United States Patent Application Publication US 2023/0026259 A1 - sequence listing, part 23

SEQ ID NO: 104300 - DNA, 1693 bp, Homo sapiens
  Payload ID: 490
  Gene Symbol: ACAD9
  Gene Name: acyl-CoA dehydrogenase family, member 9
  ENST ID: ENST00000505192
  CDS Start-End: 70-279
agacgtgtgtgtgtccctgcggcgctaagaaggggagactgaggctgaggctggggaacatcgggcagcatgagcggctgcgggctcttcctgcgcaccacggctgcggctcgtgcctgccggggtctggtggtctctaccgcgaaccggcggctactgcgcaccagcccgcctgtacgagctttcgccaaagagcttttcctaggcaaaatcaagaagtggactcccgaaaaattgaccaggaagggaaaatcccagatgaaactttggagaaattgaagagcctagggctttttgggctgcaagtcccagaagaatatggtggcctgggcttctccaacaccatgtactcaagactaggggagatcatcagcatggatgggtccatcactgtgaccctggcagcgcaccaggctattggcctcaaggggatcatcttggctggcactgaggagcagaaagccaaatacttgcctaaactggcgtccggggagcacattgcagccttctgcctcacggagccagccagtgggagcgatgcagcctcaatccggagcagagccacactaagtgaagacaagaagcactacatcctcaatggctccaaggtctggattactaatggaggactggccaatatttttactgtgtttgcaaagactgaggtcgttgattctgatggatcagtgaaagacaaaatcacagcattcatagtagaaagagactttggtggagtcactaatgggaaacccgaagataaattaggcattcggggctccaacacttgtgaagtccattttgaaaacaccaagatacctgtggaaaacatccttggagaggtcggagatgggtttaaggtggccatgaacatcctcaacagcggccggttcagcatgggcagcgtcgtggctgggctgctcaagagattgattgaaatgactgctgagtacgcctgcacaaggaaacagtttaacaagaggctcagtgaatttggattgattcaggagaaatttgcactgatggctcagaaggcttacgtcatggagagtatgacctacctcacagcagggatgctggaccaacctggctttcccgactgctccatcgaggcagccatggtgaaggtgttcagctccgaggccgcctggcagtgtgtgagtgaggcgctgcagatcctcgggggcttgggctacacaagggactatccgtacgagcgcatactgcgtgacacccgcatcctcctcatcttcgagggaaccaatgagattctccggatgtacatcgccctgacgggtctgcagcatgccggccgcatcctgactaccaggatccagtaggtgccattgtcaccgtgtgcttctcaggtcccatacctgcccagcaggggccagtccagggcagtgggaggaaagagctgccttgacctggagtgggggcatgggggtgtggcgcagccttgtggaggggaccttcccctgtggtagtggggggcttgctgcccagggaagccctcgctgccctgcccttatggccacagcaccctacagcttcagcataaataccgtatcccccatctggtccctcacactagaggcagctggtttttcagaacctgaagaatgagaggtgtccctttaaaggtgccaggcctcacagccaacataagccagtgtttctcttctctgcccttctt

SEQ ID NO: 104301 - DNA, 736 bp, Homo sapiens
  Payload ID: 490
  Gene Symbol: ACAD9
  Gene Name: acyl-CoA dehydrogenase family, member 9
  ENST ID: ENST00000512801
  CDS Start-End: 73-354
atcagacgtgtgtgtgtccctgcggcgctaagaaggggagactgaggctgaggctggggaacatcgggcagcatgagcggctgcgggctcttcctgcgcaccacggctgcggctcgtgcctgccggggtctggtggtctctaccgcgaaccggcggctactgcgcaccagcccgcctgtacgagctttcgccaaagagcttttcctaggcaaaatcaagaagaagttagccaagatgaacttaatgaaatcaatcagttcttgggacccgtggaaaaattcttcactgaagaggtggactcccgaaaaattgaccaggaagggaaaatcccagatgaaactttggagaaattgaagagcctagggctttttgggctgcaagtcccagaagaatatggtggcctgggcttctccaacaccatgtactcaagactaggggagatcatcagcatggatgggtccatcactgtgaccctggcagcgcaccaggctattggcctcaaggggatcatcttggctggcactgaggagcagaaagccaaatacttgcctaaactggcgtccggggagcacattgcagccttctgcctcacggagccagccagtgggagcgatgcagcctcaatccggagcagagccacactaagtgaagacaagaagcactacatcctcaatggctccaaggtctggattactaatggaggactggccaatatttttactgtgtttgcaaagac

SEQ ID NO: 104302 - DNA, 507 bp, Homo sapiens
  Payload ID: 490
  Gene Symbol: ACAD9
  Gene Name: acyl-CoA dehydrogenase family, member 9
  ENST ID: ENST00000620948
  CDS Start-End: 1-507
atggaggagcagctggtactgaagggtggccaacatcctcatcaacctgtatggcatgacggccgtgctgtcgcgggccagccgctccatccgcattgggctccgcaaccacgaccacgaggttctcttggccaacaccttctgcgtggaagcttacttgcagaatctcttcagcctctctcagctggacaagtatgctccagaaaacctagaagcagattaagaaagtgtcccagcagatccttgagaagcgagcctatatctgtgcccaccctctggacaggacatgctgagaggggacagtgtcccctgctaccgcccgcccctacccatggcccgttgctggatgactgttactcttttttcagaaggttgggattatcacaggttaagccttttgttccccgtctgcacctgaagggttgtcgcctggcctgggagagcctcttccaggttttgacctgcaggcagtgctctctaacaggaccatcacagcttctgaactga

SEQ ID NO: 104303 - DNA, 1950 bp, Homo sapiens
  Payload ID: 491
  Gene Symbol: ACADS
  Gene Name: acyl-CoA dehydrogenase, C-2 to C-3 short chain
  Uniprot ID: P16219
  ENST ID: ENST00000242592
  CDS Start-End: 152-1390
tggaggccccgccccctggccgcgagcgcacctcggccccgctcccgaggccctacgggcgtggcctctgtcccgggtcccgccccccagcactccggaacagcgcgctcgcagcgggaggtcgcgaagcctgggactgtgtctgtcgcccatggccgccgcgctgctcgcccgggcctcgggccctgcccgcagagctctctgtcctagggcctggcggcagttacacaccatctaccagtctgtggaactgcccgagacacaccagatgttgctccagacatgccgggactttgccgagaaggagttgtttcccattgcagcccaggtggataaggaacatctcttcccagcggctcaggtgaagaagatgggcgggcttgggcttctggccatggacgtgcccgaggagcttggcggtgctggcctcgattacctggcctacgccatcgccatggaggagatcagccgtggctgcgcctccaccggagtcatcatgagtgtcaacaactctctctacctggggcccatcttgaagtttggctccaaggagcagaagcaggcgtgggtcacgcctttcaccagtggtgacaaaattggctgctttgccctcagcgaaccagggaacggcagtgatgcaggagctgcgtccaccaccgcccgggccgagggcgactcatgggttctgaatggaaccaaagcctggatcaccaatgcctgggaggcttcggctgccgtggtctttgccagcacggacagagccctgcaaaacaagggcatcagtgccttcctggtccccatgccaacgcctgggctcacgttggggaagaaagaagacaagctgggcatccggggctcatccacggccaacctcatctttgaggactgtcgcatccccaaggacagcatcctgggggagccagggatgggcttcaagatagccatgcaaaccctggacatgggccgcatcggcatcgcctcccaggccctgggcattgcccagaccgccctcgattgtgctgtgaactacgctgagaatcgcatggccttcggggcgcccctcaccaagctccaggtcatccagttcaagttggcagacatggccctggccctggagagtgcccggctgctgacctggcgcgctgccatgctgaaggataacaagaagcctttcatcaaggaggcagccatggccaagctggccgcctcggaggccgcgaccgccatcagccaccaggccatccagatcctgggcggcatgggctacgtgacagagatgccggcagagcggcactaccgcgacgcccgcatcactgagatctacgagggcaccagcgaaatccagcggctggtgatcgccgggcatctgctcaggagctaccggagctgagcccgcggcggactgccccaggactgcgggaaggcgcgggagccaggggcctccaccccaaccccggctcagagactgggcggcccggcgggggctccctggggaccccagatgggctcagtgctgccacccagatcagatcacatgggaatgaggccctccgaccattggcagctccgcctctgggcctttccgcctcctcaccactgtgcctcaagttcctcatctaagtggccctggcctcctgggggcggggttgtgggggggctgagcgacactcagggacacctcagttgtcctcccgcgggccctggtgccctggcatgaaggcccagtgcgacaggcccttggtggggtctgtcttttccttgaggtcagaggtcaggagcagggctggggtcaggatgacgaggcctggggtcctggtgttgggcaggtggtggggctgggccatggagctggcccagaggcccctcagccctttgtaaagtctgatgaaggcaggggtggtgattcatgctgtgtgactgactgtgggtaataaacacacctgtccccca

SEQ ID NO: 104304 - DNA, 1398 bp, Homo sapiens
  Payload ID: 491
  Gene Symbol: ACADS
  Gene Name: acyl-CoA dehydrogenase, C-2 to C-3 short chain
  ENST ID: ENST00000411593
  CDS Start-End: 26-1252
aagcctgggactgtgtctgtcgcccatggccgccgcgctgctcgcccgggcctcgggccctgcccgcagagctctctgtcctagggcctggcggcagttacacaccatctaccagtctgtggaactgcccgagacacaccagatgttgctccagacatgccgggactttgccgagaaggagttgtttcccattgcagcccaggtggataaggaacatctcttcccagcggctcaggtgaagaagatgggcgggcttgggcttctggccatggacgtgcccgaggagcttggcggtgctggcctcgattacctggcctacgccatcgccatggaggagatcagccgtggctgcgcctccaccggagtcatcatgagtgtcaacaactctctctacctggggcccatcttgaagtttggctccaaggagcagaagcaggcgtgggtcacgcctttcaccagtggtgacaaaattggctgctttgccctcagcgaaccagggccttctctccttggcccgactggacctatttttgctctggggcaagtgggctgtccctgtccctcctcagctgccactgaagcctgcaccttccccagaagccggcagagggtgtcaaggcctgagcttctgagggagggcatcagtgccttcctggtccccatgccaacgcctgggctcacgttggggaagaaagaagacaagctgggcatccggggctcatccacggccaacctcatctttgaggactgtcgcatccccaaggacagcatcctgggggagccagggatgggcttcaagatagccatgcaaaccctggacatgggccgcatcggcatcgcctcccaggccctgggcattgcccagaccgccctcgattgtgctgtgaactacgctgagaatcgcatggccttcggggcgcccctcaccaagctccaggtcatccagttcaagttggcagacatggccctggccctggagagtgcccggctgctgacctggcgcgctgccatgctgaaggataacaagaagcctttcatcaaggaggcagccatggccaagctggccgcctcggaggccgcgaccgccatcagccaccaggccatccagatcctgggcggcatgggctacgtgacagagatgccggcagagcggcactaccgcgacgcccgcatcactgagatctacgagggcaccagcgaaatccagcggctggtgatcgccgggcatctgctcaggagctaccggagctgagcccgcggcggactgccccaggactgcgggaaggcgcgggagccaggggcctccaccccaaccccggctcagagactgggcggcccggcgggggctccctggggaccccagatgggctcagtgctgccacccagatcagatcacat

SEQ ID NO: 104305 - DNA, 2172 bp, Homo sapiens
  Payload ID: 492
  Gene Symbol: ACADM
  Gene Name: acyl-CoA dehydrogenase, C-4 to C-12 straight chain
  ENST ID: ENST00000370834
  CDS Start-End: 80-1444
agaggagtcccgcgttcggggagtatgtcaaggccgtgacccgtgtattattgtccgagtggccggaacgggagccaacatggcagcggggttcgggcgatgctgcagggtcctgagaagtatttctcgttttcattggagatcacagcatacaaaagccaatcgacaacgtgaaccaggattaggatttagttttgagttcaccgaacagcagaaagaatttcaagctactgctcgtaaatttgccagagaggaaatcatcccagtggctgcagaatatgataaaactggtgaatatccagtccccctaattagaagagcctgggaacttggtttaatgaacacacacattccagagaactgtgactacagtgtttgcccacttttggaagcttgcactctatacctagatgcgtttttccttcttctaactggttccaaccttaacttgcacctaaaccttggaggtcttggacttggaacttttgatgcttgtttaattagtgaagaattggcttatggatgtacaggggttcagactgctattgaaggaaattctttggggcaaatgcctattattattgctggaaatgatcaacaaaagaagaagtatttggggagaatgactgaggagccattgatgtgtgcttattgtgtaacagaacctggagcaggctctgatgtagctggtataaagaccaaagcagaaaagaaaggagatgagtatattattaatggtcagaagatgtggataaccaacggaggaaaagctaattggtattttttattggcacgttctgatccagatcctaaagctcctgctaataaagcctttactggattcattgtggaagcagataccccaggaattcagattgggagaaaggaattaaacatgggccagcgatgttcagatactagaggaattgtcttcgaagatgtgaaagtgcctaaagaaaatgttttaattggtgacggagctggtttcaaagttgcaatgggagcttttgataaaaccagacctgtagtagctgctggtgctgttggattagcacaaagagctttggatgaagctaccaagtatgccctggaaaggaaaactttcggaaagctacttgtagagcaccaagcaatatcatttatgctggctgaaatggcaatgaaagttgaactagctagaatgagttaccagagagcagcttgggaggttgattctggtcgtcgaaatacctattatgcttctattgcaaaggcatttgctggagatattgcaaatcagttagctactgatgctgtgcagatacttggaggcaatggatttaatacagaatatcctgtagaaaaactaatgagggatgccaaaatctatcagatttatgaaggtacttcacaaattcaaagacttattgtagcccgtgaacacattgacaagtacaaaaattaaaaaaattactgtagaaatattgaataactagaacacaagccactgtttcagctccagaaaaaagaaagggctttaacgttttttccagtgaaaacaaatcctcttatattaaatctaagcaactgcttattatagtagtttatacttttgcttaactctgttatgtctcttaagcaggtttggtttttattaaaatgatgtgttttctttagtaccactttacttgaattacattaacctagaaaactacataggttattttgatctcttaagattaatgtagcagaaatttcttggaattttatttttgtaatgacagaaaagtgggcttagaaagtattcaagatgttacaaaatttacatttagaaaatattgtagtatttgaatactgtcaacttgacagtaactttgtagacttaatggtattattaaagttctttttattgcagtttggaaagcatttgtgaaactttctgtttggcacagaaacagtcaaaattttgacattcatattctcctattttacagctacaagaactttcttgaaaatcttatttaattctgagcccatatttcacttaccttatttaaaataaatcaataaagcttgccttaaattatttttatatgactgttggtctctaggtagcctttggtctattgtacacaatctcatttcatatgtttgcattttggcaaagaacttaataaaattgttcagtgctta

SEQ ID NO: 104306 - DNA, 2619 bp, Homo sapiens
  Payload ID: 492
  Gene Symbol: ACADM
  Gene Name: acyl-CoA dehydrogenase, C-4 to C-12 straight chain
  Uniprot ID: P11310
  ENST ID: ENST00000370841
  CDS Start-End: 438-1703
accgcgccgcaagtccccccaccgttcagcgcaaccgggccctcccagccccgccgccgtccccctcccccgccctggctctctttccgcgctgcggtcagcctcggcgtcccacagagagggccagaggtggaaacgcagaaaaccaaaccaggactatcagagattgcccggagaggggatgcgacccctccccaggtcgcagcgacggcgcacgcaagggtcacggagcatgcgttggctacccggcgccggggaccgctgccaccccgcctagcgcagcgccccgtccttccgcagcccaaccgcctcttcccgccccgccccatcccgcccacgggctccagtgggcgggaccagaggagtcccgcgttcggggagtatgtcaaggccgtgacccgtgtattattgtccgagtggccggaacgggagccaacatggcagcggggttcgggcgatgctgcagggtcctgagaagtatttctcgttttcattggagatcacagcatacaaaagccaatcgacaacgtgaaccaggattaggatttagttttgagttcaccgaacagcagaaagaatttcaagctactgctcgtaaatttgccagagaggaaatcatcccagtggctgcagaatatgataaaactggtgaatatccagtccccctaattagaagagcctgggaacttggtttaatgaacacacacattccagagaactgtggaggtcttggacttggaacttttgatgcttgtttaattagtgaagaattggcttatggatgtacaggggttcagactgctattgaaggaaattctttggggcaaatgcctattattattgctggaaatgatcaacaaaagaagaagtatttggggagaatgactgaggagccattgatgtgtgcttattgtgtaacagaacctggagcaggctctgatgtagctggtataaagaccaaagcagaaaagaaaggagatgagtatattattaatggtcagaagatgtggataaccaacggaggaaaagctaattggtattttttattggcacgttctgatccagatcctaaagctcctgctaataaagcctttactggattcattgtggaagcagataccccaggaattcagattgggagaaaggaattaaacatgggccagcgatgttcagatactagaggaattgtcttcgaagatgtgaaagtgcctaaagaaaatgttttaattggtgacggagctggtttcaaagttgcaatgggagcttttgataaaaccagacctgtagtagctgctggtgctgttggattagcacaaagagctttggatgaagctaccaagtatgccctggaaaggaaaactttcggaaagctacttgtagagcaccaagcaatatcatttatgctggctgaaatggcaatgaaagttgaactagctagaatgagttaccagagagcagcttgggaggttgattctggtcgtcgaaatacctattatgcttctattgcaaaggcatttgctggagatattgcaaatcagttagctactgatgctgtgcagatacttggaggcaatggatttaatacagaatatcctgtagaaaaactaatgagggatgccaaaatctatcagatttatgaaggtacttcacaaattcaaagacttattgtagcccgtgaacacattgacaagtacaaaaattaaaaaaattactgtagaaatattgaataactagaacacaagccactgtttcagctccagaaaaaagaaagggctttaacgttttttccagtgaaaacaaatcctcttatattaaatctaagcaactgcttattatagtagtttatacttttgcttaactctgttatgtctcttaagcaggtttggtttttattaaaatgatgtgttttctttagtaccactttacttgaattacattaacctagaaaactacataggttattttgatctcttaagattaatgtagcagaaatttcttggaattttatttttgtaatgacagaaaagtgggcttagaaagtattcaagatgttacaaaatttacatttagaaaatattgtagtatttgaatactgtcaacttgacagtaactttgtagacttaatggtattattaaagttctttttattgcagtttggaaagcatttgtgaaactttctgtttggcacagaaacagtcaaaattttgacattcatattctcctattttacagctacaagaactttcttgaaaatcttatttaattctgagcccatatttcacttaccttatttaaaataaatcaataaagcttgccttaaattatttttatatgactgttggtctctaggtagcctttggtctattgtacacaatctcatttcatatgtttgcattttggcaaagaacttaataaaattgttcagtgcttattatcatatctttctgtattttttccaggaaatttcattacttcgtgtaatagtgtatatttcttgtatttactatgatgaaaaaaggtcgttttaattttgaattgaataaagttacctgttcattttttattagatattttaaagacttcagaaaatataaatatgaaataatttaagaacccaaa

SEQ ID NO: 104307 - DNA, 1332 bp, Homo sapiens
  Payload ID: 492
  Gene Symbol: ACADM
  Gene Name: acyl-CoA dehydrogenase, C-4 to C-12 straight chain
  Uniprot ID: P11310
  ENST ID: ENST00000420607
  CDS Start-End: 9-1286
gagccaacatggcagcggggttcgggcgatgctgcaggtgttctttacaggtcctgagaagtatttctcgttttcattggagatcacagcatacaaaagccaatcgacaacgtgaaccaggattaggatttagttttgagttcaccgaacagcagaaagaatttcaagctactgctcgtaaatttgccagagaggaaatcatcccagtggctgcagaatatgataaaactggtgaatatccagtccccctaattagaagagcctgggaacttggtttaatgaacacacacattccagagaactgtggaggtcttggacttggaacttttgatgcttgtttaattagtgaagaattggcttatggatgtacaggggttcagactgctattgaaggaaattctttggggcaaatgcctattattattgctggaaatgatcaacaaaagaagaagtatttggggagaatgactgaggagccattgatgtgtgcttattgtgtaacagaacctggagcaggctctgatgtagctggtataaagaccaaagcagaaaagaaaggagatgagtatattattaatggtcagaagatgtggataaccaacggaggaaaagctaattggtattttttattggcacgttctgatccagatcctaaagctcctgctaataaagcctttactggattcattgtggaagcagataccccaggaattcagattgggagaaaggaattaaacatgggccagcgatgttcagatactagaggaattgtcttcgaagatgtgaaagtgcctaaagaaaatgttttaattggtgacggagctggtttcaaagttgcaatgggagcttttgataaaaccagacctgtagtagctgctggtgctgttggattagcacaaagagctttggatgaagctaccaagtatgccctggaaaggaaaactttcggaaagctacttgtagagcaccaagcaatatcatttatgctggctgaaatggcaatgaaagttgaactagctagaatgagttaccagagagcagcttgggaggttgattctggtcgtcgaaatacctattatgcttctattgcaaaggcatttgctggagatattgcaaatcagttagctactgatgctgtgcagatacttggaggcaatggatttaatacagaatatcctgtagaaaaactaatgagggatgccaaaatctatcagatttatgaaggtacttcacaaattcaaagacttattgtagcccgtgaacacattgacaagtacaaaaattaaaaaaattactgtagaaatattgaataactagaacacaagccactgt

SEQ ID NO: 104308 - DNA, 508 bp, Homo sapiens
  Payload ID: 492
  Gene Symbol: ACADM
  Gene Name: acyl-CoA dehydrogenase, C-4 to C-12 straight chain
  ENST ID: ENST00000530953
  CDS Start-End: 28-180
gtccgagtggccggaacgggagccaacatggcagcggggttcgggcgatgctgcagggtcctgagaagtatttctcgttttcattggagatcacagcatacaaaagccaatcgacaacgtgaaccaggattaggatttagttttggcttattgtgtaacagaacctggagcaggctctgatgtagctggtataaagaccaaagcagaaaagaaaggagatgagtatattattaatggtcagaagatgtggataaccaacggaggaaaagctaattggtattttttattggcacgttctgatccagatcctaaagctcctgctaataaagcctttactggattcattgtggaagcagataccccaggaattcagattgggagaaaggaattaaacatgggccagcgatgttcagatactagaggaattgtcttcgaagatgtgaaagtgcctaaagaaaatgttttaattggtgacggagctggtttcaaagttgcaatgggagctttt

SEQ ID NO: 104309 - DNA, 1451 bp, Homo sapiens
  Payload ID: 492
  Gene Symbol: ACADM
  Gene Name: acyl-CoA dehydrogenase, C-4 to C-12 straight chain
  ENST ID: ENST00000526196
  CDS Start-End: 83-226
accagaggagtcccgcgttcggggagtatgtcaaggccgtgacccgtgtattattgtccgagtggccggaacgggagccaacatggcagcggggttcgggcgatgctgcaggagttcaccgaacagcagaaagaatttcaagctactgctcgtaaatttgccagagaggaaatcatcccagtggctgcagaatatgataaaactggtgaatatccagtccccctaattagaagagcctgggaacttggtttaatgaacacacacattccagagaactgtggaggtcttggacttggaacttttgatgcttgtttaattagtgaagaattggcttatggatgtacaggggttcagactgctattgaaggaaattctttggggcaaatgcctattattattgctggaaatgatcaacaaaagaagaagtatttggggagaatgactgaggagccattgatgtgtgcttattgtgtaacagaacctggagcaggctctgatgtagctggtataaagaccaaagcagaaaagaaaggagatgagtatattattaatggtcagaagatgtggataaccaacggaggaaaagctaattggtattttttattggcacgttctgatccagatcctaaagctcctgctaataaagcctttactggattcattgtggaagcagataccccaggaattcagattgggagaaaggaattaaacatgggccagcgatgttcagatactagaggaattgtcttcgaagatgtgaaagtgcctaaagaaaatgttttaattggtgacggagctggtttcaaagttgcaatgggagcttttgataaaaccagacctgtagtagctgctggtgctgttggattagcacaaagagctttggatgaagctaccaagtatgccctggaaaggaaaactttcggaaagctacttgtagagcaccaagcaatatcatttatgctggctgaaatggcaatgaaagttgaactagctagaatgagttaccagagagcagcttgggaggttgattctggtcgtcgaaatacctattatgcttctattgcaaaggcatttgctggagatattgcaaatcagttagctactgatgctgtgcagatacttggaggcaatggatttaatacagaatatcctgtagaaaaactaatgagggatgccaaaatctatcagatttatgaaggtacttcacaaattcaaagacttattgtagcccgtgaacacattgacaagtacaaaaattaaaaaaattactgtagaaatattgaataactagaacacaagccactgtttcagctccagaaaaaagaaagggctttaacgttttttccagtgaaaacaaatcctcttatattaaatctaagcaactgcttattatagtagtttatacttttgcttaactctgttatgtctcttaagcaggtttggtttttatt

SEQ ID NO: 104310 - DNA, 825 bp, Homo sapiens
  Payload ID: 492
  Gene Symbol: ACADM
  Gene Name: acyl-CoA dehydrogenase, C-4 to C-12 straight chain
  ENST ID: ENST00000532509
  CDS Start-End: 80-217
agaggagtcccgcgttcggggagtatgtcaaggccgtgacccgtgtattattgtccgagtggccggaacgggagccaacatggcagcggggttcgggcgatgctgcagggtcctgagaagtatttctcgttttcattggagatcacagcatacaaaagccaatcgacaacgtgaaccaggattaggatttagttttgtatccagtccccctaattagaagagcctgggaacttggtttaatgaacacacacattccagagaactgtggaggtcttggacttggaacttttgatgcttgtttaattagtgaagaattggcttatggatgtacaggggttcagactgctattgaaggaaattctttggggcaaatgcctattattattgctggaaatgatcaacaaaagaagaagtatttggggagaatgactgaggagccattgatgtgtgcttattgtgtaacagaacctggagcaggctctgatgtagctggtataaagaccaaagcagaaaagaaaggagatgagtatattattaatggtcagaagatgtggataaccaacggaggaaaagctaattggtattttttattggcacgttctgatccagatcctaaagctcctgctaataaagcctttactggattcattgtggaagcagataccccaggaattcagattgggagaaaggaattaaacatgggccagcgatgttcagatactagaggaattgtcttcgaagatgtgaaagtgcctaaagaaaatgttttaattggtgacggagctggtttcaaagttgcaatgggagcttttgataaaaccagac

SEQ ID NO: 104311 - DNA, 1536 bp, Homo sapiens
  Payload ID: 492
  Gene Symbol: ACADM
  Gene Name: acyl-CoA dehydrogenase, C-4 to C-12 straight chain
  ENST ID: ENST00000526129
  CDS Start-End: 83-313
accagaggagtcccgcgttcggggagtatgtcaaggccgtgacccgtgtattattgtccgagtggccggaacgggagccaacatggcagcggggttcgggcgatgctgcagggtcctgagaagtatttctcgttttcattggagatcacagcatacaaaagccaatcgacaacgtgaaccaggattaggatttagttttgagttcaccgaacagcagaaagaatttcaagctactgctcgtaaatttgccagagaggaaatcatcccagtggctgcagaatatgataaaactggtgaattctttttcttctagtatccagtccccctaattagaagagcctgggaacttggtttaatgaacacacacattccagagaactgtggaggtcttggacttggaacttttgatgcttgtttaattagtgaagaattggcttatggatgtacaggggttcagactgctattgaaggaaattctttggggcaaatgcctattattattgctggaaatgatcaacaaaagaagaagtatttggggagaatgactgaggagccattgatgtgtgcttattgtgtaacagaacctggagcaggctctgatgtagctggtataaagaccaaagcagaaaagaaaggagatgagtatattattaatggtcagaagatgtggataaccaacggaggaaaagctaattggtattttttattggcacgttctgatccagatcctaaagctcctgctaataaagcctttactggattcattgtggaagcagataccccaggaattcagattgggagaaaggaattaaacatgggccagcgatgttcagatactagaggaattgtcttcgaagatgtgaaagtgcctaaagaaaatgttttaattggtgacggagctggtttcaaagttgcaatgggagcttttgataaaaccagacctgtagtagctgctggtgctgttggattagcacaaagagctttggatgaagctaccaagtatgccctggaaaggaaaactttcggaaagctacttgtagagcaccaagcaatatcatttatgctggctgaaatggcaatgaaagttgaactagctagaatgagttaccagagagcagcttgggaggttgattctggtcgtcgaaatacctattatgcttctattgcaaaggcatttgctggagatattgcaaatcagttagctactgatgctgtgcagatacttggaggcaatggatttaatacagaatatcctgtagaaaaactaatgagggatgccaaaatctatcaggtaaggttaaagatgatttttttggtttgcaaggagagagaatattcataaatgacaacgtggatttctgattatttagaaattttatgtccctagtagcaataaatgactgtcatatatggctgtgagccagtttttggaattaattaatagaaagaagaatgttatttgtgattaagtataagtctgaagagagaataggctaaaaaaaatggtacagacatgtgtattacgtttggattaga

SEQ ID NO: 104312 - DNA, 546 bp, Homo sapiens
  Payload ID: 492
  Gene Symbol: ACADM
  Gene Name: acyl-CoA dehydrogenase, C-4 to C-12 straight chain
  ENST ID: ENST00000528016
  CDS Start-End: 1-204
ttaattggtgacggagctggtttcaaagttgcaatgggagcttttgataaaaccagacctgtagtagctgctggtgctgttggattagcacaaagagctttggatgaagctaccaagtatgccctggaaaggaaaactttcggaaagctacttgtagaggtcttgtttccccttcaccttccaacatcattgaaagtctcctgaggcctccccagccgtggaactacaaatcggagtgactatgggacaagcatatggtcgcaggactttggacgcaggcagtgaggacacctatgagcgatcagtggggtcctacggcagccgtggaactgctctgccttgcaggcgaaagtgtggtcagctatatcggagcgcgatgggggcctgagaggcgcatctgcgcaggcgcccggctcctaagtctacccaggaactgaccctgctctctcctttccctgttagacatgggcactccacagaaggatgttattatcaagtcagatgcaccggacactttgttattggagaaacatgcagattatatcg

SEQ ID NO: 104313 - DNA, 1422 bp, Homo sapiens
  Payload ID: 492
  Gene Symbol: ACADM
  Gene Name: acyl-CoA dehydrogenase, C-4 to C-12 straight chain
  ENST ID: ENST00000525808
  CDS Start-End: 22-165
gtggccggaacgggagccaacatggcagcggggttcgggcgatgctgcaggagttcaccgaacagcagaaagaatttcaagctactgctcgtaaatttgccagagaggaaatcatcccagtggctgcagaatatgataaaactggtgaatatccagtccccctaattagaagagcctgggaacttggtttaatgaacacacacattccagagaactgtggcttattgtgtaacagaacctggagcaggctctgatgtagctggtataaagaccaaagcagaaaagaaaggagatgagtatattattaatggtcagaagatgtggataaccaacggaggaaaagctaattggtattttttattggcacgttctgatccagatcctaaagctcctgctaataaagcctttactggattcattgtggaagcagataccccaggaattcagattgggagaaaggaattaaacatgggccagcgatgttcagatactagaggaattgtcttcgaagatgtgaaagtgcctaaagaaaatgttttaattggtgacggagctggtttcaaagttgcaatgggagcttttgataaaaccagacctgtagtagctgctggtgctgttggattagcacaaagagctttggatgaagctaccaagtatgccctggaaaggaaaactttcggaaagctacttgtagagcaccaagcaatatcatttatgctggctgaaatggcaatgaaagttgaactagctagaatgagttaccagagagcagcttgggaggttgattctggtcgtcgaaatacctattatgcttctattgcaaaggcatttgctggagatattgcaaatcagttagctactgatgctgtgcagatacttggaggcaatggatttaatacagaatatcctgtagaaaaactaatgagggatgccaaaatctatcagatttatgaaggtacttcacaaattcaaagacttattgtagcccgtgaacacattgacaagtacaaaaattaaaaaaattactgtagaaatattgaataactagaacacaagccactgtttcagctccagaaaaaagaaagggctttaacgttttttccagtgaaaacaaatcctcttatattaaatctaagcaactgcttattatagtagtttatacttttgcttaactctgttatgtctcttaagcaggtttggtttttattaaaatgatgtgttttctttagtaccactttacttgaattacattaacctagaaaactacataggttattttgatctcttaagattaatgtagcagaaatttcttggaattttatttttgtaatgacagaaaagtgggcttagaaagtattcaagatgttacaaaatttacatttagaaaatattgtagtatttgaatactgtcaacttgacagt

SEQ ID NO: 104314 - DNA, 1149 bp, Homo sapiens
  Payload ID: 492
  Gene Symbol: ACADM
  Gene Name: acyl-CoA dehydrogenase, C-4 to C-12 straight chain
  ENST ID: ENST00000534334
  CDS Start-End: 22-336
gtggccggaacgggagccaacatggcagcggggttcgggcgatgctgcagggtcctgagaagtatttctcgttttcattggagatcacagcatacaaaagccaatcgacaacgtgaaccaggattaggatttagttttgagttcaccgaacagcagaaagaatttcaagctactgctcgtaaatttgccagagaggaaatcatcccagtggctgcagaatatgataaaactggtgaatatccagtccccctaattagaagagcctgggaacttggtttaatgaacacacacattccagagaactgtgcaaatgcctattattattgctggaaatgatcaacaaaagaagaagtatttggggagaatgactgaggagccattgatgtgtgcttattgtgtaacagaacctggagcaggctctgatgtagctggtataaagaccaaagcagaaaagaaaggagatgagtatattattaatggtcagaagatgtggataaccaacggaggaaaagctaattggtattttttattggcacgttctgatccagatcctaaagctcctgctaataaagcctttactggattcattgtggaagcagataccccaggaattcagattgggagaaaggaattaaacatgggccagcgatgttcagatactagaggaattgtcttcgaagatgtgaaagtgcctaaagaaaatgttttaattggtgacggagctggtttcaaagttgcaatgggagcttttgataaaaccagacctgtagtagctgctggtgctgttggattagcacaaagagctttggatgaagctaccaagtatgccctggaaaggaaaactttcggaaagctacttgtagagtcttagcaaacaacacaccaggagattatatcctgcgcctggcttggagggtcccacacccatggaacctcacccactgctagcacagcagtctgagatgaaactacaaggcggcagcaaggctcagggaggggcatccgccattgctgaggcttgacaccaagcaatatcatttatgctggctgaaatggcaatgaaagttgaactagctagaatgagttaccagagagcagcttgggaggttgattctggtcgtcgaaatacctattatgcttctattgcaa

SEQ ID NO: 104315 - DNA, 2535 bp, Homo sapiens
  Payload ID: 492
  Gene Symbol: ACADM
  Gene Name: acyl-CoA dehydrogenase, C-4 to C-12 straight chain
  ENST ID: ENST00000541113
  CDS Start-End: 462-1619
ctgcaccgcgccgcaagtccccccaccgttcagcgcaaccgggccctcccagccccgccgccgtccccctcccccgccctggctctctttccgcgctgcggtcagcctcggcgtcccacagagagggccagaggtggaaacgcagaaaaccaaaccaggactatcagagattgcccggagaggggatgcgacccctccccaggtcgcagcgacggcgcacgcaagggtcacggagcatgcgttggctacccggcgccggggaccgctgccaccccgcctagcgcagcgccccgtccttccgcagcccaaccgcctcttcccgccccgccccatcccgcccacgggctccagtgggcgggaccagaggagtcccgcgttcggggagtatgtcaaggccgtgacccgtgtattattgtccgagtggccggaacgggagccaacatggcagcggggttcgggcgatgctgcaggagttcaccgaacagcagaaagaatttcaagctactgctcgtaaatttgccagagaggaaatcatcccagtggctgcagaatatgataaaactggtgaatatccagtccccctaattagaagagcctgggaacttggtttaatgaacacacacattccagagaactgtggaggtcttggacttggaacttttgatgcttgtttaattagtgaagaattggcttatggatgtacaggggttcagactgctattgaaggaaattctttggggcaaatgcctattattattgctggaaatgatcaacaaaagaagaagtatttggggagaatgactgaggagccattgatgtgtgcttattgtgtaacagaacctggagcaggctctgatgtagctggtataaagaccaaagcagaaaagaaaggagatgagtatattattaatggtcagaagatgtggataaccaacggaggaaaagctaattggtattttttattggcacgttctgatccagatcctaaagctcctgctaataaagcctttactggattcattgtggaagcagataccccaggaattcagattgggagaaaggaattaaacatgggccagcgatgttcagatactagaggaattgtcttcgaagatgtgaaagtgcctaaagaaaatgttttaattggtgacggagctggtttcaaagttgcaatgggagcttttgataaaaccagacctgtagtagctgctggtgctgttggattagcacaaagagctttggatgaagctaccaagtatgccctggaaaggaaaactttcggaaagctacttgtagagcaccaagcaatatcatttatgctggctgaaatggcaatgaaagttgaactagctagaatgagttaccagagagcagcttgggaggttgattctggtcgtcgaaatacctattatgcttctattgcaaaggcatttgctggagatattgcaaatcagttagctactgatgctgtgcagatacttggaggcaatggatttaatacagaatatcctgtagaaaaactaatgagggatgccaaaatctatcagatttatgaaggtacttcacaaattcaaagacttattgtagcccgtgaacacattgacaagtacaaaaattaaaaaaattactgtagaaatattgaataactagaacacaagccactgtttcagctccagaaaaaagaaagggctttaacgttttttccagtgaaaacaaatcctcttatattaaatctaagcaactgcttattatagtagtttatacttttgcttaactctgttatgtctcttaagcaggtttggtttttattaaaatgatgtgttttctttagtaccactttacttgaattacattaacctagaaaactacataggttattttgatctcttaagattaatgtagcagaaatttcttggaattttatttttgtaatgacagaaaagtgggcttagaaagtattcaagatgttacaaaatttacatttagaaaatattgtagtatttgaatactgtcaacttgacagtaactttgtagacttaatggtattattaaagttctttttattgcagtttggaaagcatttgtgaaactttctgtttggcacagaaacagtcaaaattttgacattcatattctcctattttacagctacaagaactttcttgaaaatcttatttaattctgagcccatatttcacttaccttatttaaaataaatcaataaagcttgccttaaattatttttatatgactgttggtctctaggtagcctttggtctattgtacacaatctcatttcatatgtttgcattttggcaaagaacttaataaaattgttcagtgcttattatcatatctttctgtattttttccaggaaatttcattacttcgtgtaatagtgtatatttcttgtatttactatgatgaaaaaaggtcgttttaattttgaattgaataaagttacctgttcattttttattagatattttaaagacttcagaaaatataaatatgaaataatttaagaacccaaa

SEQ ID NO: 104316 - DNA, 2543 bp, Homo sapiens
  Payload ID: 493
  Gene Symbol: ACADL
  Gene Name: acyl-CoA dehydrogenase, long chain
  Uniprot ID: P28330
  ENST ID: ENST00000233710
  CDS Start-End: 229-1521
agcagtttcgctgtaaaatcctattgctgacagccaagacgggcgtattccctcgcgaccagcctgtggcgtggttggggctccggaagggcgcgcgcgagcgcttttttgggaggacaccacaggtggacgcctcagctgatcgtcctccctcccggggaccctgccccgagtcgccgagtagccgcagagtcgcctccgtcgccccgccgcccctgtgtttcggacatggccgcacgccttctccgagggtccctacgcgtcctgggcggccaccgtgcgccgcgccagctgcccgccgcgcgatgttctcattccggaggggaagaacgtctagaaactccttctgctaaaaaattaacagatataggaattcgaagaatcttttctccagagcatgacattttccggaaaagtgtaaggaagtttttccaagaagaagtgattcctcatcactcagaatgggagaaagctggagaagtaagtagggaggtttgggaaaaagctggaaaacaaggactgcttggtgtcaatattgcagagcatcttggtggaattggaggggatctgtactccgcagctattgtctgggaggagcaagcttattcaaattgttcaggcccaggttttagtattcattcaggtattgtcatgtcctatattacaaaccatggctcagaagaacagattaagcactttattccccagatgactgcaggcaaatgtattggtgcaatagcaatgacagagcctggagctggaagtgacttacagggaataaaaacaaatgctaaaaaggatggaagtgactggattctcaatggaagcaaggtgttcatcagtaatgggtcattaagtgatgttgtgattgtagttgcggtcacaaatcatgaagctccctcccctgcccatggtattagcctttttctggtggaaaatggaatgaaaggatttatcaagggacgaaagctacataaaatgggattaaaagcccaggataccgcagaactattctttgaagatatacggttgccagctagtgccctacttggagaagagaataaaggcttctattacatcatgaaagagcttccacaggaaaggctgttaattgctgatgtggcaatttcagctagtgaattcatgtttgaagaaaccaggaactatgttaaacaaagaaaagcttttggcaaaacagttgctcacctacagacagtgcaacataaattagcagaattaaaaacacatatatgtgtaacccgagcatttgtggacaactgtctccagctgcatgaagcgaaacgtttggactccgccactgcttgcatggcgaaatattgggcatctgagttacaaaatagtgtagcttacgactgtgtacagctccatggaggttggggatacatgtgggagtacccaattgcaaaagcttatgtggatgccagagttcagccaatctatggtggtacaaatgaaataatgaaggagctgattgcaagagagattgtctttgacaagtagacatctgcccacatcctggagtcctattacagctaatctcgttttaaatctgctcaagataaaatgtaacttggaaagcgaggaaacactaaacatgtttttacctgctctctctatagagaaggaaataaaatataaatataagattaacacagtggaaggacaaatctttgaagccaaaattctagttttccaatataaggtttaacttacagttttttatgtagccaaaggtaaacggttttctgaatcttgcctaggtgtttcatttatctctaaaattctaaaaagcataaatcattcaaatcttcaaaccaaggcagaaataattttatgtcgctatagtataaaaacattaataagatagcacattgacttttaaagggaaaagtaaatataacttagcatgtaaactcatttcggctaccatttgctccaaattccctagaacagtggtttttaccactgtactccaaccccgtttttaagcaatggaactctttcttcaaacaaaagcttatgcagaacatctctgtgaaacgctgctgagtgagaactgctttcattgaagctggaagccatcataccttactgccttgaaacccctaggactcagctaagtatttgcctaaccctgaccagggaatgccttggttctgtcaattgctgacatctgagaacacagaataatccatcatttttaatttcaagatattggtacattttataggtatcaaagcaatggcttttcttttgcaacagttaatgtatttattaacttaataattactttatgtcttctataaaccaggctgttaatacaatgatgacaaacaaaactggcaagatcactaaaaaataagtgaataaacaaataagtagtaaaataaggtaagaagtaaatatgtaaaagagataatttcaagcataagtgcaatgtaaataataaagtaagcatttaaaattcaaaagtgaggaaatgacatttgatttaagacttaaaagtaattacaaaaaataaa

SEQ ID NO: 104317 - DNA, 1599 bp, Homo sapiens
  Payload ID: 494
  Gene Symbol: ACADSB
  Gene Name: acyl-CoA dehydrogenase, short/branched chain
  Uniprot ID: P45954
  ENST ID: ENST00000368869
  CDS Start-End: 253-1245
aggggctggctagagacccagaggcgcagagcggagaggcctgcggcgaggatggagggcctggcagtgcggttgctgcgcggcagcagctaagaagaaatttcctgacttgtttgtcttcttggaagattcctcctcatgtctcaaaatcttcccagtcagaagctctactcaatataacaaataatggaatacactttgctcccctgcaaacatttacagatgaggaaatgatgataaagagttcagttgatgggtattgaagttgacccagaatatggaggcacaggagcttcatttttatccactgtgctcgtgatagaggaattagccaaagttgatgcatctgtggctgtcttttgtgagatccagaacacattaattaacacactgattagaaaacatggaacagaagaacaaaaggccacctatttgcctcagctcactacagaaaaagtaggaagtttctgcctttcagaggctggagcaggtagtgactcatttgctttgaagaccagagctgataaagagggagattattatgtcctcaatggatcaaagatgtggatcagcagtgctgagcacgcagggctctttctggtgatggcaaatgtagaccctaccattggatataagggaattacctccttcttagtagatcgtgatactccgggccttcatatagggaaacctgaaaacaaattggggctcagagcttcttccacctgcccgttaacattcgaaaatgtcaaggttccagaagccaatatcttgggacaaattggacatggctataagtatgccatagggagtctcaatgaaggtagaataggaattgctgcacagatgctgggactggcgcaaggatgttttgactacactattccatatattaaagaaaggatacaatttggcaaaagactatttgattttcagggcctccaacaccaagtggctcacgtggccacccagctggaagctgcaagattactaacatacaatgctgctaggcttttagaagctggaaagccattcataaaagaagcgtcaatggccaaatactatgcatcagagattgcaggacaaacaacgagtaaatgtatcgagtggatggggggagtaggctacaccaaagattaccctgtggagaaatacttccgagatgcaaagattggtacgatatatgaaggagcttccaacatccagttgaacaccattgcaaagcatatcgatgcagaatactgacgtctataggagtgggacccctccctggtgtcactgctgtaaaattttaaacggttgtgtcttgttgggagtaagtgccttgcgtgggaataaacttccacagcattcgaatattttaatgaagcccttagtcagggtcctggtgttggcctttttggttttctcttttcaggctgtttaacttaggcacaggagatccacttttaaacttgggaaataagcacctgtatttttttccaaaactgtttttaaagctgtatacgcatacatatatatatttttactctgtcttactctgtcacccaggctagagtgcagtggcgcgatctcagctcactgcagccttgacctcct

SEQ ID NO: 104318 - DNA, 5859 bp, Homo sapiens
  Payload ID: 494
  Gene Symbol: ACADSB
  Gene Name: acyl-CoA dehydrogenase, short/branched chain
  Uniprot ID: P45954
  ENST ID: ENST00000358776
  CDS Start-End: 15-1313
ggcctgcggcgaggatggagggcctggcagtgcggttgctgcgcggcagcaggctgctaagaagaaatttcctgacttgtttgtcttcttggaagattcctcctcatgtctcaaaatcttcccagtcagaagctctactcaatataacaaataatggaatacactttgctcccctgcaaacatttacagatgaggaaatgatgataaagagttcagttaaaaaatttgctcaggaacaaattgcacctttggtttcaaccatggatgaaaattcgaaaatggagaaatcagtaatacaaggattatttcaacaagggttgatgggtattgaagttgacccagaatatggaggcacaggagcttcatttttatccactgtgctcgtgatagaggaattagccaaagttgatgcatctgtggctgtcttttgtgagatccagaacacattaattaacacactgattagaaaacatggaacagaagaacaaaaggccacctatttgcctcagctcactacagaaaaagtaggaagtttctgcctttcagaggctggagcaggtagtgactcatttgctttgaagaccagagctgataaagagggagattattatgtcctcaatggatcaaagatgtggatcagcagtgctgagcacgcagggctctttctggtgatggcaaatgtagaccctaccattggatataagggaattacctccttcttagtagatcgtgatactccgggccttcatatagggaaacctgaaaacaaattggggctcagagcttcttccacctgcccgttaacattcgaaaatgtcaaggttccagaagccaatatcttgggacaaattggacatggctataagtatgccatagggagtctcaatgaaggtagaataggaattgctgcacagatgctgggactggcgcaaggatgttttgactacactattccatatattaaagaaaggatacaatttggcaaaagactatttgattttcagggcctccaacaccaagtggctcacgtggccacccagctggaagctgcaagattactaacatacaatgctgctaggcttttagaagctggaaagccattcataaaagaagcgtcaatggccaaatactatgcatcagagattgcaggacaaacaacgagtaaatgtatcgagtggatggggggagtaggctacaccaaagattaccctgtggagaaatacttccgagatgcaaagattggtacgatatatgaaggagcttccaacatccagttgaacaccattgcaaagcatatcgatgcagaatactgacgtctataggagtgggacccctccctggtgtcactgctgtaaaattttaaacggttgtgtcttgttgggagtaagtgccttgcgtgggaataaacttccacagcattcgaatattttaatgaagcccttagtcagggtcctggtgttggcctttttggttttctcttttcaggctgtttaacttaggcacaggagatccacttttaaacttgggaaataagcacctgtatttttttccaaaactgtttttaaagctgtatacgcatacatatatatatttttactctgtcttactctgtcacccaggctagagtgcagtggcgcgatctcagctcactgcagccttgacctcctgggttccagtgattctcatgcctcatcctcccaagtagctggaactacaggtgtgcaccaccatgcctggttcatttttgtgtttttagtagagatggggttttaccatattgcccaggctggtcttctggcttctggatatcgcccaccttggcctcccaaagtgctgggattacagggatgagccaccgtgcctggctgggtatttatattatcattctagtttcagagtatacagaagtttcatcccatcatttggaaaaataaaggcatctgaagtacaatattacttatagaaatagtttatattcctattaaatcttaatcttgtggcatcagggaaatatttgttacatagtaggcaatttttatccagtactttatagattcaactctaagttgcaagcgaagtcaaaactgatgaaaatttatttagaaaaatctaaaaattctggttttaaatatgagaatcagtggaaaataagggtataattttgtaggtcatatgattgaagaaaatattattttaacaatgtaaagcaatatgatttgttactataattaacctgtataaaagatacattttatggtggtttcagtaggtcattttaaaaaccaatgtgcattagttttcaagtataaggtttaagtaatttggtttaataatcagaaaatattcaatacagtgttggatattctgtcatgcactatttttcagttgacaatttctgtattttaattgaatactgtttcttcagtcatggttattgcactttatcctgaataataattcagaaattgggttttggttcagtgattctcaagaaaaagatctcttgcccattaagaagtgtatcaaaatctcataaggaatgagggagagaagggggctgtagagtttgaaaaagcatattcaatattaaaatagttttatatttgggaaggcaaaaatgaatctattgttttgcaatataggttataaacaggcaaaatgcaataaaatatatatctggttgtattagtctgttttcacgctgctgataaagacatacctgagaccaggaagaaaaagaggtttaattggacttacagttccacatgactggggaggcctcagaatcatggtgggaggcaaaaagcacttcttacatggcggcagcaagagaaaatgagaaagaagcaaaagtggaaacccctaataaacctatcagatcttgtgagacttactatcacgagaatagcacaggaaagactggcccccatgattcaattacctcccccgggtccctcccacaacacatgggaattctgagagataccatttaagttgagatttcagtggggacacagccaaaccatatcattctacccctggcacctccaaatctcatgtcctcacatttcaaaaccaatcatgccttcccaacagtcccccaaagtcttaactcatttcagcattaacccaaaagtccgcagtccaaagtttcatctgagacaaggcaagtcccttccacttatgaacctgtaaaatcaaaagtaaactagttacttcctagatacaatgggggtacaggtattgggtaaatacagccattccaaatgggagaaattggccaacacaaaagggtaacagggcccatgcaagtccaaaattcagcagggcagtcaaattttaaacctccaaaatgatcacctttgactccacgtctcacaatcatctctctcaagttcgaagttccacaaatctctaaggcaagggaaagatgctgccagtctctttgctaaaacacagcaagagtcacctttactccagttcccaaaaagtttttcatctccatctgagaccacctcagcctgaattttattgtcaatattgctatcagcattttgggcaaagccattcagcaagtatctaggaagttccaaactttcccacattttcctgtcttcttctgagcccttcaaactgttccaacctctgcctgttacccagttccaaacttgctttcatatttttggctatcttttcagcaatgccccactctactgttagcagtttactgtattagtctgttttcacactgctgataaagacattcctcaagattgtgaagaaaaagaggtttaattggacttacagttccacatggccggggaggcctcagaatcatggcgggaggtgaaaagcacttcgtacatggtggtggcaagagaaaatgaagaagaagcaaaagtggaaacccctgataaacccatcagatctcatgagacttactatcatgagaatagcacaggaaagactggcccccctgattcgatgacctccccctgggtccctcccacaacatgtgggaattccagaagataaattcaagttgcaatttcagtggggacatagccaaaccatatcactggtgatgccacttcttcagtattagggattctcagtcagaagagaccccctgtgtggcctgagtcccctcaggaggaaggtggacaacagagaaatgagagttttgatattttctgaaagaggaacatgtgttagagatgaagaatcttccaaggctcatgcagttgcttagaataatcattactgttatatgagaaacattttagtaatttaataaaaggataatgtttatttaaaaaacctgacttttccagagtaattttgttttgcacattcatgtttattgaagtggactaatttctataatgcaaatcagagttaaatattaaaaattgtgtaaatacaattgacataggaattacattaaaatattaggaagaaacaaggacaaatttagaccttgaatccgaagagataaagcttacttgactttcaaatggagagatgatgaaaacccactcattcactctttcagaacaaaaagacagtcatctgataagagtatgacatggatgaaatgccctacaggggccttggacatctttaatttctgcgattatgtgaaagaggtggactttacagataatggagcagaagccaacattagtaaaaggaatcccaacttcttcccatagaattagaaacatgtgaaagtacaataaacttcttgttcaaattaccagcatcagagagcttcccatttgcatctagaccttgaatttatatttattgatcaagttctaatttgtatgtatattttgtgcatattcaccaataacagttaaaattaattatgtgttatagttaatatatgcacctaccttcttccgttagtgcatcagtaaatgtgttattttgtcatttttccaaagagagtgttgtaggttttccctgtagttcttcctttatagcttttcttctgataaccatgacttcaggagctttaaaactatctatcttgcatttgtgtctggcggagaactagccatcagcctcctgaagcctgccatcattgttaatttgaggactgggctgtcttggggctcagaagataaagaactatttgagcagatgtgtgtgggtggcactggattccacccaactgccaagttagtattgttagagatttcattttacaacacaaaaataagcctgtgtcaaagattttaaaatcatggaaagttaaaatctagaaagaccttagagaaccagccaaccaactctctcattttaaaagtgaaggattcatagcacagattacttgcctaagatcatccaggaacgaagacaagaatccaaatgtacttggggacaagaattagtccccaaattcagtgttcttcctagtattaaacattgcccctttcgacaaattttggatttcattcttgttatatttcagtactcttgctgatttattttaggtttaactggtaaagaatgaacatttcagaagtgttaggattagtcagtgtcatcgcttatgtatatgaatcacttgccaaagacactggctctcctcagctgtaaccagcatgtcaaatgtgaagattattgtgtgggatcctttggtttcattgttatgatgtattttataaatgtactagttatatccttgtttatgtatttttgctgatctttcataaagcagaatggtatgtatcggattgttttaatgttatatattggattgtattcgatgttacaaaaccaatattctatggagaatgaaaaaaataaaggactaaattaactggagatttttggtactcttataaa

SEQ ID NO: 104319 - DNA, 2352 bp, Homo sapiens
  Payload ID: 495
  Gene Symbol: ACADVL
  Gene Name: acyl-CoA dehydrogenase, very long chain
  ENST ID: ENST00000322910
  CDS Start-End: 142-261
agcatgccccggggcccgcaaccgtccgccgcccggtgcactgtggacgatgagtcagggttaggggcgccaggacgtgggcgtgcaggacgccagagctgggtcagagctcgagccagcggcgcccggagagattcggagatgcaggcggctcggatggccgcgagcttggggcggcagctgctgaggctcgggggcggaaggtctgtgtgtgacaagagggacggtgggcagcggccctgggcaccgggccggcactgaacccccactccccacagctcgcggctcacggcgctcctggggcagccccggcccggccctgcccggcggccctatgccgggggtgccgctcagctggctctggacaagtcagattcccacccctctgacgctctgaccaggaaaaaaccggccaaggcggaatctaagtcctttgctgtgggaatgttcaaaggccagctcaccacagatcaggtgttcccatacccgtccgtgctcaacgaagagcagacacagtttcttaaagagctggtggagcctgtgtcccgtttcttcgaggaagtgaacgatcccgccaagaatgacgctctggagatggtggaggagaccacttggcagggcctcaaggagctgggggcctttggtctgcaagtgcccagtgagctgggtggtgtgggcctttgcaacacccagtacgcccgtttggtggagatcgtgggcatgcatgaccttggcgtgggcattaccctgggggcccatcagagcatcggtttcaaaggcatcctgctctttggcacaaaggcccagaaagaaaaatacctccccaagctggcatctggggagactgtggccgctttctgtctaaccgagccctcaagcgggtcagatgcagcctccatccgaacctctgctgtgcccagcccctgtggaaaatactataccctcaatggaagcaagctttggatcagtaatgggggcctagcagacatcttcacggtctttgccaagacaccagttacagatccagccacaggagccgtgaaggagaagatcacagcttttgtggtggagaggggcttcgggggcattacccatgggccccctgagaagaagatgggcatcaaggcttcaaacacagcagaggtgttctttgatggagtacgggtgccatcggagaacgtgctgggtgaggttgggagtggcttcaaggttgccatgcacatcctcaacaatggaaggtttggcatggctgcggccctggcaggtaccatgagaggcatcattgctaaggcggtagatcatgccactaatcgtacccagtttggggagaaaattcacaactttgggctgatccaggagaagctggcacggatggttatgctgcagtatgtaactgagtccatggcttacatggtgagtgctaacatggaccagggagccacggacttccagatagaggccgccatcagcaaaatctttggctcggaggcagcctggaaggtgacagatgaatgcatccaaatcatggggggtatgggcttcatgaaggaacctggagtagagcgtgtgctccgagatcttcgcatcttccggatctttgaggggacaaatgacattcttcggctgtttgtggctctgcagggctgtatggacaaaggaaaggagctctctgggcttggcagtgctctaaagaatccctttgggaatgctggcctcctgctaggagaggcaggcaaacagctgaggcggcgggcagggctgggcagcggcctgagtctcagcggacttgtccacccggagttgagtcggagtggcgagctggcagtacgggctctggagcagtttgccactgtggtggaggccaagctgataaaacacaagaaggggattgtcaatgaacagtttctgctgcagcggctggcagacggggccatcgacctctatgccatggtggtggttctctcgagggcctcaagatccctgagtgagggccaccccacggcccagcatgagaaaatgctctgtgacacctggtgtatcgaggctgcagctcggatccgagagggcatggccgccctgcagtctgacccctggcagcaagagctctaccgcaacttcaaaagcatctccaaggccttggtggagcggggtggtgtggtcaccagcaacccacttggcttctgaatactcccggccagggcctgtcccagttatgtgccttccctcaagccaaagccgaagcccctttccttaaggccctggtttgtcccgaaggggcctagtgttcccagcactgtgcctgctctcaagagcacttactgcctcgcaaataataaaaatttctagccagtc

SEQ ID NO: 104320 - DNA, 2191 bp, Homo sapiens
  Payload ID: 495
  Gene Symbol: ACADVL
  Gene Name: acyl-CoA dehydrogenase, very long chain
  Uniprot ID: P49748
  ENST ID: ENST00000350303
  CDS Start-End: 123-2024
aaccgtccgccgcccggtgcactgtggacgatgagtcagggttaggggcgccaggacgtgggcgtgcaggacgccagagctgggtcagagctcgagccagcggcgcccggagagattcggagatgcaggcggctcggatggccgcgagcttggggcggcagctgctgaggctcgggggcggaagctcgcggctcacggcgctcctggggcagccccggcccggccctgcccggcggccctatgccgggggtgccgctcaggaatctaagtcctttgctgtgggaatgttcaaaggccagctcaccacagatcaggtgttcccatacccgtccgtgctcaacgaagagcagacacagtttcttaaagagctggtggagcctgtgtcccgtttcttcgaggaagtgaacgatcccgccaagaatgacgctctggagatggtggaggagaccacttggcagggcctcaaggagctgggggcctttggtctgcaagtgcccagtgagctgggtggtgtgggcctttgcaacacccagtacgcccgtttggtggagatcgtgggcatgcatgaccttggcgtgggcattaccctgggggcccatcagagcatcggtttcaaaggcatcctgctctttggcacaaaggcccagaaagaaaaatacctccccaagctggcatctggggagactgtggccgctttctgtctaaccgagccctcaagcgggtcagatgcagcctccatccgaacctctgctgtgcccagcccctgtggaaaatactataccctcaatggaagcaagctttggatcagtaatgggggcctagcagacatcttcacggtctttgccaagacaccagttacagatccagccacaggagccgtgaaggagaagatcacagcttttgtggtggagaggggcttcgggggcattacccatgggccccctgagaagaagatgggcatcaaggcttcaaacacagcagaggtgttctttgatggagtacgggtgccatcggagaacgtgctgggtgaggttgggagtggcttcaaggttgccatgcacatcctcaacaatggaaggtttggcatggctgcggccctggcaggtaccatgagaggcatcattgctaaggcggtagatcatgccactaatcgtacccagtttggggagaaaattcacaactttgggctgatccaggagaagctggcacggatggttatgctgcagtatgtaactgagtccatggcttacatggtgagtgctaacatggaccagggagccacggacttccagatagaggccgccatcagcaaaatctttggctcggaggcagcctggaaggtgacagatgaatgcatccaaatcatggggggtatgggcttcatgaaggaacctggagtagagcgtgtgctccgagatcttcgcatcttccggatctttgaggggacaaatgacattcttcggctgtttgtggctctgcagggctgtatggacaaaggaaaggagctctctgggcttggcagtgctctaaagaatccctttgggaatgctggcctcctgctaggagaggcaggcaaacagctgaggcggcgggcagggctgggcagcggcctgagtctcagcggacttgtccacccggagttgagtcggagtggcgagctggcagtacgggctctggagcagtttgccactgtggtggaggccaagctgataaaacacaagaaggggattgtcaatgaacagtttctgctgcagcggctggcagacggggccatcgacctctatgccatggtggtggttctctcgagggcctcaagatccctgagtgagggccaccccacggcccagcatgagaaaatgctctgtgacacctggtgtatcgaggctgcagctcggatccgagagggcatggccgccctgcagtctgacccctggcagcaagagctctaccgcaacttcaaaagcatctccaaggccttggtggagcggggtggtgtggtcaccagcaacccacttggcttctgaatactcccggccagggcctgtcccagttatgtgccttccctcaagccaaagccgaagcccctttccttaaggccctggtttgtcccgaaggggcctagtgttcccagcactgtgcctgctctcaagagcacttactgcctcgcaaataataaaaatttctagccagt

SEQ ID NO: 104321 - DNA, 2323 bp, Homo sapiens
  Payload ID: 495
  Gene Symbol: ACADVL
  Gene Name: acyl-CoA dehydrogenase, very long chain
  Uniprot ID: P49748
  ENST ID: ENST00000356839
  CDS Start-End: 180-2147
cggaacgcagggccgggctccagggaactacagctcccagcatgccccggggcccgcaaccgtccgccgcccggtgcactgtggacgatgagtcagggttaggggcgccaggacgtgggcgtgcaggacgccagagctgggtcagagctcgagccagcggcgcccggagagattcggagatgcaggcggctcggatggccgcgagcttggggcggcagctgctgaggctcgggggcggaagctcgcggctcacggcgctcctggggcagccccggcccggccctgcccggcggccctatgccgggggtgccgctcagctggctctggacaagtcagattcccacccctctgacgctctgaccaggaaaaaaccggccaaggcggaatctaagtcctttgctgtgggaatgttcaaaggccagctcaccacagatcaggtgttcccatacccgtccgtgctcaacgaagagcagacacagtttcttaaagagctggtggagcctgtgtcccgtttcttcgaggaagtgaacgatcccgccaagaatgacgctctggagatggtggaggagaccacttggcagggcctcaaggagctgggggcctttggtctgcaagtgcccagtgagctgggtggtgtgggcctttgcaacacccagtacgcccgtttggtggagatcgtgggcatgcatgaccttggcgtgggcattaccctgggggcccatcagagcatcggtttcaaaggcatcctgctctttggcacaaaggcccagaaagaaaaatacctccccaagctggcatctggggagactgtggccgctttctgtctaaccgagccctcaagcgggtcagatgcagcctccatccgaacctctgctgtgcccagcccctgtggaaaatactataccctcaatggaagcaagctttggatcagtaatgggggcctagcagacatcttcacggtctttgccaagacaccagttacagatccagccacaggagccgtgaaggagaagatcacagcttttgtggtggagaggggcttcgggggcattacccatgggccccctgagaagaagatgggcatcaaggcttcaaacacagcagaggtgttctttgatggagtacgggtgccatcggagaacgtgctgggtgaggttgggagtggcttcaaggttgccatgcacatcctcaacaatggaaggtttggcatggctgcggccctggcaggtaccatgagaggcatcattgctaaggcggtagatcatgccactaatcgtacccagtttggggagaaaattcacaactttgggctgatccaggagaagctggcacggatggttatgctgcagtatgtaactgagtccatggcttacatggtgagtgctaacatggaccagggagccacggacttccagatagaggccgccatcagcaaaatctttggctcggaggcagcctggaaggtgacagatgaatgcatccaaatcatggggggtatgggcttcatgaaggaacctggagtagagcgtgtgctccgagatcttcgcatcttccggatctttgaggggacaaatgacattcttcggctgtttgtggctctgcagggctgtatggacaaaggaaaggagctctctgggcttggcagtgctctaaagaatccctttgggaatgctggcctcctgctaggagaggcaggcaaacagctgaggcggcgggcagggctgggcagcggcctgagtctcagcggacttgtccacccggagttgagtcggagtggcgagctggcagtacgggctctggagcagtttgccactgtggtggaggccaagctgataaaacacaagaaggggattgtcaatgaacagtttctgctgcagcggctggcagacggggccatcgacctctatgccatggtggtggttctctcgagggcctcaagatccctgagtgagggccaccccacggcccagcatgagaaaatgctctgtgacacctggtgtatcgaggctgcagctcggatccgagagggcatggccgccctgcagtctgacccctggcagcaagagctctaccgcaacttcaaaagcatctccaaggccttggtggagcggggtggtgtggtcaccagcaacccacttggcttctgaatactcccggccagggcctgtcccagttatgtgccttccctcaagccaaagccgaagcccctttccttaaggccctggtttgtcccgaaggggcctagtgttcccagcactgtgcctgctctcaagagcacttactgcctcgcaaataataaaaatttctagccagtcatgctttg

SEQ ID NO: 104322 - DNA, 2227 bp, Homo sapiens
  Payload ID: 495
  Gene Symbol: ACADVL
  Gene Name: acyl-CoA dehydrogenase, very long chain
  Uniprot ID: P49748
  ENST ID: ENST00000543245
  CDS Start-End: 22-2058
gtcactatacagagacagtccatgttggggggcctggccgcggcggcgggaacccggataatgggaaaggagatagaagcagaagcacagaggcccctgaggcaaacatggagacctggccagccaccagcgatgacagcaaagacgatgagctcgcggctcacggcgctcctggggcagccccggcccggccctgcccggcggccctatgccgggggtgccgctcagctggctctggacaagtcagattcccacccctctgacgctctgaccaggaaaaaaccggccaaggcggaatctaagtcctttgctgtgggaatgttcaaaggccagctcaccacagatcaggtgttcccatacccgtccgtgctcaacgaagagcagacacagtttcttaaagagctggtggagcctgtgtcccgtttcttcgaggaagtgaacgatcccgccaagaatgacgctctggagatggtggaggagaccacttggcagggcctcaaggagctgggggcctttggtctgcaagtgcccagtgagctgggtggtgtgggcctttgcaacacccagtacgcccgtttggtggagatcgtgggcatgcatgaccttggcgtgggcattaccctgggggcccatcagagcatcggtttcaaaggcatcctgctctttggcacaaaggcccagaaagaaaaatacctccccaagctggcatctggggagactgtggccgctttctgtctaaccgagccctcaagcgggtcagatgcagcctccatccgaacctctgctgtgcccagcccctgtggaaaatactataccctcaatggaagcaagctttggatcagtaatgggggcctagcagacatcttcacggtctttgccaagacaccagttacagatccagccacaggagccgtgaaggagaagatcacagcttttgtggtggagaggggcttcgggggcattacccatgggccccctgagaagaagatgggcatcaaggcttcaaacacagcagaggtgttctttgatggagtacgggtgccatcggagaacgtgctgggtgaggttgggagtggcttcaaggttgccatgcacatcctcaacaatggaaggtttggcatggctgcggccctggcaggtaccatgagaggcatcattgctaaggcggtagatcatgccactaatcgtacccagtttggggagaaaattcacaactttgggctgatccaggagaagctggcacggatggttatgctgcagtatgtaactgagtccatggcttacatggtgagtgctaacatggaccagggagccacggacttccagatagaggccgccatcagcaaaatctttggctcggaggcagcctggaaggtgacagatgaatgcatccaaatcatggggggtatgggcttcatgaaggaacctggagtagagcgtgtgctccgagatcttcgcatcttccggatctttgaggggacaaatgacattcttcggctgtttgtggctctgcagggctgtatggacaaaggaaaggagctctctgggcttggcagtgctctaaagaatccctttgggaatgctggcctcctgctaggagaggcaggcaaacagctgaggcggcgggcagggctgggcagcggcctgagtctcagcggacttgtccacccggagttgagtcggagtggcgagctggcagtacgggctctggagcagtttgccactgtggtggaggccaagctgataaaacacaagaaggggattgtcaatgaacagtttctgctgcagcggctggcagacggggccatcgacctctatgccatggtggtggttctctcgagggcctcaagatccctgagtgagggccaccccacggcccagcatgagaaaatgctctgtgacacctggtgtatcgaggctgcagctcggatccgagagggcatggccgccctgcagtctgacccctggcagcaagagctctaccgcaacttcaaaagcatctccaaggccttggtggagcggggtggtgtggtcaccagcaacccacttggcttctgaatactcccggccagggcctgtcccagttatgtgccttccctcaagccaaagccgaagcccctttccttaaggccctggtttgtcccgaaggggcctagtgttcccagcactgtgcctgctctcaagagcacttactgcctcgcaaataataaaaatttctagccagtca

SEQ ID NO: 104323 - DNA, 1016 bp, Homo sapiens
  Payload ID: 495
  Gene Symbol: ACADVL
  Gene Name: acyl-CoA dehydrogenase, very long chain
  ENST ID: ENST00000542255
  CDS Start-End: 1-847
gaagctggcacggatggttatgctgcagtatgtaactgagtccatggcttacatggtgagtgctaacatggaccagggagccacggacttccagatagaggccgccatcagcaaaatctttggctcggaggcagcctggaaggtgacagatgaatgcatccaaatcatggggggtatgggcttcatgaaggaacctggagtagagcgtgtgctccgagatcttcgcatcttccggatctttgaggggacaaatgacattcttcggctgtttgtggctctgcagggctgtatggacaaaggaaaggagctctctgggcttggcagtgctctaaagaatccctttgggaatgctggcctcctgctaggagaggcaggcaaacagctgaggcggcgggcagggctgggcagcggcctgagtctcagcggacttgtccacccggagttgagtcggagtggcgagctggcagtacgggctctggagcagtttgccactgtggtggaggccaagctgataaaacacaagaaggggattgtcagtgaggaggcaggcagggaatgcctgagccgcagggggcctgggcctggatcccagccggcccagatttattttcatctcctgcttcctgccagggcctcaagatccctgagtgagggccaccccacggcccagcatgagaaaatgctctgtgacacctggtgtatcgaggctgcagctcggatccgagagggcatggccgccctgcagtctgacccctggcagcaagagctctaccgcaacttcaaaagcatctccaaggccttggtggagcggggtggtgtggtcaccagcaacccacttggcttctgaatactcccggccagggcctgtcccagttatgtgccttccctcaagccaaagccgaagcccctttccttaaggccctggtttgtcccgaaggggcctagtgttcccagcactgtgcctgctctcaagagcacttactgcctcgcaaataataaaaatttctagccagtca

SEQ ID NO: 104324 - DNA, 752 bp, Homo sapiens
  Payload ID: 495
  Gene Symbol: ACADVL
  Gene Name: acyl-CoA dehydrogenase, very long chain
  ENST ID: ENST00000581378
  CDS Start-End: 1-230
ttcttaaagagctggtggagcctgtgtcccgtttcttcgaggaagtgaacgatcccgccaagaatgacgctctggagatggtggaggagaccacttggcagggcctcaaggagctgggggcctttggtctgcaagtgcccagtgagctgggtggtgtgggcctttgcaacacccagattcctgcttcccctccagtacgcccgtttggtggagatcgtgggcatgcatgaccttggcgtgggcattaccctgggggcccatcagagcatcggtttcaaaggcatcctgctctttggcacaaaggcccagaaagaaaaatacctccccaagctggcatctggggagactgtggccgctttctgtctaaccgagccctcaagcgggtcagatgcagcctccatccgaacctctgctgtgcccagcccctgtggaaaatactataccctcaatggaagcaagctttggatcagtaatgggggcctagcagacatcttcacggtctttgccaagacaccagttacagatccagccacaggagccgtgaaggagaagatcacagcttttgtggtggagaggggcttcgggggcattacccatgggccccctgagaagaagatgggcatcaaggcttcaaacacagcagaggtgttctttgatggagtacgggtgccatcggagaacgtgctgggtgaggttgggagtggcttcaaggttgccatgcacatcctcaacaatggaaggtttggcatggc

SEQ ID NO: 104325 - DNA, 1015 bp, Homo sapiens
  Payload ID: 495
  Gene Symbol: ACADVL
  Gene Name: acyl-CoA dehydrogenase, very long chain
  ENST ID: ENST00000583858
  CDS Start-End: 1-613
tgaggttgggagtggcttcaaggttgccatgcacatcctcaacaatggaaggtttggcatggctgcggccctggcaggtaccatgagaggcatcattgctaaggcggtagatcatgccactaatcgtacccagtttggggagaaaattcacaactttgggctgatccaggagaagctggcacggatggttatgctgcagtatgtaactgagtccatggcttacatggtgagtgctaacatggaccagggagccacggacttccagatagaggccgccatcagcaaaatctttggctcggaggcagcctggaaggtgacagatgaatgcatccaaatcatggggggtatgggcttcatgaaggaacctggagtagagcgtgtgctccgagatcttcgcatcttccggatctttgaggggacaaatgacattcttcggctgtttgtggctctgcagggctgtatggcgggcagggctgggcagcggcctgagtctcagcggacttgtccacccggagttgagtcggagtggcgagctggcagtacgggctctggagcagtttgccactgtggtggaggccaagctgataaaacacaagaaggggattgtcaatgaacagtttctgctgcagcggctggcagacggggccatcgacctctatgccatggtggtggttctctcgagggcctcaagatccctgagtgagggccaccccacggcccagcatgagaaaatgctctgtgacacctggtgtatcgaggctgcagctcggatccgagagggcatggccgccctgcagtctgacccctggcagcaagagctctaccgcaacttcaaaagcatctccaaggccttggtggagcggggtggtgtggtcaccagcaacccacttggcttctgaatactcccggccagggcctgtcccagttatgtgccttccctcaagccaaagccgaagcccctttccttaaggccctggtttgtcccgaaggggcctagtgttcccagcactgtgcc

SEQ ID NO: 104326 - DNA, 502 bp, Homo sapiens
  Payload ID: 495
  Gene Symbol: ACADVL
  Gene Name: acyl-CoA dehydrogenase, very long chain
  ENST ID: ENST00000579886
  CDS Start-End: 38-502
cagagctcgagccagcggcgcccggagagattcggagatgcaggcggctcggatggccgcgagcttggggcggcagctgctgaggctcgggggcggaagctcgcggctcacggcgctcctggggcagccccggcccggccctgcccggcggccctatgccgggggtgccgctcagctggctctggacaagtcagattcccacccctctgacgctctgaccaggaaaaaaccggccaagaatgacgctctggagatggtggaggagaccacttggcagggcctcaaggagctgggggcctttggtctgcaagtgcccagtgagctgggtggtgtgggcctttgcaacacccagtacgcccgtttggtggagatcgtgggcatgcatgaccttggcgtgggcattaccctgggggcccatcagagcatcggtttcaaaggcatcctgctctttggcacaaaggcccagaaagaaaaatacctccccaagctggcatctggggag

SEQ ID NO: 104327 - DNA, 582 bp, Homo sapiens
  Payload ID: 495
  Gene Symbol: ACADVL
  Gene Name: acyl-CoA dehydrogenase, very long chain
  ENST ID: ENST00000579546
  CDS Start-End: 1-582
gctgcagtatgtaactgagtccatggcttacatggtgagtgctaacatggaccagggagccacggacttccagatagaggccgccatcagcaaaatctttggctcggaggcagcctggaaggtgacagatgaatgcatccaaatcatggggggtatgggcttcatgaaggaacctggagtagagcgtgtgctccgagatcttcgcatcttccggatctttgaggggacaaatgacattcttcggctgtttgtggctctgcagggctgtatggcgggcagggctgggcagcggcctgagtctcagcggacttgtccacccggagttgagtcggagtggcgagctgtacgggctctggagcagtttgccactgtggtggaggccaagctgataaaacacaagaaggggattgtcaatgaacagtttctgctgcagcggctggcagacggggccatcgacctctatgccatggtggtggttctctcgagggcctcaagatccctgagtgagggccaccccacggcccagcatgagaaaatgctctgtgacacctggtgtatcgaggctgcagctcggatccgaga

SEQ ID NO: 104328 - DNA, 555 bp, Homo sapiens
  Payload ID: 495
  Gene Symbol: ACADVL
  Gene Name: acyl-CoA dehydrogenase, very long chain
  ENST ID: ENST00000584103
  CDS Start-End: 83-555
gttaggggcgccaggacgtgggcgtgcaggacgccagagctgggtcagagctcgagccagcggcgcccggagagattcggagatgcaggcggctcggatggccgcgagcttggggcggcagctgctgaggctcgggggcggaagctcgcggctcacggcgctcctggggcagccccggcccggccctgcccggcggccctatgccgggggtgccgctcagctggctctggacaagtcagattcccacccctctgacgctctgaccaggaaaaaaccggccaaggcggaatctaagtcctttgctgtgggaatgttcaaaggccagctcaccacagatcaggtgttcccatacccgtccgtgctcaacgaagagcagacacagtttcttaaagagctggtggagcctgtgtcccgtttcttcgaggagcctggatgtgggatcctgtgccttccccaggaagtgaacgatcccgccaagaatgacgctctggagatggtggaggagaccacttggcagggcctcaaggagctgggggcctttggtctgcaagtgcc

SEQ ID NO: 104329 - DNA, 503 bp, Homo sapiens
  Payload ID: 495
  Gene Symbol: ACADVL
  Gene Name: acyl-CoA dehydrogenase, very long chain
  ENST ID: ENST00000583848
  CDS Start-End: 1-138
gctctggagcagtttgccactgtggtggaggccaagctgataaaacacaagaaggggattgtcacggctggcagacggggccatcgacctctatgccatggtggtggttctctcgagggcctcaagatccctgagtgagggccaccccacggcccagcatgagaaaatgctctgtgacacctggtgtatcgaggctgcagctcggatccgagagggcatggccgccctgcagtctgacccctggcagcaagagctctaccgcaacttcaaaagcatctccaaggccttggtggagcggggtggtgtggtcaccagcaacccacttggcttctgaatactcccggccagggcctgtcccagttatgtgccttccctcaagccaaagccgaagcccctttccttaaggccctggtttgtcccgaaggggcctagtgttcccagcactgtgcctgctctcaagagcacttactgcctcgcaaataataaaaatttctagccagtca

SEQ ID NO: 104330 - DNA, 799 bp, Homo sapiens
  Payload ID: 495
  Gene Symbol: ACADVL
  Gene Name: acyl-CoA dehydrogenase, very long chain
  ENST ID: ENST00000583312
  CDS Start-End: 126-799
cgcaaccgtccgccgcccggtgcactgtggacgatgagtcagggttaggggcgccaggacgtgggcgtgcaggacgccagagctgggtcagagctcgagccagcggcgcccggagagattcggagatgcaggcggctcggatggccgcgagcttggggcggcagctgctgaggctcgggggcggaagctcgcggctcacggcgctcctggggcagccccggcccggccctgcccggcggccctatgccgggggtgccgctcagctggctctggacaagtcagattcccacccctctgacgctctgaccaggaaaaaaccggccaaggcggaatctaagtcctttgctgtgggaatgttcaaaggccagctcaccacagatcaggtgttcccatacccgtccgtgctcaacgaagagcagacacagtttcttaaagagctggtggagcctgtgtcccgtttcttcgaggaagtgaacgatcccgccaagaatgacgctctggagatggtggaggagaccacttggcagggcctcaaggagctgggggcctttggtctgcaagtgcccagtgagctgggtggtgtgggcctttgcaacacccagtacgcccgtttggtggagatcgtgggcatgcatgaccttggcgtgggcattaccctgggggcccatcagagcatcggtttcaaaggcatcctgctctttggcacaaaggcccagaaagaaaaatacctccccaagctggcatctgctctctccccaacaggggagactgtggccgctttctgtctaaccgagccctc

SEQ ID NO: 104331 - DNA, 7514 bp, Homo sapiens
  Payload ID: 496
  Gene Symbol: ACOX1
  Gene Name: acyl-CoA oxidase 1, palmitoyl
  Uniprot ID: Q15067
  ENST ID: ENST00000293217
  CDS Start-End: 291-2273
cgaggatccgctcgggagcctcccctggccaggagcaggggattagtctgccccgcgaccggccccagccacgacgcggacatcgccccctctgtctgggccgctgtcactcacgcgccaaagggccacggagaaagaaggggcgggccggggcgggccgggcgagcggaggcggggacttgcgccgtcctgaggctgcctcctagggtccggccggcgctggagctgcggatttagattgtcactgccacctcggtcggtgcttacttcgctgccagctggtcgtcgccatgaacccggacctgcgcagggagcgggattccgccagcttcaacccggagctgcttacacacatcctggacggcagccccgagaaaacccggcgccgccgagagatcgagaacatgatcctgaacgacccagacttccagcatgaggacttgaacttcctcactcgcagccagcgttatgaggtggctgtcaggaaaagtgccatcatggtgaagaagatgagggagtttggcatcgctgaccctgatgaaattatgtggtttaaaaattttgtgcaccgagggcggcctgagcctctggatcttcacttgggcatgttcctgcccaccttgcttcaccaggcaactgcggagcagcaggagcgcttcttcatgcccgcctggaacttggagatcattggcacttatgcccagacagagatgggtcatggaactcaccttcgaggcttggaaaccacagccacgtatgaccctgaaacccaggagttcattctcaacagtcctactgtgacctccattaaatggtggcctggtgggcttggaaagacttcaaatcatgcaatagttcttgcccagctcatcactaaggggaaatgctatggattacatgcctttatcgtacctattcgtgaaatcgggacccataagcctttgccaggaattaccgttggtgacatcggccccaaatttggttatgatgagatagacaatggctacctcaaaatggacaaccatcgtattcccagagaaaacatgctgatgaagtatgcccaggtgaagcctgatggcacatacgtgaaaccgctgagtaacaagctgacttacgggaccatggtgtttgtcaggtccttccttgtgggagaagctgctcgggctctgtctaaggcgtgcaccattgccatccgatacagcgctgtgaggcaccagtctgaaatcaagccaggtgaaccagaaccacagattttggattttcaaacccagcagtataaactctttccactcctggccactgcctatgccttccagtttgtgggcgcatacatgaaggagacctatcaccggattaacgaaggcattggtcaaggggacctgagtgaactgcctgagcttcatgccctcaccgctggactgaaggctttcacctcctggactgcaaacactggcattgaagcatgtcggatggcttgtggtgggcatggctattctcattgcagtggtcttccaaatatttatgtcaatttcaccccaagctgtacctttgagggagaaaacactgtcatgatgctccagacggctaggttcctgatgaaaagttatgatcaggtgcactcaggaaagttggtgtgtggcatggtgtcctatttgaacgacctgcccagtcagcgcatccagccacagcaggtagcagtctggccaaccatggtggatatcaacagccccgaaagcctaaccgaagcatataaactccgtgcagccagattagtagaaattgctgcaaaaaaccttcaaaaagaagtgattcacagaaaaagcaaggaggtagcttggaacctaacttctgttgaccttgttcgagcaagtgaggcacattgccactatgtggtagttaagctcttttcagaaaaactcctcaaaattcaagataaagccattcaagctgtcttaaggagtttatgtctgctgtattctctgtatggaatcagtcagaacgcgggggatttccttcaggggagcatcatgacagagcctcagattacacaagtaaaccagcgtgtaaaggagttactcactctgattcgctcagatgctgttgctttggttgatgcatttgattttcaggatgtgacacttggctctgtgcttggccgctatgatgggaatgtgtatgaaaacttgtttgagtgggctaagaactccccactgaacaaagcagaggtccacgaatcttacaagcacctgaagtcactgcagtccaagctctgaagtgtcacaaggacaagtttaatctgcttcagaaagcgcctgtgtgcaactcaaattttgtggaatctttttcgaattcaaatagctatagagcaaatgataaattgacccctttttataaatggagggaaaaaatgaacagatttcagagattaaatgaaaaaaagcagatgttttaagtgcaattaacactgaaagagacctgttaaaccattcagaaaaagcttaagaaatgcgatatgacttccttttgtaatgctgctgatcccagtagactatgacttttgataattagcagaatttaactactgagtagttgattattttcacattttaattgctaatcactggctatataagtgtttttaagcaaaggtatttttgaagtggtgtagaacccttccaagctttcctgctcagtgttctaccagacttaccctggggcctggcttaaaagcaggattgaagaaaagggactgggggaaggaaacttattggaaaacttgatgcgaatgagtttctgcttggcacagtctctgcctgcttgctctcctttgctgatggattgcatttatcaaactattcatgctagcatttttccaacgagggaacttattccgcacgggcctactgtaggaccattgtctcgtgtaattaggaattttccatttgaaggattgctaaattgtcacagtagtaggaagtatagggaaacctctcagctgtggcactgttgtagctttggagtgcagagtgtaactctgggacaatcagatttcacatattctgtcatcttggcataagccattaaaagcttggagattactgtatttggcattaaaaaaaaatgtcacttaggtcagcactcccagacgtagcacagaaaaaccctttgacacaaaccatgtgttctgatttttggttcagaaaatattgaaactgtgagttgttttttttttaacaactgggaaaaaacaaaaacaaaaaactatagttagaaaaatggaagttccataggttctatttcttactctatgtatggctttgttttcagtctatttctaggagctttctctgaatcgctaattgtcctttcagttgaaatctaatttatacaatcattctatacttaaaggttaaatacatcttaattaattttttcttaaagtcaatgtaagtcactttgttttgtttttttttaatctacgccatatgcctcatgaaaccagctgttctagaatcagtcctgagaatatggcttaattccatggaaacataactcctatcttgggacctgacataatatctatctatcctggggaactggtaatatgagacttataggttacagcagaaatgctacatgttgacaaaagccttaatcgttccactgggagaactaattgataattgtgttaagattgaagattaaccctgtgttaatctcacttgagtctatcctgacagtagttcagattctggaaaatgataaactgacctgctagatgtagaattgtttcaaaattagtgttgaaataccttgttcacagatgaatatctgggcaggatctgagggtgtttggaatgacaccccccaatccagttgcatagatgggatgtctttgcaggtttgaggagatcatcgacctgcagagccccctttgacccagtacctcacgttttatttaaaatctaaatctggggccaggcgtggtggctcacgcctgtaatccaagcactttgggaggccgaagcgggtggatcacctgaggtcaggagtttgagaccatcctggccaacatggtgaaaccccgtctctactgaaaaaaatacaaaaattagctgggcatggtggtagcacgcgcctgtagtcccagctactcgggaggctgaggcaggataatcgcttgaacttggcgggtagaggttgcagtgagccaagatggtgccactacactgcagcctgggtggctgagcgagactccgtctcaaaaaaaaaatctaaatctgacatttgatgctatttttattaatattggaatgttctgtcttgaactttattcaatataatcaagaataaagatagagtaaacgtcactgatttgtactattaagagagaaaaaatatgccacacaactaaacataggtttaaattatgaagaaatttagaatagaggtttattagatttagggaacactaagaacaaaaaaggaaggagtgatacctgcctgagtggacagctgtaaatcagctgtaattactgcagttgtaccaatagttgtgagtggctccagtcactttaggagtccttggaagtacttggtacacatttgttggctgtaccttaaaggaagtggcaagtccagtttgttctctctaccacactagactgccactgacaagtttgggtctgttggattcaaaattttgtaagccattttcacaagtacaaagatacattttaaccttgtcttctccaaaattactgagtaggaattttatttttatctttttgagacagggtatcactgtcacccagactggagtgcagtggtgggatcttggcttactgtgacctctgcctcccgggttcaaatggtcctccctcctcagtctcctgagtagctgggacgacaggcacgtgccaccatgcccagctaatttgttctattttttctgtagagacggggttttgccatgttgcccaggctggtctcagactcctgggctcaagcgatcatttcgcctcagcctcccaaagtgctgagattataggtgtgagccacagcatctggcccagagtgaggagaattaatgagattttttgtgtgtgttagataatattgatttaagcctttttttaaaaagtactctcaaccaaatacaaaattgaaaatgtgaggtttaatagaaatgtgttggctatttgcaatggattttcttcttgcccaagtgtttggagttctactttatgctctgtatttaaaaattagtgacctcaaagcagagttgatgacacaggctttggggccctcatgttcttgtctttagaacatatcactactaagtatcagcttatcttcagaacattacaacattcaccgtgttcatatgctttctgagaagtcaccacttgtaatttcagatcacatacacctgaaggcattttatagttcctaaagttaacatgttagatcttttttttccaccccatgagggtctcactctcacccaggctggaatgcagtggtgtgattgtagcacactttggccaccaactcctgggctcaagtgatcctcctgctttggcctcctctgagaagctgggattactggtgcacaccaccacacctggctaattttttatttttttttatttttggaaatagggtatggctatgttgccttgggcccgtcatgaactcctagcctcaggtgaccctcccacctcaggcctcccaaagggttgggattacaggagtgagctactgcactgggccaacatgttaatttttttttttttttttttgagatggagtctcccaggcgggaatgcaatggtgcgatctcgacttcactgcaatcttcacctcccgggttcgagcgattctcccacctcagcctcctgagtagctgggattacaggcacctgccatcacgctcggctaatttttgtattttgagcagagatggagtttcaccatgttggccaggtgatctgcactcccactccccccacacttcccaaagtgctgggattacaggcataagccacaagccacctcacccagccaacatgttacatcttaattcttggattttcttcactgcagggctttgggtggagaaataaaactcttcaaatgcatgatcttggagatccctgtgaatcaataattctttagacaactgcggctcaaaatccctcctttcccttttccgagttattccatccatcttattagaaaggaagtgaattaggtgtaggtggtctgtaacacctgcacatctttttatacgtgtagagggtatgcctgggatatataggttgtcttcaagcagtagctgctactacagctagagagaggaggagtgccaggaaactgatgacctgagaccaagagtcttgttgatgttctgacttagataaaggttttgatcattttcatgaaataatgcagggaagtcatttctgctgtttctttactactccattcttggaggattagaacaagtcacactgtaattgactaaaacgactttttattttaaaatattgatggtggggttttgcttttttttttttttttttttttgagacgttgtcttgctctttcacccagggtagagtgcagtggcgaaatcttggctcactgcaacctctgcctcccgggttcaagcaattctctgcctcagcctcctgagaagctgggattacagcgcctgccaccatgcctgtctagtttttttgtatttttagtagagacaggggtttcaccaagttggccaggctggtcttgaactcctgacctcgtgatccacccacctcggcctcccaaagtgctgggattacaggcgtgagccaccgtgccgggccagtgtttttaactgtccacacttactaaattttccagtacttcttcctatggttcatgatagtaaacacagaaacatataaggaacattattagagttaccagatgttagctgttgcatatgtgcacattcctagattcaagggtgtttttgccttaaatttaagtgggtcattggttgtcttgggaagatcatggaaaattcgggattttttagaattctgaaccaaaatatgttttgagtgtttcttagtaaatgtgtgatcttccaccttccacattcagactgcggactacacttcataaatgcctttttatttccagttatggattcaactaaatgactgccttgggagcacataattactttgctacctttttccccctttgctgttgtggctcgagtttggttctcacctgagaagatgcattgagcatatgttgttacccagccctggcttaatggtgtcctgtggggtaggggtgggaggacgaggggcacggggccagagcatgtgaatggatcatggttggacagctgtgacctgccagcactgcgggtaagcaaaactacaaaccgttctttcctctgtgacattgaataaaccttaataaaattcataattagcacatactagaaaaaa

SEQ ID NO: 104332 - DNA, 2215 bp, Homo sapiens
  Payload ID: 496
  Gene Symbol: ACOX1
  Gene Name: acyl-CoA oxidase 1, palmitoyl
  Uniprot ID: Q15067
  ENST ID: ENST00000301608
  CDS Start-End: 62-2044
ggatttagattgtcactgccacctcggtcggtgcttacttcgctgccagctggtcgtcgccatgaacccggacctgcgcagggagcgggattccgccagcttcaacccggagctgcttacacacatcctggacggcagccccgagaaaacccggcgccgccgagagatcgagaacatgatcctgaacgacccagacttccagcatgaggacttgaacttcctcactcgcagccagcgttatgaggtggctgtcaggaaaagtgccatcatggtgaagaagatgagggagtttggcatcgctgaccctgatgaaattatgtggtttaaaaaactacatttggtcaattttgtggaacctgtgggcctcaattactccatgtttattcctaccttgctgaatcagggcaccactgctcagaaagagaaatggctgctttcatccaaaggactccagataattggcacctacgcccagacggaaatgggccacggaactcaccttcgaggcttggaaaccacagccacgtatgaccctgaaacccaggagttcattctcaacagtcctactgtgacctccattaaatggtggcctggtgggcttggaaagacttcaaatcatgcaatagttcttgcccagctcatcactaaggggaaatgctatggattacatgcctttatcgtacctattcgtgaaatcgggacccataagcctttgccaggaattaccgttggtgacatcggccccaaatttggttatgatgagatagacaatggctacctcaaaatggacaaccatcgtattcccagagaaaacatgctgatgaagtatgcccaggtgaagcctgatggcacatacgtgaaaccgctgagtaacaagctgacttacgggaccatggtgtttgtcaggtccttccttgtgggagaagctgctcgggctctgtctaaggcgtgcaccattgccatccgatacagcgctgtgaggcaccagtctgaaatcaagccaggtgaaccagaaccacagattttggattttcaaacccagcagtataaactctttccactcctggccactgcctatgccttccagtttgtgggcgcatacatgaaggagacctatcaccggattaacgaaggcattggtcaaggggacctgagtgaactgcctgagcttcatgccctcaccgctggactgaaggctttcacctcctggactgcaaacactggcattgaagcatgtcggatggcttgtggtgggcatggctattctcattgcagtggtcttccaaatatttatgtcaatttcaccccaagctgtacctttgagggagaaaacactgtcatgatgctccagacggctaggttcctgatgaaaagttatgatcaggtgcactcaggaaagttggtgtgtggcatggtgtcctatttgaacgacctgcccagtcagcgcatccagccacagcaggtagcagtctggccaaccatggtggatatcaacagccccgaaagcctaaccgaagcatataaactccgtgcagccagattagtagaaattgctgcaaaaaaccttcaaaaagaagtgattcacagaaaaagcaaggaggtagcttggaacctaacttctgttgaccttgttcgagcaagtgaggcacattgccactatgtggtagttaagctcttttcagaaaaactcctcaaaattcaagataaagccattcaagctgtcttaaggagtttatgtctgctgtattctctgtatggaatcagtcagaacgcgggggatttccttcaggggagcatcatgacagagcctcagattacacaagtaaaccagcgtgtaaaggagttactcactctgattcgctcagatgctgttgctttggttgatgcatttgattttcaggatgtgacacttggctctgtgcttggccgctatgatgggaatgtgtatgaaaacttgtttgagtgggctaagaactccccactgaacaaagcagaggtccacgaatcttacaagcacctgaagtcactgcagtccaagctctgaagtgtcacaaggacaagtttaatctgcttcagaaagcgcctgtgtgcaactcaaattttgtggaatctttttcgaattcaaatagctatagagcaaatgataaattgacccctttttataaatggagggaaaaaatgaacagatttcagagattaaatgaaaaaaagcaga

SEQ ID NO: 104333 - DNA, 2417 bp, Homo sapiens
  Payload ID: 496
  Gene Symbol: ACOX1
  Gene Name: acyl-CoA oxidase 1, palmitoyl
  ENST ID: ENST00000573078
  CDS Start-End: 56-727
agattgtcactgccacctcggtcggtgcttacttcgctgccagctggtcgtcgccatgaacccggacctgcgcagggagcgggattccgccagcttcaacccggagctgcttacacacatcctggacggcagccccgagaaaacccggcgccgccgagagatcgagaacatgatcctgaacgacccagacttccagcatgaggacttgaacttcctcactcgcagccagcgttatgaggtggctgtcaggaaaagtgccatcatggtgaagaagatgagggagtttggcatcgctgaccctgatgaaattatgtggtttaaaaaactacatttggtcaattttgtggaacctgtgggcctcaattactccatgtttattcctaccttgctgaatcagggcaccactgctcagaaagagaaatggctgctttcatccaaaggactccagataattggcacctacgcccagacggaaatgggccacgttttgtgcaccgagggcggcctgagcctctggatcttcacttgggcatgttcctgcccaccttgcttcaccaggcaactgcggagcagcaggagcgcttcttcatgcccgcctggaacttggagatcattggcacttatgcccagacagagatgggtcatggaactcaccttcgaggcttggaaaccacagccacgtatgaccctgaaacccaggagttcattctcaacagtcctactgtgacctccattaaatggtggcctggtgggcttggaaagacttcaaatcatgcaatagttcttgcccagctcatcactaaggggaaatgctatggattacatgcctttatcgtacctattcgtgaaatcgggacccataagcctttgccaggaattaccgttggtgacatcggccccaaatttggttatgatgagatagacaatggctacctcaaaatggacaaccatcgtattcccagagaaaacatgctgatgaagtatgcccaggtgaagcctgatggcacatacgtgaaaccgctgagtaacaagctgacttacgggaccatggtgtttgtcaggtccttccttgtgggagaagctgctcgggctctgtctaaggcgtgcaccattgccatccgatacagcgctgtgaggcaccagtctgaaatcaagccaggtgaaccagaaccacagattttggattttcaaacccagcagtataaactctttccactcctggccactgcctatgccttccagtttgtgggcgcatacatgaaggagacctatcaccggattaacgaaggcattggtcaaggggacctgagtgaactgcctgagcttcatgccctcaccgctggactgaaggctttcacctcctggactgcaaacactggcattgaagcatgtcggatggcttgtggtgggcatggctattctcattgcagtggtcttccaaatatttatgtcaatttcaccccaagctgtacctttgagggagaaaacactgtcatgatgctccagacggctaggttcctgatgaaaagttatgatcaggtgcactcaggaaagttggtgtgtggcatggtgtcctatttgaacgacctgcccagtcagcgcatccagccacagcaggtagcagtctggccaaccatggtggatatcaacagccccgaaagcctaaccgaagcatataaactccgtgcagccagattagtagaaattgctgcaaaaaaccttcaaaaagaagtgattcacagaaaaagcaaggaggtagcttggaacctaacttctgttgaccttgttcgagcaagtgaggcacattgccactatgtggtagttaagctcttttcagaaaaactcctcaaaattcaagataaagccattcaagctgtcttaaggagtttatgtctgctgtattctctgtatggaatcagtcagaacgcgggggatttccttcaggggagcatcatgacagagcctcagattacacaagtaaaccagcgtgtaaaggagttactcactctgattcgctcagatgctgttgctttggttgatgcatttgattttcaggatgtgacacttggctctgtgcttggccgctatgatgggaatgtgtatgaaaacttgtttgagtgggctaagaactccccactgaacaaagcagaggtccacgaatcttacaagcacctgaagtcactgcagtccaagctctgaagtgtcacaaggacaagtttaatctgcttcagaaagcgcctgtgtgcaactcaaattttgtggaatctttttcgaattcaaatagctatagagcaaatgataaattgacccctttttataaatggagggaaaaaatgaacagatttcagagattaaatgaaaaaaagcagatgttttaagtgcaattaacactgaaagagacctgttaaaccattcag

SEQ ID NO: 104334 - DNA, 2441 bp, Homo sapiens
  Payload ID: 496
  Gene Symbol: ACOX1
  Gene Name: acyl-CoA oxidase 1, palmitoyl
  ENST ID: ENST00000572047
  CDS Start-End: 1-216
atgaacccggacctgcgcagggagcgggattccgccagcttcaacccggagctgcttacacacatcctggacggcagccccgagaaaacccggcgccgccgagagatcggtgagggcggcgggcgagacctccctcctttcccgagaaaagctggagactccctcgatgcggagtcaggggcgctgtggggcctaggccctctggcccagcgttaggggagccgggacccccacttcgaggaacagcctgtgtccctggtggggggatatcgccattccccagagaacatgatcctgaacgacccagacttccagcatgaggacttgaacttcctcactcgcagccagcgttatgaggtggctgtcaggaaaagtgccatcatggtgaagaagatgagggagtttggcatcgctgaccctgatgaaattatgtggtttaaaaattttgtgcaccgagggcggcctgagcctctggatcttcacttgggcatgttcctgcccaccttgcttcaccaggcaactgcggagcagcaggagcgcttcttcatgcccgcctggaacttggagatcattggcacttatgcccagacagagatgggtcatggaactcaccttcgaggcttggaaaccacagccacgtatgaccctgaaacccaggagttcattctcaacagtcctactgtgacctccattaaatggtggcctggtgggcttggaaagacttcaaatcatgcaatagttcttgcccagctcatcactaaggggaaatgctatggattacatgcctttatcgtacctattcgtgaaatcgggacccataagcctttgccaggaattaccgttggtgacatcggccccaaatttggttatgatgagatagacaatggctacctcaaaatggacaaccatcgtattcccagagaaaacatgctgatgaagtatgcccaggtgaagcctgatggcacatacgtgaaaccgctgagtaacaagctgacttacgggaccatggtgtttgtcaggtccttccttgtgggagaagctgctcgggctctgtctaaggcgtgcaccattgccatccgatacagcgctgtgaggcaccagtctgaaatcaagccaggtgaaccagaaccacagattttggattttcaaacccagcagtataaactctttccactcctggccactgcctatgccttccagtttgtgggcgcatacatgaaggagacctatcaccggattaacgaaggcattggtcaaggggacctgagtgaactgcctgagcttcatgccctcaccgctggactgaaggctttcacctcctggactgcaaacactggcattgaagcatgtcggatggcttgtggtgggcatggctattctcattgcagtggtcttccaaatatttatgtcaatttcaccccaagctgtacctttgagggagaaaacactgtcatgatgctccagacggctaggttcctgatgaaaagttatgatcaggtgcactcaggaaagttggtgtgtggcatggtgtcctatttgaacgacctgcccagtcagcgcatccagccacagcaggtagcagtctggccaaccatggtggatatcaacagccccgaaagcctaaccgaagcatataaactccgtgcagccagattagtagaaattgctgcaaaaaaccttcaaaaagaagtgattcacagaaaaagcaaggaggtagcttggaacctaacttctgttgaccttgttcgagcaagtgaggcacattgccactatgtggtagttaagctcttttcagaaaaactcctcaaaattcaagataaagccattcaagctgtcttaaggagtttatgtctgctgtattctctgtatggaatcagtcagaacgcgggggatttccttcaggggagcatcatgacagagcctcagattacacaagtaaaccagcgtgtaaaggagttactcactctgattcgctcagatgctgttgctttggttgatgcatttgattttcaggatgtgacacttggctctgtgcttggccgctatgatgggaatgtgtatgaaaacttgtttgagtgggctaagaactccccactgaacaaagcagaggtccacgaatcttacaagcacctgaagtcactgcagtccaagctctgaagtgtcacaaggacaagtttaatctgcttcagaaagcgcctgtgtgcaactcaaattttgtggaatctttttcgaattcaaatagctatagagcaaatgataaattgacccctttttataaatggagggaaaaaatgaacagatttcagagattaaatgaaaaaaagcagatgttttaagtgcaattaacactgaaagagacctgttaaaccattcagaaaaagcttaagaaatgcgatatgacttccttttgtaatgctgctgatcccagtagactatgactt

SEQ ID NO: 104335 - DNA, 637 bp, Homo sapiens
  Payload ID: 496
  Gene Symbol: ACOX1
  Gene Name: acyl-CoA oxidase 1, palmitoyl
  ENST ID: ENST00000576743
  CDS Start-End: 1-326
agaacatgatcctgaacgacccagacttccagcatgaggacttgaacttcctcactcgcagccagcgttatgaggtggctgtcaggaaaagtgccatcatggtgaagaagatgagggagtttggcatcgctgaccctgatgaaattatgtggtttaaaaaactacatttggtcaattttgtggaacctgtgggcctcaattactccatgtttattcctaccttgctgaatcagggcaccactgctcagaaagagaaatggctgctttcatccaaaggactccagataattggcacctacgcccagacggaaatgggccacggttagtccacattgagggtctgtgggtaacccacctcaggacatcagttaacagtgattgctggcatttgacttttttctgctgctacctgtttgggattctatttttaagttgttaagtcaaaattcaacttcttgttttctcctagacattttccctggaaactggtccagggctctggcctataaacgtcattcactgttatttcctaaagccttttattattgaacagcttgaaaagatggggtttacagtgcagcggggaaccccattatgttactctgggtctaatgagtaaagactttgttggaaattc

SEQ ID NO: 104336 - DNA, 574 bp, Homo sapiens
  Payload ID: 496
  Gene Symbol: ACOX1
  Gene Name: acyl-CoA oxidase 1, palmitoyl
  ENST ID: ENST00000588176
  CDS Start-End: 105-574
gtcctgaggctgcctcctagggtccggccggcgctggagctgcggatttagattgtcactgccacctcggtcggtgcttacttcgctgccagctggtcgtcgccatgaacccggacctgcgcagggagcgggattccgccagcttcaacccggagctgcttacacacatcctggacggcagccccgagaaaacccggcgccgccgagagatcgagaacatgatcctgaacgacccagacttccagcatgaggacttgaacttcctcactcgcagccagcgttatgaggtggctgtcaggaaaagtgccatcatggtgaagaagatgagggagtttggcatcgctgaccctgatgaaattatgtggtttaaaaaactacatttggtcaattttgtggaacctgtgggcctcaattactccatgtttattcctaccttgctgaatcagggcaccactgctcagaaagagaaatggctgctttcatccaaaggactccagataattggcacctacgcccagacggaaatgggccacgttggaaagacttcaaatcatgcaatagttcttgcccagct

SEQ ID NO: 104337 - DNA, 775 bp, Homo sapiens
  Payload ID: 496
  Gene Symbol: ACOX1
  Gene Name: acyl-CoA oxidase 1, palmitoyl
  ENST ID: ENST00000587927
  CDS Start-End: 1-398
cacattgccactatgtggtagttaagctcttttcagaaaaactcctcaaaattcaagataaagccattcaagctgtcttaaggagtttatgtctgctgtattctctgtatggaatcagtcagaacgcgggggatttccttcaggggagcatcatgacagagcctcagattacacaagtaaaccagcgtgtaaaggagttactcactctgattcgctcagatgctgttgctttggttgatgcatttgattttcaggatgtgacacttggctctgtgcttggccgctatgatgggaatgtgtatgaaaacttgtttgagtgggctaagaactccccactgaacaaagcagaggtccacgaatcttacaagcacctgaagtcactgcagtccaagctctgaagtgtcacaaggacaagtttaatctgcttcagaaagcgcctatggagtctcccaggcgggaatgcaatggtgcgatctcgacttcactgcaatcttcacctcccgggttcgagcgattctcccacctcagcctcctgagtagctgggattacaggcacctgccatcacgctcggctaatttttgtattttgagcagagatggagtttcaccatgttggccaggtgatctgcactcccactccccccacacttcccaaagtgctgggattacaggcataagccacaagccacctcacccagccaacatgttacatcttaattcttggattttcttcactgcagggctttgggtggagaaataaaactcttcaaatgca

SEQ ID NO: 104338 - DNA, 550 bp, Homo sapiens
  Payload ID: 496
  Gene Symbol: ACOX1
  Gene Name: acyl-CoA oxidase 1, palmitoyl
  ENST ID: ENST00000589301
  CDS Start-End: 56-271
agattgtcactgccacctcggtcggtgcttacttcgctgccagctggtcgtcgccatgaacccggacctgcgcagggagcgggattccgccagcttcaacccggagctgcttacacacatcctggacggcagccccgagaaaacccggcgccgccgagagatcggtgagggcggcgggcgagacctccctcctttcccgagaaaagctggagactccctcgatgcggagtcaggggcgctgtggggcctaggccctctggcccagcgttaggggagccgggacccccacttcgaggaacagcctgtgtccctggtggggggatatcgccattccccagagaacatgatcctgaacgacccagacttccagcatgaggacttgaacttcctcactcgcagccagcgttatgaggtggctgtcaggaaaagtgccatcatggtgaagaagatgagggagtttggcatcgctgaccctgatgaaattatgtggtttaaaaagaactcaccttcgaggcttggaaaccacagccacgtatgaccctgaaaccca

SEQ ID NO: 104339 - DNA, 706 bp, Homo sapiens
  Payload ID: 496
  Gene Symbol: ACOX1
  Gene Name: acyl-CoA oxidase 1, palmitoyl
  ENST ID: ENST00000588968
  CDS Start-End: 1-461
ggaacctaacttctgttgaccttgttcgagcaagtgaggcacattgccactatgtggtagttaagctcttttcagaaaaactcctcaaaattcaagataaagccattcaagctgtcttaaggagtttatgtctgctgtattctctgtatggaatcagtcagaacgcgggggatttccttcaggggagcatcatgacagagcctcagattacacaagtaaaccagcgtgtaaaggagttactcactctgattcgctcagatgctgttgctttggttgatgcatttgattttcaggatgtgacacttggctctgtgcttggccgctatgatgggaatgtgtatgaaaacttgtttgagtgggctaagaactccccactgaacaaagcagagggctttgggtggagaaataaaactcttcaaatgcatgatcttggagatccctgtgaatcaataattctttagacaactgcggctcaaaatccctcctttcccttttccgagttattccatccatcttattagaaaggaagtgaattaggtgtaggtggtctgtaacacctgcacatctttttatacgtgtagagggtatgcctgggatatataggttgtcttcaagcagtagctgctactacagctagagagaggaggagtgccaggaaactgatgacctgagaccaagagtcttgttgatgttctgacttagataa

SEQ ID NO: 104340 - DNA, 2426 bp, Homo sapiens
  Payload ID: 497
  Gene Symbol: ACOX2
  Gene Name: acyl-CoA oxidase 2, branched chain
  Uniprot ID: Q99424
  ENST ID: ENST00000302819
  CDS Start-End: 293-2338
acaagggcttgagagcagacaagggcttgagagcagacaagggcttgagagctggccaagcagtttctctcagcttctgtgttccagcccctatgtgggaggagagaagggcaggaccacaagcctgccagaggctgcggcctacagccggggagaggccagcccggcctacagtgcggacacaggacagaggggagccaggttctttgcactgaccaatgctgagagcagaccctcggagcagccgggttggaagtgtctctccatagtcaccagacagatccaggataggatgggcagcccagtgcaccgagtgtcattgggggatacctggagcaggcaaatgcaccccgacatagagagcgagaggtatatgcagtcctttgacgtggaacggctcaccaacatccttgatggaggtgcccagaacactgcactccgcaggaaagttgagagcatcatccacagttacccggagtttagctgtaaggacaattatttcatgacccagaatgagcgttataaggctgccatgcggagggcattccacatccggttgatagctcggcgcctgggttggttagaagatggtcgtgaattaggctacgcttacagagccctttctggagacgtggccttaaatatacacagagtcttcgtgagagccctcaggagcctgggctcagaggagcagattgccaaatgggacccactctgcaaaaacatccagatcatcgcaacgtatgcacagacagagttgggacatgggacatatcttcagggcctggagactgaagccacctatgacgcagccacccaggagtttgtgatacacagccccacgctgactgccaccaaatggtggcctggagacttgggacggtcagccacccatgccctggtccaggcccagctgatctgctcaggagccaggcggggcatgcacgcttttattgtgccaatccggagtcttcaggaccacaccccactgccaggaatcatcattggggacatcggacccaagatggactttgatcaaacagacaatggcttcctgcagctgaaccatgtgcgggtccccagggagaacatgctgagtcgctttgcacaggtcttgccagatggcacctacgtcaaactcggtacagcacagagcaactaccttcccatggtggtggtgcgggtggagctgctgtcaggggagatcctccctatactgcagaaggcctgtgtcatcgccatgcgctactcggtcatccgccgccaatcccggctccggcccagtgacccagaggcaaaggtcctggactaccagacacaacagcagaaactctttcctcagctggccatcagttatgccttccatttcctggcagtcagcctcttggagttcttccagcactcctacactgccattctgaaccaagacttcagcttcctgcctgagctccacgcactgagcacgggcatgaaggccatgatgtcagaattctgcacccagggagctgagatgtgccgcagggcctgtggcggacatggctactcaaagctgagtggcctgccatcactggtcaccaaattgtcggcctcctgtacctacgagggtgagaacacagtgctctacctgcaggtggccaggttcctggtgaagagctacctgcagactcagatgtcccctggctccacgccacagagatctctctctccatctgtcgcatatctcaccgcacctgacctggccaggtgtccagcccagagggcagccgacttcctctgcccggagctctacaccacggcctgggcacatgtggcagtaaggctcataaaggactcagtgcagcatttacagaccctgacgcaatccggagctgaccagcacgaggcttggaaccagaccactgtcatacacctccaggctgctaaggtgcactgctactatgtcactgtgaagggttttacagaagctctggagaaactagaaaatgaaccagcgattcagcaggtgctcaagcgcctctgtgacctccatgccatacatggaatcttgactaactcgggtgactttctccatgacgccttcctgtctggtgcccaagtggacatggcaagaacagcctacctggacctgctccgcctgatccggaaggatgccatcctgttaactgatgcttttgacttcaccgatcagtgtttaaattcagcacttggctgttatgatggaaacgtctacgaacgcctgttccagtgggctcagaagtcaccaaccaatactcaggagaaccctgcctatgaggaatatataagaccacttttacaaagttggagatccaagctatgaaataaccaacagtattcaagaagcaaccagcaccatcatgtgataatggtactatggcatatatgcaacattaaaattttaaattaga

SEQ ID NO: 104341 - DNA, 540 bp, Homo sapiens
  Payload ID: 497
  Gene Symbol: ACOX2
  Gene Name: acyl-CoA oxidase 2, branched chain
  ENST ID: ENST00000460921
  CDS Start-End: 1-282
gaagctctggagaaactagaaaatgaaccagcgattcagcaggtgctcaagcgcctctgtgacctccatgccatacatggaatcttgactaactcgggtgactttctccatgacgccttcctgtctggtgcccaagtggacatggcaagaacagcctacctggacctgctccgcctgatccgtgaaatacgatgtaaagccatccaggcaaaagagatgggaaaggtggatagtgtcaatctgaggatcaaagagatggaaggatgccatcctgttaactgatgcttttgacttcaccgatcagtgtttaaattcagcacttggctgttatgatggaaacgtctacgaacgcctgttccagtgggctcagaagtcaccaaccaatactcaggagaaccctgcctatgaggaatatataagaccacttttacaaagttggagatccaagctatgaaataaccaacagtattcaagaagcaaccagcaccatcatgtgataatggtactatggcatatatgcaacattaaaattttaaatta

SEQ ID NO: 104342 - DNA, 869 bp, Homo sapiens
  Payload ID: 497
  Gene Symbol: ACOX2
  Gene Name: acyl-CoA oxidase 2, branched chain
  ENST ID: ENST00000489472
  CDS Start-End: 1-324
gggacatatcttcagggcctggagactgaagccacctatgacgcagccacccaggagtttgtgatacacagccccacgctgactgccaccaaatggtggcctggagacttgggacggtcagccacccatgccctggtccaggcccagctgatctgctcaggagccaggcggggcatgcacgcttttattgtgccaatccggagtcttcaggaccacaccccactgccaggtgtcctcatctccatctccttcaaggaatcatcattggggacatcggacccaagatggactttgatcaaacagacaatggcttcctgcagctgaaccatgtgcgggtccccagggagaacatgctgagtcgctttgcacagtgacccagaggcaaaggtcctggactaccagacacaacagcagaaactctttcctcagctggccatcagttatgccttccatttcctggcagtcagcctcttggagttcttccagcactcctacactgccattctgaaccaagacttcagcttcctgcctgagctccacgcactgagcacgggcatgaaggccatgatgtcagaattctgcacccagggagctgagatgtgccgcagggcctgtggcggacatggctactcaaagctgagtggcctgccatcactggtcaccaaattgtcggcctcctgtacctacgagggtgagaacacagtgctctacctgcaggtggccaggttcctggtgaagagctacctgcagactcagatgtcccctggctccacgccacagagatctctctctccatctgtcgcatatctcaccgcacctgacctggccaggtgtccagcccagagggcagccgacttcctctgcccgga

SEQ ID NO: 104343 - DNA, 2348 bp, Homo sapiens
  Payload ID: 497
  Gene Symbol: ACOX2
  Gene Name: acyl-CoA oxidase 2, branched chain
  ENST ID: ENST00000459701
  CDS Start-End: 257-2260
acaagggcttgagagctggccaagcagtttctctcagcttctgtgttccagcccctatgtgggaggagagaagggcaggaccacaagcctgccagaggctgcggcctacagccggggagaggccagcccggcctacagtgcggacacaggacagaggggagccaggttctttgcactgaccaatgctgagagcagaccctcggagcagccgggttggaagtgtctctccatagtcaccagacagatccaggataggatgggcagcccagtgcaccgagtgtcattgggggatacctggagcaggcaaatgcaccccgacatagagagcgagaggtatatgcagtcctttgacgtggaacggctcaccaacatccttgatggaggtgcccagaacactgcactccgcaggaaagttgagagcatcatccacagttacccggagtttagctgtaaggacaattatttcatgacccagaatgagcgttataaggctgccatgcggagggcattccacatccggttgatagctcggcgcctgggttggttagaagatggtcgtgaattaggctacgcttacagagccctttctggagacgtggccttaaatatacacagagtcttcgtgagagccctcaggagcctgggctcagaggagcagattgccaaatgggacccactctgcaaaaacatccagatcatcgcaacgtatgcacagacagagttgggacatgggacatatcttcagggcctggagactgaagccacctatgacgcagccacccaggagtttgtgatacacagccccacgctgactgccaccaaatggtggcctggagacttgggacggtcagccacccatgccctggtccaggcccagctgatctgctcaggagccaggcggggcatgcacgcttttattgtgccaatccggagtcttcaggaccacaccccactgccaggaatcatcattggggacatcggacccaagatggactttgatcaaacagacaatggcttcctgcagctgaaccatgtcttgccagatggcacctacgtcaaactcggtacagcacagagcaactaccttcccatggtggtggtgcgggtggagctgctgtcaggggagatcctccctatactgcagaaggcctgtgtcatcgccatgcgctactcggtcatccgccgccaatcccggctccggcccagtgacccagaggcaaaggtcctggactaccagacacaacagcagaaactctttcctcagctggccatcagttatgccttccatttcctggcagtcagcctcttggagttcttccagcactcctacactgccattctgaaccaagacttcagcttcctgcctgagctccacgcactgagcacgggcatgaaggccatgatgtcagaattctgcacccagggagctgagatgtgccgcagggcctgtggcggacatggctactcaaagctgagtggcctgccatcactggtcaccaaattgtcggcctcctgtacctacgagggtgagaacacagtgctctacctgcaggtggccaggttcctggtgaagagctacctgcagactcagatgtcccctggctccacgccacagagatctctctctccatctgtcgcatatctcaccgcacctgacctggccaggtgtccagcccagagggcagccgacttcctctgcccggagctctacaccacggcctgggcacatgtggcagtaaggctcataaaggactcagtgcagcatttacagaccctgacgcaatccggagctgaccagcacgaggcttggaaccagaccactgtcatacacctccaggctgctaaggtgcactgctactatgtcactgtgaagggttttacagaagctctggagaaactagaaaatgaaccagcgattcagcaggtgctcaagcgcctctgtgacctccatgccatacatggaatcttgactaactcgggtgactttctccatgacgccttcctgtctggtgcccaagtggacatggcaagaacagcctacctggacctgctccgcctgatccggaaggatgccatcctgttaactgatgcttttgacttcaccgatcagtgtttaaattcagcacttggctgttatgatggaaacgtctacgaacgcctgttccagtgggctcagaagtcaccaaccaatactcaggagaaccctgcctatgaggaatatataagaccacttttacaaagttggagatccaagctatgaaataaccaacagtattcaagaagcaaccagcaccatcatgtgataatggtactatggcatatatgcaacattaaaattttaaattaga

SEQ ID NO: 104344 - DNA, 578 bp, Homo sapiens
  Payload ID: 497
  Gene Symbol: ACOX2
  Gene Name: acyl-CoA oxidase 2, branched chain
  ENST ID: ENST00000492530
  CDS Start-End: 1-41
gtgcccagaacactgcactccgcaggaaagttgatccatgaagcaagtgggtgagaagatttcaaggtgccagaaacctcacccaggtccctaagccctctgttctctgtcctctgcagagagcatcatccacagttacccggagtttagctagccctttctggagacgtggccttaaatatacacagagtcttcgtgagagccctcaggagcctgggctcagaggagcagattgccaaatgggacccactctgcaaaaacatccagatcatcgcaacgtatgcacagacagagttgggacatgggacatatcttcagggcctggagactgaagccacctatgacgcagccacccaggagtttgtgatacacagccccacgctgactgccaccaaatggtggcctggagacttgggacggtcagccacccatgccctggtccaggcccagctgatctgctcaggagccaggcggggcatgcacgcttttattgtgccaatccggagtcttcaggaccacaccccactgccaggaatcatcattggggacatcggacccaagatggactttgatcaaac

SEQ ID NO: 104345 - DNA, 708 bp, Homo sapiens
  Payload ID: 497
  Gene Symbol: ACOX2
  Gene Name: acyl-CoA oxidase 2, branched chain
  ENST ID: ENST00000474098
  CDS Start-End: 195-708
ctacagccggggagaggccagcccggcctacagtgcggacacaggacagaggggagccagccctggctgacacccagccctaggcagttcctcttgcacacaggttctttgcactgaccaatgctgagagcagaccctcggagcagccgggttggaagtgtctctccatagtcaccagacagatccaggataggatgggcagcccagtgcaccgagtgtcattgggggatacctggagcaggcaaatgcaccccgacatagagagcgagaggtatatgcagtcctttgacgtggaacggctcaccaacatccttgatggaggtgcccagaacactgcactccgcaggaaagttgagagcatcatccacagttacccggagtttagctgtaaggacaattatttcatgacccagaatgagcgttataaggctgccatgcggagggcattccacatccggttgatagctcggcgcctgggttggttagaagatggtcgtgaattaggctacgcttacagagccctttctggagacgtggccttaaatatacacagagtcttcgtgagagccctcaggagcctgggctcagaggagcagattgccaaatgggacccactctgcaaaaacatccagatcatcgcaacgtatgcacagacagagttgggacatgggacatatcttcagggcctggagactgaagccacctatg

SEQ ID NO: 104346 - DNA, 2860 bp, Homo sapiens
  Payload ID: 498
  Gene Symbol: ACOX3
  Gene Name: acyl-CoA oxidase 3, pristanoyl
  Uniprot ID: O15254
  ENST ID: ENST00000356406
  CDS Start-End: 79-2181
cgccgctggagatcctttcctgcttttggtttccctggcaggggttgaactgtggagtgtgtgggctcttatcacgcgatggcatccactgtggaaggaggcgacacagctctgctcccagaattccccagggggcccctcgatgcctaccgagcaagagcgtccttcagctggaaggagctggcgctgttcacggaaggggagggcatgctccgctttaagaaaaccatcttctcagctcttgagaatgaccctcttttcgctcgttcccctggagccgatctgtccttggagaagtatcgcgagctgaacttccttcgatgcaagcggatcttcgagtatgacttcctcagtgtcgaagacatgttcaagagccctctgaaggtccccgccttgattcagtgcctgggcatgtatgactcttctctggctgccaagtacctcctccatagcttggtttttggatcagcagtttacagttctggttctgaaagacatctcacatatattcaaaagatcttcaggatggagatttttggatgttttgctctgaccgaattaagccacggcagtaataccaaggccattcgcacaactgcccactacgatcctgccactgaggaattcatcatacattcccctgatttcgaagctgccaagttttgggttggcaacatgggcaagacagccactcacgcggtggtgtttgctaagctgtgtgtgccaggggaccagtgccatgggctgcatccctttatcgtgcagatccgggacccgaagacccttcttcccatgcctggagtgatggttggcgacataggaaaaaaactcgggcagaacggtctggataatggtttcgccatgttccacaaggtcagagttcctcgccagagccttctgaaccggatgggagacgtcacccccgagggcacctatgtcagcccctttaaggacgtcaggcagcgctttggagcgtccctggggagcctgtcctcgggccgggtctccatcgtgagcctggccatccttaacctaaagctggccgtggccatcgctcttcgcttctcagccactcggcgtcagtttggacccacagaggaggaggaaataccagtgcttgagtatccaatgcagcaatggcgcttgcttccatatctggcagctgtctacgccttagaccatttctccaagtcgctcttcctggacctggtggagctccagcgaggacttgcatcgggagaccgcagcgccagacaggcagagcttggacgtgagatccacgccctggcatcggccagcaagcccctggcctcgtggaccacccagcaaggaattcaggaatgccgggaggcgtgtggaggacacggctatctggccatgaaccggttgggtgtccttagagatgacaacgatcccaactgcacatacgaaggtgacaacaacatcctgctgcagcagacaagcaactatttgctgggtctcctggcacaccaggtccacgatggagcttgcttccgcagtccgctgaagtcagtggactttctggacgcctatcccggcatccttgaccagaagtttgaggtctccagtgttgccgactgcttggactctgcagtcgccctggcagcatacaagtggctggtttgctacctgctccgagagacttatcaaaaattaaaccaagagaaaagatcaggaagcagtgactttgaagcaaggaacaaatgccaggtgtcccacggccgtccgttggcgctggccttcgtggagctcacggtggtccagaggttccacgagcacgtgcaccagccttccgtgccgccctcgctgcgggccgtgctggggcggctcagtgctctgtacgccctgtggtccctgagccgccacgcggccctgctctaccgaggaggatacttctccggtgagcaggcgggagaagtgttggagagcgccgtcctggctttgtgttcccagctgaaagacgatgcagttgccctggtagacgtgatcgctcctcctgactttgttctggactcaccgattggcagagccgacggcgagctctacaaaaacctctggggcgctgtcctgcaggaaagcaaggtgttggagcgggcatcctggtggccagagttttctgtgaacaaacctgtcataggaagtctgaaatcgaagctctagtgggactggcacacattcagccaagtctaatgaaacgaagggaactaatcagacgtggacctcaacttctgattccagaacacgccggagattgctgctgctttctgagcccgcacctgtgcgcctaaactgctgattggcctcaactgcccaggcggacgggagggaggcacccggccggctggactaatctgggatcgcggtgatttgcagcgtggaaaagaaatgcagatgatcatgtctacctgatgcgccgtgggttttttgataattagaatttcgcacattcagttttcagggttcagctcctttctctaaagtaaacagcccattgtcagggatcttctggtcagacaacctgtgattcatctagattttttaccgagctccacttcattgagaagtcaatgatgccagtctggttctttgtcaactctccctcggctttgtcacataattgaattatgtcataaccttattaatttgcacatagatcatctgaatgtcgtggtttaagacttaaggaggaacatctgtttgattactttcttttgtggaactggaaatttccatcgaggaaatgtttttttaaaaagtctaatgatttgaatgggcaattcagtctccaaccgcccccctccccctgccgccagttatatacaaatcactttattggtaa

SEQ ID NO: 104347 - DNA, 2374 bp, Homo sapiens
  Payload ID: 498
  Gene Symbol: ACOX3
  Gene Name: acyl-CoA oxidase 3, pristanoyl
  Uniprot ID: O15254
  ENST ID: ENST00000413009
  CDS Start-End: 91-1965
aaatgagaatggcgccgctggagatcctttcctgcttttggtttccctggcaggggttgaactgtggagtgtgtgggctcttatcacgcgatggcatccactgtggaaggaggcgacacagctctgctcccagaattccccagggggcccctcgatgcctaccgagcaagagcgtccttcagctggaaggagctggcgctgttcacggaaggggagggcatgctccgctttaagaaaaccatcttctcagctcttgagaatgaccctcttttcgctcgttcccctggagccgatctgtccttggagaagtatcgcgagctgaacttccttcgatgcaagcggatcttcgagtatgacttcctcagtgtcgaagacatgttcaagagccctctgaaggtccccgccttgattcagtgcctgggcatgtatgactcttctctggctgccaagtacctcctccatagcttggtttttggatcagcagtttacagttctggttctgaaagacatctcacatatattcaaaagatcttcaggatggagatttttggatgttttgctctgaccgaattaagccacggcagtaataccaaggccattcgcacaactgcccactacgatcctgccactgaggaattcatcatacattcccctgatttcgaagctgccaagttttgggttggcaacatgggcaagacagccactcacgcggtggtgtttgctaagctgtgtgtgccaggggaccagtgccatgggctgcatccctttatcgtgcagatccgggacccgaagacccttcttcccatgcctggagtgatggttggcgacataggaaaaaaactcgggcagaacggtctggataatggtttcgccatgttccacaaggtcagagttcctcgccagagccttctgaaccggatgggagacgtcacccccgagggcacctatgtcagcccctttaaggacgtcaggcagcgctttggagcgtccctggggagcctgtcctcgggccgggtctccatcgtgagcctggccatccttaacctaaagctggccgtggccatcgctcttcgcttctcagccactcggcgtcagtttggacccacagaggaggaggaaataccagtgcttgagtatccaatgcagcaatggcgcttgcttccatatctggcagctgtctacgccttagaccatttctccaagtcgctcttcctggacctggtggagctccagcgaggacttgcatcgggagaccgcagcgccagacaggcagagcttggacgtgagatccacgccctggcatcggccagcaagcccctggcctcgtggaccacccagcaaggaattcaggaatgccgggaggcgtgtggaggacacggctatctggccatgaaccggttgggtgtccttagagatgacaacgatcccaactgcacatacgaaggtgacaacaacatcctgctgcagcagacaagcaactatttgctgggtctcctggcacaccaggtccacgatggagcttgcttccgcagtccgctgaagtcagtggactttctggacgcctatcccggcatccttgaccagaagtttgaggtctccagtgttgccgactgcttggactctgcagtcgccctggcagcatacaagtggctggtttgctacctgctccgagagacttatcaaaaattaaaccaagagaaaagatcaggaagcagtgactttgaagcaaggaacaaatgccaggtgtcccacggccgtccgttggcgctggccttcgtggagctcacggtggtccagaggttccacgagcacgtgcaccagccttccgtgccgccctcgctgcgggccgtgctggggcggctcagtgctctgtacgccctgtggtccctgagccgccacgcggccctgctctaccgagctgaaagacgatgcagttgccctggtagacgtgatcgctcctcctgactttgttctggactcaccgattggcagagccgacggcgagctctacaaaaacctctggggcgctgtcctgcaggaaagcaaggtgttggagcgggcatcctggtggccagagttttctgtgaacaaacctgtcataggaagtctgaaatcgaagctctagtgggactggcacacattcagccaagtctaatgaaacgaagggaactaatcagacgtggacctcaacttctgattccagaacacgccggagattgctgctgctttctgagcccgcacctgtgcgcctaaactgctgattggcctcaactgcccaggcggacgggagggaggcacccggccggctggactaatctgggatcgcggtgatttgcagcgtggaaaagaaatgcagatgatcatgtctacctga

SEQ ID NO: 104348 - DNA, 2253 bp, Homo sapiens
  Payload ID: 498
  Gene Symbol: ACOX3
  Gene Name: acyl-CoA oxidase 3, pristanoyl
  Uniprot ID: O15254
  ENST ID: ENST00000503233
  CDS Start-End: 151-2253
atgggacggacggaggccgagaggcgtggcgggggagcagtggggccaggccagagacagctgcgctgtgcgggcagctagtcccagtactccgagtcggtcgcgggccgacaggcatcccctgagcgcctgctgggctcttatcacgcgatggcatccactgtggaaggaggcgacacagctctgctcccagaattccccagggggcccctcgatgcctaccgagcaagagcgtccttcagctggaaggagctggcgctgttcacggaaggggagggcatgctccgctttaagaaaaccatcttctcagctcttgagaatgaccctcttttcgctcgttcccctggagccgatctgtccttggagaagtatcgcgagctgaacttccttcgatgcaagcggatcttcgagtatgacttcctcagtgtcgaagacatgttcaagagccctctgaaggtccccgccttgattcagtgcctgggcatgtatgactcttctctggctgccaagtacctcctccatagcttggtttttggatcagcagtttacagttctggttctgaaagacatctcacatatattcaaaagatcttcaggatggagatttttggatgttttgctctgaccgaattaagccacggcagtaataccaaggccattcgcacaactgcccactacgatcctgccactgaggaattcatcatacattcccctgatttcgaagctgccaagttttgggttggcaacatgggcaagacagccactcacgcggtggtgtttgctaagctgtgtgtgccaggggaccagtgccatgggctgcatccctttatcgtgcagatccgggacccgaagacccttcttcccatgcctggagtgatggttggcgacataggaaaaaaactcgggcagaacggtctggataatggtttcgccatgttccacaaggtcagagttcctcgccagagccttctgaaccggatgggagacgtcacccccgagggcacctatgtcagcccctttaaggacgtcaggcagcgctttggagcgtccctggggagcctgtcctcgggccgggtctccatcgtgagcctggccatccttaacctaaagctggccgtggccatcgctcttcgcttctcagccactcggcgtcagtttggacccacagaggaggaggaaataccagtgcttgagtatccaatgcagcaatggcgcttgcttccatatctggcagctgtctacgccttagaccatttctccaagtcgctcttcctggacctggtggagctccagcgaggacttgcatcgggagaccgcagcgccagacaggcagagcttggacgtgagatccacgccctggcatcggccagcaagcccctggcctcgtggaccacccagcaaggaattcaggaatgccgggaggcgtgtggaggacacggctatctggccatgaaccggttgggtgtccttagagatgacaacgatcccaactgcacatacgaaggtgacaacaacatcctgctgcagcagacaagcaactatttgctgggtctcctggcacaccaggtccacgatggagcttgcttccgcagtccgctgaagtcagtggactttctggacgcctatcccggcatccttgaccagaagtttgaggtctccagtgttgccgactgcttggactctgcagtcgccctggcagcatacaagtggctggtttgctacctgctccgagagacttatcaaaaattaaaccaagagaaaagatcaggaagcagtgactttgaagcaaggaacaaatgccaggtgtcccacggccgtccgttggcgctggccttcgtggagctcacggtggtccagaggttccacgagcacgtgcaccagccttccgtgccgccctcgctgcgggccgtgctggggcggctcagtgctctgtacgccctgtggtccctgagccgccacgcggccctgctctaccgaggaggatacttctccggtgagcaggcgggagaagtgttggagagcgccgtcctggctttgtgttcccagctgaaagacgatgcagttgccctggtagacgtgatcgctcctcctgactttgttctggactcaccgattggcagagccgacggcgagctctacaaaaacctctggggcgctgtcctgcaggaaagcaaggtgttggagcgggcatcctggtggccagagttttctgtgaacaaacctgtcataggaagtctgaaatcgaagctctag

SEQ ID NO: 104349 - DNA, 584 bp, Homo sapiens
  Payload ID: 498
  Gene Symbol: ACOX3
  Gene Name: acyl-CoA oxidase 3, pristanoyl
  ENST ID: ENST00000514423
  CDS Start-End: 253-584
gtggcgggggagcagtggggccaggccagagacagctgcgctgtgcgggcagctagtcccagtactccgagtcggtcgcgggccgacaggcatcccctgagcgcctgctggaaaaccatcttctcagctcttgagaatgaccctcttttcgctcgttcccctggagccgatctgtccttggagaagtatcgcgagctgaacttccttcgatgcaagcggatcttcgagtatgacttcctcagtgtcgaagacatgttcaagagccctctgaaggtccccgccttgattcagtgcctgggcatgtatgactcttctctggctgccaagtacctcctccatagcttggtttttggatcagcagtttacagttctggttctgaaagacatctcacatatattcaaaagatcttcaggatggagatttttggatgttttgctctgaccgaattaagccacggcagtaataccaaggccattcgcacaactgcccactacgatcctgccactgaggaattcatcatacattcccctgatttcgaagctgccaagttttgggttggcaacatgggcaagacagccactca

SEQ ID NO: 104350 - DNA, 2188 bp, Homo sapiens
  Payload ID: 499
  Gene Symbol: ACOXL
  Gene Name: acyl-CoA oxidase-like
  Uniprot ID: Q9NUZ1
  ENST ID: ENST00000340561
  CDS Start-End: 164-1003
agaggcaggtgagcgcgatgcagccggcgccgggtctggggctcggggactcctccctgcaccgctacctggacggcgacttctggagcctcaagaacgagctgcgcggactcctcggcggcgcccgctcttccggcaaaggtatgatttaagcttggatgaaatgagagctttgacagttcagagagtgaagtttgccatggacctgcctctgttaaaacgtgcaggtcaggatctggcagagaaaacaaagaattttgtcagccgaagccttgtcataggagaagtcctctccatggcggacatggccacaggagtgaagtgcggaataatttattggctatttggtggtgctatcaggaatctcggaagccctgaacatgttactaagtggtttcagccactccaggagcagaaatacactgggatgtttgcaatgaccgagaggggccatgggagcaacgcgagagggatccagaccgaagccacctttgacctctctgcccaggagtttgtaattgacacgccgtgtgaaaatgcggagaagatgtatattggaaatgccatgtacgggaattatgcagctgtctttgcccagctcatcatagatggaagatctcaagggccccactgtttcatcgttcctgtccgggatgaaaacggaagcttgtacccaggagtcacagctattgatatgatgtacaaggagggtctgcatggtgtggacaatgggatattaatatttgacaaggttcggatacccagggagaacctgctggataagtttggttccgtggctccagatggacagtaccattcgcctattaggaacaagagtgcaagattcaatgccatgctggcagcactgaccccttcgagattagctgtggctttccaagctatgggtgccatgaagcttgggttgacgatagccattcgctatagccacaggtccagaatcatctcccagaactgctgttcagctccagctggtctttattgagcccctcttgtggaccaggctaatttcctgaaaactggtttttgctaacgtttcttacgcttgctcgtgaaatcagccacttaactgttctgggttttcccgtggcagatccctataggcttctcactgcactatcccaaactttttatctgagaatgttgtgtggcaagatgtctgcagagtgccgcttaggagatgctggcctggcgtccacgggtctgctgtgtatgtctctccaggcagatggcctgtctctgcctggcaaggacgatctggggtggaaaaactctgatctgaaagtgaaatcattgactccgttaccatgttctgaattcccagatctccctgatatggaaagtgaaaattggcttctattacacaatgcatcaaaattcttttgtataggaccagaccactgatatcaagggcagtgcactgactttcagttcctctgcatcccttggtcatgttcccacctttcaatgggaacagagaataaaaattccagctctagggcccagcctagtggccacctctcacggacaggcacccggctgctcagtgttatccaattactagaggccattcctagcatttcaacttggggaattaatttactattactttatttttatctttagagacagagtcttgctctgtcacccagactagagtgtagtggcatgatcatagctcactgcagccttgaactcctgagctcaggcaatcctcctgccacagccacctgagtagctggaactataggcatgtgccatcatgcccaactaattttatttttatttcagttgtagagatggagccttaccctgttgcccaggctggtctctgactcctggtctctagtgatcctcctgccttggcctcccaaagtgctaggattataggtgtgagccaacatgctgtccccattattgactgttaccctaaagtgtgtgttgcctttctagtttgagtagaaagtccagcattatctttttggataatatccaggttttgctgtttctttctttatttttcataatgagaacatttgctctcttgctgacattggagggcgtctgtttacctctcctgtaggcacacaaaattcccaacgtttatttgaagaaaaagacaattatttgagtaatttgaataaataaacattttaagtgattcccaaaa

SEQ ID NO: 104351 - DNA, 2714 bp, Homo sapiens
  Payload ID: 499
  Gene Symbol: ACOXL
  Gene Name: acyl-CoA oxidase-like
  Uniprot ID: Q9NUZ1
  ENST ID: ENST00000389811
  CDS Start-End: 225-1868
acctgctgggagctggaggaggcgcggagcgaagccggccctgccagccacgcggagaagcagaggcaggtgagcgcgatgcagccggcgccgggtctggggctcggggactcctccctgcaccgctacctggacggcgacttctggagcctcaagaacgagctgcgcggactcctcggcggcgcccgctcttccggcaaaggtatgatttaagcttggatgaaatgagagctttgacagttcagagagtgaagtttgccatggacctgcctctgttaaaacgtgcaggtcaggatctggcagagaaaacaaagaattttgtcagccgaagccttgtcataggagaagtcctctccatggcggacatggccacaggagtgaagtgcggaataatttattggctatttggtggtgctatcaggaatctcggaagccctgaacatgttactaagtggtttcagccactccaggagcagaaatacactgggatgtttgcaatgaccgagaggggccatgggagcaacgcgagagggatccagaccgaagccacctttgacctctctgcccaggagtttgtaattgacacgccgtgtgaaaatgcggagaagatgtatattggaaatgccatgtacgggaattatgcagctgtctttgcccagctcatcatagatggaagatctcaagggccccactgtttcatcgttcctgtccgggatgaaaacggaagcttgtacccaggagtcacagctattgatatgatgtacaaggagggtctgcatggtgtggacaatgggatattaatatttgacaaggttcggatacccagggagaacctgctggataagtttggttccgtggctccagatggacagtaccattcgcctattaggaacaagagtgcaagattcaatgccatgctggcagcactgaccccttcgagattagctgtggctttccaagctatgggtgccatgaagcttgggttgacgatagccattcgctatagccacagccggaggcagtttgggcccaaaaccaaggaagaggtgaagatcattgagcaccaaacacagaccctgcggctgatgccccacctggccacagccttggccctgaccttcgtcagcaggtatgctggggccctcctggatgaggatgtcttccagggaaaggagctggtcaacagtcgctcgctgcaggctctggtggcggggctgaaggcctacagcacctgggagaacatccgctgcctgcaggactgccgcgagtgcactggaggcatgggttacatgatggaaaatcgaatctcaggcttaaagtgtgacacagatgtgtttgccacttttgaaggtgacgatgttgttatgcttcaggttgtggggcgggaactgctggcccaatacaccaaacagtatgaagaaaaaccactctttggcctgctccaaaactgggctgaatctgtgggggacaagctgagaaccagtttcctggcatttaacatggacacagttgatgatctcgcctttctgttgaaagcagtgaaatttcgtgaaagggttcttcagcggggtttggtggccagaatttattataaggtaaagaccaagaaggaggattttttccatgcctggaactcgtgtctgcaccacgtggcttctctgtccctggcacacactcaccgagttaccttagagcagttctccctagcagtgaagagctgtcctgaccaagaggaccagactttgttaatgaagttttgtctgttgtatggaaccaagctggtgtttcaggagcgggcctggtatttagaacataaatacttgactcccatggccagcacgaggatcaggaatcaggagagatgctgaaacacaaacaggtataagactcagtctccacatgaagggagctcatatccaaggacacaaaaccactttaaaaacataaatactggccaggtgcagtggctcatgcctgtaatcccagcactatgggaggctgaggcgggcagatctcctgagctcaggagttcgacaccatcttgggcaacatggtgaaaccctgtctactaaaatacaaaaaaattagctgggcgtggtggcatgtggctgtagtcccagctactcgggaggctgaggcacgagaatcgcttgagccctggagttggaggttgcagtgagcagagattgcgccactgtactccagtttggactacagagtgagactccatctcaaaacaaaacaaaacaacaacagcaaaaaacaacaaaacaaaacacaaatactctcacagggcatggaggttttcgaatgaacttggccataagaataaattcagagttgacagaacagacgtcttaggaataaatgccattcttatgctagaccttgaagagtagaaaattaagagatggtggcccaattgagaggggaaaatgcagttgaaacttcagacagggttgataaagtgaggacgatcatagacatggagtacttagacatattaataaacaataaagactttacctgtctaatggaaaacctggagaagtcgtcaggaaccagactacagtggaccctggagaaccttgaagaacatttttccttttcaggaaaacggaggttacagagaaaagtatatgtaatgatgctacagtaatgtatttctgtataacaaatgactccaaacttacgacttaaaacaaccaccactt

SEQ ID NO: 104352 - DNA, 1793 bp, Homo sapiens
  Payload ID: 499
  Gene Symbol: ACOXL
  Gene Name: acyl-CoA oxidase-like
  ENST ID: ENST00000417074
  CDS Start-End: 1-1068
cgggatgaaaacggaagcttgtacccaggagtcacagctattgatatgatgtacaaggagggtctgcatggtgtggacaatgggatattaatatttgacaaggttcggatacccagggagaacctgctggataagtttggttccgtggctccagatggacagtaccattcgcctattaggaacaagagtgcaagattcaatgccatgctggcagcactgaccccttcgagattagctgtggctttccaagctatgggtgccatgaagcttgggttgacgatagccattcgctatagccacagccggaggcagtttgggcccaaaaccaaggaagaggtgaagatcattgagcaccaaacacagaccctgcggctgatgccccacctggccacagccttggccctgaccttcgtcagcaggtatgctggggccctcctggatgaggatgtcttccagggaaaggagctggtcaacagtcgctcgctgcaggctctggtggcggggctgaaggcctacagcacctgggagaacatccgctgcctgcaggactgccgcgagtgcactggaggcatggttgtggggcgggaactgctggcccaatacaccaaacagtatgaagaaaaaccactctttggcctgctccaaaactgggctgaatctgtgggggacaagctgagaaccagtttcctggcatttaacatggacacagttgatgatctcgcctttctgttgaaagcagtgaaatttcgtgaaagggttcttcagcggggtttggtggccagaatttattataaggtaaagaccaagaaggaggattttttccatgcctggaactcgtgtctgcaccacgtggcttctctgtccctggcacacactcaccgagttaccttagagcagttctccctagcagtgaagagctgtcctgaccaagaggaccagactttgttaatgaagttttgtctgttgtatggaaccaagctggtgtttcaggagcgggcctggtatttagaacataaatacttgactcccatggccagcacgaggatcaggaatcaggagagatgctgaaacacaaacaggtataagactcagtctccacatgaagggagctcatatccaaggacacaaaaccactttaaaaacataaatactggccaggtgcagtggctcatgcctgtaatcccagcactatgggaggctgaggcgggcagatctcctgagctcaggagttcgacaccatcttgggcaacatggtgaaaccctgtctactaaaatacaaaaaaattagctgggcgtggtggcatgtggctgtagtcccagctactcgggaggctgaggcacgagaatcgcttgagccctggagttggaggttgcagtgagcagagattgcgccactgtactccagtttggactacagagtgagactccatctcaaaacaaaacaaaacaacaacagcaaaaaacaacaaaacaaaacacaaatactctcacagggcatggaggttttcgaatgaacttggccataagaataaattcagagttgacagaacagacgtcttaggaataaatgccattcttatgctagaccttgaagagtagaaaattaagagatggtggcccaattgagaggggaaaatgcagttgaaacttcagacagggttgataaagtgaggacgatcatagacatggagtacttagacatattaataaacaataaagactttacctgtctaatggaaaacctggagaagtcgtcaggaaccagactacagtggaccctggagaaccttgaa

SEQ ID NO: 104353 - DNA, 399 bp, Homo sapiens
  Payload ID: 499
  Gene Symbol: ACOXL
  Gene Name: acyl-CoA oxidase-like
  ENST ID: ENST00000441974
  CDS Start-End: 1-282
ggggacaagctgagaaccagtttcctggcatttaacatggacacagttgatgatctcgcctttctgttgaaagcagtgaaatttcgtgaaagggttcttcagcggggtttggtggccagaatttattataaggtaaagaccaagaaggaggattttttccatgcctggaactcgtgtctgcaccacgtggcttctctgtccctggcacacactcaccgagttttgtctgttgtatggaaccaagctggtgtttcaggagcgggcctggtatttagaacataaatacttgactcccatggccagcacgaggatcaggaatcagttgctggatttgtgcgactcggtgaaggatgatgcccggagggtgatctcgacctttaacattccacacacctacct

SEQ ID NO: 104354 - DNA, 486 bp, Homo sapiens
  Payload ID: 499
  Gene Symbol: ACOXL
  Gene Name: acyl-CoA oxidase-like
  ENST ID: ENST00000448863
  CDS Start-End: 277-486
ggacaacgccctggcgagggcgaggtggggtgtgcgccgcgcctgagaggcgggtccctgcctcgccgcaggtgacgggctcccctccccaggtgtgtgggcgcagccggccgccgccgacctcttcggccccctgagaggtgccctctcctcccgagctccctcccccacgaagagtcgggtgcagggctgggccccgcggtgacaggcgcggtgtctacgaagaccgtgtggctggaagatcggccttgctggtatgatttaagcttggatgaaatgagagctttgacagttcagagagtgaagtttgccatggacctgcctctgttaaaacgtgcaggtcaggatctggcagagaaaacaaagaattttgtcagccgaagccttgtcataggagaagtcctctccatggcggacatggccacaggagtgaagtgcggaataatttattggctatttggtggtgctatcaggaatctcggaagc

SEQ ID NO: 104355 - DNA, 483 bp, Homo sapiens
  Payload ID: 499
  Gene Symbol: ACOXL
  Gene Name: acyl-CoA oxidase-like
  ENST ID: ENST00000433706
  CDS Start-End: 1-483
caagattcaatgccatgctggcagcactgaccccttcgagattagctgtggctttccaagctatgggtgccatgaagcttgggttgacgatagccattcgctatagccacaggtatgctggggccctcctggatgaggatgtcttccagggaaaggagctggtcaacagtcgctcgctgcaggctctggtggcggggctgaaggcctacagcacctgggagaacatccgctgcctgcaggactgccgcgagtgcactggaggcatgggttacatgatggaaaatcgaatctcaggcttaaagtgtgacacagatgtgtttgccacttttgaaggtgacgatgttgttatgcttcaggttgtggggcgggaactgctggcccaatacaccaaacagtatgaagaaaaaccactctttggcctgctccaaaactgggctgaatctgtgggggacaagctgagaaccagtttcctggcatttaaca

SEQ ID NO: 104356 - DNA, 2373 bp, Homo sapiens
  Payload ID: 499
  Gene Symbol: ACOXL
  Gene Name: acyl-CoA oxidase-like
  Uniprot ID: Q9NUZ1
  ENST ID: ENST00000439055
  CDS Start-End: 225-1967
acctgctgggagctggaggaggcgcggagcgaagccggccctgccagccacgcggagaagcagaggcaggtgagcgcgatgcagccggcgccgggtctggggctcggggactcctccctgcaccgctacctggacggcgacttctggagcctcaagaacgagctgcgcggactcctcggcggcgcccgctcttccggcaaaggtatgatttaagcttggatgaaatgagagctttgacagttcagagagtgaagtttgccatggacctgcctctgttaaaacgtgcaggtcaggatctggcagagaaaacaaagaattttgtcagccgaagccttgtcataggagaagtcctctccatggcggacatggccacaggagtgaagtgcggaataatttattggctatttggtggtgctatcaggaatctcggaagccctgaacatgttactaagtggtttcagccactccaggagcagaaatacactgggatgtttgcaatgaccgagaggggccatgggagcaacgcgagagggatccagaccgaagccacctttgacctctctgcccaggagtttgtaattgacacgccgtgtgaaaatgcggagaagatgtatattggaaatgccatgtacgggaattatgcagctgtctttgcccagctcatcatagatggaagatctcaagggccccactgtttcatcgttcctgtccgggatgaaaacggaagcttgtacccaggagtcacagctattgatatgatgtacaaggagggtctgcatggtgtggacaatgggatattaatatttgacaaggttcggatacccagggagaacctgctggataagtttggttccgtggctccagatggacagtaccattcgcctattaggaacaagagtgcaagattcaatgccatgctggcagcactgaccccttcgagattagctgtggctttccaagctatgggtgccatgaagcttgggttgacgatagccattcgctatagccacagccggaggcagtttgggcccaaaaccaaggaagaggtgaagatcattgagcaccaaacacagaccctgcggctgatgccccacctggccacagccttggccctgaccttcgtcagcaggtatgctggggccctcctggatgaggatgtcttccagggaaaggagctggtcaacagtcgctcgctgcaggctctggtggcggggctgaaggcctacagcacctgggagaacatccgctgcctgcaggactgccgcgagtgcactggaggcatggttgtggggcgggaactgctggcccaatacaccaaacagtatgaagaaaaaccactctttggcctgctccaaaactgggctgaatctgtgggggacaagctgagaaccagtttcctggcatttaacatggacacagttgatgatctcgcctttctgttgaaagcagtgaaatttcgtgaaagggttcttcagcggggtttggtggccagaatttattataaggtaaagaccaagaaggaggattttttccatgcctggaactcgtgtctgcaccacgtggcttctctgtccctggcacacactcaccgagttaccttagagcagttctccctagcagtgaagagctgtcctgaccaagaggaccagactttgttaatgaagttttgtctgttgtatggaaccaagctggtgtttcaggagcgggcctggtatttagaacataaatacttgactcccatggccagcacgaggatcaggaatcagttgctggatttgtgcgactcggtgaaggatgatgcccggagggtgatctcgacctttaacattccacacacctacctccacgcaccaatcgccggaatctccaacccgcgggccgcgtgggctttctaccctgcaccgctgcagccgcggccacgggaagaggcgcgctcccggcggcccaagctgggagccaagctctaacgggtgtggcgggaagtgtggtggcccgccagcagctgccacgacgctcgctccaccgacgcccagagctgtggccgaggccgggggctggcacccgctgggccgccactctcggggattttggtggcaaagcggaggtcccgccgaggctggcgaggtgcgcggctggctgctaggaaagagatccagacggtcgcctggtgcgctggatccctgtgccctttccctgaaacccagcctggcctgactgcaacctctcccaacttcagtgccggatcccctagacaatcagggtgggctccccgctgcgagcgcgccccacagccgggtgccgccaaaggtctcctgctgttagcggtgactcacattcccagtgatttagaaaaactgtggtgccgagtgaaag

SEQ ID NO: 104357 - DNA, 668 bp, Homo sapiens
  Payload ID: 499
  Gene Symbol: ACOXL
  Gene Name: acyl-CoA oxidase-like
  ENST ID: ENST00000443586
  CDS Start-End: 1-321
ggttacatgatggaaaatcgaatctcaggcttaaagtgtgacacagatgtgtttgccacttttgaaggtgacgatgttgttatgcttcaggttgtggggcgggaactgctggcccaatacaccaaacagtatgaagaaaaaccactctttggcctgctccaaaactgggctgaatctgtgggggacaagctgagaaccagtttcctggcatttaacatggacacagttgatgatctcgcctttctgttgaaagcagtgaaatttcgtgaaagggttcttcagcggggtttggtggccagaatttattataagttaccttagagcagttctccctagcagtgaagagctgtcctgaccaagaggaccagactttgttaatgaagttttgtctgttgtatggaaccaagctggtgtttcaggagcgggcctggtatttagaacataaatacttgactcccatggccagcacgaggatcaggaatcaggagatgtggcttggaggaagaatgcgcagaagtgtggtagacaccaggcccccaagccaggatgctgcttggctcctttgaacgtagaagatggattacactcgtttactattttaatctaagcataaagtataaatgcagtcactgcttagtgtcacaaaggcttgtgattaaagaacacac

SEQ ID NO: 104358 - DNA, 6357 bp, Homo sapiens
  Payload ID: 500
  Gene Symbol: ACSBG1
  Gene Name: acyl-CoA synthetase bubblegum family member 1
  Uniprot ID: Q96GR2
  ENST ID: ENST00000258873
  CDS Start-End: 207-2381
aaaccacaaagaaaaggaaagttttaattctgagaaacttcactgaggagcaattttttttgagcttctaaaaatagagaggaaatgagcctctttgggtcactctagttgccgcctcccctgccccatgcccacccccactgctcactcaaggctagcctctctcagtgggtgactgagctgtcttcagtggaagcccgaggcagatgccacgcaattctggagctggatacggctgcccacacggggaccccagcatgctggacagcagagagaccccacaggagagccggcaggacatgattgtgaggaccacccaagaaaaattgaaaaccagctcactgactgacaggcagccactctccaaagagtccctgaaccatgctctcgagctctcagtgccagagaaggtgaataatgcccagtgggatgctccagaggaggcgctgtggacgactcgggccgatgggcgggtgcgcctgcgcatagaccccagctgcccacagcttccctacactgtgcatcggatgttctacgaggccctggataagtatggggacctcatcgctttgggcttcaagcgccaggacaagtgggaacacatctcctactcccaatactacctgctcgcccgcagagccgccaagggcttcctgaagctcggcctgaagcaggcccacagtgtggccatcctcggcttcaactccccggagtggttcttctcggcagtgggcacagtatttgcaggtggcatcgtcactggcatctacaccaccagctccccagaggcctgccagtacatcgcttatgactgctgcgccaatgtcatcatggtcgacacgcagaagcagctggaaaagatcctgaagatctggaaacagttgccacatctaaaggcagtcgtgatatataaagaacctcctccaaacaagatggccaatgtgtacacgatggaggaattcatggagctggggaatgaagtgcctgaggaagccctggacgccatcattgacacccagcagcccaaccagtgctgtgtgctagtctacacttccggcaccactgggaaccccaagggcgtgatgctgagtcaagacaatatcacgtggacggcacggtacggcagccaggccggtgacatccggccggcagaagtccagcaggaggtggtagtcagctacctgcccctcagccatattgccgcccagatctacgacctgtggacaggcatccagtggggggcccaggtttgctttgccgaacccgacgccctgaaggggagcctggtgaacacgctgcgggaggtggagcccacatcacacatgggggtgccccgggtatgggagaagatcatggagcgcatccaggaggtggcggctcagtctggcttcatccggcgaaagatgctgctgtgggccatgtcggtgaccttggagcagaacctcacctgccccggcagcgacctgaagcccttcacaaccagactggcagattacctggtgctagccaaggttcgccaggcactgggatttgccaagtgtcaaaagaacttctatggagcggcccccatgatggcagagacacagcacttcttcctgggtctcaacatccgcttgtatgcgggctacggcctcagtgagacctcaggcccccacttcatgtccagtccctacaactaccggctgtacagctcaggcaagttggtgcccggctgtcgggtgaagctggtgaaccaggacgcagagggcattggcgagatctgcctgtggggccgcaccatattcatgggctacctgaacatggaggacaagacttgtgaggccatcgacgaggaaggctggctgcacacgggtgatgctggccgcctggacgccgatggcttcctctacatcactgggcgcctcaaagaattaatcatcacagctggtggggagaatgtgccccctgtgcccatcgaggaggccgtgaagatggagctgcccatcatcagcaacgccatgctcattggggaccagaggaagttcctgtccatgctgctcaccttgaagtgcactctggacccagacacctctgaccagactgataatctgactgaacaagctatggagttctgccagagggtgggcagcagagccaccacagtgtccgagatcatagagaagaaggatgaggccgtgtaccaggccatcgaagaggggatccggagggtcaacatgaacgcggcggcccggccctaccacatccagaagtgggccattctcgagagagacttctccatttcgggtggagagttgggtcccacgatgaaactgaaacggctcacagttttggagaagtacaaaggtatcattgactccttttaccaagagcaaaaaatgtaatcagggcctatgcctgcagtttctatagaatagagggcaggcgttccgagcctcttcctgagccccaggtctcttcagtctgggcacaggcatttctgccaagtctgttagatctccaggtcagggcacagcactggctctacatttaccaggtcttacgccaacaatagctgacaattccaagaagcttcacgtgtgggtagttttaattcagtttaagtattgctttttgttcaggtgacaaatgagatcagctctccttccagaacgaaagggctgataatttttggccttagttccaggtagattaaaaagctgctagctcacatacaggacagccagcagtaggctgtggagcgggtaggagagagatggctgatactgctcacgtgcgctgcaggaaaagcaatcagtcacaactcacctagcgacctgacttactctggaatcttggcgggcatcgccgaccctattattccattaccaggcactccgccacccacatgccaactgacttgatgcttaataaaactgctgctgcctgtttgattctatttaatgtataatttgaatattaaaccttttaacagaactgtcaacaaggacctgattttttttgtcaattgagcaggtgggaccagtgcagagagtagtgggcatttaactcacaggactgtgcacagcgggcatgcgagtgaccattagtgccctggaataaacaaaggtgcaggatggggtcaagtggcgcattctcataaaagcagccagctctacgttagcctgtcgccaccagaccaccccacttccattctgaatacgggaagcagccattctcagtagcaagctgagccaaaatgaccgaaggcatctgaacaggaaacaggtagagaaagcaaacatctcagttttggaattctttattactttgaacccaagagccactgataactggcacaatccaatgaaacagaggaagcagcagcttaaacaaaggaaaatacatttaagattataagtctgggggggcggttacaagcttaaaaagtgacccagacagggatatcattgctaaaaaaaaaaaaatccccttgtgacctgggtacattttgcaaagccacaggtttgcaatgttacacaagggccaaaggaggccatgagttgtctttggttgtggggacagagggtaactgttcatgaaaatagtgagtgtctgaagattaagaaaatcatgctgcagcagaggagaagggagaggaagacaggaagggaaaggagatgcctgagggtcaaaagctgagcccaagcctaagcccaagctcaagctcaagccccagcatggcataattttgtgaattaactcaggctgagttgcctccagtctttggaatgtcatcttatactggtactgctgaggcagagggcagtaattggtgctttgggataggagaaggggcagttgctgaaatacaaaattaatagcatcccaagttcctcaattgcagccaaaatacatgtgttcgggcctttcggcagtatcgcccccagaactacctgctgtagtgtggtccattcccagacagcaacatgcaagaataagtttacaatacactcagcccttctggcttcagatcaggggctcagaggctgtgacaactcatgatgctgaaaatgtatccagtgaaaatgaagtactagctctctgcttcattaaaagctcttggaaagaatattaaatctcaagacaacaaaataattgaacacacaatacatttgtgtctttgtatccaatatattacctttgtcttattaacaaaaattatatctctcattatatatttcttggatctgaagtttttattcacactcagtaatttctgtaaaggacaaatctgtctctattttccatatcatttagaaatataccacattcactctttttgatgtgaactttcccaggaaaattctcttgtgcccatttagttttagaagagtgtcattttgtgctattatgtcaatatcctgttttatttccattatgtttttcaaaaaccgaagaaaataaggtttttcttaaaaagttagacattttctcttgttaattctgtatcctgttatttacagctgaagagaaactattttaacttaagtgtaaaatggtttagaatagcaaatgatacagtccactcagagtttacaaaaaaaacatttaccaggtagacacttaataaataaaacaagcacttggaaaaagttctttgaaaacagacctagggacatccacctgcatcttttgcacagattttgttaagaaaaggccagatctaaaaatgtactgtcaagaaacaagcaaaccaatgcatacatacgtaggtattctaaacagaggttcatgtggtgtccatttagagtgactgatgtaaatgccagttgtagaagtgttaatctaaatcttttactcggcgacagatttcctctgtgaagtctgagcattttgcattgcctcccaaatcttttgtcaagctctgagaaaaggaaaaagcaaaaataaaagatgtatccgcaaactaaactaaaccaaggagattttaaagccctcagtgagatgccacctgggcaagttactcggctgctctttcatttagttcctcatttcaaagtgaggaaccactccaccaccatctacccagcccaggaggatcgggatccaatctcatagtgtatacaacagcactctgcaaagaataaggtgctcttgatgcaaagggaggcagggagctttaccaaaattttccctttgttcacacaatagaccctaacccagattagttggtcatggatatttaaataaaagcgaatctaaataagaagtttcataaaaatccttgggaaatatgtctcaggaatagacctgagacatattttgatctatttttgtttttattattattttttttttagatggagtctcactctgttgcccaggctggagtgcagtggcacgatcccagctcaccacaacctctgcctcctgggttcaagcgattctcctgcctcagcgtcctgaatagctggaattacaagtgcatgccaccatacccaactaatttttgtatctgatctatttttggaggctgggacacaaatacgaaagaaatatttaaatcattaactcttttttttttttttaagagacggggtctcactatgtggcccaggctggtcttgaactcagaggctaaggtgatcctcctgcctcagcctatagctgcaactacaggcatgcaccaccacacctgcctaaatcattaactcttaaacctccctctttaggaaagaaagcctcccatacaactgatctgttctaccagcttatcctttctttcctgcatacagaccccaatatatttaattctctttatctttccatcctacacaataaaagggcccactatgtaattcaggcacctctctactgggctgtagattataacttcccaaatataactttaaagaataagaaaatcatatgacctccaatgtgactatcaggctgttaaaaacaagcctgaatttcttgtattttggccacacgatataatttcaaattacagaatttttttaaaagaagggaccaactttgaagatattacgctaagtgaaataagccagactcaaaggacaaatactgtatgattccacttacatgaggtacctagagtagtcaaattcatagagacaggaagcagaatggcaggtgtcagaggatgggagggggaagggaaagttactgtttaacgggtgcagagtctcagtttgagaaaatgaaactggtctggagatgactgatggtgatggttacattacaatgtgaatgtacttaacattattgaactgtatacctaaatacggctaaaatggcaaattttatgttatgcatatttttcacaatttttgttaaaaaggacctcaaattagg

SEQ ID NO: 104359 - DNA, 1474 bp, Homo sapiens
  Payload ID: 500
  Gene Symbol: ACSBG1
  Gene Name: acyl-CoA synthetase bubblegum family member 1
  ENST ID: ENST00000559707
  CDS Start-End: 74-316
acccccactgctcactcaaggctagcctctctcagtgggtgactgagctgtcttcagtggaagcccgaggcagatgccacgcaattctggagctggatacggctgcccacacggggaccccagcatgctggacagcagagagaccccacaggagagccggcaggacatgattgtgaggaccacccaagaaaaattgaaaaccagaggaggcgctgtggacgactcgggccgatgggcgggtgcgcctgcgcatagaccccagctgcccacagcttccctacactgtgcatcggatgttctacgaggccctggataagtatggggacctcatcgctttgggcttcaagcgccaggacaagtgggaacacatctcctactcccaatactacctgctcgcccgcagagccgccaagggcttcctgaagctcggcctgaagcaggcccacagtgtggccatcctcggcttcaactccccggagtggttcttctcggcagtgggcacagtatttgcaggtggcatcgtcactggcatctacaccaccagctccccagaggcctgccagtacatcgcttatgactgctgcgccaatgtcatcatggtcgacacgcagaagcagctggaaaagatcctgaagatctggaaacagttgccacatctaaaggcagtcgtgatatataaagaacctcctccaaacaagatggccaatgtgtacacgatggaggaattcatggagctggggaatgaagtgcctgaggaagccctggacgccatcattgacacccagcagcccaaccagtgctgtgtgctagtctacacttccggcaccactgggaaccccaagggcgtgatgctgagtcaagacaatatcacgtggacggcacggtacggcagccaggccggtgacatccggccggcagaagtccagcaggaggtggtagtcagctacctgcccctcagccatattgccgcccagatctacgacctgtggacaggcatccagtggggggcccaggtttgctttgccgaacccgacgccctgaaggggagcctggtgaacacgctgcgggaggtggagcccacatcacacatgggggtgccccgggtatgggagaagatcatggagcgcatccaggaggtggcggctcagtctggcttcatccggcgaaagatgctgctgtgggccatgtcggtgaccttggagcagaacctcacctgccccggcagcgacctgaagcccttcacaaccagactggcagattacctggtgctagccaaggttcgccaggcactgggatttgccaagtgtcaaaagaacttctatggagcggcccccatgatggcagagacacagcacttcttcctgggtctcaacatccgcttgtatgcgggctacggcctcagtgagacctcaggcccccacttcatgtccagtccctacaactaccggctgtacagctgtaagtcccctgtaaa

SEQ ID NO: 104360 - DNA, 2462 bp, Homo sapiens
  Payload ID: 500
  Gene Symbol: ACSBG1
  Gene Name: acyl-CoA synthetase bubblegum family member 1
  ENST ID: ENST00000560817
  CDS Start-End: 484-1932
ggcaacccgctccggtcaccttccacgctgtgaaagctttattcttttgctctttgcaataaatcttgctactgctcagtctttgggtccacgctgcttttatgagctgtaacactcactggaaagtctgcagcttcattcctgaagccagcaagaccgcgagccccccgggggaggaatgaacaactccagagacgccactttaagagctgtaacactcaccgtgaaggtctgcagcttcactcctgagccagcgagaccacgaacccaccagaaggaagaaactccgaacacatccgaacgtcagaaggaacaaactccagacgcgcccccttaagagctgtaacactcaccgcgagggtctgcggcgtcagtcttgaagtcagtgagaccaagaacccaccaattcgggacacatagatctggaaacagttgccacatctaaaggcagtcgtgatatataaagaacctcctccaaacaagatggccaatgtgtacacgatggaggaattcatggagctggggaatgaagtgcctgaggaagccctggacgccatcattgacacccagcagcccaaccagtgctgtgtgctagtctacacttccggcaccactgggaaccccaagggcgtgatgctgagtcaagacaatatcacgtggacggcacggtacggcagccaggccggtgacatccggccggcagaagtccagcaggaggtggtagtcagctacctgcccctcagccatattgccgcccagatctacgacctgtggacaggcatccagtggggggcccaggtttgctttgccgaacccgacgccctgaaggggagcctggtgaacacgctgcgggaggtggagcccacatcacacatgggggtgccccgggtatgggagaagatcatggagcgcatccaggaggtggcggctcagtctggcttcatccggcgaaagatgctgctgtgggccatgtcggtgaccttggagcagaacctcacctgccccggcagcgacctgaagcccttcacaaccagactggcagattacctggtgctagccaaggttcgccaggcactgggatttgccaagtgtcaaaagaacttctatggagcggcccccatgatggcagagacacagcacttcttcctgggtctcaacatccgcttgtatgcgggctacggcctcagtgagacctcaggcccccacttcatgtccagtccctacaactaccggctgtacagctcaggcaagttggtgcccggctgtcgggtgaagctggtgaaccaggacgcagagggcattggcgagatctgcctgtggggccgcaccatattcatgggctacctgaacatggaggacaagacttgtgaggccatcgacgaggaaggctggctgcacacgggtgatgctggccgcctggacgccgatggcttcctctacatcactgggcgcctcaaagaattaatcatcacagctggtggggagaatgtgccccctgtgcccatcgaggaggccgtgaagatggagctgcccatcatcagcaacgccatgctcattggggaccagaggaagttcctgtccatgctgctcaccttgaagtgcactctggacccagacacctctgaccagactgataatctgactgaacaagctatggagttctgccagagggtgggcagcagagccaccacagtgtccgagatcatagagaagaaggatgaggccgtgtaccaggccatcgaagaggggatccggagggtcaacatgaacgcggcggcccggccctaccacatccagaagtgggccattctcgagagagacttctccatttcgggtggagagttgggtcccacgatgaaactgaaacggctcacagttttggagaagtacaaaggtatcattgactccttttaccaagagcaaaaaatgtaatcagggcctatgcctgcagtttctatagaatagagggcaggcgttccgagcctcttcctgagccccaggtctcttcagtctgggcacaggcatttctgccaagtctgttagatctccaggtcagggcacagcactggctctacatttaccaggtcttacgccaacaatagctgacaattccaagaagcttcacgtgtgggtagttttaattcagtttaagtattgctttttgttcaggtgacaaatgagatcagctctccttccagaacgaaagggctgataatttttggccttagttccaggtagattaaaaagctgctagctcacatacaggacagccagcagtaggctgtggagcgggtaggagagagatggctgatactgctcacgtgcgctgcaggaaaagcaatcagtcacaactcacctagcgacctgacttactctggaatcttggcgggcatcgccgaccctattattccattaccaggcactccgccacccacatgccaactgacttgatgcttaataaa

SEQ ID NO: 104361 - DNA, 925 bp, Homo sapiens
  Payload ID: 500
  Gene Symbol: ACSBG1
  Gene Name: acyl-CoA synthetase bubblegum family member 1
  ENST ID: ENST00000559241
  CDS Start-End: 195-925
atgccttagctgagggagcagaggggttgctgagccctgtgcctgccaggtgcaagaaggaggaagggcggtccggtggagccgggcctctctggggctgctgtggctctcccggggggactccgtgacatgttctctgaggttctggctctctcctgggcaagctcacagattgcagccaccccccaggcaccatgccagaggtgctcctgctcaggtctgccagctccatcctgaggactgcgttcttaagcagatggctgccaggtgggcctaggtgtgttcacaaacttagttttgttcggaacctgcagtgccgacaaggagtgaggctgaatgtgagaagcagctcactgactgacaggcagccactctccaaagagtccctgaaccatgctctcgagctctcagtgccagagaaggtgaataatgcccagtgggatgctccagaggaggcgctgtggacgactcgggccgatgggcgggtgcgcctgcgcatagaccccagctgcccacagcttccctacactgtgcatcggatgttctacgaggccctggataagtatggggacctcatcgctttgggcttcaagcgccaggacaagtgggaacacatctcctactcccaatactacctgctcgcccgcagagccgccaagggcttcctgaagctcggcctgaagcaggcccacagtgtggccatcctcggcttcaactccccggagtggttcttctcggcagtgggcacagtatttgcaggtggcatcgtcactggcatctacaccaccagctccccagaggcctgccagtacatcgcttatgactgctgcgccaatgtcatcatggtcgacacgcagaagcagctggaaaagatcctgaagatctggaaacagttgccacatctaaaggcagtcgtgatatataa

SEQ ID NO: 104362 - DNA, 895 bp, Homo sapiens
  Payload ID: 500
  Gene Symbol: ACSBG1
  Gene Name: acyl-CoA synthetase bubblegum family member 1
  ENST ID: ENST00000557935
  CDS Start-End: 102-269
tagttgccgcctcccctgccccatgcccacccccactgctcactcaaggctagcctctctcagtgggtgactgagctgtcttcagtggaagcccgaggcagatgccacgcaattctggagctggatacggctgcccacacggggaccccagcatgctggacagcagagagaccccacaggagagccggcaggacatgattgtgaggaccacccaagaaaaattgaaaaccagagatggagtcttgctacattgcccaggctggccttgaactcctggcctgaagcgatcttcccaccttggccttccaaagtgctgggatgaacaggctggagccactacacctggcccactactacagccttatactaaatcttgaaatcagaggaggcgctgtggacgactcgggccgatgggcgggtgcgcctgcgcatagaccccagctgcccacagcttccctacactgtgcatcggatgttctacgaggccctggataagtatggggacctcatcgctttgggcttcaagcgccaggacaagtgggaacacatctcctactcccaatactacctgctcgcccgcagagccgccaagggcttcctgaagctcggcctgaagcaggcccacagtgtggccatcctcggcttcaactccccggagtggttcttctcggcagtgggcacagtatttgcaggtggcatcgtcactggcatctacaccaccagctccccagaggcctgccagtacatcgcttatgactgctgcgccaatgtcatcatggtcgacacgcagaagcagctggaaaagatcctgaagatctggaaacagttgccacatctaaaggcagtcgtgatatataaagaacctcctccaaacaagatggccaatgtgtacacg

SEQ ID NO: 104363 - DNA, 2257 bp, Homo sapiens
  Payload ID: 500
  Gene Symbol: ACSBG1
  Gene Name: acyl-CoA synthetase bubblegum family member 1
  ENST ID: ENST00000560124
  CDS Start-End: 25-180
gtcttcagtggaagcccgaggcagatgccacgcaattctggagctggatacggctgcccacacggggaccccagcatgctggacagcagagagaccccacaggagagccggcaggacatgattgtgaggaccacccaagaaaaattgaaaaccagatctggaaacagttgccacatctaaaggcagtcgtgatatataaagaacctcctccaaacaagatggccaatgtgtacacgatggaggaattcatggagctggggaatgaagtgcctgaggaagccctggacgccatcattgacacccagcagcccaaccagtgctgtgtgctagtctacacttccggcaccactgggaaccccaagggcgtgatgctgagtcaagacaatatcacgtggacggcacggtacggcagccaggccggtgacatccggccggcagaagtccagcaggaggtggtagtcagctacctgcccctcagccatattgccgcccagatctacgacctgtggacaggcatccagtggggggcccaggtttgctttgccgaacccgacgccctgaaggggagcctggtgaacacgctgcgggaggtggagcccacatcacacatgggggtgccccgggtatgggagaagatcatggagcgcatccaggaggtggcggctcagtctggcttcatccggcgaaagatgctgctgtgggccatgtcggtgaccttggagcagaacctcacctgccccggcagcgacctgaagcccttcacaaccagactggcagattacctggtgctagccaaggttcgccaggcactgggatttgccaagtgtcaaaagaacttctatggagcggcccccatgatggcagagacacagcacttcttcctgggtctcaacatccgcttgtatgcgggctacggcctcagtgagacctcaggcccccacttcatgtccagtccctacaactaccggctgtacagctcaggcaagttggtgcccggctgtcgggtgaagctggtgaaccaggacgcagagggcattggcgagatctgcctgtggggccgcaccatattcatgggctacctgaacatggaggacaagacttgtgaggccatcgacgaggaaggctggctgcacacgggtgatgctggccgcctggacgccgatggcttcctctacatcactgggcgcctcaaagaattaatcatcacagctggtggggagaatgtgccccctgtgcccatcgaggaggccgtgaagatggagctgcccatcatcagcaacgccatgctcattggggaccagaggaagttcctgtccatgctgctcaccttgaagtgcactctggacccagacacctctgaccagactgataatctgactgaacaagctatggagttctgccagagggtgggcagcagagccaccacagtgtccgagatcatagagaagaaggatgaggccgtgtaccaggccatcgaagaggggatccggagggtcaacatgaacgcggcggcccggccctaccacatccagaagtgggccattctcgagagagacttctccatttcgggtggagagttgggtcccacgatgaaactgaaacggctcacagttttggagaagtacaaaggtatcattgactccttttaccaagagcaaaaaatgtaatcagggcctatgcctgcagtttctatagaatagagggcaggcgttccgagcctcttcctgagccccaggtctcttcagtctgggcacaggcatttctgccaagtctgttagatctccaggtcagggcacagcactggctctacatttaccaggtcttacgccaacaatagctgacaattccaagaagcttcacgtgtgggtagttttaattcagtttaagtattgctttttgttcaggtgacaaatgagatcagctctccttccagaacgaaagggctgataatttttggccttagttccaggtagattaaaaagctgctagctcacatacaggacagccagcagtaggctgtggagcgggtaggagagagatggctgatactgctcacgtgcgctgcaggaaaagcaatcagtcacaactcacctagcgacctgacttactctggaatcttggcgggcatcgccgaccctattattccattaccaggcactccgccacccacatgccaactgacttgatgcttaataaaactgctgctgcctgtttgattctatttaatgtataatttgaatattaaaccttttaacag

SEQ ID NO: 104364 - DNA, 569 bp, Homo sapiens
  Payload ID: 500
  Gene Symbol: ACSBG1
  Gene Name: acyl-CoA synthetase bubblegum family member 1
  ENST ID: ENST00000558130
  CDS Start-End: 25-569
gtcttcagtggaagcccgaggcagatgccacgcaattctggagctggatacggctgcccacacggggaccccagcatgctggacagcagagagaccccacaggagagccggcaggacatgattgtgaggaccacccaagaaaaattgaaaaccagctcactgactgacaggcagccactctccaaagagtccctgaaccatgctctcgagctctcagtgccagagaaggtgaataatgcccagtgggatgctccagaggaggcgctgtggacgactcgggccgatgggcgggtgcgcctgcgcatagaccccagctgcccacagcttccctacactgtgcatcggatgttctacgaggccctggataagtatggggacctcatcgctttgggcttcaagcgccaggacaagtgggaacacatctcctactcccaatactacctgctcgcccgcagagccgccaagggcttcctgaagcaggcccacagtgtggccatcctcggcttcaactccccggagtggttcttctcggcagtgggcacagtatttgcaggtggcatcgtcactgg

SEQ ID NO: 104365 - DNA, 559 bp, Homo sapiens
  Payload ID: 500
  Gene Symbol: ACSBG1
  Gene Name: acyl-CoA synthetase bubblegum family member 1
  ENST ID: ENST00000559114
  CDS Start-End: 144-559
agatttcttcttcaagaaagctgggaagaagagaggccagagatagagagacagaggaggcgctgtggacgactcgggccgatgggcgggtgcgcctgcgcatagaccccagctgcccacagcttccctacactgtgcatcggatgttctacgaggccctggataagtatggggacctcatcgctttgggcttcaagcgccaggacaagtgggaacacatctcctactcccaatactacctgctcgcccgcagagccgccaagggcttcctgaagctcggcctgaagcaggcccacagtgtggccatcctcggcttcaactccccggagtggttcttctcggcagtgggcacagtatttgcaggtggcatcgtcactggcatctacaccaccagctccccagaggcctgccagtacatcgcttatgactgctgcgccaatgtcatcatggtcgacacgcagaagcagctggaaaagatcctgaagatctggaaacagttgccacatctaaaggcagtcgtgatatataaagaacctcctccaaacaagatggccaatgt

SEQ ID NO: 104366 - DNA, 2759 bp, Homo sapiens
  Payload ID: 501
  Gene Symbol: ACSBG2
  Gene Name: acyl-CoA synthetase bubblegum family member 2
  Uniprot ID: Q5FVE4
  ENST ID: ENST00000588304
  CDS Start-End: 447-2297
gaggtggctgggatggaacgttctggaaggttgaatggggtagaaggcctgttgtggagggaaaccacccatcctcctgcctcccaccaccaccatcatcctggctggacggagagggtgacgggggctgggaaggggcagctcatgttcaggtttccaggaggggctacctgttgactgtctttgcaggaagaagaaaacacctgagtgaccagatgtcccagctccaggtgccttgccagatggccagaaccacacctcttgaagagtgacagtgctgtggagcatggtttctgcacacctggaatgactggaaccccaaagactcaagaaggagctaaagatcttgaagtagacatgaataaaacagaaggctgtggaccacctgtcgagatggagaagtccttctgaggctatccaaacacggaccaggccatgagaccccgatgaccatccctgaattttttcgagagtcagtcaaccgatttggaacttatccagccctcgcatccaagaatggcaaaaagtgggaaattctgaatttcaaccagtactatgaggcttgtcggaaggctgcaaaatccttgatcaagctgggtttggagcgtttccacggagttggtatcctggggtttaactctgcagagtggtttatcactgctgttggtgccatcctagccgggggtctttgtgttggtatttatgccaccaactctgccgaggtttgtcaatatgtcatcactcatgccaaagtgaacatcttgctggttgagaatgatcaacagttacagaaaatcctttcgattccacagagcagcctagagcccctaaaagcgatcatccagtacagactgccaatgaagaagaacaacaacttgtactcttgggatgatttcatggaacttggcagaagtatccctgacacccaactggagcaggtcatcgagagccagaaggcgaatcaatgcgcagtgctcatctacacttcagggaccacaggcatacccaagggagtgatgctcagtcatgacaacatcacgtggattgcaggagcagtgacaaaggactttaaactgacagacaagcatgagacggtggttagctacctcccactcagccatattgcagcacagatgatggacatctgggtacccataaagattggggcgctcacatactttgctcaagcagatgctctcaagggcaccttggtaagtactctaaaggaggtaaaacctactgtcttcattggagtgcctcaaatttgggagaagatacatgagatggtgaagaaaaatagtgccaagtccatgggcttgaagaagaaggcattcgtgtgggcaagaaacattggcttcaaggtcaactcaaaaaagatgttggggaaatataatactcccgtgagctaccgcatggctaagactctcgtgttcagcaaagtcaagacatcccttggcttggatcactgtcactcttttatcagtgggactgcgcccctcaaccaagagactgccgagttctttctaagcttggacatacctataggcgagttgtatgggttgagtgagagctcgggaccccacacgatatccaaccagaataactacaggcttctaagctgtggcaagatcttgactgggtgtaagaatatgctgttccagcagaacaaggatggcattggggagatctgcctctggggtaggcacatcttcatgggctatctggaaagtgagactgaaactacagaggccatcgatgatgaaggctggctacactctggggatctgggccagctggacggtctgggtttcctctatgtcaccggccacatcaaagaaatccttatcactgctggtggtgaaaatgtgccccccattcctgttgagaccttggttaagaagaagatccccatcatcagtaacgccatgttagtaggagataaactgaagtttctgagcatgttgctgacgctgaagtgtgagatgaatcagatgagcggagaacctctggacaagctgaacttcgaggccatcaacttctgtcggggtctgggcagccaggcatccaccgtgactgagattgtgaagcagcaagaccccctggtctacaaggccatccagcaaggcatcaatgctgtgaaccaggaagccatgaacaatgcacagaggattgaaaagtgggtcatcttggagaaggacttttccatctatggtggagagctaggtccaatgatgaaacttaagagacattttgtagcccagaaatacaaaaaacaaattgatcacatgtaccactgactgctttgatggagctgctctcagctgttctgatgccttcagcaggaagacctcattgcaataagtgaaatgctgctctaggtagaagctctccctgctgtttttaagaagccacattcctcattggtcagtttcttgattgttcgtctgttggagaggtgctccctagaagaacctgccatacgtttcaaagcaataaaatcactgtatatctttctaaggaccttcaagtcatgactccagggaagcctattgggaagtctactaaaaactgcctgatttacaagaaagacctgaacttgtgggctcccatttgatttttttctcctcaggggactcagacattagaaagaaaaagcctcacagatttgaagaactggacccccaaatcaactcacctgcctggaagcaactgggaaacccttccaataagtcctgataataaagcacttcagggtccca

SEQ ID NO: 104367 - DNA, 789 bp, Homo sapiens
  Payload ID: 501
  Gene Symbol: ACSBG2
  Gene Name: acyl-CoA synthetase bubblegum family member 2
  ENST ID: ENST00000587617
  CDS Start-End: 196-600
acccatcctcctgcctcccaccaccaccatcatcctggctggacggagagggtgacgggggctgggaaggggcagctcatgttcaggtttccaggaggggctacctgttgactgtctttgcaggaagaagaaaacacctgagtgaccagatgtcccagctccagtgctgtggagcatggtttctgcacacctggaatgactggaaccccaaagactcaagaaggagctaaagatcttgaagtagacatgaataaaacagaagttactcccaggctgtggaccacctgtcgagatggagaagtccttctgaggctatccaaacacggaccaggccatgagaccccgatgaccatccctgaattttttcgagagtcagtcaaccgatttggaacttatccagccctcgcatccaagaatggcaaaaagtgggaaattctgaatttcaaccagtactatgaggcttgtcggaaggctgcaaaatccttgatcaagctgggtttggagcgtttccacggagttggtatcctggggtttaactctgcagagtggtttatcactgctgttggtgccatcctagccggattccacagagcagcctagagcccctaaaagcgatcatccagtacagactgccaatgaagaagaacaacaacttgtactcttgggatgatttcatggaacttggcagaagtatccctgacacccaactggagcaggtcatcgagagccagaaggcgaatcaatgcgcagtgctcatctacacttcagggaccacaggcatacccaagg

SEQ ID NO: 104368 - DNA, 605 bp, Homo sapiens
  Payload ID: 501
  Gene Symbol: ACSBG2
  Gene Name: acyl-CoA synthetase bubblegum family member 2
  ENST ID: ENST00000587227
  CDS Start-End: 1-354
tatgccaccaactctgccgaggtttgtcaatatgtcatcactcatgccaaagtgaacatcttgctggttgagaatgatcaacagttacagaaaatcctttcgattccacagagcagcctagagcccctaaaagcgatcatccagtacagactgccaatgaagaagaacaacaacttgtactcttgggatgatttcatggaacttggcagaagtatccctgacacccaactggagcaggtcatcgagagccagaaggcgaatcaatgcgcagtgctcatctacacttcagggaccacaggcatacccaagggagtgatgctcagtcatgacaacaaaaattcattgagcacctagtatgtactggggaatattccaggagcaggggaaacagcagcaaacaagacagactcaatctggaccttgggaacagataagaaatgaacaaatgaaaacattcagtttgtgtgacatgatcacgtggattgcaggagcagtgacaaaggactttaaactgacagacaagcatgagacggtggttagctacctcccactcagccatattgcagcacagatgatggacatctgggtacccataaagattgggg

SEQ ID NO: 104369 - DNA, 2739 bp, Homo sapiens
  Payload ID: 501
  Gene Symbol: ACSBG2
  Gene Name: acyl-CoA synthetase bubblegum family member 2
  Uniprot ID: Q5FVE4
  ENST ID: ENST00000586696
  CDS Start-End: 277-2277
gtagaaggcctgttgtggagggaaaccacccatcctcctgcctcccaccaccaccatcatcctggctggacggagagggtgacgggggctgggaaggggcagctcatgttcaggtttccaggaggggctacctgttgactgtctttgcaggaagaagaaaacacctgagtgaccagatgtcccagctccaggtgccttgccagatggccagaaccacacctcttgaagagtgacaggtgccagtgtgctgtggagcatggtttctgcacacctggaatgactggaaccccaaagactcaagaaggagctaaagatcttgaagtagacatgaataaaacagaagttactcccaggctgtggaccacctgtcgagatggagaagtccttctgaggctatccaaacacggaccaggccatgagaccccgatgaccatccctgaattttttcgagagtcagtcaaccgatttggaacttatccagccctcgcatccaagaatggcaaaaagtgggaaattctgaatttcaaccagtactatgaggcttgtcggaaggctgcaaaatccttgatcaagctgggtttggagcgtttccacggagttggtatcctggggtttaactctgcagagtggtttatcactgctgttggtgccatcctagccgggggtctttgtgttggtatttatgccaccaactctgccgaggtttgtcaatatgtcatcactcatgccaaagtgaacatcttgctggttgagaatgatcaacagttacagaaaatcctttcgattccacagagcagcctagagcccctaaaagcgatcatccagtacagactgccaatgaagaagaacaacaacttgtactcttgggatgatttcatggaacttggcagaagtatccctgacacccaactggagcaggtcatcgagagccagaaggcgaatcaatgcgcagtgctcatctacacttcagggaccacaggcatacccaagggagtgatgctcagtcatgacaacatcacgtggattgcaggagcagtgacaaaggactttaaactgacagacaagcatgagacggtggttagctacctcccactcagccatattgcagcacagatgatggacatctgggtacccataaagattggggcgctcacatactttgctcaagcagatgctctcaagggcaccttggtaagtactctaaaggaggtaaaacctactgtcttcattggagtgcctcaaatttgggagaagatacatgagatggtgaagaaaaatagtgccaagtccatgggcttgaagaagaaggcattcgtgtgggcaagaaacattggcttcaaggtcaactcaaaaaagatgttggggaaatataatactcccgtgagctaccgcatggctaagactctcgtgttcagcaaagtcaagacatcccttggcttggatcactgtcactcttttatcagtgggactgcgcccctcaaccaagagactgccgagttctttctaagcttggacatacctataggcgagttgtatgggttgagtgagagctcgggaccccacacgatatccaaccagaataactacaggcttctaagctgtggcaagatcttgactgggtgtaagaatatgctgttccagcagaacaaggatggcattggggagatctgcctctggggtaggcacatcttcatgggctatctggaaagtgagactgaaactacagaggccatcgatgatgaaggctggctacactctggggatctgggccagctggacggtctgggtttcctctatgtcaccggccacatcaaagaaatccttatcactgctggtggtgaaaatgtgccccccattcctgttgagaccttggttaagaagaagatccccatcatcagtaacgccatgttagtaggagataaactgaagtttctgagcatgttgctgacgctgaagtgtgagatgaatcagatgagcggagaacctctggacaagctgaacttcgaggccatcaacttctgtcggggtctgggcagccaggcatccaccgtgactgagattgtgaagcagcaagaccccctggtctacaaggccatccagcaaggcatcaatgctgtgaaccaggaagccatgaacaatgcacagaggattgaaaagtgggtcatcttggagaaggacttttccatctatggtggagagctaggtccaatgatgaaacttaagagacattttgtagcccagaaatacaaaaaacaaattgatcacatgtaccactgactgctttgatggagctgctctcagctgttctgatgccttcagcaggaagacctcattgcaataagtgaaatgctgctctaggtagaagctctccctgctgtttttaagaagccacattcctcattggtcagtttcttgattgttcgtctgttggagaggtgctccctagaagaacctgccatacgtttcaaagcaataaaatcactgtatatctttctaaggaccttcaagtcatgactccagggaagcctattgggaagtctactaaaaactgcctgatttacaagaaagacctgaacttgtgggctcccatttgatttttttctcctcaggggactcagacattagaaagaaaaagcctcacagatttgaagaactggacccccaaatcaactcacctgcctggaagcaactgggaaacccttccaataagtcctgataataaagcacttcagggtccca

SEQ ID NO: 104370 - DNA, 571 bp, Homo sapiens
  Payload ID: 501
  Gene Symbol: ACSBG2
  Gene Name: acyl-CoA synthetase bubblegum family member 2
  ENST ID: ENST00000588722
  CDS Start-End: 145-571
atggaacgttctggaaggttgaatggggaagaagaaaacacctgagtgaccagatgtcccagctccaggtgccttgccagatggccagaaccacacctcttgaagagtgacagtgctgtggagcatggtttctgcacacctggaatgactggaaccccaaagactcaagaaggagctaaagatcttgaagtagacatgaataaaacagaagttactcccaggctgtggaccacctgtcgagatggagaagtccttctgaggctatccaaacacggaccaggccatgagaccccgatgaccatccctgaattttttcgagagtcagtcaaccgatttggaacttatccagccctcgcatccaagaatggcaaaaagtgggaaattctgaatttcaaccagtactatgaggcttgtcggaaggctgcaaaatccttgatcaagctgggtttggagcgtttccacggagttggtatcctggggtttaactctgcagagtggtttatcactgctgttggtgccatcctagccgggggtctttgtgttggtatttatgccaccaactctgccgagg

SEQ ID NO: 104371 - DNA, 2478 bp, Homo sapiens
  Payload ID: 501
  Gene Symbol: ACSBG2
  Gene Name: acyl-CoA synthetase bubblegum family member 2
  Uniprot ID: Q5FVE4
  ENST ID: ENST00000588485
  CDS Start-End: 582-2021
ggctgggatggaacgttctggaaggaagaagaaaacacctgagtgaccagatgtcccagctccaggtgccttgccagatggccagaaccacacctcttgaagagtgacagtgctgtggagcatggtttctgcacacctggaatgactggaaccccaaagactcaagaaggagctaaagatcttgaagtagacatgaataaaacagaagttactcccaggctgtggaccacctgtcgagatggagaagtccttctgaggctatccaaacacggaccaggccatgagaccccgatgaccatccctgaattttttcgagagtcagtcaaccgatttggaacttatccagccctcgcatccaagaatggcaaaaagtgggaaattctgaatttcaaccagtactatgaggcttgtcggaaggctgcaaaatccttgatcaagctgggtttggagcgtttccacggagttggtatcctggggtttaactctgcagagtggtttatcactgctgttggtgccatcctagccggattccacagagcagcctagagcccctaaaagcgatcatccagtacagactgccaatgaagaagaacaacaacttgtactcttgggatgatttcatggaacttggcagaagtatccctgacacccaactggagcaggtcatcgagagccagaaggcgaatcaatgcgcagtgctcatctacacttcagggaccacaggcatacccaagggagtgatgctcagtcatgacaacatcacgtggattgcaggagcagtgacaaaggactttaaactgacagacaagcatgagacggtggttagctacctcccactcagccatattgcagcacagatgatggacatctgggtacccataaagattggggcgctcacatactttgctcaagcagatgctctcaagggcaccttggtaagtactctaaaggaggtaaaacctactgtcttcattggagtgcctcaaatttgggagaagatacatgagatggtgaagaaaaatagtgccaagtccatgggcttgaagaagaaggcattcgtgtgggcaagaaacattggcttcaaggtcaactcaaaaaagatgttggggaaatataatactcccgtgagctaccgcatggctaagactctcgtgttcagcaaagtcaagacatcccttggcttggatcactgtcactcttttatcagtgggactgcgcccctcaaccaagagactgccgagttctttctaagcttggacatacctataggcgagttgtatgggttgagtgagagctcgggaccccacacgatatccaaccagaataactacaggcttctaagctgtggcaagatcttgactgggtgtaagaatatgctgttccagcagaacaaggatggcattggggagatctgcctctggggtaggcacatcttcatgggctatctggaaagtgagactgaaactacagaggccatcgatgatgaaggctggctacactctggggatctgggccagctggacggtctgggtttcctctatgtcaccggccacatcaaagaaatccttatcactgctggtggtgaaaatgtgccccccattcctgttgagaccttggttaagaagaagatccccatcatcagtaacgccatgttagtaggagataaactgaagtttctgagcatgttgctgacgctgaagtgtgagatgaatcagatgagcggagaacctctggacaagctgaacttcgaggccatcaacttctgtcggggtctgggcagccaggcatccaccgtgactgagattgtgaagcagcaagaccccctggtctacaaggccatccagcaaggcatcaatgctgtgaaccaggaagccatgaacaatgcacagaggattgaaaagtgggtcatcttggagaaggacttttccatctatggtggagagctaggtccaatgatgaaacttaagagacattttgtagcccagaaatacaaaaaacaaattgatcacatgtaccactgactgctttgatggagctgctctcagctgttctgatgccttcagcaggaagacctcattgcaataagtgaaatgctgctctaggtagaagctctccctgctgtttttaagaagccacattcctcattggtcagtttcttgattgttcgtctgttggagaggtgctccctagaagaacctgccatacgtttcaaagcaataaaatcactgtatatctttctaaggaccttcaagtcatgactccagggaagcctattgggaagtctactaaaaactgcctgatttacaagaaagacctgaacttgtgggctcccatttgatttttttctcctcaggggactcagacattagaaagaaaaagcctcacagatttgaagaactggacccccaaatcaactcacctgcctggaagcaactgggaaacccttccaataagtcctgataataaagcacttcaggg

SEQ ID NO: 104372 - DNA, 683 bp, Homo sapiens
  Payload ID: 501
  Gene Symbol: ACSBG2
  Gene Name: acyl-CoA synthetase bubblegum family member 2
  ENST ID: ENST00000590132
  CDS Start-End: 1-113
agaccttggttaagaagaagatccccatcatcagtaacgccatgttagtaggagataaactgaagtttctgagcatgttgctgacgctgaagccaggcatccaccgtgactgagattgtgaagcagcaagaccccctggtctacaaggccatccagcaaggcatcaatgctgtgaaccaggaagccatgaacaatgcacagaggattgaaaagtgggtcatcttggagaaggacttttccatctatggtggagagctagccttcagcaggaagacctcattgcaataagtgaaatgctgctctaggtagaagctctccctgctgtttttaagaagccacattcctcattggtcagtttcttgattgttcgtctgttggagaggtgctccctagaagaacctgccatacgtttcaaagcaataaaatcactgtatatctttctaaggaccttcaagtcatgactccagggaagcctattgggaagtctactaaaaactgcctgatttacaagaaagacctgaacttgtgggctcccatttgatttttttctcctcaggggactcagacattagaaagaaaaagcctcacagatttgaagaactggacccccaaatcaactcacctgcctggaagcaactgggaaacccttccaataagtcctgataataaagcacttcagggtc

SEQ ID NO: 104373 - DNA, 2690 bp, Homo sapiens
  Payload ID: 501
  Gene Symbol: ACSBG2
  Gene Name: acyl-CoA synthetase bubblegum family member 2
  Uniprot ID: Q5FVE4
  ENST ID: ENST00000591403
  CDS Start-End: 228-2228
atggggtagaaggcctgttgtggagggaaaccacccatcctcctgcctcccaccaccaccatcatcctggctggacggagagggtgacgggggctgggaaggggcagctcatgttcaggtttccaggaggggctacctgttgactgtctttgcaggaagaagaaaacacctgagtgaccagatgtcccagctccagtgctgtggagcatggtttctgcacacctggaatgactggaaccccaaagactcaagaaggagctaaagatcttgaagtagacatgaataaaacagaagttactcccaggctgtggaccacctgtcgagatggagaagtccttctgaggctatccaaacacggaccaggccatgagaccccgatgaccatccctgaattttttcgagagtcagtcaaccgatttggaacttatccagccctcgcatccaagaatggcaaaaagtgggaaattctgaatttcaaccagtactatgaggcttgtcggaaggctgcaaaatccttgatcaagctgggtttggagcgtttccacggagttggtatcctggggtttaactctgcagagtggtttatcactgctgttggtgccatcctagccgggggtctttgtgttggtatttatgccaccaactctgccgaggtttgtcaatatgtcatcactcatgccaaagtgaacatcttgctggttgagaatgatcaacagttacagaaaatcctttcgattccacagagcagcctagagcccctaaaagcgatcatccagtacagactgccaatgaagaagaacaacaacttgtactcttgggatgatttcatggaacttggcagaagtatccctgacacccaactggagcaggtcatcgagagccagaaggcgaatcaatgcgcagtgctcatctacacttcagggaccacaggcatacccaagggagtgatgctcagtcatgacaacatcacgtggattgcaggagcagtgacaaaggactttaaactgacagacaagcatgagacggtggttagctacctcccactcagccatattgcagcacagatgatggacatctgggtacccataaagattggggcgctcacatactttgctcaagcagatgctctcaagggcaccttggtaagtactctaaaggaggtaaaacctactgtcttcattggagtgcctcaaatttgggagaagatacatgagatggtgaagaaaaatagtgccaagtccatgggcttgaagaagaaggcattcgtgtgggcaagaaacattggcttcaaggtcaactcaaaaaagatgttggggaaatataatactcccgtgagctaccgcatggctaagactctcgtgttcagcaaagtcaagacatcccttggcttggatcactgtcactcttttatcagtgggactgcgcccctcaaccaagagactgccgagttctttctaagcttggacatacctataggcgagttgtatgggttgagtgagagctcgggaccccacacgatatccaaccagaataactacaggcttctaagctgtggcaagatcttgactgggtgtaagaatatgctgttccagcagaacaaggatggcattggggagatctgcctctggggtaggcacatcttcatgggctatctggaaagtgagactgaaactacagaggccatcgatgatgaaggctggctacactctggggatctgggccagctggacggtctgggtttcctctatgtcaccggccacatcaaagaaatccttatcactgctggtggtgaaaatgtgccccccattcctgttgagaccttggttaagaagaagatccccatcatcagtaacgccatgttagtaggagataaactgaagtttctgagcatgttgctgacgctgaagtgtgagatgaatcagatgagcggagaacctctggacaagctgaacttcgaggccatcaacttctgtcggggtctgggcagccaggcatccaccgtgactgagattgtgaagcagcaagaccccctggtctacaaggccatccagcaaggcatcaatgctgtgaaccaggaagccatgaacaatgcacagaggattgaaaagtgggtcatcttggagaaggacttttccatctatggtggagagctaggtccaatgatgaaacttaagagacattttgtagcccagaaatacaaaaaacaaattgatcacatgtaccactgactgctttgatggagctgctctcagctgttctgatgccttcagcaggaagacctcattgcaataagtgaaatgctgctctaggtagaagctctccctgctgtttttaagaagccacattcctcattggtcagtttcttgattgttcgtctgttggagaggtgctccctagaagaacctgccatacgtttcaaagcaataaaatcactgtatatctttctaaggaccttcaagtcatgactccagggaagcctattgggaagtctactaaaaactgcctgatttacaagaaagacctgaacttgtgggctcccatttgatttttttctcctcaggggactcagacattagaaagaaaaagcctcacagatttgaagaactggacccccaaatcaactcacctgcctggaagcaactgggaaacccttccaataagtcctgataataaagcacttcagggtccca

SEQ ID NO: 104374 - DNA, 619 bp, Homo sapiens
  Payload ID: 501
  Gene Symbol: ACSBG2
  Gene Name: acyl-CoA synthetase bubblegum family member 2
  ENST ID: ENST00000591738
  CDS Start-End: 232-619
caagactcccgtctcaaaaaacgaaagaaaagaaagaaaccactcccagactccctgcctgggcgggatcctttgatcaagccctcaacatgccttggggctctcttcacaatggaagaagaaaacacctgagtgaccagatgtcccagctccaggtgccttgccagatggccagaaccacacctcttgaagagtgacagtgctgtggagcatggtttctgcacacctggaatgactggaaccccaaagactcaagaaggagctaaagatcttgaagtagacatgaataaaacagaagttactcccaggctgtggaccacctgtcgagatggagaagtccttctgaggctatccaaacacggaccaggccatgagaccccgatgaccatccctgaattttttcgagagtcagtcaaccgatttggaacttatccagccctcgcatccaagaatggcaaaaagtgggaaattctgaatttcaaccagtactatgaggcttgtcggaaggctgcaaaatccttgatcaagctgggtttggagcgtttccacggagttggtatcctggggtttaactctgcagagtggtttatcactgctgttggtgccatcctagccgggt

SEQ ID NO: 104375 - DNA, 599 bp, Homo sapiens
  Payload ID: 501
  Gene Symbol: ACSBG2
  Gene Name: acyl-CoA synthetase bubblegum family member 2
  ENST ID: ENST00000589401
  CDS Start-End: 372-599
ctgttgtggagggaaaccacccatcctcctgcctcccaccaccaccatcatcctggctggacggagagggtgacgggggctgggaaggggcagctcatgttcaggtttccaggaggggctacctgttgactgtctttgcaggaagaagaaaacacctgagtgaccagatgtcccagctccaggtgccttgccagatggccagaaccacacctcttgaagagtgacaggtgccagtgccaggcgtagtggcatgcttctgtagtcccagctatctgaggggaagagagttccaggcagagggcacagcccgtacgaaggccccaaggaaggactgcacctgtgctgtggagcatggtttctgcacacctggaatgactggaaccccaaagactcaagaaggagctaaagatcttgaagtagacatgaataaaacagaagttactcccaggctgtggaccacctgtcgagatggagaagtccttctgaggctatccaaacacggaccaggccatgagaccccgatgaccatccctgaattttttcgagagtcagtcaaccgatttggaacttatccagccctcgcatccaagaatggcaaa

SEQ ID NO: 104376 - DNA, 881 bp, Homo sapiens
  Payload ID: 501
  Gene Symbol: ACSBG2
  Gene Name: acyl-CoA synthetase bubblegum family member 2
  ENST ID: ENST00000592677
  CDS Start-End: 261-665
gcctgttgtggagggaaaccacccatcctcctgcctcccaccaccaccatcatcctggctggacggagagggtgacgggggctgggaaggggcagctcatgttcaggtttccaggaggggctacctgttgactgtctttgcaggaagaagaaaacacctgagtgaccagatgtcccagctccaggtgccttgccagatggccagaaccacacctcttgaagagtgacagtgctgtggagcatggtttctgcacacctggaatgactggaaccccaaagactcaagaaggagctaaagatcttgaagtagacatgaataaaacagaagttactcccaggctgtggaccacctgtcgagatggagaagtccttctgaggctatccaaacacggaccaggccatgagaccccgatgaccatccctgaattttttcgagagtcagtcaaccgatttggaacttatccagccctcgcatccaagaatggcaaaaagtgggaaattctgaatttcaaccagtactatgaggcttgtcggaaggctgcaaaatccttgatcaagctgggtttggagcgtttccacggagttggtatcctggggtttaactctgcagagtggtttatcactgctgttggtgccatcctagccggattccacagagcagcctagagcccctaaaagcgatcatccagtacagactgccaatgaagaagaacaacaacttgtactcttgggatgatttcatggaacttggcagaagtatccctgacacccaactggagcaggtcatcgagagccagaaggcgaatcaatgcgcagtgctcatctacacttcagggaccacaggcatacccaagggagtgatgctcagtcatgacaacgtac

SEQ ID NO: 104377 - DNA, 2235 bp, Homo sapiens
  Payload ID: 502
  Gene Symbol: ACSF2
  Gene Name: acyl-CoA synthetase family member 2
  Uniprot ID: Q96CM8
  ENST ID: ENST00000300441
  CDS Start-End: 105-1952
ataggcagaggccaccctccccgcctccccgcccgctgcgcgcccgccccgccccggctcactttaaaagtttactcgggccgggacgcagggcaaagcgagccatggctgtctacgtcgggatgctgcgcctggggaggctgtgcgccgggagctcgggggtgctgggggcccgggccgccctctctcggagttggcaggaagccaggttgcagggtgtccgcttcctcagttccagagaggtggatcgcatggtctccacgcccatcggaggcctcagctacgttcaggggtgcaccaaaaagcatcttaacagcaagactgtgggccagtgcctggagaccacagcacagagggtcccagaacgagaggccttggtcgtcctccatgaagacgtcaggttgacctttgcccaactcaaggaggaggtggacaaagctgcttctggcctcctgagcattggcctctgcaaaggtgaccggctgggcatgtggggacctaactcctatgcatgggtgctcatgcagttggccaccgcccaggcgggcatcattctggtgtctgtgaacccagcctaccaggctatggaactggagtatgtcctcaagaaggtgggctgcaaggcccttgtgttccccaagcaattcaagacccagcaatactacaacgtcctgaagcagatctgtccagaagtggagaatgcccagccaggggccttgaagagtcagaggctcccagatctgaccacagtcatctcggtggatgcccctttgccggggaccctgctcctggatgaagtggtggcggctggcagcacacggcagcatctggaccagctccaatacaaccagcagttcctgtcctgccatgaccccatcaacatccagttcacctcggggacaacaggcagccccaagggggccaccctctcccactacaacattgtcaacaactccaacattttaggagagcgcctgaaactgcatgagaagacaccagagcagttgcggatgatcctgcccaaccccctgtaccattgcctgggttccgtggcaggcacaatgatgtgtctgatgtacggtgccaccctcatcctggcctctcccatcttcaatggcaagaaggcactggaggccatcagcagagagagaggcaccttcctgtatggtacccccacgatgttcgtggacattctgaaccagccagacttctccagttatgacatctcgaccatgtgtggaggtgtcattgctgggtcccctgcacctccagagttgatccgagccatcatcaacaagataaatatgaaggacctggtggttgcttatggaaccacagagaacagtcccgtgacattcgcgcacttccctgaggacactgtggagcagaaggcagaaagcgtgggcagaattatgcctcacacggaggcccggatcatgaacatggaggcagggacgctggcaaagctgaacacgcccggggagctgtgcatccgagggtactgcgtcatgctgggctactggggtgagcctcagaagacagaggaagcagtggatcaggacaagtggtattggacaggagatgtcgccacaatgaatgagcagggcttctgcaagatcgtgggccgctctaaggatatgatcatccggggtggtgagaacatctaccccgcagagctcgaggacttctttcacacacacccgaaggtgcaggaagtgcaggtggtgggagtgaaggacgatcggatgggggaagagatttgtgcctgcattcggctgaaggacggggaggagaccacggtggaggagataaaagctttctgcaaagggaagatctctcacttcaagattccgaagtacatcgtgtttgtcacaaactaccccctcaccatttcaggaaagatccagaaattcaaacttcgagagcagatggaacgacatctaaatctgtgaataaagcagcaggcctgtcctggccggttggcttgactctctcctgtcagaatgcaacctggctttatgcacctagatgtccccagcacccagttctgagccaggcacatcaaatgtcaaggaattgactgaacgaactaagagctcctggatgggtccgggaactcgcctgggcacaaggtgccaaaaggcaggcagcctgcccaggccctccctcctgtccatcccccacattcccctgtctgtccttgtgatttggcataaagagcttctgttttctttg

SEQ ID NO: 104378 - DNA, 2251 bp, Homo sapiens
  Payload ID: 502
  Gene Symbol: ACSF2
  Gene Name: acyl-CoA synthetase family member 2
  Uniprot ID: Q96CM8
  ENST ID: ENST00000427954
  CDS Start-End: 44-1966
ctttaaaagtttactcgggccgggacgcagggcaaagcgagccatggctgtctacgtcgggatgctgcgcctggggaggctgtgcgccgggagctcgggggtgctgggggcccgggccgccctctctcggagttggcaggaagccaggttgcagggtgtccgcttcctcagtgcaaggggtgggatggaagctggcaggcagaggatttcagttcccagtagcttcactgcctctgcagcagcacattccagagaggtggatcgcatggtctccacgcccatcggaggcctcagctacgttcaggggtgcaccaaaaagcatcttaacagcaagactgtgggccagtgcctggagaccacagcacagagggtcccagaacgagaggccttggtcgtcctccatgaagacgtcaggttgacctttgcccaactcaaggaggaggtggacaaagctgcttctggcctcctgagcattggcctctgcaaaggtgaccggctgggcatgtggggacctaactcctatgcatgggtgctcatgcagttggccaccgcccaggcgggcatcattctggtgtctgtgaacccagcctaccaggctatggaactggagtatgtcctcaagaaggtgggctgcaaggcccttgtgttccccaagcaattcaagacccagcaatactacaacgtcctgaagcagatctgtccagaagtggagaatgcccagccaggggccttgaagagtcagaggctcccagatctgaccacagtcatctcggtggatgcccctttgccggggaccctgctcctggatgaagtggtggcggctggcagcacacggcagcatctggaccagctccaatacaaccagcagttcctgtcctgccatgaccccatcaacatccagttcacctcggggacaacaggcagccccaagggggccaccctctcccactacaacattgtcaacaactccaacattttaggagagcgcctgaaactgcatgagaagacaccagagcagttgcggatgatcctgcccaaccccctgtaccattgcctgggttccgtggcaggcacaatgatgtgtctgatgtacggtgccaccctcatcctggcctctcccatcttcaatggcaagaaggcactggaggccatcagcagagagagaggcaccttcctgtatggtacccccacgatgttcgtggacattctgaaccagccagacttctccagttatgacatctcgaccatgtgtggaggtgtcattgctgggtcccctgcacctccagagttgatccgagccatcatcaacaagataaatatgaaggacctggtggttgcttatggaaccacagagaacagtcccgtgacattcgcgcacttccctgaggacactgtggagcagaaggcagaaagcgtgggcagaattatgcctcacacggaggcccggatcatgaacatggaggcagggacgctggcaaagctgaacacgcccggggagctgtgcatccgagggtactgcgtcatgctgggctactggggtgagcctcagaagacagaggaagcagtggatcaggacaagtggtattggacaggagatgtcgccacaatgaatgagcagggcttctgcaagatcgtgggccgctctaaggatatgatcatccggggtggtgagaacatctaccccgcagagctcgaggacttctttcacacacacccgaaggtgcaggaagtgcaggtggtgggagtgaaggacgatcggatgggggaagagatttgtgcctgcattcggctgaaggacggggaggagaccacggtggaggagataaaagctttctgcaaagggaagatctctcacttcaagattccgaagtacatcgtgtttgtcacaaactaccccctcaccatttcaggaaagatccagaaattcaaacttcgagagcagatggaacgacatctaaatctgtgaataaagcagcaggcctgtcctggccggttggcttgactctctcctgtcagaatgcaacctggctttatgcacctagatgtccccagcacccagttctgagccaggcacatcaaatgtcaaggaattgactgaacgaactaagagctcctggatgggtccgggaactcgcctgggcacaaggtgccaaaaggcaggcagcctgcccaggccctccctcctgtccatcccccacattcccctgtctgtccttgtgatttggcataaagagcttctgttttctttggc

SEQ ID NO: 104379 - DNA, 407 bp, Homo sapiens
  Payload ID: 502
  Gene Symbol: ACSF2
  Gene Name: acyl-CoA synthetase family member 2
  ENST ID: ENST00000510262
  CDS Start-End: 1-314
atggcaagaaggcactggaggccatcagcagagagagaggcaccttcctgtatggtacccccacgatgttcgtggacattctgaaccagccagacttctccagttatgacatctcgaccatgtgtggaggtgtcattgctgggtcccctgcacctccagagttgatccgagccatcatcaacaagataaatatgaaggacctggtgaaatctcaggaagaaattgcagcatgggaagatggacagcaaagcaccgatgtcctgctagaacgtcctggcaggttgcttatggaaccacagagaacagtcccgtgacattcgcgcacttccctgaggacactgtggagcagaaggcagaaagcgtgggcagaattatgcctcacacggaggcccggatcatgaacatgg

SEQ ID NO: 104380 - DNA, 2098 bp, Homo sapiens
  Payload ID: 502
  Gene Symbol: ACSF2
  Gene Name: acyl-CoA synthetase family member 2
  Uniprot ID: Q96CM8
  ENST ID: ENST00000502667
  CDS Start-End: 11-1819
aaagcgagccatggctgtctacgtcgggatgctgcgcctggggaggctgtgcgccgggagctcgggggtgctgggggcccgggccgccctctctcggagttggcaggaagccaggttgcagggtgtccgcttcctcagttccagagaggtggatcgcatggtctccacgcccatcggaggcctcagctacgttcaggggtgcaccaaaaagcatcttaacagcaagactgtgggccagtgcctggagaccacagcacagagggtcccagaacgagaggccttggtcgtcctccatgaagacgtcaggttgacctttgcccaactcaaggaggaggtggacaaagctgcttctggcctcctgagcattggcctctgcaaaggtgaccggctgggcatgtggggacctaactcctatgcatgggtgctcatgcagttggccaccgcccaggctatggaactggagtatgtcctcaagaaggtgggctgcaaggcccttgtgttccccaagcaattcaagacccagcaatactacaacgtcctgaagcagatctgtccagaagtggagaatgcccagccaggggccttgaagagtcagaggctcccagatctgaccacagtcatctcggtggatgcccctttgccggggaccctgctcctggatgaagtggtggcggctggcagcacacggcagcatctggaccagctccaatacaaccagcagttcctgtcctgccatgaccccatcaacatccagttcacctcggggacaacaggcagccccaagggggccaccctctcccactacaacattgtcaacaactccaacattttaggagagcgcctgaaactgcatgagaagacaccagagcagttgcggatgatcctgcccaaccccctgtaccattgcctgggttccgtggcaggcacaatgatgtgtctgatgtacggtgccaccctcatcctggcctctcccatcttcaatggcaagaaggcactggaggccatcagcagagagagaggcaccttcctgtatggtacccccacgatgttcgtggacattctgaaccagccagacttctccagttatgacatctcgaccatgtgtggaggtgtcattgctgggtcccctgcacctccagagttgatccgagccatcatcaacaagataaatatgaaggacctggtggttgcttatggaaccacagagaacagtcccgtgacattcgcgcacttccctgaggacactgtggagcagaaggcagaaagcgtgggcagaattatgcctcacacggaggcccggatcatgaacatggaggcagggacgctggcaaagctgaacacgcccggggagctgtgcatccgagggtactgcgtcatgctgggctactggggtgagcctcagaagacagaggaagcagtggatcaggacaagtggtattggacaggagatgtcgccacaatgaatgagcagggcttctgcaagatcgtgggccgctctaaggatatgatcatccggggtggtgagaacatctaccccgcagagctcgaggacttctttcacacacacccgaaggtgcaggaagtgcaggtggtgggagtgaaggacgatcggatgggggaagagatttgtgcctgcattcggctgaaggacggggaggagaccacggtggaggagataaaagctttctgcaaagggaagatctctcacttcaagattccgaagtacatcgtgtttgtcacaaactaccccctcaccatttcaggaaagatccagaaattcaaacttcgagagcagatggaacgacatctaaatctgtgaataaagcagcaggcctgtcctggccggttggcttgactctctcctgtcagaatgcaacctggctttatgcacctagatgtccccagcacccagttctgagccaggcacatcaaatgtcaaggaattgactgaacgaactaagagctcctggatgggtccgggaactcgcctgggcacaaggtgccaaaaggcaggcagcctgcccaggccctccctcctgtccatcccccacattcccctgtctgtccttgtgatttggcataaagagcttctgttttc

SEQ ID NO: 104381 - DNA, 665 bp, Homo sapiens
  Payload ID: 502
  Gene Symbol: ACSF2
  Gene Name: acyl-CoA synthetase family member 2
  ENST ID: ENST00000508245
  CDS Start-End: 1-258
acggtgccaccctcatcctggcctctcccatcttcaatggcaagaaggcactggaggccatcagcagagagaggtgtcattgctgggtcccctgcacctccagagttgatccgagccatcatcaacaagataaatatgaaggacctggtgaaatctcaggaagaaattgcagcatgggaagatggacagcaaagcaccgatgtcctgctagaacgtcctggcaggttgcttatggaaccacagagaacagtcccgtgacattcgcgcacttccctgaggacactgtggagcagaaggcagaaagcgtgggcagaattatgcctcacacggaggcccggatcatgaacatggaggcagggacgctggcaaagctgaacacgcccggggagctgtgcatccgagggtactgcgtcatgctgggctactggggtgagcctcagaagacagaggaagcagtggatcaggacaagtggtattggacaggagatgtcgccacaatgaatgagcagggcttctgcaagatcgtgggccgctctaaggatatgatcatccggggtggtgagaacatctaccccgcagagctcgaggacttctttcacacacacccgaaggtgcaggaagtgcaggtggtgggagtgaaggacgatcggatgggggaagagatt

SEQ ID NO: 104382 - DNA, 594 bp, Homo sapiens
  Payload ID: 502
  Gene Symbol: ACSF2
  Gene Name: acyl-CoA synthetase family member 2
  ENST ID: ENST00000506582
  CDS Start-End: 45-594
actttaaaagtttactcgggccgggacgcagggcaaagcgagccatggctgtctacgtcgggatgctgcgcctggggaggctgtgcgccgggagctcgggggtgctgggggcccgggccgccctctctcggagttggcaggaagccaggttgcagggtgtccgcttcctcagttccagagaggtggatcgcatggtctccacgcccatcggaggcctcagctacgttcaggggtgcaccaaaaagcatcttaacagcaagactgtgggccagtgcctggagaccacagcacagagggtcccagaacgagaggccttggtcgtcctccatgaagacgtcaggttgacctttgcccaactcaaggaggaggtggacaaagctgcttctggcctcctgagcattggcctctgcaaaggtgtctgtgaacccagcctaccaggctatggaactggagtatgtcctcaagaaggtgggctgcaaggcccttgtgttccccaagcaattcaagacccagcaatactacaacgtcctgaagcagatctgtccagaagtggagaatgcccagccaggggccttgaagagtcagaggctccca

SEQ ID NO: 104383 - DNA, 1745 bp, Homo sapiens
  Payload ID: 502
  Gene Symbol: ACSF2
  Gene Name: acyl-CoA synthetase family member 2
  ENST ID: ENST00000510410
  CDS Start-End: 105-242
ataggcagaggccaccctccccgcctccccgcccgctgcgcgcccgccccgccccggctcactttaaaagtttactcgggccgggacgcagggcaaagcgagccatggctgtctacgtcgggatgctgcgcctggggaggctgtgcgccgggagctcgggggtgctgggggcccgggccgccctctctcggagttggcaggaagccaggttgcagggtgtccgcttcctcaggtgtctgtgaacccagcctaccaggctatggaactggagtatgtcctcaagaaggtgggctgcaaggcccttgtgttccccaagcaattcaagacccagcaatactacaacgtcctgaagcagatctgtccagaagtggagaatgcccagccaggggccttgaagagtcagaggctcccagatctgaccacagtcatctcggtggatgcccctttgccggggaccctgctcctggatgaagtggtggcggctggcagcacacggcagcatctggaccagctccaatacaaccagcagttcctgtcctgccatgaccccatcaacatccagttcacctcggggacaacaggcagccccaagggggccaccctctcccactacaacattgtcaacaactccaacattttaggagagcgcctgaaactgcatgagaagacaccagagcagttgcggatgatcctgcccaaccccctgtaccattgcctgggttccgtggcaggcacaatgatgtgtctgatgtacggtgccaccctcatcctggcctctcccatcttcaatggcaagaaggcactggaggccatcagcagagagagaggcaccttcctgtatggtacccccacgatgttcgtggacattctgaaccagccagacttctccagttatgacatctcgaccatgtgtggaggtgtcattgctgggtcccctgcacctccagagttgatccgagccatcatcaacaagataaatatgaaggacctggtggttgcttatggaaccacagagaacagtcccgtgacattcgcgcacttccctgaggacactgtggagcagaaggcagaaagcgtgggcagaattatgcctcacacggaggcccggatcatgaacatggaggcagggacgctggcaaagctgaacacgcccggggagctgtgcatccgagggtactgcgtcatgctgggctactggggtgagcctcagaagacagaggaagcagtggatcaggacaagtggtattggacaggagatgtcgccacaatgaatgagcagggcttctgcaagatcgtgggccgctctaaggatatgatcatccggggtggtgagaacatctaccccgcagagctcgaggacttctttcacacacacccgaaggtgcaggaagtgcaggtggtgggagtgaaggacgatcggatgggggaagagatttgtgcctgcattcggctgaaggacggggaggagaccacggtggaggagataaaagctttctgcaaagggaagatctctcacttcaagattccgaagtacatcgtgtttgtcacaaactaccccctcaccatttcaggaaagatccagaaattcaaacttcgagagcagatggaacgacatctaaatctgtgaataaagcagcaggcctgtcctggccggttggcttgactctctcctgtcagaatgcaacctggctttatgcacctagatgtccccagcacccagttctgagccaggcacatcaaatgtc

SEQ ID NO: 104384 - DNA, 1881 bp, Homo sapiens
  Payload ID: 502
  Gene Symbol: ACSF2
  Gene Name: acyl-CoA synthetase family member 2
  ENST ID: ENST00000504392
  CDS Start-End: 45-1763
actttaaaagtttactcgggccgggacgcagggcaaagcgagccatggctgtctacgtcgggatgctgcgcctggggaggctgtgcgccgggagctcgggggtgctgggggcccgggccgccctctctcggagttggcaggaagccaggttgcagggtgtccgcttcctcagttccagagaggtggatcgcatggtctccacgcccatcggaggcctcagctacgttcaggggtgcaccaaaaagcatcttaacagcaagactgtgggccagtgcctggagaccacagcacagagggtcccagaacgagaggccttggtcgtcctccatgaagacgtcaggttgacctttgcccaactcaaggaggaggtgtctgtgaacccagcctaccaggctatggaactggagtatgtcctcaagaaggtgggctgcaaggcccttgtgttccccaagcaattcaagacccagcaatactacaacgtcctgaagcagatctgtccagaagtggagaatgcccagccaggggccttgaagagtcagaggctcccagatctgaccacagtcatctcggtggatgcccctttgccggggaccctgctcctggatgaagtggtggcggctggcagcacacggcagcatctggaccagctccaatacaaccagcagttcctgtcctgccatgaccccatcaacatccagttcacctcggggacaacaggcagccccaagggggccaccctctcccactacaacattgtcaacaactccaacattttaggagagcgcctgaaactgcatgagaagacaccagagcagttgcggatgatcctgcccaaccccctgtaccattgcctgggttccgtggcaggcacaatgatgtgtctgatgtacggtgccaccctcatcctggcctctcccatcttcaatggcaagaaggcactggaggccatcagcagagagagaggcaccttcctgtatggtacccccacgatgttcgtggacattctgaaccagccagacttctccagttatgacatctcgaccatgtgtggaggtgtcattgctgggtcccctgcacctccagagttgatccgagccatcatcaacaagataaatatgaaggacctggtggttgcttatggaaccacagagaacagtcccgtgacattcgcgcacttccctgaggacactgtggagcagaaggcagaaagcgtgggcagaattatgcctcacacggaggcccggatcatgaacatggaggcagggacgctggcaaagctgaacacgcccggggagctgtgcatccgagggtactgcgtcatgctgggctactggggtgagcctcagaagacagaggaagcagtggatcaggacaagtggtattggacaggagatgtcgccacaatgaatgagcagggcttctgcaagatcgtgggccgctctaaggatatgatcatccggggtggtgagaacatctaccccgcagagctcgaggacttctttcacacacacccgaaggtgcaggaagtgcaggtggtgggagtgaaggacgatcggatgggggaagagatttgtgcctgcattcggctgaaggacggggaggagaccacggtggaggagataaaagctttctgcaaagggaagatctctcacttcaagattccgaagtacatcgtgtttgtcacaaactaccccctcaccatttcaggaaagatccagaaattcaaacttcgagagcagatggaacgacatctaaatctgtgaataaagcagcaggcctgtcctggccggttggcttgactctctcctgtcagaatgcaacctggctttatgcacctagatgtccccagcacccagttctgagccaggcacatcaaatgtc

SEQ ID NO: 104385 - DNA, 554 bp, Homo sapiens
  Payload ID: 502
  Gene Symbol: ACSF2
  Gene Name: acyl-CoA synthetase family member 2
  ENST ID: ENST00000503408
  CDS Start-End: 45-209
actttaaaagtttactcgggccgggacgcagggcaaagcgagccatggctgtctacgtcgggatgctgcgcctggggaggctgtgcgccgggagctcgggggtgctgggggcccgggccgccctctctcggagttggcaggaagccaggttgcagggtgtccgcttcctcaggccctcaggagaaaaactggcccaccaaggagtctaaaatcctaagaccttggattcaagcccagggtccaggcacgcttccctggttcctcaggaaggaccccagtgacctgtttattctccaggaggcaggggctaggggtgaaggcatggtcctgctttttccagagaggtggatcgcatggtctccacgcccatcggaggcctcagctacgttcaggggtgcaccaaaaagcatcttaacagcaagactgtgggccagtgcctggagaccacagcacagagggtcccagaacgagaggccttggtcgtcctccatgaagacgtcaggttgacctttgcccaactcaaggaggaggtggacaaagctgcttctggcctc

SEQ ID NO: 104386 - DNA, 3664 bp, Homo sapiens
  Payload ID: 503
  Gene Symbol: ACSF3
  Gene Name: acyl-CoA synthetase family member 3
  Uniprot ID: Q4G176
  ENST ID: ENST00000317447
  CDS Start-End: 378-2108
gggggacgcgcttgggcgacggacgcgccgcgccggggaagctgttgggcgccggaactggtccggcccgactcacgaccccgcgggacccggccggaacccggcccgaccccggcgcgcgcgcggcggaggacgaggaagagttgtggcgaggcagatcctgccccgtggccgcggccgtctcgtgtcccaccggccttccgggttccagcgccaggcctggtgcctgccccaggaggatgagcatttgcattgcctgcaccttatcgtgcccttccacctgctgaagcagctgtgcctgccgctcttgtgaactgcgaacttccccttacctcctctctctggctcgggagctggctcggccgcctgtcagtgcaatgctgccccatgtggtgctcaccttccggcgcctgggctgcgccttggcgtcctgccggctggcgcctgcgagacacagaggaagtggtcttctgcacacagccccagtggcccgctcggacaggagcgccccggtgttcacccgtgccctggcctttggggacagaatcgccctggttgaccagcacggccgccacacgtacagggagctttattcccgcagccttcgcctgtcccaggagatctgcaggctctgcgggtgtgtcggcggggacctccgggaggagagggtctccttcctatgcgctaacgatgcctcctacgtcgtggcccagtgggcgtcatggatgagtggcggtgtggcagtccccctctacaggaagcatcccgcggcccagctggagtatgtcatctgcgactcccagagctctgtggtccttgccagccaggagtacctggagctcctgagcccggtggtcaggaagctgggggtcccgctgctgccgctcacaccagccatctacactggagcagtagaggaaccggcagaggtcccggtcccagagcagggatggaggaacaagggcgccatgatcatctacaccagtgggaccacggggaggcccaagggcgtgctgagcacgcaccaaaacatcagggctgtggtgaccgggctggtccacaagtgggcatggaccaaagacgacgtgatcctccacgtgctcccgctgcaccacgtccatggtgtggtcaacgcgctgctctgtcctctctgggtgggagccacctgtgtgatgatgcctgagttcagccctcagcaggtttgggaaaagttcttaagttctgaaacgccgcggatcaatgtctttatggcagtgcctacaatatacaccaagctgatggagtactacgacaggcattttacccagccgcacgcccaggatttcttgcgtgcagtttgtgaagaaaaaattaggctgatggtctcaggctcagctgccctgcccctcccagtgctggagaagtggaagaacatcacgggccacaccctgctggagcggtatggcatgaccgagatcggcatggctctgtccgggcccctgaccactgccgtgcgcctgccaggttccgtggggaccccactgcctggagtacaggtgcgcattgtctcagaaaacccacagagggaagcctgctcctacaccatccacgcagagggagacgagagggggaccaaggtgaccccagggtttgaagaaaaggagggggagctgctggtgaggggaccctccgtgtttcgagaatactggaataaaccagaagaaactaagagtgcattcaccctggatggctggtttaagacaggggacaccgtggtgtttaaggatggccagtactggatccgaggccggacctcagtggacatcatcaagactggaggctacaaggtcagcgccctggaggtggagtggcacctgctggcccaccccagcatcacagatgtggctgtgattggagttccggatatgacatggggccagcgggtcactgctgtggtgaccctccgagaaggacactcactgtcccacagggagctcaaagagtgggccagaaatgtcctggccccgtacgcggtgccctcggagctggtgctggtggaggagatcccgcggaaccagatgggcaagattgacaagaaggcgctcatcaggcacttccacccctcatgacccggcagactgggactgcgggtctggtggggagcagcagacgtccccttcacaccgagaaccacgggggcccgtccaagacctggcctcccttaaacctgaaccccccaaatcaggtcacgtagaatcaagaactgtttgggatgaaatcaccatgtggggtccccagcctcgggccagttgttgcagctcaaggagaccgtccctggtgtcacctctgcctggtcaccgccgacctcatctgtgcagcgcggtgcagccagcccctggccccacgtgctgaggcacctcccgccccacagtgccctgcagttgccaggctctccagggcaggtcccagaggtttcccacaaaaaacaaagactccactggaggaaacaagcccctgtcccacgccgtctgcacgtgcctgtgcctcacccagagccagtgtctcccggcccacataggaggtctgggcagccacccagggggccctcctgggaggagctgagggttcacaagcctcccagaaccagccctgtcccatgggttccgtgcatttcctggtgctgctcttggaggagagcagctcccactgtggggacacctgccaccctgcacactactgtgtgtccatcagcatgtgtcacagaaagtgcgtggacggatggccccggagctgctctgccgtgaccctgcctcaccccccagcgcagggactttccaggtcatctccacaccagcccctcagccggtgaaccctctctcccatcaccgtctccacccagacccccacctgccccatggcccccatttcatgtctgtggctcaccagcttttccccagacccagctccggagcccacaggcgtggccgatgcagaaacctcaggaaggtgtgttgtgaatgttgggtgcacccacgttgcatttacttagcggggccaattcagatgcacaggggccacatgcagaatccagaagtttctggacaattttcagaagaataggctgcctcctccccacagcctgggggaagtaacagtcatcgcccagcagtgtctggcctgaacttacccagaacattctgcccccggaatgcacgtctgaaagagtggccagaaacgagtgtgccgggcaggaggccagccccatctcaggctcacgtgcctctgacaggagaccagccccatctcaggctcacatgcctcgcggacagttggacgtggcctggggcccctgctcacttgagcatgtcgcccaccaagcttgtctgaggccacagagcagcgtcccagccctgttttccaggactggtgggtgccccagtccacggccctgccccacccgaactcctgcctcacggtgtggccttgtgcatccccatggcctgaccccgggaacagtcagaggaaggggtcccgccctcccgccagaggcctggacccaagggaacggcagtcagagactacagtccagacgtttgtgtctaggccttgctggtagctaaggaaatgccttctgttgggaaaaggtcaaatttaacatagcaaaatttttacttaattccactaa

SEQ ID NO: 104387 - DNA, 1541 bp, Homo sapiens
  Payload ID: 503
  Gene Symbol: ACSF3
  Gene Name: acyl-CoA synthetase family member 3
  ENST ID: ENST00000378345
  CDS Start-End: 225-1160
ccggccggaacccggcccgaccccggcgcgcgcgcggcggaggacgaggaagagttgtggcgaggcagatcctgccccgtggccgcggccgtctcgtgaccgggctggtccacaagtgggcatggaccaaagacgacgtgatcctccacgtgctcccgctgcaccacgtccatggtgtggtcaacgcgctgctctgtcctctctgggtgggagccacctgtgtgatgatgcctgagttcagccctcagcaggtttgggaaaagttcttaagttctgaaacgccgcggatcaatgtctttatggcagtgcctacaatatacaccaagctgatggagtactacgacaggcattttacccagccgcacgcccaggatttcttgcgtgcagtttgtgaagaaaaaattaggctgatggtctcaggctcagctgccctgcccctcccagtgctggagaagtggaagaacatcacgggccacaccctgctggagcggtatggcatgaccgagatcggcatggctctgtccgggcccctgaccactgccgtgcgcctgccaggttccgtggggaccccactgcctggagtacaggtgcgcattgtctcagaaaacccacagagggaagcctgctcctacaccatccacgcagagggagacgagagggggaccaaggtgaccccagggtttgaagaaaaggagggggagctgctggtgaggggaccctccgtgtttcgagaatactggaataaaccagaagaaactaagagtgcattcaccctggatggctggtttaagacaggggacaccgtggtgtttaaggatggccagtactggatccgaggccggacctcagtggacatcatcaagactggaggctacaaggtcagcgccctggaggtggagtggcacctgctggcccaccccagcatcacagatgtggctgtgattggagttccggatatgacatggggccagcgggtcactgctgtggtgaccctccgagaaggacactcactgtcccacagggagctcaaagagtgggccagaaatgtcctggccccgtacgcggtgccctcggagctggtgctggtggaggagatcccgcggaaccagatgggcaagattgacaagaaggcgctcatcaggcacttccacccctcatgacccggcagactgggactgcgggtctggtggggagcagcagacgtccccttcacaccgagaaccacgggggcccgtccaagacctggcctcccttaaacctgaaccccccaaatcaggtcacgtagaatcaagaactgtttgggatgaaatcaccatgtggggtccccagcctcgggccagttgttgcagctcaaggagaccgtccctggtgtcacctctgcctggtcaccgccgacctcatctgtgcagcgcggtgcagccagcccctggccccacgtgctgaggcacctcccgccccacagtgccctgcagttgccaggctctccagggcaggtcccagaggtttcccacaaaaaacaaagactccactggaggaaacaa

SEQ ID NO: 104388 - DNA, 2247 bp, Homo sapiens
  Payload ID: 503
  Gene Symbol: ACSF3
  Gene Name: acyl-CoA synthetase family member 3
  Uniprot ID: Q4G176
  ENST ID: ENST00000406948
  CDS Start-End: 135-1865
acgaccccgcgggacccggccggaacccggcccgaccccggcgcgcgcgcggcggaggacgaggaagagttgtggcgaggcagatcctgccccgtggccgcggccgtctcgtagctcggccgcctgtcagtgcaatgctgccccatgtggtgctcaccttccggcgcctgggctgcgccttggcgtcctgccggctggcgcctgcgagacacagaggaagtggtcttctgcacacagccccagtggcccgctcggacaggagcgccccggtgttcacccgtgccctggcctttggggacagaatcgccctggttgaccagcacggccgccacacgtacagggagctttattcccgcagccttcgcctgtcccaggagatctgcaggctctgcgggtgtgtcggcggggacctccgggaggagagggtctccttcctatgcgctaacgatgcctcctacgtcgtggcccagtgggcgtcatggatgagtggcggtgtggcagtccccctctacaggaagcatcccgcggcccagctggagtatgtcatctgcgactcccagagctctgtggtccttgccagccaggagtacctggagctcctgagcccggtggtcaggaagctgggggtcccgctgctgccgctcacaccagccatctacactggagcagtagaggaaccggcagaggtcccggtcccagagcagggatggaggaacaagggcgccatgatcatctacaccagtgggaccacggggaggcccaagggcgtgctgagcacgcaccaaaacatcagggctgtggtgaccgggctggtccacaagtgggcatggaccaaagacgacgtgatcctccacgtgctcccgctgcaccacgtccatggtgtggtcaacgcgctgctctgtcctctctgggtgggagccacctgtgtgatgatgcctgagttcagccctcagcaggtttgggaaaagttcttaagttctgaaacgccgcggatcaatgtctttatggcagtgcctacaatatacaccaagctgatggagtactacgacaggcattttacccagccgcacgcccaggatttcttgcgtgcagtttgtgaagaaaaaattaggctgatggtctcaggctcagctgccctgcccctcccagtgctggagaagtggaagaacatcacgggccacaccctgctggagcggtatggcatgaccgagatcggcatggctctgtccgggcccctgaccactgccgtgcgcctgccaggttccgtggggaccccactgcctggagtacaggtgcgcattgtctcagaaaacccacagagggaagcctgctcctacaccatccacgcagagggagacgagagggggaccaaggtgaccccagggtttgaagaaaaggagggggagctgctggtgaggggaccctccgtgtttcgagaatactggaataaaccagaagaaactaagagtgcattcaccctggatggctggtttaagacaggggacaccgtggtgtttaaggatggccagtactggatccgaggccggacctcagtggacatcatcaagactggaggctacaaggtcagcgccctggaggtggagtggcacctgctggcccaccccagcatcacagatgtggctgtgattggagttccggatatgacatggggccagcgggtcactgctgtggtgaccctccgagaaggacactcactgtcccacagggagctcaaagagtgggccagaaatgtcctggccccgtacgcggtgccctcggagctggtgctggtggaggagatcccgcggaaccagatgggcaagattgacaagaaggcgctcatcaggcacttccacccctcatgacccggcagactgggactgcgggtctggtggggagcagcagacgtccccttcacaccgagaaccacgggggcccgtccaagacctggcctcccttaaacctgaaccccccaaatcaggtcacgtagaatcaagaactgtttgggatgaaatcaccatgtggggtccccagcctcgggccagttgttgcagctcaaggagaccgtccctggtgtcacctctgcctggtcaccgccgacctcatctgtgcagcgcggtgcagccagcccctggccccacgtgctgaggcacctcccgccccacagtgccctgcagttgccaggctctccagggcaggtcccagaggtttcccacaaaaaacaaagactccactggaggaaacaag

SEQ ID NO: 104389 - DNA, 550 bp, Homo sapiens
  Payload ID: 503
  Gene Symbol: ACSF3
  Gene Name: acyl-CoA synthetase family member 3
  ENST ID: ENST00000537895
  CDS Start-End: 234-550
agtttccagggggctcattaagggagatgtggacagaatccgtggcggggtggtgattcccacccagcctctgccagtttccagggagctccattaggccagaggtgaccgggctggtccacaagtgggcatggaccaaagacgacgtgatcctccacgtgctcccgctgcaccacgtccatggtgtggtcaacgcgctgctctgtcctctctgggtgggagccacctgtgtgatgatgcctgagttcagccctcagcaggtttgggaaaagttcttaagttctgaaacgccgcggatcaatgtctttatggcagtgcctacaatatacaccaagctgatggagtactacgacaggcattttacccagccgcacgcccaggatttcttgcgtgcagtttgtgaagaaaaaattaggctgatggtctcaggctcagctgccctgcccctcccagtgctggagaagtggaagaacatcacgggccacaccctgctggagcggtatggcatgaccgagatcggcatggctctgtccgggcccctgaccactgc

SEQ ID NO: 104390 - DNA, 869 bp, Homo sapiens
  Payload ID: 503
  Gene Symbol: ACSF3
  Gene Name: acyl-CoA synthetase family member 3
  ENST ID: ENST00000537290
  CDS Start-End: 159-869
gggcgccggaactggtccggcccgactcacgaccccgcgggacccggccggaacccggcccgaccccggcgcgcgcgcggcggaggacgaggaagagttgtggcgaggcagatcctgccccgtggccgcggccgtctcctcggccgcctgtcagtgcaatgctgccccatgtggtgctcaccttccggcgcctgggctgcgccttggcgtcctgccggctggcgcctgcgagacacagaggaagtggtcttctgcacacagccccagtggcccgctcggacaggagcgccccggtgttcacccgtgccctggcctttggggacagaatcgccctggttgaccagcacggccgccacacgtacagggagctttattcccgcagccttcgcctgtcccaggagatctgcaggctctgcgggtgtgtcggcggggacctccgggaggagagggtctccttcctatgcgctaacgatgcctcctacgtcgtggcccagtgggcgtcatggatgagtggcggtgtggcagtccccctctacaggaagcatcccgcggcccagctggagtatgtcatctgcgactcccagagctctgtggtccttgccagccaggagtacctggagctcctgagcccggtggtcaggaagctgggggtcccgctgctgccgctcacaccagccatctacactggagcagtagaggaaccggcagaggtcccggtcccagagcagggatggaggaacaagggcgccatgatcatctacaccagtgggaccacggggaggcccaagggcgtgctgagcacgcaccaaaacatcagggctgtggtgaccgggctggtccacaagtgggcatggaccaaagacgacgtg

SEQ ID NO: 104391 - DNA, 940 bp, Homo sapiens
  Payload ID: 503
  Gene Symbol: ACSF3
  Gene Name: acyl-CoA synthetase family member 3
  ENST ID: ENST00000543676
  CDS Start-End: 1-550
gctgctctgtcctctctgggtgggagccacctgtgtgatgatgcctgagttcagccctcagcaggtttgggaaaagttcttaagttctgaaacgccgcggatcaatgtctttatggcagtgcctacaatatacaccaagctgatggagtactacgacaggcattttacccagccgcacgcccaggatttcttgcgtgcagtttgtgaagaaaaaattaggctgatggtctcaggctcagctgccctgcccctcccagtgctggagaagtggaagaacatcacgggccacaccctgctggagcggtatggcatgaccgagatcggcatggctctgtccgggcccctgaccactgccgtgcgcctgccaggttccgtggggaccccactgcctggagtacaggtgcgcattgtctcagaaaacccacagagggaagcctgctcctacaccatccacgcagagggagacgagagggggaccaagggccccagcccatgctgttgtcctgacatgcctctcctgggattcctgcctctgccctgctggtactaggctgctggccacaccccacatctcaggttcctgaatacaccggcccttcctggctctcaagtctgtgccctgcagtgcccctgcccccaactcgaggacctcccagctcagccagttccaaccctgtctgcagggacggggctcagcctgtgcctgggttggggacaccatctagtcagaaatgtccccagcagagagcagaacgtgagtggcgtgtggaggagtgagacgccccgtggctgtgcagccctctccaggtgtcagtcagctgacactcctgcctctgagcacctgctctgccggaaatggcagaaatgttgccagagaaaggggcggagcgggggtggggagcatttctgtcttaaattaaaacaaaacttaactgcttca

SEQ ID NO: 104392 - DNA, 883 bp, Homo sapiens
  Payload ID: 503
  Gene Symbol: ACSF3
  Gene Name: acyl-CoA synthetase family member 3
  ENST ID: ENST00000544543
  CDS Start-End: 179-883
aattccctaaagcctctggctgtgtgtggcgctgtcctctgtccccagggtgaccgggctggtccacaagtgggcatggaccaaagacgacgtgatcctccacgtgctcccgctgcaccacgtccatggtgtggtcaacgcgctgctctgtcctctctgggtgggagccacctgtgtgatgatgcctgagttcagccctcagcaggtttgggaaaagttcttaagttctgaaacgccgcggatcaatgtctttatggcagtgcctacaatatacaccaagctgatggagtactacgacaggcattttacccagccgcacgcccaggatttcttgcgtgcagtttgtgaagaaaaaattaggctgatggtctcaggctcagctgccctgcccctcccagtgctggagaagtggaagaacatcacgggccacaccctgctggagcggtatggcatgaccgagatcggcatggctctgtccgggcccctgaccactgccgtgcgcctgccaggttccgtggggaccccactgcctggagtacaggtgcgcattgtctcagaaaacccacagagggaagcctgctcctacaccatccacgcagagggagacgagagggggaccaaggtgaccccagggtttgaagaaaaggagggggagctgctggtgaggggaccctccgtgtttcgagaatactggaataaaccagaagaaactaagagtgcattcaccctggatggctggtttaagacaggggacaccgtggtgtttaaggatggccagtactggatccgaggccggacctcagtggacatcatcaagactggaggctacaaggtcagcgccctggaggtggagtggcacctgctggcccaccccagcatcaca

SEQ ID NO: 104393 - DNA, 421 bp, Homo sapiens
  Payload ID: 503
  Gene Symbol: ACSF3
  Gene Name: acyl-CoA synthetase family member 3
  ENST ID: ENST00000535176
  CDS Start-End: 1-320
ttggagttccggatatgacatggggccagcgggtcactgctgtggtgaccctccgagaaggacactcactgtcccacagggagctcaaagagtgggccaggttgaaagaacacccaaccaagaggagagaaaacagcattctaaatatcggaaggaaacgaaacctcgcctcaggcatgcgggctctgacgggcaggatggcggcacggagggctgctgtatccagtgaagtcagcagttcagatgaaacagataactcccttaaaagacacaaattgccaagactgacgcaaacactgaaacagactgaacagttctgagttaccaatttaaaactgcaaagcaaatagcaggcccaaaaggcttcactgataaattatctcaaacattgaaggcaaaaaataaaaccagacacagcaaa

SEQ ID NO: 104394 - DNA, 829 bp, Homo sapiens
  Payload ID: 503
  Gene Symbol: ACSF3
  Gene Name: acyl-CoA synthetase family member 3
  ENST ID: ENST00000540697
  CDS Start-End: 259-829
ggtccggcccgactcacgaccccgcgggacccggccggaacccggcccgaccccggcgcgcgcgcggcggaggacgaggaagagttgtggcgaggcagatcctgccccgtggccgcggccgtctcgtaggtgaccgggctggtccacaagtgggcatggaccaaagacgacgtgatcctccacgtgctcccgctgcaccacgtccatggtgtggtcaacgcgctgctctgtcctctctgggtgggagccacctgtgtgatgatgcctgagttcagccctcagcaggtttgggaaaagttcttaagttctgaaacgccgcggatcaatgtctttatggcagtgcctacaatatacaccaagctgatggagtactacgacaggcattttacccagccgcacgcccaggatttcttgcgtgcagtttgtgaagaaaaaattaggctgatggtctcaggctcagctgccctgcccctcccagtgctggagaagtggaagaacatcacgggccacaccctgctggagcggtatggcatgaccgagatcggcatggctctgtccgggcccctgaccactgccgtgcgcctgccaggttccgtggggaccccactgcctggagtacaggtgcgcattgtctcagaaaacccacagagggaagcctgctcctacaccatccacgcagagggagacgagagggggaccaaggtgaccccagggtttgaagaaaaggagggggagctgctggtgaggggaccctccgtgtttcgagaatactggaataaaccagaagaaactaagagtgcattcaccctggatggctggtttaagacag

SEQ ID NO: 104395 - DNA, 434 bp, Homo sapiens
  Payload ID: 503
  Gene Symbol: ACSF3
  Gene Name: acyl-CoA synthetase family member 3
  ENST ID: ENST00000538340
  CDS Start-End: 1-434
ctggtccacaagtgggcatggaccaaagacgacgtgatcctccacgtgctcccgctgcaccacgtccatggtgtggtcaacgcgctgctctgtcctctctgggtgggagccacctgtgtgatgatgcctgagttcagccctcagcaggtttgggaaaagttcttaagttctgaaacgccgcggatcaatgtctttatggcagtgcctacaatatacaccaagctgatggagtactacgacaggcattttacccagccgcacgcccaggatttcttgcgtgcagtttgtgaagaaaaaattaggttccgtggggaccccactgcctggagtacaggtgcgcattgtctcagaaaacccacagagggaagcctgctcctacaccatccacgcagagggagacgagagggggaccaagggccccagcccatgctgtt

SEQ ID NO: 104396 - DNA, 2024 bp, Homo sapiens
  Payload ID: 503
  Gene Symbol: ACSF3
  Gene Name: acyl-CoA synthetase family member 3
  ENST ID: ENST00000542688
  CDS Start-End: 110-1216
ctcttgtgaactgcgaacttccccttacctcctctctctggctcgggagctggttgggcactcacgtcctgtgccttgcctttctccagctcggccgcctgtcagtgcaatgctgccccatgtggtgctcaccttccggcgcctgggctgcgccttggcgtcctgccggctggcgcctgcgagacacagaggaagtggtcttctgcacacagccccagtggcccgctcggacaggagcgccccggtgttcacccgtgccctggcctttggggacagaatcgccctggttgaccagcacggccgccacacgtacagggagctttattcccgcagccttcgcctgtcccaggagatctgcaggctctgcgggtgtgtcggcggggacctccgggaggagagggtctccttcctatgcgctaacgatgcctcctacgtcgtggcccagtgggcgtcatggatgagtggcggtgtggcagtccccctctacaggaagcatcccgcggcccagctggagtatgtcatctgcgactcccagagctctgtggtccttgccagccaggagtacctggagctcctgagcccggtggtcaggaagctgggggtcccgctgctgccgctcacaccagccatctacactggagcagtagaggaaccggcagaggtcccggtcccagagcagggatggaggaacaagggcgccatgatcatctacaccagtgggaccacggggaggcccaagggcgtgctgagcacgcaccaaaacatcagggctgtggtgaccgggctggtccacaagtgggcatggaccaaagacgacgtgatcctccacgtgctcccgctgcaccacgtccatggtgtggtcaacgcgctgctctgtcctctctgggtgggagccacctgtgtgatgatgcctgagttcagccctcagcaggtttgggaaaagttcttaagttctgaaacgccgcggatcaatgtctttatggcagtgcctacaatatacaccaagctgatggagtactacgacaggcattttacccagccgcacgcccaggatttcttgcgtgcagtttgtgaagaaaaaattaggttccgtggggaccccactgcctggagtacaggtgcgcattgtctcagaaaacccacagagggaagcctgctcctacaccatccacgcagagggagacgagagggggaccaaggtgaccccagggtttgaagaaaaggagggggagctgctggtgaggggaccctccgtgtttcgagaatactggaataaaccagaagaaactaagagtgcattcaccctggatggctggtttaagacaggggacaccgtggtgtttaaggatggccagtactggatccgaggccggacctcagtggacatcatcaagactggaggctacaaggtcagcgccctggaggtggagtggcacctgctggcccaccccagcatcacagatgtggctgtgattggagttccggatatgacatggggccagcgggtcactgctgtggtgaccctccgagaaggacactcactgtcccacagggagctcaaagagtgggccagaaatgtcctggccccgtacgcggtgccctcggagctggtgctggtggaggagatcccgcggaaccagatgggcaagattgacaagaaggcgctcatcaggcacttccacccctcatgacccggcagactgggactgcgggtctggtggggagcagcagacgtccccttcacaccgagaaccacgggggcccgtccaagacctggcctcccttaaacctgaaccccccaaatcaggtcacgtagaatcaagaactgtttgggatgaaatcaccatgtggggtccccagcctcgggccagttgttgcagctcaaggagaccgtccctggtgtcacctctgcctggtcaccgccgacctcatctgtgcagcgcggtgcagccagcccctggccccacgtgctgaggcacctcccgccccacagtgccctgcagttgccaggctctccagggcag

SEQ ID NO: 104397 - DNA, 477 bp, Homo sapiens
  Payload ID: 503
  Gene Symbol: ACSF3
  Gene Name: acyl-CoA synthetase family member 3
  ENST ID: ENST00000541755
  CDS Start-End: 392-477
ggaacccggcccgaccccggcgcgcgcgcggcggaggacgaggaagagttgtggcgaggcagatcctgccccgtggccgcggccgtctcgtgttggaggacataagatgaggcttcccttgctcttgctcctttggctctgaaccatctcctcaaggcagacagaaatggcggattaaactgtgggcttgggatagttgtgtcccaccggccttccgggttccagcgccaggcctggtgcctgccccaggaggatgagcatttgcattgcctgcaccttatcgtgcccttccacctgctgaagcagctgtgcctgccgctcttgtgaactgcgaacttccccttacctcctctctctggctcgggagctggctcggccgcctgtcagtgcaatgctgccccatgtggtgctcaccttccggcgcctgggctgcgccttggcgtcctgccggctggcgcctgcgagacacagaggaag

SEQ ID NO: 104398 - DNA, 3751 bp, Homo sapiens
  Payload ID: 503
  Gene Symbol: ACSF3
  Gene Name: acyl-CoA synthetase family member 3
  Uniprot ID: Q4G176
  ENST ID: ENST00000614302
  CDS Start-End: 382-2112
gggggacgcgcttgggcgacggacgcgccgcgccggggaagctgttgggcgccggaactggtccggcccgactcacgaccccgcgggacccggccggaacccggcccgaccccggcgcgcgcgcggcggaggacgaggaagagttgtggcgaggcagatcctgccccgtggccgcggccgtctcgtaggtgtcccaccggccttccgggttccagcgccaggcctggtgcctgccccaggaggatgagcatttgcattgcctgcaccttatcgtgcccttccacctgctgaagcagctgtgcctgccgctcttgtgaactgcgaacttccccttacctcctctctctggctcgggagctggctcggccgcctgtcagtgcaatgctgccccatgtggtgctcaccttccggcgcctgggctgcgccttggcgtcctgccggctggcgcctgcgagacacagaggaagtggtcttctgcacacagccccagtggcccgctcggacaggagcgccccggtgttcacccgtgccctggcctttggggacagaatcgccctggttgaccagcacggccgccacacgtacagggagctttattcccgcagccttcgcctgtcccaggagatctgcaggctctgcgggtgtgtcggcggggacctccgggaggagagggtctccttcctatgcgctaacgatgcctcctacgtcgtggcccagtgggcgtcatggatgagtggcggtgtggcagtccccctctacaggaagcatcccgcggcccagctggagtatgtcatctgcgactcccagagctctgtggtccttgccagccaggagtacctggagctcctgagcccggtggtcaggaagctgggggtcccgctgctgccgctcacaccagccatctacactggagcagtagaggaaccggcagaggtcccggtcccagagcagggatggaggaacaagggcgccatgatcatctacaccagtgggaccacggggaggcccaagggcgtgctgagcacgcaccaaaacatcagggctgtggtgaccgggctggtccacaagtgggcatggaccaaagacgacgtgatcctccacgtgctcccgctgcaccacgtccatggtgtggtcaacgcgctgctctgtcctctctgggtgggagccacctgtgtgatgatgcctgagttcagccctcagcaggtttgggaaaagttcttaagttctgaaacgccgcggatcaatgtctttatggcagtgcctacaatatacaccaagctgatggagtactacgacaggcattttacccagccgcacgcccaggatttcttgcgtgcagtttgtgaagaaaaaattaggctgatggtctcaggctcagctgccctgcccctcccagtgctggagaagtggaagaacatcacgggccacaccctgctggagcggtatggcatgaccgagatcggcatggctctgtccgggcccctgaccactgccgtgcgcctgccaggttccgtggggaccccactgcctggagtacaggtgcgcattgtctcagaaaacccacagagggaagcctgctcctacaccatccacgcagagggagacgagagggggaccaaggtgaccccagggtttgaagaaaaggagggggagctgctggtgaggggaccctccgtgtttcgagaatactggaataaaccagaagaaactaagagtgcattcaccctggatggctggtttaagacaggggacaccgtggtgtttaaggatggccagtactggatccgaggccggacctcagtggacatcatcaagactggaggctacaaggtcagcgccctggaggtggagtggcacctgctggcccaccccagcatcacagatgtggctgtgattggagttccggatatgacatggggccagcgggtcactgctgtggtgaccctccgagaaggacactcactgtcccacagggagctcaaagagtgggccagaaatgtcctggccccgtacgcggtgccctcggagctggtgctggtggaggagatcccgcggaaccagatgggcaagattgacaagaaggcgctcatcaggcacttccacccctcatgacccggcagactgggactgcgggtctggtggggagcagcagacgtccccttcacaccgagaaccacgggggcccgtccaagacctggcctcccttaaacctgaaccccccaaatcaggtcacgtagaatcaagaactgtttgggatgaaatcaccatgtggggtccccagcctcgggccagttgttgcagctcaaggagaccgtccctggtgtcacctctgcctggtcaccgccgacctcatctgtgcagcgcggtgcagccagcccctggccccacgtgctgaggcacctcccgccccacagtgccctgcagttgccaggctctccagggcaggtcccagaggtttcccacaaaaaacaaagactccactggaggaaacaagcccctgtcccacgccgtctgcacgtgcctgtgcctcacccagagccagtgtctcccggcccacataggaggtctgggcagccacccagggggccctcctgggaggagctgagggttcacaagcctcccagaaccagccctgtcccatgggttccgtgcatttcctggtgctgctcttggaggagagcagctcccactgtggggacacctgccaccctgcacactactgtgtgtccatcagcatgtgtcacagaaagtgcgtggacggatggccccggagctgctctgccgtgaccctgcctcaccccccagcgcagggactttccaggtcatctccacaccagcccctcagccggtgaaccctctctcccatcaccgtctccacccagacccccacctgccccatggcccccatttcatgtctgtggctcaccagcttttccccagacccagctccggagcccacaggcgtggccgatgcagaaacctcaggaaggtgtgttgtgaatgttgggtgcacccacgttgcatttacttagcggggccaattcagatgcacaggggccacatgcagaatccagaagtttctggacaattttcagaagaataggctgcctcctccccacagcctgggggaagtaacagtcatcgcccagcagtgtctggcctgaacttacccagaacattctgcccccggaatgcacgtctgaaagagtggccagaaacgagtgtgccgggcaggaggccagccccatctcaggctcacgtgcctctgacaggagaccagccccatctcaggctcacatgcctcgcggacagttggacgtggcctggggcccctgctcacttgagcatgtcgcccaccaagcttgtctgaggccacagagcagcgtcccagccctgttttccaggactggtgggtgccccagtccacggccctgccccacccgaactcctgcctcacggtgtggccttgtgcatccccatggcctgaccccgggaacagtcagaggaaggggtcccgccctcccgccagaggcctggacccaagggaacggcagtcagagactacagtccagacgtttgtgtctaggccttgctggtagctaaggaaatgccttctgttgggaaaaggtcaaatttaacatagcaaaatttttacttaattccactaattttacatttgcatctctctcctttaatcctgaaacttttgattcctaaaaagcttacataatcatttgctttatccgatagt

SEQ ID NO: 104399 - DNA, 3832 bp, Homo sapiens
  Payload ID: 504
  Gene Symbol: ACSL1
  Gene Name: acyl-CoA synthetase long-chain family member 1
  Uniprot ID: P33121
  ENST ID: ENST00000281455
  CDS Start-End: 212-2308
ggggccggcgcggcgagcgcaccagcagcatcctggctcagccgcggcggtggcgggggcgcaaccagcgggccgaggcggcggcgccagcggcgccttaaatagcatccagagccggcgcggggcagggagtgggctgcagtgacagccggcggcggagcggccggtccacggaggagaattcagcttagagaactatcaacacaggacaatgcaagcccatgagctgttccggtattttcgaatgccagagctggttgacttccgacagtacgtgcgtactcttccgaccaacacgcttatgggcttcggagcttttgcagcactcaccaccttctggtacgccacgagacccaaacccctgaagccgccatgcgacctctccatgcagtcagtggaagtggcgggtagtggtggtgcacgaagatccgcactacttgacagcgacgagcccttggtgtatttctatgatgatgtcacaacattatacgaaggtttccagaggggaatacaggtgtcaaataatggcccttgtttaggctctcggaaaccagaccaaccctatgaatggctttcatataaacaggttgcagaattgtcggagtgcataggctcagcactgatccagaagggcttcaagactgccccagatcagttcattggcatctttgctcaaaatagacctgagtgggtgattattgaacaaggatgctttgcttattcgatggtgatcgttccactttatgatacccttggaaatgaagccatcacgtacatagtcaacaaagctgaactctctctggtttttgttgacaagccagagaaggccaaactcttattagagggtgtagaaaataagttaataccaggccttaaaatcatagttgtcatggatgcctacggcagtgaactggtggaacgaggccagaggtgtggggtggaagtcaccagcatgaaggcgatggaggacctgggaagagccaacagacggaagcccaagcctccagcacctgaagatcttgcagtaatttgtttcacaagtggaactacaggcaaccccaaaggagcaatggtcactcaccgaaacatagtgagcgattgttcagcttttgtgaaagcaacagagaatacagtcaatccttgcccagatgatactttgatatctttcttgcctctcgcccatatgtttgagagagttgtagagtgtgtaatgctgtgtcatggagctaaaatcggatttttccaaggagatatcaggctgctcatggatgacctcaaggtgcttcaacccactgtcttccccgtggttccaagactgctgaaccggatgtttgaccgaattttcggacaagcaaacaccacgctgaagcgatggctcttggactttgcctccaagaggaaagaagcagagcttcgcagcggcatcatcagaaacaacagcctgtgggaccggctgatcttccacaaagtacagtcgagcctgggcggaagagtccggctgatggtgacaggagccgccccggtgtctgccactgtgctgacgttcctcagagcagccctgggctgtcagttttatgaaggatacggacagacagagtgcactgccgggtgctgcctgaccatgcctggagactggaccgcaggccatgttggggccccgatgccgtgcaatttgataaaacttgttgatgtggaagaaatgaattacatggctgccgagggcgagggcgaggtgtgtgtgaaagggccaaatgtatttcagggctacttgaaggacccagcgaaaacagcagaagctttggacaaagacggctggttacacacaggggacattggaaaatggttaccaaatggcaccttgaaaattatcgaccggaaaaagcacatatttaagctggcacaaggagaatacatagcccctgaaaagattgaaaatatctacatgcgaagtgagcctgttgctcaggtgtttgtccacggagaaagcctgcaggcatttctcattgcaattgtggtaccagatgttgagacattatgttcctgggcccaaaagagaggatttgaagggtcgtttgaggaactgtgcagaaataaggatgtcaaaaaagctatcctcgaagatatggtgagacttgggaaggattctggtctgaaaccatttgaacaggtcaaaggcatcacattgcaccctgaattattttctatcgacaatggccttctgactccaacaatgaaggcgaaaaggccagagctgcggaactatttcaggtcgcagatagatgacctctattccactatcaaggtttagtgtgaagaagaaagctcagaggaaatggcacagttccacaatctcttctcctgctgatggccttcatgttgttaattttgaatacagcaagtgtagggaaggaagcgttcgtgtttgacttgtccattcggggttcttctcataggaatgctagaggaaagagaacactgccttacagtcacctcatgttgcagaccatgtttatggtaatacacactttccaaaatgagccttaaaaattgtaaaggggatactataaatgtgctaagttatttgagacttcctcagtttaaaaagtgggttttaaatcttctgtctccctgtttctctaatcaaggggttaggactttgctatctctgagatgtctgctacttgctgcaaattctgcagctgtctgctgctctaaagagtacagtgcactagagggaagtgttccctttaaaaataagaacaactgtcctggctggagaatctcacaagcggaccagagatctttttaaatccctgctactgtcccttctcacaggcattcacagaacccttctgattcgtaagggttacgaaactcatgttcttctccagtcccctgtggtttctgttggagcataaggtttccagtaagcgggagggcagatccaactcagaaccatgcagataaggagcctctggcaaatgggtgctcatcagaacgcgtggattctctttcatggcagaatgctcttggactcggttctccaggcctgattccccgactccatcctttttcaggggttatttaaaaatctgccttagattctatagtgaagacaagcatttcaagaaagagttacctggatcagccatgctcagctgtgacgcctgaataactgtctactttatcttcactgaaccactcactctgtgtaaaggccaacagatttttaatgtggttttcatatcaaaagatcatgttgggattaacttgcctttttccccaaaaaataaactctcaggcaagcatttctttaaagctattaagggagtatatacttgagtacttattgaaatggacagtaataagcaaatgttcttataatgctacctgatttctatgaaatgtgtttgacaagccaaaattctaggatgtagaaatctggaaagttcatttcctgggattcacttctccagggattttttaaagttaatttgggaaattaacagcagttcactttattgtgagtctttgccacatttgactgaattgagctgtcatttgtacatttaaagcagctgttttggggtctgtgagagtacatgtattatatacaagcacaacagggcttgcactaaagaattgtcattgtaataacactacttggtagcctaacttcatatatgtattcttaattgcacaaaaagtcaataatttgtcaccttggggttttgaatgtttgctttaagtgttggctatttctatgttttataaaccaaaacaaaatttccaaaaacaatgaaggaaaccaaaataaatatttctgcatttc

SEQ ID NO: 104400 - DNA, 3636 bp, Homo sapiens
  Payload ID: 504
  Gene Symbol: ACSL1
  Gene Name: acyl-CoA synthetase long-chain family member 1
  ENST ID: ENST00000454703
  CDS Start-End: 523-2106
gggcggggcggggccgcgggagggcggggccggcgcggcgagcgcaccagcagcatcctggctcagccgcggcggtggcgggggcgcaaccagcgggccgaggcggcggcgccagcggcgccttaaatagcatccagagccggcgcggggcagggagtgggctgcagtgacagccggcggcggagcggccggtccacggaggagggtagtggtggtgcacgaagatccgcactacttgacagcgacgagcccttggtgtatttctatgatgatgtcacaacattatacgaaggtttccagaggggaatacaggtgtcaaataatggcccttgtttaggctctcggaaaccagaccaaccctatgaatggctttcatataaacaggttgcagaattgtcggagtgcataggctcagcactgatccagaagggcttcaagactgccccagatcagttcattggcatctttgctcaaaatagacctgagtgggtgattattgaacaaggatgctttgcttattcgatggtgatcgttccactttatgatacccttggaaatgaagccatcacgtacatagtcaacaaagctgaactctctctggtttttgttgacaagccagagaaggccaaactcttattagagggtgtagaaaataagttaataccaggccttaaaatcatagttgtcatggatgcctacggcagtgaactggtggaacgaggccagaggtgtggggtggaagtcaccagcatgaaggcgatggaggacctgggaagagccaacagacggaagcccaagcctccagcacctgaagatcttgcagtaatttgtttcacaagtggaactacaggcaaccccaaaggagcaatggtcactcaccgaaacatagtgagcgattgttcagcttttgtgaaagcaacagagaatacagtcaatccttgcccagatgatactttgatatctttcttgcctctcgcccatatgtttgagagagttgtagagtgtgtaatgctgtgtcatggagctaaaatcggatttttccaaggagatatcaggctgctcatggatgacctcaaggtgcttcaacccactgtcttccccgtggttccaagactgctgaaccggatgtttgaccgaattttcggacaagcaaacaccacgctgaagcgatggctcttggactttgcctccaagaggaaagaagcagagcttcgcagcggcatcatcagaaacaacagcctgtgggaccggctgatcttccacaaagtacagtcgagcctgggcggaagagtccggctgatggtgacaggagccgccccggtgtctgccactgtgctgacgttcctcagagcagccctgggctgtcagttttatgaaggatacggacagacagagtgcactgccgggtgctgcctgaccatgcctggagactggaccgcaggccatgttggggccccgatgccgtgcaatttgataaaacttgttgatgtggaagaaatgaattacatggctgccgagggcgagggcgaggtgtgtgtgaaagggccaaatgtatttcagggctacttgaaggacccagcgaaaacagcagaagctttggacaaagacggctggttacacacaggggacattggaaaatggttaccaaatggcaccttgaaaattatcgaccggaaaaagcacatatttaagctggcacaaggagaatacatagcccctgaaaagattgaaaatatctacatgcgaagtgagcctgttgctcaggtgtttgtccacggagaaagcctgcaggcatttctcattgcaattgtggtaccagatgttgagacattatgttcctgggcccaaaagagaggatttgaagggtcgtttgaggaactgtgcagaaataaggatgtcaaaaaagctatcctcgaagatatggtgagacttgggaaggattctggtctgaaaccatttgaacaggtcaaaggcatcacattgcaccctgaattattttctatcgacaatggccttctgactccaacaatgaaggcgaaaaggccagagctgcggaactatttcaggtcgcagatagatgacctctattccactatcaaggtttagtgtgaagaagaaagctcagaggaaatggcacagttccacaatctcttctcctgctgatggccttcatgttgttaattttgaatacagcaagtgtagggaaggaagcgttcgtgtttgacttgtccattcggggttcttctcataggaatgctagaggaaagagaacactgccttacagtcacctcatgttgcagaccatgtttatggtaatacacactttccaaaatgagccttaaaaattgtaaaggggatactataaatgtgctaagttatttgagacttcctcagtttaaaaagtgggttttaaatcttctgtctccctgtttctctaatcaaggggttaggactttgctatctctgagatgtctgctacttgctgcaaattctgcagctgtctgctgctctaaagagtacagtgcactagagggaagtgttccctttaaaaataagaacaactgtcctggctggagaatctcacaagcggaccagagatctttttaaatccctgctactgtcccttctcacaggcattcacagaacccttctgattcgtaagggttacgaaactcatgttcttctccagtcccctgtggtttctgttggagcataaggtttccagtaagcgggagggcagatccaactcagaaccatgcagataaggagcctctggcaaatgggtgctcatcagaacgcgtggattctctttcatggcagaatgctcttggactcggttctccaggcctgattccccgactccatcctttttcaggggttatttaaaaatctgccttagattctatagtgaagacaagcatttcaagaaagagttacctggatcagccatgctcagctgtgacgcctgaataactgtctactttatcttcactgaaccactcactctgtgtaaaggccaacagatttttaatgtggttttcatatcaaaagatcatgttgggattaacttgcctttttccccaaaaaataaactctcaggcaagcatttctttaaagctattaagggagtatatacttgagtacttattgaaatggacagtaataagcaaatgttcttataatgctacctgatttctatgaaatgtgtttgacaagccaaaattctaggatgtagaaatctggaaagttcatttcctgggattcacttctccagggattttttaaagttaatttgggaaattaacagcagttcactttattgtgagtctttgccacatttgactgaattgagctgtcatttgtacatttaaagcagctgttttggggtctgtgagagtacatgtattatatacaagcacaacagggcttgcactaaagaattgtcattgtaataacactacttggtagcctaacttcatatatgtattcttaattgcacaaaaagtcaataatttgtcaccttggggttttgaatgtttgctttaagtgttggctatttctatgttttataaaccaaaacaaaatttccaaaaacaatgaaggaaaccaaaataaatatttctgcatttcaggtga

SEQ ID NO: 104401 - DNA, 3948 bp, Homo sapiens
  Payload ID: 504
  Gene Symbol: ACSL1
  Gene Name: acyl-CoA synthetase long-chain family member 1
  Uniprot ID: P33121
  ENST ID: ENST00000515030
  CDS Start-End: 327-2423
aaactccacggtaacggggaccaatgttgttagaggttgaggttcctggtaggtcccaggtgctaaaaggaagagcagcctttgggatgtgagcccgaaaaccatcgtgttggcttctgaagccccaagatgggcatggcagggacgcggaagccctcagaaccgcggaagccctcagaaccgcacagcaggtggccgccgtggtgcagcgcgcagtcggccctcagctcccctgcaccggcgcgagctgcgggcgctgcccacgtcaggctctgcagacaccagacagaaaagaattcagcttagagaactatcaacacaggacaatgcaagcccatgagctgttccggtattttcgaatgccagagctggttgacttccgacagtacgtgcgtactcttccgaccaacacgcttatgggcttcggagcttttgcagcactcaccaccttctggtacgccacgagacccaaacccctgaagccgccatgcgacctctccatgcagtcagtggaagtggcgggtagtggtggtgcacgaagatccgcactacttgacagcgacgagcccttggtgtatttctatgatgatgtcacaacattatacgaaggtttccagaggggaatacaggtgtcaaataatggcccttgtttaggctctcggaaaccagaccaaccctatgaatggctttcatataaacaggttgcagaattgtcggagtgcataggctcagcactgatccagaagggcttcaagactgccccagatcagttcattggcatctttgctcaaaatagacctgagtgggtgattattgaacaaggatgctttgcttattcgatggtgatcgttccactttatgatacccttggaaatgaagccatcacgtacatagtcaacaaagctgaactctctctggtttttgttgacaagccagagaaggccaaactcttattagagggtgtagaaaataagttaataccaggccttaaaatcatagttgtcatggatgcctacggcagtgaactggtggaacgaggccagaggtgtggggtggaagtcaccagcatgaaggcgatggaggacctgggaagagccaacagacggaagcccaagcctccagcacctgaagatcttgcagtaatttgtttcacaagtggaactacaggcaaccccaaaggagcaatggtcactcaccgaaacatagtgagcgattgttcagcttttgtgaaagcaacagagaatacagtcaatccttgcccagatgatactttgatatctttcttgcctctcgcccatatgtttgagagagttgtagagtgtgtaatgctgtgtcatggagctaaaatcggatttttccaaggagatatcaggctgctcatggatgacctcaaggtgcttcaacccactgtcttccccgtggttccaagactgctgaaccggatgtttgaccgaattttcggacaagcaaacaccacgctgaagcgatggctcttggactttgcctccaagaggaaagaagcagagcttcgcagcggcatcatcagaaacaacagcctgtgggaccggctgatcttccacaaagtacagtcgagcctgggcggaagagtccggctgatggtgacaggagccgccccggtgtctgccactgtgctgacgttcctcagagcagccctgggctgtcagttttatgaaggatacggacagacagagtgcactgccgggtgctgcctgaccatgcctggagactggaccgcaggccatgttggggccccgatgccgtgcaatttgataaaacttgttgatgtggaagaaatgaattacatggctgccgagggcgagggcgaggtgtgtgtgaaagggccaaatgtatttcagggctacttgaaggacccagcgaaaacagcagaagctttggacaaagacggctggttacacacaggggacattggaaaatggttaccaaatggcaccttgaaaattatcgaccggaaaaagcacatatttaagctggcacaaggagaatacatagcccctgaaaagattgaaaatatctacatgcgaagtgagcctgttgctcaggtgtttgtccacggagaaagcctgcaggcatttctcattgcaattgtggtaccagatgttgagacattatgttcctgggcccaaaagagaggatttgaagggtcgtttgaggaactgtgcagaaataaggatgtcaaaaaagctatcctcgaagatatggtgagacttgggaaggattctggtctgaaaccatttgaacaggtcaaaggcatcacattgcaccctgaattattttctatcgacaatggccttctgactccaacaatgaaggcgaaaaggccagagctgcggaactatttcaggtcgcagatagatgacctctattccactatcaaggtttagtgtgaagaagaaagctcagaggaaatggcacagttccacaatctcttctcctgctgatggccttcatgttgttaattttgaatacagcaagtgtagggaaggaagcgttcgtgtttgacttgtccattcggggttcttctcataggaatgctagaggaaagagaacactgccttacagtcacctcatgttgcagaccatgtttatggtaatacacactttccaaaatgagccttaaaaattgtaaaggggatactataaatgtgctaagttatttgagacttcctcagtttaaaaagtgggttttaaatcttctgtctccctgtttctctaatcaaggggttaggactttgctatctctgagatgtctgctacttgctgcaaattctgcagctgtctgctgctctaaagagtacagtgcactagagggaagtgttccctttaaaaataagaacaactgtcctggctggagaatctcacaagcggaccagagatctttttaaatccctgctactgtcccttctcacaggcattcacagaacccttctgattcgtaagggttacgaaactcatgttcttctccagtcccctgtggtttctgttggagcataaggtttccagtaagcgggagggcagatccaactcagaaccatgcagataaggagcctctggcaaatgggtgctcatcagaacgcgtggattctctttcatggcagaatgctcttggactcggttctccaggcctgattccccgactccatcctttttcaggggttatttaaaaatctgccttagattctatagtgaagacaagcatttcaagaaagagttacctggatcagccatgctcagctgtgacgcctgaataactgtctactttatcttcactgaaccactcactctgtgtaaaggccaacagatttttaatgtggttttcatatcaaaagatcatgttgggattaacttgcctttttccccaaaaaataaactctcaggcaagcatttctttaaagctattaagggagtatatacttgagtacttattgaaatggacagtaataagcaaatgttcttataatgctacctgatttctatgaaatgtgtttgacaagccaaaattctaggatgtagaaatctggaaagttcatttcctgggattcacttctccagggattttttaaagttaatttgggaaattaacagcagttcactttattgtgagtctttgccacatttgactgaattgagctgtcatttgtacatttaaagcagctgttttggggtctgtgagagtacatgtattatatacaagcacaacagggcttgcactaaagaattgtcattgtaataacactacttggtagcctaacttcatatatgtattcttaattgcacaaaaagtcaataatttgtcaccttggggttttgaatgtttgctttaagtgttggctatttctatgttttataaaccaaaacaaaatttccaaaaacaatgaaggaaaccaaaataaatatttctgcatttca

SEQ ID NO: 104402 - DNA, 1583 bp, Homo sapiens
  Payload ID: 504
  Gene Symbol: ACSL1
  Gene Name: acyl-CoA synthetase long-chain family member 1
  ENST ID: ENST00000504900
  CDS Start-End: 170-1336
cgcggcggtggcgggggcgcaaccagcgggccgaggcggcggcgccagcggcgccttaaatagcatccagagccggcgcggggcagggagtgggctgcagtgacagccggcggcggagcggccggtccacggaggagaattcagcttagagaactatcaacacaggacaatgcaagcccatgagctgttccggtattttcgaatgccagagctggttgacttccgacagtacgtgcgtactcttccgaccaacacgcttatgggcttcggagcttttgcagcactcaccaccttctggtacgccacgagacccaaacccctgaagccgccatgcgacctctccatgcagtcagtggaagtggcgggtagtggtggtgcacgaagatccgcactacttgacagcgacgagcccttggtgtatttctatgatgatgtcacaacattatacgaaggtttccagaggggaatacaggtgtcaaataatggcccttgtttaggctctcggaaaccagaccaaccctatgaatggctttcatataaacaggttgcagaattgtcggagtgcataggctcagcactgatccagaagggcttcaagactgccccagatcagttcattggcatctttgctcaaaatagacctgagtgggtgattattgaacaaggatgctttgcttattcgatggtgatcgttccactttatgatacccttggaaatgaagccatcacgtacatagtcaacaaagctgaactctctctggtttttgttgacaagccagagaaggccaaactcttattagagggtgtagaaaataagttaataccaggccttaaaatcatagttgtcatggatgcctacggcagtgaactggtggaacgaggccagaggtgtggggtggaagtcaccagcatgaaggcgatggaggacctgggaagagccaacagacggaagcccaagcctccagcacctgaagatcttgcagtaatttgtttcacaagtggaactacaggcaaccccaaaggagcaatggtcactcaccgaaacatagtgagcgattgttcagcttttgtgaaagcaacagagaatacagtcaatccttgcccagatgatactttgatatctttcttgcctctcgcccatatgtttgagagagttgtagagtgtgtaatgctgtgtcatggagctaaaatcggatttttccaaggagatatcaggctgctcatggatgacctcaaggtgcttcaacccactgtcttccccgtggttccaagactgctgaaccggatgtttgaccgagtaagttccaagcagcgaagtcccaggactgagcactgacttggacgcaggggcttgggcttgaattgggctgtgccatgtgccatctgtatgaccctggacaatcctcccaatcttacagaacttcagtttactcatctgtaaagttagaatgcgtttacctctcagagtggctgataaggattataagagaaaatgcatgaacacactttgtaaaccatggtcacaacacaagcataatgtgggaggtcattttatttttacaataaacactttgagcctctgc

SEQ ID NO: 104403 - DNA, 2333 bp, Homo sapiens
  Payload ID: 504
  Gene Symbol: ACSL1
  Gene Name: acyl-CoA synthetase long-chain family member 1
  Uniprot ID: P33121
  ENST ID: ENST00000504342
  CDS Start-End: 133-2229
gggactgtgttaagaaccaagggcatataaagacagatgggaggagaccctggccggggagaggaagaagcatctacataggtactaagtaccattcgctaattcagcttagagaactatcaacacaggacaatgcaagcccatgagctgttccggtattttcgaatgccagagctggttgacttccgacagtacgtgcgtactcttccgaccaacacgcttatgggcttcggagcttttgcagcactcaccaccttctggtacgccacgagacccaaacccctgaagccgccatgcgacctctccatgcagtcagtggaagtggcgggtagtggtggtgcacgaagatccgcactacttgacagcgacgagcccttggtgtatttctatgatgatgtcacaacattatacgaaggtttccagaggggaatacaggtgtcaaataatggcccttgtttaggctctcggaaaccagaccaaccctatgaatggctttcatataaacaggttgcagaattgtcggagtgcataggctcagcactgatccagaagggcttcaagactgccccagatcagttcattggcatctttgctcaaaatagacctgagtgggtgattattgaacaaggatgctttgcttattcgatggtgatcgttccactttatgatacccttggaaatgaagccatcacgtacatagtcaacaaagctgaactctctctggtttttgttgacaagccagagaaggccaaactcttattagagggtgtagaaaataagttaataccaggccttaaaatcatagttgtcatggatgcctacggcagtgaactggtggaacgaggccagaggtgtggggtggaagtcaccagcatgaaggcgatggaggacctgggaagagccaacagacggaagcccaagcctccagcacctgaagatcttgcagtaatttgtttcacaagtggaactacaggcaaccccaaaggagcaatggtcactcaccgaaacatagtgagcgattgttcagcttttgtgaaagcaacagagaatacagtcaatccttgcccagatgatactttgatatctttcttgcctctcgcccatatgtttgagagagttgtagagtgtgtaatgctgtgtcatggagctaaaatcggatttttccaaggagatatcaggctgctcatggatgacctcaaggtgcttcaacccactgtcttccccgtggttccaagactgctgaaccggatgtttgaccgaattttcggacaagcaaacaccacgctgaagcgatggctcttggactttgcctccaagaggaaagaagcagagcttcgcagcggcatcatcagaaacaacagcctgtgggaccggctgatcttccacaaagtacagtcgagcctgggcggaagagtccggctgatggtgacaggagccgccccggtgtctgccactgtgctgacgttcctcagagcagccctgggctgtcagttttatgaaggatacggacagacagagtgcactgccgggtgctgcctgaccatgcctggagactggaccgcaggccatgttggggccccgatgccgtgcaatttgataaaacttgttgatgtggaagaaatgaattacatggctgccgagggcgagggcgaggtgtgtgtgaaagggccaaatgtatttcagggctacttgaaggacccagcgaaaacagcagaagctttggacaaagacggctggttacacacaggggacattggaaaatggttaccaaatggcaccttgaaaattatcgaccggaaaaagcacatatttaagctggcacaaggagaatacatagcccctgaaaagattgaaaatatctacatgcgaagtgagcctgttgctcaggtgtttgtccacggagaaagcctgcaggcatttctcattgcaattgtggtaccagatgttgagacattatgttcctgggcccaaaagagaggatttgaagggtcgtttgaggaactgtgcagaaataaggatgtcaaaaaagctatcctcgaagatatggtgagacttgggaaggattctggtctgaaaccatttgaacaggtcaaaggcatcacattgcaccctgaattattttctatcgacaatggccttctgactccaacaatgaaggcgaaaaggccagagctgcggaactatttcaggtcgcagatagatgacctctattccactatcaaggtttagtgtgaagaagaaagctcagaggaaatggcacagttccacaatctcttctcctgctgatggccttcatgttgttaattttgaatacagcaagtgtagggaaggaa

SEQ ID NO: 104404 - DNA, 2409 bp, Homo sapiens
  Payload ID: 504
  Gene Symbol: ACSL1
  Gene Name: acyl-CoA synthetase long-chain family member 1
  ENST ID: ENST00000503407
  CDS Start-End: 1-885
aagaggaaagaagcagagcttcgcagcggcatcatcagaaacaacagcctgtgggaccggctgatcttccacaaagtacagtcgagcctgggcggaagagtccggctgatggtgacaggagccgccccggtgtctgccactgtgctgacgttcctcagagcagccctgggctgtcagttttatgaaggatacggacagacagagtgcactgccgggtgctgcctgaccatgcctggagactggaccgcaggccatgttggggccccgatgccgtgcaatttgataaaacttgttgatgtggaagaaatgaattacatggctgccgagggcgagggcgagggctacttgaaggacccagcgaaaacagcagaagctttggacaaagacggctggttacacacaggggacattggaaaatggttaccaaatggcaccttgaaaattatcgaccggaaaaagcacatatttaagctggcacaaggagaatacatagcccctgaaaagattgaaaatatctacatgcgaagtgagcctgttgctcaggtgtttgtccacggagaaagcctgcaggcatttctcattgcaattgtggtaccagatgttgagacattatgttcctgggcccaaaagagaggatttgaagggtcgtttgaggaactgtgcagaaataaggatgtcaaaaaagctatcctcgaagatatggtgagacttgggaaggattctggtctgaaaccatttgaacaggtcaaaggcatcacattgcaccctgaattattttctatcgacaatggccttctgactccaacaatgaaggcgaaaaggccagagctgcggaactatttcaggtcgcagatagatgacctctattccactatcaaggtttagtgtgaagaagaaagctcagaggaaatggcacagttccacaatctcttctcctgctgatggccttcatgttgttaattttgaatacagcaagtgtagggaaggaagcgttcgtgtttgacttgtccattcggggttcttctcataggaatgctagaggaaagagaacactgccttacagtcacctcatgttgcagaccatgtttatggtaatacacactttccaaaatgagccttaaaaattgtaaaggggatactataaatgtgctaagttatttgagacttcctcagtttaaaaagtgggttttaaatcttctgtctccctgtttctctaatcaaggggttaggactttgctatctctgagatgtctgctacttgctgcaaattctgcagctgtctgctgctctaaagagtacagtgcactagagggaagtgttccctttaaaaataagaacaactgtcctggctggagaatctcacaagcggaccagagatctttttaaatccctgctactgtcccttctcacaggcattcacagaacccttctgattcgtaagggttacgaaactcatgttcttctccagtcccctgtggtttctgttggagcataaggtttccagtaagcgggagggcagatccaactcagaaccatgcagataaggagcctctggcaaatgggtgctcatcagaacgcgtggattctctttcatggcagaatgctcttggactcggttctccaggcctgattccccgactccatcctttttcaggggttatttaaaaatctgccttagattctatagtgaagacaagcatttcaagaaagagttacctggatcagccatgctcagctgtgacgcctgaataactgtctactttatcttcactgaaccactcactctgtgtaaaggccaacagatttttaatgtggttttcatatcaaaagatcatgttgggattaacttgcctttttccccaaaaaataaactctcaggcaagcatttctttaaagctattaagggagtatatacttgagtacttattgaaatggacagtaataagcaaatgttcttataatgctacctgatttctatgaaatgtgtttgacaagccaaaattctaggatgtagaaatctggaaagttcatttcctgggattcacttctccagggattttttaaagttaatttgggaaattaacagcagttcactttattgtgagtctttgccacatttgactgaattgagctgtcatttgtacatttaaagcagctgttttggggtctgtgagagtacatgtattatatacaagcacaacagggcttgcactaaagaattgtcattgtaataacactacttggtagcctaacttcatatatgtattcttaattgcacaaaaagtcaataatttgtcaccttggggttttgaatgtttgctttaagtgttggctatttctatgttttataaaccaaaacaaaatttccaaaaacaatgaaggaaaccaaaataaatatttctgcatttc

SEQ ID NO: 104405 - DNA, 280 bp, Homo sapiens
  Payload ID: 504
  Gene Symbol: ACSL1
  Gene Name: acyl-CoA synthetase long-chain family member 1
  ENST ID: ENST00000505492
  CDS Start-End: 1-280
cctgggaagagccaacagacggaagcccaagcctccagcacctgaagatcttgcagtaatttgtttcacaagtggaactacaggcaaccccaaaggagcaatggtcactcaccgaaacatagtgagcgattgttcagcttttgtgaaagcaacagagtgtgtaatgctgtgtcatggagctaaaatcggatttttccaaggagatatcaggctgctcatggatgacctcaaggtgcttcaacccactgtcttccccgtggttccaagactgctgaaccgg

SEQ ID NO: 104406 - DNA, 2469 bp, Homo sapiens
  Payload ID: 504
  Gene Symbol: ACSL1
  Gene Name: acyl-CoA synthetase long-chain family member 1
  Uniprot ID: P33121
  ENST ID: ENST00000513317
  CDS Start-End: 295-2391
gactttgctgctggctgcccattggcctatcctccaccctctgctctcctgagaagtcaagtgtggattttgtctgctagttacctttagcccagtgggcagcagcgtggggctcggcatgtgacttgtgccctgagagaccttggtaggctgggggagcgcagctgagccctgctaacccccgcccacttccaggctcattgccctcttctgtgtctgcagtggggtgtcacctagtagtcagctgttggtggcacagatgaattcagcttagagaactatcaacacaggacaatgcaagcccatgagctgttccggtattttcgaatgccagagctggttgacttccgacagtacgtgcgtactcttccgaccaacacgcttatgggcttcggagcttttgcagcactcaccaccttctggtacgccacgagacccaaacccctgaagccgccatgcgacctctccatgcagtcagtggaagtggcgggtagtggtggtgcacgaagatccgcactacttgacagcgacgagcccttggtgtatttctatgatgatgtcacaacattatacgaaggtttccagaggggaatacaggtgtcaaataatggcccttgtttaggctctcggaaaccagaccaaccctatgaatggctttcatataaacaggttgcagaattgtcggagtgcataggctcagcactgatccagaagggcttcaagactgccccagatcagttcattggcatctttgctcaaaatagacctgagtgggtgattattgaacaaggatgctttgcttattcgatggtgatcgttccactttatgatacccttggaaatgaagccatcacgtacatagtcaacaaagctgaactctctctggtttttgttgacaagccagagaaggccaaactcttattagagggtgtagaaaataagttaataccaggccttaaaatcatagttgtcatggatgcctacggcagtgaactggtggaacgaggccagaggtgtggggtggaagtcaccagcatgaaggcgatggaggacctgggaagagccaacagacggaagcccaagcctccagcacctgaagatcttgcagtaatttgtttcacaagtggaactacaggcaaccccaaaggagcaatggtcactcaccgaaacatagtgagcgattgttcagcttttgtgaaagcaacagagaaagcacttcccttgagtgccagtgacacacacatttcatatttaccacttgctcacatttatgaacagttattgaagtgtgtaatgctgtgtcatggagctaaaatcggatttttccaaggagatatcaggctgctcatggatgacctcaaggtgcttcaacccactgtcttccccgtggttccaagactgctgaaccggatgtttgaccgaattttcggacaagcaaacaccacgctgaagcgatggctcttggactttgcctccaagaggaaagaagcagagcttcgcagcggcatcatcagaaacaacagcctgtgggaccggctgatcttccacaaagtacagtcgagcctgggcggaagagtccggctgatggtgacaggagccgccccggtgtctgccactgtgctgacgttcctcagagcagccctgggctgtcagttttatgaaggatacggacagacagagtgcactgccgggtgctgcctgaccatgcctggagactggaccgcaggccatgttggggccccgatgccgtgcaatttgataaaacttgttgatgtggaagaaatgaattacatggctgccgagggcgagggcgaggtgtgtgtgaaagggccaaatgtatttcagggctacttgaaggacccagcgaaaacagcagaagctttggacaaagacggctggttacacacaggggacattggaaaatggttaccaaatggcaccttgaaaattatcgaccggaaaaagcacatatttaagctggcacaaggagaatacatagcccctgaaaagattgaaaatatctacatgcgaagtgagcctgttgctcaggtgtttgtccacggagaaagcctgcaggcatttctcattgcaattgtggtaccagatgttgagacattatgttcctgggcccaaaagagaggatttgaagggtcgtttgaggaactgtgcagaaataaggatgtcaaaaaagctatcctcgaagatatggtgagacttgggaaggattctggtctgaaaccatttgaacaggtcaaaggcatcacattgcaccctgaattattttctatcgacaatggccttctgactccaacaatgaaggcgaaaaggccagagctgcggaactatttcaggtcgcagatagatgacctctattccactatcaaggtttagtgtgaagaagaaagctcagaggaaatggcacagttccacaatctcttctcctgctgatggccttcatgttgttaattt

SEQ ID NO: 104407 - DNA, 2490 bp, Homo sapiens
  Payload ID: 504
  Gene Symbol: ACSL1
  Gene Name: acyl-CoA synthetase long-chain family member 1
  ENST ID: ENST00000507295
  CDS Start-End: 152-2146
gcaaccagcgggccgaggcggcggcgccagcggcgccttaaatagcatccagagccggcgcggggcagggagtgggctgcagtgacagccggcggcggagcggccggtccacggaggagaattcagcttagagaactatcaacacaggacaatgcaagcccatgagctgttccggtattttcgaatgccagagctggttgacttccgacagtacgtgcgtactcttccgaccaacacgcttatgggcttcggagcttttgcagcactcaccaccttctggtacgccacgagacccaaacccctgaagccgccatgcgacctctccatgcagtcagtggaagtggcgggtagtggtggtgcacgaagatccgcactacttgacagcgacgagcccttggtgtatttctatgatgatgtcacaacattatacgaaggtttccagaggggaatacaggtgtcaaataatggcccttgtttaggctctcggaaaccagaccaaccctatgaatggctttcatataaacagtgggtgattattgaacaaggatgctttgcttattcgatggtgatcgttccactttatgatacccttggaaatgaagccatcacgtacatagtcaacaaagctgaactctctctggtttttgttgacaagccagagaaggccaaactcttattagagggtgtagaaaataagttaataccaggccttaaaatcatagttgtcatggatgcctacggcagtgaactggtggaacgaggccagaggtgtggggtggaagtcaccagcatgaaggcgatggaggacctgggaagagccaacagacggaagcccaagcctccagcacctgaagatcttgcagtaatttgtttcacaagtggaactacaggcaaccccaaaggagcaatggtcactcaccgaaacatagtgagcgattgttcagcttttgtgaaagcaacagagaatacagtcaatccttgcccagatgatactttgatatctttcttgcctctcgcccatatgtttgagagagttgtagagtgtgtaatgctgtgtcatggagctaaaatcggatttttccaaggagatatcaggctgctcatggatgacctcaaggtgcttcaacccactgtcttccccgtggttccaagactgctgaaccggatgtttgaccgaattttcggacaagcaaacaccacgctgaagcgatggctcttggactttgcctccaagaggaaagaagcagagcttcgcagcggcatcatcagaaacaacagcctgtgggaccggctgatcttccacaaagtacagtcgagcctgggcggaagagtccggctgatggtgacaggagccgccccggtgtctgccactgtgctgacgttcctcagagcagccctgggctgtcagttttatgaaggatacggacagacagagtgcactgccgggtgctgcctgaccatgcctggagactggaccgcaggccatgttggggccccgatgccgtgcaatttgataaaacttgttgatgtggaagaaatgaattacatggctgccgagggcgagggcgaggtgtgtgtgaaagggccaaatgtatttcagggctacttgaaggacccagcgaaaacagcagaagctttggacaaagacggctggttacacacaggggacattggaaaatggttaccaaatggcaccttgaaaattatcgaccggaaaaagcacatatttaagctggcacaaggagaatacatagcccctgaaaagattgaaaatatctacatgcgaagtgagcctgttgctcaggtgtttgtccacggagaaagcctgcaggcatttctcattgcaattgtggtaccagatgttgagacattatgttcctgggcccaaaagagaggatttgaagggtcgtttgaggaactgtgcagaaataaggatgtcaaaaaagctatcctcgaagatatggtgagacttgggaaggattctggtctgaaaccatttgaacaggtcaaaggcatcacattgcaccctgaattattttctatcgacaatggccttctgactccaacaatgaaggcgaaaaggccagagctgcggaactatttcaggtcgcagatagatgacctctattccactatcaaggtttagtgtgaagaagaaagctcagaggaaatggcacagttccacaatctcttctcctgctgatggccttcatgttgttaattttgaatacagcaagtgtagggaaggaagcgttcgtgtttgacttgtccattcggggttcttctcataggaatgctagaggaaagagaacactgccttacagtcacctcatgttgcagaccatgtttatggtaatacacactttccaaaatgagccttaaaaattgtaaaggggatactataaatgtgctaagttatttgagacttcctcagtttaaaaagtgggttttaaatcttctgtctccctgtttctctaatcaaggggttag

SEQ ID NO: 104408 - DNA, 2646 bp, Homo sapiens
  Payload ID: 504
  Gene Symbol: ACSL1
  Gene Name: acyl-CoA synthetase long-chain family member 1
  ENST ID: ENST00000506733
  CDS Start-End: 193-573
atttatgtgggtttgtttgagggctgcattcctagtgaagtattccatcaaactgccattattcatcttgatgaaagcttgaggaactttagaaggagagaaacatccagaccacccggtttttggtttctaaatgacatgaagagaatacaatgttaataattcagcttagagaactatcaacacaggacaatgcaagcccatgagctgttccggtattttcgaatgccagagctggttgacttccgacagtacgtgcgtactcttccgaccaacacgcttatgggcttcggagcttttgcagcactcaccaccttctggtacgccacgagacccaaacccctgaagccgccatgcgacctctccatgcagtcagtggaagtggcgggtagtggtggtgcacgaagatccgcactacttgacagcgacgagcccttggtgtatttctatgatgatgtcacaacattatacgaaggtttccagaggggaatacaggtgtcaagatcgctcaggcccctctgtgtccactgtaactttcccagagtcggtcccaaagctcactggaccctctagatgttccctgtggccctgggggctccatggtcaaatatgtgagtgtcacatcctgtattttatgataatggcccttgtttaggctctcggaaaccagaccaaccctatgaatggctttcatataaacaggttgcagaattgtcggagtgcataggctcagcactgatccagaagggcttcaagactgccccagatcagttcattggcatctttgctcaaaatagacctgagtgggtgattattgaacaaggatgctttgcttattcgatggtgatcgttccactttatgatacccttggaaatgaagccatcacgtacatagtcaacaaagctgaactctctctggtttttgttgacaagccagagaaggccaaactcttattagagggtgtagaaaataagttaataccaggccttaaaatcatagttgtcatggatgcctacggcagtgaactggtggaacgaggccagaggtgtggggtggaagtcaccagcatgaaggcgatggaggacctgggaagagccaacagacggaagcccaagcctccagcacctgaagatcttgcagtaatttgtttcacaagtggaactacaggcaaccccaaaggagcaatggtcactcaccgaaacatagtgagcgattgttcagcttttgtgaaagcaacagagaatacagtcaatccttgcccagatgatactttgatatctttcttgcctctcgcccatatgtttgagagagttgtagagtgtgtaatgctgtgtcatggagctaaaatcggatttttccaaggagatatcaggctgctcatggatgacctcaaggtgcttcaacccactgtcttccccgtggttccaagactgctgaaccggatgtttgaccgaattttcggacaagcaaacaccacgctgaagcgatggctcttggactttgcctccaagaggaaagaagcagagcttcgcagcggcatcatcagaaacaacagcctgtgggaccggctgatcttccacaaagtacagtcgagcctgggcggaagagtccggctgatggtgacaggagccgccccggtgtctgccactgtgctgacgttcctcagagcagccctgggctgtcagttttatgaaggatacggacagacagagtgcactgccgggtgctgcctgaccatgcctggagactggaccgcaggccatgttggggccccgatgccgtgcaatttgataaaacttgttgatgtggaagaaatgaattacatggctgccgagggcgagggcgaggtgtgtgtgaaagggccaaatgtatttcagggctacttgaaggacccagcgaaaacagcagaagctttggacaaagacggctggttacacacaggggacattggaaaatggttaccaaatggcaccttgaaaattatcgaccggaaaaagcacatatttaagctggcacaaggagaatacatagcccctgaaaagattgaaaatatctacatgcgaagtgagcctgttgctcaggtgtttgtccacggagaaagcctgcaggcatttctcattgcaattgtggtaccagatgttgagacattatgttcctgggcccaaaagagaggatttgaagggtcgtttgaggaactgtgcagaaataaggatgtcaaaaaagctatcctcgaagatatggtgagacttgggaaggattctggtctgaaaccatttgaacaggtcaaaggcatcacattgcaccctgaattattttctatcgacaatggccttctgactccaacaatgaaggcgaaaaggccagagctgcggaactatttcaggtcgcagatagatgacctctattccactatcaaggtttagtgtgaagaagaaagctcagaggaaatggcacagttccacaatctcttctcctgctgatggccttcatgttgttaattttgaatacagcaagtgtagggaaggaagcgttcgtgtttgacttgtccattcggggttcttctcataggaatgctagaggaaagagaacactgccttacagtcacctcatgttgcagaccatgtttatggtaatacacactttcc

SEQ ID NO: 104409 - DNA, 4103 bp, Homo sapiens
  Payload ID: 504
  Gene Symbol: ACSL1
  Gene Name: acyl-CoA synthetase long-chain family member 1
  ENST ID: ENST00000622937
  CDS Start-End: 991-2574
acaaagggggcgctttcagcctctgtaaatagcctattgtacaaggggaggaggcggggcacggaatggcagcatcttgccagcttgggttgctgcgttaaggaaagatgtcaggctttcttaatttgccactgcaggggcaagggtgtcatttatgtgggtttgtttgagggctgcattcctagtgaagtattccatcaaactgccattattcatcttgatgaaagcttgaggaactttagaaggagagaaacatccagaccacccggtttttggtttctaaatgacatgaagagaatacaatgttaataattcagcttagagaactatcaacacaggacaatgcaagcccatgagctgttccggtattttcgaatgccagagctggttgacttccgacagtacgtgcgtactcttccgaccaacacgcttatgggcttcggagcttttgcagcactcaccaccttctggtacgccacgagacccaaacccctgaagccgccatgcgacctctccatgcagtcagtggaagtggcgggtagtggtggtgcacgaagatccgcactacttgacagcgacgagcccttggtgtatttctatgatgatgtcacaacattatacgaaggtttccagaggggaatacaggtgtcaagatcgctcaggcccctctgtgtccactgtaactttcccagagtcggtcccaaagctcactggaccctctagatgttccctgtggccctgggggctccatggtcaaatatgtgagtgtcacatcctgtattttatgataatggcccttgtttaggctctcggaaaccagaccaaccctatgaatggctttcatataaacaggttgcagaattgtcggagtgcataggctcagcactgatccagaagggcttcaagactgccccagatcagttcattggcatctttgctcaaaatagacctgagtgggtgattattgaacaaggatgctttgcttattcgatggtgatcgttccactttatgatacccttggaaatgaagccatcacgtacatagtcaacaaagctgaactctctctggtttttgttgacaagccagagaaggccaaactcttattagagggtgtagaaaataagttaataccaggccttaaaatcatagttgtcatggatgcctacggcagtgaactggtggaacgaggccagaggtgtggggtggaagtcaccagcatgaaggcgatggaggacctgggaagagccaacagacggaagcccaagcctccagcacctgaagatcttgcagtaatttgtttcacaagtggaactacaggcaaccccaaaggagcaatggtcactcaccgaaacatagtgagcgattgttcagcttttgtgaaagcaacagagaatacagtcaatccttgcccagatgatactttgatatctttcttgcctctcgcccatatgtttgagagagttgtagagtgtgtaatgctgtgtcatggagctaaaatcggatttttccaaggagatatcaggctgctcatggatgacctcaaggtgcttcaacccactgtcttccccgtggttccaagactgctgaaccggatgtttgaccgaattttcggacaagcaaacaccacgctgaagcgatggctcttggactttgcctccaagaggaaagaagcagagcttcgcagcggcatcatcagaaacaacagcctgtgggaccggctgatcttccacaaagtacagtcgagcctgggcggaagagtccggctgatggtgacaggagccgccccggtgtctgccactgtgctgacgttcctcagagcagccctgggctgtcagttttatgaaggatacggacagacagagtgcactgccgggtgctgcctgaccatgcctggagactggaccgcaggccatgttggggccccgatgccgtgcaatttgataaaacttgttgatgtggaagaaatgaattacatggctgccgagggcgagggcgaggtgtgtgtgaaagggccaaatgtatttcagggctacttgaaggacccagcgaaaacagcagaagctttggacaaagacggctggttacacacaggggacattggaaaatggttaccaaatggcaccttgaaaattatcgaccggaaaaagcacatatttaagctggcacaaggagaatacatagcccctgaaaagattgaaaatatctacatgcgaagtgagcctgttgctcaggtgtttgtccacggagaaagcctgcaggcatttctcattgcaattgtggtaccagatgttgagacattatgttcctgggcccaaaagagaggatttgaagggtcgtttgaggaactgtgcagaaataaggatgtcaaaaaagctatcctcgaagatatggtgagacttgggaaggattctggtctgaaaccatttgaacaggtcaaaggcatcacattgcaccctgaattattttctatcgacaatggccttctgactccaacaatgaaggcgaaaaggccagagctgcggaactatttcaggtcgcagatagatgacctctattccactatcaaggtttagtgtgaagaagaaagctcagaggaaatggcacagttccacaatctcttctcctgctgatggccttcatgttgttaattttgaatacagcaagtgtagggaaggaagcgttcgtgtttgacttgtccattcggggttcttctcataggaatgctagaggaaagagaacactgccttacagtcacctcatgttgcagaccatgtttatggtaatacacactttccaaaatgagccttaaaaattgtaaaggggatactataaatgtgctaagttatttgagacttcctcagtttaaaaagtgggttttaaatcttctgtctccctgtttctctaatcaaggggttaggactttgctatctctgagatgtctgctacttgctgcaaattctgcagctgtctgctgctctaaagagtacagtgcactagagggaagtgttccctttaaaaataagaacaactgtcctggctggagaatctcacaagcggaccagagatctttttaaatccctgctactgtcccttctcacaggcattcacagaacccttctgattcgtaagggttacgaaactcatgttcttctccagtcccctgtggtttctgttggagcataaggtttccagtaagcgggagggcagatccaactcagaaccatgcagataaggagcctctggcaaatgggtgctcatcagaacgcgtggattctctttcatggcagaatgctcttggactcggttctccaggcctgattccccgactccatcctttttcaggggttatttaaaaatctgccttagattctatagtgaagacaagcatttcaagaaagagttacctggatcagccatgctcagctgtgacgcctgaataactgtctactttatcttcactgaaccactcactctgtgtaaaggccaacagatttttaatgtggttttcatatcaaaagatcatgttgggattaacttgcctttttccccaaaaaataaactctcaggcaagcatttctttaaagctattaagggagtatatacttgagtacttattgaaatggacagtaataagcaaatgttcttataatgctacctgatttctatgaaatgtgtttgacaagccaaaattctaggatgtagaaatctggaaagttcatttcctgggattcacttctccagggattttttaaagttaatttgggaaattaacagcagttcactttattgtgagtctttgccacatttgactgaattgagctgtcatttgtacatttaaagcagctgttttggggtctgtgagagtacatgtattatatacaagcacaacagggcttgcactaaagaattgtcattgtaataacactacttggtagcctaacttcatatatgtattcttaattgcacaaaaagtcaataatttgtcaccttggggttttgaatgtttgctttaagtgttggctatttctatgttttataaaccaaaacaaaatttccaaaaacaatgaaggaaaccaaaataaatatttctgcatttcaggtg

SEQ ID NO: 104410 - DNA, 5679 bp, Homo sapiens
  Payload ID: 505
  Gene Symbol: ACSL3
  Gene Name: acyl-CoA synthetase long-chain family member 3
  Uniprot ID: O95573
  ENST ID: ENST00000357430
  CDS Start-End: 532-2694
agccccgcacgcgccaccgctcgcgggccaatgggtggcagcctctctgcataggcaacgagtgccggccgggggtgagcgtcccaggcggttccgctcaacagacgctgctgtggctgcgccgggctgcgacactgcagttgtctacgcggccggggccgggacgaggaggcgttggacggggtcgcatacgttcgtcccctcgcattgcggccccgacagctgcgccaggatccccgggcggcggcgcggggcgtgaacgctctggggctcagccaggcctgcgcgggcccgaggccggaggaacccggactccggcgtagcggttttgacacaagggcgcatatcttcaaagcacctagtacctcctaccattgtcaactgatacagaattcgttgttgggaaggactggggaaacagctgtaacatttgccaccctcagaagctgctggtcctgtgtcacaccaccttagcctcttgatcgaggaagattctcgctgaagtctgttaattctactttttgagtacttatgaataaccacgtgtcttcaaaaccatctaccatgaagctaaaacataccatcaaccctattcttttatattttatacattttctaatatcactttatactattttaacatacattccgttttattttttctccgagtcaagacaagaaaaatcaaaccgaattaaagcaaagcctgtaaattcaaaacctgattctgcatacagatctgttaatagtttggatggtttggcttcagtattataccctggatgtgatactttagataaagtttttacatatgcaaaaaacaaatttaagaacaaaagactcttgggaacacgtgaagttttaaatgaggaagatgaagtacaaccaaatggaaaaatttttaaaaaggttattcttggacagtataattggctttcctatgaagatgtctttgttcgagcctttaattttggaaatggattacagatgttgggtcagaaaccaaagaccaacatcgccatcttctgtgagaccagggccgagtggatgatagctgcacaggcgtgttttatgtataattttcagcttgttacattatatgccactctaggaggtccagccattgttcatgcattaaatgaaacagaggtgaccaacatcattactagtaaagaactcttacaaacaaagttgaaggatatagtttctttggtcccacgcctgcggcacatcatcactgttgatggaaagccaccgacctggtccgagttccccaagggcatcattgtgcataccatggctgcagtggaggccctgggagccaaggccagcatggaaaaccaacctcatagcaaaccattgccctcagatattgcagtaatcatgtacacaagtggatccacaggacttccaaagggagtcatgatctcacatagtaacattattgctggtataactgggatggcagaaaggattccagaactaggagaggaagatgtctacattggatatttgcctctggcccatgttctagaattaagtgctgagcttgtctgtctttctcacggatgccgcattggttactcttcaccacagactttagcagatcagtcttcaaaaattaaaaaaggaagcaaaggggatacatccatgttgaaaccaacactgatggcagcagttccggaaatcatggatcggatctacaaaaatgtcatgaataaagtcagtgaaatgagtagttttcaacgtaatctgtttattctggcctataattacaaaatggaacagatttcaaaaggacgtaatactccactgtgcgacagctttgttttccggaaagttcgaagcttgctagggggaaatattcgtctcctgttgtgtggtggcgctccactttctgcaaccacgcagcgattcatgaacatctgtttctgctgtcctgttggtcagggatacgggctcactgaatctgctggggctggaacaatttccgaagtgtgggactacaatactggcagagtgggagcaccattagtttgctgtgaaatcaaattaaaaaactgggaggaaggtggatactttaatactgataagccacaccccaggggtgaaattcttattgggggccaaagtgtgacaatggggtactacaaaaatgaagcaaaaacaaaagctgatttctttgaagatgaaaatggacaaaggtggctctgtactggggatattggagagtttgaacccgatggatgcttaaagattattgatcgtaaaaaggaccttgtaaaactacaggcaggggaatatgtttctcttgggaaagtagaggcagctttgaagaatcttccactagtagataacatttgtgcatatgcaaacagttatcattcttatgtcattggatttgttgtgccaaatcaaaaggaactaactgaactagctcgaaagaaaggacttaaagggacttgggaggagctgtgtaacagttgtgaaatggaaaatgaggtacttaaagtgctttccgaagctgctatttcagcaagtctggaaaagtttgaaattccagtaaaaattcgtttgagtcctgaaccgtggacccctgaaactggtctggtgacagatgccttcaagctgaaacgcaaagagcttaaaacacattaccaggcggacattgagcgaatgtatggaagaaaataattattctcttctggcatcagtttgctacagtgagctcagatcaaataggaaaatacttgaaatgcatgtctcaagctgcaaggcaaactccattcctcatattaaactattacttctcatgacgtcaccatttttaactgacaggattagtaaaacattaagacagcaaacttgtgtctgtctcttctttcattttccccgccaccaacttactttaccacctatgactgtacttgtcagtatgagaatttttctgaatcatattggggaagcagtgattttaaaacctcaagtttttaaacatgatttatatgttctgtataatgttcagtttgtaactttttaaaagtttggatgtatagagggataaataggaaatataagaattggttatttgggggcttttttacttactgtatttaaaaatacaagggtattgatatgaaattatgtaaatttcaaatgcttatgaatcaaatcattgttgaacaaaagatttgttgctgtgtaattattgtcttgtatgcatttgagagaaataaatatacccatacttatgttttaagaagttgagatcttgtgaatatatgcctgtcagtgtcttctttatatatttattttttattagaaaaaatgaagtttggttggtgatgcatgaaacaaaatagcaagagagggttatagtttaatagtaagggagataacacagcatgtgtagcaccagttgataattggtctctagtagcttactgtcaaaatgttcaatgaagtcttctgttcatctgttgaaactaggaaaatacccaaacttaaatggaagaattctgaaagagaggatagaatttaaagaacaagagtatataaagttattctttgaatatttcgttgactatatgtacattgagttatctatatttgtaaacaaattagtcatggaaaattattctatctcaaagtctccttttagtctagataatcattatttcattttaaaattagtgtttttcctagtttgcactgatgcgtgtatggatgtgtgtgagtcagtggtagcttatttaaaaagcaccttatcctttctcccataacctttgtacactaaaaaatgaaagaatttagaatgtatttgatgatagcattctcactaagacacatgagaatttaactttataaccgcgtgagttaagatttaattcataggttttgatgtcattgttgaagttatttgtaattcagaaaccttgcttgtgtgatacatagtctcttcatttattactgcttgtctgttgttatatctggattatcaaaagcaatagtgcaccaattaagatgtgctcaaatcaggacttaaatcataggcaccacatttttcatgtcagactagttactttgttgattctcagttactgtaggcatcaaaaggcaaaaatcaaaaaaaaaaaaaacaaaaacaaaaaaaaagatgaacctaggtctgtgtaaagtaaggggagtgttaggagcagccaggactgtgtagtgtgtgtttggttgcatcacaaacatcgtatgtggagacattgcaatacagtgttttttgttttcaacttttcttgtattgtatatttgtattatgttttgaatgcttttctcttttcataattaaatattaatgtttgggataactgccaagaagaagtaaaaatattgaatggaacttctatatgaggatgctgtgatctaaaaattaaatctcagtgggcggagagaatttgtttctgatgccttgtctttagaataattgtttgctttcagatgattaaaaaaaggagattgtatctaggaaaaaagtgtgaatgcttcaaaggagagatactgataattgtgacttgaaatagtgtcagatgaattatgtagctgatcactgatggaaccatctaatgaggcaggcttaaactctatttagtttcgtttgttttctcatatgaagtttataattcctttcagtcctaaaatgtcagatgccaggtgtcaaatgccacagtagaaagtgaaattaagtagagtccccttttaaacaaatttgtctgtaagcaaaactatctttagtgacttaaaaaataatatcctctaaaattaccctttcaagaggaaaaaactgttcaatgaaaaaaccactcaattatgactcatataagaaatactggtttaaccaggagatatttggggagcaaaattttaaggaatttcaaattgctaaatctaatacaaatatctgacaataagatacagatctaaaagaatggttcttaagaactattgtttactgggaataaactaagctctatgaagaattcgtaagcattacatgttccagtaagtttagcaacttagagccaagactggtggccacctccatttatttccccactgctcctccactgacatccttcttagcagaaacttcatgaaaaagtttttgctgacacagaacaaacctgaaagtagtatctactttctaaatactactttgcttttcagtagtggatttgatatttataatgttctctaaagcttgcaactttttcagcaacgtttaaaaatagattaacctggaataacttacttgtttgctgctaaaatactcaagattttgccatttttaaacaaccagtccctgtgatacaactttgaaaaaacttttaaaaatctctgatgtgtgggctctttttttcccataagaattatgtacatctgtgatgttttacagggggatccgcttttaaacagtgtacatattggaccacactgaaatgtcatatatcctttctctacttaaaattggttatttactgtgagttcatttccgatgtgttcttggttgttgctgttttctgcctgaagacgtgtatcataaagagctacatggtatggactatttatttgtaatttgacataaagtttgaagaataaagatctataaaagttgaagtttctgatattaaa

SEQ ID NO: 104411 - DNA, 3147 bp, Homo sapiens
  Payload ID: 505
  Gene Symbol: ACSL3
  Gene Name: acyl-CoA synthetase long-chain family member 3
  Uniprot ID: O95573
  ENST ID: ENST00000392066
  CDS Start-End: 417-2579
acgcgccaccgctcgcgggccaatgggtggcagcctctctgcataggcaacgagtgccggccgggggtgagcgtcccaggcggttccgctcaacagacgctgctgtggctgcgccgggctgcgacactgcagttgtctacgcggccggggccgggacgaggaggcgttggacggggtcgcatacgttcgtcccctcgcattgcggccccgacagctgcgccaggatccccgggcggcggcgcggggcgtgaacgctctggggctcagccaggcctgcgcgggcccgaggccggaggaacccggactccggcgtagcggttttgacacaagggcgcatatcttcaaagcacctagtacctcctaccattgtcaactgattctcgctgaagtctgttaattctactttttgagtacttatgaataaccacgtgtcttcaaaaccatctaccatgaagctaaaacataccatcaaccctattcttttatattttatacattttctaatatcactttatactattttaacatacattccgttttattttttctccgagtcaagacaagaaaaatcaaaccgaattaaagcaaagcctgtaaattcaaaacctgattctgcatacagatctgttaatagtttggatggtttggcttcagtattataccctggatgtgatactttagataaagtttttacatatgcaaaaaacaaatttaagaacaaaagactcttgggaacacgtgaagttttaaatgaggaagatgaagtacaaccaaatggaaaaatttttaaaaaggttattcttggacagtataattggctttcctatgaagatgtctttgttcgagcctttaattttggaaatggattacagatgttgggtcagaaaccaaagaccaacatcgccatcttctgtgagaccagggccgagtggatgatagctgcacaggcgtgttttatgtataattttcagcttgttacattatatgccactctaggaggtccagccattgttcatgcattaaatgaaacagaggtgaccaacatcattactagtaaagaactcttacaaacaaagttgaaggatatagtttctttggtcccacgcctgcggcacatcatcactgttgatggaaagccaccgacctggtccgagttccccaagggcatcattgtgcataccatggctgcagtggaggccctgggagccaaggccagcatggaaaaccaacctcatagcaaaccattgccctcagatattgcagtaatcatgtacacaagtggatccacaggacttccaaagggagtcatgatctcacatagtaacattattgctggtataactgggatggcagaaaggattccagaactaggagaggaagatgtctacattggatatttgcctctggcccatgttctagaattaagtgctgagcttgtctgtctttctcacggatgccgcattggttactcttcaccacagactttagcagatcagtcttcaaaaattaaaaaaggaagcaaaggggatacatccatgttgaaaccaacactgatggcagcagttccggaaatcatggatcggatctacaaaaatgtcatgaataaagtcagtgaaatgagtagttttcaacgtaatctgtttattctggcctataattacaaaatggaacagatttcaaaaggacgtaatactccactgtgcgacagctttgttttccggaaagttcgaagcttgctagggggaaatattcgtctcctgttgtgtggtggcgctccactttctgcaaccacgcagcgattcatgaacatctgtttctgctgtcctgttggtcagggatacgggctcactgaatctgctggggctggaacaatttccgaagtgtgggactacaatactggcagagtgggagcaccattagtttgctgtgaaatcaaattaaaaaactgggaggaaggtggatactttaatactgataagccacaccccaggggtgaaattcttattgggggccaaagtgtgacaatggggtactacaaaaatgaagcaaaaacaaaagctgatttctttgaagatgaaaatggacaaaggtggctctgtactggggatattggagagtttgaacccgatggatgcttaaagattattgatcgtaaaaaggaccttgtaaaactacaggcaggggaatatgtttctcttgggaaagtagaggcagctttgaagaatcttccactagtagataacatttgtgcatatgcaaacagttatcattcttatgtcattggatttgttgtgccaaatcaaaaggaactaactgaactagctcgaaagaaaggacttaaagggacttgggaggagctgtgtaacagttgtgaaatggaaaatgaggtacttaaagtgctttccgaagctgctatttcagcaagtctggaaaagtttgaaattccagtaaaaattcgtttgagtcctgaaccgtggacccctgaaactggtctggtgacagatgccttcaagctgaaacgcaaagagcttaaaacacattaccaggcggacattgagcgaatgtatggaagaaaataattattctcttctggcatcagtttgctacagtgagctcagatcaaataggaaaatacttgaaatgcatgtctcaagctgcaaggcaaactccattcctcatattaaactattacttctcatgacgtcaccatttttaactgacaggattagtaaaacattaagacagcaaacttgtgtctgtctcttctttcattttccccgccaccaacttactttaccacctatgactgtacttgtcagtatgagaatttttctgaatcatattggggaagcagtgattttaaaacctcaagtttttaaacatgatttatatgttctgtataatgttcagtttgtaactttttaaaagtttggatgtatagagggataaataggaaatataagaattggttatttgggggcttttttacttactgtatttaaaaatacaagggtattgatatgaaattatgtaaatttcaaatgcttatgaatcaaatcattgttgaacaaaagatttgttgctgtgtaattattgtcttgtatgcatttgagagaaataaatatacccatacttatgttttaagaa

SEQ ID NO: 104412 - DNA, 538 bp, Homo sapiens
  Payload ID: 505
  Gene Symbol: ACSL3
  Gene Name: acyl-CoA synthetase long-chain family member 3
  ENST ID: ENST00000407441
  CDS Start-End: 1-55
ggaacagatttcaaaaggacgtaatactccactgtgcgacaggtggatactttaatactgataagccacaccccaggggtgaaattcttattgggggccaaagtgtgacaatggggtactacaaaaatgaagcaaaaacaaaagctgatttctttgaagatgaaaatggacaaaggtggctctgtactggggatattggagagtttgaacccgatggatgcttaaagattattgatcgtaaaaaggaccttgtaaaactacaggcaggggaatatgtttctcttgggaaagtagaggcagctttgaagaatcttccactagtagataacatttgtgcatatgcaaacagttatcattcttatgtcattggatttgttgtgccaaatcaaaaggaactaactgaactagctcgaaagaaaggacttaaagggacttgggaggagctgtgtaacagttgtgaaatggaaaatgaggtacttaaagtgctttccgaagctgctatttcagcaagtctggaaaagtttgaaattccagtaaa

SEQ ID NO: 104413 - DNA, 650 bp, Homo sapiens
  Payload ID: 505
  Gene Symbol: ACSL3
  Gene Name: acyl-CoA synthetase long-chain family member 3
  ENST ID: ENST00000413316
  CDS Start-End: 387-650
actgcgtgcctcccggcgctgtggggcggggtggggaggccacccccttgaattaagagggctctgccgcggccccagcagtgcggtgtccgtggaaggagactcagccctgcgatttcggaaaacccttgtttggcggggcgggaggggctgttgctgcgtggggtgagaagaaactaggttttgacacaagggcgcatatcttcaaagcacctagtacctcctaccattgtcaactgatacagaattcgttgttgggaaggactggggaaacagctgtaacatttgccaccctcagaagctgctggtcctgtgtcacaccaccttagcctcttgatcgaggaagattctcgctgaagtctgttaattctactttttgagtacttatgaataaccacgtgtcttcaaaaccatctaccatgaagctaaaacataccatcaaccctattcttttatattttatacattttctaatatcactttatactattttaacatacattccgttttattttttctccgagtcaagacaagaaaaatcaaaccgaattaaagcaaagcctgtaaattcaaaacctgattctgcatacagatctgttaatagtttggatggtttggcttcagtattataccctggatgtgatacttta

SEQ ID NO: 104414 - DNA, 560 bp, Homo sapiens
  Payload ID: 505
  Gene Symbol: ACSL3
  Gene Name: acyl-CoA synthetase long-chain family member 3
  ENST ID: ENST00000535678
  CDS Start-End: 274-560
tccgctcaacagacgctgctgtggctgcgccgggctgcgacactgcagttgtctacgcggccggggccgggacgaggaggcgttggacggggtcgcatacgttcgtcccctcgcattgcggccccgacagctgcgccaggatccccgggcggcggcgcggggcgtgaacgctctggggctcagccaggcctgcgcgggcccgaggccggaggaacccggactccggcgtagcgattctcgctgaagtctgttaattctactttttgagtacttatgaataaccacgtgtcttcaaaaccatctaccatgaagctaaaacataccatcaaccctattcttttatattttatacattttctaatatcactttatactattttaacatacattccgttttattttttctccgagtcaagacaagaaaaatcaaaccgaattaaagcaaagcctgtaaattcaaaacctgattctgcatacagatctgttaatagtttggatggtttggcttcagtattataccctggatgtgatactttagataaagtttttacatatgcaaa

SEQ ID NO: 104415 - DNA, 624 bp, Homo sapiens
  Payload ID: 505
  Gene Symbol: ACSL3
  Gene Name: acyl-CoA synthetase long-chain family member 3
  ENST ID: ENST00000540115
  CDS Start-End: 202-624
tgaaacaacgggcaagatgttctcagaggcagtgtaacagcgattaagagcctggactccagacccagactataggtctgaatcttggctttgccacttaactggctttctgaccctggaaaagttattcttggacagtataattggctttcctatgaagatgtctttgttcgagcctttaattttggaaatggattacagatgttgggtcagaaaccaaagaccaacatcgccatcttctgtgagaccagggccgagtggatgatagctgcacaggcgtgttttatgtataattttcagcttgttacattatatgccactctaggaggtccagccattgttcatgcattaaatgaaacagaggtgaccaacatcattactagtaaagaactcttacaaacaaagttgaaggatatagtttctttggtcccacgcctgcggcacatcatcactgttgatggaaagccaccgacctggtccgagttccccaagggcatcattgtgcataccatggctgcagtggaggccctgggagccaaggccagcatggaaaaccaacctcatagcaaaccattgccctcagatattgcagtaatcatgtacacaagtggatccacaggactt

SEQ ID NO: 104416 - DNA, 5032 bp, Homo sapiens
  Payload ID: 506
  Gene Symbol: ACSL4
  Gene Name: acyl-CoA synthetase long-chain family member 4
  Uniprot ID: O60488
  ENST ID: ENST00000348502
  CDS Start-End: 328-2340
gtctgcagccagcgattcggctggctctgccacaccaccgcgcgcccccgctccgcccgcccctccgggcgcgtcttttccgggctcgcgctgagtcccgcctccgccggctgtccgggtgcgcgcgcgccgctgcggctttttctctggcctccgccgcgcgctcctcctcgtcccagcgctagcgggcacgcggttcctttttgcgagctttccgagtgccaggcgccggccggctgcgaagacgcggtgggccgcccctccgattgaaatcacagaagatattcgtgttcttcttaagagaaaaagaggacatttaaaaacgctatggcaaagagaataaaagctaagcccacttcagacaaacctggaagtccatatcgctctgtcacacacttcgactcactagctgtaatagacatccctggagcagatactctggataaattatttgaccatgctgtatccaagtttgggaagaaggacagccttgggaccagggaaatcctaagtgaagaaaatgaaatgcagccaaatggaaaagtttttaagaagttaattcttgggaattataaatggatgaactatcttgaagtgaatcgcagagtgaataactttggtagtggactcactgcactgggactaaaaccaaagaacaccattgccatcttctgtgagaccagggccgaatggatgattgcagcacagacctgctttaagtacaactttcctcttgtgactttatatgccacacttggcaaagaagcagtagttcatgggctaaatgaatctgaggcttcctatctgattaccagtgttgaacttctggaaagtaaacttaagactgcattgttagatatcagttgtgttaaacatatcatttatgtggacaataaggctatcaataaagcagagtaccctgaaggatttgagattcacagcatgcaatcagtagaagagttgggatctaacccagaaaacttgggcattcctccaagtagaccaacgccttcagacatggccattgttatgtatactagtggttctactggccgacctaagggagtgatgatgcatcatagcaatttgatagctggaatgacaggccagtgtgaaagaatacctggactgggaccgaaggacacatatattggctacttgcctttggctcatgtgctagaactgacagcagagatatcttgctttacctatggctgcaggattggatattcttctccgcttacactctctgaccagtccagcaaaattaaaaaaggaagcaaaggagactgtactgtactgaagcccacacttatggctgctgttccggaaatcatggatagaatttataagaatgttatgagcaaagtccaagagatgaattatattcagaaaactctgttcaagatagggtatgattacaaattggaacagatcaaaaagggatatgatgcacctctttgcaatctgttactgtttaaaaaggtcaaggccctgctgggagggaatgtccgcatgatgctgtctggaggggccccgctatctcctcagacacaccgattcatgaatgtctgcttctgctgcccaattggccagggttatggactgacagaatcatgtggtgctgggacagttactgaagtaactgactatactactggcagagttggagcacctcttatttgctgtgaaattaagctaaaagactggcaagaaggcggttatacaattaatgacaagccaaaccccagaggtgaaatcgtaattggtggacagaacatctccatgggatattttaaaaatgaagagaaaacagcagaagattattctgtggatgaaaatggacaaaggtggttttgcactggtgatattggagaattccatcccgatggatgtttacagattatagatcgtaagaaagatctagtgaagttacaagcaggagagtatgtatctcttgggaaagtagaagctgcactgaagaattgtccacttattgacaacatctgtgcttttgccaaaagtgatcagtcctatgtgatcagttttgtggttcctaaccagaaaaggttgacacttttggcacaacagaaaggggtagaaggaacttgggttgatatctgcaataatcctgctatggaagctgaaatactgaaagaaattcgagaagctgcaaatgccatgaaattggagcgatttgaaattccaatcaaggttcgattaagcccagagccatggacccctgaaactggtttggtaactgatgctttcaaactgaaaaggaaggagctgaggaaccattacctcaaagacattgaacgaatgtatgggggcaaataaaatgttgttgtcttattgacagttgtgcaggaggtagcctggtggttttcaacctctagaattttaagcctttgttgaactgttagaatgtaaggtatatcattctaaagatagagtaaaaagaaaacaaaaccaaaagttattaaaattgttgtccggtttactttaacttagttttgcatagttctagtgcagctgaaattgaaaagttatttccctttagctgtgttattatagagcagaaattctgtttttaaaaattagcctaagatatacttgtttttgtaaagaaaaatatttaatgttgaacaaaataaattggagttggagtagaatgtagtttgaggaaatttgcagcttccaatgcctcttgtcttcctatttcagaagtttaaatattaagcatgacagaaaatatgtattaacactactcaaagcaaaagtgctgcagggctttaaaattctcttccaaccatttatcttgaaggaaaaattcaatagtaatataatacacaaaatcaaataataccttagaaggtattaagattataattgttgcataggttagatatagagtcattgtaatgttgtgaataattacagtgcctaaaataagaatagaacaacatatacaacaccaaaaaatatctagtaatatatttaaagggaaattgagctgctttttttgaaactttgagatctaaaaataactgtaattatttgaatgactaagaggaaagtacattttttgaaatgctgaaaattgcctttctgtgtttattcaaactgaaaagctgagaccaagagcaaggaaggtaaaaagttaacaggcaaacattttctcttagaaaaggtgataaaatcataagtatttggaattagaacccttgcacagcactgaacctgggaaagagatttaaactctgaatttatctttgataacagggattgattttaaaatgtacatgtattaaattacatttgtaatttaaggtctgtttgctgttgctgattttattcttgatcagtagtttgcatttcagaaagcctttcattttgctttaattttagcaaagcgggttataatgaatgacttccccaatatcttgcttgaacttacaggtgattaacttggatgagttttgggaagttaaagggaagaaaacactgttatcattttttcctgtttgggaagagcttagaaactggaaatactagatttgggagaagggcagagttacttgataagggactgatgtttgtgcagtaacttgggagtgtggtttctttttgaatctttaattaaaacctgggattatatatccctgataaatattcacacttgaaccatagttactgtaaaatgcaaaaaatcttaatactgttattctttgcactttttcttaatcattttttatatatatgcatatatatatgtgtgtgtgtgtgttgcttatgttgttttgtacagatgtgggccaccattgcaacaaaatacattctttttgctctaaaatatttatgaagaaaatacttaaatgttatgtatatggtggtaataagggaaaaatcaagtattataaacaagaatgaaggtttttgtaaagatttctgttcagcgttttgcaaggtaaaattttaggcaagttttccctgaagttatgtgtatgtgagtattctcattcttcccaacttgcctttgaagagtgaaataccattattatcaagtagactactgttcagcttttattcctgccctgctgtttatcccttaagaatgagtttcttagacttttccaatatgtgattttttttcccatttagaatggtgattttaaatgtgtgagtgcatgtactatcttatctcagatatttgcacccccaatctgcccccaactcccaaaagctagaacactgccaactgatctgttataggtcctttagaaacacataattaacacttaaggttgggtgctgctaattctttgcaaaaatccaaatattgttaagggaccagggagatgccactaccccttgattttccatctaaaaatatacatgtttatgtaaacaaatctttccatatccatagtgacttttcaagtatttaagcctaaagattttgatctcacatttttatacctgtttaaattgctcacagttattacatacacatcagccatcaactaaagttgtactttaaaaatttactacaatatgtacatttctaagtcaaacacttgtgacttttgctttaattccatgaatgttcctgcctccttgatatttgtatttattctttttttctctagagtagaggtataattgtgtgatatttcagaaatacagataaatgattcaaaaagtcacagttaaggagaatcatgtttctttgatcatgaataactgattagtaagtcttgcctatattttcctgatagcatatgacaaatgtttctaaggtaacaagatgagaacagataaagattgtgtggtgttttggatttggagagaaatattttaatttttaaatgcagttacaaattataatgtattcatatttgtactttctgttaaaatgcatgattgcagaattgtttagattttgtgtttattcttgatgaaaagctttgtttgttcttgtttttaagtttgcactcaaatcttaagaaataaatccacccatgttatc

SEQ ID NO: 104417 - DNA, 5333 bp, Homo sapiens
  Payload ID: 506
  Gene Symbol: ACSL4
  Gene Name: acyl-CoA synthetase long-chain family member 4
  Uniprot ID: O60488
  ENST ID: ENST00000340800
  CDS Start-End: 506-2641
gcgattcggctggctctgccacaccaccgcgcgcccccgctccgcccgcccctccgggcgcgtcttttccgggctcgcgctgagtcccgcctccgccggctgtccgggtgcgcgcgcgccgctgcggctttttctctggcctccgccgcgcgctcctcctcgtcccagcgctagcgggcacgcggttcctttttgcgagctttccgagtgccaggcgccggccggctgcgaagacgcggtgggccgcccctccgattgaaatcacagaagatattcgtgttcttcttaagagaaaaagaggacattttagctttctcagttgaaggcgtactttattgtcggcttccaaagattactaacttttatctgtatcactaagattgaactgccttggctgtactgctattcttactgctgcttctattattgccttcttcagcacaataaggctttcaaaagccaaagaataacaagaaataagcaccattttagaagcctttccactatgaaacttaagctaaatgtgctcaccattattttgctgcctgtccacttgttaataacaatatacagtgcccttatatttattccatggtattttcttaccaatgccaagaagaaaaacgctatggcaaagagaataaaagctaagcccacttcagacaaacctggaagtccatatcgctctgtcacacacttcgactcactagctgtaatagacatccctggagcagatactctggataaattatttgaccatgctgtatccaagtttgggaagaaggacagccttgggaccagggaaatcctaagtgaagaaaatgaaatgcagccaaatggaaaagtttttaagaagttaattcttgggaattataaatggatgaactatcttgaagtgaatcgcagagtgaataactttggtagtggactcactgcactgggactaaaaccaaagaacaccattgccatcttctgtgagaccagggccgaatggatgattgcagcacagacctgctttaagtacaactttcctcttgtgactttatatgccacacttggcaaagaagcagtagttcatgggctaaatgaatctgaggcttcctatctgattaccagtgttgaacttctggaaagtaaacttaagactgcattgttagatatcagttgtgttaaacatatcatttatgtggacaataaggctatcaataaagcagagtaccctgaaggatttgagattcacagcatgcaatcagtagaagagttgggatctaacccagaaaacttgggcattcctccaagtagaccaacgccttcagacatggccattgttatgtatactagtggttctactggccgacctaagggagtgatgatgcatcatagcaatttgatagctggaatgacaggccagtgtgaaagaatacctggactgggaccgaaggacacatatattggctacttgcctttggctcatgtgctagaactgacagcagagatatcttgctttacctatggctgcaggattggatattcttctccgcttacactctctgaccagtccagcaaaattaaaaaaggaagcaaaggagactgtactgtactgaagcccacacttatggctgctgttccggaaatcatggatagaatttataagaatgttatgagcaaagtccaagagatgaattatattcagaaaactctgttcaagatagggtatgattacaaattggaacagatcaaaaagggatatgatgcacctctttgcaatctgttactgtttaaaaaggtcaaggccctgctgggagggaatgtccgcatgatgctgtctggaggggccccgctatctcctcagacacaccgattcatgaatgtctgcttctgctgcccaattggccagggttatggactgacagaatcatgtggtgctgggacagttactgaagtaactgactatactactggcagagttggagcacctcttatttgctgtgaaattaagctaaaagactggcaagaaggcggttatacaattaatgacaagccaaaccccagaggtgaaatcgtaattggtggacagaacatctccatgggatattttaaaaatgaagagaaaacagcagaagattattctgtggatgaaaatggacaaaggtggttttgcactggtgatattggagaattccatcccgatggatgtttacagattatagatcgtaagaaagatctagtgaagttacaagcaggagagtatgtatctcttgggaaagtagaagctgcactgaagaattgtccacttattgacaacatctgtgcttttgccaaaagtgatcagtcctatgtgatcagttttgtggttcctaaccagaaaaggttgacacttttggcacaacagaaaggggtagaaggaacttgggttgatatctgcaataatcctgctatggaagctgaaatactgaaagaaattcgagaagctgcaaatgccatgaaattggagcgatttgaaattccaatcaaggttcgattaagcccagagccatggacccctgaaactggtttggtaactgatgctttcaaactgaaaaggaaggagctgaggaaccattacctcaaagacattgaacgaatgtatgggggcaaataaaatgttgttgtcttattgacagttgtgcaggaggtagcctggtggttttcaacctctagaattttaagcctttgttgaactgttagaatgtaaggtatatcattctaaagatagagtaaaaagaaaacaaaaccaaaagttattaaaattgttgtccggtttactttaacttagttttgcatagttctagtgcagctgaaattgaaaagttatttccctttagctgtgttattatagagcagaaattctgtttttaaaaattagcctaagatatacttgtttttgtaaagaaaaatatttaatgttgaacaaaataaattggagttggagtagaatgtagtttgaggaaatttgcagcttccaatgcctcttgtcttcctatttcagaagtttaaatattaagcatgacagaaaatatgtattaacactactcaaagcaaaagtgctgcagggctttaaaattctcttccaaccatttatcttgaaggaaaaattcaatagtaatataatacacaaaatcaaataataccttagaaggtattaagattataattgttgcataggttagatatagagtcattgtaatgttgtgaataattacagtgcctaaaataagaatagaacaacatatacaacaccaaaaaatatctagtaatatatttaaagggaaattgagctgctttttttgaaactttgagatctaaaaataactgtaattatttgaatgactaagaggaaagtacattttttgaaatgctgaaaattgcctttctgtgtttattcaaactgaaaagctgagaccaagagcaaggaaggtaaaaagttaacaggcaaacattttctcttagaaaaggtgataaaatcataagtatttggaattagaacccttgcacagcactgaacctgggaaagagatttaaactctgaatttatctttgataacagggattgattttaaaatgtacatgtattaaattacatttgtaatttaaggtctgtttgctgttgctgattttattcttgatcagtagtttgcatttcagaaagcctttcattttgctttaattttagcaaagcgggttataatgaatgacttccccaatatcttgcttgaacttacaggtgattaacttggatgagttttgggaagttaaagggaagaaaacactgttatcattttttcctgtttgggaagagcttagaaactggaaatactagatttgggagaagggcagagttacttgataagggactgatgtttgtgcagtaacttgggagtgtggtttctttttgaatctttaattaaaacctgggattatatatccctgataaatattcacacttgaaccatagttactgtaaaatgcaaaaaatcttaatactgttattctttgcactttttcttaatcattttttatatatatgcatatatatatgtgtgtgtgtgtgttgcttatgttgttttgtacagatgtgggccaccattgcaacaaaatacattctttttgctctaaaatatttatgaagaaaatacttaaatgttatgtatatggtggtaataagggaaaaatcaagtattataaacaagaatgaaggtttttgtaaagatttctgttcagcgttttgcaaggtaaaattttaggcaagttttccctgaagttatgtgtatgtgagtattctcattcttcccaacttgcctttgaagagtgaaataccattattatcaagtagactactgttcagcttttattcctgccctgctgtttatcccttaagaatgagtttcttagacttttccaatatgtgattttttttcccatttagaatggtgattttaaatgtgtgagtgcatgtactatcttatctcagatatttgcacccccaatctgcccccaactcccaaaagctagaacactgccaactgatctgttataggtcctttagaaacacataattaacacttaaggttgggtgctgctaattctttgcaaaaatccaaatattgttaagggaccagggagatgccactaccccttgattttccatctaaaaatatacatgtttatgtaaacaaatctttccatatccatagtgacttttcaagtatttaagcctaaagattttgatctcacatttttatacctgtttaaattgctcacagttattacatacacatcagccatcaactaaagttgtactttaaaaatttactacaatatgtacatttctaagtcaaacacttgtgacttttgctttaattccatgaatgttcctgcctccttgatatttgtatttattctttttttctctagagtagaggtataattgtgtgatatttcagaaatacagataaatgattcaaaaagtcacagttaaggagaatcatgtttctttgatcatgaataactgattagtaagtcttgcctatattttcctgatagcatatgacaaatgtttctaaggtaacaagatgagaacagataaagattgtgtggtgttttggatttggagagaaatattttaatttttaaatgcagttacaaattataatgtattcatatttgtactttctgttaaaatgcatgattgcagaattgtttagattttgtgtttattcttgatgaaaagctttgtttgttcttgtttttaagtttgcactcaaatcttaagaaataaatccacccatgttatc

SEQ ID NO: 104418 - DNA, 5225 bp, Homo sapiens
  Payload ID: 506
  Gene Symbol: ACSL4
  Gene Name: acyl-CoA synthetase long-chain family member 4
  Uniprot ID: O60488
  ENST ID: ENST00000469796
  CDS Start-End: 398-2533
ctccgccggctgtccgggtgcgcgcgcgccgctgcggctttttctctggcctccgccgcgcgctcctcctcgtcccagcgctagcgggcacgcggttcctttttgcgagctttccgagtgccaggcgccggccggctgcgaagacgcggtgggccgcccctccgattgaaatcacagaagatattcgtgttcttcttaagagaaaaagaggacatttgcgtactttattgtcggcttccaaagattactaacttttatctgtatcactaagattgaactgccttggctgtactgctattcttactgctgcttctattattgccttcttcagcacaataaggctttcaaaagccaaagaataacaagaaataagcaccattttagaagcctttccactatgaaacttaagctaaatgtgctcaccattattttgctgcctgtccacttgttaataacaatatacagtgcccttatatttattccatggtattttcttaccaatgccaagaagaaaaacgctatggcaaagagaataaaagctaagcccacttcagacaaacctggaagtccatatcgctctgtcacacacttcgactcactagctgtaatagacatccctggagcagatactctggataaattatttgaccatgctgtatccaagtttgggaagaaggacagccttgggaccagggaaatcctaagtgaagaaaatgaaatgcagccaaatggaaaagtttttaagaagttaattcttgggaattataaatggatgaactatcttgaagtgaatcgcagagtgaataactttggtagtggactcactgcactgggactaaaaccaaagaacaccattgccatcttctgtgagaccagggccgaatggatgattgcagcacagacctgctttaagtacaactttcctcttgtgactttatatgccacacttggcaaagaagcagtagttcatgggctaaatgaatctgaggcttcctatctgattaccagtgttgaacttctggaaagtaaacttaagactgcattgttagatatcagttgtgttaaacatatcatttatgtggacaataaggctatcaataaagcagagtaccctgaaggatttgagattcacagcatgcaatcagtagaagagttgggatctaacccagaaaacttgggcattcctccaagtagaccaacgccttcagacatggccattgttatgtatactagtggttctactggccgacctaagggagtgatgatgcatcatagcaatttgatagctggaatgacaggccagtgtgaaagaatacctggactgggaccgaaggacacatatattggctacttgcctttggctcatgtgctagaactgacagcagagatatcttgctttacctatggctgcaggattggatattcttctccgcttacactctctgaccagtccagcaaaattaaaaaaggaagcaaaggagactgtactgtactgaagcccacacttatggctgctgttccggaaatcatggatagaatttataagaatgttatgagcaaagtccaagagatgaattatattcagaaaactctgttcaagatagggtatgattacaaattggaacagatcaaaaagggatatgatgcacctctttgcaatctgttactgtttaaaaaggtcaaggccctgctgggagggaatgtccgcatgatgctgtctggaggggccccgctatctcctcagacacaccgattcatgaatgtctgcttctgctgcccaattggccagggttatggactgacagaatcatgtggtgctgggacagttactgaagtaactgactatactactggcagagttggagcacctcttatttgctgtgaaattaagctaaaagactggcaagaaggcggttatacaattaatgacaagccaaaccccagaggtgaaatcgtaattggtggacagaacatctccatgggatattttaaaaatgaagagaaaacagcagaagattattctgtggatgaaaatggacaaaggtggttttgcactggtgatattggagaattccatcccgatggatgtttacagattatagatcgtaagaaagatctagtgaagttacaagcaggagagtatgtatctcttgggaaagtagaagctgcactgaagaattgtccacttattgacaacatctgtgcttttgccaaaagtgatcagtcctatgtgatcagttttgtggttcctaaccagaaaaggttgacacttttggcacaacagaaaggggtagaaggaacttgggttgatatctgcaataatcctgctatggaagctgaaatactgaaagaaattcgagaagctgcaaatgccatgaaattggagcgatttgaaattccaatcaaggttcgattaagcccagagccatggacccctgaaactggtttggtaactgatgctttcaaactgaaaaggaaggagctgaggaaccattacctcaaagacattgaacgaatgtatgggggcaaataaaatgttgttgtcttattgacagttgtgcaggaggtagcctggtggttttcaacctctagaattttaagcctttgttgaactgttagaatgtaaggtatatcattctaaagatagagtaaaaagaaaacaaaaccaaaagttattaaaattgttgtccggtttactttaacttagttttgcatagttctagtgcagctgaaattgaaaagttatttccctttagctgtgttattatagagcagaaattctgtttttaaaaattagcctaagatatacttgtttttgtaaagaaaaatatttaatgttgaacaaaataaattggagttggagtagaatgtagtttgaggaaatttgcagcttccaatgcctcttgtcttcctatttcagaagtttaaatattaagcatgacagaaaatatgtattaacactactcaaagcaaaagtgctgcagggctttaaaattctcttccaaccatttatcttgaaggaaaaattcaatagtaatataatacacaaaatcaaataataccttagaaggtattaagattataattgttgcataggttagatatagagtcattgtaatgttgtgaataattacagtgcctaaaataagaatagaacaacatatacaacaccaaaaaatatctagtaatatatttaaagggaaattgagctgctttttttgaaactttgagatctaaaaataactgtaattatttgaatgactaagaggaaagtacattttttgaaatgctgaaaattgcctttctgtgtttattcaaactgaaaagctgagaccaagagcaaggaaggtaaaaagttaacaggcaaacattttctcttagaaaaggtgataaaatcataagtatttggaattagaacccttgcacagcactgaacctgggaaagagatttaaactctgaatttatctttgataacagggattgattttaaaatgtacatgtattaaattacatttgtaatttaaggtctgtttgctgttgctgattttattcttgatcagtagtttgcatttcagaaagcctttcattttgctttaattttagcaaagcgggttataatgaatgacttccccaatatcttgcttgaacttacaggtgattaacttggatgagttttgggaagttaaagggaagaaaacactgttatcattttttcctgtttgggaagagcttagaaactggaaatactagatttgggagaagggcagagttacttgataagggactgatgtttgtgcagtaacttgggagtgtggtttctttttgaatctttaattaaaacctgggattatatatccctgataaatattcacacttgaaccatagttactgtaaaatgcaaaaaatcttaatactgttattctttgcactttttcttaatcattttttatatatatgcatatatatatgtgtgtgtgtgtgttgcttatgttgttttgtacagatgtgggccaccattgcaacaaaatacattctttttgctctaaaatatttatgaagaaaatacttaaatgttatgtatatggtggtaataagggaaaaatcaagtattataaacaagaatgaaggtttttgtaaagatttctgttcagcgttttgcaaggtaaaattttaggcaagttttccctgaagttatgtgtatgtgagtattctcattcttcccaacttgcctttgaagagtgaaataccattattatcaagtagactactgttcagcttttattcctgccctgctgtttatcccttaagaatgagtttcttagacttttccaatatgtgattttttttcccatttagaatggtgattttaaatgtgtgagtgcatgtactatcttatctcagatatttgcacccccaatctgcccccaactcccaaaagctagaacactgccaactgatctgttataggtcctttagaaacacataattaacacttaaggttgggtgctgctaattctttgcaaaaatccaaatattgttaagggaccagggagatgccactaccccttgattttccatctaaaaatatacatgtttatgtaaacaaatctttccatatccatagtgacttttcaagtatttaagcctaaagattttgatctcacatttttatacctgtttaaattgctcacagttattacatacacatcagccatcaactaaagttgtactttaaaaatttactacaatatgtacatttctaagtcaaacacttgtgacttttgctttaattccatgaatgttcctgcctccttgatatttgtatttattctttttttctctagagtagaggtataattgtgtgatatttcagaaatacagataaatgattcaaaaagtcacagttaaggagaatcatgtttctttgatcatgaataactgattagtaagtcttgcctatattttcctgatagcatatgacaaatgtttctaaggtaacaagatgagaacagataaagattgtgtggtgttttggatttggagagaaatattttaatttttaaatgcagttacaaattataatgtattcatatttgtactttctgttaaaatgcatgattgcagaattgtttagattttgtgtttattcttgatgaaaagctttgtttgttcttgtttttaagtttgcactcaaatcttaagaaataaatccacccatgttatc

SEQ ID NO: 104419 - DNA, 573 bp, Homo sapiens
  Payload ID: 506
  Gene Symbol: ACSL4
  Gene Name: acyl-CoA synthetase long-chain family member 4
  ENST ID: ENST00000504980
  CDS Start-End: 195-573
acgcggttcctttttgcgagctttccgagtgccaggcgccggccggctgcgaagacgcggtgggccgcccctccgattgaaatcacagaagatattcgtgttcttcttaagagaaaaagaggacatttcacaataaggctttcaaaagccaaagaataacaagaaataagcaccattttagaagcctttccactatgaaacttaagctaaatgtgctcaccattattttgctgcctgtccacttgttaataacaatatacagtgcccttatatttattccatggtattttcttaccaatgccaagaagaaaaacgctatggcaaagagaataaaagctaagcccacttcagacaaacctggaagtccatatcgctctgtcacacacttcgactcactagctgtaatagacatccctggagcagatactctggataaattatttgaccatgctgtatccaagtttgggaagaaggacagccttgggaccagggaaatcctaagtgaagaaaatgaaatgcagccaaatggaaaagtttttaagaagttaattcttgggaattataaatggatga

SEQ ID NO: 104420 - DNA, 506 bp, Homo sapiens
  Payload ID: 506
  Gene Symbol: ACSL4
  Gene Name: acyl-CoA synthetase long-chain family member 4
  ENST ID: ENST00000469857
  CDS Start-End: 345-506
gtcccagcgctagcgggcacgcggttcctttttgcgagctttccgagtgccaggcgccggccggctgcgaagacgcggtgggccgcccctccgattgaaatcacagaagatattcgtgttcttcttaagagaaaaagaggacattttagctttctcagttgaaggcgtactttattgtcggcttccaaagattactaacttttatctgtatcactaagattgaactgccttggctgtactgctattcttactgctgcttctattattgccttcttcagcacaataaggctttcaaaagccaaagaataacaagaaataagcaccattttagaagcctttccactatgaaacttaagctaaatgtgctcaccattattttgctgcctgtccacttgttaataacaatatacagtgcccttatatttattccatggtattttcttaccaatgccaagaagaaaaacgctatggcaaagagaataaaagctaagcccacttcagacaaa

SEQ ID NO: 104421 - DNA, 696 bp, Homo sapiens
  Payload ID: 506
  Gene Symbol: ACSL4
  Gene Name: acyl-CoA synthetase long-chain family member 4
  ENST ID: ENST00000514500
  CDS Start-End: 1-470
aaactctgttcaagatagggtatgattacaaattggaacagatcaaaaagggatatgatgcacctctttgcaatctgttactgtttaaaaaggtcaaggccctgctgggagggaatgtccgcatgatgctgtctggaggggccccgctatctcctcagacacaccgattcatgaatgtctgcttctgctgcccaattggccagggttatggactgacagaatcatgtggtgctgggacagttactgaagtaactgactatactactggcagagttggagcacctcttatttgctgtgaaattaagctaaaagactggcaagaaggcggttatacaattaatgacaagccaaaccccagaggtgaaatcgtaattggtggacagaacatctccatgggatattttaaaaatgaagagaaaacagcagaagattattctgtggatgaaaatggacaaaggaacttgggttgatatctgcaataatcctgctatggaagctgaaatactgaaagaaattcgagaagctgcaaatgccatgaaattggagcgatttgaaattccaatcaaggttcgattaagcccagagccatggacccctgaaactggtttggtaactgatgctttcaaactgaaaaggaaggagctgaggaaccattacctcaaagacattgaacgaatgtatgggggcaaataaaat

SEQ ID NO: 104422 - DNA, 587 bp, Homo sapiens
  Payload ID: 506
  Gene Symbol: ACSL4
  Gene Name: acyl-CoA synthetase long-chain family member 4
  ENST ID: ENST00000505855
  CDS Start-End: 125-587
actctagagcattaaaagtgtcttcaacatggcagctgaggtgctttctttgctgggaaaagctgcaaagagactggcagaatggcgacttcaggagttaatacctctccagaagaaaaacgctatggcaaagagaataaaagctaagcccacttcagacaaacctggaagtccatatcgctctgtcacacacttcgactcactagctgtaatagacatccctggagcagatactctggataaattatttgaccatgctgtatccaagtttgggaagaaggacagccttgggaccagggaaatcctaagtgaagaaaatgaaatgcagccaaatggaaaagtttttaagaagttaattcttgggaattataaatggatgaactatcttgaagtgaatcgcagagtgaataactttggtagtggactcactgcactgggactaaaaccaaagaacaccattgccatcttctgtgagaccagggccgaatggatgattgcagcacagacctgctttaagtacaactttcctcttgtgactttatatgccacacttggcaaagaagcagtagttcatgggctaaatgaat

SEQ ID NO: 104423 - DNA, 637 bp, Homo sapiens
  Payload ID: 506
  Gene Symbol: ACSL4
  Gene Name: acyl-CoA synthetase long-chain family member 4
  ENST ID: ENST00000508092
  CDS Start-End: 254-637
tccgggctcgcgctgagtcccgcctccgccggctgtccgggtgcgcgcgcgccgctgcggctttttctctggcctccgccgcgcgctcctcctcgtcccagcgctagcgggcacgcggttcctttttgcgagctttccgagtgccaggcgccggccggctgcgaagacgcggtgggccgcccctccgcacaataaggctttcaaaagccaaagaataacaagaaataagcaccattttagaagcctttccactatgaaacttaagctaaatgtgctcaccattattttgctgcctgtccacttgttaataacaatatacagtgcccttatatttattccatggtattttcttaccaatgccaagaagaaaaacgctatggcaaagagaataaaagctaagcccacttcagacaaacctggaagtccatatcgctctgtcacacacttcgactcactagctgtaatagacatccctggagcagatactctggataaattatttgaccatgctgtatccaagtttgggaagaaggacagccttgggaccagggaaatcctaagtgaagaaaatgaaatgcagccaaatggaaaagtttttaagaagttaattcttgggaattataaatggatgaactat

SEQ ID NO: 104424 - DNA, 802 bp, Homo sapiens
  Payload ID: 506
  Gene Symbol: ACSL4
  Gene Name: acyl-CoA synthetase long-chain family member 4
  ENST ID: ENST00000502391
  CDS Start-End: 368-802
tccgggctcgcgctgagtcccgcctccgccggctgtccgggtgcgcgcgcgccgctgcggctttttctctggcctccgccgcgcgctcctcctcgtcccagcgctagcgggcacgcggttcctttttgcgagctttccgagtgccaggcgccggccggctgcgaagacgcggtgggccgcccctccggcgtactttattgtcggcttccaaagattactaacttttatctgtatcactaagattgaactgccttggctgtactgctattcttactgctgcttctattattgccttcttcagcacaataaggctttcaaaagccaaagaataacaagaaataagcaccattttagaagcctttccactatgaaacttaagctaaatgtgctcaccattattttgctgcctgtccacttgttaataacaatatacagtgcccttatatttattccatggtattttcttaccaatgccaagaagaaaaacgctatggcaaagagaataaaagctaagcccacttcagacaaacctggaagtccatatcgctctgtcacacacttcgactcactagctgtaatagacatccctggagcagatactctggataaattatttgaccatgctgtatccaagtttgggaagaaggacagccttgggaccagggaaatcctaagtgaagaaaatgaaatgcagccaaatggaaaagtttttaagaagttaattcttgggaattataaatggatgaactatcttgaagtgaatcgcagagtgaataactttggtagtggactcactgcactg

SEQ ID NO: 104425 - DNA, 3353 bp, Homo sapiens
  Payload ID: 507
  Gene Symbol: ACSL5
  Gene Name: acyl-CoA synthetase long-chain family member 5
  Uniprot ID: Q9ULC5
  ENST ID: ENST00000354273
  CDS Start-End: 280-2331
aaaaccaggaagtgaagtccccgagcacgttagaaagcctgacatggcctgactcgggacagctcagagcagggcagaactggggacactctgggccggccttctgcctgcatggacgctctgaagccaccctgtctctggaggaaccacgagcgagggaagaaggacagggactcgtgtggcaggaagaactcagagccgggaagcccccattcactagaagcactgagagatgcggccccctcgcagggtctgaatttcctgctgctgttcacaaagatgctttttatctttaactttttgttttccccacttccgaccccggcgttgatctgcatcctgacatttggagctgccatcttcttgtggctgatcaccagacctcaacccgtcttacctcttcttgacctgaacaatcagtctgtgggaattgagggaggagcacggaagggggtttcccagaagaacaatgacctaacaagttgctgcttctcagatgccaagactatgtatgaggttttccaaagaggactcgctgtgtctgacaatgggccctgcttgggatatagaaaaccaaaccagccctacagatggctatcttacaaacaggtgtctgatagagcagagtacctgggttcctgtctcttgcataaaggttataaatcatcaccagaccagtttgtcggcatctttgctcagaataggccagagtggatcatctccgaattggcttgttacacgtactctatggtagctgtacctctgtatgacaccttgggaccagaagccatcgtacatattgtcaacaaggctgatatcgccatggtgatctgtgacacaccccaaaaggcattggtgctgatagggaatgtagagaaaggcttcaccccgagcctgaaggtgatcatccttatggacccctttgatgatgacctgaagcaaagaggggagaagagtggaattgagatcttatccctatatgatgctgagaacctaggcaaagagcacttcagaaaacctgtgcctcctagcccagaagacctgagcgtcatctgcttcaccagtgggaccacaggtgaccccaaaggagccatgataacccatcaaaatattgtttcaaatgctgctgcctttctcaaatgtgtggagcatgcttatgagcccactcctgatgatgtggccatatcctacctccctctggctcatatgtttgagaggattgtacaggctgttgtgtacagctgtggagccagagttggattcttccaaggggatattcggttgctggctgacgacatgaagactttgaagcccacattgtttcccgcggtgcctcgactccttaacaggatctacgataaggtacaaaatgaggccaagacacccttgaagaagttcttgttgaagctggctgtttccagtaaattcaaagagcttcaaaagggtatcatcaggcatgatagtttctgggacaagctcatctttgcaaagatccaggacagcctgggcggaagggttcgtgtaattgtcactggagctgcccccatgtccacttcagtcatgacattcttccgggcagcaatgggatgtcaggtgtatgaagcttatggtcaaacagaatgcacaggtggctgtacatttacattacctggggactggacatcaggtcacgttggggtgcccctggcttgcaattacgtgaagctggaagatgtggctgacatgaactactttacagtgaataatgaaggagaggtctgcatcaagggtacaaacgtgttcaaaggatacctgaaggaccctgagaagacacaggaagccctggacagtgatggctggcttcacacaggagacattggtcgctggctcccgaatggaactctgaagatcatcgaccgtaaaaagaacattttcaagctggcccaaggagaatacattgcaccagagaagatagaaaatatctacaacaggagtcaaccagtgttacaaatttttgtacacggggagagcttacggtcatccttagtaggagtggtggttcctgacacagatgtacttccctcatttgcagccaagcttggggtgaagggctcctttgaggaactgtgccaaaaccaagttgtaagggaagccattttagaagacttgcagaaaattgggaaagaaagtggccttaaaacttttgaacaggtcaaagccatttttcttcatccagagccattttccattgaaaatgggctcttgacaccaacattgaaagcaaagcgaggagagctttccaaatactttcggacccaaattgacagcctgtatgagcacatccaggattaggataaggtacttaagtacctgccggcccactgtgcactgcttgtgagaaaatggattaaaaactattcttacatttgttttgcctttcctcctatttttttttaacctgttaaactctaaagccatagcttttgttttatattgagacatataatgtgtaaacttagttcccaaataaatcaatcctgtctttcccatcttcgatgttgctaatattaaggcttcagggctacttttatcaacatgcctgtcttcaagatcccagtttatgttctgtgtccttcctcatgatttccaaccttaatactattagtaaccacaagttcaagggtcaaagggaccctctgtgccttcttctttgttttgtgataaacataacttgccaacagtctctatgcttatttacatcttctactgttcaaactaagagatttttaaattctgaaaaactgcttacaattcatgttttctagccactccacaaaccactaaaattttagttttagcctatcactcatgtcaatcatatctatgagacaaatgtctccgatgctcttctgcgtaaattaaattgtgtactgaagggaaaagtttgatcataccaaacatttcctaaactctctagttagatatctgacttgggagtattaaaaattgggtctatgacatattgtccaaaaggaatgctgttcttaaagcattatttacagtaggaactggggagtaaatctgttccctacagtttgctgctgagctggaagctgtgggggaaggagttgacaggtgggcccagtgaacttttccagtaaatgaagcaagcactgaataaaaacctcctgaactgggaacaaagatctacaggcaagcaagatgcccacacaacaggcttattttctgtgaaggaaccaactgatctcccccacccttggattagagttcctgctctaccttacccacagataacacatgttgtttctacttgtaaatgtaaagtctttaaaataaactattacagatactta

SEQ ID NO: 104426 - DNA, 3351 bp, Homo sapiens
  Payload ID: 507
  Gene Symbol: ACSL5
  Gene Name: acyl-CoA synthetase long-chain family member 5
  Uniprot ID: Q9ULC5
  ENST ID: ENST00000354655
  CDS Start-End: 282-2333
cttactgtcagaggttactacaagtgtttgaacaggtaacttctacctttgaacttctgttgtgacagattcaaaggttccaggggagtgtgttggccactctcaggacagtacacagtagcttcgggtgtgtcccagtcagtcctaggagctgtggaaagagtagaagtgcctgaatgtggtgctgaatcaatacagccagctgtgaggggagcacttcctggacccaggaagggagagtcttcttccaaggtctgaatttcctgctgctgttcacaaagatgctttttatctttaactttttgttttccccacttccgaccccggcgttgatctgcatcctgacatttggagctgccatcttcttgtggctgatcaccagacctcaacccgtcttacctcttcttgacctgaacaatcagtctgtgggaattgagggaggagcacggaagggggtttcccagaagaacaatgacctaacaagttgctgcttctcagatgccaagactatgtatgaggttttccaaagaggactcgctgtgtctgacaatgggccctgcttgggatatagaaaaccaaaccagccctacagatggctatcttacaaacaggtgtctgatagagcagagtacctgggttcctgtctcttgcataaaggttataaatcatcaccagaccagtttgtcggcatctttgctcagaataggccagagtggatcatctccgaattggcttgttacacgtactctatggtagctgtacctctgtatgacaccttgggaccagaagccatcgtacatattgtcaacaaggctgatatcgccatggtgatctgtgacacaccccaaaaggcattggtgctgatagggaatgtagagaaaggcttcaccccgagcctgaaggtgatcatccttatggacccctttgatgatgacctgaagcaaagaggggagaagagtggaattgagatcttatccctatatgatgctgagaacctaggcaaagagcacttcagaaaacctgtgcctcctagcccagaagacctgagcgtcatctgcttcaccagtgggaccacaggtgaccccaaaggagccatgataacccatcaaaatattgtttcaaatgctgctgcctttctcaaatgtgtggagcatgcttatgagcccactcctgatgatgtggccatatcctacctccctctggctcatatgtttgagaggattgtacaggctgttgtgtacagctgtggagccagagttggattcttccaaggggatattcggttgctggctgacgacatgaagactttgaagcccacattgtttcccgcggtgcctcgactccttaacaggatctacgataaggtacaaaatgaggccaagacacccttgaagaagttcttgttgaagctggctgtttccagtaaattcaaagagcttcaaaagggtatcatcaggcatgatagtttctgggacaagctcatctttgcaaagatccaggacagcctgggcggaagggttcgtgtaattgtcactggagctgcccccatgtccacttcagtcatgacattcttccgggcagcaatgggatgtcaggtgtatgaagcttatggtcaaacagaatgcacaggtggctgtacatttacattacctggggactggacatcaggtcacgttggggtgcccctggcttgcaattacgtgaagctggaagatgtggctgacatgaactactttacagtgaataatgaaggagaggtctgcatcaagggtacaaacgtgttcaaaggatacctgaaggaccctgagaagacacaggaagccctggacagtgatggctggcttcacacaggagacattggtcgctggctcccgaatggaactctgaagatcatcgaccgtaaaaagaacattttcaagctggcccaaggagaatacattgcaccagagaagatagaaaatatctacaacaggagtcaaccagtgttacaaatttttgtacacggggagagcttacggtcatccttagtaggagtggtggttcctgacacagatgtacttccctcatttgcagccaagcttggggtgaagggctcctttgaggaactgtgccaaaaccaagttgtaagggaagccattttagaagacttgcagaaaattgggaaagaaagtggccttaaaacttttgaacaggtcaaagccatttttcttcatccagagccattttccattgaaaatgggctcttgacaccaacattgaaagcaaagcgaggagagctttccaaatactttcggacccaaattgacagcctgtatgagcacatccaggattaggataaggtacttaagtacctgccggcccactgtgcactgcttgtgagaaaatggattaaaaactattcttacatttgttttgcctttcctcctatttttttttaacctgttaaactctaaagccatagcttttgttttatattgagacatataatgtgtaaacttagttcccaaataaatcaatcctgtctttcccatcttcgatgttgctaatattaaggcttcagggctacttttatcaacatgcctgtcttcaagatcccagtttatgttctgtgtccttcctcatgatttccaaccttaatactattagtaaccacaagttcaagggtcaaagggaccctctgtgccttcttctttgttttgtgataaacataacttgccaacagtctctatgcttatttacatcttctactgttcaaactaagagatttttaaattctgaaaaactgcttacaattcatgttttctagccactccacaaaccactaaaattttagttttagcctatcactcatgtcaatcatatctatgagacaaatgtctccgatgctcttctgcgtaaattaaattgtgtactgaagggaaaagtttgatcataccaaacatttcctaaactctctagttagatatctgacttgggagtattaaaaattgggtctatgacatattgtccaaaaggaatgctgttcttaaagcattatttacagtaggaactggggagtaaatctgttccctacagtttgctgctgagctggaagctgtgggggaaggagttgacaggtgggcccagtgaacttttccagtaaatgaagcaagcactgaataaaaacctcctgaactgggaacaaagatctacaggcaagcaagatgcccacacaacaggcttattttctgtgaaggaaccaactgatctcccccacccttggattagagttcctgctctaccttacccacagataacacatgttgtttctacttgtaaatgtaaagtctttaaaataaactattacagata

SEQ ID NO: 104427 - DNA, 3353 bp, Homo sapiens
  Payload ID: 507
  Gene Symbol: ACSL5
  Gene Name: acyl-CoA synthetase long-chain family member 5
  Uniprot ID: Q9ULC5
  ENST ID: ENST00000356116
  CDS Start-End: 113-2332
taaaaccaggaagtgaagtccccgagcacgttagaaagcctgacatggcctgactcgggacagctcagagcagggcagaactggggacactctgggccggccttctgcctgcatggacgctctgaagccaccctgtctctggaggaaccacgagcgagggaagaaggacagggactcgtgtggcaggaagaactcagagccgggaagcccccattcactagaagcactgagagatgcggccccctcgcagggtctgaatttcctgctgctgttcacaaagatgctttttatctttaactttttgttttccccacttccgaccccggcgttgatctgcatcctgacatttggagctgccatcttcttgtggctgatcaccagacctcaacccgtcttacctcttcttgacctgaacaatcagtctgtgggaattgagggaggagcacggaagggggtttcccagaagaacaatgacctaacaagttgctgcttctcagatgccaagactatgtatgaggttttccaaagaggactcgctgtgtctgacaatgggccctgcttgggatatagaaaaccaaaccagccctacagatggctatcttacaaacaggtgtctgatagagcagagtacctgggttcctgtctcttgcataaaggttataaatcatcaccagaccagtttgtcggcatctttgctcagaataggccagagtggatcatctccgaattggcttgttacacgtactctatggtagctgtacctctgtatgacaccttgggaccagaagccatcgtacatattgtcaacaaggctgatatcgccatggtgatctgtgacacaccccaaaaggcattggtgctgatagggaatgtagagaaaggcttcaccccgagcctgaaggtgatcatccttatggacccctttgatgatgacctgaagcaaagaggggagaagagtggaattgagatcttatccctatatgatgctgagaacctaggcaaagagcacttcagaaaacctgtgcctcctagcccagaagacctgagcgtcatctgcttcaccagtgggaccacaggtgaccccaaaggagccatgataacccatcaaaatattgtttcaaatgctgctgcctttctcaaatgtgtggagcatgcttatgagcccactcctgatgatgtggccatatcctacctccctctggctcatatgtttgagaggattgtacaggctgttgtgtacagctgtggagccagagttggattcttccaaggggatattcggttgctggctgacgacatgaagactttgaagcccacattgtttcccgcggtgcctcgactccttaacaggatctacgataaggtacaaaatgaggccaagacacccttgaagaagttcttgttgaagctggctgtttccagtaaattcaaagagcttcaaaagggtatcatcaggcatgatagtttctgggacaagctcatctttgcaaagatccaggacagcctgggcggaagggttcgtgtaattgtcactggagctgcccccatgtccacttcagtcatgacattcttccgggcagcaatgggatgtcaggtgtatgaagcttatggtcaaacagaatgcacaggtggctgtacatttacattacctggggactggacatcaggtcacgttggggtgcccctggcttgcaattacgtgaagctggaagatgtggctgacatgaactactttacagtgaataatgaaggagaggtctgcatcaagggtacaaacgtgttcaaaggatacctgaaggaccctgagaagacacaggaagccctggacagtgatggctggcttcacacaggagacattggtcgctggctcccgaatggaactctgaagatcatcgaccgtaaaaagaacattttcaagctggcccaaggagaatacattgcaccagagaagatagaaaatatctacaacaggagtcaaccagtgttacaaatttttgtacacggggagagcttacggtcatccttagtaggagtggtggttcctgacacagatgtacttccctcatttgcagccaagcttggggtgaagggctcctttgaggaactgtgccaaaaccaagttgtaagggaagccattttagaagacttgcagaaaattgggaaagaaagtggccttaaaacttttgaacaggtcaaagccatttttcttcatccagagccattttccattgaaaatgggctcttgacaccaacattgaaagcaaagcgaggagagctttccaaatactttcggacccaaattgacagcctgtatgagcacatccaggattaggataaggtacttaagtacctgccggcccactgtgcactgcttgtgagaaaatggattaaaaactattcttacatttgttttgcctttcctcctatttttttttaacctgttaaactctaaagccatagcttttgttttatattgagacatataatgtgtaaacttagttcccaaataaatcaatcctgtctttcccatcttcgatgttgctaatattaaggcttcagggctacttttatcaacatgcctgtcttcaagatcccagtttatgttctgtgtccttcctcatgatttccaaccttaatactattagtaaccacaagttcaagggtcaaagggaccctctgtgccttcttctttgttttgtgataaacataacttgccaacagtctctatgcttatttacatcttctactgttcaaactaagagatttttaaattctgaaaaactgcttacaattcatgttttctagccactccacaaaccactaaaattttagttttagcctatcactcatgtcaatcatatctatgagacaaatgtctccgatgctcttctgcgtaaattaaattgtgtactgaagggaaaagtttgatcataccaaacatttcctaaactctctagttagatatctgacttgggagtattaaaaattgggtctatgacatattgtccaaaaggaatgctgttcttaaagcattatttacagtaggaactggggagtaaatctgttccctacagtttgctgctgagctggaagctgtgggggaaggagttgacaggtgggcccagtgaacttttccagtaaatgaagcaagcactgaataaaaacctcctgaactgggaacaaagatctacaggcaagcaagatgcccacacaacaggcttattttctgtgaaggaaccaactgatctcccccacccttggattagagttcctgctctaccttacccacagataacacatgttgtttctacttgtaaatgtaaagtctttaaaataaactattacagatactt

SEQ ID NO: 104428 - DNA, 3380 bp, Homo sapiens
  Payload ID: 507
  Gene Symbol: ACSL5
  Gene Name: acyl-CoA synthetase long-chain family member 5
  Uniprot ID: Q9ULC5
  ENST ID: ENST00000393081
  CDS Start-End: 308-2359
gccagaggatggaatgccacaggccccacttcgtctcccagcccttcatctttcttccatgtccaaaggcggctccccagaggccaagggctcagctcttgtgttctctgagactgtggcacagctcaccctggcttccttagtaggaagcttttaagaactgctctgtagaaagaacaaaccctaatctagctccagcaaagagccaggatcatgctgaacttcctgtgagccttcgtgggggatcgaggctggagaaagtgctgcttcattctgaggtctgaatttcctgctgctgttcacaaagatgctttttatctttaactttttgttttccccacttccgaccccggcgttgatctgcatcctgacatttggagctgccatcttcttgtggctgatcaccagacctcaacccgtcttacctcttcttgacctgaacaatcagtctgtgggaattgagggaggagcacggaagggggtttcccagaagaacaatgacctaacaagttgctgcttctcagatgccaagactatgtatgaggttttccaaagaggactcgctgtgtctgacaatgggccctgcttgggatatagaaaaccaaaccagccctacagatggctatcttacaaacaggtgtctgatagagcagagtacctgggttcctgtctcttgcataaaggttataaatcatcaccagaccagtttgtcggcatctttgctcagaataggccagagtggatcatctccgaattggcttgttacacgtactctatggtagctgtacctctgtatgacaccttgggaccagaagccatcgtacatattgtcaacaaggctgatatcgccatggtgatctgtgacacaccccaaaaggcattggtgctgatagggaatgtagagaaaggcttcaccccgagcctgaaggtgatcatccttatggacccctttgatgatgacctgaagcaaagaggggagaagagtggaattgagatcttatccctatatgatgctgagaacctaggcaaagagcacttcagaaaacctgtgcctcctagcccagaagacctgagcgtcatctgcttcaccagtgggaccacaggtgaccccaaaggagccatgataacccatcaaaatattgtttcaaatgctgctgcctttctcaaatgtgtggagcatgcttatgagcccactcctgatgatgtggccatatcctacctccctctggctcatatgtttgagaggattgtacaggctgttgtgtacagctgtggagccagagttggattcttccaaggggatattcggttgctggctgacgacatgaagactttgaagcccacattgtttcccgcggtgcctcgactccttaacaggatctacgataaggtacaaaatgaggccaagacacccttgaagaagttcttgttgaagctggctgtttccagtaaattcaaagagcttcaaaagggtatcatcaggcatgatagtttctgggacaagctcatctttgcaaagatccaggacagcctgggcggaagggttcgtgtaattgtcactggagctgcccccatgtccacttcagtcatgacattcttccgggcagcaatgggatgtcaggtgtatgaagcttatggtcaaacagaatgcacaggtggctgtacatttacattacctggggactggacatcaggtcacgttggggtgcccctggcttgcaattacgtgaagctggaagatgtggctgacatgaactactttacagtgaataatgaaggagaggtctgcatcaagggtacaaacgtgttcaaaggatacctgaaggaccctgagaagacacaggaagccctggacagtgatggctggcttcacacaggagacattggtcgctggctcccgaatggaactctgaagatcatcgaccgtaaaaagaacattttcaagctggcccaaggagaatacattgcaccagagaagatagaaaatatctacaacaggagtcaaccagtgttacaaatttttgtacacggggagagcttacggtcatccttagtaggagtggtggttcctgacacagatgtacttccctcatttgcagccaagcttggggtgaagggctcctttgaggaactgtgccaaaaccaagttgtaagggaagccattttagaagacttgcagaaaattgggaaagaaagtggccttaaaacttttgaacaggtcaaagccatttttcttcatccagagccattttccattgaaaatgggctcttgacaccaacattgaaagcaaagcgaggagagctttccaaatactttcggacccaaattgacagcctgtatgagcacatccaggattaggataaggtacttaagtacctgccggcccactgtgcactgcttgtgagaaaatggattaaaaactattcttacatttgttttgcctttcctcctatttttttttaacctgttaaactctaaagccatagcttttgttttatattgagacatataatgtgtaaacttagttcccaaataaatcaatcctgtctttcccatcttcgatgttgctaatattaaggcttcagggctacttttatcaacatgcctgtcttcaagatcccagtttatgttctgtgtccttcctcatgatttccaaccttaatactattagtaaccacaagttcaagggtcaaagggaccctctgtgccttcttctttgttttgtgataaacataacttgccaacagtctctatgcttatttacatcttctactgttcaaactaagagatttttaaattctgaaaaactgcttacaattcatgttttctagccactccacaaaccactaaaattttagttttagcctatcactcatgtcaatcatatctatgagacaaatgtctccgatgctcttctgcgtaaattaaattgtgtactgaagggaaaagtttgatcataccaaacatttcctaaactctctagttagatatctgacttgggagtattaaaaattgggtctatgacatattgtccaaaaggaatgctgttcttaaagcattatttacagtaggaactggggagtaaatctgttccctacagtttgctgctgagctggaagctgtgggggaaggagttgacaggtgggcccagtgaacttttccagtaaatgaagcaagcactgaataaaaacctcctgaactgggaacaaagatctacaggcaagcaagatgcccacacaacaggcttattttctgtgaaggaaccaactgatctcccccacccttggattagagttcctgctctaccttacccacagataacacatgttgtttctacttgtaaatgtaaagtctttaaaataaactattacagatactt

SEQ ID NO: 104429 - DNA, 3281 bp, Homo sapiens
  Payload ID: 507
  Gene Symbol: ACSL5
  Gene Name: acyl-CoA synthetase long-chain family member 5
  Uniprot ID: Q9ULC5
  ENST ID: ENST00000433418
  CDS Start-End: 281-2260
taaaaccaggaagtgaagtccccgagcacgttagaaagcctgacatggcctgactcgggacagctcagagcagggcagaactggggacactctgggccggccttctgcctgcatggacgctctgaagccaccctgtctctggaggaaccacgagcgagggaagaaggacagggactcgtgtggcaggaagaactcagagccgggaagcccccattcactagaagcactgagagatgcggccccctcgcagggtctgaatttcctgctgctgttcacaaagatgctttttatctttaactttttgttttccccacttccgaccccggcgttgatctgcatcctgacatttggagctgccatcttcttgtggctgatcaccagacctcaacccgtcttacctcttcttgacctgaacaatcagtctgtgggaattgagggaggagcacggaagggggtttcccagaagaacaatgacctaacaagttgctgcttctcagatgccaagactatgtatgaggttttccaaagaggactcgctgtgtctgacaatgggccctgcttgggatatagaaaaccaaaccagccctacagatggctatcttacaaacaggtgtctgatagagcagagtacctgggttcctgtctcttgcataaaggttataaatcatcaccagaccagtttgtcggcatctttgctcagaataggccagagtggatcatctccgaattggcttgttacacgtactctatggtagctgtacctctgtatgacaccttgggaccagaagccatcgtacatattgtcaacaaggctgatatcgccatggtgatctgtgacacaccccaaaaggcattggtgctgatagggaatgtagagaaaggcttcaccccgagcctgaaggtgatcatccttatggacccctttgatgatgacctgaagcaaagaggggagaagagtggaattgagatcttatccctatatgatgctgagaacctaggcaaagagcacttcagaaaacctgtgcctcctagcccagaagacctgagcgtcatctgcttcaccagtgggaccacaggtgaccccaaaggagccatgataacccatcaaaatattgtttcaaatgctgctgcctttctcaaatgtgtggagcatgcttatgagcccactcctgatgatgtggccatatcctacctccctctggctcatatgtttgagaggattgtacaggctgttgtgtacagctgtggagccagagttggattcttccaaggggatattcggttgctggctgacgacatgaagactttgaagcccacattgtttcccgcggtgcctcgactccttaacaggatctacgataaggtacaaaatgaggccaagacacccttgaagaagttcttgttgaagctggctgtttccagtaaattcaaagagcttcaaaagggtatcatcaggcatgatagtttctgggacaagctcatctttgcaaagatccaggacagcctgggcggaagggttcgtgtaattgtcactggagctgcccccatgtccacttcagtcatgacattcttccgggcagcaatgggatgtcaggtgtatgaagcttatggtcaaacagaatgcacaggtggctgtacatttacattacctggggactggacatcaggtcacgttggggtgcccctggcttgcaattacgtgaagctggaagatgtggctgacatgaactactttacagtgaataatgaaggagaggtctgcatcaagggtacaaacgtgttcaaaggatacctgaaggaccctgagaagacacaggaagccctggacagtgatggctggcttcacacaggagacattggtcgctggctcccgaatggaactctgaagatcatcgaccgtaaaaagaacattttcaagctggcccaaggagaatacattgcaccagagaagatagaaaatatctacaacaggagtcaaccagtgttacaaatttttgtacacggggagagcttacggtcatccttagtaggagtggtggttcctgacacagatgtacttccctcatttgcagccaagcttggggtgaagggctcctttgaggaactgtgccaaaaccaagtcaaagccatttttcttcatccagagccattttccattgaaaatgggctcttgacaccaacattgaaagcaaagcgaggagagctttccaaatactttcggacccaaattgacagcctgtatgagcacatccaggattaggataaggtacttaagtacctgccggcccactgtgcactgcttgtgagaaaatggattaaaaactattcttacatttgttttgcctttcctcctatttttttttaacctgttaaactctaaagccatagcttttgttttatattgagacatataatgtgtaaacttagttcccaaataaatcaatcctgtctttcccatcttcgatgttgctaatattaaggcttcagggctacttttatcaacatgcctgtcttcaagatcccagtttatgttctgtgtccttcctcatgatttccaaccttaatactattagtaaccacaagttcaagggtcaaagggaccctctgtgccttcttctttgttttgtgataaacataacttgccaacagtctctatgcttatttacatcttctactgttcaaactaagagatttttaaattctgaaaaactgcttacaattcatgttttctagccactccacaaaccactaaaattttagttttagcctatcactcatgtcaatcatatctatgagacaaatgtctccgatgctcttctgcgtaaattaaattgtgtactgaagggaaaagtttgatcataccaaacatttcctaaactctctagttagatatctgacttgggagtattaaaaattgggtctatgacatattgtccaaaaggaatgctgttcttaaagcattatttacagtaggaactggggagtaaatctgttccctacagtttgctgctgagctggaagctgtgggggaaggagttgacaggtgggcccagtgaacttttccagtaaatgaagcaagcactgaataaaaacctcctgaactgggaacaaagatctacaggcaagcaagatgcccacacaacaggcttattttctgtgaaggaaccaactgatctcccccacccttggattagagttcctgctctaccttacccacagataacacatgttgtttctacttgtaaatgtaaagtctttaaaataaactattacagatactt

SEQ ID NO: 104430 - DNA, 2561 bp, Homo sapiens
  Payload ID: 508
  Gene Symbol: ACSL6
  Gene Name: acyl-CoA synthetase long-chain family member 6
  Uniprot ID: Q9UKU0
  ENST ID: ENST00000296869
  CDS Start-End: 61-2229
ggctgcggggctgcgggtcggggaggccgggccgggccgggccgggccccgctgaccgccatgctgaccttcttcctcgtgtcggggggctccctctggctattcgtagagtttgtcctctcacttctggagaagatgcagacacaggagatcctgaggatactgcgactgcctgagctaggtgacttgggacagtttttccgcagcctctcggccaccaccctcgtgagtatgggtgccctggctgccatccttgcctactggttcactcaccggccaaaggccttgcagccgccatgcaacctcctgatgcagtcagaagaagtagaggacagtggcggggcacggcgatctgtgattgggtctggccctcagctacttacccactactatgatgatgcccggaccatgtaccaggtgttccgccgtgggcttagcatctcagggaatgggccctgtcttggtttcaggaagcctaagcagccttaccagtggctgtcctaccaggaggtggccgacagggctgaatttctggggtccggacttctccagcacaattgtaaagcatgcactgatcagtttattggtgtttttgcacaaaatcggccagagtggatcattgtggagctggcctgctacacatattccatggtggtggtcccgctctatgacaccctgggccctggggctatccgctacatcatcaatacagcggacatcagcaccgtgattgtggacaaacctcagaaggctgtgcttctgctagagcatgtggagaggaaggagactccaggcctcaagctgatcatcctcatggacccattcgaagaagccctgaaagagagagggcagaagtgcggggtggtcattaagtccatgcaggccgtggaggactgtggccaagagaatcaccaggctcctgtgcccccgcagcctgatgacctctccattgtgtgtttcacaagcggcacgacagggaacccaaaaggtgcgatgctcacccatgggaacgtggtggctgatttctcaggctttctgaaagtgacagagagtcagtgggctcccacttgtgcggatgtgcacatttcctatttgcctttagcacacatgtttgagcgaatggtgcagtctgtcgtctattgccacggagggcgtgttggcttcttccagggagatatccgccttctctcagatgacatgaaggctctatgccccaccatcttccctgtggtcccacgactgctgaaccggatgtacgacaagatcttcagccaggcaaacacaccattaaagcgctggctcctggagtttgcagcaaagcgtaagcaagccgaggtccggagtggaatcatcaggaatgatagtatctgggatgaactcttctttaataagattcaggccagtcttggtgggtgtgtgcggatgattgttactggagcagccccagcatcaccaacagttctgggatttctccgggcagctctagggtgccaggtttatgaaggttatggccaaactgagtgcacagctggatgtaccttcaccactcctggcgactggacctcagggcacgtaggggcgccacttccctgcaatcatatcaagctcgttgatgttgaggaactgaactactgggcctgcaaaggagagggagagatatgtgtgagaggaccaaatgtgttcaaaggctacttgaaagatccagacaggacgaaggaggccctggacagcgatggctggcttcacactggagacatcggaaaatggctgccggcaggaactcttaaaattattgatcggaaaaagcatatatttaaacttgctcagggagaatatgttgcacccgagaagattgagaacatctacatccggagccaacctgtggcgcaaatctatgtccatggggacagcttaaaggcctttttggtaggcattgttgtgcctgaccctgaagttatgccctcctgggcccagaagagaggaattgaaggaacatatgcagatctctgcacaaataaggatctgaagaaagccattttggaagatatggtgaggttaggaaaagaaagtggactccattcttttgagcaggttaaagccattcacatccattctgacatgttctcagttcaaaatggcttgctgacaccaacactaaaagctaagagacctgagctgagagagtacttcaaaaaacaaatagaagagctttactcaatctccatgtgaagttcaaggaaagttcttctcagtgtaatgaactgtctagcaatattatagttattcttgaaagtaatgagtcaaaatgacacagctgaaaatgaataagcatctgattttatgactgagccttttcctgtcccaagaggtctttaacaatattttctctatcatcaatgagtatattttatttttattataaaaatgatattgtggtggactgctaaaaatatcacaaatggcaatgtaaaaatcaagacattttctcaagaactgtgtaccactaaaagtaatatattgtcaatgttcacagaactattaaacataaaggaaaaacataa

SEQ ID NO: 104431 - DNA, 6298 bp, Homo sapiens
  Payload ID: 508
  Gene Symbol: ACSL6
  Gene Name: acyl-CoA synthetase long-chain family member 6
  Uniprot ID: Q9UKU0
  ENST ID: ENST00000357096
  CDS Start-End: 172-2040
ggtactgacgttggagagcggggccggagagggctggttcgctctgcggccgggcccctcccccgcccgggagcttggcggttccgacaccgcggtcagtgcggggcaagccccagacccggccggccaggctgcagggcagggaagtttgtcctctcacttctggagaagatgcagacacaggagatcctgaggatactgcgactgcctgagctaggtgacttgggacagtttttccgcagcctctcggccaccaccctcgacagtggcggggcacggcgatctgtgattgggtctggccctcagctacttacccactactatgatgatgcccggaccatgtaccaggtgttccgccgtgggcttagcatctcagggaatgggccctgtcttggtttcaggaagcctaagcagccttaccagtggctgtcctaccaggaggtggccgacagggctgaatttctggggtccggacttctccagcacaattgtaaagcatgcactgatcagtttattggtgtttttgcacaaaatcggccagagtggatcattgtggagctggcctgctacacatattccatggtggtggtcccgctctatgacaccctgggccctggggctatccgctacatcatcaatacagcggacatcagcaccgtgattgtggacaaacctcagaaggctgtgcttctgctagagcatgtggagaggaaggagactccaggcctcaagctgatcatcctcatggacccattcgaagaagccctgaaagagagagggcagaagtgcggggtggtcattaagtccatgcaggccgtggaggactgtggccaagagaatcaccaggctcctgtgcccccgcagcctgatgacctctccattgtgtgtttcacaagcggcacgacagggaacccaaaaggtgcgatgctcacccatgggaacgtggtggctgatttctcaggctttctgaaagtgacagagggagatatccgccttctctcagatgacatgaaggctctatgccccaccatcttccctgtggtcccacgactgctgaaccggatgtacgacaagatcttcagccaggcaaacacaccattaaagcgctggctcctggagtttgcagcaaagcgtaagcaagccgaggtccggagtggaatcatcaggaatgatagtatctgggatgaactcttctttaataagattcaggccagtcttggtgggtgtgtgcggatgattgttactggagcagccccagcatcaccaacagttctgggatttctccgggcagctctagggtgccaggtttatgaaggttatggccaaactgagtgcacagctggatgtaccttcaccactcctggcgactggacctcagggcacgtaggggcgccacttccctgcaatcatatcaagctcgttgatgttgaggaactgaactactgggcctgcaaaggagagggagagatatgtgtgagaggaccaaatgtgttcaaaggctacttgaaagatccagacaggacgaaggaggccctggacagcgatggctggcttcacactggagacatcggaaaatggctgccggcaggaactcttaaaattattgatcggaaaaagcatatatttaaacttgctcagggagaatatgttgcacccgagaagattgagaacatctacatccggagccaacctgtggcgcaaatctatgtccatggggacagcttaaaggcctttttggtaggcattgttgtgcctgaccctgaagttatgccctcctgggcccagaagagaggaattgaaggaacatatgcagatctctgcacaaataaggatctgaagaaagccattttggaagatatggtgaggttaggaaaagaaagtggactccattcttttgagcaggttaaagccattcacatccattctgacatgttctcagttcaaaatggcttgctgacaccaacactaaaagctaagagacctgagctgagagagtacttcaaaaaacaaatagaagagctttactcaatctccatgtgaagttcaaggaaagttcttctcagtgtaatgaactgtctagcaatattatagttattcttgaaagtaatgagtcaaaatgacacagctgaaaatgaataagcatctgattttatgactgagccttttcctgtcccaagaggtctttaacaatattttctctatcatcaatgagtatattttatttttattataaaaatgatattgtggtggactgctaaaaatatcacaaatggcaatgtaaaaatcaagacattttctcaagaactgtgtaccactaaaagtaatatattgtcaatgttcacagaactattaaacataaaggaaaaacataagtgatatattctacttaattatttgtgaatcagtaaccagatgcagcaaatatctaggcaatgtggactacctcattcagtaactgattgtcaaaatcacaattaaatcagacttcaaaaattaaagctaggtgtatagaatcatgctaaaagaaaacatgataactcatagtctacgtaacttcagagtctttaaacatgacaatccacattgtcatatgtgaaaattttctctctgatttttactttcattcatgaaaaatgaaaattcagaaattctttttttcctttttgttttgagacagggtctgctctgtcacctaggctggagtgcagtggcttaatcatggctcattgcagtctccatctcctgggctcgagtgatcctcctgtctcacctcccaagtagctgagactacagtacaggcacatgccaccacacctggctaatagaaattttttttttagagattttgctcaggctggtctcaaactcctgagctcaagggatcctcccgccttggcctccctaagtgctaggattacaggcatgagccattgttcccagccaaattcagatattattaaaacacatgtcatatttatatagtaacttacaaagacctttcaatacattttctcatttattaagctcattaaagtattcaggaactacctagaaaaaatataatgtaaaactattcaaggatagtgtgtgtatgttcatggacttcttattataatgaattctaaaagacatctgttgactctacaatgaatggatccttgaggaatacttgggagaagaaactcagagttatttctcagggtaggcagcaattaatgtacctacattccttgctggggtcttctagtcttccattcccaatgtgcccatgctatgcctggaaaccctatatggttgtaattctgaacaatttcactttttttccagtaagaatatcaaggcagaaggtgggaaggaggggacattatttccagggaaaatagtttttcaacaatataactttgataaacctctttaaaatgccccaagaaaactttttaagtccatagacaaagaaatactgcctaatggcataattacattcctaaaatctttaagcgtgccgaagtttaaccactaaaacctcctttcttgcattatgtatttagatgcaccctgtattggggtgtcaacaatttcttataattaaaggccagataccatggacagcaattaagttccaagctatagattgtgcctctgaaaaaggcatggaccccaggaacgtgtttttcttctgtagagacaagactctaaaagcatatcaacaatccatatgcaattcatgtgttaatttaaaatgtatgtgctcagtgtttgtagtctagaagctcctttcccttggaggaatgccaagcagtttgcaaaaataaatgctgttagttaaaaaccacataatcacatgggcctactgaataaatatgcatcagtgattatatacttatatttcagtcttgtcaaaagtgaatcactgtttcatttgatgtatttacccagtctttttatccagtttttcttgggcatattctctctgaagacccactgttgcacttctaaatttgacagttaagaaatgagctagttctatacacactgatttttaaaggcgtttctgaataaactaatacttaaaatgtccaaagtcacatctgtacagcattagatttttatatttaatatatatttgactaattaaaagtgaaagttgttacctgaactggatattcatactattttaagggcaagttgcttacatttcaataacaacaaaaaaagaatctgtttcccattgtcctcctactcaactaaaattcatagttggctttaagcccaaaagaattttgaacaatgtgacagaaacaagtaatgtaaaacttattttgttttatttatactttataatagttagatataacagattatggacaacttaatatttcttctttttggctgggcgcggtggctcatgcctgtaatcccagcactttgggaggccgaggcgggcagatcacgaagtcaggagatcgagaccatcctggctaacacagtgaaaccccgtctctactaaaaaaatacaaaaaattagccgggcgttgtggcgggcgcctgtagtcccagctactcgggaggctgaggcaggagaatggcatgaacctgggaggcggagcttgcagtgagccgagatcccgccactgtactccagcctgggcaacagaacgagactccgtctcaaaaagaaagaaaaaaaaaaaacaaaaacaaggtttcttctttttgccacttaaaatatcttatatttctagatttccaggtctatgtggaaatcatcacacttgggccaataaatgggttagttcagatgtgctgagaaaagtaaatagtgtaccctaaatatcttgcatgtacatttatctatttctctgtttaatgccacttaattttgtaagaaatgagaaatgaaaccctatgtatcagtggaaaaatccttcttgcttcagatttcccaactttattctggaggagaaaaaaatctgtatttctcattaacagagatagaaaaaggtgatgtacttacgatggtcacattcatattgggcattggatctatttaagcctagaagtataacagataatcagttccttaagtgtaaatatgttcttaaatgtttggcctttttatctgttattcaaatgtattagtaattctcatattttgcaaacagatccttttgtgtatattataaaatatataccaaatctgtttttccttttgctgtggaagatgtctttatataatattgagacttcccttgcaaatgagagacgggactctggtcaggtatagtgtgtaggcctagccccatgtattaggaactcataaactcagaaatccaaggattaaacattttatgtctccttcatttatgcaagtcatgctttcattctacatgtagttaaaactacaagtatgagaaaaaatagaactttccattggaattttttccaatcaggtaatgttttagcaacttgaaatcagcacttaatttgattgtattacctatcaaagaaccaataacctttcctttttctgcagtaaagaaaatgaaatatcctttattttccaaatgtatgaagcacaaatgcaatatagttatttaaaatataaaatactttaaaatgaatgtgaagaatgggaaaatatatttttgcatgaaaacagactacttacaaatgtgcttaatatctcaggaaaaaaagaatgaataaccgtatataaaattggtaaactataaattggctgtatttccttgccggttttaattttaaggaagcatttacatgaaaagaaaaaaggatcctagtagtctgaatttcctctcaagtatgctagaaaatactttctatgaatttacaattaactgcaataagaagtgggttagcattcaagtaaggtcaataccccaaatgagaaactcttcagttagaacacattagtggttgtaacacagaggcagtagataaatatttgaaatgtgagcatttctaaacttggtaccaaatggaaagggtttcatgaggtgacagtggcttttaaacattcatttgaccgattattctaattttccttgttaaatcattgcaacagttgcatgggggagaatggatattttttgaagaattgcttattccactttcaatttttaaaaatcgaggggattaaaatattactttttaaatatgcataaaagtatcttaactgtaattacattttcagttgctttgttatagtagcatgcatattaaatataaaatgcatttatgaaaatttttgtaaaaaataaaagatttttcatttctc

SEQ ID NO: 104432 - DNA, 2548 bp, Homo sapiens
  Payload ID: 508
  Gene Symbol: ACSL6
  Gene Name: acyl-CoA synthetase long-chain family member 6
  Uniprot ID: Q9UKU0
  ENST ID: ENST00000379240
  CDS Start-End: 155-2248
tccaggaagcatcattcccagagctgccagagcagtggccctggaaaatatggaagcagctgtcagccatggcccagggcctgagcgtatgattctcaggaaaagtgggcaggacatctgactgtcagagtttgtcctctcacttctggagaagatgcagacacaggagatcctgaggatactgcgactgcctgagctaggtgacttgggacagtttttccgcagcctctcggccaccaccctcgtgagtatgggtgccctggctgccatccttgcctactggttcactcaccggccaaaggccttgcagccgccatgcaacctcctgatgcagtcagaagaagtagaggacagtggcggggcacggcgatctgtgattgggtctggccctcagctacttacccactactatgatgatgcccggaccatgtaccaggtgttccgccgtgggcttagcatctcagggaatgggccctgtcttggtttcaggaagcctaagcagccttaccagtggctgtcctaccaggaggtggccgacagggctgaatttctggggtccggacttctccagcacaattgtaaagcatgcactgatcagtttattggtgtttttgcacaaaatcggccagagtggatcattgtggagctggcctgctacacatattccatggtggtggtcccgctctatgacaccctgggccctggggctatccgctacatcatcaatacagcggacatcagcaccgtgattgtggacaaacctcagaaggctgtgcttctgctagagcatgtggagaggaaggagactccaggcctcaagctgatcatcctcatggacccattcgaagaagccctgaaagagagagggcagaagtgcggggtggtcattaagtccatgcaggccgtggaggactgtggccaagagaatcaccaggctcctgtgcccccgcagcctgatgacctctccattgtgtgtttcacaagcggcacgacagggaacccaaaaggtgcgatgctcacccatgggaacgtggtggctgatttctcaggctttctgaaagtgacagagaaagtgatctttccgagacaggacgatgtgctcatctccttcctgcctctggctcacatgtttgagagagtaatccagtctgtcgtctattgccacggagggcgtgttggcttcttccagggagatatccgccttctctcagatgacatgaaggctctatgccccaccatcttccctgtggtcccacgactgctgaaccggatgtacgacaagatcttcagccaggcaaacacaccattaaagcgctggctcctggagtttgcagcaaagcgtaagcaagccgaggtccggagtggaatcatcaggaatgatagtatctgggatgaactcttctttaataagattcaggccagtcttggtgggtgtgtgcggatgattgttactggagcagccccagcatcaccaacagttctgggatttctccgggcagctctagggtgccaggtttatgaaggttatggccaaactgagtgcacagctggatgtaccttcaccactcctggcgactggacctcagggcacgtaggggcgccacttccctgcaatcatatcaagctcgttgatgttgaggaactgaactactgggcctgcaaaggagagggagagatatgtgtgagaggaccaaatgtgttcaaaggctacttgaaagatccagacaggacgaaggaggccctggacagcgatggctggcttcacactggagacatcggaaaatggctgccggcaggaactcttaaaattattgatcggaaaaagcatatatttaaacttgctcagggagaatatgttgcacccgagaagattgagaacatctacatccggagccaacctgtggcgcaaatctatgtccatggggacagcttaaaggcctttttggtaggcattgttgtgcctgaccctgaagttatgccctcctgggcccagaagagaggaattgaaggaacatatgcagatctctgcacaaataaggatctgaagaaagccattttggaagatatggtgaggttaggaaaagaaagtggactccattcttttgagcaggttaaagccattcacatccattctgacatgttctcagttcaaaatggcttgctgacaccaacactaaaagctaagagacctgagctgagagagtacttcaaaaaacaaatagaagagctttactcaatctccatgtgaagttcaaggaaagttcttctcagtgtaatgaactgtctagcaatattatagttattcttgaaagtaatgagtcaaaatgacacagctgaaaatgaataagcatctgattttatgactgagccttttcctgtcccaagaggtctttaacaatattttctctatcatcaatgagtatattttatttttattataaaaatgatattgtggtggactgctaaaaatatcacaaatggcaatgtaaaaatcaagacattttctcaagaactgtgtaccactaaaagtaatatattgtcaatgttc

SEQ ID NO: 104433 - DNA, 2658 bp, Homo sapiens
  Payload ID: 508
  Gene Symbol: ACSL6
  Gene Name: acyl-CoA synthetase long-chain family member 6
  Uniprot ID: Q9UKU0
  ENST ID: ENST00000379244
  CDS Start-End: 238-2331
ggctctaccaccacccggcttctcagagcaggcggctgttgccatcgactgtccccaggagggcagactcggggcagggccttcgccacttttgtgctttgatcaagatgtggtaacttctttccctgggccccacaggccctataaagggaggctggttctagtgggacgagctcagccgcctcctcagtgccaggagcctgctggaaagagtttgtcctctcacttctggagaagatgcagacacaggagatcctgaggatactgcgactgcctgagctaggtgacttgggacagtttttccgcagcctctcggccaccaccctcgtgagtatgggtgccctggctgccatccttgcctactggttcactcaccggccaaaggccttgcagccgccatgcaacctcctgatgcagtcagaagaagtagaggacagtggcggggcacggcgatctgtgattgggtctggccctcagctacttacccactactatgatgatgcccggaccatgtaccaggtgttccgccgtgggcttagcatctcagggaatgggccctgtcttggtttcaggaagcctaagcagccttaccagtggctgtcctaccaggaggtggccgacagggctgaatttctggggtccggacttctccagcacaattgtaaagcatgcactgatcagtttattggtgtttttgcacaaaatcggccagagtggatcattgtggagctggcctgctacacatattccatggtggtggtcccgctctatgacaccctgggccctggggctatccgctacatcatcaatacagcggacatcagcaccgtgattgtggacaaacctcagaaggctgtgcttctgctagagcatgtggagaggaaggagactccaggcctcaagctgatcatcctcatggacccattcgaagaagccctgaaagagagagggcagaagtgcggggtggtcattaagtccatgcaggccgtggaggactgtggccaagagaatcaccaggctcctgtgcccccgcagcctgatgacctctccattgtgtgtttcacaagcggcacgacagggaacccaaaaggtgcgatgctcacccatgggaacgtggtggctgatttctcaggctttctgaaagtgacagagagtcagtgggctcccacttgtgcggatgtgcacatttcctatttgcctttagcacacatgtttgagcgaatggtgcagtctgtcgtctattgccacggagggcgtgttggcttcttccagggagatatccgccttctctcagatgacatgaaggctctatgccccaccatcttccctgtggtcccacgactgctgaaccggatgtacgacaagatcttcagccaggcaaacacaccattaaagcgctggctcctggagtttgcagcaaagcgtaagcaagccgaggtccggagtggaatcatcaggaatgatagtatctgggatgaactcttctttaataagattcaggccagtcttggtgggtgtgtgcggatgattgttactggagcagccccagcatcaccaacagttctgggatttctccgggcagctctagggtgccaggtttatgaaggttatggccaaactgagtgcacagctggatgtaccttcaccactcctggcgactggacctcagggcacgtaggggcgccacttccctgcaatcatatcaagctcgttgatgttgaggaactgaactactgggcctgcaaaggagagggagagatatgtgtgagaggaccaaatgtgttcaaaggctacttgaaagatccagacaggacgaaggaggccctggacagcgatggctggcttcacactggagacatcggaaaatggctgccggcaggaactcttaaaattattgatcggaaaaagcatatatttaaacttgctcagggagaatatgttgcacccgagaagattgagaacatctacatccggagccaacctgtggcgcaaatctatgtccatggggacagcttaaaggcctttttggtaggcattgttgtgcctgaccctgaagttatgccctcctgggcccagaagagaggaattgaaggaacatatgcagatctctgcacaaataaggatctgaagaaagccattttggaagatatggtgaggttaggaaaagaaagtggactccattcttttgagcaggttaaagccattcacatccattctgacatgttctcagttcaaaatggcttgctgacaccaacactaaaagctaagagacctgagctgagagagtacttcaaaaaacaaatagaagagctttactcaatctccatgtgaagttcaaggaaagttcttctcagtgtaatgaactgtctagcaatattatagttattcttgaaagtaatgagtcaaaatgacacagctgaaaatgaataagcatctgattttatgactgagccttttcctgtcccaagaggtctttaacaatattttctctatcatcaatgagtatattttatttttattataaaaatgatattgtggtggactgctaaaaatatcacaaatggcaatgtaaaaatcaagacattttctcaagaactgtgtaccactaaaagtaatatattgtcaatgttcacagaactattaaacataaaggaaaaa

SEQ ID NO: 104434 - DNA, 2622 bp, Homo sapiens
  Payload ID: 508
  Gene Symbol: ACSL6
  Gene Name: acyl-CoA synthetase long-chain family member 6
  Uniprot ID: Q9UKU0
  ENST ID: ENST00000379246
  CDS Start-End: 167-2293
aaccgcgacccggctgccattcgagcctgcccagccataaaacccaggctgcgagtcgcgcgggggcagggtcgcgtgttgatggggtgggtggcggcggggtgggctcaatgtcacgctctggcgctcgtcgcccgtgctcccccttccagccggtttccgcagaatgccagagtttgtcctctcacttctggagaagatgcagacacaggagatcctgaggatactgcgactgcctgagctaggtgacttgggacagtttttccgcagcctctcggccaccaccctcgtgagtatgggtgccctggctgccatccttgcctactggttcactcaccggccaaaggccttgcagccgccatgcaacctcctgatgcagtcagaagaagtagaggacagtggcggggcacggcgatctgtgattgggtctggccctcagctacttacccactactatgatgatgcccggaccatgtaccaggtgttccgccgtgggcttagcatctcagggaatgggccctgtcttggtttcaggaagcctaagcagccttaccagtggctgtcctaccaggaggtggccgacagggctgaatttctggggtccggacttctccagcacaattgtaaagcatgcactgatcagtttattggtgtttttgcacaaaatcggccagagtggatcattgtggagctggcctgctacacatattccatggtggtggtcccgctctatgacaccctgggccctggggctatccgctacatcatcaatacagcggacatcagcaccgtgattgtggacaaacctcagaaggctgtgcttctgctagagcatgtggagaggaaggagactccaggcctcaagctgatcatcctcatggacccattcgaagaagccctgaaagagagagggcagaagtgcggggtggtcattaagtccatgcaggccgtggaggactgtggccaagagaatcaccaggctcctgtgcccccgcagcctgatgacctctccattgtgtgtttcacaagcggcacgacagggaacccaaaaggtgcgatgctcacccatgggaacgtggtggctgatttctcaggctttctgaaagtgacagagaaagtgatctttccgagacaggacgatgtgctcatctccttcctgcctctggctcacatgtttgagagagtaatccagtctgtcgtctattgccacggagggcgtgttggcttcttccagggagatatccgccttctctcagatgacatgaaggctctatgccccaccatcttccctgtggtcccacgactgctgaaccggatgtacgacaagatcttcagccaggcaaacacaccattaaagcgctggctcctggagtttgcagcaaagcgtaagcaagccgaggtccggagtggaatcatcaggaatgatagtatctgggatgaactcttctttaataagattcaggccagtcttggtgggtgtgtgcggatgattgttactggagcagccccagcatcaccaacagttctgggatttctccgggcagctctagggtgccaggtttatgaaggttatggccaaactgagtgcacagctggatgtaccttcaccactcctggcgactggacctcagggcacgtaggggcgccacttccctgcaatcatatcaagctcgttgatgttgaggaactgaactactgggcctgcaaaggagagggagagatatgtgtgagaggaccaaatgtgttcaaaggctacttgaaagatccagacaggacgaaggaggccctggacagcgatggctggcttcacactggagacatcggaaaatggctgccggcaggaactcttaaaattattgatcggaaaaagcatatatttaaacttgctcagggagaatatgttgcacccgagaagattgagaacatctacatccggagccaacctgtggcgcaaatctatgtccatggggacagcttaaaggcctttttggtaggcattgttgtgcctgaccctgaagttatgccctcctgggcccagaagagaggaattgaaggaacatatgcagatctctgcacaaataaggatctgaagaaagccattttggaagatatggtgaggttaggaaaagaaagtggactccattcttttgagcaggttaaagccattcacatccattctgacatgttctcagttcaaaatggcttgctgacaccaacactaaaagctaagagacctgagctgagagagtacttcaaaaaacaaatagaagagctttactcaatctccatgtgaagttcaaggaaagttcttctcagtgtaatgaactgtctagcaatattatagttattcttgaaagtaatgagtcaaaatgacacagctgaaaatgaataagcatctgattttatgactgagccttttcctgtcccaagaggtctttaacaatattttctctatcatcaatgagtatattttatttttattataaaaatgatattgtggtggactgctaaaaatatcacaaatggcaatgtaaaaatcaagacattttctcaagaactgtgtaccactaaaagtaatatattgtcaatgttcacagaactattaaacataaaggaaaaaca

SEQ ID NO: 104435 - DNA, 2301 bp, Homo sapiens
  Payload ID: 508
  Gene Symbol: ACSL6
  Gene Name: acyl-CoA synthetase long-chain family member 6
  Uniprot ID: Q9UKU0
  ENST ID: ENST00000379255
  CDS Start-End: 97-1965
cggagagggctggttcgctctgcggccgggcccctcccccgcccgggagcttggcggttccgacaccgcgagtttgtcctctcacttctggagaagatgcagacacaggagatcctgaggatactgcgactgcctgagctaggtgacttgggacagtttttccgcagcctctcggccaccaccctcgacagtggcggggcacggcgatctgtgattgggtctggccctcagctacttacccactactatgatgatgcccggaccatgtaccaggtgttccgccgtgggcttagcatctcagggaatgggccctgtcttggtttcaggaagcctaagcagccttaccagtggctgtcctaccaggaggtggccgacagggctgaatttctggggtccggacttctccagcacaattgtaaagcatgcactgatcagtttattggtgtttttgcacaaaatcggccagagtggatcattgtggagctggcctgctacacatattccatggtggtggtcccgctctatgacaccctgggccctggggctatccgctacatcatcaatacagcggacatcagcaccgtgattgtggacaaacctcagaaggctgtgcttctgctagagcatgtggagaggaaggagactccaggcctcaagctgatcatcctcatggacccattcgaagaagccctgaaagagagagggcagaagtgcggggtggtcattaagtccatgcaggccgtggaggactgtggccaagagaatcaccaggctcctgtgcccccgcagcctgatgacctctccattgtgtgtttcacaagcggcacgacagggaacccaaaaggtgcgatgctcacccatgggaacgtggtggctgatttctcaggctttctgaaagtgacagagggagatatccgccttctctcagatgacatgaaggctctatgccccaccatcttccctgtggtcccacgactgctgaaccggatgtacgacaagatcttcagccaggcaaacacaccattaaagcgctggctcctggagtttgcagcaaagcgtaagcaagccgaggtccggagtggaatcatcaggaatgatagtatctgggatgaactcttctttaataagattcaggccagtcttggtgggtgtgtgcggatgattgttactggagcagccccagcatcaccaacagttctgggatttctccgggcagctctagggtgccaggtttatgaaggttatggccaaactgagtgcacagctggatgtaccttcaccactcctggcgactggacctcagggcacgtaggggcgccacttccctgcaatcatatcaagctcgttgatgttgaggaactgaactactgggcctgcaaaggagagggagagatatgtgtgagaggaccaaatgtgttcaaaggctacttgaaagatccagacaggacgaaggaggccctggacagcgatggctggcttcacactggagacatcggaaaatggctgccggcaggaactcttaaaattattgatcggaaaaagcatatatttaaacttgctcagggagaatatgttgcacccgagaagattgagaacatctacatccggagccaacctgtggcgcaaatctatgtccatggggacagcttaaaggcctttttggtaggcattgttgtgcctgaccctgaagttatgccctcctgggcccagaagagaggaattgaaggaacatatgcagatctctgcacaaataaggatctgaagaaagccattttggaagatatggtgaggttaggaaaagaaagtggactccattcttttgagcaggttaaagccattcacatccattctgacatgttctcagttcaaaatggcttgctgacaccaacactaaaagctaagagacctgagctgagagagtacttcaaaaaacaaatagaagagctttactcaatctccatgtgaagttcaaggaaagttcttctcagtgtaatgaactgtctagcaatattatagttattcttgaaagtaatgagtcaaaatgacacagctgaaaatgaataagcatctgattttatgactgagccttttcctgtcccaagaggtctttaacaatattttctctatcatcaatgagtatattttatttttattataaaaatgatattgtggtggactgctaaaaatatcacaaatggcaatgtaaaaatcaagacattttctcaagaactgtgtaccactaaaagtaatatattgtcaatgttcacagaactattaaacataaaggaaaaacataagtga

SEQ ID NO: 104436 - DNA, 6539 bp, Homo sapiens
  Payload ID: 508
  Gene Symbol: ACSL6
  Gene Name: acyl-CoA synthetase long-chain family member 6
  Uniprot ID: Q9UKU0
  ENST ID: ENST00000379264
  CDS Start-End: 110-2278
cggcagcggcggcggcggcgcggctactgctggggctgctgggctgcggggctgcggggctgcgggtcggggaggccgggccgggccgggccgggccccgctgaccgccatgctgaccttcttcctcgtgtcggggggctccctctggctattcgtagagtttgtcctctcacttctggagaagatgcagacacaggagatcctgaggatactgcgactgcctgagctaggtgacttgggacagtttttccgcagcctctcggccaccaccctcgtgagtatgggtgccctggctgccatccttgcctactggttcactcaccggccaaaggccttgcagccgccatgcaacctcctgatgcagtcagaagaagtagaggacagtggcggggcacggcgatctgtgattgggtctggccctcagctacttacccactactatgatgatgcccggaccatgtaccaggtgttccgccgtgggcttagcatctcagggaatgggccctgtcttggtttcaggaagcctaagcagccttaccagtggctgtcctaccaggaggtggccgacagggctgaatttctggggtccggacttctccagcacaattgtaaagcatgcactgatcagtttattggtgtttttgcacaaaatcggccagagtggatcattgtggagctggcctgctacacatattccatggtggtggtcccgctctatgacaccctgggccctggggctatccgctacatcatcaatacagcggacatcagcaccgtgattgtggacaaacctcagaaggctgtgcttctgctagagcatgtggagaggaaggagactccaggcctcaagctgatcatcctcatggacccattcgaagaagccctgaaagagagagggcagaagtgcggggtggtcattaagtccatgcaggccgtggaggactgtggccaagagaatcaccaggctcctgtgcccccgcagcctgatgacctctccattgtgtgtttcacaagcggcacgacagggaacccaaaaggtgcgatgctcacccatgggaacgtggtggctgatttctcaggctttctgaaagtgacagagaaagtgatctttccgagacaggacgatgtgctcatctccttcctgcctctggctcacatgtttgagagagtaatccagtctgtcgtctattgccacggagggcgtgttggcttcttccagggagatatccgccttctctcagatgacatgaaggctctatgccccaccatcttccctgtggtcccacgactgctgaaccggatgtacgacaagatcttcagccaggcaaacacaccattaaagcgctggctcctggagtttgcagcaaagcgtaagcaagccgaggtccggagtggaatcatcaggaatgatagtatctgggatgaactcttctttaataagattcaggccagtcttggtgggtgtgtgcggatgattgttactggagcagccccagcatcaccaacagttctgggatttctccgggcagctctagggtgccaggtttatgaaggttatggccaaactgagtgcacagctggatgtaccttcaccactcctggcgactggacctcagggcacgtaggggcgccacttccctgcaatcatatcaagctcgttgatgttgaggaactgaactactgggcctgcaaaggagagggagagatatgtgtgagaggaccaaatgtgttcaaaggctacttgaaagatccagacaggacgaaggaggccctggacagcgatggctggcttcacactggagacatcggaaaatggctgccggcaggaactcttaaaattattgatcggaaaaagcatatatttaaacttgctcagggagaatatgttgcacccgagaagattgagaacatctacatccggagccaacctgtggcgcaaatctatgtccatggggacagcttaaaggcctttttggtaggcattgttgtgcctgaccctgaagttatgccctcctgggcccagaagagaggaattgaaggaacatatgcagatctctgcacaaataaggatctgaagaaagccattttggaagatatggtgaggttaggaaaagaaagtggactccattcttttgagcaggttaaagccattcacatccattctgacatgttctcagttcaaaatggcttgctgacaccaacactaaaagctaagagacctgagctgagagagtacttcaaaaaacaaatagaagagctttactcaatctccatgtgaagttcaaggaaagttcttctcagtgtaatgaactgtctagcaatattatagttattcttgaaagtaatgagtcaaaatgacacagctgaaaatgaataagcatctgattttatgactgagccttttcctgtcccaagaggtctttaacaatattttctctatcatcaatgagtatattttatttttattataaaaatgatattgtggtggactgctaaaaatatcacaaatggcaatgtaaaaatcaagacattttctcaagaactgtgtaccactaaaagtaatatattgtcaatgttcacagaactattaaacataaaggaaaaacataagtgatatattctacttaattatttgtgaatcagtaaccagatgcagcaaatatctaggcaatgtggactacctcattcagtaactgattgtcaaaatcacaattaaatcagacttcaaaaattaaagctaggtgtatagaatcatgctaaaagaaaacatgataactcatagtctacgtaacttcagagtctttaaacatgacaatccacattgtcatatgtgaaaattttctctctgatttttactttcattcatgaaaaatgaaaattcagaaattctttttttcctttttgttttgagacagggtctgctctgtcacctaggctggagtgcagtggcttaatcatggctcattgcagtctccatctcctgggctcgagtgatcctcctgtctcacctcccaagtagctgagactacagtacaggcacatgccaccacacctggctaatagaaattttttttttagagattttgctcaggctggtctcaaactcctgagctcaagggatcctcccgccttggcctccctaagtgctaggattacaggcatgagccattgttcccagccaaattcagatattattaaaacacatgtcatatttatatagtaacttacaaagacctttcaatacattttctcatttattaagctcattaaagtattcaggaactacctagaaaaaatataatgtaaaactattcaaggatagtgtgtgtatgttcatggacttcttattataatgaattctaaaagacatctgttgactctacaatgaatggatccttgaggaatacttgggagaagaaactcagagttatttctcagggtaggcagcaattaatgtacctacattccttgctggggtcttctagtcttccattcccaatgtgcccatgctatgcctggaaaccctatatggttgtaattctgaacaatttcactttttttccagtaagaatatcaaggcagaaggtgggaaggaggggacattatttccagggaaaatagtttttcaacaatataactttgataaacctctttaaaatgccccaagaaaactttttaagtccatagacaaagaaatactgcctaatggcataattacattcctaaaatctttaagcgtgccgaagtttaaccactaaaacctcctttcttgcattatgtatttagatgcaccctgtattggggtgtcaacaatttcttataattaaaggccagataccatggacagcaattaagttccaagctatagattgtgcctctgaaaaaggcatggaccccaggaacgtgtttttcttctgtagagacaagactctaaaagcatatcaacaatccatatgcaattcatgtgttaatttaaaatgtatgtgctcagtgtttgtagtctagaagctcctttcccttggaggaatgccaagcagtttgcaaaaataaatgctgttagttaaaaaccacataatcacatgggcctactgaataaatatgcatcagtgattatatacttatatttcagtcttgtcaaaagtgaatcactgtttcatttgatgtatttacccagtctttttatccagtttttcttgggcatattctctctgaagacccactgttgcacttctaaatttgacagttaagaaatgagctagttctatacacactgatttttaaaggcgtttctgaataaactaatacttaaaatgtccaaagtcacatctgtacagcattagatttttatatttaatatatatttgactaattaaaagtgaaagttgttacctgaactggatattcatactattttaagggcaagttgcttacatttcaataacaacaaaaaaagaatctgtttcccattgtcctcctactcaactaaaattcatagttggctttaagcccaaaagaattttgaacaatgtgacagaaacaagtaatgtaaaacttattttgttttatttatactttataatagttagatataacagattatggacaacttaatatttcttctttttggctgggcgcggtggctcatgcctgtaatcccagcactttgggaggccgaggcgggcagatcacgaagtcaggagatcgagaccatcctggctaacacagtgaaaccccgtctctactaaaaaaatacaaaaaattagccgggcgttgtggcgggcgcctgtagtcccagctactcgggaggctgaggcaggagaatggcatgaacctgggaggcggagcttgcagtgagccgagatcccgccactgtactccagcctgggcaacagaacgagactccgtctcaaaaagaaagaaaaaaaaaaaacaaaaacaaggtttcttctttttgccacttaaaatatcttatatttctagatttccaggtctatgtggaaatcatcacacttgggccaataaatgggttagttcagatgtgctgagaaaagtaaatagtgtaccctaaatatcttgcatgtacatttatctatttctctgtttaatgccacttaattttgtaagaaatgagaaatgaaaccctatgtatcagtggaaaaatccttcttgcttcagatttcccaactttattctggaggagaaaaaaatctgtatttctcattaacagagatagaaaaaggtgatgtacttacgatggtcacattcatattgggcattggatctatttaagcctagaagtataacagataatcagttccttaagtgtaaatatgttcttaaatgtttggcctttttatctgttattcaaatgtattagtaattctcatattttgcaaacagatccttttgtgtatattataaaatatataccaaatctgtttttccttttgctgtggaagatgtctttatataatattgagacttcccttgcaaatgagagacgggactctggtcaggtatagtgtgtaggcctagccccatgtattaggaactcataaactcagaaatccaaggattaaacattttatgtctccttcatttatgcaagtcatgctttcattctacatgtagttaaaactacaagtatgagaaaaaatagaactttccattggaattttttccaatcaggtaatgttttagcaacttgaaatcagcacttaatttgattgtattacctatcaaagaaccaataacctttcctttttctgcagtaaagaaaatgaaatatcctttattttccaaatgtatgaagcacaaatgcaatatagttatttaaaatataaaatactttaaaatgaatgtgaagaatgggaaaatatatttttgcatgaaaacagactacttacaaatgtgcttaatatctcaggaaaaaaagaatgaataaccgtatataaaattggtaaactataaattggctgtatttccttgccggttttaattttaaggaagcatttacatgaaaagaaaaaaggatcctagtagtctgaatttcctctcaagtatgctagaaaatactttctatgaatttacaattaactgcaataagaagtgggttagcattcaagtaaggtcaataccccaaatgagaaactcttcagttagaacacattagtggttgtaacacagaggcagtagataaatatttgaaatgtgagcatttctaaacttggtaccaaatggaaagggtttcatgaggtgacagtggcttttaaacattcatttgaccgattattctaattttccttgttaaatcattgcaacagttgcatgggggagaatggatattttttgaagaattgcttattccactttcaatttttaaaaatcgaggggattaaaatattactttttaaatatgcataaaagtatcttaactgtaattacattttcagttgctttgttatagtagcatgcatattaaatataaaatgcatttatgaaaatttttgtaaaaaataaaagatttttcatttctcaaa

SEQ ID NO: 104437 - DNA, 934 bp, Homo sapiens
  Payload ID: 508
  Gene Symbol: ACSL6
  Gene Name: acyl-CoA synthetase long-chain family member 6
  ENST ID: ENST00000419502
  CDS Start-End: 477-934
cccctgggcactgtgctgagcacttctgctgcccttccctcttctccacaccccaggagcaaagataagtaaaatgctatgacagctgtcacacaggagaacagagcacccaggccttgaggtccaggaagcatcattcccagagctgccagagcagtggccctggaaaatatggaagcagctgtcagccatggcccagggcctgagcgtatgattctcaggaaaagtgggcaggacatctgactgtcaggtgtgacggcagaaggttctggcctcttcctgggaaaagcccttctaggtagccagcttctggggtgcactctgtacatcccaactccccgagggcctgccctacagtgtttcagaccagatatcaggtcctgtgacccaggacccctccctaacctgcccgtcaggtctcttgccttatctgactcttgttttcaacagagtttgtcctctcacttctggagaagatgcagacacaggagatcctgaggatactgcgactgcctgagctaggtgacttgggacagtttttccgcagcctctcggccaccaccctcgtgagtatgggtgccctggctgccatccttgcctactggttcactcaccggccaaaggccttgcagccgccatgcaacctcctgatgcagtcagaagaagtagaggacagtggcggggcacggcgatctgtgattgggtctggccctcagctacttacccactactatgatgatgcccggaccatgtaccaggtgttccgccgtgggcttagcatctcagggaatgggccctgtcttggtttcaggaagcctaagcagccttaccagtggctgtcctaccaggaggtggccgacagggctgaatttctggggtccggacttctccagcacaattgtaaagcatgcactgatcagtttattggtgtttt

SEQ ID NO: 104438 - DNA, 414 bp, Homo sapiens
  Payload ID: 508
  Gene Symbol: ACSL6
  Gene Name: acyl-CoA synthetase long-chain family member 6
  ENST ID: ENST00000441995
  CDS Start-End: 116-414
ggaggctccccatgtctgcaaactcgggtcctagggggcgttggtgtcagcgggcaacagcccacaggagtgtgcacctcctaggacagagtttgtcctctcacttctggagaagatgcagacacaggagatcctgaggatactgcgactgcctgagctaggtgacttgggacagtttttccgcagcctctcggccaccaccctcgacagtggcggggcacggcgatctgtgattgggtctggccctcagctacttacccactactatgatgatgcccggaccatgtaccaggtgttccgccgtgggcttagcatctcagggaatgggccctgtcttggtttcaggaagcctaagcagccttaccagtggctgtcctaccaggaggtggccgacagggctgaatttctggggtc

SEQ ID NO: 104439 - DNA, 519 bp, Homo sapiens
  Payload ID: 508
  Gene Symbol: ACSL6
  Gene Name: acyl-CoA synthetase long-chain family member 6
  ENST ID: ENST00000414078
  CDS Start-End: 116-519
ggaggctccccatgtctgcaaactcgggtcctagggggcgttggtgtcagcgggcaacagcccacaggagtgtgcacctcctaggacagagtttgtcctctcacttctggagaagatgcagacacaggagatcctgaggatactgcgactgcctgagctaggtgacttgggacagtttttccgcagcctctcggccaccaccctcgtgagtatgggtgccctggctgccatccttgcctactggttcactcaccggccaaaggccttgcagccgccatgcaacctcctgatgcagtcagaagaagtagaggacagtggcggggcacggcgatctgtgattgggtctggccctcagctacttacccactactatgatgatgcccggaccatgtaccaggtgttccgccgtgggcttagcatctcagggaatgggccctgtcttggtttcaggaagcctaagcagccttaccagtggctgtcctaccaggaggtggccgacagggctgaatttctggggtc

SEQ ID NO: 104440 - DNA, 1123 bp, Homo sapiens
  Payload ID: 508
  Gene Symbol: ACSL6
  Gene Name: acyl-CoA synthetase long-chain family member 6
  ENST ID: ENST00000434099
  CDS Start-End: 29-1123
agagtttgtcctctcacttctggagaagatgcagacacaggagatcctgaggatactgcgactgcctgagctaggtgacttgggacagtttttccgcagcctctcggccaccaccctcgacagtggcggggcacggcgatctgtgattgggtctggccctcagctacttacccactactatgatgatgcccggaccatgtaccaggtgttccgccgtgggcttagcatctcagggaatgggccctgtcttggtttcaggaagcctaagcagccttaccagtggctgtcctaccaggaggtggccgacagggctgaatttctggggtccggacttctccagcacaattgtaaagcatgcactgatcagtttattggtgtttttgcacaaaatcggccagagtggatcattgtggagctggcctgctacacatattccatggtggtggtcccgctctatgacaccctgggccctggggctatccgctacatcatcaatacagcggacatcagcaccgtgattgtggacaaacctcagaaggctgtgcttctgctagagcatgtggagaggaaggagactccaggcctcaagctgatcatcctcatggacccattcgaagaagccctgaaagagagagggcagaagtgcggggtggtcattaagtccatgcaggccgtggaggactgtggccaagagaatcaccaggctcctgtgcccccgcagcctgatgacctctccattgtgtgtttcacaagcggcacgacagggaacccaaaaggtgcgatgctcacccatgggaacgtggtggctgatttctcaggctttctgaaagtgacagagagtcagtgggctcccacttgtgcggatgtgcacatttcctatttgcctttagcacacatgtttgagcgaatggtgcagtctgtcgtctattgccacggagggcgtgttggcttcttccagggagatatccgccttctctcagatgacatgaaggctctatgccccaccatcttccctgtggtcccacgactgctgaaccggatgtacgacaagatcttcagccaggcaaacacaccattaaagcgctggctcctggagtttgcagcaaagcgtaagcaagccgag

SEQ ID NO: 104441 - DNA, 530 bp, Homo sapiens
  Payload ID: 508
  Gene Symbol: ACSL6
  Gene Name: acyl-CoA synthetase long-chain family member 6
  ENST ID: ENST00000416557
  CDS Start-End: 97-530
attgtttgtgcctggcttcctggtgctagcatcaggaatgtggacccacattccctgagcagggcttaggagtttgtcctctcacttctggagaagatgcagacacaggagatcctgaggatactgcgactgcctgagctaggtgacttgggacagtttttccgcagcctctcggccaccaccctcgtgagtatgggtgccctggctgccatccttgcctactggttcactcaccggccaaaggccttgcagccgccatgcaacctcctgatgcagtcagaagaagtagaggacagtggcggggcacggcgatctgtgattgggtctggccctcagctacttacccactactatgatgatgcccggaccatgtaccaggtgttccgccgtgggcttagcatctcagggaatgggccctgtcttggtttcaggaagcctaagcagccttaccagtggctgtcctaccaggaggtggccgacagggctgaatttctggggtccggacttctccagcacaattgtaaagcatg

SEQ ID NO: 104442 - DNA, 799 bp, Homo sapiens
  Payload ID: 508
  Gene Symbol: ACSL6
  Gene Name: acyl-CoA synthetase long-chain family member 6
  ENST ID: ENST00000430403
  CDS Start-End: 161-799
tggagagcggggccggagagggctggttcgctctgcggccgggcccctcccccgcccgggagcttggcggttccgacaccgcggtcagtgcggggcaagccccagacccggccggccaggctgcagggcagggaagtttgtcctctcacttctggagaagatgcagacacaggagatcctgaggatactgcgactgcctgagctaggtgacttgggacagtttttccgcagcctctcggccaccaccctcgtgagtatgggtgccctggctgccatccttgcctactggttcactcaccggccaaaggccttgcagccgccatgcaacctcctgatgcagtcagaagaagtagaggacagtggcggggcacggcgatctgtgattgggtctggccctcagctacttacccactactatgatgatgcccggaccatgtaccaggtgttccgccgtgggcttagcatctcagggaatgggccctgtcttggtttcaggaagcctaagcagccttaccagtggctgtcctaccaggaggtggccgacagggctgaatttctggggtccggacttctccagcacaattgtaaagcatgcactgatcagtttattggtgtttttgcacaaaatcggccagagtggatcattgtggagctggcctgctacacatattccatggtggtggtcccgctctatgacaccctgggccctggggctatccgctacatcatcaatacagcggacatcagcaccgtgattgtggacaaacctcagaaggctgtgcttctgctagagcatgtg

SEQ ID NO: 104443 - DNA, 2060 bp, Homo sapiens
  Payload ID: 508
  Gene Symbol: ACSL6
  Gene Name: acyl-CoA synthetase long-chain family member 6
  ENST ID: ENST00000431707
  CDS Start-End: 27-2060
agtttgtcctctcacttctggagaagatgcagacacaggagatcctgaggatactgcgactgcctgagctaggtgacttgggacagtttttccgcagcctctcggccaccaccctcgacagtggcggggcacggcgatctgtgattgggtctggccctcagctacttacccactactatgatgatgcccggaccatgtaccaggtgttccgccgtgggcttagcatctcagggaatgggccctgtcttggtttcaggaagcctaagcagccttaccagtggctgtcctaccaggaggtggccgacagggctgaatttctggggtccggacttctccagcacaattgtaaagcatgcactgatcagtttattggtgtttttgcacaaaatcggccagagtggatcattgtggagctggcctgctacacatattccatggtggtggtcccgctctatgacaccctgggccctggggctatccgctacatcatcaatacagggctcagctgccaagaaggagcctctgcaacagcctccacacaggcggacatcagcaccgtgattgtggacaaacctcagaaggctgtgcttctgctagagcatgtggagaggaaggagactccaggcctcaagctgatcatcctcatggacccattcgaagaagccctgaaagagagagggcagaagtgcggggtggtcattaagtccatgcaggccgtggaggactgtggccaagagaatcaccaggctcctgtgcccccgcagcctgatgacctctccattgtgtgtttcacaagcggcacgacagggaacccaaaaggtgcgatgctcacccatgggaacgtggtggctgatttctcaggctttctgaaagtgacagagaaagtgatctttccgagacaggacgatgtgctcatctccttcctgcctctggctcacatgtttgagagagtaatccagtctgtcgtctattgccacggagggcgtgttggcttcttccagggagatatccgccttctctcagatgacatgaaggctctatgccccaccatcttccctgtggtcccacgactgctgaaccggatgtacgacaagatcttcagccaggcaaacacaccattaaagcgctggctcctggagtttgcagcaaagcgtaagcaagccgaggtccggagtggaatcatcaggaatgatagtatctgggatgaactcttctttaataagattcaggccagtcttggtgggtgtgtgcggatgattgttactggagcagccccagcatcaccaacagttctgggatttctccgggcagctctagggtgccaggtttatgaaggttatggccaaactgagtgcacagctggatgtaccttcaccactcctggcgactggacctcagggcacgtaggggcgccacttccctgcaatcatatcaagctcgttgatgttgaggaactgaactactgggcctgcaaaggagagggagagatatgtgtgagaggaccaaatgtgttcaaaggctacttgaaagatccagacaggacgaaggaggccctggacagcgatggctggcttcacactggagacatcggaaaatggctgccggcaggaactcttaaaattattgatcggaaaaagcatatatttaaacttgctcagggagaatatgttgcacccgagaagattgagaacatctacatccggagccaacctgtggcgcaaatctatgtccatggggacagcttaaaggcctttttggtaggcattgttgtgcctgaccctgaagttatgccctcctgggcccagaagagaggaattgaaggaacatatgcagatctctgcacaaataaggatctgaagaaagccattttggaagatatggtgaggttaggaaaagaaagtggactccattcttttgagcaggttaaagccattcacatccattctgacatgttctcagttcaaaatggcttgctgacaccaacactaaaagctaagagacctgagctgagagagtacttcaaaaaacaaatagaagagctttactcaatctccatgtga

SEQ ID NO: 104444 - DNA, 2139 bp, Homo sapiens
  Payload ID: 508
  Gene Symbol: ACSL6
  Gene Name: acyl-CoA synthetase long-chain family member 6
  Uniprot ID: Q9UKU0
  ENST ID: ENST00000543479
  CDS Start-End: 1-2139
atgcagacacaggagatcctgaggatactgcgactgcctgagctaggtgacttgggacagtttttccgcagcctctcggccaccaccctcgtgagtatgggtgccctggctgccatccttgcctactggttcactcaccggccaaaggccttgcagccgccatgcaacctcctgatgcagtcagaagaagtagaggacagtggcggggcacggcgatctgtgattgggtctggccctcagctacttacccactactatgatgatgcccggaccatgtaccaggtgttccgccgtgggcttagcatctcagggaatgggccctgtcttggtttcaggaagcctaagcagccttaccagtggctgtcctaccaggaggtggccgacagggctgaatttctggggtccggacttctccagcacaattgtaaagcatgcactgatcagtttattggtgtttttgcacaaaatcggccagagtggatcattgtggagctggcctgctacacatattccatggtggtggtcccgctctatgacaccctgggccctggggctatccgctacatcatcaatacagggctcagctgccaagaaggagcctctgcaacagcctccacacaggcggacatcagcaccgtgattgtggacaaacctcagaaggctgtgcttctgctagagcatgtggagaggaaggagactccaggcctcaagctgatcatcctcatggacccattcgaagaagccctgaaagagagagggcagaagtgcggggtggtcattaagtccatgcaggccgtggaggactgtggccaagagaatcaccaggctcctgtgcccccgcagcctgatgacctctccattgtgtgtttcacaagcggcacgacagggaacccaaaaggtgcgatgctcacccatgggaacgtggtggctgatttctcaggctttctgaaagtgacagagaaagtgatctttccgagacaggacgatgtgctcatctccttcctgcctctggctcacatgtttgagagagtaatccagtctgtcgtctattgccacggagggcgtgttggcttcttccagggagatatccgccttctctcagatgacatgaaggctctatgccccaccatcttccctgtggtcccacgactgctgaaccggatgtacgacaagatcttcagccaggcaaacacaccattaaagcgctggctcctggagtttgcagcaaagcgtaagcaagccgaggtccggagtggaatcatcaggaatgatagtatctgggatgaactcttctttaataagattcaggccagtcttggtgggtgtgtgcggatgattgttactggagcagccccagcatcaccaacagttctgggatttctccgggcagctctagggtgccaggtttatgaaggttatggccaaactgagtgcacagctggatgtaccttcaccactcctggcgactggacctcagggcacgtaggggcgccacttccctgcaatcatatcaagctcgttgatgttgaggaactgaactactgggcctgcaaaggagagggagagatatgtgtgagaggaccaaatgtgttcaaaggctacttgaaagatccagacaggacgaaggaggccctggacagcgatggctggcttcacactggagacatcggaaaatggctgccggcaggaactcttaaaattattgatcggaaaaagcatatatttaaacttgctcagggagaatatgttgcacccgagaagattgagaacatctacatccggagccaacctgtggcgcaaatctatgtccatggggacagcttaaaggcctttttggtaggcattgttgtgcctgaccctgaagttatgccctcctgggcccagaagagaggaattgaaggaacatatgcagatctctgcacaaataaggatctgaagaaagccattttggaagatatggtgaggttaggaaaagaaagtggactccattcttttgagcaggttaaagccattcacatccattctgacatgttctcagttcaaaatggcttgctgacaccaacactaaaagctaagagacctgagctgagagagtacttcaaaaaacaaatagaagagctttactcaatctccatgtga

SEQ ID NO: 104445 - DNA, 2051 bp, Homo sapiens
  Payload ID: 509
  Gene Symbol: ACSM1
  Gene Name: acyl-CoA synthetase medium-chain family member 1
  Uniprot ID: Q08AH1
  ENST ID: ENST00000307493
  CDS Start-End: 69-1802
agccatctcttcccaaggcaggtggtgacttgagaactctgtgcctggtttctgaggactgtttcaccatgcagtggctaatgaggttccggaccctctggggcatccacaaatccttccacaacatccaccctgccccttcacagctgcgctgccggtctttatcagaatttggagccccaagatggaatgactatgaagtaccggaggaatttaactttgcaagttatgtactggactactgggctcaaaaggagaaggagggcaagagaggtccaaatccagctttttggtgggtgaatggccaaggggatgaagtaaagtggagcttcagagagatgggagacctaacccgccgtgtagccaacgtcttcacacagacctgtggcctacaacagggagaccatctggccttgatgctgcctcgagttcctgagtggtggctggtggctgtgggctgcatgcgaacagggatcatcttcattcctgcgaccatcctgttgaaggccaaagacattctctatcgactacagttgtctaaagccaagggcattgtgaccatagatgcccttgcctcagaggtggactccatagcttctcagtgcccctctctgaaaaccaagctcctggtgtctgatcacagccgtgaagggtggctggacttccgatcgctggttaaatcagcatccccagaacacacctgtgttaagtcaaagaccttggacccaatggtcatcttcttcaccagtgggaccacaggcttccccaagatggcaaaacactcccatgggttggccttacaaccctccttcccaggaagtaggaaattacggagcctgaagacatctgatgtctcctggtgcctgtcggactcaggatggattgtggctaccatttggaccctggtagaaccatggacagcgggttgtacagtctttatccaccatctgccacagtttgacaccaaggtcatcatacagacattgttgaaataccccattaaccacttttggggggtatcatctatatatcgaatgattctgcagcaggatttcaccagcatcaggttccctgccctggagcactgctatactggcggggaggtcgtgttgcccaaggatcaggaggagtggaaaagacggacgggccttctgctctacgagaactatgggcagtcggaaacgggactaatttgtgccacctactggggaatgaagatcaagccgggtttcatggggaaggccactccaccctacgacgtccaggtcattgatgacaagggcagcatcctgccacctaacacagaaggaaacattggcatcagaatcaaacctgtcaggcctgtgagcctcttcatgtgctatgagggtgacccagagaagacagctaaagtggaatgtggggacttctacaacactggggacagaggtaagatggatgaagagggctacatttgtttcctggggaggagtgatgacatcattaatgcctctgggtatcgcatcgggcctgcagaggttgaaagcgctttggtggagcacccagcggtggcggagtcagccgtggtgggcagcccagacccgattcgaggggaggtggtgaaggcctttattgtcctgaccccacagttcctgtcccatgacaaggatcagctgaccaaggaactgcagcagcatgtcaagtcagtgacagccccatacaagtacccaaggaaggtggagtttgtctcagagctgccaaaaaccatcactggcaagattgaacggaaggaacttcggaaaaaggagactggtcagatgtaatcggcagtgaactcagaacgcactgcacacctaaggcaaatccctggccactttagtctccccactatggtgaggacgagggtggggcattgagagtgttgatttgggaaagtatcaggagtgccatgattccaatgttttccttcttttaaattaaattcagttgctctgcttcctccaagtcctctgtatctttagaatttcccaggtgagcactcataacgcaagtaataaaatactgatatcaac

SEQ ID NO: 104446 - DNA, 1894 bp, Homo sapiens
  Payload ID: 509
  Gene Symbol: ACSM1
  Gene Name: acyl-CoA synthetase medium-chain family member 1
  Uniprot ID: Q08AH1
  ENST ID: ENST00000520010
  CDS Start-End: 161-1894
aatcctgcggatcacctgatcagagagaactgaacctacaaaagagagctcaacctccttttccatacctaccagggacctagttcagctacgtcctaaacagtaccaggcaggtggtgacttgagaactctgtgcctggtttctgaggactgtttcaccatgcagtggctaatgaggttccggaccctctggggcatccacaaatccttccacaacatccaccctgccccttcacagctgcgctgccggtctttatcagaatttggagccccaagatggaatgactatgaagtaccggaggaatttaactttgcaagttatgtactggactactgggctcaaaaggagaaggagggcaagagaggtccaaatccagctttttggtgggtgaatggccaaggggatgaagtaaagtggagcttcagagagatgggagacctaacccgccgtgtagccaacgtcttcacacagacctgtggcctacaacagggagaccatctggccttgatgctgcctcgagttcctgagtggtggctggtggctgtgggctgcatgcgaacagggatcatcttcattcctgcgaccatcctgttgaaggccaaagacattctctatcgactacagttgtctaaagccaagggcattgtgaccatagatgcccttgcctcagaggtggactccatagcttctcagtgcccctctctgaaaaccaagctcctggtgtctgatcacagccgtgaagggtggctggacttccgatcgctggttaaatcagcatccccagaacacacctgtgttaagtcaaagaccttggacccaatggtcatcttcttcaccagtgggaccacaggcttccccaagatggcaaaacactcccatgggttggccttacaaccctccttcccaggaagtaggaaattacggagcctgaagacatctgatgtctcctggtgcctgtcggactcaggatggattgtggctaccatttggaccctggtagaaccatggacagcgggttgtacagtctttatccaccatctgccacagtttgacaccaaggtcatcatacagacattgttgaaataccccattaaccacttttggggggtatcatctatatatcgaatgattctgcagcaggatttcaccagcatcaggttccctgccctggagcactgctatactggcggggaggtcgtgttgcccaaggatcaggaggagtggaaaagacggacgggccttctgctctacgagaactatgggcagtcggaaacgggactaatttgtgccacctactggggaatgaagatcaagccgggtttcatggggaaggccactccaccctacgacgtccaggtcattgatgacaagggcagcatcctgccacctaacacagaaggaaacattggcatcagaatcaaacctgtcaggcctgtgagcctcttcatgtgctatgagggtgacccagagaagacagctaaagtggaatgtggggacttctacaacactggggacagaggtaagatggatgaagagggctacatttgtttcctggggaggagtgatgacatcattaatgcctctgggtatcgcatcgggcctgcagaggttgaaagcgctttggtggagcacccagcggtggcggagtcagccgtggtgggcagcccagacccgattcgaggggaggtggtgaaggcctttattgtcctgaccccacagttcctgtcccatgacaaggatcagctgaccaaggaactgcagcagcatgtcaagtcagtgacagccccatacaagtacccaaggaaggtggagtttgtctcagagctgccaaaaaccatcactggcaagattgaacggaaggaacttcggaaaaaggagactggtcagatgtaa

SEQ ID NO: 104447 - DNA, 809 bp, Homo sapiens
  Payload ID: 509
  Gene Symbol: ACSM1
  Gene Name: acyl-CoA synthetase medium-chain family member 1
  ENST ID: ENST00000524149
  CDS Start-End: 1-749
cacagtttgacaccaaggtcatcatacagacattgttgaaataccccattaaccacttttggggggtatcatctatatatcgaatgattctgcagcaggatttcaccagcatcaggttccctgccctggagcactgctatactggcggggaggtcgtgttgcccaaggatcaggaggagtggaaaagacggacgggccttctgctctacgagaactatgggcagtcggaaacgggactaatttgtgccacctactggggaatgaagatcaagccgggtttcatggggaaggccactccaccctacgacgtccagggtgacccagagaagacagctaaagtggaatgtggggacttctacaacactggggacagaggtaagatggatgaagagggctacatttgtttcctggggaggagtgatgacatcattaatgcctctgggtatcgcatcgggcctgcagaggttgaaagcgctttggtggagcacccagcggtggcggagtcagccgtggtgggcagcccagacccgattcgaggggaggtggtgaaggcctttattgtcctgaccccacagttcctgtcccatgacaaggatcagctgaccaaggaactgcagcagcatgtcaagtcagtgacagccccatacaagtacccaaggaaggtggagtttgtctcagagctgccaaaaaccatcactggcaagattgaacggaaggaacttcggaaaaaggagactggtcagatgtaatcggcagtgaactcagaacgcactgcacacctaaggcaaatccctggccactttagtctc

SEQ ID NO: 104448 - DNA, 1568 bp, Homo sapiens
  Payload ID: 509
  Gene Symbol: ACSM1
  Gene Name: acyl-CoA synthetase medium-chain family member 1
  Uniprot ID: Q08AH1
  ENST ID: ENST00000519745
  CDS Start-End: 69-683
agccatctcttcccaaggcaggtggtgacttgagaactctgtgcctggtttctgaggactgtttcaccatgcagtggctaatgaggttccggaccctctggggcatccacaaatccttccacaacatccaccctgccccttcacagctgcgctgccggtctttatcagaatttggagccccaagatggaatgactatgaagtaccggaggaatttaactttgcaagttatgtactggactactgggctcaaaaggagaaggagggcaagagaggtccaaatccagctttttggtgggtgaatggccaaggggatgaagtaaagtggagcttcagagagatgggagacctaacccgccgtgtagccaacgtcttcacacagacctgtggcctacaacagggagaccatctggccttgatgctgcctcgagttcctgagtggtggctggtggctgtgggctgcatgcgaacagggatcatcttcattcctgcgaccatcctgttgaaggccaaagacattctctatcgactacagttgtctaaagccaagggcattgtgaccatagatgcccttgcctcagaggtggactccatagcttctcagtgcccctctctgaaaaccaagctcctggtgtctgatcacagccgtgaagggtggctggacttccgatcgctggttaagtagaagaatgccattcactcccaagtggtgagagacaagcagccagtggtaggaagatcagcatccccagaacacacctgtgttaagtcaaagaccttggacccaatggtcatcttcttcaccagtgggaccacaggcttccccaagatggcaaaacactcccatgggttggccttacaaccctccttcccaggaagttagtaggaaattacggagcctgaagacatctgatgtctcctggtgcctgtcggactcaggatggattgtggctaccatttggaccctggtagaaccatggacagcgggttgtacagtctttatccaccatctgccacagtttgacaccaaggtcatcatacagacattgttgaaataccccattaaccacttttggggggtatcatctatatatcgaatgattctgcagcaggatttcaccagggactaatttgtgccacctactggggaatgaagatcaagccgggtttcatggggaaggccactccaccctacgacgtccagggtgacccagagaagacagctaaagtggaatgtggggacttctacaacactggggacagaggtggtgaaggcctttattgtcctgaccccacagttcctgtcccatgacaaggatcagctgaccaaggaactgcagcagcatgtcaagtcagtgacagccccatacaagtacccaaggaaggtggagtttgtctcagagctgccaaaaaccatcactggcaagattgaacggaaggaacttcggaaaaaggagactggtcagatgtaatcggcagtgaactcagaacgcactgcacacctaaggcaaatccctggccactttagtctccccactatggtgaggacgagggtggggcattgagagtg

SEQ ID NO: 104449 - DNA, 701 bp, Homo sapiens
  Payload ID: 509
  Gene Symbol: ACSM1
  Gene Name: acyl-CoA synthetase medium-chain family member 1
  ENST ID: ENST00000523065
  CDS Start-End: 240-701
taacaaacaaatgaagaagcaaagaaaacaccctgggaggtcccccttcgctgtggccagaagccaagttctgctgggtgcacaatcctgcggatcacctgatcagagagaactgaacctacaaaagagagctcaacctccttttccatacctaccagggacctagttcagctacgtcctaaacagtaccaggtggtgacttgagaactctgtgcctggtttctgaggactgtttcaccatgcagtggctaatgaggttccggaccctctggggcatccacaaatccttccacaacatccaccctgccccttcacagctgcgctgccggtctttatcagaatttggagccccaagatggaatgactatgaagtaccggaggaatttaactttgcaagttatgtactggactactgggctcaaaaggagaaggagggcaagagaggtccaaatccagctttttggtgggtgaatggccaaggggatgaagtaaagtggagcttcagagagatgggagacctaacccgccgtgtagccaacgtcttcacacagacctgtggcctacaacagggagaccatctggccttgatgctgcctcgagttcctgagtggtggctggtggctgtgggctgcatgcgaacagggatcatcttcattcctgcgaccatcctgttgaaggccaaagacattctctatcgacta

SEQ ID NO: 104450 - DNA, 1988 bp, Homo sapiens
  Payload ID: 510
  Gene Symbol: ACSM2A
  Gene Name: acyl-CoA synthetase medium-chain family member 2A
  Uniprot ID: Q08AH3
  ENST ID: ENST00000219054
  CDS Start-End: 142-1875
gtgctctcttccaaggctgtaggagttctggagctgctggctggagaggagggtggacgaagctctctctagaaagacatcctgagaggacttggcagcctgcagatggcctattgtgggaccttgtgatcatgcctgaatatgcattggctgcgaaaagttcagggactttgcaccctgtggggtactcagatgtccagccgcactctctacattaatagtaggcaactggtgtccctgcagtggggccaccaggaagtgccggccaagtttaactttgctagtgatgtgttggatcactgggctgacatggagaaggctggcaagcgactcccaagcccagccctgtggtgggtgaatgggaaggggaaggaattaatgtggaatttcagagaactgagtgaaaacagccagcaggcagccaacgtcctctcgggagcctgtggcctgcagcgtggggatcgtgtggcagtggtgctgccccgagtgcctgagtggtggctggtgatcctgggctgcattcgagcaggtctcatctttatgcctggaaccatccagatgaaatccactgacatactgtataggttgcagatgtctaaggccaaggctattgttgctggggatgaagtcatccaagaagtggacacagtggcatctgaatgtccttctctgagaattaagctactggtgtctgagaaaagctgtgatgggtggctgaacttcaagaaactactaaatgaggcatccaccactcatcactgtgtggagactggaagccaggaagcatctgccatctacttcactagtgggaccagtggtcttcccaagatggcagaacattcctactcgagcctgggcctcaaggccaagatggatgctggttggacaggcctgcaagcctctgatataatgtggaccatatcagacacaggttggatactgaacatcttgtgctcacttatggaaccttgggcattaggagcatgcacatttgttcatctcttgccaaagtttgacccactggttattctaaagacactctccagttatccaatcaagagtatgatgggtgcccccattgtttaccggatgttgctacagcaggatctttccagttacaagttcccccatctacagaactgcgtcactgtaggggagtcccttcttccagaaactctggagaactggagggcccagacaggactggacatccgagaatcctatggccagacagaaacgggattaacttgcatggtttccaagacaatgaaaatcaaaccaggatacatgggaacggctgcttcctgttatgatgtacagatcatagatgataagggcaacgtcctgccccccggcacagaaggagacattggcatcagggtcaaacccatcaggcctataggcatcttctctggctatgtggacaatcccgacaagacagcagccaacattcgaggagacttttggctccttggagaccggggaatcaaagatgaagatgggtatttccagtttatgggacgggcaaatgatatcattaactccagcgggtaccggattggaccctcggaggtagagaatgcactgatggagcaccctgctgtggttgagacggctgtgatcagcagcccagaccccgtccgaggagaggtggtgaaggcatttgtggtcctggcctcgcagttcctgtcccatgacccagaacagctcaccaaggagctgcagcagcatgtgaagtcagtgacagccccatacaagtacccaagaaagatagagtttgtcttgaacctgcccaagactgtcacagggaaaattcaacgagccaagcttcgagacaaggagtggaagatgtccggaaaagcccgtgcgcagtgagacatctaagagacattcatttggattcccctcttctttctctttcttttccctttgggcccttggccttcctatgattatatgagattctttatggaagaacatgaatataa

SEQ ID NO: 104451 - DNA, 2734 bp, Homo sapiens
  Payload ID: 510
  Gene Symbol: ACSM2A
  Gene Name: acyl-CoA synthetase medium-chain family member 2A
  Uniprot ID: Q08AH3
  ENST ID: ENST00000396104
  CDS Start-End: 12-1745
caggcctgaatatgcattggctgcgaaaagttcagggactttgcaccctgtggggtactcagatgtccagccgcactctctacattaatagtaggcaactggtgtccctgcagtggggccaccaggaagtgccggccaagtttaactttgctagtgatgtgttggatcactgggctgacatggagaaggctggcaagcgactcccaagcccagccctgtggtgggtgaatgggaaggggaaggaattaatgtggaatttcagagaactgagtgaaaacagccagcaggcagccaacgtcctctcgggagcctgtggcctgcagcgtggggatcgtgtggcagtggtgctgccccgagtgcctgagtggtggctggtgatcctgggctgcattcgagcaggtctcatctttatgcctggaaccatccagatgaaatccactgacatactgtataggttgcagatgtctaaggccaaggctattgttgctggggatgaagtcatccaagaagtggacacagtggcatctgaatgtccttctctgagaattaagctactggtgtctgagaaaagctgtgatgggtggctgaacttcaagaaactactaaatgaggcatccaccactcatcactgtgtggagactggaagccaggaagcatctgccatctacttcactagtgggaccagtggtcttcccaagatggcagaacattcctactcgagcctgggcctcaaggccaagatggatgctggttggacaggcctgcaagcctctgatataatgtggaccatatcagacacaggttggatactgaacatcttgtgctcacttatggaaccttgggcattaggagcatgcacatttgttcatctcttgccaaagtttgacccactggttattctaaagacactctccagttatccaatcaagagtatgatgggtgcccccattgtttaccggatgttgctacagcaggatctttccagttacaagttcccccatctacagaactgcgtcactgtaggggagtcccttcttccagaaactctggagaactggagggcccagacaggactggacatccgagaatcctatggccagacagaaacgggattaacttgcatggtttccaagacaatgaaaatcaaaccaggatacatgggaacggctgcttcctgttatgatgtacagatcatagatgataagggcaacgtcctgccccccggcacagaaggagacattggcatcagggtcaaacccatcaggcctataggcatcttctctggctatgtggacaatcccgacaagacagcagccaacattcgaggagacttttggctccttggagaccggggaatcaaagatgaagatgggtatttccagtttatgggacgggcaaatgatatcattaactccagcgggtaccggattggaccctcggaggtagagaatgcactgatggagcaccctgctgtggttgagacggctgtgatcagcagcccagaccccgtccgaggagaggtggtgaaggcatttgtggtcctggcctcgcagttcctgtcccatgacccagaacagctcaccaaggagctgcagcagcatgtgaagtcagtgacagccccatacaagtacccaagaaagatagagtttgtcttgaacctgcccaagactgtcacagggaaaattcaacgagccaagcttcgagacaaggagtggaagatgtccggaaaagcccgtgcgcagtgagacatctaagagacattcatttggattcccctcttctttctctttcttttccctttgggcccttggccttcctatgattatatgagattctttatggaagaacatgaatataagttttgtcttgccttggttattagcacaaaactttaccatgttagatgttgaaagaagaaagggaaggaatgagagagagtgaaaaggagagggtaacagaaaaaaaggaaagaaaagtaagtcagggaaatattaaaactgcaagggaaagcaattgaaaaagaaataaagtagggaaagaaggagagaggaagcaagggaaggaggaagaaaggaaagaggagatgaaagggggagaaaagatagaagaaaaataattgaagggagaatcagaaaaataaagagcagaaaggaaagaaataaagagagaaagagaaagaagaaagagcaaaagaacacaagaaagaaagagagggagaaagagagggagaaagggagagaaaaaaattgtaaaaataaaaatagtaaaagaaactgataaagaaaagtaatggaagacaggaagaaaagaagagaaggaagtaaagaggaaaacttataaatattcccacagatagacaaagtcaagcataaaactggagcttgagaaggaaatgaaaggccgtggcaccttcttataccctagaagaagacctccatacaggaagacttgtgtgtggggttgggacattagaatcatccacaagtcaccccaaaccttggaactgtcagggtcagaggggaaccaccatttattaagcatttgccatgtgccaggcactaacccagatgcattataaataccacgttgtttcacctgtgtgtggcatctacagaccttagatcatagctgtgagaacaacgtaagcactgccaaagttatcagctacccatatctcatgtttttgatgttatctactcttcctagaatcaaatattaaaataattttaaaacc

SEQ ID NO: 104452 - DNA, 1835 bp, Homo sapiens
  Payload ID: 510
  Gene Symbol: ACSM2A
  Gene Name: acyl-CoA synthetase medium-chain family member 2A
  ENST ID: ENST00000417235
  CDS Start-End: 171-1667
gcttgagttactgtgctctcttccaaggctgtaggagttctggagctgctggctggagaggagggtggacgaagctctctctagaaagacatcctgagaggacttggcaggctggcaagcgactcccaagcccagccctgtggtgggtgaatgggaaggggaaggaattaatgtggaatttcagagaactgagtgaaaacagccagcaggcagccaacgtcctctcgggagcctgtggcctgcagcgtggggatcgtgtggcagtggtgctgccccgagtgcctgagtggtggctggtgatcctgggctgcattcgagcaggtctcatctttatgcctggaaccatccagatgaaatccactgacatactgtataggttgcagatgtctaaggccaaggctattgttgctggggatgaagtcatccaagaagtggacacagtggcatctgaatgtccttctctgagaattaagctactggtgtctgagaaaagctgtgatgggtggctgaacttcaagaaactactaaatgaggcatccaccactcatcactgtgtggagactggaagccaggaagcatctgccatctacttcactagtgggaccagtggtcttcccaagatggcagaacattcctactcgagcctgggcctcaaggccaagatggatgctggttggacaggcctgcaagcctctgatataatgtggaccatatcagacacaggttggatactgaacatcttgtgctcacttatggaaccttgggcattaggagcatgcacatttgttcatctcttgccaaagtttgacccactggttattctaaagacactctccagttatccaatcaagagtatgatgggtgcccccattgtttaccggatgttgctacagcaggatctttccagttacaagttcccccatctacagaactgcgtcactgtaggggagtcccttcttccagaaactctggagaactggagggcccagacaggactggacatccgagaatcctatggccagacagaaacgggattaacttgcatggtttccaagacaatgaaaatcaaaccaggatacatgggaacggctgcttcctgttatgatgtacagatcatagatgataagggcaacgtcctgccccccggcacagaaggagacattggcatcagggtcaaacccatcaggcctataggcatcttctctggctatgtggacaatcccgacaagacagcagccaacattcgaggagacttttggctccttggagaccggggaatcaaagatgaagatgggtatttccagtttatgggacgggcaaatgatatcattaactccagcgggtaccggattggaccctcggaggtagagaatgcactgatggagcaccctgctgtggttgagacggctgtgatcagcagcccagaccccgtccgaggagaggtggtgaaggcatttgtggtcctggcctcgcagttcctgtcccatgacccagaacagctcaccaaggagctgcagcagcatgtgaagtcagtgacagccccatacaagtacccaagaaagatagagtttgtcttgaacctgcccaagactgtcacagggaaaattcaacgagccaagcttcgagacaaggagtggaagatgtccggaaaagcccgtgcgcagtgagacatctaagagacattcatttggattcccctcttctttctctttcttttccctttgggcccttggccttcctatgattatatgagattctttatggaagaacatgaatataagttttgtcttgccttggttattagcacaaaactttaccatgttagatgttgaaag

SEQ ID NO: 104453 - DNA, 2837 bp, Homo sapiens
  Payload ID: 510
  Gene Symbol: ACSM2A
  Gene Name: acyl-CoA synthetase medium-chain family member 2A
  Uniprot ID: Q08AH3
  ENST ID: ENST00000573854
  CDS Start-End: 115-1848
gagttactgtgctctcttccaaggctgtaggagttctggagctgctggctggagaggagggtggacgaagctctctctagaaagacatcctgagaggacttggcaggcctgaatatgcattggctgcgaaaagttcagggactttgcaccctgtggggtactcagatgtccagccgcactctctacattaatagtaggcaactggtgtccctgcagtggggccaccaggaagtgccggccaagtttaactttgctagtgatgtgttggatcactgggctgacatggagaaggctggcaagcgactcccaagcccagccctgtggtgggtgaatgggaaggggaaggaattaatgtggaatttcagagaactgagtgaaaacagccagcaggcagccaacgtcctctcgggagcctgtggcctgcagcgtggggatcgtgtggcagtggtgctgccccgagtgcctgagtggtggctggtgatcctgggctgcattcgagcaggtctcatctttatgcctggaaccatccagatgaaatccactgacatactgtataggttgcagatgtctaaggccaaggctattgttgctggggatgaagtcatccaagaagtggacacagtggcatctgaatgtccttctctgagaattaagctactggtgtctgagaaaagctgtgatgggtggctgaacttcaagaaactactaaatgaggcatccaccactcatcactgtgtggagactggaagccaggaagcatctgccatctacttcactagtgggaccagtggtcttcccaagatggcagaacattcctactcgagcctgggcctcaaggccaagatggatgctggttggacaggcctgcaagcctctgatataatgtggaccatatcagacacaggttggatactgaacatcttgtgctcacttatggaaccttgggcattaggagcatgcacatttgttcatctcttgccaaagtttgacccactggttattctaaagacactctccagttatccaatcaagagtatgatgggtgcccccattgtttaccggatgttgctacagcaggatctttccagttacaagttcccccatctacagaactgcgtcactgtaggggagtcccttcttccagaaactctggagaactggagggcccagacaggactggacatccgagaatcctatggccagacagaaacgggattaacttgcatggtttccaagacaatgaaaatcaaaccaggatacatgggaacggctgcttcctgttatgatgtacagatcatagatgataagggcaacgtcctgccccccggcacagaaggagacattggcatcagggtcaaacccatcaggcctataggcatcttctctggctatgtggacaatcccgacaagacagcagccaacattcgaggagacttttggctccttggagaccggggaatcaaagatgaagatgggtatttccagtttatgggacgggcaaatgatatcattaactccagcgggtaccggattggaccctcggaggtagagaatgcactgatggagcaccctgctgtggttgagacggctgtgatcagcagcccagaccccgtccgaggagaggtggtgaaggcatttgtggtcctggcctcgcagttcctgtcccatgacccagaacagctcaccaaggagctgcagcagcatgtgaagtcagtgacagccccatacaagtacccaagaaagatagagtttgtcttgaacctgcccaagactgtcacagggaaaattcaacgagccaagcttcgagacaaggagtggaagatgtccggaaaagcccgtgcgcagtgagacatctaagagacattcatttggattcccctcttctttctctttcttttccctttgggcccttggccttcctatgattatatgagattctttatggaagaacatgaatataagttttgtcttgccttggttattagcacaaaactttaccatgttagatgttgaaagaagaaagggaaggaatgagagagagtgaaaaggagagggtaacagaaaaaaaggaaagaaaagtaagtcagggaaatattaaaactgcaagggaaagcaattgaaaaagaaataaagtagggaaagaaggagagaggaagcaagggaaggaggaagaaaggaaagaggagatgaaagggggagaaaagatagaagaaaaataattgaagggagaatcagaaaaataaagagcagaaaggaaagaaataaagagagaaagagaaagaagaaagagcaaaagaacacaagaaagaaagagagggagaaagagagggagaaagggagagaaaaaaattgtaaaaataaaaatagtaaaagaaactgataaagaaaagtaatggaagacaggaagaaaagaagagaaggaagtaaagaggaaaacttataaatattcccacagatagacaaagtcaagcataaaactggagcttgagaaggaaatgaaaggccgtggcaccttcttataccctagaagaagacctccatacaggaagacttgtgtgtggggttgggacattagaatcatccacaagtcaccccaaaccttggaactgtcagggtcagaggggaaccaccatttattaagcatttgccatgtgccaggcactaacccagatgcattataaataccacgttgtttcacctgtgtgtggcatctacagaccttagatcatagctgtgagaacaacgtaagcactgccaaagttatcagctacccatatctcatgtttttgatgttatctactcttcctagaatcaaatattaaaataattttaaaacc

SEQ ID NO: 104454 - DNA, 561 bp, Homo sapiens
  Payload ID: 510
  Gene Symbol: ACSM2A
  Gene Name: acyl-CoA synthetase medium-chain family member 2A
  ENST ID: ENST00000571894
  CDS Start-End: 208-561
ctggagctgctggctggagaggagggtggacgaagctctctctagaaagacatcctgagaggacttggcagatctttcttccgtactggatgcttcctgcacttgaacatcagactccaggttcttcagttttggaactcaaactggctctccttgcacctcagcctgcagatggcctattgtgggaccttgtgatcatgcctgaatatgcattggctgcgaaaagttcagggactttgcaccctgtggggtactcagatgtccagccgcactctctacattaatagtaggcaactggtgtccctgcagtggggccaccaggaagtgccggccaagtttaactttgctagtgatgtgttggatcactgggctgacatggagaaggctggcaagcgactcccaagcccagccctgtggtgggtgaatgggaaggggaaggaattaatgtggaatttcagagaactgagtgaaaacagccagcaggcagccaacgtcctctcgggagcctgtggcctgcagcgtggggatcgtgtggcagtggtgctgccccgagtgcctgag

SEQ ID NO: 104455 - DNA, 545 bp, Homo sapiens
  Payload ID: 510
  Gene Symbol: ACSM2A
  Gene Name: acyl-CoA synthetase medium-chain family member 2A
  ENST ID: ENST00000574251
  CDS Start-End: 361-545
ataaacttggctaggaggactgctgttaccctttgtaagactccaaagttatccactgtcaatgattagctgagctctctttctgacagtgcagggattctgaagctgtctgcttgagttactgtgctctcttccaaggctgtaggagttctggagctgctggctggagaggagggtggacgaagctctctctagaaagacatcctgagaggacttggcaggttcttcagttttggaactcaaactggctctccttgcacctcagcctgcagatggcctattgtgggaccttgtgatcatgctggcaagcgactcccaagcccagccctgtggtgggtgaatgggaaggggaaggaattaatgtggaatttcagagaactgagtgaaaacagccagcaggcagccaacgtcctctcgggagcctgtggcctgcagcgtggggatcgtgtggcagtggtgctgccccgagtgcctgagtggtggctggtgatcctgggctgcattcgagcaggtctcatctttatgcctggaaccatccagatgaa

SEQ ID NO: 104456 - DNA, 2322 bp, Homo sapiens
  Payload ID: 510
  Gene Symbol: ACSM2A
  Gene Name: acyl-CoA synthetase medium-chain family member 2A
  Uniprot ID: Q08AH3
  ENST ID: ENST00000575690
  CDS Start-End: 471-2204
gtaggagttctggagctgctggctggagaggagggtggacgaagctctctctagaaagacatcctgagaggacttggcagaaaaaaaggagacagaaatgtcagacactgtgatggttaatactgagtgtcaattgattgaattgaaggatacaaagtgttgatcctggatgtgtctgtgagggtgttgtcaaaagagattaacatttgagtcggtgggctgggagaggcagacccacccttaatctgggtaggaaccacctaatccagcatgactagaatataagcaggcagaaaaatatgaaaagagagactggcctagcttcccagcctagatctttcttccgtactggatgcttcctgcacttgaacatcagactccaggttcttcagttttggaactcaaactggctctccttgcacctcagcctgcagatggcctattgtgggaccttgtgatcatgcctgaatatgcattggctgcgaaaagttcagggactttgcaccctgtggggtactcagatgtccagccgcactctctacattaatagtaggcaactggtgtccctgcagtggggccaccaggaagtgccggccaagtttaactttgctagtgatgtgttggatcactgggctgacatggagaaggctggcaagcgactcccaagcccagccctgtggtgggtgaatgggaaggggaaggaattaatgtggaatttcagagaactgagtgaaaacagccagcaggcagccaacgtcctctcgggagcctgtggcctgcagcgtggggatcgtgtggcagtggtgctgccccgagtgcctgagtggtggctggtgatcctgggctgcattcgagcaggtctcatctttatgcctggaaccatccagatgaaatccactgacatactgtataggttgcagatgtctaaggccaaggctattgttgctggggatgaagtcatccaagaagtggacacagtggcatctgaatgtccttctctgagaattaagctactggtgtctgagaaaagctgtgatgggtggctgaacttcaagaaactactaaatgaggcatccaccactcatcactgtgtggagactggaagccaggaagcatctgccatctacttcactagtgggaccagtggtcttcccaagatggcagaacattcctactcgagcctgggcctcaaggccaagatggatgctggttggacaggcctgcaagcctctgatataatgtggaccatatcagacacaggttggatactgaacatcttgtgctcacttatggaaccttgggcattaggagcatgcacatttgttcatctcttgccaaagtttgacccactggttattctaaagacactctccagttatccaatcaagagtatgatgggtgcccccattgtttaccggatgttgctacagcaggatctttccagttacaagttcccccatctacagaactgcgtcactgtaggggagtcccttcttccagaaactctggagaactggagggcccagacaggactggacatccgagaatcctatggccagacagaaacgggattaacttgcatggtttccaagacaatgaaaatcaaaccaggatacatgggaacggctgcttcctgttatgatgtacagatcatagatgataagggcaacgtcctgccccccggcacagaaggagacattggcatcagggtcaaacccatcaggcctataggcatcttctctggctatgtggacaatcccgacaagacagcagccaacattcgaggagacttttggctccttggagaccggggaatcaaagatgaagatgggtatttccagtttatgggacgggcaaatgatatcattaactccagcgggtaccggattggaccctcggaggtagagaatgcactgatggagcaccctgctgtggttgagacggctgtgatcagcagcccagaccccgtccgaggagaggtggtgaaggcatttgtggtcctggcctcgcagttcctgtcccatgacccagaacagctcaccaaggagctgcagcagcatgtgaagtcagtgacagccccatacaagtacccaagaaagatagagtttgtcttgaacctgcccaagactgtcacagggaaaattcaacgagccaagcttcgagacaaggagtggaagatgtccggaaaagcccgtgcgcagtgagacatctaagagacattcatttggattcccctcttctttctctttcttttccctttgggcccttggccttcctatgattatatgagattctttatggaagaacatgaatataagtttt

SEQ ID NO: 104457 - DNA, 1214 bp, Homo sapiens
  Payload ID: 510
  Gene Symbol: ACSM2A
  Gene Name: acyl-CoA synthetase medium-chain family member 2A
  ENST ID: ENST00000574692
  CDS Start-End: 84-710
agttctggagctgctggctggagaggagggtggacgaagctctctctagaaagacatcctgagaggacttggcaggcctgaatatgcattggctgcgaaaagttcagggactttgcaccctgtggggtactcagatgtccagccgcactctctacattaatagtaggcaactggtgtccctgcagtggggccaccaggaagtgccggccaagtttaactttgctagtgatgtgttggatcactgggctgacatggagaaggctggcaagcgactcccaagcccagccctgtggtgggtgaatgggaaggggaaggaattaatgtggaatttcagagaactgagtgaaaacagccagcaggcagccaacgtcctctcgggagcctgtggcctgcagcgtggggatcgtgtggcagtggtgctgccccgagtgcctgagtggtggctggtgatcctgggctgcattcgagcaggtctcatctttatgcctggaaccatccagatgaaatccactgacatactgtataggttgcagatgtctaaggccaaggctattgttgctggggatgaagtcatccaagaagtggacacagtggcatctgaatgtccttctctgagaattaagctactggtgtctgagaaaagctgtgatgggtggctgaacttcaagaaactactaaaatataaagtcagacacagagacgttaaataagtagtttaaggttgcattgataacaaagtgtgaaacttcagtagttttcaaacccaactctgattgactcagactcccatgatcttaatcactcagcagcctctcttgtgagtgaggcatccaccactcatcactgtgtggagactggaagccaggaagcatctgccatctacttcactagtgggaccagtggtcttcccaagatggcagaacattcctactcgagcctgggcctcaaggccaagatggatgctggttggacaggcctgcaagcctctgatataatgtggaccatatcagacacaggttggatactgaacatcttgtgctcacttatggaaccttgggcattaggagcatgcacatttgttcatctcttgccaaagtttgacccactggttattctaaagacactctccagttatccaatcaagagtatgatgggtgcccccattgtttaccggatgttgctacagcaggatctttccaggtgatggggctttg

SEQ ID NO: 104458 - DNA, 556 bp, Homo sapiens
  Payload ID: 510
  Gene Symbol: ACSM2A
  Gene Name: acyl-CoA synthetase medium-chain family member 2A
  ENST ID: ENST00000576361
  CDS Start-End: 240-556
ctctttctgacagtgcagggattctgaagctgtctgcttgagttactgtgctctcttccaaggctgtaggagttctggagctgctggctggagaggagggtggacgaagctctctctagaaagacatcctgagaggacttggcagactccaggttcttcagttttggaactcaaactggctctccttgcacctcagcctgcagatggcctattgtgggaccttgtgatcatgcctgaatatgcattggctgcgaaaagttcagggactttgcaccctgtggggtactcagatgtccagccgcactctctacattaatagtaggcaactggtgtccctgcagtggggccaccaggaagtgccggccaagtttaactttgctagtgatgtgttggatcactgggctgacatggagaaggctggcaagcgactcccaagcccagccctgtggtgggtgaatgggaaggggaaggaattaatgtggaatttcagagaactgagtgaaaacagccagcaggcagccaacgtcctctcgggagcctgtggcctgcagcgtgg

SEQ ID NO: 104459 - DNA, 2935 bp, Homo sapiens
  Payload ID: 511
  Gene Symbol: ACSM2B
  Gene Name: acyl-CoA synthetase medium-chain family member 2B
  Uniprot ID: Q68CK6
  ENST ID: ENST00000329697
  CDS Start-End: 170-1903
aatgattagctgagctctctttccgacagtgcagggattctgaagctgtctgcttgagttactgtgctctcttccaaggctgtaggagttctggagctgctggctggagaggagggtggacgaagctctctccagaaagacatcctgagaggacttggcaggcctgaacatgcattggctgcgaaaagttcagggactttgcaccctgtggggtactcagatgtccagccgcactctctacattaatagtaggcaactggtgtccctgcagtggggccaccaggaagtgccggccaagtttaactttgctagtgatgtgttggatcactgggctgacatggagaaggctggcaagcgactcccaagcccagccctgtggtgggtgaatgggaaggggaaggaattaatgtggaatttcagagaactgagtgaaaacagccagcaggcagccaacatcctctcgggagcctgtggcctgcagcgtggggatcgtgtggcagtgatgctgccccgagtgcctgagtggtggctggtgatcctgggctgcattcgagcaggtctcatctttatgcctggaaccatccagatgaaatccactgacatactgtataggttgcagatgtctaaggccaaggctattgttgctggggatgaagtcatccaagaagtggacacagtggcatctgaatgtccttctctgagaattaagctactggtgtctgagaaaagctgcgatgggtggctgaacttcaagaaactactaaatgaggcatccaccactcatcactgtgtggagactggaagccaggaagcatctgccatctacttcactagtgggaccagtggtcttcccaagatggcagaacattcctactcgagcctgggcctcaaggccaagatggatgctggttggacaggcctgcaagcctctgatataatgtggaccatatcagacacaggttggatactgaacatcttgggctcacttttggaatcttggacattaggagcatgcacatttgttcatctcttgccaaagtttgacccactggttattctaaagacactctccagttatccaatcaagagtatgatgggtgcccctattgtttaccggatgttgctacagcaggatctttccagttacaagttcccccatctacagaactgcctcgctggaggggagtcccttcttccagaaactctggagaactggagggcccagacaggactggacatccgagaattctatggccagacagaaacgggattaacttgcatggtttccaagacaatgaaaatcaaaccaggatacatgggaacggctgcttcctgttatgatgtacaggttatagatgataagggcaacgtcctgccccccggcacagaaggagacattggcatcagggtcaaacccatcaggcctataggcatcttctctggctatgtggaaaatcccgacaagacagcagccaacattcgaggagacttttggctccttggagaccggggaatcaaagatgaagatgggtatttccagtttatgggacgggcagatgatatcattaactccagcgggtaccggattggaccctcggaggtagagaatgcactgatgaagcaccctgctgtggttgagacggctgtgatcagcagcccagaccccgtccgaggagaggtggtgaaggcatttgtgatcctggcctcgcagttcctatcccatgacccagaacagctcaccaaggagctgcagcagcatgtgaagtcagtgacagccccatacaagtacccaagaaagatagagtttgtcttgaacctgcccaagactgtcacagggaaaattcaacgaaccaaacttcgagacaaggagtggaagatgtccggaaaagcccgtgcgcagtgaggcgtctaggagacattcatttggattcccctcttctttctctttcttttccctttgggcccttggccttactatgatgatatgagattctttatgaaagaacatgaatgtaagttttgtcttgccctggttattagcacaaaacattactatgttagatattgaaataagaaagggaaggaatgagagagagtgaaaaggagagggtaacagaaaaagaggaaagaaaagtaagtcagggaaatgttaaaaactgcaagagaaagcaattgaaaaagaaataaagtagggagggaaggcgagaggaagcaagggaaggaggaagaaaggaaagaggagatgaaagggggagaaaagatagaagaaaaataattgaagggagaatcagaaaaataaagagaagaaaggaaagaaataaagagagaaagagaaagaagaaagagcaaaagaacacaagaaagaaagagagggagaaagagagggagaaagggagagaaaaaaattgtaaaaataaaaatagtaaaagaaactgataaagaaaagtcatggaagacaggaagaaaggaagagagggaagtaaagaggaaaacctataaatattcccacagatagacaaagtcaagcataaaactggagcttgagaaggaaatgaaaggaaaagaagtggtactttcttttaccctaggagaagacctccatacaggaagacttgtgtgtggggctgggacattagaatcatccgcaagtcactccaaaccttgaaactgtcagggtcagaggggaaccaccatttattaagcatttgccatgtgccaggcactgacccagacacattataaataccacattgtttcacctgtgtgtggcatctacagaccttagatcatagctgtgagaacaaagtaagcactgccaaagttatcagctacccatacctcatgtttttggtgttatctactcttcctagaatcaaatattaaaataattttaaaaccaagatcctgacaatagtctttaggaaaaacaaaaaaa

SEQ ID NO: 104460 - DNA, 2740 bp, Homo sapiens
  Payload ID: 511
  Gene Symbol: ACSM2B
  Gene Name: acyl-CoA synthetase medium-chain family member 2B
  Uniprot ID: Q68CK6
  ENST ID: ENST00000414188
  CDS Start-End: 12-1745
caggcctgaacatgcattggctgcgaaaagttcagggactttgcaccctgtggggtactcagatgtccagccgcactctctacattaatagtaggcaactggtgtccctgcagtggggccaccaggaagtgccggccaagtttaactttgctagtgatgtgttggatcactgggctgacatggagaaggctggcaagcgactcccaagcccagccctgtggtgggtgaatgggaaggggaaggaattaatgtggaatttcagagaactgagtgaaaacagccagcaggcagccaacatcctctcgggagcctgtggcctgcagcgtggggatcgtgtggcagtgatgctgccccgagtgcctgagtggtggctggtgatcctgggctgcattcgagcaggtctcatctttatgcctggaaccatccagatgaaatccactgacatactgtataggttgcagatgtctaaggccaaggctattgttgctggggatgaagtcatccaagaagtggacacagtggcatctgaatgtccttctctgagaattaagctactggtgtctgagaaaagctgcgatgggtggctgaacttcaagaaactactaaatgaggcatccaccactcatcactgtgtggagactggaagccaggaagcatctgccatctacttcactagtgggaccagtggtcttcccaagatggcagaacattcctactcgagcctgggcctcaaggccaagatggatgctggttggacaggcctgcaagcctctgatataatgtggaccatatcagacacaggttggatactgaacatcttgggctcacttttggaatcttggacattaggagcatgcacatttgttcatctcttgccaaagtttgacccactggttattctaaagacactctccagttatccaatcaagagtatgatgggtgcccctattgtttaccggatgttgctacagcaggatctttccagttacaagttcccccatctacagaactgcctcgctggaggggagtcccttcttccagaaactctggagaactggagggcccagacaggactggacatccgagaattctatggccagacagaaacgggattaacttgcatggtttccaagacaatgaaaatcaaaccaggatacatgggaacggctgcttcctgttatgatgtacaggttatagatgataagggcaacgtcctgccccccggcacagaaggagacattggcatcagggtcaaacccatcaggcctataggcatcttctctggctatgtggaaaatcccgacaagacagcagccaacattcgaggagacttttggctccttggagaccggggaatcaaagatgaagatgggtatttccagtttatgggacgggcagatgatatcattaactccagcgggtaccggattggaccctcggaggtagagaatgcactgatgaagcaccctgctgtggttgagacggctgtgatcagcagcccagaccccgtccgaggagaggtggtgaaggcatttgtgatcctggcctcgcagttcctatcccatgacccagaacagctcaccaaggagctgcagcagcatgtgaagtcagtgacagccccatacaagtacccaagaaagatagagtttgtcttgaacctgcccaagactgtcacagggaaaattcaacgaaccaaacttcgagacaaggagtggaagatgtccggaaaagcccgtgcgcagtgaggcgtctaggagacattcatttggattcccctcttctttctctttcttttccctttgggcccttggccttactatgatgatatgagattctttatgaaagaacatgaatgtaagttttgtcttgccctggttattagcacaaaacattactatgttagatattgaaataagaaagggaaggaatgagagagagtgaaaaggagagggtaacagaaaaagaggaaagaaaagtaagtcagggaaatgttaaaaactgcaagagaaagcaattgaaaaagaaataaagtagggagggaaggcgagaggaagcaagggaaggaggaagaaaggaaagaggagatgaaagggggagaaaagatagaagaaaaataattgaagggagaatcagaaaaataaagagaagaaaggaaagaaataaagagagaaagagaaagaagaaagagcaaaagaacacaagaaagaaagagagggagaaagagagggagaaagggagagaaaaaaattgtaaaaataaaaatagtaaaagaaactgataaagaaaagtcatggaagacaggaagaaaggaagagagggaagtaaagaggaaaacctataaatattcccacagatagacaaagtcaagcataaaactggagcttgagaaggaaatgaaaggaaaagaagtggtactttcttttaccctaggagaagacctccatacaggaagacttgtgtgtggggctgggacattagaatcatccgcaagtcactccaaaccttgaaactgtcagggtcagaggggaaccaccatttattaagcatttgccatgtgccaggcactgacccagacacattataaataccacattgtttcacctgtgtgtggcatctacagaccttagatcatagctgtgagaacaaagtaagcactgccaaagttatcagctacccatacctcatgtttttggtgttatctactcttcctagaatcaaatattaaaataattttaaaacc

SEQ ID NO: 104461 - DNA, 561 bp, Homo sapiens
  Payload ID: 511
  Gene Symbol: ACSM2B
  Gene Name: acyl-CoA synthetase medium-chain family member 2B
  ENST ID: ENST00000566384
  CDS Start-End: 208-561
ctggagctgctggctggagaggagggtggacgaagctctctccagaaagacatcctgagaggacttggcagatctttcttccgtactggatgcttcctgcccttgaacatcagactccaggttcttcagttttggaactcaaactggctctccttgcacctcagcctgcagatggcctattgtgggaccttgtgatcatgcctgaacatgcattggctgcgaaaagttcagggactttgcaccctgtggggtactcagatgtccagccgcactctctacattaatagtaggcaactggtgtccctgcagtggggccaccaggaagtgccggccaagtttaactttgctagtgatgtgttggatcactgggctgacatggagaaggctggcaagcgactcccaagcccagccctgtggtgggtgaatgggaaggggaaggaattaatgtggaatttcagagaactgagtgaaaacagccagcaggcagccaacatcctctcgggagcctgtggcctgcagcgtggggatcgtgtggcagtgatgctgccccgagtgcctgag

SEQ ID NO: 104462 - DNA, 1214 bp, Homo sapiens
  Payload ID: 511
  Gene Symbol: ACSM2B
  Gene Name: acyl-CoA synthetase medium-chain family member 2B
  ENST ID: ENST00000569327
  CDS Start-End: 84-710
agttctggagctgctggctggagaggagggtggacgaagctctctccagaaagacatcctgagaggacttggcaggcctgaacatgcattggctgcgaaaagttcagggactttgcaccctgtggggtactcagatgtccagccgcactctctacattaatagtaggcaactggtgtccctgcagtggggccaccaggaagtgccggccaagtttaactttgctagtgatgtgttggatcactgggctgacatggagaaggctggcaagcgactcccaagcccagccctgtggtgggtgaatgggaaggggaaggaattaatgtggaatttcagagaactgagtgaaaacagccagcaggcagccaacatcctctcgggagcctgtggcctgcagcgtggggatcgtgtggcagtgatgctgccccgagtgcctgagtggtggctggtgatcctgggctgcattcgagcaggtctcatctttatgcctggaaccatccagatgaaatccactgacatactgtataggttgcagatgtctaaggccaaggctattgttgctggggatgaagtcatccaagaagtggacacagtggcatctgaatgtccttctctgagaattaagctactggtgtctgagaaaagctgcgatgggtggctgaacttcaagaaactactaaaatataaagtgagacacagagaagttaaataagtagtttaaggttgcattgataacaaagtgccaaacttgagtagttttcaaacccaactctgattgactcaggctcccatgatcttaatcactcagcagcctctcttgtgagtgaggcatccaccactcatcactgtgtggagactggaagccaggaagcatctgccatctacttcactagtgggaccagtggtcttcccaagatggcagaacattcctactcgagcctgggcctcaaggccaagatggatgctggttggacaggcctgcaagcctctgatataatgtggaccatatcagacacaggttggatactgaacatcttgggctcacttttggaatcttggacattaggagcatgcacatttgttcatctcttgccaaagtttgacccactggttattctaaagacactctccagttatccaatcaagagtatgatgggtgcccctattgtttaccggatgttgctacagcaggatctttccaggtgatggggctttg

SEQ ID NO: 104463 - DNA, 2322 bp, Homo sapiens
  Payload ID: 511
  Gene Symbol: ACSM2B
  Gene Name: acyl-CoA synthetase medium-chain family member 2B
  Uniprot ID: Q68CK6
  ENST ID: ENST00000565232
  CDS Start-End: 471-2204
gtaggagttctggagctgctggctggagaggagggtggacgaagctctctccagaaagacatcctgagaggacttggcagaaaaaaaggagacagaaatgtcagacactgtgatggttaatactgagtgtcaattgattgaattgaaggatacaaagtgttgatcctgggtgtgtctgtgagggtgttgtcaaaagagattaacatttgagtcggtgggctgggagaggcagacccacccttaatctgggtaggcaccacctaatccagcatgactagaatataaggaggcagaaaaatatgaaaagagagactggcctagcttcccagcctagatctttcttccgtactggatgcttcctgcccttgaacatcagactccaggttcttcagttttggaactcaaactggctctccttgcacctcagcctgcagatggcctattgtgggaccttgtgatcatgcctgaacatgcattggctgcgaaaagttcagggactttgcaccctgtggggtactcagatgtccagccgcactctctacattaatagtaggcaactggtgtccctgcagtggggccaccaggaagtgccggccaagtttaactttgctagtgatgtgttggatcactgggctgacatggagaaggctggcaagcgactcccaagcccagccctgtggtgggtgaatgggaaggggaaggaattaatgtggaatttcagagaactgagtgaaaacagccagcaggcagccaacatcctctcgggagcctgtggcctgcagcgtggggatcgtgtggcagtgatgctgccccgagtgcctgagtggtggctggtgatcctgggctgcattcgagcaggtctcatctttatgcctggaaccatccagatgaaatccactgacatactgtataggttgcagatgtctaaggccaaggctattgttgctggggatgaagtcatccaagaagtggacacagtggcatctgaatgtccttctctgagaattaagctactggtgtctgagaaaagctgcgatgggtggctgaacttcaagaaactactaaatgaggcatccaccactcatcactgtgtggagactggaagccaggaagcatctgccatctacttcactagtgggaccagtggtcttcccaagatggcagaacattcctactcgagcctgggcctcaaggccaagatggatgctggttggacaggcctgcaagcctctgatataatgtggaccatatcagacacaggttggatactgaacatcttgggctcacttttggaatcttggacattaggagcatgcacatttgttcatctcttgccaaagtttgacccactggttattctaaagacactctccagttatccaatcaagagtatgatgggtgcccctattgtttaccggatgttgctacagcaggatctttccagttacaagttcccccatctacagaactgcctcgctggaggggagtcccttcttccagaaactctggagaactggagggcccagacaggactggacatccgagaattctatggccagacagaaacgggattaacttgcatggtttccaagacaatgaaaatcaaaccaggatacatgggaacggctgcttcctgttatgatgtacaggttatagatgataagggcaacgtcctgccccccggcacagaaggagacattggcatcagggtcaaacccatcaggcctataggcatcttctctggctatgtggaaaatcccgacaagacagcagccaacattcgaggagacttttggctccttggagaccggggaatcaaagatgaagatgggtatttccagtttatgggacgggcagatgatatcattaactccagcgggtaccggattggaccctcggaggtagagaatgcactgatgaagcaccctgctgtggttgagacggctgtgatcagcagcccagaccccgtccgaggagaggtggtgaaggcatttgtgatcctggcctcgcagttcctatcccatgacccagaacagctcaccaaggagctgcagcagcatgtgaagtcagtgacagccccatacaagtacccaagaaagatagagtttgtcttgaacctgcccaagactgtcacagggaaaattcaacgaaccaaacttcgagacaaggagtggaagatgtccggaaaagcccgtgcgcagtgaggcgtctaggagacattcatttggattcccctcttctttctctttcttttccctttgggcccttggccttactatgatgatatgagattctttatgaaagaacatgaatgtaagtttt

SEQ ID NO: 104464 - DNA, 405 bp, Homo sapiens
  Payload ID: 511
  Gene Symbol: ACSM2B
  Gene Name: acyl-CoA synthetase medium-chain family member 2B
  ENST ID: ENST00000568098
  CDS Start-End: 1-332
tctctggctatgtggaaaatcccgacaagacagcagccaacattcgaggagacttttggctccttggagaccggggaatcaaagatgaagatgggtatttccagtttatgggacgggcatttgtgatcctggcctcgcagttcctatcccatgacccagaacagctcaccaaggagctgcagcagcatgtgaagtcagtgacagccccatacaagtacccaagaaagatagagtttgtcttgaacctgcccaagactgtcacagggaaaattcaacgaaccaaacttcgagacaaggagtggaagatgtccggaaaagcccgtgcgcagtgaggcgtctaggagacattcatttggattcccctcttctttctctttcttttccctttgggcccttggccttact

SEQ ID NO: 104465 - DNA, 545 bp, Homo sapiens
  Payload ID: 511
  Gene Symbol: ACSM2B
  Gene Name: acyl-CoA synthetase medium-chain family member 2B
  ENST ID: ENST00000568882
  CDS Start-End: 361-545
ataaacttggctaggaggactgctgttaccctttgtaagactccaaagttatccactgtcaatgattagctgagctctctttccgacagtgcagggattctgaagctgtctgcttgagttactgtgctctcttccaaggctgtaggagttctggagctgctggctggagaggagggtggacgaagctctctccagaaagacatcctgagaggacttggcaggttcttcagttttggaactcaaactggctctccttgcacctcagcctgcagatggcctattgtgggaccttgtgatcatgctggcaagcgactcccaagcccagccctgtggtgggtgaatgggaaggggaaggaattaatgtggaatttcagagaactgagtgaaaacagccagcaggcagccaacatcctctcgggagcctgtggcctgcagcgtggggatcgtgtggcagtgatgctgccccgagtgcctgagtggtggctggtgatcctgggctgcattcgagcaggtctcatctttatgcctggaaccatccagatgaa

SEQ ID NO: 104466 - DNA, 556 bp, Homo sapiens
  Payload ID: 511
  Gene Symbol: ACSM2B
  Gene Name: acyl-CoA synthetase medium-chain family member 2B
  ENST ID: ENST00000569344
  CDS Start-End: 240-556
ctctttccgacagtgcagggattctgaagctgtctgcttgagttactgtgctctcttccaaggctgtaggagttctggagctgctggctggagaggagggtggacgaagctctctccagaaagacatcctgagaggacttggcagactccaggttcttcagttttggaactcaaactggctctccttgcacctcagcctgcagatggcctattgtgggaccttgtgatcatgcctgaacatgcattggctgcgaaaagttcagggactttgcaccctgtggggtactcagatgtccagccgcactctctacattaatagtaggcaactggtgtccctgcagtggggccaccaggaagtgccggccaagtttaactttgctagtgatgtgttggatcactgggctgacatggagaaggctggcaagcgactcccaagcccagccctgtggtgggtgaatgggaaggggaaggaattaatgtggaatttcagagaactgagtgaaaacagccagcaggcagccaacatcctctcgggagcctgtggcctgcagcgtgg

SEQ ID NO: 104467 - DNA, 592 bp, Homo sapiens
  Payload ID: 511
  Gene Symbol: ACSM2B
  Gene Name: acyl-CoA synthetase medium-chain family member 2B
  ENST ID: ENST00000569163
  CDS Start-End: 1-450
tggctgaacttcaagaaactactaaatgaggcatccaccactcatcactgtgtggagactggaagccaggaagcatctgccatctacttcactagtgggaccagtggtcttcccaagatggcagaacattcctactcgagcctgggcctcaaggccaagatggatgctggttggacaggcctgcaagcctctgatataatgtggaccatatcagacacaggttggatactgaacatcttgggctcacttttggaatcttggacattaggagcatgcacatttgttcatctcttgccaaagtttgacccactggttattctaaaggtctttagatcaactcaaccaattgtcaaccagaaaaaatttaaatctacctataagctggaagcccccgcttcaagttgccccacctttctggaccaaaccaatgtattttttaaatgtgtttgattgatgtcttatgtctccctaaaatgtataaaaccaaagtgcaccctgaccaccttgggcacgtgttctcaggacctcctgagggctctgtcatggccatggttactcatgtttggctcagaataaatctcttcaaatattt

SEQ ID NO: 104468 - DNA, 1988 bp, Homo sapiens
  Payload ID: 511
  Gene Symbol: ACSM2B
  Gene Name: acyl-CoA synthetase medium-chain family member 2B
  Uniprot ID: Q68CK6
  ENST ID: ENST00000567001
  CDS Start-End: 142-1875
gtgctctcttccaaggctgtaggagttctggagctgctggctggagaggagggtggacgaagctctctccagaaagacatcctgagaggacttggcagcctgcagatggcctattgtgggaccttgtgatcatgcctgaacatgcattggctgcgaaaagttcagggactttgcaccctgtggggtactcagatgtccagccgcactctctacattaatagtaggcaactggtgtccctgcagtggggccaccaggaagtgccggccaagtttaactttgctagtgatgtgttggatcactgggctgacatggagaaggctggcaagcgactcccaagcccagccctgtggtgggtgaatgggaaggggaaggaattaatgtggaatttcagagaactgagtgaaaacagccagcaggcagccaacatcctctcgggagcctgtggcctgcagcgtggggatcgtgtggcagtgatgctgccccgagtgcctgagtggtggctggtgatcctgggctgcattcgagcaggtctcatctttatgcctggaaccatccagatgaaatccactgacatactgtataggttgcagatgtctaaggccaaggctattgttgctggggatgaagtcatccaagaagtggacacagtggcatctgaatgtccttctctgagaattaagctactggtgtctgagaaaagctgcgatgggtggctgaacttcaagaaactactaaatgaggcatccaccactcatcactgtgtggagactggaagccaggaagcatctgccatctacttcactagtgggaccagtggtcttcccaagatggcagaacattcctactcgagcctgggcctcaaggccaagatggatgctggttggacaggcctgcaagcctctgatataatgtggaccatatcagacacaggttggatactgaacatcttgggctcacttttggaatcttggacattaggagcatgcacatttgttcatctcttgccaaagtttgacccactggttattctaaagacactctccagttatccaatcaagagtatgatgggtgcccctattgtttaccggatgttgctacagcaggatctttccagttacaagttcccccatctacagaactgcctcgctggaggggagtcccttcttccagaaactctggagaactggagggcccagacaggactggacatccgagaattctatggccagacagaaacgggattaacttgcatggtttccaagacaatgaaaatcaaaccaggatacatgggaacggctgcttcctgttatgatgtacaggttatagatgataagggcaacgtcctgccccccggcacagaaggagacattggcatcagggtcaaacccatcaggcctataggcatcttctctggctatgtggaaaatcccgacaagacagcagccaacattcgaggagacttttggctccttggagaccggggaatcaaagatgaagatgggtatttccagtttatgggacgggcagatgatatcattaactccagcgggtaccggattggaccctcggaggtagagaatgcactgatgaagcaccctgctgtggttgagacggctgtgatcagcagcccagaccccgtccgaggagaggtggtgaaggcatttgtgatcctggcctcgcagttcctatcccatgacccagaacagctcaccaaggagctgcagcagcatgtgaagtcagtgacagccccatacaagtacccaagaaagatagagtttgtcttgaacctgcccaagactgtcacagggaaaattcaacgaaccaaacttcgagacaaggagtggaagatgtccggaaaagcccgtgcgcagtgaggcgtctaggagacattcatttggattcccctcttctttctctttcttttccctttgggcccttggccttactatgatgatatgagattctttatgaaagaacatgaatgtaa

SEQ ID NO: 104469 - DNA, 1834 bp, Homo sapiens
  Payload ID: 511
  Gene Symbol: ACSM2B
  Gene Name: acyl-CoA synthetase medium-chain family member 2B
  ENST ID: ENST00000565322
  CDS Start-End: 171-1667
gcttgagttactgtgctctcttccaaggctgtaggagttctggagctgctggctggagaggagggtggacgaagctctctccagaaagacatcctgagaggacttggcaggctggcaagcgactcccaagcccagccctgtggtgggtgaatgggaaggggaaggaattaatgtggaatttcagagaactgagtgaaaacagccagcaggcagccaacatcctctcgggagcctgtggcctgcagcgtggggatcgtgtggcagtgatgctgccccgagtgcctgagtggtggctggtgatcctgggctgcattcgagcaggtctcatctttatgcctggaaccatccagatgaaatccactgacatactgtataggttgcagatgtctaaggccaaggctattgttgctggggatgaagtcatccaagaagtggacacagtggcatctgaatgtccttctctgagaattaagctactggtgtctgagaaaagctgcgatgggtggctgaacttcaagaaactactaaatgaggcatccaccactcatcactgtgtggagactggaagccaggaagcatctgccatctacttcactagtgggaccagtggtcttcccaagatggcagaacattcctactcgagcctgggcctcaaggccaagatggatgctggttggacaggcctgcaagcctctgatataatgtggaccatatcagacacaggttggatactgaacatcttgggctcacttttggaatcttggacattaggagcatgcacatttgttcatctcttgccaaagtttgacccactggttattctaaagacactctccagttatccaatcaagagtatgatgggtgcccctattgtttaccggatgttgctacagcaggatctttccagttacaagttcccccatctacagaactgcctcgctggaggggagtcccttcttccagaaactctggagaactggagggcccagacaggactggacatccgagaattctatggccagacagaaacgggattaacttgcatggtttccaagacaatgaaaatcaaaccaggatacatgggaacggctgcttcctgttatgatgtacaggttatagatgataagggcaacgtcctgccccccggcacagaaggagacattggcatcagggtcaaacccatcaggcctataggcatcttctctggctatgtggaaaatcccgacaagacagcagccaacattcgaggagacttttggctccttggagaccggggaatcaaagatgaagatgggtatttccagtttatgggacgggcagatgatatcattaactccagcgggtaccggattggaccctcggaggtagagaatgcactgatgaagcaccctgctgtggttgagacggctgtgatcagcagcccagaccccgtccgaggagaggtggtgaaggcatttgtgatcctggcctcgcagttcctatcccatgacccagaacagctcaccaaggagctgcagcagcatgtgaagtcagtgacagccccatacaagtacccaagaaagatagagtttgtcttgaacctgcccaagactgtcacagggaaaattcaacgaaccaaacttcgagacaaggagtggaagatgtccggaaaagcccgtgcgcagtgaggcgtctaggagacattcatttggattcccctcttctttctctttcttttccctttgggcccttggccttactatgatgatatgagattctttatgaaagaacatgaatgtaagttttgtcttgccctggttattagcacaaaacattactatgttagatattgaaa

SEQ ID NO: 104470 - DNA, 883 bp, Homo sapiens
  Payload ID: 511
  Gene Symbol: ACSM2B
  Gene Name: acyl-CoA synthetase medium-chain family member 2B
  ENST ID: ENST00000567288
  CDS Start-End: 1-603
gaacattcctactcgagcctgggcctcaaggccaagatggatgctggttggacaggcctgcaagcctctgatataatgtggaccatatcagacacaggttggatactgaacatcttgggctcacttttggaatcttggacattaggagcatgcacatttgttcatctcttgccaaagtttgacccactggttattctaaagacactctccagttatccaatcaagagtatgatgggtgcccctattgtttaccggatgttgctacagcaggatctttccagttacaagttcccccatctacagaactgcctcgctggaggggagtcccttcttccagaaactctggagaactggagggcccagacaggactggacatccgagaattctatggccagacagaaacgggattaacttgcatggtttccaagacaatgaaaatcaaaccaggatacatgggaacggctgcttcctgttatgatgtacaggttatagatgataagggcaacgtcctgccccccggcacagaaggagacattggcatcagggtcaaacccatcaggcctataggcatcttctctggctatgtggtatcatccccatgatctatgccgttgatcttctttagagccatgccaggcactttacgttgagacttcaccatctagttggaggaatccctatcttcagatcttgggaaggtaaagacagataatccttgaatctggccacctcacttgacaggtgaggatggtggagccagagattacaagacttgctcaagctcacaaccattagaaagtggacagagaagaacccaagggcatgccttctgatccctgagataattgactaataaactaaataaataataaatcaaataat

SEQ ID NO: 104471 - DNA, 2845 bp, Homo sapiens
  Payload ID: 512
  Gene Symbol: ACSM3
  Gene Name: acyl-CoA synthetase medium-chain family member 3
  Uniprot ID: Q53FZ2
  ENST ID: ENST00000289416
  CDS Start-End: 476-2236
ctttcctttcaatttcaaaactcctctatggcttcctccatctgttcttccttctgagaagtgctctctctgcccctttacagaactaaccacttcggcaactccttggacactttccttcttgttaataatttgctttctccgcccctcaaaagcttgctgtttctgtaaatcattacctgtaagaggaaccgctgggagtcctgtaaactttagcccagagcttggctcctcctccagaatgtctccaccaatcaaggaaagtgttttgggccagtcttgctcctccggattgtcagactgctcctccctcttctttagactgccacgaggaaaaagcagatgtgagaactcaaggttcagggctgctcttctaagaaacaagtctgccataatctccatctgtgttggaatctgttaactaatgaactggtctctgtgcaaatcctgagtgctaaagcttccaacaagactgatgctagctcgtgtcaccaggaagatgctacgtcatgccaagtgttttcagcgcctagcaatttttggttctgtgagggcactgcataaagataatagaacagcaacccctcagaatttctccaactatgaatccatgaaacaggacttcaaactggggattccagagtatttcaactttgctaaagatgtcctggaccaatggactgataaggaaaaggctggaaagaaaccttcaaatccagccttctggtggatcaacagaaatggagaagagatgcgatggagttttgaggaactgggatctctgtccagaaaatttgccaatatactttcagaagcctgttccctacaaagaggagatcgggtaattctgattctgcccagggtcccagagtggtggcttgcaaatgtggcctgtctgcgaacagggacagttttaattccaggaaccactcagctgacccagaaagacattctctacagactacaatcttcaaaagcaaactgcattatcaccaatgatgttttagccccagcagtagacgctgttgcatccaaatgtgaaaatctgcactccaagctgattgtatcagagaactccagagaggggtgggggaacctcaaggagttgatgaaacatgccagtgacagccacacctgtgtgaagacaaaacacaatgagatcatggccatattctttaccagtggaacaagtggatatccgaaaatgactgcacacacccacagcagttttggtttaggattatctgtaaatggaaggttctggctagatttgacaccctcagatgtgatgtggaatacctcagatacgggctgggcaaagtctgcatggagtagtgttttttctccgtggatccagggagcatgtgtattcacacaccatttaccccgttttgagccgacttctatcttgcaaacactctccaagtaccccatcacagtcttctgttcagcaccaactgtataccgaatgcttgtacagaatgatataaccagctataagtttaaaagcttaaagcactgtgtgagtgctggggaaccaattacccctgacgtgactgaaaaatggagaaacaagacgggcctggatatctacgaaggatatggacagactgaaacggtgctaatctgtggaaattttaagggaatgaaaattaaacctggctcaatgggaaaaccttctcctgctttcgatgttaagattgtagatgtaaatggcaatgttctacctcctggacaagaaggagatattggcattcaagttctacccaaccgaccatttggcctttttactcattacgtagataatccttcaaaaacagcttcaactctacgaggcaatttctatatcactggggacagaggatatatggataaagatgggtatttctggtttgttgcaagagcagatgatgtcatattatcctctggctatcgaattggaccatttgaggtagaaaatgccctgaatgaacacccttcagttgcagagtcagctgttgtcagcagcccagaccccatcagaggagaggtagtaaaggcttttgtcgttctaaatcctgattacaagtcacatgatcaagaacaactaataaaggagattcaggagcatgttaaaaaaactacagcaccttacaaatatcccagaaaggtagaatttattcaagagctgccaaagactatcagtgggaagacaaaaagaaatgaactgaggaagaaagaatggaagacaatttaaagttgtttcattaattaccatatctataaaacaaacatagtatctgtcaatctctagaaaccacaagatgatggagaggtcataaaaactgtggtagtatgcttagaaactgttgatttaaaatatcttgtggttatgatatcagaggctaaattttgaaataaaatatttggcaaattcctccacattagtgtcaatgttcctatcatttcttaatataaaaataataccatcaattgctgattaatttttaaatgtatagtatagaagcagtttctgaaccagatctctgctacataggttttcaaactttagttgactaattcttctgatatgttgatatacaaatcagaaccaatgttcaagcctgaaataaaactaaagaacttataaaagtttttagaaaaatataaaatatcagttagaagattatgataatctcaaagtacaagaatctacctgaaaatagactagggatttttattagtcacattttttgcaaataatttaaaaatagtttagacttgtttcaaggtctaactataaaagaaggatcatatactattgttgcttattatatgtaatctaataaatactgtttacaaaaga

SEQ ID NO: 104472 - DNA, 1517 bp, Homo sapiens
  Payload ID: 512
  Gene Symbol: ACSM3
  Gene Name: acyl-CoA synthetase medium-chain family member 3
  Uniprot ID: Q53FZ2
  ENST ID: ENST00000440284
  CDS Start-End: 138-1454
gcagatgtgagaactcaaggttcagggctgctcttctaagaaacaagtctgccataatctccatctgtgttggaatctgttaactaatgaactggtctctgtgcaaatcctgagtgctaaagcttccaacaagactgatgctagctcgtgtcaccaggaagatgctacgtcatgccaagtgttttcagcgcctagcaatttttggttctgtgagggcactgcataaagataatagaacagcaacccctcagaatttctccaactatgaatccatgaaacaggacttcaaactggggattccagagtatttcaactttgctaaagatgtcctggaccaatggactgataaggaaaaggctggaaagaaaccttcaaatccagccttctggtggatcaacagaaatggagaagagatgcgatggagttttgaggaactgggatctctgtccagaaaatttgccaatatactttcagaagcctgttccctacaaagaggagatcgggtaattctgattctgcccagggtcccagagtggtggcttgcaaatgtggcctgtctgcgaacagggacagttttaattccaggaaccactcagctgacccagaaagacattctctacagactacaatcttcaaaagcaaactgcattatcaccaatgatgttttagccccagcagtagacgctgttgcatccaaatgtgaaaatctgcactccaagctgattgtatcagagaactccagagaggggtgggggaacctcaaggagttgatgaaacatgccagtgacagccacacctgtgtgaagacaaaacacaatgagatcatggccatattctttaccagtggaacaagtggatatccgaaaatgactgcacacacccacagcagttttggtttaggattatctgtaaatggaaggttctggctagatttgacaccctcagatgtgatgtggaatacctcagatacgggctgggcaaagtctgcatggagtagtgttttttctccgtggatccagggagcatgtgtattcacacaccatttaccccgttttgagccgacttctatcttgcaaacactctccaagtaccccatcacagtcttctgttcagcaccaactgtataccgaatgcttgtacagaatgatataaccagctataagtttaaaagcttaaagcactgtgtgagtgctggggaaccaattacccctgacgtgactgaaaaatggagaaacaagacgggcctggatatctacgaaggatatggacagactgaaacggtgctaatctgtggaaattttaagggaatgaaaattaaacctggctcaatgggaaaaccttctcctgctttcgatgttaaggtttgcacatccccttccaggagaatgtttaacaacccaatctgtacactacctacctaccgcttacccccatataaactttctttgttatgatggtgattccattttacttccatgatactttaatttttataaatatgtgaaaatgattagaaa

SEQ ID NO: 104473 - DNA, 561 bp, Homo sapiens
  Payload ID: 512
  Gene Symbol: ACSM3
  Gene Name: acyl-CoA synthetase medium-chain family member 3
  ENST ID: ENST00000561584
  CDS Start-End: 405-561
atttctggtggcccatatggggattggagataacagatttactgtctcctttgcccatgggactagggccctggggctgtggaagacctggcatccaaggcatgccatgggggagtttcacccggatggagactggctctccccgcatcctgcccagcagtgcaactgaacctgagatggggctgcaggatgacaccagcacttcaggaaccgcggtgtcagagccagaggagaagagtggacaacccaactgcccaccacaggtccctagaagtacaggtcaagcctatgctggggagaggcaaacagtttcctggtacatagccgctaaaacccctggaatttctgaagtgatgaactggtctctgtgcaaatcctgagtgctaaagcttccaacaagactgatgctagctcgtgtcaccaggaagatgctacgtcatgccaagtgttttcagcgcctagcaatttttggttctgtgagggcactgcataaagataatagaacagcaacccctcagaatttctccaactatgaatccatgaaacaggacttcaaactgg

SEQ ID NO: 104474 - DNA, 1931 bp, Homo sapiens
  Payload ID: 512
  Gene Symbol: ACSM3
  Gene Name: acyl-CoA synthetase medium-chain family member 3
  ENST ID: ENST00000562251
  CDS Start-End: 1-1747
ctatgaatccatgaaacaggacttcaaactggggattccagagtatttcaactttgctaaagatgtcctggaccaatggactgataaggaaaaggctggaaagaaaccttcaaatccagccttctggtggatcaacagaaatggagaagagatgcgatggagttttgaggaactgggatctctgtccagaaaatttgccaatatactttcagaagcctgttccctacaaagaggagatcgggtaattctgattctgcccagggtcccagagtggtggcttgcaaatgtggcctgtctgcgaacagggacagttttaattccaggaaccactcagctgacccagaaagacattctctacagactacaatcttcaaaagcaaactgcattatcaccaatgatgttttagccccagcagtagacgctgttgcatccaaatgtgaaaatctgcactccaagctgattgtatcagagaactccagagaggggtgggggaacctcaaggagttgatgaaagtctttctctgtcacccaggctggagtacggtggctcgatcttggctcactgcaacctccacctccctggttcaagcgattctcagcctcctgagtagctgggattacagacatgccagtgacagccacacctgtgtgaagacaaaacacaatgagatcatggccatattctttaccagtggaacaagtggatatccgaaaatgactgcacacacccacagcagttttggtttaggattatctgtaaatggaaggttctggctagatttgacaccctcagatgtgatgtggaatacctcagatacgggctgggcaaagtctgcatggagtagtgttttttctccgtggatccagggagcatgtgtattcacacaccatttaccccgttttgagccgacttctatcttgcaaacactctccaagtaccccatcacagtcttctgttcagcaccaactgtataccgaatgcttgtacagaatgatataaccagctataagtttaaaagcttaaagcactgtgtgagtgctggggaaccaattacccctgacgtgactgaaaaatggagaaacaagacgggcctggatatctacgaaggatatggacagactgaaacggtgctaatctgtggaaattttaagggaatgaaaattaaacctggctcaatgggaaaaccttctcctgctttcgatgttaagattgtagatgtaaatggcaatgttctacctcctggacaagaaggagatattggcattcaagttctacccaaccgaccatttggcctttttactcattacgtagataatccttcaaaaacagcttcaactctacgaggcaatttctatatcactggggacagaggatatatggataaagatgggtatttctggtttgttgcaagagcagatgatgtcatattatcctctggctatcgaattggaccatttgaggtagaaaatgccctgaatgaacacccttcagttgcagagtcagctgttgtcagcagcccagaccccatcagaggagaggtagtaaaggcttttgtcgttctaaatcctgattacaagtcacatgatcaagaacaactaataaaggagattcaggagcatgttaaaaaaactacagcaccttacaaatatcccagaaaggtagaatttattcaagagctgccaaagactatcagtgggaagacaaaaagaaatgaactgaggaagaaagaatggaagacaatttaaagttgtttcattaattaccatatctataaaacaaacatagtatctgtcaatctctagaaaccacaagatgatggagaggtcataaaaactgtggtagtatgcttagaaactgttgatttaaaatatcttgtggttatgatatcagaggctaaattttgaaataaaatatttggcaaattcctcc

SEQ ID NO: 104475 - DNA, 558 bp, Homo sapiens
  Payload ID: 512
  Gene Symbol: ACSM3
  Gene Name: acyl-CoA synthetase medium-chain family member 3
  ENST ID: ENST00000568235
  CDS Start-End: 258-558
gttgaaaggctggcttagaggcaggctgagaggatggctggattagaggcttgctgagatgctgactggtgtcagagccagaggagaagagtggacaacccaactgcccaccacaggtccctagaagtacaggtcaagcctatgctggggagaggcaaacagtttcctggtacatagccgctaaaacccctggaatttctgaagtgatgaactggtctctgtgcaaatcctgagtgctaaagcttccaacaagactgatgctagctcgtgtcaccaggaagatgctacgtcatgccaagtgttttcagcgcctagcaatttttggttctgtgagggcactgcataaagataatagaacagcaacccctcagaatttctccaactatgaatccatgaaacaggacttcaaactggggattccagagtatttcaactttgctaaagatgtcctggaccaatggactgataaggaaaaggctggaaagaaaccttcaaatccagccttctggtggatcaacagaaatggagaagagatgcgatggagttttgaggaactgg

SEQ ID NO: 104476 - DNA, 756 bp, Homo sapiens
  Payload ID: 512
  Gene Symbol: ACSM3
  Gene Name: acyl-CoA synthetase medium-chain family member 3
  ENST ID: ENST00000564701
  CDS Start-End: 682-756
cctgcttctcagcttatgttagaagcctgggaaaggggagaagagtattttcaccccctttgctgtcagggttaccaagggaatcccctgtgaaggtgagaggtggttctaagaagagactggcatcacattccttggttgatattcccctctgcctggctgagtgagaaactgagccagaaagagaagtagagacagatggcaaggcagagacagtagagcaggggtggaggacagcagaggagaagcctgaagcataagatagggtgttgcaagtatatgtgcatatctggtacatcaaatggatcttcagaagttgcctgggcttgaccaggtagacccaacagacagaggatgaaagtcacacccagcatagtaagccctctaactccaatcttgtttcctcgccctcaacaatggaggctccagagtgtaaaagaaggagaagggaaaggtgtcagtgacaaataaggccatgtgtctctattccaggtgtcagagccagaggagaagagtggacaacccaactgcccaccacaggtccctagaagtacaggtcaagcctatgctggggagaggcaaacagtttcctggtacatagccgctaaaacccctggaatttctgaagtgatgaactggtctctgtgcaaatcctgagtgctaaagcttccaacaagactgatgctagctcgtgtcaccaggaagatgctacgtcatgccaagtgttttcagcgcctagcaatttttggttctgtg

SEQ ID NO: 104477 - DNA, 405 bp, Homo sapiens
  Payload ID: 512
  Gene Symbol: ACSM3
  Gene Name: acyl-CoA synthetase medium-chain family member 3
  ENST ID: ENST00000569141
  CDS Start-End: 1-405
aaaatggagaaacaagacgggcctggatatctacgaaggatatggacagactgaaacggtgctaatctgtggaaattttaagggaatgaaaattaaacctggctcaatgggaaaaccttctcctgctttcgatgttaagattgtagatgtaaatggcaatgttctacctcctggacaagaaggagatattggcattcaagttctacccaaccgaccatttggcctttttactcattacgtagtagtaaaggcttttgtcgttctaaatcctgattacaagtcacatgatcaagaacaactaataaaggagattcaggagcatgttaaaaaaactacagcaccttacaaatatcccagaaaggtagaatttattcaagagctgccaaagactatcagtgggaagac

SEQ ID NO: 104478 - DNA, 771 bp, Homo sapiens
  Payload ID: 512
  Gene Symbol: ACSM3
  Gene Name: acyl-CoA synthetase medium-chain family member 3
  ENST ID: ENST00000563914
  CDS Start-End: 1-706
cagcctcctgagtagctgggattacagacatgccagtgacagccacacctgtgtgaagacaaaacacaatgagatcatggccatattctttaccagtggaacaagtggatatccgaaaatgactgcacacacccacagcagttttggtttaggattatctgtaaatggaaggttctggctagatttgacaccctcagatgtgatgtggaatacctcagatacgggctgggcaaagtctgcatggagtagtgttttttctccgtggatccagggagcatgtgtattcacacaccatttaccccgttttgagccgacttctatcttgcaaacactctccaagtaccccatcacagtcttctgttcagcaccaactgtataccgaatgcttgtacagaatgatataaccagctataagtttaaaagcttaaagcactgtgtgagtgctggggaaccaattacccctgacgtgactgaaaaatggagaaacaagacgggcctggatatctacgaaggatatggacagactgaaacggtgctaatctgtggaaattttaagggaatgaaaattaaacctggctcaatgggaaaaccttctcctgctttcgatgttaaggtttgcacatccccttccaggagaatgtttaacaacccaatctgtacactacctacctaccgcttacccccatataaactttctttgttatgatggtgattccattttacttccatgatactttaatttttataaatatgtgaaaatgattagaaatg

SEQ ID NO: 104479 - DNA, 580 bp, Homo sapiens
  Payload ID: 512
  Gene Symbol: ACSM3
  Gene Name: acyl-CoA synthetase medium-chain family member 3
  ENST ID: ENST00000561795
  CDS Start-End: 106-580
actgcactccagcctgggtgacagaacaagactccatctcaaaaaaaagaccagatgaactggtctctgtgcaaatcctgagtgctaaagcttccaacaagactgatgctagctcgtgtcaccaggaagatgctacgtcatgccaagtgttttcagcgcctagcaatttttggttctgtgagggcactgcataaagataatagaacagcaacccctcagaatttctccaactatgaatccatgaaacaggacttcaaactggggattccagagtatttcaactttgctaaagatgtcctggaccaatggactgataaggaaaaggctggaaagaaaccttcaaatccagccttctggtggatcaacagaaatggagaagagatgcgatggagttttgaggaactgggatctctgtccagaaaatttgccaatatactttcagaagcctgttccctacaaagaggagatcgggtaattctgattctgcccagggtcccagagtggtggcttgcaaatgtggcctgtctgcgaacagggacagttttaattccaggaaccactcagctgacccagaaagaca

SEQ ID NO: 104480 - DNA, 2142 bp, Homo sapiens
  Payload ID: 513
  Gene Symbol: ACSM4
  Gene Name: acyl-CoA synthetase medium-chain family member 4
  Uniprot ID: P0C7M7
  ENST ID: ENST00000399422
  CDS Start-End: 49-1791
ctgtagtacttctgtgtccatagcagtagacaaagtcctttgggaaccatgaagatttttttccgctaccagacatttagattcatctggctcaccaagccacctggccggcgcttacacaaagatcaccagctttggacgcctctgactcttgctgactttgaagccataaatcgctgtaacaggccattgcctaaaaactttaactttgctgcagatgtgctggaccagtggtcccaaaaggagaagacaggggagagaccagctaacccagccctgtggtgggtgaatggcaaaggggatgaggtaaaatggagcttcagagaactgggctccttgtcccgaaaagctgccaacgtgctcaccaagccctgtggcctgcagagaggagaccgtttggccgtgattctgcccagaatccctgagtggtggctggtcaatgtagcttgcatacgaacagggatcatcttcatgccgggaacaatccagctgacagcaaaagacatcctctaccggctgcgagcatccaaggccaagtgcattgtggccagtgaggaggtggccccagcggtggagtccattgtattggagtgtcctgaccttaagacaaaactcctggtgtctccacaaagctggaatgggtggctcagcttccaggagttatttcaattcgcctctgaagagcacagctgtgtggaaacaggaagtcaagaaccaatgaccatttatttcaccagtgggaccacaggctttcctaaaatggcccagcactctcagagcagcctcggcattgggttcaccctctgcggaaggtattggctggacttgaagtcctcagatatcatatggaatatgtctgacacgggctgggtcaaggccgccattggcagtgtgttttcttcctggctgtgtggagcctgtgtttttgtgcatcgaatggcacagtttgacactgacaccttcctagacacacttactacttatcccatcacgaccctgtgcagtcctcccactgtgtaccggatgctcgtgcaaaaagaccttaagagatataaattcaagagtctgcggcactgcttgaccggaggggagccactcaacccagaagtgctggagcagtggagggtgcaaactgggctggagctatatgagggctatggacagacggaagtgggaatgatttgtgccaatcagaaaggccaagaaattaaaccaggttcaatggggaaaggaatgctgccctatgatgtccagattatagatgaaaatggcaatgttctaccacctggcaaagaaggggaaattgccctcagactcaaacctacacggcccttctgtttcttctctaaatatgtggacaatccacagaaaactgctgccacgataagaggagatttttatgtcactggagacagaggagtgatggacagtgatgggtatttctggtttgtcggcagagctgatgatgtcattatatcctctgggtaccgtattgggccatttgaagtggagagtgcactcattgagcatccagcagttgttgaatcggctgttgtcagtagtccagatcaaatccgcggagaggtggtgaaagcttttgttgtcttagctgcaccctttaagtcctacaacccagagaaattaactcttgaacttcaggatcatgtgaaaaaatcaactgcaccttacaaatatccaagaaaggtggaatttgttcaagaactcccaaagacaatcactgggaaaatcaaacgcaacgttttaagagaccaagaatggagaggaagatagtttgataacaaagctgaagggttaagcagtaatatggttgctttcttttagtatttgttccgataattcagcgactactctcttaaaatgtttaagatctttcctgcttgaaaactcaactgttgattttttggtttttacttagctaaaaagtttaaaagtaaataaaagcctcaaaaacgtatggatgaaaattgttataatgaccaaactgacaaaggtaatgatgatgatttgtagtgtttaaaatagcaggaataaaatgattgcttagaacaagaaagtgcacattgaatctgtatttcatttaccttgtgcctgattgattcaaaataaacatatatcctaaga

SEQ ID NO: 104481 - DNA, 2796 bp, Homo sapiens
  Payload ID: 514
  Gene Symbol: ACSM5
  Gene Name: acyl-CoA synthetase medium-chain family member 5
  Uniprot ID: Q6NUN0
  ENST ID: ENST00000331849
  CDS Start-End: 148-1887
gcatttggggctgaagttccctgtgggaggctgttttctgagggagctgagtgtttacagccactcagccctgctctgctcagctgaagcagaaaacagagaccttttgcattactttggttcaagagcaagacaggaggcgactgcatgagaccatggctgagacacctagtcctccaggcactgaggaactccagggcattctgtgggtctcatgggaagccagcacctctacctgttcctcagaagatcgtggccacctgggaagccatcagcctgggaaggcagctggtgcctgagtacttcaacttcgcccatgatgtgctggatgtgtggagtcggctggaagaggctggacaccgccccccaaatcctgccttctggtgggtcaatggcacaggagcagagatcaagtggagctttgaggagctggggaagcagtccaggaaggcagccaatgtgctggggggtgcatgcggcctgcagcctggggacagaatgatgctggtactcccacggctcccggagtggtggctggtcagtgtggcttgcatgcggacagggactgtgatgattccgggtgtgactcagctgacagagaaggacctcaagtaccggctgcaggcgtccagggccaagtccattatcaccagtgactccctagctccaagggtggatgccatcagtgccgaatgcccctccctccagaccaagctgctggtgtcagacagcagtcggccaggctggttgaacttcagggaactcctccgggaggcttctacagagcacaactgcatgaggacaaagagtcgagacccgctggccatctactttaccagcggaaccaccggggcccccaagatggtcgagcactcccagagcagctacggactgggttttgtggccagcggaagacggtgggtggccttgaccgaatctgacatcttctggaacacgactgacactggctgggtgaaggcagcctggactctcttctctgcctggcctaatggatcttgcatttttgtgcatgagctgccccgagttgatgccaaagttatcctgaatactctctccaaattcccgataaccaccctctgctgtgtcccaaccatctttcggctgcttgtgcaggaggatctgaccaggtaccagtttcagagcctgaggcactgtctgaccggaggagaggccctcaaccctgacgtgagggagaagtggaaacaccagactggtgtggagctgtacgaaggctatggccagtctgaaacggttgtcatctgtgccaatccaaaaggcatgaaaatcaagtctggatccatggggaaggcgtccccaccctacgatgtgcagattgtggatgatgagggcaacgtcctgcctcctggagaagaggggaatgttgccgtccgtatcagacccactcggcccttctgtttcttcaattgctatttggacaatcctgagaagacagctgcatcagaacaaggggacttttacatcacaggggaccgagctcgcatggacaaggatggctacttttggttcatgggaagaaacgacgatgtgatcaattcttcaagctaccggatcgggcctgttgaagtggaaagtgccctggcagagcatcctgctgtcctggagtcggctgtggtcagcagcccagaccccatcaggggagaggtggtaaaggcatttatagtccttactccagcctactcctctcatgacccagaggcactaacgcgggaactccaggagcatgtgaaaagggtgactgctccatacaaataccccaggaaggtggcctttgtttcagaactgccaaagacggtttctggaaagatccaaaggagtaaattgcgaagtcaggagtgggggaaatgaggtgcaccccaggaaggccccgtagacctccgaagactccacaagaaactaatggatcactggtcagtccccatggggagcatcatctcttcgaccctaaagatgtcaaaggtgtgcagcttccaaacggcatccccaggatcactgggcaatgctggaaagagcaaaagaatatcattggccctgatcacatagatgctgcgccgcctagcaaatgcttggtggttcgacttctccctctgtctgggggcaggctcagcatctgcccactggtctcactaagagctttcagatttccctccataggacaggttaccatagacttggggcacttgtgggtactcattttctgccagtgggaatgtaaaggcttcatcctttgtatgtaaccatttggcaaaagtatgcaggaacataaaataaaatatcctttagctcagaaattctatcttcgggagtcaccacaaaagaaaaaaatcaaaatgcagaaaatgtgtggtgcactaagatgatcacacagcattaaaactaaaaaaaaaaaagaaaaaattaacaattaacatccaaacaacaaggaaatgattaacaaaattgtagtagattaactcaattacatatgatgtagccactaaaatatttgagagcagtttagtatgtcttgggaaaagtgtaagctatattaattttaaaaatcagagcaaaaatattcatactggagaatcccaactctgaaaaataaagggaaaactgtggttaattgtaatcctcctggagattgaggagggagggagagaaaataatggatggtagtttttcttcttcctttttccattacatttctgtattttccaagtttttgtacgaagcacatacaactattttaatgaaaaagttatgttaaagaaagca

SEQ ID NO: 104482 - DNA, 1130 bp, Homo sapiens
  Payload ID: 514
  Gene Symbol: ACSM5
  Gene Name: acyl-CoA synthetase medium-chain family member 5
  Uniprot ID: Q6NUN0
  ENST ID: ENST00000575584
  CDS Start-End: 148-774
gcatttggggctgaagttccctgtgggaggctgttttctgagggagctgagtgtttacagccactcagccctgctctgctcagctgaagcagaaaacagagaccttttgcattactttggttcaagagcaagacaggaggcgactgcatgagaccatggctgagacacctagtcctccaggcactgaggaactccagggcattctgtgggtctcatgggaagccagcacctctacctgttcctcagaagatcgtggccacctgggaagccatcagcctgggaaggcagctggtgcctgagtacttcaacttcgcccatgatgtgctggatgtgtggagtcggctggaagaggctggacaccgccccccaaatcctgccttctggtgggtcaatggcacaggagcagagatcaagtggagctttgaggagctggggaagcagtccaggaaggcagccaatgtgctggggggtgcatgcggcctgcagcctggggacagaatgatgctggtactcccacggctcccggagtggtggctggtcagtgtggcttgcatgcggacagggactgtgatgattccgggtgtgactcagctgacagagaaggacctcaagtaccggctgcaggcgtccagggccaagtccattatcaccagtgactccctagctccaagggtggatgccatcagtgccgaatgcccctccctccagaccaagctgctggtgtcagacagcagtcggccaggctggttgaacttcagggaactcctccggtgaattggggctctccagaacagcagaaaaatgaagtcatttcccctttaagcaacaaaagatgaaatgcattgctgattccacacatagagagcgaatcagagaggagcactcccattggcagccaggctgacctgagcataatcctggtccctaccttaatgttcaaggtccctcattcagtcagtgctggatttgtcagcagcttttctgtgcttcatttgcttctataatgcggtggtagttattagagctaccattcagagtacatgaaataaccaatatggtgcatttagcacatagcaggtggtcagttaataataaactagtggccatgtattgggtacttagtgtatcgc

SEQ ID NO: 104483 - DNA, 457 bp, Homo sapiens
  Payload ID: 514
  Gene Symbol: ACSM5
  Gene Name: acyl-CoA synthetase medium-chain family member 5
  ENST ID: ENST00000573920
  CDS Start-End: 1-339
cacaactgcatgaggacaaagagtcgagacccgctggccatctactttaccagcggaaccaccggggcccccaagatggtcgagcactcccagagcagctacggactgggttttgtggccagcggaagacggtgggtggccttgaccgaatctgacatcttctggaacacgactgacactggctgggtgaaggcagcctggactctcttctctgcctggcctaatggatcttgcatttttgtgcatgagctgccccgagttgatgccaaagttatcctgaatgtaccagtttcagagcctgaggcactgtctgaccggaggagaggccctcaaccctgacgtgagggagaagtggaaacaccagactggtgtggagctgtacgaaggctatggccagtctgaaacggttgtcatctgtgccaatccaaaaggcatgaaaatcaagtctggatccatg

SEQ ID NO: 104484 - DNA, 856 bp, Homo sapiens
  Payload ID: 514
  Gene Symbol: ACSM5
  Gene Name: acyl-CoA synthetase medium-chain family member 5
  ENST ID: ENST00000575070
  CDS Start-End: 136-360
gaagttccctgtgggaggctgttttctgagggagctgagtgtttacagccactcagccctgctctgctcagctgaagcagaaaacagagaccttttgcattactttggttcaagagcaagacaggaggcgactgcatgagaccatggctgagacacctagtcctccaggcactgaggaactccagggcattctgtgggtctcatgggaagccagcacctctacctgttcctcagaagatcgtggccacctgggaagccatcagcctgggaaggcagctggtgcctgagtacttcaacttcgcccatgatgtgctggatgtgtggagtcggctggaagaggtgaagcctgttctgtcctagagtccatctggggcatctgaggctgccctcatgtaccacaatgagactcaaggctccaagcatgttgatgaggaaatttggacctgggaattttgctagttctaaaatgtaaactgttggcatttgagacttaggaaaaaattctgagtcagtgttgtgagccttagacatgcttgttccttctctgaagtgtcctgcattcttgagcccaaatcacacagtgagacagttatgtcccttccgattcccttccagttgttcatcaactgaaggaggaagttttgttttgctgctactctgtctttgatgtttttctctcactgtcacgcccttctcttctaaataaggaaagaaggccgggcgcggtggctcatgaccataatcccagcactttgggacaccgagaagggcagatcacctgaggtcaggagttcgagaccaccctcaccaacatggtgaaactccgtctctactaaaaataaaataaaaaaaaatt

SEQ ID NO: 104485 - DNA, 2307 bp, Homo sapiens
  Payload ID: 515
  Gene Symbol: ACSM6
  Gene Name: acyl-CoA synthetase medium-chain family member 6
  ENST ID: ENST00000327739
  CDS Start-End: 126-551
aactaaactataagaggtaagcagttctcagaggagacagaaggcaacagctctaccatcctccaaacatctgaagccccccatagaaactcctcttggaattggtggttccctgtctgacccaaatgctaggccgatttcaacccttctccttggtccggagtttcagactgggatttgaagcctgctgctatccaaaccaaaaatgtgctactcagaccatcagaccccctgactccaggtgcctagtccaagcagtttctcagaactttaattttgcaaaggatgtgttggatcagtggtcccagctggaaaaggacggactcagagggccttaccccgccctctggaaggttagtgccaaaggagaagaggacaaatggagctttgaaaggatgactcaactctccaagaaggccgccagcatcctctcagacacctgtgcccttagccatggagaccggctgatgataatcttgcccccaacacctgaagcctactggatctgcctggcctgtgaatcacctttgtgcctgggagcccccagctgactgccaagaaaattcgctatcaattacgcatgtctaaggcccagtgcattgtggctaatgaagctatggccccagttgtaaactctgccgtgtccgactgccccaccttgaaaaccaagctcctggtgtcagataagagctatgatgggtggttggatttcaagaagttgattcaagttgcccctccaaagcagacctacatgaggaccaaaagccaagatccaatggccatattcttcaccaagggtacaacaggagctcccaaaatggtcgagtattcccagtatggtttgggaatgggattcagccaggcttccagacggtggatggatctccagccaacagatgtcttgtggagtctgggtgatgcctttggtggatctttatccctgagcgctgtcttgggaacttggttccaaggagcctgtgtgtttctgtgtcacatgccaaccttctgccctgagactgttctaaatgtcctgtccagatttcccatcaccactctatctgcaaatccagagatgtaccaggaactgcttcagcacaagtgtttcaccagggtctactctgtgccacttccaaaacaataaaattgaagccaagctctctggggaagccattgccaccttatattgtccagattgtggatgaaaactcaaatctcctgcctccaggggaagaaggaaatattgcaatccgcataaaactaaaccaacctgcttctctgtactgtccacacatggtaagaaaattttcttctttcctaaatactttcattgttgctactaatcgtagtgccattattgttgagtactttatgatttgccaaatacttttgtcccaatttttaattttgcaaatttttgagtctccaaaaatgttaaatagtagcactcacctacattcacttcttattaagattttgccccatttacttcatatttgcacatttttgatgagacatttgggagtaaatgcagacattatgacactttgtccttaaatatttcagcagcatcctcctaataaggactttcttcttaaacatcagcaccatcacatctatgaaaattaaaaataattatttaatactatctaatatctagccaatacttagactttctcaattgtactcagatgtgttttataccttttgtaaatccagaattcaatcaaagttcatgcatttatttggttctcatatctctttagttgtttttatctataactgttccaccaccatgtttttcgtgacgtggacattttgaagaatagaggacggttgtgttaaaaaatgcctcactttctaggcttacatattgtttctttataatgagatccaggataaacatctttctcaagactattatgtagatgatgtatatttcttatttgcttatggggggaaacattaggttgtctcattttggatgctgatcattttgatcttttgattaaggaggtgagtgccatttccattgtaaaggtacattttcctctttgtaattagtaataatctgccgtgtaacaatttgagactctgtaaatatcctattctccaattaactttcacccaatcattttagcatccatagatgattcttttctttttggaaacaattattaaaataaagagtggctgggcacagtggctcatgcctgtaatctcaacactttgggaagctaagatggacagatcacttgagcccaggggttcaagactagcctgggcaacatggcaaaactccatctctac

SEQ ID NO: 104486 - DNA, 1712 bp, Homo sapiens
  Payload ID: 515
  Gene Symbol: ACSM6
  Gene Name: acyl-CoA synthetase medium-chain family member 6
  Uniprot ID: Q6P461
  ENST ID: ENST00000341686
  CDS Start-End: 126-1568
aactaaactataagaggtaagcagttctcagaggagacagaaggcaacagctctaccatcctccaaacatctgaagccccccatagaaactcctcttggaattggtggttccctgtctgacccaaatgctaggccgatttcaacccttctccttggtccggagtttcagactgggatttgaagcctgctgctatccaaaccaaaaatgtgctactcagaccatcagaccccctgactccaggtgcctagtccaagcagtttctcagaactttaattttgcaaaggatgtgttggatcagtggtcccagctggaaaaggacggactcagagggccttaccccgccctctggaaggttagtgccaaaggagaagaggacaaatggagctttgaaaggatgactcaactctccaagaaggccgccagcatcctctcagacacctgtgcccttagccatggagaccggctgatgataatcttgcccccaacacctgaagcctactggatctgcctggcctgtgtgcgcttgggaatcacctttgtgcctgggagcccccagctgactgccaagaaaattcgctatcaattacgcatgtctaaggcccagtgcattgtggctaatgaagctatggccccagttgtaaactctgccgtgtccgactgccccaccttgaaaaccaagctcctggtgtcagataagagctatgatgggtggttggatttcaagaagttgattcaagttgcccctccaaagcagacctacatgaggaccaaaagccaagatccaatggccatattcttcaccaagggtacaacaggagctcccaaaatggtcgagtattcccagtatggtttgggaatgggattcagccaggcttccagacggtggatggatctccagccaacagatgtcttgtggagtctgggtgatgcctttggtggatctttatccctgagcgctgtcttgggaacttggttccaaggagcctgtgtgtttctgtgtcacatgccaaccttctgccctgagactgttctaaatgtcctgtccagatttcccatcaccactctatctgcaaatccagagatgtaccaggaactgcttcagcacaagtgtttcaccagctacagattcaagagtctgaagcagtgtgtggctgcaggaggacccatcagccctggggtgattgaggactggaaacgcatcactaagttggacatctatgaaggctatgggcagacggaaactggtctactctgtgccacttccaaaacaataaaattgaagccaagctctctggggaagccattgccaccttatattgtccagattgtggatgaaaactcaaatctcctgcctccaggggaagaaggaaatattgcaatccgcataaaactaaaccaacctgcttctctgtactgtccacacatggtgagctgggaggaatatgcttcagcaagaggccacatgctttacctcacaggtgacagagggatcatggatgaagacggctacttctggtggtctggtagagttgatgatgttgccaatgcattgggtcagagattgtgaatgctttggttattgctattgagcctggggctgtgggagtttgaagaagactctggactgcttccaatacgtaggaattatatttctaaagtttagaaaatgcaaacaaccaaaaataaaaaaataaaactcatccataatctc

SEQ ID NO: 104487 - DNA, 1592 bp, Homo sapiens
  Payload ID: 515
  Gene Symbol: ACSM6
  Gene Name: acyl-CoA synthetase medium-chain family member 6
  Uniprot ID: Q6P461
  ENST ID: ENST00000394005
  CDS Start-End: 10-1452
ctgacccaaatgctaggccgatttcaacccttctccttggtccggagtttcagactgggatttgaagcctgctgctatccaaaccaaaaatgtgctactcagaccatcagaccccctgactccaggtgcctagtccaagcagtttctcagaactttaattttgcaaaggatgtgttggatcagtggtcccagctggaaaaggacggactcagagggccttaccccgccctctggaaggttagtgccaaaggagaagaggacaaatggagctttgaaaggatgactcaactctccaagaaggccgccagcatcctctcagacacctgtgcccttagccatggagaccggctgatgataatcttgcccccaacacctgaagcctactggatctgcctggcctgtgtgcgcttgggaatcacctttgtgcctgggagcccccagctgactgccaagaaaattcgctatcaattacgcatgtctaaggcccagtgcattgtggctaatgaagctatggccccagttgtaaactctgccgtgtccgactgccccaccttgaaaaccaagctcctggtgtcagataagagctatgatgggtggttggatttcaagaagttgattcaagttgcccctccaaagcagacctacatgaggaccaaaagccaagatccaatggccatattcttcaccaagggtacaacaggagctcccaaaatggtcgagtattcccagtatggtttgggaatgggattcagccaggcttccagacggtggatggatctccagccaacagatgtcttgtggagtctgggtgatgcctttggtggatctttatccctgagcgctgtcttgggaacttggttccaaggagcctgtgtgtttctgtgtcacatgccaaccttctgccctgagactgttctaaatgtcctgtccagatttcccatcaccactctatctgcaaatccagagatgtaccaggaactgcttcagcacaagtgtttcaccagctacagattcaagagtctgaagcagtgtgtggctgcaggaggacccatcagccctggggtgattgaggactggaaacgcatcactaagttggacatctatgaaggctatgggcagacggaaactggtctactctgtgccacttccaaaacaataaaattgaagccaagctctctggggaagccattgccaccttatattgtccagattgtggatgaaaactcaaatctcctgcctccaggggaagaaggaaatattgcaatccgcataaaactaaaccaacctgcttctctgtactgtccacacatggtgagctgggaggaatatgcttcagcaagaggccacatgctttacctcacaggtgacagagggatcatggatgaagacggctacttctggtggtctggtagagttgatgatgttgccaatgcattgggtcagagattgtgaatgctttggttattgctattgagcctggggctgtgggagtttgaagaagactctggactgcttccaatacgtaggaattatatttctaaagtttagaaaatgcaaacaaccaaaaataaaaaaataaaactcatccataa

SEQ ID NO: 104488 - DNA, 1336 bp, Homo sapiens
  Payload ID: 515
  Gene Symbol: ACSM6
  Gene Name: acyl-CoA synthetase medium-chain family member 6
  ENST ID: ENST00000404473
  CDS Start-End: 10-267
ctgacccaaatgctaggccgatttcaacccttctccttggtccggagtttcagactgggatttgaagcctgctgctatccaaaccaaaaatgtgctactcagaccatcagaccccctgactccaggtgcctagtccaagcagtttctcagaactttaattttgcaaaggatgtgttggatcagtggtcccagctggaaaaggataatggccttcagctccatccatgttgctgcaaaagacaggatttcattcttttccatggctgagtaatattccatgttgacggactcagagggccttaccccgccctctggaaggttagtgccaaaggagaagaggacaaatggagctttgaaaggatgactcaactctccaagaaggccgccagcatcctctcagacacctgtgcccttagccatggagaccggctgatgataatcttgcccccaacacctgaagcctactggatctgcctggcctgtgtgcgcttgggaatcacctttgtgcctgggagcccccagctgactgccaagaaaattcgctatcaattacgcatgtctaaggcccagtgcattgtggctaatgaagctatggccccagttgtaaactctgccgtgtccgactgccccaccttgaaaaccaagctcctggtgtcagataagagctatgatgggtggttggatttcaagaagttgattcaagttgcccctccaaagcagacctacatgaggaccaaaagccaagatccaatggccatattcttcaccaagggtacaacaggagctcccaaaatggtcgagtattcccagtatggtttgggaatgggattcagccaggcttccagacggtggatggatctccagccaacagatgtcttgtggagtctgggtgatgcctttggtggatctttatccctgagcgctgtcttgggaacttggttccaaggagcctgtgtgtttctgtgtcacatgccaaccttctgccctgagactgttctaaatgtcctgtccagatttcccatcaccactctatctgcaaatccagagatgtaccaggaactgcttcagcacaagtgtttcaccagctacagattcaagagtctgaagcagtgtgtggctgcaggaggacccatcagccctggggtgattgaggactggaaacgcatcactaagttggacatctatgaaggctatgggcagacggaaactggtctactctgtgccacttccaaaacaataaaattgaagccaagctctctggggaagccattgccaccttatattgtccagattgtggatgaaaactcaaatctcctgcctccaggggaagaaggaa

SEQ ID NO: 104489 - DNA, 3680 bp, Homo sapiens
  Payload ID: 516
  Gene Symbol: ACSS1
  Gene Name: acyl-CoA synthetase short-chain family member 1
  Uniprot ID: Q9NUB1
  ENST ID: ENST00000323482
  CDS Start-End: 81-2150
ggcccgcggagactccacggggcgccccgggcgtgaggcacccactctgggagcacagagagctcaggtagcctgcctagatggcggcgcgcaccctgggccgcggcgtcgggaggctgctgggcagcctgcgagggctctcggggcagcccgcgcggccgccgtgcggggtgagcgcgccgcgcagggcggcctcgggaccctcgggcagcgctcccgcagttgcagcagcagcagcacagccaggctcgtatcccgcgctgagtgcacaggcagcccgggagccggccgccttctgggggcctctggcgcgggacactctcgtgtgggacaccccctaccacaccgtctgggactgcgacttcagcactggcaagatcggctggttcctgggaggccagttaaatgtctctgtcaactgcttggaccagcatgttcggaagtcccccgagagcgttgctttgatctgggagcgcgatgagcctggaacggaagtgaggatcacctacagggaactactggagaccacgtgccgcctggccaacacgctgaagaggcatggagtccaccgtggggaccgtgttgccatctacatgcccgtgtccccattggctgtggcagcaatgctggcctgtgccaggatcggagctgtccacacagtcatctttgctggcttcagtgcagagtccttggctgggaggatcaatgatgccaagtgcaaggtggttatcaccttcaaccaaggactccggggtgggcgcgtggtggagctgaagaaaatagtggatgaggctgtgaagcactgccccaccgtgcagcatgtcctggtggctcacaggacagacaacaaggtccacatgggggatctggacgtcccgctggagcaggaaatggccaaggaggaccctgtttgcgccccagagagcatgggcagtgaggacatgctcttcatgctgtacacctcagggagcaccggaatgcccaagggcatcgtccatacccaggcaggctacctgctctatgccgccctgactcacaagcttgtgtttgaccaccagccaggtgacatctttggctgtgtggccgacatcggttggattacaggacacagctacgtggtgtatgggcctctctgcaatggtgccaccagcgtcctttttgagagcaccccagtttatcccaatgctggtcggtactgggagacagtagagaggttgaagatcaatcagttctatggcgccccaacggctgtccggctgttgctgaaatacggtgatgcctgggtgaagaagtatgatcgctcctccctgcggaccctggggtcagtgggagagcccatcaactgtgaggcctgggagtggcttcacagggtggtgggggacagcaggtgcacgctggtggacacctggtggcagacagaaacaggtggcatctgcatcgcaccacggccctcggaagaaggggcggaaatcctccctgccatggcgatgaggcccttctttggcatcgtccccgtcctcatggatgagaagggcagcgtcgtggagggcagcaacgtctccggggccctgtgcatctcccaggcctggccgggcatggccaggaccatctatggcgaccaccagcgatttgtggacgcctacttcaaggcctacccaggctattacttcactggagacggggcttaccgaactgagggcggctattaccagatcacagggcggatggatgatgtcatcaacatcagtggccaccggctggggaccgcagagattgaggacgccatcgccgaccaccctgcagtaccagaaagtgctgtcattggctacccccacgacatcaaaggagaagctgcctttgccttcattgtggtgaaagatagtgcgggtgactcagatgtggtggtgcaggagctcaagtccatggtggccaccaagatcgccaaatatgctgtgcctgatgagatcctggtggtgaaacgtcttccaaaaaccaggtctgggaaggtcatgcggcggctcctgaggaagatcatcactagtgaggcccaggagctgggagacactaccaccttggaggaccccagcatcatcgcagagatcctgagtgtctaccagaagtgcaaggacaagcaggctgctgctaagtgagctggcaccttgtggggctcttgggatgggcgggcacccaagccctggcttgtccttcccagaaggtacccctgaggttggcgtcttcctacgtcccagaagcagcccccaccccacacatgacccacaccgccctcacgtgaagctgggctgagagccctttctcccatccattggaggtcccaggagtgtcacccatggagaggctatgcgacatggctagggctggttctgccatctgagtttggtttcctggaatgaaaaggcattgccatctccattcctctgccctcttgagccagcacaggaaggtgaggccctgggatagcgcgcctgctcagataacacagagctagttagctagtagcaaccgtgttttctccagatctgtctagatacaaaggtcagaaatcttatttttatacttttatattgtggaagaacagcatgcaacactcacatgtagtgtgtggatttacttgaacatgttctttttaacatgtagttatgaaaatctccttttttgcctctactggtgaggaaacatgaggatcagaggccacatttttaattattgttagtgtatttggaagtctgaattggagatgtttgtacctctgtctaaacagttcccttgagaacttccaagcctccggcatcttttcctggtgagtgtttctcctgtgcttggttgtgtataatggagctaactcctaagcggtggggtgaatgtggccgccttagttctgaagctactccagttatgttctgtttcttcaagctgtgatccagaaagatttttgtgcccccagatgcctcttgataggagaggcaacatactccaaatagttgggttcttcagggaagctattagaaactcaggtgacttgttagagcactaacttggtcagagccaaatcctggcaaacgctgcctgaccttcactctgtggttggggcggtgagaaccactgaggtccaatgatgagacttggaggtctggatccagtctctctttgttttaatgtgacttaggtgctgtcaacattagcaagataatggaaatcacgacgccagtgggtgcttacctccctgctaggcatgcaggggctggcggttggcaggggaaggaggcccagtgagccgggtcccttaggggagggagagtttgtcctctttgccccacagtctacccttcagggccttgtggcagtgccagtgttcggggggtgtctgggccactgagtacccactcggtcgtggttgtgctggcctcttgggtgagtgaacctgtgaagcccaggaggtggtgttggctgcagggtacacaaatactgagtggtggtcttttgttacaggcttagcaacaaagctgtgccctgggcatggggggctgtagtgtagctacagttgtgcgtttgtgaaatggcttagctttccatgttgctgagaggaacctggacatggtcccgggcatctgaatgatctgtaggggagggagttcaaataaagctttattttgttcattttc

SEQ ID NO: 104490 - DNA, 2244 bp, Homo sapiens
  Payload ID: 516
  Gene Symbol: ACSS1
  Gene Name: acyl-CoA synthetase short-chain family member 1
  ENST ID: ENST00000376726
  CDS Start-End: 879-1340
aaaaggaaaacgaggcaccgagaagttaaggaacttgctcaaggtcacagagtttgaactcaggctacagatgctgcagcaactggagaaagtcctcatcgccccatatcacccaccaccgacccccagcaggacgtgacccccgccaggacggaggccggcagctggggggctggagcatgggacccagaacacggactcaggcttgcgcagcctcctggcttctaggcgggagcctagaaaggcgccagcccctttcgcgtgctgctgagactccaggggtggggttcactctcaggggcgcacaaaggcatgaaaaccttggcttcagcctctgagatgcggaactgaccgacctattgtcttgggacccaccagtgcgcttgggtgcaccagcccccttaacgttggtgccggctccctcccggctcctccccatcccagagggtcccctcgccccaggccctgagcctgcgtcctggggtcctgggccgcacgtgcctctggcagctcgaagaagctgtcggggcttgcaggagagcgtgcaaactgaaaccaaaacaggccgactcgaggaacatccgggtgggaccgcagactcaccggagcgcagcgcctgggccagggcctgggaccctgctccgccccgcgctcccctgcaccccttccccacgctgctcccctcttcctaagcggccccccctctcccgggcagcagaagaaggggtgggacccgggcgggctccgggagggggccctggaggaatggatggtggcggaagggcggagcaggggcggggcccgcggagactccacggggcgccccgggcgtgaggcacccactctgggagcacagagagctcaggtagcctgcctagatggcggcgcgcaccctgggccgcggcgtcgggaggctgctgggcagcctgcgagggctctcggggcagcccgcgcggccgccgtgcggggtgagcgcgccgcgcagggcggcctcgggaccctcgggcagcgctcccgcagttgcagcagcagcagcacagccaggctcgtatcccgcgctgagtgcacaggcagcccgggagccggccgccttctgggggcctctggcgcgggacactctcgtgtgggacaccccctaccacaccgtctgggactgcgacttcagcactggcaagatcggctggttcctgggaggccagttaaatgtctctgtcaactgcttggaccagcatgttcggaagtcccccgagagcgttgctttgatctgggagcgcgatgagcctggaacggaagtgaggatcacctacagtccctggttgcagatgccgtgtggcccataggccagcagcattcttctgccctggatcctcgggccccactggacaactgagcggccccccaggtggcccctgcacactggagtgtgcttggctctgaagacccaagctgctgcagctgcccctcgccacggtgggcccagctccatctgcctgcgaacaaagccccttctgagaaggaacttgaggctgctgcccctggagtagttcttcagtaaaagatgaaaaccctctgttgggggtcgggggctaaggagctaactggacacctggaggtccggcagggagggcccagccatggcactccccgaagggccagtttctctccatcagtctctcaggtgtgcctggaccctggggcaggcaggttgtgtgccacgccccctcggctggacgctgcccgtgggagcactgagtgtgtgctaagtagcggttcggtctgtgagcggggctggagccctgtggagacgtgtggttaaacataaaccatgtgagaattctcaggaccacagccagcctgtggaagctaaggacagcttcaggtccatgacactgaaatggccctggcaaagtacttattactctgtctctaaaaataaacaggggccggtcgcagtggctcatgccggtaatcccagcactttgggatggtgaggatcacttgaggacggtgggtggatcgcttgaggtcaggagtttgagaccaacctggccaacatggtgaaaccccgtctctactaaaaatacaaaaattagttgggtgtggtgatgtgcgcctgtagtcccagctacttgggaggctgaagcaggagaactgcttgaaactgggaggtggatgttgcagtgagccaagattgtgccactgcactccatcctgggtgacagagtcagactccatctcaaaaat

SEQ ID NO: 104491 - DNA, 2438 bp, Homo sapiens
  Payload ID: 516
  Gene Symbol: ACSS1
  Gene Name: acyl-CoA synthetase short-chain family member 1
  Uniprot ID: Q9NUB1
  ENST ID: ENST00000432802
  CDS Start-End: 81-1808
ggcccgcggagactccacggggcgccccgggcgtgaggcacccactctgggagcacagagagctcaggtagcctgcctagatggcggcgcgcaccctgggccgcggcgtcgggaggctgctgggcagcctgcgagggctctcggggcagcccgcgcggccgccgtgcggggtgagcgcgccgcgcagggcggcctcgggaccctcgggcagcgctcccgcagttgcagcagcagcagcacagccaggctcgtatcccgcgctgagtgcacaggcagcccgggagccggccgccttctgggggcctctggcgcgggacactctcgtgtgggacaccccctaccacaccgtctgggactgcgacttcagcactggcaagatcggctggttcctgggaggccagttaaatgtctctgtcaactgcttggaccagcatgttcggaagtcccccgagagcgttgctttgatctgggagcgcgatgagcctggaacggaagtgaggatcacctacagggaactactggagaccacgtgccgcctggccaacacgctgaagaggcatggagtccaccgtggggaccgtgttgccatctacatgcccgtgtccccattggctgtggcagcaatgctggcctgtgccaggatcggagctgtccacacagtcatctttgctggcttcagtgcagagtccttggctgggaggatcaatgatgccaagtgcaaggtggttatcaccttcaaccaaggactccggggtgggcgcgtggtggagctgaagaaaatagtggatgaggctgtgaagcactgccccaccgtgcagcatgtcctggtggctcacaggacagacaacaaggtccacatgggggatctggacgtcccgctggagcaggaaatggccaaggaggaccctgtttgcgccccagagagcatgggcagtgaggacatgctcttcatgctgtacacctcagggagcaccggaatgcccaagggcatcgtccatacccaggcaggctacctgctctatgccgccctgactcacaagcttgtgtttgaccaccagccaggtgacatctttggctgtgtggccgacatcggttggattacaggacacagctacgtggtgtatgggcctctctgcaatggtgccaccagcgtcctttttgagagcaccccagtttatcccaatgctggtcggtactgggagacagtagagaggttgaagatcaatcagttctatggcgccccaacggctgtccggctgttgctgaaatacggtgatgcctgggtgaagaagtatgatcgctcctccctgcggaccctggggtcagtgggagagcccatcaactgtgaggcctgggagtggcttcacagggtggtgggggacagcaggtgcacgctggtggacacctggtggcagacagaaacaggtggcatctgcatcgcaccacggccctcggaagaaggggcggaaatcctccctgccatggcgatgaggcccttctttggcatcgtccccgtcctcatggatgagaagggcagcgtcgtggagggcagcaacgtctccggggccctgtgcatctcccaggcctggccgggcatggccaggaccatctatggcgaccaccagcgatttgtggacgcctacttcaaggcctacccaggctattacttcactggagacggggcttaccgaactgagggcggctattaccagatcacagggcggatggatgatgtcatcaacatactccaaatagttgggttcttcagggaagctattagaaactcaggtgacttgttagagcactaacttggtcagagccaaatcctggcaaacgctgcctgaccttcactctgtggttggggcggtgagaaccactgaggtccaatgatgagacttggaggtctggatccagtctctctttgttttaatgtgacttaggtgctgtcaacattagcaagataatggaaatcacgacgccagtgggtgcttacctccctgctaggcatgcaggggctggcggttggcaggggaaggaggcccagtgagccgggtcccttaggggagggagagtttgtcctctttgccccacagtctacccttcagggccttgtggcagtgccagtgttcggggggtgtctgggccactgagtacccactcggtcgtggttgtgctggcctcttgggtgagtgaacctgtgaagcccaggaggtggtgttggctgcagggtacacaaatactgagtggtggtcttttgttacaggcttagcaacaaagctgtgccctgggcatggggggctgtagtgtagctacagttgtgcgtttgtgaaatggcttagctttccatgttgctgagaggaacctggacatggtcccgggcatctgaatgatctgtaggggagggagttcaaataaagctttattttgttcattttctc

SEQ ID NO: 104492 - DNA, 3509 bp, Homo sapiens
  Payload ID: 516
  Gene Symbol: ACSS1
  Gene Name: acyl-CoA synthetase short-chain family member 1
  Uniprot ID: Q9NUB1
  ENST ID: ENST00000537502
  CDS Start-End: 271-1977
agccctttccttgactaccctttgaacagaggagagctatgcaaacacgctgcgagcggccttgagagcccgaggagggtctgctttctgggcccctgcagagggcaggggtcgcgggctggtggtctgccccgcccagagagaaagggccttggcttcccctcattcttcgttctgtgttagctctttttattgcaaataattaattaaagtcagtacagcaagagtgggaaagtggttaatgcaattgccaggtccagattcagagggatgaggcgccgaaaggaaagacaaccttgggatcgcttccacttcctccacttcgcaccgcatggccgggaactactggagaccacgtgccgcctggccaacacgctgaagaggcatggagtccaccgtggggaccgtgttgccatctacatgcccgtgtccccattggctgtggcagcaatgctggcctgtgccaggatcggagctgtccacacagtcatctttgctggcttcagtgcagagtccttggctgggaggatcaatgatgccaagtgcaaggtggttatcaccttcaaccaaggactccggggtgggcgcgtggtggagctgaagaaaatagtggatgaggctgtgaagcactgccccaccgtgcagcatgtcctggtggctcacaggacagacaacaaggtccacatgggggatctggacgtcccgctggagcaggaaatggccaaggaggaccctgtttgcgccccagagagcatgggcagtgaggacatgctcttcatgctgtacacctcagggagcaccggaatgcccaagggcatcgtccatacccaggcaggctacctgctctatgccgccctgactcacaagcttgtgtttgaccaccagccaggtgacatctttggctgtgtggccgacatcggttggattacaggacacagctacgtggtgtatgggcctctctgcaatggtgccaccagcgtcctttttgagagcaccccagtttatcccaatgctggtcggtactgggagacagtagagaggttgaagatcaatcagttctatggcgccccaacggctgtccggctgttgctgaaatacggtgatgcctgggtgaagaagtatgatcgctcctccctgcggaccctggggtcagtgggagagcccatcaactgtgaggcctgggagtggcttcacagggtggtgggggacagcaggtgcacgctggtggacacctggtggcagacagaaacaggtggcatctgcatcgcaccacggccctcggaagaaggggcggaaatcctccctgccatggcgatgaggcccttctttggcatcgtccccgtcctcatggatgagaagggcagcgtcgtggagggcagcaacgtctccggggccctgtgcatctcccaggcctggccgggcatggccaggaccatctatggcgaccaccagcgatttgtggacgcctacttcaaggcctacccaggctattacttcactggagacggggcttaccgaactgagggcggctattaccagatcacagggcggatggatgatgtcatcaacatcagtggccaccggctggggaccgcagagattgaggacgccatcgccgaccaccctgcagtaccagaaagtgctgtcattggctacccccacgacatcaaaggagaagctgcctttgccttcattgtggtgaaagatagtgcgggtgactcagatgtggtggtgcaggagctcaagtccatggtggccaccaagatcgccaaatatgctgtgcctgatgagatcctggtggtgaaacgtcttccaaaaaccaggtctgggaaggtcatgcggcggctcctgaggaagatcatcactagtgaggcccaggagctgggagacactaccaccttggaggaccccagcatcatcgcagagatcctgagtgtctaccagaagtgcaaggacaagcaggctgctgctaagtgagctggcaccttgtggggctcttgggatgggcgggcacccaagccctggcttgtccttcccagaaggtacccctgaggttggcgtcttcctacgtcccagaagcagcccccaccccacacatgacccacaccgccctcacgtgaagctgggctgagagccctttctcccatccattggaggtcccaggagtgtcacccatggagaggctatgcgacatggctagggctggttctgccatctgagtttggtttcctggaatgaaaaggcattgccatctccattcctctgccctcttgagccagcacaggaaggtgaggccctgggatagcgcgcctgctcagataacacagagctagttagctagtagcaaccgtgttttctccagatctgtctagatacaaaggtcagaaatcttatttttatacttttatattgtggaagaacagcatgcaacactcacatgtagtgtgtggatttacttgaacatgttctttttaacatgtagttatgaaaatctccttttttgcctctactggtgaggaaacatgaggatcagaggccacatttttaattattgttagtgtatttggaagtctgaattggagatgtttgtacctctgtctaaacagttcccttgagaacttccaagcctccggcatcttttcctggtgagtgtttctcctgtgcttggttgtgtataatggagctaactcctaagcggtggggtgaatgtggccgccttagttctgaagctactccagttatgttctgtttcttcaagctgtgatccagaaagatttttgtgcccccagatgcctcttgataggagaggcaacatactccaaatagttgggttcttcagggaagctattagaaactcaggtgacttgttagagcactaacttggtcagagccaaatcctggcaaacgctgcctgaccttcactctgtggttggggcggtgagaaccactgaggtccaatgatgagacttggaggtctggatccagtctctctttgttttaatgtgacttaggtgctgtcaacattagcaagataatggaaatcacgacgccagtgggtgcttacctccctgctaggcatgcaggggctggcggttggcaggggaaggaggcccagtgagccgggtcccttaggggagggagagtttgtcctctttgccccacagtctacccttcagggccttgtggcagtgccagtgttcggggggtgtctgggccactgagtacccactcggtcgtggttgtgctggcctcttgggtgagtgaacctgtgaagcccaggaggtggtgttggctgcagggtacacaaatactgagtggtggtcttttgttacaggcttagcaacaaagctgtgccctgggcatggggggctgtagtgtagctacagttgtgcgtttgtgaaatggcttagctttccatgttgctgagaggaacctggacatggtcccgggcatctgaatgatctgtaggggagggagttcaaataaagctttattttgttcattttctc

SEQ ID NO: 104493 - DNA, 2925 bp, Homo sapiens
  Payload ID: 517
  Gene Symbol: ACSS2
  Gene Name: acyl-CoA synthetase short-chain family member 2
  Uniprot ID: Q9NR19
  ENST ID: ENST00000253382
  CDS Start-End: 33-2177
aaaggcggccgcggttctaggaacttgacgtgatggggcttcctgaggagcgggtccggagcggcagcgggagccggggccaggaggaagctggagccggaggccgggcgcggagttggtctccgccgcccgaggtcagccgctccgcgcacgtcccctcgctgcagcgctaccgcgagctgcaccggcgctccgtggaggagccgcgggaattctggggagacattgccaaggaattttactggaagactccatgccctggcccattccttcggtacaactttgatgtgactaaagggaaaatcttcattgagtggatgaaaggagcaactaccaacatctgctacaatgtactggatcgaaatgtccatgagaaaaagcttggagataaagttgctttttactgggagggcaatgagccaggggagaccactcagatcacataccatcagcttctggtccaagtgtgtcagttcagcaatgttctccgaaaacagggcattcagaagggggaccgagtggccatctacatgcctatgatcccagagcttgtggtggccatgctggcatgtgcccgcattggggctttgcactccattgtgtttgcaggcttctcttcagagtctctatgtgaacggatcttggattccagctgcagtcttctcatcactacagatgccttctacaggggggaaaagcttgtgaacctgaaggagctggctgacgaggccctgcagaagtgtcaggagaagggtttcccagtaagatgctgcattgtggtcaagcacctggggcgggcagagctcggcatgggtgactccaccagccagtcccccccaattaagaggtcatgcccagatgtgcagggtaaactgaaagagaaatccaagcgtgttcagccccagatctcatggaaccaagggattgacttgtggtggcatgagctcatgcaagaggcaggggatgagtgtgagcccgagtggtgtgatgccgaggacccactcttcatcctgtacaccagtggctccacaggcaaacccaagggtgtggttcacacagttgggggctacatgctctatgtagccacaaccttcaagtatgtgtttgacttccatgcagaggatgtgttctggtgcacggcagacattggttggatcactggtcattcctacgtcacctatgggccactggccaatggtgccaccagtgttttgtttgaggggattcccacatatccggacgtgaaccgcctgtggagcattgtggacaaatacaaggtgaccaagttctacacagcacccacagccatccgtctgctcatgaagtttggagatgagcctgtcaccaagcatagccgggcatccttgcaggtgttaggcacagtgggtgaacccatcaaccctgaggcctggctatggtaccaccgggtggtaggtgcccagcgctgccccatcgtggacaccttctggcaaacagagacaggtggccacatgttgactccccttcctggtgccacacccatgaaacccggttctgctactttcccattctttggtgtagctcctgcaatcctgaatgagtccggggaagagttggaaggtgaagctgaaggttatctggtgttcaagcagccctggccagggatcatgcgcacagtctatgggaaccacgaacgctttgagacaacctactttaagaagtttcctggatactatgttacaggagatggctgccagcgggaccaggatggctattactggatcactggcaggattgatgacatgctcaatgtatctggacacctgctgagtacagcagaggtggagtcagcacttgtggaacatgaggctgttgcagaggcagctgtggtgggccaccctcatcctgtgaagggtgaatgcctctactgctttgtcaccttgtgtgatggccacaccttcagccccaagctcaccgaggagctcaagaagcagattagagaaaagattggccccattgccacaccagactacatccagaatgcacctggcttgcctaaaacccgctcagggaaaatcatgaggcgagtgcttcggaagattgctcagaatgaccatgacctcggggacatgtctactgtggctgacccatctgtcatcagtcacctcttcagccaccgctgcctgaccatccagtgaacatgatcctgacctttacctaggattcctcctgctccaaactttgcccatcctctttgccccctcaggagtgctgagggccagtgttgacccacactaccctcccttgaccagctgtctgggaccggaaaccagctttgtctccaggtagagacaacatcctgtgactgccaggcagaaaggacagggcccaggtcagcctcagtctgctgtgcctccagactgcagagctctcagaacccagaacagagacgaaaaggctacctctcctacccaagttaagtgttcaaaggggatgtgagggcctccactgaagcagggaggcagctgtgtaatcctatgtcagctctcttaggaagccccagtacttatattgggcatgcacttgcccttaaaaacaatgatttgtgagtccaggaacaatttactatttttaaaatattttgctgcttctgttctgggtctgaattcccttttgtgccagatgccagtactgtctgcccattggctccaggggctgtatgggcagattcagtctccagagggtattcagatcatctgcttctttgaaggagtaaatgtgttttgttcctagggccagaggagcttgtcttccttgtcctctgttcccaccctcccctgaacagaacccagcccataagagacattctcagatgaaactctgttttcttgccccagtcaggctcaagccctgtggttgtaggaataaagcctgtgatctcaagaa

SEQ ID NO: 104494 - DNA, 3065 bp, Homo sapiens
  Payload ID: 517
  Gene Symbol: ACSS2
  Gene Name: acyl-CoA synthetase short-chain family member 2
  Uniprot ID: Q9NR19
  ENST ID: ENST00000360596
  CDS Start-End: 212-2317
tatagtatttctgtccttgccaacctcgatccctccccaaccagacacggccccgccccctctggcaccgcccacccgccagactaagccactcccccactcaccaggccccgcccctctacggaggccccgcctctagttcggcctgttttctcagtcccggcacccgccgcgaccgcaaaggcggccgcggttctaggaacttgacgtgatggggcttcctgaggagcgggtccggagcggcagcgggagccggggccaggaggaagctggagccggaggccgggcgcggagttggtctccgccgcccgaggtcagccgctccgcgcacgtcccctcgctgcagcgctaccgcgagctgcaccggcgctccgtggaggagccgcgggaattctggggagacattgccaaggaattttactggaagactccatgccctggcccattccttcggtacaactttgatgtgactaaagggaaaatcttcattgagtggatgaaaggagcaactaccaacatctgctacaatgtactggatcgaaatgtccatgagaaaaagcttggagataaagttgctttttactgggagggcaatgagccaggggagaccactcagatcacataccatcagcttctggtccaagtgtgtcagttcagcaatgttctccgaaaacagggcattcagaagggggaccgagtggccatctacatgcctatgatcccagagcttgtggtggccatgctggcatgtgcccgcattggggctttgcactccattgtgtttgcaggcttctcttcagagtctctatgtgaacggatcttggattccagctgcagtcttctcatcactacagatgccttctacaggggggaaaagcttgtgaacctgaaggagctggctgacgaggccctgcagaagtgtcaggagaagggtttcccagtaagatgctgcattgtggtcaagcacctggggcgggcagagctcggcatgggtgactccaccagccagtcccccccaattaagaggtcatgcccagatgtgcagatctcatggaaccaagggattgacttgtggtggcatgagctcatgcaagaggcaggggatgagtgtgagcccgagtggtgtgatgccgaggacccactcttcatcctgtacaccagtggctccacaggcaaacccaagggtgtggttcacacagttgggggctacatgctctatgtagccacaaccttcaagtatgtgtttgacttccatgcagaggatgtgttctggtgcacggcagacattggttggatcactggtcattcctacgtcacctatgggccactggccaatggtgccaccagtgttttgtttgaggggattcccacatatccggacgtgaaccgcctgtggagcattgtggacaaatacaaggtgaccaagttctacacagcacccacagccatccgtctgctcatgaagtttggagatgagcctgtcaccaagcatagccgggcatccttgcaggtgttaggcacagtgggtgaacccatcaaccctgaggcctggctatggtaccaccgggtggtaggtgcccagcgctgccccatcgtggacaccttctggcaaacagagacaggtggccacatgttgactccccttcctggtgccacacccatgaaacccggttctgctactttcccattctttggtgtagctcctgcaatcctgaatgagtccggggaagagttggaaggtgaagctgaaggttatctggtgttcaagcagccctggccagggatcatgcgcacagtctatgggaaccacgaacgctttgagacaacctactttaagaagtttcctggatactatgttacaggagatggctgccagcgggaccaggatggctattactggatcactggcaggattgatgacatgctcaatgtatctggacacctgctgagtacagcagaggtggagtcagcacttgtggaacatgaggctgttgcagaggcagctgtggtgggccaccctcatcctgtgaagggtgaatgcctctactgctttgtcaccttgtgtgatggccacaccttcagccccaagctcaccgaggagctcaagaagcagattagagaaaagattggccccattgccacaccagactacatccagaatgcacctggcttgcctaaaacccgctcagggaaaatcatgaggcgagtgcttcggaagattgctcagaatgaccatgacctcggggacatgtctactgtggctgacccatctgtcatcagtcacctcttcagccaccgctgcctgaccatccagtgaacatgatcctgacctttacctaggattcctcctgctccaaactttgcccatcctctttgccccctcaggagtgctgagggccagtgttgacccacactaccctcccttgaccagctgtctgggaccggaaaccagctttgtctccaggtagagacaacatcctgtgactgccaggcagaaaggacagggcccaggtcagcctcagtctgctgtgcctccagactgcagagctctcagaacccagaacagagacgaaaaggctacctctcctacccaagttaagtgttcaaaggggatgtgagggcctccactgaagcagggaggcagctgtgtaatcctatgtcagctctcttaggaagccccagtacttatattgggcatgcacttgcccttaaaaacaatgatttgtgagtccaggaacaatttactatttttaaaatattttgctgcttctgttctgggtctgaattcccttttgtgccagatgccagtactgtctgcccattggctccaggggctgtatgggcagattcagtctccagagggtattcagatcatctgcttctttgaaggagtaaatgtgttttgttcctagggccagaggagcttgtcttccttgtcctctgttcccaccctcccctgaacagaacccagcccataagagacattctcagatgaaactctgttttcttgccccagtcaggctcaagccctgtggttgtaggaataaagcctgtgatctcaagaa

SEQ ID NO: 104495 - DNA, 648 bp, Homo sapiens
  Payload ID: 517
  Gene Symbol: ACSS2
  Gene Name: acyl-CoA synthetase short-chain family member 2
  ENST ID: ENST00000488172
  CDS Start-End: 159-648
aaagtgcagggaagtagctgggaagggaggctgggctagatggggtcacaaggcctgtgtaggcttcaggaggtgggagctgcccgcttcaggcctcagaatcactcttggagttagatatttaagaatccttcctgccttgacagccagtctgtgaaatgatggtgaggtgggcacttctttgtgaattctggggagacattgccaaggaattttactggaagactccatgccctggcccattccttcggtacaactttgatgtgactaaagggaaaatcttcattgagtggatgaaaggagcaactaccaacatctgctacaatgtactggatcgaaatgtccatgagaaaaagcttggagataaagttgctttttactgggagggcaatgagccaggggagaccactcagatcacataccatcagcttctggtccaagtgtgtcagttcagcaatgttctccgaaaacagggcattcagaagggggaccgagtggccatctacatgcctatgatcccagagcttgtggtggccatgctggcatgtgcccgcattggggctttgcactccattgtgtttgcaggcttctcttcagagtctctatgtgaacggatcttggattccagctgcagtcttctcatcacta

SEQ ID NO: 104496 - DNA, 2851 bp, Homo sapiens
  Payload ID: 517
  Gene Symbol: ACSS2
  Gene Name: acyl-CoA synthetase short-chain family member 2
  ENST ID: ENST00000481284
  CDS Start-End: 138-251
gaagggaggctgggctagatggggtcacaaggcctgtgtaggcttcaggaggtgggagctgcccgcttcaggcctcagaatcactcttggagttagatatttaagaatccttcctgccttgacagccagtctgtgaaatgatggtgaggtgggcacttctttgtggtgagtgcagaattctggggagacattgccaaggaattttactggaagactccatgccctggcccattccttcggtacaactttgatgtgactaaagggaaaatcttcattgagtggatgaaaggagcaactaccaacatctgctacaatgtactggatcgaaatgtccatgagaaaaagcttggagataaagttgctttttactgggagggcaatgagccaggggagaccactcagatcacataccatcagcttctggtccaagtgtgtcagttcagcaatgttctccgaaaacagggcattcagaagggggaccgagtggccatctacatgcctatgatcccagagcttgtggtggccatgctggcatgtgcccgcattggggctttgcactccattgtgtttgcaggcttctcttcagagtctctatgtgaacggatcttggattccagctgcagtcttctcatcactacagatgccttctacaggggggaaaagcttgtgaacctgaaggagctggctgacgaggccctgcagaagtgtcaggagaagggtttcccagtaagatgctgcattgtggtcaagcacctggggcgggcagagctcggcatgggtgactccaccagccagtcccccccaattaagaggtcatgcccagatgtgcagatctcatggaaccaagggattgacttgtggtggcatgagctcatgcaagaggcaggggatgagtgtgagcccgagtggtgtgatgccgaggacccactcttcatcctgtacaccagtggctccacaggcaaacccaagggtgtggttcacacagttgggggctacatgctctatgtagccacaaccttcaagtatgtgtttgacttccatgcagaggatgtgttctggtgcacggcagacattggttggatcactggtcattcctacgtcacctatgggccactggccaatggtgccaccagtgttttgtttgaggggattcccacatatccggacgtgaaccgcctgtggagcattgtggacaaatacaaggtgaccaagttctacacagcacccacagccatccgtctgctcatgaagtttggagatgagcctgtcaccaagcatagccgggcatccttgcaggtgttaggcacagtgggtgaacccatcaaccctgaggcctggctatggtaccaccgggtggtaggtgcccagcgctgccccatcgtggacaccttctggcaaacagagacaggtggccacatgttgactccccttcctggtgccacacccatgaaacccggttctgctactttcccattctttggtgtagctcctgcaatcctgaatgagtccggggaagagttggaaggtgaagctgaaggttatctggtgttcaagcagccctggccagggatcatgcgcacagtctatgggaaccacgaacgctttgagacaacctactttaagaagtttcctggatactatgttacaggagatggctgccagcgggaccaggatggctattactggatcactggcaggattgatgacatgctcaatgtatctggacacctgctgagtacagcagaggtggagtcagcacttgtggaacatgaggctgttgcagaggcagctgtggtgggccaccctcatcctgtgaagggtgaatgcctctactgctttgtcaccttgtgtgatggccacaccttcagccccaagctcaccgaggagctcaagaagcagattagagaaaagattggccccattgccacaccagactacatccagaatgcacctggcttgcctaaaacccgctcagggaaaatcatgaggcgagtgcttcggaagattgctcagaatgaccatgacctcggggacatgtctactgtggctgacccatctgtcatcagtcacctcttcagccaccgctgcctgaccatccagtgaacatgatcctgacctttacctaggattcctcctgctccaaactttgcccatcctctttgccccctcaggagtgctgagggccagtgttgacccacactaccctcccttgaccagctgtctgggaccggaaaccagctttgtctccaggtagagacaacatcctgtgactgccaggcagaaaggacagggcccaggtcagcctcagtctgctgtgcctccagactgcagagctctcagaacccagaacagagacgaaaaggctacctctcctacccaagttaagtgttcaaaggggatgtgagggcctccactgaagcagggaggcagctgtgtaatcctatgtcagctctcttaggaagccccagtacttatattgggcatgcacttgcccttaaaaacaatgatttgtgagtccaggaacaatttactatttttaaaatattttgctgcttctgttctgggtctgaattcccttttgtgccagatgccagtactgtctgcccattggctccaggggctgtatgggcagattcagtctccagagggtattcagatcatctgcttctttgaaggagtaaatgtgttttgttcctagggccagaggagcttgtcttccttgtcctctgttcccaccctcccctgaacagaacccagcccataagagacattctcagatgaaactctgttttcttgccccagtcaggctcaagccctgtggttgtaggaataaagcctgtgatctcaagaa

SEQ ID NO: 104497 - DNA, 2450 bp, Homo sapiens
  Payload ID: 517
  Gene Symbol: ACSS2
  Gene Name: acyl-CoA synthetase short-chain family member 2
  ENST ID: ENST00000477932
  CDS Start-End: 57-431
agtcccggcacccgccgcgaccgcaaaggcggccgcggttctaggaacttgacgtgatggggcttcctgaggagcgggtccggagcggcagcgggagccggggccaggaggaagctggagccggaggccgggcgcggagttggtctccgccgcccgaggtcagccgctccgcgcacgtcccctcgctgcagcgctaccgcgagctgcaccggcgctccgtggaggagccgcgggaattctggggagacattgccaaggaattttactggaagactccatgccctggcccattccttcggtacaactttgatgtgactaaagggaaaatcttcattgagtggatgaaaggagcaactaccaacatctgctacaatgtactggatcgaaatgtccatgagaaaaagcttggagataaagttgctttttactgatctcatggaaccaagggattgacttgtggtggcatgagctcatgcaagaggcaggggatgagtgtgagcccgagtggtgtgatgccgaggacccactcttcatcctgtacaccagtggctccacaggcaaacccaagggtgtggttcacacagttgggggctacatgctctatgtagccacaaccttcaagtatgtgtttgacttccatgcagaggatgtgttctggtgcacggcagacattggttggatcactggtcattcctacgtcacctatgggccactggccaatggtgccaccagtgttttgtttgaggggattcccacatatccggacgtgaaccgcctgtggagcattgtggacaaatacaaggtgaccaagttctacacagcacccacagccatccgtctgctcatgaagtttggagatgagcctgtcaccaagcatagccgggcatccttgcaggtgttaggcacagtgggtgaacccatcaaccctgaggcctggctatggtaccaccgggtggtaggtgcccagcgctgccccatcgtggacaccttctggcaaacagagacaggtggccacatgttgactccccttcctggtgccacacccatgaaacccggttctgctactttcccattctttggtgtagctcctgcaatcctgaatgagtccggggaagagttggaaggtgaagctgaaggttatctggtgttcaagcagccctggccagggatcatgcgcacagtctatgggaaccacgaacgctttgagacaacctactttaagaagtttcctggatactatgttacaggagatggctgccagcgggaccaggatggctattactggatcactggcaggattgatgacatgctcaatgtatctggacacctgctgagtacagcagaggtggagtcagcacttgtggaacatgaggctgttgcagaggcagctgtggtgggccaccctcatcctgtgaagggtgaatgcctctactgctttgtcaccttgtgtgatggccacaccttcagccccaagctcaccgaggagctcaagaagcagattagagaaaagattggccccattgccacaccagactacatccagaatgcacctggcttgcctaaaacccgctcagggaaaatcatgaggcgagtgcttcggaagattgctcagaatgaccatgacctcggggacatgtctactgtggctgacccatctgtcatcagtcacctcttcagccaccgctgcctgaccatccagtgaacatgatcctgacctttacctaggattcctcctgctccaaactttgcccatcctctttgccccctcaggagtgctgagggccagtgttgacccacactaccctcccttgaccagctgtctgggaccggaaaccagctttgtctccaggtagagacaacatcctgtgactgccaggcagaaaggacagggcccaggtcagcctcagtctgctgtgcctccagactgcagagctctcagaacccagaacagagacgaaaaggctacctctcctacccaagttaagtgttcaaaggggatgtgagggcctccactgaagcagggaggcagctgtgtaatcctatgtcagctctcttaggaagccccagtacttatattgggcatgcacttgcccttaaaaacaatgatttgtgagtccaggaacaatttactatttttaaaatattttgctgcttctgttctgggtctgaattcccttttgtgccagatgccagtactgtctgcccattggctccaggggctgtatgggcagattcagtctccagagggtattcagatcatctgcttctttgaaggagtaaatgtgttttgttcctagggccagaggagcttgtcttccttgtcctctgttcccaccctcccctgaacagaacccagcccataagagacattctcagatgaaactctgttttcttgccccagtcaggctcaagccctgtggttgtaggaataaagcctgtgatctcaagaa

SEQ ID NO: 104498 - DNA, 567 bp, Homo sapiens
  Payload ID: 517
  Gene Symbol: ACSS2
  Gene Name: acyl-CoA synthetase short-chain family member 2
  ENST ID: ENST00000480274
  CDS Start-End: 67-249
ctgttttctcagtcccggcacccgccgcgaccgcaaaggcggccgcggttctaggaacttgacgtgatggggcttcctgaggagcgggtccggagcggcagcgggagccggggccaggaggaagctggagccggaggccgggcgcggagttggtctccgccgcccgagaattctggggagacattgccaaggaattttactggaagactccatgccctggcccattccttcggtacaactttgatgtgactaaagggaaaatcttcattgagtggatgaaaggagcaactaccaacatctgctacaatgtactggatcgaaatgtccatgagaaaaagcttggagataaagttgctttttactgggagggcaatgagccaggggagaccactcagatcacataccatcagcttctggtccaagtgtgtcagttcagcaatgttctccgaaaacagggcattcagaagggggaccgagtggccatctacatgcctatgatcccagagcttgtggtggccatgctggcatgtgcccgcattggggctttgcactccattgtggtaggag

SEQ ID NO: 104499 - DNA, 603 bp, Homo sapiens
  Payload ID: 517
  Gene Symbol: ACSS2
  Gene Name: acyl-CoA synthetase short-chain family member 2
  ENST ID: ENST00000493805
  CDS Start-End: 57-603
agtcccggcacccgccgcgaccgcaaaggcggccgcggttctaggaacttgacgtgatggggcttcctgaggagcgggtccggagcggcagcgggagccggggccaggaggaagctggagccggaggccgggcgcggagttggtctccgccgcccgaggtcagccgctccgcgcacgtcccctcgctgcagcgctaccgcgagctgcaccggcgctccgtggaggagccgcgggaattctggggagacattgccaaggaattttactggaagactccatgccctggcccattccttcggtacaactttgatgtgactaaagggaaaatcttcattgagtggatgaaaggagcaactaccaacatctgctacaatgtactggatcgaaatgtccatgagaaaaagcttggagataaagttgctttttactgtggagacgtggttttgccatgttggccaggctggtctcaacttcctgacctcagggagggcaatgagccaggggagaccactcagatcacataccatcagcttctggtccaagtgtgtcagttcagcaatgttctccgaaaacagggcattcagaagggggaccgagtggcca

SEQ ID NO: 104500 - DNA, 517 bp, Homo sapiens
  Payload ID: 517
  Gene Symbol: ACSS2
  Gene Name: acyl-CoA synthetase short-chain family member 2
  ENST ID: ENST00000484354
  CDS Start-End: 75-517
agttcggcctgttttctcagtcccggcacccgccgcgaccgcaaaggcggccgcggttctaggaacttgacgtgatggggcttcctgaggagcgggtccggagcggcagcgggagccggggccaggaggaagctggagccggaggccgggcgcggagttggtctccgccgcccgaggtcagccgctccgcgcacgtcccctcgctgcagcgctaccgcgagctgcaccggcgctccgtggaggagccgcgggaattttactggaagactccatgccctggcccattccttcggtacaactttgatgtgactaaagggaaaatcttcattgagtggatgaaaggagcaactaccaacatctgctacaatgtactggatcgaaatgtccatgagaaaaagcttggagataaagttgctttttactgggagggcaatgagccaggggagaccactcagatcacataccatcagcttctggtccaagtgtgtcagttcagcaatgttctccgaaaacaggg

SEQ ID NO: 104501 - DNA, 665 bp, Homo sapiens
  Payload ID: 517
  Gene Symbol: ACSS2
  Gene Name: acyl-CoA synthetase short-chain family member 2
  ENST ID: ENST00000473172
  CDS Start-End: 57-665
agtcccggcacccgccgcgaccgcaaaggcggccgcggttctaggaacttgacgtgatggggcttcctgaggagcgggtccggagcggcagcgggagccggggccaggaggaagctggagccggaggccgggcgcggagttggtctccgccgcccgaggtcagccgctccgcgcacgtcccctcgctgcagcgctaccgcgagctgcaccggcgctccgtggaggagccgcgggaattctggggagacattgccaaggaattttactggaagactccatgccctggcccattccttcggtacaactttgatgtgactaaagggaaaatcttcattgagtggatgaaaggagcaactaccaacatctgctacaatgtactggatcgaaatgtccatgagaaaaagcttggagataaagttgctttttactggtccacttctggtaattcatcctacagatatacttgcagggagggcaatgagccaggggagaccactcagatcacataccatcagcttctggtccaagtgtgtcagttcagcaatgttctccgaaaacagggcattcagaagggggaccgagtggccatctacatgcctatgatcccagagcttgtggtggccatgctggcatgtgcccgcattggggctttgcactccattgtg

SEQ ID NO: 104502 - DNA, 558 bp, Homo sapiens
  Payload ID: 517
  Gene Symbol: ACSS2
  Gene Name: acyl-CoA synthetase short-chain family member 2
  ENST ID: ENST00000475459
  CDS Start-End: 122-346
agatggggtcacaaggcctgtgtaggcttcaggaggtgggagctgcccgcttcaggcctcagaatcactcttggagttagatatttaagaatccttcctgccttgacagccagtctgtgaaatgatggtgaggtgggcacttctttgtgaattctggggagacattgccaaggaattttactggaagactccatgccctggcccattccttcggtacaactttgatgtgactaaagggaaaatcttcattgagtggatgaaaggagcaactaccaacatctgctacaatgtactggatcgaaatgtccatgagaaaaagcttggagataaagttgctttttactgatctcatggaaccaagggattgacttgtggtggcatgagctcatgcaagaggcaggggatgagtgtgagcccgagtggtgtgatgccgaggacccactcttcatcctgtacaccagtggctccacaggcaaacccaagggtgtggttcacacagttgggggctacatgctctatgtagccacaaccttcaagtatgtgtttgacttccatgca

SEQ ID NO: 104503 - DNA, 844 bp, Homo sapiens
  Payload ID: 517
  Gene Symbol: ACSS2
  Gene Name: acyl-CoA synthetase short-chain family member 2
  ENST ID: ENST00000480978
  CDS Start-End: 54-617
cccggcacccgccgcgaccgcaaaggcggccgcggttctaggaacttgacgtgatggggcttcctgaggagcgggtccggagcggcagcgggagccggggccaggaggaagctggagccggaggccgggcgcggagttggtctccgccgcccgaggtcagccgctccgcgcacgtcccctcgctgcagcgctaccgcgagctgcaccggcgctccgtggaggagccgcgggaattctggggagacattgccaaggaattttactggaagactccatgccctggcccattccttcggtacaactttgatgtgactaaagggaaaatcttcattgagtggatgaaaggagcaactaccaacatctgctacaatgtactggatcgaaatgtccatgagaaaaagcttggagataaagttgctttttactggtgttcaagcagccctggccagggatcatgcgcacagtctatgggaaccacgaacgctttgagacaacctactttaagaagtttcctggatactatgttacaggagatggctgccagcgggaccaggatggctattactggatcactggcaggattgatgacatgctcaatgtatctggacacctgctgagtacagcagaggtggagtcagcacttgtggaacatgaggctgttgcagaggcagctgtggtgggccaccctcatcctgtgaagggtgaatgcctctactgctttgtcaccttgtgtgatggccacaccttcagccccaagctcaccgaggagctcaagaagcagattagagaaaagattggccccattgccacaccagactacatccagaatgcacctggcttgcct

SEQ ID NO: 104504 - DNA, 2666 bp, Homo sapiens
  Payload ID: 518
  Gene Symbol: ACSS3
  Gene Name: acyl-CoA synthetase short-chain family member 3
  ENST ID: ENST00000261206
  CDS Start-End: 65-2122
ggccccaggaagttgcaagagtaccatttgtcgcacactcggggaccgcgggtggccggaggagatgaaaccgtcttggctgcagtgtcgtaaagtcaccagcgccggggggctcggagggcccttgcctgggtcctctccggcccggggagccggtgcggccctcagggctttagtggtcccgggcccgcggggcggtctcgggggccggggatgcagggcactgtcctccggcagtggcagcgagtacaagacccacttcgcagcctcggtgaccgaccccgagaggttctggggcaaagctgccgagcagatcagctggtacaagccctggaccaaaacgctggagaacaaacactcgccctctaccaggtttgtggaaggaatgcttaacatttgttacaatgccgttgatcgtcatattgaaaatggtaaaggggataagattgctatcatctatgacagtcctgttacaaacactaaagcaacctttacctataaagaagttctggagcaggtctccaagctggctggtgtcttggtcaagcatggcatcaagaaaggtgacactgtggttatctacatgcctatgatcccacaggcgatgtataccatgttggcatgtgcaaggataggtgccatccacagtctcatatttggaggatttgcttccaaagaactaagtagtcgcattgatcatgtaaagcccaaggtggttgttacagcatcatttggcattgaacctggaaggagggtagagtacgtaccacttgtagaagaagcgctaaaaataggacaacacaaaccagacaaaattctcatttataatcgtccaaatatggaggcggttcctttggctcccggtcgtgaccttgattgggatgaagagatggcaaaagcccagtcacatgactgtgttcctgttctttcagaacacccactgtatattctttacacatctggcacaacggggttacctaagggtgtgattaggcccactgggggatacgctgtcatgctacactggtcaatgtcttccatatacggacttcaacccggagaggtgtggtgggcagcttctgacttaggctgggttgttggacattcctatatctgctatggacctcttcttcatgggaacacaacagttttatatgaggggaagcctgtgggaacaccagatgctggcgcttatttccgtgtgcttgcagagcatggagtagctgccttgtttacagcaccaactgcaattagagcaatccgtcaacaggaccctggggcagctttggggaagcagtactctctgacaaggttcaaaacattatttgtggctggagaacgatgtgatgtagagaccctggaatggtccaaaaatgtcttcagagtacctgtcttagaccattggtggcaaactgagactggatctccaattactgcgtcatgtgttggattaggcaattctaaaacacctccaccagggcaagcaggaaaaagcgtcccaggatacaatgttatgattttggatgacaacatgcaaaaactgaaggctcggtgtttaggaaatattgtggtaaagttaccattgccacctggggctttttcaggactctggaagaatcaggaagcattcaagcatttatactttgaaaaatttcctggatattatgataccatggatgctggttacatggatgaagaaggctatttgtatgttatgtctcgagtggatgatgtaataaatgttgcaggtcacagaatttctgcaggcgccattgaagagtcaatcctttcccatggtaccgtggcagactgtgctgttgttggcaaggaagatcccttaaaaggtcatgtccccttagcactctgtgtattgagaaaagatataaatgcaacagaggagcaagttttggaagaaattgtgaaacacgttagacagaacattggccctgtggctgcttttcgaaatgcagtgtttgtcaaacagctacccaaaaccagatctggcaagatcccccgatcagctttatctgccattgtcaatggcaagccatacaagataacttctacaattgaagaccccagcatttttggccacgtagaagaaatgctgaagcaagcataatgagtttgtcttattcctattttgagttgatttaatttcttaattgaaattaaattatttgagttgtttctcagaaataaatatttcagtagaaattacttgcaaaatgaaatgtgaattgtaaaacttggcctaaacaaatctaatgaaaacatgtgaaagacctgtgccttttttttggtttgaccctgttagcattgttattagttatctataacatggcttattgaatgtcatctactgctttaggaaaaacgtatctagtgtattatttttaaaattgtacctcccaagaagaacactttaattgaaagcaacactaatatagagccacttcctgaaaccaagaatctgtagttttgatccaaaatctaaaacttaaagtcagaaaataattaaaatttttcttgtagaaattttagatattttctagtattctttagatgctcacattgttttaaataaaatagatgaaatgggaagtttaggtaatcatctagacagatgaaattattatctaggtaggagggcttttctatacatt

SEQ ID NO: 104505 - DNA, 534 bp, Homo sapiens
  Payload ID: 518
  Gene Symbol: ACSS3
  Gene Name: acyl-CoA synthetase short-chain family member 3
  ENST ID: ENST00000549175
  CDS Start-End: 255-534
aaggtggtggtggtggagaagaaagcttgggtgggttggtagccagatggagacgcaactgttccgcggcggcagatcttcagttgcggtgcggagctgagcagagacagagactgactgtgatgcccaggcttatctctaactcgtggcctcaagcaatcctcttgcctcaggctcccaaagcacttggattaccggataagctgtagacatgtttttaaaggtggatatgtgcctgtaggtttgtggaaggaatgcttaacatttgttacaatgccgttgatcgtcatattgaaaatggtaaaggggataagattgctatcatctatgacagtcctgttacaaacactaaagcaacctttacctataaagaagttctggagcaggtctccaagctggctggtgtcttggtcaagcatggcatcaagaaaggtgacactgtggttatctacatgcctatgatcccacaggcgatgtataccatgttggcatgtgcaaggataggtgccatccacagtctcatatttggaggat

SEQ ID NO: 104506 - DNA, 379 bp, Homo sapiens
  Payload ID: 518
  Gene Symbol: ACSS3
  Gene Name: acyl-CoA synthetase short-chain family member 3
  ENST ID: ENST00000546664
  CDS Start-End: 1-226
gcttgcagagcatggagtagctgccttgtttacagcaccaactgcaattagagcaatccgtcaacaggaccctggggcagctttggggaagcagtactctctgacaaggttcaaaacattatttgtggctggagaacgatgtgatgtagagaccctggaatggtccaaaaatgtcttcagagtacctgtcttagaccattggtggcaaactggtataaagcactaaagacctctttatcttctcttctttgtttcttatatctgagactggatctccaattactgcgtcatgtgttggattaggcaattctaaaacacctccaccagggcaagcaggaaaaagcgtcccaggatacaatgttatgattttggatgacaa

SEQ ID NO: 104507 - DNA, 9254 bp, Homo sapiens
  Payload ID: 518
  Gene Symbol: ACSS3
  Gene Name: acyl-CoA synthetase short-chain family member 3
  Uniprot ID: Q9H6R3
  ENST ID: ENST00000548058
  CDS Start-End: 911-2971
ctttctttttacattttcccagtttcctcttttgattcatctttacttacttcctatttttgttttttgtttatttgtttgttttgttttctcattagaaaagccacagaaactccaagcaggcaaattagaagggaggcaatgcaacaagtcctatctgttctctgtctagatcacatgcggagtctggtcagcaggtgaatccgcatcccagtggggtcaccttccctgtgacctgtcaatcaccccaagaagcacttcccaatttgtctggcacaacctccttccactcctcctaccctctcagtggtcaggaaatcccggagcagtccttgccctggagctgcttgtgtttttagtaaccagggactgagctgattttgaaaaatcaatcaatcaataaataacaatcaaagagccttgcctcaacgcaccgagttgctggtttcctgcaggtcagaggcgatgccacctccaccaacgaccttccaaagattaaaccagccgtgtacaaactgctggattgaaaattgagagatgggccgttggcctcctcctaggagtacttgtgtgttgaaatcggaaggacgttctggagtttgagcgcgatttttcccggaaggctgcggggttggaagtgcatgttggggtttggatctcgtgcagcagcgcaactaacctgctgcaacggcgctgtgacacccctgtcccggggcccccactttagcctgttgcttctctggtcgctccaggtcggtttttcccggcgactctagtgtggcttccaaacttctgggctctgggctcacttcggaatttgcccccgccccctactcccttccctcaggccccaggaagttgcaagagtaccatttgtcgcacactcggggaccgcgggtggccggaggagatgaaaccgtcttggctgcagtgtcgtaaagtcaccagcgccggggggctcggagggcccttgcctgggtcctctccggcccggggagccggtgcggccctcagggctttagtggtcccgggcccgcggggcggtctcgggggccggggatgcagggcactgtcctccggcagtggcagcgagtacaagacccacttcgcagcctcggtgaccgaccccgagaggttctggggcaaagctgccgagcagatcagctggtacaagccctggaccaaaacgctggagaacaaacactcgccctctaccaggtggtttgtggaaggaatgcttaacatttgttacaatgccgttgatcgtcatattgaaaatggtaaaggggataagattgctatcatctatgacagtcctgttacaaacactaaagcaacctttacctataaagaagttctggagcaggtctccaagctggctggtgtcttggtcaagcatggcatcaagaaaggtgacactgtggttatctacatgcctatgatcccacaggcgatgtataccatgttggcatgtgcaaggataggtgccatccacagtctcatatttggaggatttgcttccaaagaactaagtagtcgcattgatcatgtaaagcccaaggtggttgttacagcatcatttggcattgaacctggaaggagggtagagtacgtaccacttgtagaagaagcgctaaaaataggacaacacaaaccagacaaaattctcatttataatcgtccaaatatggaggcggttcctttggctcccggtcgtgaccttgattgggatgaagagatggcaaaagcccagtcacatgactgtgttcctgttctttcagaacacccactgtatattctttacacatctggcacaacggggttacctaagggtgtgattaggcccactgggggatacgctgtcatgctacactggtcaatgtcttccatatacggacttcaacccggagaggtgtggtgggcagcttctgacttaggctgggttgttggacattcctatatctgctatggacctcttcttcatgggaacacaacagttttatatgaggggaagcctgtgggaacaccagatgctggcgcttatttccgtgtgcttgcagagcatggagtagctgccttgtttacagcaccaactgcaattagagcaatccgtcaacaggaccctggggcagctttggggaagcagtactctctgacaaggttcaaaacattatttgtggctggagaacgatgtgatgtagagaccctggaatggtccaaaaatgtcttcagagtacctgtcttagaccattggtggcaaactgagactggatctccaattactgcgtcatgtgttggattaggcaattctaaaacacctccaccagggcaagcaggaaaaagcgtcccaggatacaatgttatgattttggatgacaacatgcaaaaactgaaggctcggtgtttaggaaatattgtggtaaagttaccattgccacctggggctttttcaggactctggaagaatcaggaagcattcaagcatttatactttgaaaaatttcctggatattatgataccatggatgctggttacatggatgaagaaggctatttgtatgttatgtctcgagtggatgatgtaataaatgttgcaggtcacagaatttctgcaggcgccattgaagagtcaatcctttcccatggtaccgtggcagactgtgctgttgttggcaaggaagatcccttaaaaggtcatgtccccttagcactctgtgtattgagaaaagatataaatgcaacagaggagcaagttttggaagaaattgtgaaacacgttagacagaacattggccctgtggctgcttttcgaaatgcagtgtttgtcaaacagctacccaaaaccagatctggcaagatcccccgatcagctttatctgccattgtcaatggcaagccatacaagataacttctacaattgaagaccccagcatttttggccacgtagaagaaatgctgaagcaagcataatgagtttgtcttattcctattttgagttgatttaatttcttaattgaaattaaattatttgagttgtttctcagaaataaatatttcagtagaaattacttgcaaaatgaaatgtgaattgtaaaacttggcctaaacaaatctaatgaaaacatgtgaaagacctgtgccttttttttggtttgaccctgttagcattgttattagttatctataacatggcttattgaatgtcatctactgctttaggaaaaacgtatctagtgtattatttttaaaattgtacctcccaagaagaacactttaattgaaagcaacactaatatagagccacttcctgaaaccaagaatctgtagttttgatccaaaatctaaaacttaaagtcagaaaataattaaaatttttcttgtagaaattttagatattttctagtattctttagatgctcacattgttttaaataaaatagatgaaatgggaagtttaggtaatcatctagacagatgaaattattatctaggtaggagggcttttctatacattttctgagggaaagcagaacaccggggttatagctataccttcaggtcttttgttacttaggcaaggaaaaccacatgtctgacctggttcagcatgtaatccgagcactttgggaggctgaggcaggcggatcacttgaggtcagcagtttgagacgagcctggccaacatggtgaaaccctgtagctactgaaaatacaaaaataagccaggcgtggtggcgggaggctgaggcaaggagaatcacttgaatacaagaggcagaggttgcagtgagccaagttcccccactgtactccagcctgggtgacagagtaagactccatctcaaaacaacaaaaacaacaaaaaaaccacatgcctggcggagaacaaagagatcatttagtccaatctcttcatggagatgagggctcctgggagcccctcttcatgtctcaggttcttagttgactatgtttatccaaatgattccagattcctgtggaaacaaggaatcgatgtacaaatggggtagggtggcaaggaaaactcttaagagagaaacatcaaggttttcacattaggttaaagacaagaaggtttctaggcaggtagtgtaatgtctaggtgattttgaagtgaacttaagccactaggtttgagggacaaaggacagtagaaaatggtgaagactgcagatcacctgctatacctcaaggagcagcggacccagcagaatatggcccaaaaaggaggcaggtctcctgttgcaagagcctctgtttttttaaagagaaaacaaagaatcctggtttttatgtgaaatctctaattttaaaataataactcattaaaaatattgtaatgtccaaaagtatctttccatttaacttctaaaaatctcttaaatgttttttttaaataattgtaaagtgagtttttgttaagcttataggaatgggccagttaactaaggtagacagatgtaggaaattaaatatttgatttacttagggatctatatgacatcagttatcaaagaatacattttaacccaaaagtataccatgctcattgtatctttgatcgttcttcaagtatttctcaatcttttaatctatcaggaacattactatcaagagcagattgttgtaacataatactcaggatacatgaaatgtatgtgagagataaatagataatagaaagtttattgttataaaaatgacctacaacttatataaaaaaattctgaaaatgttgactttttttggactgaagactgcaaaataaatggcttctcaaagtaaattcctatttacttaaattgccttcttgattgttacacctggaaaaatatattcatctactttttccttttaattatgttagtagactgaattaaaccagctacatagacactctctcatttgaagctgttgggatccttgagttgcctctttcattggtacgttttatccattgtcacaactgtggtcttcattaataactcattttaatgtcttaggagtagaatgtgtttccttattttttttcaaataagagtcagttaatttgaaatggcaaattatttacctgaatgtgtatcattgttcatttgcaaggtttaagctcaggcagatccaataattaggtaaaggttgcatctttggtcctcttgcacattttttctggtaatcaaatctgaagcgacatctcagcaagcagacttgggttattttccactaggatgggaatggaaaacagtgctggagactggggaagtggctatttcctgtgtctcactggggaattgcaagatcaaagaatgttgttacttttatgtgatgaaaaaatagggcaagaaagatatacctgaatcatcagactgcttaaaatttgggaggaaaaaattctattttactactaaccataaatcacttttgctagatagtactttaaagattctgaattaaatgtatctttaaaaacaacaatataatattactaaaaaatgcagacatacttaaacttgctagaataaattctgtgaggtcttcgtttggtattttcataggatttcttactgttaagttattggaaaatgaaaatataaagtgctttcagaagttatagtattttccaattcattgaattactttgcttgtgaaaatatattaaacatatttaaatgagacctatcctacatttaaaaaccagttttgtttatataaaattgtatttgaaaggtcctgaacattaaaaatgtgaaaatttataatgttgatgatcaaaagtaacgtgttgagactctgagcttaatccattaaatggattttagaatctagtagaagttatctttcttataaattaaaacatattttatgcttcttttttgagggaaatacctggatcttttgcatcactatatgttagtgtctattatagatgattaatctttctaacttgatctttaaaagaaagaaattgattttagtgattgagtgttatataatagtagatacaaatctagttatggcattataatgtcgtagttcctatattctatttcatttctatgaatcaagatgcccatgtttagatgagcttagaaagctacttctcattgttcctactcaggccacatttttagaaaaaaattttaagatcactcccataagcaagtttagatctccctcttgtggcagactcaattttgaagctaaatatttgggtcacccaaagaacacatttcctgatagtttaagtaaattgtcgagccttatgtgactagaaaacaaagcttaaacagagaactggaattattattttttttattgacaatggaaagggtttctgttatcattaccttttgactgaatctgttaaataaaaatagacatcaaaacaaatgtaatgtacgtgcaaacatagcaaattaaaatacagaaaagaaattactaatgacaggtcttgcgcttaataagatcaagcagcagaaaatcagcagttagataaatggtattattaaataggctttactttgaatctcccatataaacaaagaataaacaacagtaacaccaccaaataaagccacagggaagagattactcttctatacttttatacactatatatgttaatcattctgtctttcatttatttcctctgataaaactgacttcagggaagtcgcaacaaggccatctcggctaaaagcttataacattagacatgagtctggctaatgccctgttacattgacaaaagggaaaggtatcttgggtttcgttttctctagtggaaatgagcctcagactctgcggtggttgacattcactgtccagtactggctggcatttcaagatatttgaatgaacatgtggttcttagtaaagaagtttttttatctttttttttttcttggtccacaggtaacaagagaagattatggttttttaatataaatttttaaataattgcttttgacccttgtaaacagcttggctttgttttgtattgaaaaggagatcaagccatcacagtgctatttctaaagatataggacatccctgattgcctttaaagctctatttttggctccggttccaggttaaatcattcttttttacatgatcagaggcaggttgttcagctttaagtattgacagacttgaaggagaaacacgttgaagcatgaaacatgcttcaaggaaacatattgatttgactattaacaatccaaaaactgtaaaaatggtggaatggtaaaatacaaacagtacttggaattgtcaaatgtttgcactcgagactccatgaaccatatattttattttttaaaaaatcatatttatatccatttacataagacttacacatttaaaaagaaatgcacggtaatacataaatgcctagtatattacaataaaacatgaaaaacaactggcttcatttcataaaagcatctgttgtacagagtttatgatgtagatgatgtttattattcaaatgacttaagcattttattacaatttgtagtaaactaatcaaatgtaatatctgactccccccaaaaatcacatttttcagcttttaataagtcatgacgtcattatttccttagaattcagttttcacaaaggttttcactgctcgtcttcttagatggtagtgcactttaggtagagtagactgaaaagacgccatctaaaatatacaatggatagcattagttcactgaaaagtcccagactgggaaatctcattctactcctctgtggtgtacctccacgcagcctgcttactcctgtcctagaagatcatgagaaggaaatcatctaggatgtagccaacagccgtatgtaattaacatttgcttttctccaatttggtgcaggggagcttaacaaataatagaatttgctcaactttgtggaaagtatggcagtaatgtaaacaaaggtagttatgcaaaatgttagcatgccttctgaaaaatttacaacttgctaattaataaattgggttgaattgacctatttcataatgtagatttatattctagttcatatattttagagttcttaaaaaatacctttatttgttacaaaaacataacgataataagtcacctattgtaaacgtttgtgtcagtagtatggcattgctgattgttttcagccataatgtacttagaaaaagctcacaattgctattactgacacaaaagaaacagcaagtagtatgctctggattattttaatatcaaaagtgttgttgtttcacccaaacaaaaaatggttgtcctagattgaattattgtaaatgaatactgttatcccaattaatggtaaaaactaggaaatatgaactagaatgtcatgcacaaaaaacagattgcaaatagagtaactctacccatcacttaagagctaagaagcaagcactattgaacatattaaatagtcatttgtaaattagtgaagtgttcatttcctgaagaaattataatgctatgtgtagaatctaatataaacagtattttgggagacctcttatttagccaaattattatatactttaaatcatgtctaattaggtgccaaattatataccataattaaaattttaatgtaagggttgtacattctgaaattaaatctcttatcgggatgcttttcattttatcagcttcaaatagtgatccaaataaggcagcatatctgctcccatcctaagcccaaaagaccaacaataaattgtgtggcacttttagttcaaggcaatgaaaacagcacaaggtgagttgttcctctgtctataactgttttctcttaaccctgtgcacacattttgttctaaatatcgctcttaaaaagtatttttctaaaatattgattcatcgaaagtggttaaatattttggtaaagcatagttttaggttgaaaaaaaattatgaacatttgacatttataaatctaagaaaccacagttttactattaagactgtttttcaataaaacctcatttttatatggattttaaagtagctttcattaattggtatttccttaaaatcaaatgcttggtatttatggttacataggaaggttttgtgctggtcctattctccattcttaaagtaattttattttgttcctatatgtcttaaatacttaaaatttatatttgtttttagcaagtgtaaatcagattgataagaaacaatgtaataaaggtttgaatttttca

SEQ ID NO: 104508 - DNA, 1713 bp, Homo sapiens
  Payload ID: 519
  Gene Symbol: ACOT1
  Gene Name: acyl-CoA thioesterase 1
  Uniprot ID: Q86TX2
  ENST ID: ENST00000311148
  CDS Start-End: 309-1574
gccgggacgaaccagtcctggcccagcccattccgcgagccagcaagcttctgaaaagcaaacctaggaagttgctttccaacataaagtggaggtttcaacacaggagactttaagcaagttccagtgtgtctatatttggtctggctgatcggctggactctggccttccccgctcacattagcagacagctctgccctagtgggcgtttagcctgcgacggcagcccgagaggaagagttgggcagagttgcaggggtctccacagctgaggcagtttggccggattatttgggttcctgctcggatggcggcgacgctgatcctggagcccgcgggccgctgctgctgggacgaaccggtgcgaatcgccgtgcgcggcctagccccggagcagccggtcacgctgcgcgcgtccctgcgcgacgagaagggcgcgcttttccaggcccacgcgcgctaccgcgccgacacccttggcgagctggacctggagcgcgcgcccgcgctgggcggcagcttcgcggggcttgagcccatggggctgctctgggccttggagcccgagaaacccttggtgcggctggtgaagcgcgacgtgcgaacgcccttggccgtggagctggaggtgctggatggccacgaccccgaccccgggcggctgctgtgccgggtgcggcacgagcgctacttcctcccgcccggggtgcggcgcgagccggtgcgcgcgggccgggtgcgaggcacgctcttcctgccgccagaacctgggccctttcctggcattgtggacatgttcggaactggaggtggcctgctggagtatcgggctagtctgctggctgggaagggttttgctgtgatggctctggcttactataactatgaagacctccccaagaccatggagacgctccatctggagtactttgaagaagctgtgaactacttgctcagtcatcctgaggtaaaaggtccaggagttgggctgcttggaatttccaaagggggtgagctctgcctttccatggcctctttcctgaagggcatcacggctgctgtcgtcatcaacggctctgtggccaatgttgggggaaccttacgctacaagggcgagaccctgccccctgtgggcgtcaacagaaatcgcatcaaggtgaccaaagatggctatgcagacattgtggatgtcctgaacagccctttggaaggacctgaccagaagagcttcattcctgtggaaagggcagagagcaccttcctgttcctggtaggtcaggatgaccacaactggaagagtgagttctatgctaatgaggcctgtaaacgcttgcaggcccatgggaggagaaagccccagatcatctgttacccagagacagggcactatattgagcctccttacttccccctgtgtcgggcttccctgcatgccttggtgggcagtcctattatctggggaggggagcccagggctcatgccatggctcaggtggatgcttggaaacaactccagactttcttccacaaacacttgggtggccacgaggggacaatcccatcaaaagtgtaaattttatttgatcatgtggcctctctgttgctaatctctcctggaaacatctgccacatttagtgtgtgtatgtgtattcattctttctcataacttcttaaagtttcttcccctcattattaaaatgaatttaccagt

SEQ ID NO: 104509 - DNA, 1271 bp, Homo sapiens
  Payload ID: 519
  Gene Symbol: ACOT1
  Gene Name: acyl-CoA thioesterase 1
  ENST ID: ENST00000557556
  CDS Start-End: 29-1216
tggccggattatttgggttcctgctcggatggcggcgacgctgatcctggagcccgcgggccgctgctgctgggacgaaccggtgcgaatcgccgtgcgcggcctagccccggagcagccggtcacgctgcgcgcgtccctgcgcgacgagaagggcgcgcttttccaggcccacgcgcgctaccgcgccgacacccttggcgagctggacctggagcgcgcgcccgcgctgggcggcagcttcgcggggcttgagcccatggggctgctctgggccttggagcccgagaaacccttggtgcggctggtgaagcgcgacgtgcgaacgcccttggccgtggagctggaggtgctggatggccacgaccccgaccccgggcggctgctgtgccgggtgcggcacgagcgctacttcctcccgcccggggtgcggcgcgagccggtgcgcgcgggccgggtgcgaggcacgctcttcctgccgccagaacctgggccctttcctggcattgtggacatgttcggaactggaggtggcctgctggagtatcgggctagtctgctggctgggaagggttttgctgtgatggctctggcttactataactatgaagacctccccaagaccatggagacgctccatctggagtactttgaagaagctgtgaactacttgctcagtcatcctgagggcatcacggctgctgtcgtcatcaacggctctgtggccaatgttgggggaaccttacgctacaagggcgagaccctgccccctgtgggcgtcaacagaaatcgcatcaaggtgaccaaagatggctatgcagacattgtggatgtcctgaacagccctttggaaggacctgaccagaagagcttcattcctgtggaaagggcagagagcaccttcctgttcctggtaggtcaggatgaccacaactggaagagtgagttctatgctaatgaggcctgtaaacgcttgcaggcccatgggaggagaaagccccagatcatctgttacccagagacagggcactatattgagcctccttacttccccctgtgtcgggcttccctgcatgccttggtgggcagtcctattatctggggaggggagcccagggctcatgccatggctcaggtggatgcttggaaacaactccagactttcttccacaaacacttgggtggccacgaggggacaatcccatcaaaagtgtaaattttatttgatcatgtggcctctctgttgctaatctctcctggaaacatctgcc

SEQ ID NO: 104510 - DNA, 3082 bp, Homo sapiens
  Payload ID: 520
  Gene Symbol: ACOT11
  Gene Name: acyl-CoA thioesterase 11
  Uniprot ID: Q8WXI4
  ENST ID: ENST00000343744
  CDS Start-End: 83-1867
atttggagtcaggcctggctgttgctcaggtgaccagcttgtgtctctgggagggcgctgctttccccggccacccggcgcgatgatccagaatgtcggaaatcacctgcgacggggcttggcctctgtgttctccaaccgcacatcccggaagtcagccttacgtgcggggaacgacagtgccatggcagacggcgagggataccggaaccccacggaggtgcagatgagccagctggtgctgccctgccacaccaaccaacgtggtgagctgagcgtcgggcagctgctcaagtggattgacaccacggcttgcctgtccgcggagaggcacgctggctgcccctgtgtcacagcttccatggatgacatctattttgagcacaccattagtgttggacaagtggtgaatatcaaggccaaggtgaaccgggccttcaactccagcatggaggtgggcatccaggtggcctcggaggacctgtgctctgagaagcagtggaatgtgtgcaaggccttggccaccttcgtggcccgccgagagatcaccaaggtgaagctgaagcagatcacgccgcggacagaagaggagaagatggagcacagtgtggcggctgagcgccggcgcatgcgccttgtctatgcagacaccatcaaggacctcctggccaactgcgccattcagggcgatctggagagcagagactgtagccgcatggtgccggctgagaagacccgtgtggagagtgtggagctggtcctgcctccccacgccaatcaccagggcaacacctttgggggccagatcatggcctggatggagaatgtggccaccattgcagccagccggctctgccgtgcccaccctacgctgaaggccattgaaatgttccacttccgaggcccgtcccaggtcggcgaccgtctggtgctcaaagccatcgtgaacaatgccttcaaacatagcatggaggtgggcgtgtgcgtggaggcctatcgccaggaggctgagacccaccggcgccacatcaacagtgcctttatgacctttgtggtcctggacgcagatgaccagccccagttgctgccctggattcggccccagcccggcgatggtgagcggcggtaccgagaggccagtgccagaaagaagatccgcctggacaggaagtacatcgtgtcctgtaagcagacagaggtgcccctctccgtcccctgggaccctagcaaccaggtgtacctgagctacaataacgtctcctccttgaagatgcttgtggccaaggacaactgggtgctgtcctcggagatcagtcaggtccgcctgtacactctggaggatgacaagttcctctccttccacatggagatggtggtgcatgtggatgcagcccaggccttcctgctgctctcggacctgcgtcagaggccagagtgggacaagcactaccggagcgtggagctagtgcagcaggtagacgaggacgacgccatctaccacgtcaccagccctgccctcggaggtcacacaaagccccaggacttcgtgatcctggcctcgaggcggaagccttgtgacaatggggacccctatgtcatcgcgctgaggtcggtcacgctgcccacacaccgagagacgccagagtacagacgcggagagaccctctgctcaggcttctgcctctggcgcgagggggaccagctgaccaaggtatcctactacaaccaggccaccccaggtgttctcaactatgtgaccaccaacgtggccggcctctcctctgagttctacaccaccttcaaggcttgtgagcagtttctcttggacaaccggaatgatctggcccccagcctccagaccctctagatgccctcagtggccacatcatgcccactcccactccatcctgtccccaaggactcacatacagtgcctggagaaagccaaagacctttatttcttcctgcctccccgtgggaagcctccgccctgaggtccgctggcccaccacccctgggtgctcagtttctaccaacatgagccagcaagtccttgtggtagccctggggtagcctgtagtagactcgggtcctgtccacagccctagctgccagcaatgctgtcctcacagaggcatagtcgcccccagctgggttgtgctccactgtgacggtggcccggggggaggatgccagcagcctgcctatggctccagctgtgctgtggcccagcagcatggcctgcatctggaaggacacaggttgccagagcccctggcacaactctagcatatctgtgagcagctgttccctgtagccactgcccagcacctcctcaggccagcctggtgccacagtcacgtgggggaagacctcagccacagctgtaagcagctctctgccagccacatggccggggaccgaaaaactcccgtgggagattttggccccaacccacacaggccaatgcaagaggccaaggctggagaggcgtgccagcaaggccagggatggccggagggctgcgggctccgctatttgcaaatggatgccccagtgtccgggatgtgtggccagctgctgcaggcaggactccagcgtcaggatgttgccacttggagtatgaacaatgggcacggggttttcagccacagttccctcgaggccagtgttcagcaggatcatgccttctgtgtctggaagaggcggcagaggcaacagtgtttaggatttgggttatcataaggtgttaagagtcccttgttaaaggggcagtgggagttatggggtcatcaaggaccttgcctctctggaatctgtcaacccagttttgggctccaggtggatgggttgctttataaatgtgcctggtgcatgagaaactcttgtttcagctcttggcctttacccatgactcagcctgggggctggtgccggccttgcctgcagcaatgtagctgaggactggtctgaaggccaggagccctgtgctcttgacatcactgtactccctctccctccccgcaaccctgccccaccttgcatccagggtatggtgtaaataaacctgtgttgccatggc

SEQ ID NO: 104511 - DNA, 6369 bp, Homo sapiens
  Payload ID: 520
  Gene Symbol: ACOT11
  Gene Name: acyl-CoA thioesterase 11
  Uniprot ID: Q8WXI4
  ENST ID: ENST00000371316
  CDS Start-End: 83-1906
atttggagtcaggcctggctgttgctcaggtgaccagcttgtgtctctgggagggcgctgctttccccggccacccggcgcgatgatccagaatgtcggaaatcacctgcgacggggcttggcctctgtgttctccaaccgcacatcccggaagtcagccttacgtgcggggaacgacagtgccatggcagacggcgagggataccggaaccccacggaggtgcagatgagccagctggtgctgccctgccacaccaaccaacgtggtgagctgagcgtcgggcagctgctcaagtggattgacaccacggcttgcctgtccgcggagaggcacgctggctgcccctgtgtcacagcttccatggatgacatctattttgagcacaccattagtgttggacaagtggtgaatatcaaggccaaggtgaaccgggccttcaactccagcatggaggtgggcatccaggtggcctcggaggacctgtgctctgagaagcagtggaatgtgtgcaaggccttggccaccttcgtggcccgccgagagatcaccaaggtgaagctgaagcagatcacgccgcggacagaagaggagaagatggagcacagtgtggcggctgagcgccggcgcatgcgccttgtctatgcagacaccatcaaggacctcctggccaactgcgccattcagggcgatctggagagcagagactgtagccgcatggtgccggctgagaagacccgtgtggagagtgtggagctggtcctgcctccccacgccaatcaccagggcaacacctttgggggccagatcatggcctggatggagaatgtggccaccattgcagccagccggctctgccgtgcccaccctacgctgaaggccattgaaatgttccacttccgaggcccgtcccaggtcggcgaccgtctggtgctcaaagccatcgtgaacaatgccttcaaacatagcatggaggtgggcgtgtgcgtggaggcctatcgccaggaggctgagacccaccggcgccacatcaacagtgcctttatgacctttgtggtcctggacgcagatgaccagccccagttgctgccctggattcggccccagcccggcgatggtgagcggcggtaccgagaggccagtgccagaaagaagatccgcctggacaggaagtacatcgtgtcctgtaagcagacagaggtgcccctctccgtcccctgggaccctagcaaccaggtgtacctgagctacaataacgtctcctccttgaagatgcttgtggccaaggacaactgggtgctgtcctcggagatcagtcaggtccgcctgtacactctggaggatgacaagttcctctccttccacatggagatggtggtgcatgtggatgcagcccaggccttcctgctgctctcggacctgcgtcagaggccagagtgggacaagcactaccggagcgtggagctagtgcagcaggtagacgaggacgacgccatctaccacgtcaccagccctgccctcggaggtcacacaaagccccaggacttcgtgatcctggcctcgaggcggaagccttgtgacaatggggacccctatgtcatcgcgctgaggtcggtcacgctgcccacacaccgagagacgccagagtacagacgcggagagaccctctgctcaggcttctgcctctggcgcgagggggaccagctgaccaagtgctgctgggttagggtctccctgactgagctggtctcggcaagtggcttctattcctgggggctcgaatccaggtcaaagggtcgcaggagcgacggttggaatggaaaactagctggaggacacctgagtactcttaaagcaatccccgtggccaaaatcaacagccgatttggataccttcaagacacctgaaaccttatcatgagccagatgccaaggaagagactctgggaggatccagaggaccccctggttgcagccacgtagagactgacgctgaggaggactccaactatcatgagcaacacccgtcgaacacagccaccccgctaagaacagatcaagaagctgtcacagatggcggaagaaaacctgaggaaagcgggacaaccagtcacaatgaataatttaatggtagctatgatagcagttatcaccactgccgtgagtattccttcaataagggctggtaataatgcctggatgcaatcattctatgacacagttacacatgctttctgatctcagtatttaccataataaatcggctcctataattgaggcataccaccctcaaaaacctatttgtaaacaggattggacccagttagaaaaaatgaacgtacttatttaggaagattgctttgcagaataggcagagatgctgcacaacgattcctatggaatcattactaattggtcccccaaggggatgtttagcttgaattgcacctctcagtctgcatgccacggtcacactatgttcagatgatctgaacaaaacagtcagatggtagaaatgttaagtacggcaaaagttcctattatctggaaccatggcggtatagtggcacctcaacctcaaataatatggcccgctctaggagctaaacataaggatttgtaaaaactattaaatgctcttaataagatcaaaatttgggaaagaataaaagagtatctagaaggacactctacaaacttgtttttggatatagcaaaattaaaagaacaaatatgtaaagcatcccgggcaacctgaccttaatgccaggaaccagagtgcttaaaggagctgcagaaaaattagcagctagtaacccatttaaatgggtaaaaacacttggaagctctgtgatttcaatgatgactatgctttttaatctgttgtttgcctttgtatagtctgcagatgcggatcccgactcctgcgagagtctctttgcaaatcgaagaagggagacatgttgggagcaagccccccagagtctggccataaactggccccaaaactggccataagcaaaacctctgcagcactaaaacatgtccataatggccctaacgcccaatctggaaggttgtgggtttatgggaatgagagcaaggaacacctggcctgcccagggcggaaaaccgcttaaaggcattcttaagccacaaacaaaagcatgagcgatctgtgtcttacgggtgtgttcctgctgcaattaattcagcccatccctttgtttcccataagggatacttttagttaatttaatatctatagaaacaatgctaatgactggtttgctgttaaatgaaggggtgggttgcccctccacacctgtgggtgtttctcgttaggtggaacgagagacttggaaaagagacacagagacaaagtatagagaaagaaaagtgggcccaggggaccagcattcagcatacagaggatccacactggcaccggcctctgagttcccttagtatttattgatcattatcgagcatggcaggataataggataatagtggagagaaggtcagaaggtaaacacatgaacaaaggtctctgcatcataaacaaggtaaagaattaagtgctgtgctttagatatgtatacacataaacatctcaatgccttaaagagcagtattgctgcccgcatgtcatacctacagccctaaggcggttttcccctatctcagtagatggaagtatattccatgtaaagtaaatcggctttacacccagacattccattgcccagagacgagcaggagacagaagccttcctcttatctcaactgcaaagaggtgttccttcctcttttactaatcctcctcagcacagaccctttatgggtgtcgggctgggggatggtcaggtctttcccttcccacgaggccatatttcagactatcacatggggagaaaccttggacaatacctggctttcctaggcagaggtccctgcggcctttgcagtattttgcgtctctgggtacttgagattagggagtggtttgagattagggagtggtgatgactcttaaggagcatgctgccttcaagcatttgtttaacaaagcacatcttgcacagcccttaatccatttaaccctgagttgacacagcacatgtttcagggagcacagggttgggggtaaggttacagattaacggcatctcaaggcagaagaatttttcttaatacagaacaaaatggagtctcctatgtctacttctttctacacagacacagtaacaatctgatctctcttttccccacagttaataaatatgtgggtaaatctctgttgggggctctcagctctgaaggctgtgagacccctgattttctacttcacacctctatatttttgtgtgtgtgtctttaattcctctagcgctgctgagttagtgaccgagctggtctcggcagaggtgggcgggtcttttgagttcaggagttcaagagcagcctggccaacatggtgaaaccccttctctactaaaaatatgaaaattatccgggcatggtggtgtgcctctgtactttcagctactcaggaagctgaggcacaagaattgctggaacatgggaggtggaggctgcagtgagctgagatcatgccactgcactccagcccaggcaatagagtaagactctgtctcaaaacaaaaagagttttaggccaggtgtggtggctcacgcctgtaatcccagcactttgggaggctgaggtgggcagatcacctgaggtcaggagttcgagaccagtctggccaacatggcgaaaccccatctctctctactaaaaatacaaaatttagccaggtgtggtggtgggtgcctgtaatcacagctgcttgggaggctgaggcaggagaattggttgaacccaggaggcagaggttacagtgagcagagatcgtgccactgcattccagccggggtaagagagcgagactctgcctcaaaaaaagaaggcttagtgtgcaactcatcagagttgcacagggcagagaaagaatgggaaaaaaacaatttctagaaaacttttcgaattttctgatcaacaccaaatattccaaataggaaaaatacaaaaaaatccatacctatatgtggcataatatgattgtagagcaccaaagtaaaagatcttattttttattaaaattaaaaaaaaattaaaatagagggtctcactatgctgcccaggctggtcttgaactcctggcttcaagctatcctcccaccatggcatcctaaagtgctgggattgcaggcatgagctgctgcatctggcccaaagtaaaagatcttagaagcggccagaaaaaatagatttgggctgggcatgaatagattgatcaccaaaaaggtggcagactaacttctcgacagaatccacagaagccagaaggcagtggaacattagctttgatgtactaaaataaaataccacgctaggctcctacatacagtgaaaatgttttgagaatgagaattataattttttggcaaacaaaactaaaggagtttacaactaagaaactcttttgtgagacagccttgctctgttgcccaggctggagtgcagtgacgaaatctcagctcactgcaacctcggcctcccgggttcaggcaattcttgtgtctcagccttccaagtagctgggattacagatgtgcgccaccaggcccagctactttttatatttttagtggagatggggtttcactgtgttggccaggctggtctcaaactcctgacttcaagtgatctgcccgccttggcctgctaaagtgctgggattacaggcatgagcgactgtgcctctccagtccctgtgtttttttttgtttttggaggttttatttgtttgtttttagagacactttcactgtgttgcccaggcctgtctgttggcctcaagtgatcctcctgccttggatctcccaaagtgctgggattacaggtgtgaaccactgtgctcagcccattttttatttgtttcttgaaggaaggtagcagtattaattaattttggactttgctcactaaagtttgaatgttaagaatagatgtatacagtctggatgcagtggtgcatgcttgtaattttagcactttgggaggctgaagcgggaggatcgcttgggctcaagagtttgagaccagcctgggcaacatggtgaaaccttgtctctacaaaaaaattttaaaaaattagccagacatgatggcatgcacctataatcccagctacttgggaggctgaggtgggaggattgcttgagtccagggaggtcgaggctgcagtgagccatgatcacaccactgcactccagcctgggtgacagagtgatactgtctc

SEQ ID NO: 104512 - DNA, 2086 bp, Homo sapiens
  Payload ID: 521
  Gene Symbol: ACOT12
  Gene Name: acyl-CoA thioesterase 12
  Uniprot ID: Q8WYK0
  ENST ID: ENST00000307624
  CDS Start-End: 30-1697
gccgcaggcgtagcgctctcgccctggccatggagcggccggcgcccggcgaggtggtcatgagccaagccatccagccggcgcacgccactgcgcgcggcgagctgagcgcggggcagctgctcaagtggatcgacaccaccgcctgcctggcggctgagaaacatgctggagtttcctgcgttacagcctcagtggatgacatacagtttgaggagacagctagagttggacaagttataaccatcaaagcaaaagttactagagcattcagcacaagcatggagatcagtatcaaggtcatggtacaggatatgctcactggcattgagaagcttgttagtgtggctttctccacatttgtagccaaaccagttggaaaagaaaagattcatttaaaaccagtcacacttctaactgaacaagatcatgtggaacataatctggctgctgagagaaggaaagttcgattacaacatgaagatacctttaacaatttaatgaaggaaagtagcaaatttgatgatctcatttttgatgaagaggaaggagcggtttccacaaggggcacctccgttcagagcattgaactggtcctcccaccccatgcaaaccatcacggaaatacatttggtggccagattatggcgtggatggagacagtggctactatttctgcaagccgcctgtgttgggctcatccctttctgaagtccgtagatatgtttaagttccggggaccatctacagttggagatcgtcttgtcttcactgccattgtcaacaatacatttcagacctgtgttgaagttggagttcgcgtggaggcctttgactgtcaggaatgggccgagggccgagggcgtcacatcaacagtgcttttctcatttacaatgctgctgatgataaggaaaatctcatcacgtttcccagaatccaacccatttcaaaggatgatttcagacgctatcggggagctattgcacgcaagcgaattcgcctaggcagaaaatatgttatttcccacaaagaagaggttccactttgcatacactgggatatcagcaagcaggcatccctgagtgacagcaatgtggaggccctcaaaaaactggcagccaaaaggggttgggaggttaccagcactgtggaaaagataaaaatatatactctggaagagcatgatgttttatctgtttgggttgaaaagcacgtgggaagtccagcacatttggcttatcgtctcttgtctgactttacaaagcgacctttgtgggacccccattttgtgtcctgtgaagtcatagactgggtgagtgaagatgatcagctgtatcacatcacctgtcctatactgaatgatgacaaacccaaagacttggtagtactcgtatcacgaagaaaacccctcaaagatggtaacacttacacagtggcagtgaagtcggtcattttgccatcggtccccccgtctccacagtacatcagaagtgaaatcatatgtgccggatttctcatccatgctattgacagcaattcatgcatcgtatcttactttaaccatatgtctgctagcatccttccttactttgctggaaatcttggtggctggtcaaaatccattgaagaaacagcagcctcttgtatacagttcttagagaatcctcctgatgatgggtttgtaagcacattttaaaggtcaactttcaattactggtaatttaatttcccacttttaattccaagcacccttagccctgacatctgtcaagctttggggccacaaaataatttaatataaccctaagcaaaatgcagtgacggagttaaaaaacaaaatgcatcttaagtcaaataccagtgatttggattagcattaaaagagctttagaattctgttgtaagtcatctgtggctctgcctcttccaggggcacagatagtggaaaattgcctgtatgcagtactatgtgttctataaaatggcatgaatttagtttaaattatcgtaaacatttttaggttacagaggtgaaacatgcattctgtgtgaaattccaaaaaaaaaattataaaatctaaaatg

SEQ ID NO: 104513 - DNA, 612 bp, Homo sapiens
  Payload ID: 521
  Gene Symbol: ACOT12
  Gene Name: acyl-CoA thioesterase 12
  Uniprot ID: Q8WYK0
  ENST ID: ENST00000513751
  CDS Start-End: 66-569
cggggcgggcggagcgggcatggtggggtgtcgggggccgcaggcgtagcgctctcgccctggccatggagcggccggcgcccggcgaggtggtcatgagccaagccatccagccggcgcacgccactgcgcgcggcgagctgagcgcggggcagctgctcaagtggatcgacaccaccgcctgcctggcggctgagaaacatgctggagtttcctgcgttacagcctcagtggatgacatacagtttgaggagacagctagagttggacaagttataaccatcaaagcaaaagttactagagcattcagcacaagcatggagatcagtatcaaggtcatggtacaggatatgctcactggcattgagaagcttgttagtgtggctttctccacatttgtagccaaaccagttggaaaagaaaagattcatttaaaaccagtcacacttctaactgaacaagatcatgtggaacataatctggctgctgagagaaggaaagttcgattacaacatgaagatacctttaacaatttaatgaaggaaagtagcaaatttgatggtcagtaaatccacttataagaattttaattctataactgtgacaggcaaa

SEQ ID NO: 104514 - DNA, 4047 bp, Homo sapiens
  Payload ID: 522
  Gene Symbol: ACOT13
  Gene Name: acyl-CoA thioesterase 13
  Uniprot ID: Q9NPJ3
  ENST ID: ENST00000230048
  CDS Start-End: 194-616
aaagtcagtgagcaaatcgcggaccaccggggctgccagctcgcctgactcccggcctcttgcgctcctaggggcggagaagggtgcgggctcttcgccctttgtgtcctccttctttcactaacttctggactttccagctcttccgaagttcgttcttgcgcaaagcccaaaggctggaaaaccgtccacgatgaccagcatgactcagtctctgcgggaggtgataaaggccatgaccaaggctcgcaattttgagagagttttgggaaagattactcttgtctctgctgctcctgggaaagtgatttgtgaaatgaaagtagaagaagagcataccaatgcaataggcactctccacggcggtttgacagccacgttagtagataacatatcaacaatggctctgctatgcacggaaaggggagcacccggagtcagtgtcgatatgaacataacgtacatgtcacctgcaaaattaggagaagatatagtgattacagcacatgttctgaagcaaggaaaaacacttgcatttacctctgtggatctgaccaacaaggccacaggaaaattaatagcacaaggaagacacacaaaacacctgggaaactgagagaacagcagaatgacctaaagaaacccaacaatgaatatcaagtatagatttgactcaaacaattgtaatttttgaaataaactagcaaaaccagaagcagctagaaatattcttggaggaaaaggacctggatatcaagtagggtaaaggtgggggtgtcttttttcactttaagcatcttgttttctaatcatgtgtgataattgggtgaaaaattcttagctcaaagtgttttaaaaacaggtaaagcaaagaaactagcaggaccactctcagttaagattaaaactaaagtccagtgttaagctaaaggagaaatagaaattaatggttctaattctgtttgggctgctaggaacaacagaaatttttcatggttctagaagctggaaagtcctgggtcaaggcccagcagatcctgttaggtgagggcccgcttcctggctcatagatggtgccttctcactgtgtggtggaaggggcaagtgagccctctgggttctcgtttttgaaatggagtctcgctctgttgcccaggctggagtacagcagcacgatctcggctcactgcaatctctgccccctgggttcaagtgattctcctgcctcagcctcccaagtagctgggactataggcatgtgccatcacacctagctaatttttgtagttttttgtagaaacagggttcaccatgttggccaggctggtctcgaactcgtgacctcaggtgatccgcctgccttggccccccaaagtgctgggattacaggtgtgagccaatgtgcccagcctgggttctcttttgtaagggcacttactccaatcttgagggttctgccctcgtgatctaataacttcccaaagacccccacctgctaatatcaccttgggggttgggattttaacatacaaatttaggggaaacacatggagaccacagcaatggccaatccttagcgaatcttaggtccttcccagatctaaaatgccaagctacacttgcatttcctttttttaagattatgaaacttcaaaatatatgaactacagcccatattgaaaaataaaatagattgagccatatgcctaaaaaagacctcaagaaaagtttgaggctaagcatgttagtgttacaggaaatggtccaatagagggggaagaaaaaaagcatgctactagccccttttcttgtaccgagaataaaaccatgcagatctcaaacctccaagtctatagtattgaaaagaccaagttcacttctcagaagtctccaagttcagttgactgtggcactctgagacagcttctgtcactcaggctggagtgatacaatcacagcttcccatagcctcaaaatcccaggctcaagacattcttccacctcagtctcctgagtagctggaactacaggcgtgtgccaccacgcctaattttatttttgtagaaacaaggtctcactgttgcccagcctcgtctcaaactcctaggctcaagcaatcctcctgccttggccccccaagtactggacttacaggtgtgaaccactgcacccagctgactcttacttgatttctgtcagggaatcttaatgaacatttcatgactaaagactaaaaaggatgcagctttaagtaaatttaagtcaagttaacagttaaagacaaatcctttccctacattagatcgcctgctgatctgtccactgtgaaagggcagaagactccacagtagcaatagcagcagtgagcatacaggagtcccagatgtttacttctagtatttcccactaaaaggaagctgggctccttggagaaacagctgactccagggcttgaggctgggacagaaaggttacagtatcttatgcatgaaaggagatgctcaaaataataaaggcatgcaaattatgatttggagggaaaaaatatgaggccatagtgtttaggtagataataaatggcagagatagaacactctcttacaacaaatgctgtaaatggacaaagcattagatttggaaaatcactattttgtaaccatcatagttaaagactggtttgggttttagtctggaaagaatcgccaagggagctcctgataaaggaacagggtatttgcacattgcttcccagagattgctagtagtaagtaccacacatagggcaaaaccaggacaccttgaccaggcgctcaaaagtaacatcaatgaagagcagatggagagtatacttgagaagggcgttaagcatgaataaacaattcaaatgcaaaatgagtaacaatttacaagaaaaattgccctgtactccaaaaaacatagaggtcatggaacacataaaggctaaggaactgttccacattaaagacaactgagaacaactaaattcaatgatcctgtactctagagggggggatctaaaacaagctaccaaggatactgggacaacaaaacgaatatggatgataaagagtatcaacattccctgagtttggtaattttactctagttatatgaaatattcttgtacttggaacatatgccgaagtactaaggaaggggtaaggaagcacaaagtgtgcaacaaactcaaatagctcacaggtataagtgtacagagaaaatgaaaaaaatgtggcaaaataataaaaatgagggtaaagattacacaacagctttcatattactctggtaacttttctaaattattccaaaataaaaacgtaaacaatggctgccaaaatgcctaacttggtgaacataagtgtaattcaatatggtaaattaattcaacatggtaaattaagagcataggccttaagagccagccagcctggttttaaatcctccactacttatgatctgagcttgagcaagttacttaacctctgcatctatttccaccaaaggttgagaggttaagacaagagcttagaagagtacctggttataataaacattcaaaatgttatttcaaatagattctaatttttaaataagaggacacatgaaagcattttgaaatttaagaatggccctttcccatgaagcaaggcataaggccaggttgctaactgttgaaagctgacagtatgttcttgattcctgttcttgttgaagttacacactcaattgccaggtatttttcttctgaatttactatttagccacagactatgaaataattctctaaggtgaccagtaacatcagtgaaatggaaagaaaaagttaacacttcaaactttgtgtattcacctgaatagtcagggaactttcacctattttatttaggttttctttttctttttttctttttttttcaaattccaaccagaagctaaatacaattggaaactggtaagcactagttttactccaaaggagtaggatcattcagatttactccaataaaagtatgcaacccttaa

SEQ ID NO: 104515 - DNA, 4391 bp, Homo sapiens
  Payload ID: 522
  Gene Symbol: ACOT13
  Gene Name: acyl-CoA thioesterase 13
  Uniprot ID: Q9NPJ3
  ENST ID: ENST00000537591
  CDS Start-End: 588-941
aagcgcgcatgcgcgcttcgtcacaagggtgcgaggaaagtcagtgagcaaatcgcggaccaccggggctgccagctcgcctgactcccggcctcttgcgctcctaggggcggagaagggtgcgggctcttcgccctttgtgtcctccttctttcactaacttctggactttccagctcttccgaagttcgttcttgcgcaaagcccaaaggctggaaaaccgtccacgatgaccagcatgactcagtctctgcgggaggtgataaaggccatgaccaaggctcgcaattttgagagagttttgggaaagtaacacgtggaggaacatacgttgggaatatcaactgacacgcactgtgctaggatctagaaataccatgtggactccaacacacatagaaataaggaagtggaattccaaaggaaggcaaagtgtaaagtcatctttatggaaatgagtgatgaaggtgaatacctgaatgagatgtcaagaggaggaacacactggagagaagcagtaaagatttaggactgaaccttaaagacatacaggcttgagagaaagaaagcatgtaaagaagacagaaatggttagaaagattactcttgtctctgctgctcctgggaaagtgatttgtgaaatgaaagtagaagaagagcataccaatgcaataggcactctccacggcggtttgacagccacgttagtagataacatatcaacaatggctctgctatgcacggaaaggggagcacccggagtcagtgtcgatatgaacataacgtacatgtcacctgcaaaattaggagaagatatagtgattacagcacatgttctgaagcaaggaaaaacacttgcatttacctctgtggatctgaccaacaaggccacaggaaaattaatagcacaaggaagacacacaaaacacctgggaaactgagagaacagcagaatgacctaaagaaacccaacaatgaatatcaagtatagatttgactcaaacaattgtaatttttgaaataaactagcaaaaccagaagcagctagaaatattcttggaggaaaaggacctggatatcaagtagggtaaaggtgggggtgtcttttttcactttaagcatcttgttttctaatcatgtgtgataattgggtgaaaaattcttagctcaaagtgttttaaaaacaggtaaagcaaagaaactagcaggaccactctcagttaagattaaaactaaagtccagtgttaagctaaaggagaaatagaaattaatggttctaattctgtttgggctgctaggaacaacagaaatttttcatggttctagaagctggaaagtcctgggtcaaggcccagcagatcctgttaggtgagggcccgcttcctggctcatagatggtgccttctcactgtgtggtggaaggggcaagtgagccctctgggttctcgtttttgaaatggagtctcgctctgttgcccaggctggagtacagcagcacgatctcggctcactgcaatctctgccccctgggttcaagtgattctcctgcctcagcctcccaagtagctgggactataggcatgtgccatcacacctagctaatttttgtagttttttgtagaaacagggttcaccatgttggccaggctggtctcgaactcgtgacctcaggtgatccgcctgccttggccccccaaagtgctgggattacaggtgtgagccaatgtgcccagcctgggttctcttttgtaagggcacttactccaatcttgagggttctgccctcgtgatctaataacttcccaaagacccccacctgctaatatcaccttgggggttgggattttaacatacaaatttaggggaaacacatggagaccacagcaatggccaatccttagcgaatcttaggtccttcccagatctaaaatgccaagctacacttgcatttcctttttttaagattatgaaacttcaaaatatatgaactacagcccatattgaaaaataaaatagattgagccatatgcctaaaaaagacctcaagaaaagtttgaggctaagcatgttagtgttacaggaaatggtccaatagagggggaagaaaaaaagcatgctactagccccttttcttgtaccgagaataaaaccatgcagatctcaaacctccaagtctatagtattgaaaagaccaagttcacttctcagaagtctccaagttcagttgactgtggcactctgagacagcttctgtcactcaggctggagtgatacaatcacagcttcccatagcctcaaaatcccaggctcaagacattcttccacctcagtctcctgagtagctggaactacaggcgtgtgccaccacgcctaattttatttttgtagaaacaaggtctcactgttgcccagcctcgtctcaaactcctaggctcaagcaatcctcctgccttggccccccaagtactggacttacaggtgtgaaccactgcacccagctgactcttacttgatttctgtcagggaatcttaatgaacatttcatgactaaagactaaaaaggatgcagctttaagtaaatttaagtcaagttaacagttaaagacaaatcctttccctacattagatcgcctgctgatctgtccactgtgaaagggcagaagactccacagtagcaatagcagcagtgagcatacaggagtcccagatgtttacttctagtatttcccactaaaaggaagctgggctccttggagaaacagctgactccagggcttgaggctgggacagaaaggttacagtatcttatgcatgaaaggagatgctcaaaataataaaggcatgcaaattatgatttggagggaaaaaatatgaggccatagtgtttaggtagataataaatggcagagatagaacactctcttacaacaaatgctgtaaatggacaaagcattagatttggaaaatcactattttgtaaccatcatagttaaagactggtttgggttttagtctggaaagaatcgccaagggagctcctgataaaggaacagggtatttgcacattgcttcccagagattgctagtagtaagtaccacacatagggcaaaaccaggacaccttgaccaggcgctcaaaagtaacatcaatgaagagcagatggagagtatacttgagaagggcgttaagcatgaataaacaattcaaatgcaaaatgagtaacaatttacaagaaaaattgccctgtactccaaaaaacatagaggtcatggaacacataaaggctaaggaactgttccacattaaagacaactgagaacaactaaattcaatgatcctgtactctagagggggggatctaaaacaagctaccaaggatactgggacaacaaaacgaatatggatgataaagagtatcaacattccctgagtttggtaattttactctagttatatgaaatattcttgtacttggaacatatgccgaagtactaaggaaggggtaaggaagcacaaagtgtgcaacaaactcaaatagctcacaggtataagtgtacagagaaaatgaaaaaaatgtggcaaaataataaaaatgagggtaaagattacacaacagctttcatattactctggtaacttttctaaattattccaaaataaaaacgtaaacaatggctgccaaaatgcctaacttggtgaacataagtgtaattcaatatggtaaattaattcaacatggtaaattaagagcataggccttaagagccagccagcctggttttaaatcctccactacttatgatctgagcttgagcaagttacttaacctctgcatctatttccaccaaaggttgagaggttaagacaagagcttagaagagtacctggttataataaacattcaaaatgttatttcaaatagattctaatttttaaataagaggacacatgaaagcattttgaaatttaagaatggccctttcccatgaagcaaggcataaggccaggttgctaactgttgaaagctgacagtatgttcttgattcctgttcttgttgaagttacacactcaattgccaggtatttttcttctgaatttactatttagccacagactatgaaataattctctaaggtgaccagtaacatcagtgaaatggaaagaaaaagttaacacttcaaactttgtgtattcacctgaatagtcagggaactttcacctattttatttaggttttctttttctttttttctttttttttcaaattccaaccagaagctaaatacaattggaaactggtaagcactagttttactccaaaggagtaggatcattcagatttactccaataaaagtatgcaacccttaagcaaagcttttcttcattt

SEQ ID NO: 104516 - DNA, 1774 bp, Homo sapiens
  Payload ID: 523
  Gene Symbol: ACOT2
  Gene Name: acyl-CoA thioesterase 2
  Uniprot ID: P49753
  ENST ID: ENST00000238651
  CDS Start-End: 183-1634
aaagcaaacctaggaagtagctttccaacataaagtggaggtttcaacacaggagactttaagcaagttccagtgtgtctatatttggtctggctgatcggctggactctggccttccccgctcacgttagcagacagctctgccctagtgggcgcttagcctgcgacggcagcccgagaggatgtctaacaagcttctttctccccacccccattcagttgttctcaggtctgaattcaaaatggcctcatctcctgctgtccttcgagcgtcccggctgtaccaatggagcctgaagagttcggcgcagttcctggggtctccacagctgaggcaggttggtcagatcattagggttcctgctcggatggcggcgacgctgatcctggagcctgcgggccgctgctgctgggacgaaccggtgcgaatcgccgtgcgcggcctagccccggagcagccggtcacgctgcgcgcgtccctgcgcgacgagaagggcgcgcttttccaggcccacgcgcgctaccgcgccgacactcttggcgagctggacctggagcgcgcgcccgcgctgggcggcagcttcgcggggcttgagcccatggggctgctctgggccttggagcccgagaaacctttggtgcggctggtgaagcgcgacgtgcgaacgcccttggccgtggagctggaggtgctggatggccacgaccccgaccccgggcggctgctgtgccagacgcggcacgagcgctacttcctcccgcccggggtgcggcgcgagccggtgcgcgtgggccgggtgcgaggcacgctcttcctgccgccagaacctgggccctttcctgggattgtggacatgttcggaactggaggtggcctgctggagtatcgggctagtctgctggctgggaagggttttgctgtgatggctctggcttattataactatgaagacctccccaagaccatggagacgctccatctggagtactttgaagaagccatgaactacttgctcagtcatcccgaggtaaaaggtccaggagttgggctgcttggaatttccaaagggggtgagctctgcctttccatggcctctttcctgaagggcatcacggctgctgtcgtcatcaacggctctgtggccaatgttgggggaaccttacactacaagggcgagaccctgccccctgtgggcgtcaacagaaatcgcatcaaggtgaccaaagatggctatgcagacattgtggatgtcctgaacagccctttggaaggacctgaccagaagagcttcattcctgtggaaagggcagagagcaccttcctgttcctggtaggtcaggatgaccacaactggaagagtgagttctatgctaatgaggcctgtaaacgcttgcaggcccatgggaggagaaagccccagatcatctgttacccagagacagggcactatattgagcctccttacttccccctgtgtcgggcttccctgcatgccttggtgggcagtcctattatctggggaggggagcccagggctcatgccatggctcaggtggatgcttggaaacaactccagactttcttccacaaacacttgggtggccacgaggggacaatcccatcaaaagtgtaaattttatttgatcatgtggcctctctgttgctaatctctcctggaaacatctgccacatttagtgtgtgtatgtgtattcattcttttgtttttaataactaaagttttttcccctcattattaaaatgaatttaccagt

SEQ ID NO: 104517 - DNA, 1578 bp, Homo sapiens
  Payload ID: 523
  Gene Symbol: ACOT2
  Gene Name: acyl-CoA thioesterase 2
  ENST ID: ENST00000538782
  CDS Start-End: 534-728
aacctgcgtgagttccgctccaggctgatggaagctttgttcttttgtacttcacaataaaccttgctactgctccttctttgggtccatactgcatttcagagctgtaacaccgtgaaggtatacagcttcactcctgaagccaagaccatgaacccactgagaggaacaagaaaaacaactctggacctgctgcctttatgagctgtaacactcaccttgaaggtctgtggctttactcttgaagtcggtgagaagcgagaccatgaacccaccagaaggaacacattccggacgcatctgaacatcagaggaaacaaactccagacacactacttttcagaactgtattaagaactgtaacagtcactgcgagggtctgcggcttcattcttgatgtcagcgagaccaagaatccaccagaaggaaccaattccagacacagaattatttgccttcttacttcctgagagttctaggcacagaacatacttgaggtgttatacaaagttgttctcaggtctgaattcaaaatggcctcatctcctgctgtccttcgagcgtcccggctgtaccaatggagcctgaagagttcggcgcagttcctggggtctccacagctgaggcagaacctgggccctttcctgggattgtggacatgttcggaactggaggtggcctgctggagtatcgggctagtctgctggctgggaagggttttgctgtgatggctctggcttattataactatgaagacctccccaagaccatggagacgctccatctggagtactttgaagaagccatgaactacttgctcagtcatcccgaggtaaaaggtccaggagttgggctgcttggaatttccaaagggggtgagctctgcctttccatggcctctttcctgaagggcatcacggctgctgtcgtcatcaacggctctgtggccaatgttgggggaaccttacactacaagggcgagaccctgccccctgtgggcgtcaacagaaatcgcatcaaggtgaccaaagatggctatgcagacattgtggatgtcctgaacagccctttggaaggacctgaccagaagagcttcattcctgtggaaagggcagagagcaccttcctgttcctggtaggtcaggatgaccacaactggaagagtgagttctatgctaatgaggcctgtaaacgcttgcaggcccatgggaggagaaagccccagatcatctgttacccagagacagggcactatattgagcctccttacttccccctgtgtcgggcttccctgcatgccttggtgggcagtcctattatctggggaggggagcccagggctcatgccatggctcaggtggatgcttggaaacaactccagactttcttccacaaacacttgggtggccacgaggggacaatcccatcaaaagtgtaaattttatttgatcatgtggcctctctgttgctaatctctcctggaaacatctgccacatttagtgtgtgtatgtgtattcattcttttgtttttaataactaaagttttttcccctcattattaaaatgaatttaccagt

SEQ ID NO: 104518 - DNA, 1553 bp, Homo sapiens
  Payload ID: 523
  Gene Symbol: ACOT2
  Gene Name: acyl-CoA thioesterase 2
  ENST ID: ENST00000613168
  CDS Start-End: 17-1408
caggtctgaattcaaaatggcctcatctcctgctgtccttcgagcgtcccggctgtaccaatggagcctgaagagttcggcgcagttcctggggtctccacagctgaggcaggttggtcagatcattagggttcctgctcggatggcggcgacgctgatcctggagcctgcgggccgctgctgctgggacgaaccggtgcgaatcgccgtgcgcggcctagccccggagcagccggtcacgctgcgcgcgtccctgcgcgacgagaagggcgcgcttttccaggcccacgcgcgctaccgcgccgacactcttggcgagctggacctggagcgcgcgcccgcgctgggcggcagcttcgcggggcttgagcccatggggctgctctgggccttggagcccgagaaacctttggtgcggctggtgaagcgcgacgtgcgaacgcccttggccgtggagctggaggtgctggatggccacgaccccgaccccgggcggctgctgtgccagacgcggcacgagcgctacttcctcccgcccggggtgcggcgcgagccggtgcgcgtgggccgggtgcgaggcacgctcttcctgccgccagaacctgggccctttcctgggattgtggacatgttcggaactggaggtggcctgctggagtatcgggctagtctgctggctgggaagggttttgctgtgatggctctggcttattataactatgaagacctccccaagaccatggagacgctccatctggagtactttgaagaagccatgaactacttgctcagtcatcccgaggtaaaaggtccaggagttgggctgcttggaatttccaaagggggtgagctctgcctttccatggcctctttcctgaagggcatcacggctgctgtcgtcatcaacggctctgtggccaatgttgggggaaccttacactacaagggcgagaccctgccccctgtgggcgtcaacagaaatcgcatcaaggtgaccaaagatggctatgcagacattgtggatgtcctgaacagccctttggaaggacctgaccagaagagcttcattcctgtggaaagggcagagagcaccttcctgttcctggtaggtcaggatgaccacaactggaagagtgagttctatgctaatgaggcctgtaaacgcttgcaggcccatgggaggagaaagccccagatcatctgttacccagagacagggcactatattgagcctccttacttccccctgtgtcgggcttccctgcatgccttggtgggcagtcctattatctggggaggggagcccagggctcatgccatggctcaggtggatgcttggaaacaactccagactttcttccacaaacacttgggtggccacgaggggacaatcccatcaaaagtgtaaattttatttgatcatgtggcctctctgttgctaatctctcctggaaacatctgccacatttagtgtgtgtatgtgtattcattcttttgtttttaataactaaagttttttcccctcattattaaaatgaatttaccagtaagaa

SEQ ID NO: 104519 - DNA, 1604 bp, Homo sapiens
  Payload ID: 523
  Gene Symbol: ACOT2
  Gene Name: acyl-CoA thioesterase 2
  ENST ID: ENST00000622407
  CDS Start-End: 199-1464
ctttaagcaagttccagtgtgtctatatttggtctggctgatcggctggactctggccttccccgctcacgttagcagacagctctgccctagtgggcgcttagcctgcgacggcagcccgagaggaagagttcggcgcagttcctggggtctccacagctgaggcaggttggtcagatcattagggttcctgctcggatggcggcgacgctgatcctggagcctgcgggccgctgctgctgggacgaaccggtgcgaatcgccgtgcgcggcctagccccggagcagccggtcacgctgcgcgcgtccctgcgcgacgagaagggcgcgcttttccaggcccacgcgcgctaccgcgccgacactcttggcgagctggacctggagcgcgcgcccgcgctgggcggcagcttcgcggggcttgagcccatggggctgctctgggccttggagcccgagaaacctttggtgcggctggtgaagcgcgacgtgcgaacgcccttggccgtggagctggaggtgctggatggccacgaccccgaccccgggcggctgctgtgccagacgcggcacgagcgctacttcctcccgcccggggtgcggcgcgagccggtgcgcgtgggccgggtgcgaggcacgctcttcctgccgccagaacctgggccctttcctgggattgtggacatgttcggaactggaggtggcctgctggagtatcgggctagtctgctggctgggaagggttttgctgtgatggctctggcttattataactatgaagacctccccaagaccatggagacgctccatctggagtactttgaagaagccatgaactacttgctcagtcatcccgaggtaaaaggtccaggagttgggctgcttggaatttccaaagggggtgagctctgcctttccatggcctctttcctgaagggcatcacggctgctgtcgtcatcaacggctctgtggccaatgttgggggaaccttacactacaagggcgagaccctgccccctgtgggcgtcaacagaaatcgcatcaaggtgaccaaagatggctatgcagacattgtggatgtcctgaacagccctttggaaggacctgaccagaagagcttcattcctgtggaaagggcagagagcaccttcctgttcctggtaggtcaggatgaccacaactggaagagtgagttctatgctaatgaggcctgtaaacgcttgcaggcccatgggaggagaaagccccagatcatctgttacccagagacagggcactatattgagcctccttacttccccctgtgtcgggcttccctgcatgccttggtgggcagtcctattatctggggaggggagcccagggctcatgccatggctcaggtggatgcttggaaacaactccagactttcttccacaaacacttgggtggccacgaggggacaatcccatcaaaagtgtaaattttatttgatcatgtggcctctctgttgctaatctctcctggaaacatctgccacatttagtgtgtgtatgtgtattcattcttttgtttttaataactaaagttttttcccctcattattaaaatgaatttaccagt

SEQ ID NO: 104520 - DNA, 2362 bp, Homo sapiens
  Payload ID: 524
  Gene Symbol: ACOT4
  Gene Name: acyl-CoA thioesterase 4
  Uniprot ID: Q8N9L9
  ENST ID: ENST00000326303
  CDS Start-End: 255-1520
ttgggcgccacaccttgcgcgccccggggcccaaggagacgaccctgaagaggagcctggctacttttgcctcagacgagtccggagcgccgggttaaccggtctgaagtcccaggggctttctgggactgctcagccaccggcagcttccggcaccaggggacgccggacgccgtccggacattcggcgcgcttgccacgatcttggacgggtctcgggcctcgacctttgaattccccgctccggctccaagatgtcagcaacgctgatcctggagcccccaggccgctgctgctggaacgagccggtgcgcattgccgtgcgcggcctggccccggagcagcgggttacgctgcgcgcgtccctgcgcgacgagaagggcgcgctcttccgggcccacgcgcgctactgcgccgacgcccgcggcgagctggacctggagcgcgcacccgcgctgggcggcagcttcgcgggactcgagcccatggggctgctctgggccctggaacccgagaagcctttttggcgcttcctgaagcgggacgtacagattccttttgtcgtggagttggaggtgctggacggccacgaccccgagcctggacggctgctgtgccaggcgcagcacgagcgccacttcctcccgccaggggtgcggcgccagtcggtgcgagcgggccgggtgcgcgccacgctcttcctgccgccaggacctggacccttcccagggatcattgacatctttggtattggagggggcctcttggaatatcgagccagcctccttgctggccatggctttgccacgttggctctagcttattataactttgaagatctccccaataacatggacaacatatccctggagtacttcgaagaagccgtatgctacatgcttcaacatccccaggtaaaaggcccaggcattgggcttttgggcatttctctaggagctgatatttgtctctcaatggcctcattcttgaagaatgtctcagccacagtttccatcaatggatctgggatcagtgggaacacagccatcaactataagcacagtagcattccaccattgggctatgacctgaggagaatcaaggtagctttctcaggcctcgtggacattgtggatataaggaatgctctcgtaggagggtacaagaaccccagcatgattccaatagagaaggcccaggggcccatcctgctcattgttggtcaggatgaccataactggagaagtgagttgtatgcccaaacagtctctgaacggttacaggcccatggaaaggaaaaaccccagatcatctgttaccctgggactgggcattacatcgagcctccttacttccccctgtgcccagcttcccttcacagattactgaacaaacatgttatatggggtggggagcccagggctcattctaaggcccaggaagatgcctggaagcaaattctagccttcttctgcaaacacctgggaggtacccagaaaacagctgtccctaaattgtaatgcatttgtctgttgttgacatgagagattcaagatcagattctagtgttcagtaaccctatgtgaatcagatgtctcctggataacattaaagccatgtctttgtcattaatggtgtattttacgtaactttgttgaataagctttgtcgttagttttactaatgtaacttgcttgttgtagaagattaagaggcatatgacacatataagtgaaaaacattcccaccagttaacatttgtgtttccttctagatttttttagttaatgttttgagtcacaggtgagctttaaagctggtgactttttccatcactatgaaagaatggtcacttaatgtttgctgttcaaccatcagtagcagggtagaattttctttggccagaaacatacagaggggtgttaatatgaggaaaggcagctgaccttttcattataaacgtgagagaagactcttttgacaggaggagatgagacctgtctctagaatagttaagtctgtactctcttccaagggtgaattactacgatctattttccctctcacttcctctctaagagcagaccctggggccgagtacagtggctcacacctgtaatcccagtactttgggaagtcaaggggggcatattgcttgagctcaggatttcatgaccagcttaggcaacatggcaaaacccaatccctacaaaaattagccaaacatggtacacacctgtagtcccagctactcgagactcagatgggacgattgcttgagcccgggaggtcaagattggtgcagtgagccgtgattgcaccactgcactccagcccaggtaacacagcgagaccccgtttc

SEQ ID NO: 104521 - DNA, 1004 bp, Homo sapiens
  Payload ID: 525
  Gene Symbol: ACOT6
  Gene Name: acyl-CoA thioesterase 6
  Uniprot ID: Q3I5F7
  ENST ID: ENST00000381139
  CDS Start-End: 332-955
tatattatcattattgtttgagaaaataagacattttgttctttctctgccaatctctctacccccaatctccttggcttcaaaaacttgtttgcttactgtcttttgagaaactaaagctccctgtgatttgtgatgttctccaggcagggggccctttcctgggatcattgatctgtttgggagcagcaggggcctttgtgaatacagggccagcctcctggccggacatggttttgctgtgcttgccctggcttatttcagatttgaagacctccccgaagatctgaatgatgtacatctggagtactttgaagaagccgtggactttatgctgcagcatccaaaggtgaaaggtcctagtattgcgcttcttggattttccaaaggaggtgacctgtgtctctcaatggcttctttcttgaagggcatcacagccactgtacttatcaatgcctgtgtagccaacacagtagctcctctacattacaaggatatgattattcctaaacttgtcgatgatctaggaaaagtaaaaatcactaagtcaggatttctcacttttatggacacttggagcaatccactggaggaacacaatcaccaaagtcttgttccattggaaaaggcgcaggtgcccttcttgtttattgttggcatggatgatcaaagctggaagagtgaattctatgctcagatagcctctgaaaggctacaagctcatgggaaagaaagaccccagataatctgttacccagaaactggtcactgtattgacccaccttattttcctccttctagagcttctgtgcacgctgttttgggtgaggcaatattctatggaggtgagccaaaggctcactcaaaggcacaggtagatgcctggcagcaaattcaaactttcttccataaacatctcaatggtaaaaaatctgtcaagcacagcaaaatataacattgtagccacagaccagataccattaataaaaatcctattcatacaa

SEQ ID NO: 104522 - DNA, 870 bp, Homo sapiens
  Payload ID: 525
  Gene Symbol: ACOT6
  Gene Name: acyl-CoA thioesterase 6
  ENST ID: ENST00000554229
  CDS Start-End: 365-870
acacacatgagattccatcacccaggcagcattcctgagccttgggggactggtttccaatgattcttaggcttctgtcattctttgctgcctatctgctgagagtgccacttgcttactgccagaactctgtatgcatacaacccaaaatggactctgccagtgattagatttgtgaggcagggggccctttcctgggatcattgatctgtttgggagcagcaggggcctttgtgaatacagggccagcctcctggccggacatggttttgctgtgcttgccctggcttatttcagatttgaagacctccccgaagatctgaatgatgtacatctggagtactttgaagaagccgtggactttatgctgcagcatccaaaggtgaaaggtcctagtattgcgcttcttggattttccaaaggaggtgacctgtgtctctcaatggcttctttcttgaagggcatcacagccactgtacttatcaatgcctgtgtagccaacacagtagctcctctacattacaaggatatgattattcctaaacttgtcgatgatctaggaaaagtaaaaatcactaagtcaggatttctcacttttatggacacttggagcaatccactggaggaacacaatcaccaaagtcttgttccattggaaaaggcgcaggtgcccttcttgtttattgttggcatggatgatcaaagctggaagagtgaattctatgctcagatagcctctgaaaggctacaagctcatgggaaagaaagaccccagataatctgttacccagaaactggtcactgtattgacccaccttattttcctccttctagagcttctgtgcacgctgttttgggtgaggcaatatt

SEQ ID NO: 104523 - DNA, 2429 bp, Homo sapiens
  Payload ID: 526
  Gene Symbol: ACOT7
  Gene Name: acyl-CoA thioesterase 7
  Uniprot ID: O00154
  ENST ID: ENST00000361521
  CDS Start-End: 993-2105
gccggagttgcgtgggttttaatttaaagatgtaagtacaaatctatgtgcattgtagaaaattcggaaaaggtccaactgcctagcaagtaaaaagctgtcattccagcacgtggggggtgaccgcttctcccttcttgggtgttttttggtggattttttttggtgaccccgactggcctagactccattcaagggcacatcttgtgcagtaaaacacgcatgtttcagggctcctcactgcaacacgtgcacctccaggctggcgctcagcgctcccagtaaaagctgcaggcggcggtgtagatagtcgccggcctttcctcctccccacctcgtgacgctttgtgctgcggaagcaaaggcccgttccattccccgtgtcttcccagcagccgccaccaatgctcctttctaggaaacagccttccattctctcttagggccgatcttagcgagagccgcgatgcgggcgactggtgccggggtgggttgggggcgggggtgggaatcaggccccactgccaggagcccgggccgcgccttccgctctgacctcatccggccgcccaggcactgggcgcggcagcgaatcggcggcgcgggcggccgggaacgcccagcacaaatatttaccgccgcgcggagagtgagggcccaagtccgccctgctccgccacttaggccgccccagacgcttccctcggggctgccaccgggtcgggcgcggctgccgcggctagcgggccttccccgcaccggcgcggcccaaccgccaccgaaccttctggaagcggcggctgcctgggcccccacgccgccagaatcgtacgcccgcgcgagctctctgcagccttggcggcctgggaggcggggctcggggtggggccggcgcgggggcggggtcggcgcggggaggccgcgttcgattgcccccggcgcgcaggccccgcctcaccagccccatcgctccacctctgccctccccctttatggcgcggcccgggctcattcattccgcgccgggcctgccagacacctgcgcccttctgcagccgcccgccgcatccgccgccgcagcccccagcatgtcgggcccagacgtcgagacgccgtccgccatccagatctgccggatcatgcggccagatgatgccaacgtggccggcaatgtccacggggggaccatcctgaagatgatcgaggaggcaggcgccatcatcagcacccggcattgcaacagccagaacggggagcgctgtgtggccgccctggctcgtgtcgagcgcaccgacttcctgtctcccatgtgcatcggtgaggtggcgcatgtcagcgcggagatcacctacacctccaagcactctgtggaggtgcaggtcaacgtgatgtccgaaaacatcctcacaggtgccaaaaagctgaccaataaggccaccctgtggtatgtgcccctgtcgctgaagaatgtggacaaggtcctcgaggtgcctcctgttgtgtattcccggcaggagcaggaggaggagggccggaagcggtatgaagcccagaagctggagcgcatggagaccaagtggaggaacggggacatcgtccagccagtcctcaacccagagccgaacactgtcagctacagccagtccagcttgatccacctggtggggccttcagactgcaccctgcacggctttgtgcacggaggtgtgaccatgaagctcatggatgaggtcgccgggatcgtggctgcacgccactgcaagaccaacatcgtcacagcttccgtggacgccattaattttcatgacaagatcagaaaaggctgcgtcatcaccatctcgggacgcatgaccttcacgagcaataagtccatggagatcgaggtgttggtggacgccgaccctgttgtggacagctctcagaagcgctaccgggccgccagtgccttcttcacctacgtgtcgctgagccaggaaggcaggtcgctgcctgtgccccagctggtgcccgagaccgaggacgagaagaagcgctttgaggaaggcaaagggcggtacctgcagatgaaggcgaagcgacagggccacgcggagcctcagccctagactccctcctcctgccactggtgcctcgagtagccatggcaacgggcccagtgtccagtcacttagaagttccccccttggccaaaaacccaattcacattgagagctggtgttgtctgaagttttcgtatcacagtgttaacctgtactctctcctgcaaacctacacaccaaagctttatttatatcattccagtatcaatgctacacagtgttgtcccgagcgccgggaggcgttgggcagaaaccctcgggaatgcttccgagcacgctgtagggtatgggaagaacccagcaccactaataaagctgctgcttggctgg

SEQ ID NO: 104524 - DNA, 1813 bp, Homo sapiens
  Payload ID: 526
  Gene Symbol: ACOT7
  Gene Name: acyl-CoA thioesterase 7
  Uniprot ID: O00154
  ENST ID: ENST00000377842
  CDS Start-End: 500-1489
aggatgcaggcttggacctgctggagtccttgctggcctgtgaccttcctcccctgtctacatttcagggagctctagaaggcggcagtggggccagacctggctttggctgagaccctggagaaagactagggggtcttgtgccctgtcagagaaggcagagcctcatagccgcttccctgaggccgctcagcagcggcccctctgccttcctgatctcctggcatggcagccagaagagctcacagaattacttcttctgtaattatttataaagcaaggtttccatgacgaccggtttctggtagacgctctggattggcgaggcagcctcttcctggccagattgggcagctcaggaagctgggggtggggggtgctccccaccaagcccggtgtggcagggagctgggacagtcctgggtcaggcaaggactctgtgatgcttccctgctccctcgcctttctctgcatctgatcctgggatgtcctagccaccatggctttccagctgagcaggatcatgcggccagatgatgccaacgtggccggcaatgtccacggggggaccatcctgaagatgatcgaggaggcaggcgccatcatcagcacccggcattgcaacagccagaacggggagcgctgtgtggccgccctggctcgtgtcgagcgcaccgacttcctgtctcccatgtgcatcggtgaggtggcgcatgtcagcgcggagatcacctacacctccaagcactctgtggaggtgcaggtcaacgtgatgtccgaaaacatcctcacaggtgccaaaaagctgaccaataaggccaccctgtggtatgtgcccctgtcgctgaagaatgtggacaaggtcctcgaggtgcctcctgttgtgtattcccggcaggagcaggaggaggagggccggaagcggtatgaagcccagaagctggagcgcatggagaccaagtggaggaacggggacatcgtccagccagtcctcaacccagagccgaacactgtcagctacagccagtccagcttgatccacctggtggggccttcagactgcaccctgcacggctttgtgcacggaggtgtgaccatgaagctcatggatgaggtcgccgggatcgtggctgcacgccactgcaagaccaacatcgtcacagcttccgtggacgccattaattttcatgacaagatcagaaaaggctgcgtcatcaccatctcgggacgcatgaccttcacgagcaataagtccatggagatcgaggtgttggtggacgccgaccctgttgtggacagctctcagaagcgctaccgggccgccagtgccttcttcacctacgtgtcgctgagccaggaaggcaggtcgctgcctgtgccccagctggtgcccgagaccgaggacgagaagaagcgctttgaggaaggcaaagggcggtacctgcagatgaaggcgaagcgacagggccacgcggagcctcagccctagactccctcctcctgccactggtgcctcgagtagccatggcaacgggcccagtgtccagtcacttagaagttccccccttggccaaaaacccaattcacattgagagctggtgttgtctgaagttttcgtatcacagtgttaacctgtactctctcctgcaaacctacacaccaaagctttatttatatcattccagtatcaatgctacacagtgttgtcccgagcgccgggaggcgttgggcagaaaccctcgggaatgcttccgagcacgctgtagggtatgggaagaacccagcaccactaataaagctgctgcttggctgg

SEQ ID NO: 104525 - DNA, 1432 bp, Homo sapiens
  Payload ID: 526
  Gene Symbol: ACOT7
  Gene Name: acyl-CoA thioesterase 7
  Uniprot ID: O00154
  ENST ID: ENST00000377845
  CDS Start-End: 56-1108
gagttccatttggctgcagcttctggagggagccgacaggagacgtggggagacgatgctcctgcttcggagaagcttgtcactaaacgtcctcagaaaggaagtcgacagggcctgttttggggagaaggccaaacagatcatgcggccagatgatgccaacgtggccggcaatgtccacggggggaccatcctgaagatgatcgaggaggcaggcgccatcatcagcacccggcattgcaacagccagaacggggagcgctgtgtggccgccctggctcgtgtcgagcgcaccgacttcctgtctcccatgtgcatcggtgaggtggcgcatgtcagcgcggagatcacctacacctccaagcactctgtggaggtgcaggtcaacgtgatgtccgaaaacatcctcacaggtgccaaaaagctgaccaataaggccaccctgtggtatgtgcccctgtcgctgaagaatgtggacaaggtcctcgaggtgcctcctgttgtgtattcccggcaggagcaggaggaggagggccggaagcggtatgaagcccagaagctggagcgcatggagaccaagtggaggaacggggacatcgtccagccagtcctcaacccagagccgaacactgtcagctacagccagtccagcttgatccacctggtggggccttcagactgcaccctgcacggctttgtgcacggaggtgtgaccatgaagctcatggatgaggtcgccgggatcgtggctgcacgccactgcaagaccaacatcgtcacagcttccgtggacgccattaattttcatgacaagatcagaaaaggctgcgtcatcaccatctcgggacgcatgaccttcacgagcaataagtccatggagatcgaggtgttggtggacgccgaccctgttgtggacagctctcagaagcgctaccgggccgccagtgccttcttcacctacgtgtcgctgagccaggaaggcaggtcgctgcctgtgccccagctggtgcccgagaccgaggacgagaagaagcgctttgaggaaggcaaagggcggtacctgcagatgaaggcgaagcgacagggccacgcggagcctcagccctagactccctcctcctgccactggtgcctcgagtagccatggcaacgggcccagtgtccagtcacttagaagttccccccttggccaaaaacccaattcacattgagagctggtgttgtctgaagttttcgtatcacagtgttaacctgtactctctcctgcaaacctacacaccaaagctttatttatatcattccagtatcaatgctacacagtgttgtcccgagcgccgggaggcgttgggcagaaaccctcgggaatgcttccgagcacgctgtagggtatgggaagaacccagcaccactaataaagctgctgcttggctgg

SEQ ID NO: 104526 - DNA, 1614 bp, Homo sapiens
  Payload ID: 526
  Gene Symbol: ACOT7
  Gene Name: acyl-CoA thioesterase 7
  Uniprot ID: O00154
  ENST ID: ENST00000377855
  CDS Start-End: 148-1290
cggtcctaggaggagcaggagcctggtgctttctatcagggagggatcacaccggctcactgctgagccggccaggcagacacaggcttgggctctgctgggcatcatacttgtcactgggtaaacagtttgcccacttaccgcaggatgaagctgcttgccagggctctccggctctgtgagtttgggaggcaggcatcttccaggaggctggtggctggccagggatgtgtggggccccggcgagggtgctgcgctcccgtccaggtggttgggcccagggctgatctcccaccctgtggagcctgcattactggaaggatcatgcggccagatgatgccaacgtggccggcaatgtccacggggggaccatcctgaagatgatcgaggaggcaggcgccatcatcagcacccggcattgcaacagccagaacggggagcgctgtgtggccgccctggctcgtgtcgagcgcaccgacttcctgtctcccatgtgcatcggtgaggtggcgcatgtcagcgcggagatcacctacacctccaagcactctgtggaggtgcaggtcaacgtgatgtccgaaaacatcctcacaggtgccaaaaagctgaccaataaggccaccctgtggtatgtgcccctgtcgctgaagaatgtggacaaggtcctcgaggtgcctcctgttgtgtattcccggcaggagcaggaggaggagggccggaagcggtatgaagcccagaagctggagcgcatggagaccaagtggaggaacggggacatcgtccagccagtcctcaacccagagccgaacactgtcagctacagccagtccagcttgatccacctggtggggccttcagactgcaccctgcacggctttgtgcacggaggtgtgaccatgaagctcatggatgaggtcgccgggatcgtggctgcacgccactgcaagaccaacatcgtcacagcttccgtggacgccattaattttcatgacaagatcagaaaaggctgcgtcatcaccatctcgggacgcatgaccttcacgagcaataagtccatggagatcgaggtgttggtggacgccgaccctgttgtggacagctctcagaagcgctaccgggccgccagtgccttcttcacctacgtgtcgctgagccaggaaggcaggtcgctgcctgtgccccagctggtgcccgagaccgaggacgagaagaagcgctttgaggaaggcaaagggcggtacctgcagatgaaggcgaagcgacagggccacgcggagcctcagccctagactccctcctcctgccactggtgcctcgagtagccatggcaacgggcccagtgtccagtcacttagaagttccccccttggccaaaaacccaattcacattgagagctggtgttgtctgaagttttcgtatcacagtgttaacctgtactctctcctgcaaacctacacaccaaagctttatttatatcattccagtatcaatgctacacagtgttgtcccgagcgccgggaggcgttgggcagaaaccctcgggaatgcttccgagcacgctgtagggtatgggaagaacccagcaccactaataaagctgctgcttggctgg

SEQ ID NO: 104527 - DNA, 1472 bp, Homo sapiens
  Payload ID: 526
  Gene Symbol: ACOT7
  Gene Name: acyl-CoA thioesterase 7
  Uniprot ID: O00154
  ENST ID: ENST00000377860
  CDS Start-End: 59-910
gccagacacctgcgcccttctgcagccgcccgccgcatccgccgccgcagcccccagcatgtcgggcccagacgtcgagacgccgtccgccatccagatctgccggatcatgcggccagatgatgccaacgtggccggcaatgtccacggggggaccatcctgaagatgatcgaggaggcaggcgccatcatcagcacccggcattgcaacagccagaacggggagcgctgtgtggccgccctggctcgtgtcgagcgcaccgacttcctgtctcccatgtgcatcggtgaggtggcgcatgtcagcgcggagatcacctacacctccaagcactctgtggaggtgcaggtcaacgtgatgtccgaaaacatcctcacaggtgccaaaaagctgaccaataaggccaccctgtggtatgtgcccctgtcgctgaagaatgtggacaaggtcctcgaggtgcctcctgttgtgtattcccggcaggagcaggaggaggagggccggaagcggtatgaagcccagaagctggagcgcatggagaccaagtggaggaacggggacatcgtccagccagtcctcaacccagagccgaacactgtcagctacagccagtccagcttgatccacctggtggggccttcagactgcaccctgcacggctttgtgcacggaggtgtgaccatgaagctcatggatgaggtcgccgggatcgtggctgcacgccactgcaagaccaacatcgtcacagcttccgtggacgccattaattttcatgacaagatcagaaaagctcacgtaatgcctgctggcgctgaccacacagctccttcctcctctcccagcactggcacgaagtgctccctgctgcgtcatcaccatctcgggacgcatgaccttcacgagcaataagtccatggagatcgaggtgttggtggacgccgaccctgttgtggacagctctcagaagcgctaccgggccgccagtgccttcttcacctacgtgtcgctgagccaggaaggcaggtcgctgcctgtgccccagctggtgcccgagaccgaggacgagaagaagcgctttgaggaaggcaaagggcggtacctgcagatgaaggcgaagcgacagggccacgcggagcctcagccctagactccctcctcctgccactggtgcctcgagtagccatggcaacgggcccagtgtccagtcacttagaagttccccccttggccaaaaacccaattcacattgagagctggtgttgtctgaagttttcgtatcacagtgttaacctgtactctctcctgcaaacctacacaccaaagctttatttatatcattccagtatcaatgctacacagtgttgtcccgagcgccgggaggcgttgggcagaaaccctcgggaatgcttccgagcacgctgtagggtatgggaagaacccagcaccactaataaagctgctgcttggctgg

SEQ ID NO: 104528 - DNA, 1564 bp, Homo sapiens
  Payload ID: 526
  Gene Symbol: ACOT7
  Gene Name: acyl-CoA thioesterase 7
  Uniprot ID: O00154
  ENST ID: ENST00000418124
  CDS Start-End: 59-799
gccagacacctgcgcccttctgcagccgcccgccgcatccgccgccgcagcccccagcatgtcgggcccagacgtcgagacgccgtccgccatccagatctgccggatcatgcggccagatgatgccaacgtggccggcaatgtccacggggggaccatcctgaagatgatcgaggaggcaggcgccatcatcagcacccggcattgcaacagccagaacggggagcgctgtgtggccgccctggctcgtgtcgagcgcaccgacttcctgtctcccatgtgcatcggtgaggtggcgcatgtcagcgcggagatcacctacacctccaagcactctgtggaggtgcaggtcaacgtgatgtccgaaaacatcctcacaggtgccaaaaagctgaccaataaggccaccctgtggtatgtgcccctgtcgctgaagaatgtggacaaggtcctcgaggtgcctcctgttgtgtattcccggcaggagcaggaggaggagggccggaagcggtatgaagcccagaagctggagcgcatggagaccaagtggaggaacggggacatcgtccagccagtcctcaacccagagccgaacactgtcagctacagccagtccagcttgatccacctggtggggccttcagactgcaccctgcacggctttgtgcacggaggtgtgaccatgaagctcatggatgaggtcgccgggatcgtggctgcacgccactgcaagaccaacatcgtcacagcttccgtggacgccattaattttcatgacaagatcagaaaagctccttagctggggcctgacccatggcctgccctcctcccggggtgcgtcttgtgactgcgggcgctttgcatgggactctgtaccttacagctcacgtaatgcctgctggcgctgaccacacagctccttcctcctctcccagcactggcacgaagtgctccctgctgcgtcatcaccatctcgggacgcatgaccttcacgagcaataagtccatggagatcgaggtgttggtggacgccgaccctgttgtggacagctctcagaagcgctaccgggccgccagtgccttcttcacctacgtgtcgctgagccaggaaggcaggtcgctgcctgtgccccagctggtgcccgagaccgaggacgagaagaagcgctttgaggaaggcaaagggcggtacctgcagatgaaggcgaagcgacagggccacgcggagcctcagccctagactccctcctcctgccactggtgcctcgagtagccatggcaacgggcccagtgtccagtcacttagaagttccccccttggccaaaaacccaattcacattgagagctggtgttgtctgaagttttcgtatcacagtgttaacctgtactctctcctgcaaacctacacaccaaagctttatttatatcattccagtatcaatgctacacagtgttgtcccgagcgccgggaggcgttgggcagaaaccctcgggaatgcttccgagcacgctgtagggtatgggaagaacccagcaccactaataaagctgctgcttggctgg

SEQ ID NO: 104529 - DNA, 1804 bp, Homo sapiens
  Payload ID: 526
  Gene Symbol: ACOT7
  Gene Name: acyl-CoA thioesterase 7
  Uniprot ID: O00154
  ENST ID: ENST00000545482
  CDS Start-End: 368-1480
caaatatttaccgccgcgcggagagtgagggcccaagtccgccctgctccgccacttaggccgccccagacgcttccctcggggctgccaccgggtcgggcgcggctgccgcggctagcgggccttccccgcaccggcgcggcccaaccgccaccgaaccttctggaagcggcggctgcctgggcccccacgccgccagaatcgtacgcccgcgcgagctctctgcagccttggcggcctgggaggcggggctcggggtggggccggcgcgggggcggggtcggcgcggggaggccgcgttcgattgcccccggcgcgcaggccccgcctcaccagccccatcgctccacctctgccctccccctttatggcgcggcccgggctcattcattccgcgccgggcctgccagacacctgcgcccttctgcagccgcccgccgcatccgccgccgcagcccccagcatgtcgggcccagacgtcgagacgccgtccgccatccagatctgccggatcatgcggccagatgatgccaacgtggccggcaatgtccacggggggaccatcctgaagatgatcgaggaggcaggcgccatcatcagcacccggcattgcaacagccagaacggggagcgctgtgtggccgccctggctcgtgtcgagcgcaccgacttcctgtctcccatgtgcatcggtgaggtggcgcatgtcagcgcggagatcacctacacctccaagcactctgtggaggtgcaggtcaacgtgatgtccgaaaacatcctcacaggtgccaaaaagctgaccaataaggccaccctgtggtatgtgcccctgtcgctgaagaatgtggacaaggtcctcgaggtgcctcctgttgtgtattcccggcaggagcaggaggaggagggccggaagcggtatgaagcccagaagctggagcgcatggagaccaagtggaggaacggggacatcgtccagccagtcctcaacccagagccgaacactgtcagctacagccagtccagcttgatccacctggtggggccttcagactgcaccctgcacggctttgtgcacggaggtgtgaccatgaagctcatggatgaggtcgccgggatcgtggctgcacgccactgcaagaccaacatcgtcacagcttccgtggacgccattaattttcatgacaagatcagaaaaggctgcgtcatcaccatctcgggacgcatgaccttcacgagcaataagtccatggagatcgaggtgttggtggacgccgaccctgttgtggacagctctcagaagcgctaccgggccgccagtgccttcttcacctacgtgtcgctgagccaggaaggcaggtcgctgcctgtgccccagctggtgcccgagaccgaggacgagaagaagcgctttgaggaaggcaaagggcggtacctgcagatgaaggcgaagcgacagggccacgcggagcctcagccctagactccctcctcctgccactggtgcctcgagtagccatggcaacgggcccagtgtccagtcacttagaagttccccccttggccaaaaacccaattcacattgagagctggtgttgtctgaagttttcgtatcacagtgttaacctgtactctctcctgcaaacctacacaccaaagctttatttatatcattccagtatcaatgctacacagtgttgtcccgagcgccgggaggcgttgggcagaaaccctcgggaatgcttccgagcacgctgtagggtatgggaagaacccagcaccactaataaagctgctgcttggctgg

SEQ ID NO: 104530 - DNA, 868 bp, Homo sapiens
  Payload ID: 526
  Gene Symbol: ACOT7
  Gene Name: acyl-CoA thioesterase 7
  ENST ID: ENST00000473466
  CDS Start-End: 30-868
tctgatttggggaaagggagaaggggatcatgcggccagatgatgccaacgtggccggcaatgtccacggggggaccatcctgaagatgatcgaggaggcaggcgccatcatcagcacccggcattgcaacagccagaacggggagcgctgtgtggccgccctggctcgtgtcgagcgcaccgacttcctgtctcccatgtgcatcggtgaggtggcgcatgtcagcgcggagatcacctacacctccaagcactctgtggaggtgcaggtcaacgtgatgtccgaaaacatcctcacaggtgccaaaaagctgaccaataaggccaccctgtggtatgtgcccctgtcgctgaagaatgtggacaaggtcctcgaggtgcctcctgttgtgtattcccggcaggagcaggaggaggagggccggaagcggtatgaagcccagaagctggagcgcatggagaccaagtggaggaacggggacatcgtccagccagtcctcaacccagagccgaacactgtcagctacagccagtccagcttgatccacctggtggggccttcagactgcaccctgcacggctttgtgcacggaggtgtgaccatgaagctcatggatgaggtcgccgggatcgtggctgcacgccactgcaagaccaacatcgtcacagcttccgtggacgccattaattttcatgacaagatcagaaaaggctgcgtcatcaccatctcgggacgcatgaccttcacgagcaataagtccatggagatcgaggtgttggtggacgccgaccctgttgtggacagctctcagaagcgctaccgggccgccagtgccttcttcacctacgtgtcgctgagccaggaagg

SEQ ID NO: 104531 - DNA, 1403 bp, Homo sapiens
  Payload ID: 526
  Gene Symbol: ACOT7
  Gene Name: acyl-CoA thioesterase 7
  Uniprot ID: O00154
  ENST ID: ENST00000608083
  CDS Start-End: 59-1075
gccagacacctgcgcccttctgcagccgcccgccgcatccgccgccgcagcccccagcatgtcgggcccagacgtcgagacgccgtccgccatccagatctgccggatcatgcggccagatgatgccaacgtggccggcaatgtccacggggggaccatcctgaagatgatcgaggaggcaggcgccatcatcagcacccggcattgcaacagccagaacggggagcgctgtgtggccgccctggctcgtgtcgagcgcaccgacttcctgtctcccatgtgcatcggtgaggtggcgcatgtcagcgcggagatcacctacacctccaagcactctgtggaggtgcaggtcaacgtgatgtccgaaaacatcctcacaggtgccaaaaagctgaccaataaggccaccctgtggtatgtgcccctgtcgctgaagaatgtggacaaggtcctcgaggtgcctcctgttgtgtattcccggcaggagcaggaggaggagggccggaagcggtatgaagcccagaagctggagcgcatggagaccaagtggaggaacggggacatcgtccagccagtcctcaacccagagccgaacactgtcagctacagccagtccagcttgatccacctggtggggccttcagactgcaccctgcacggctttgtgcacggaggtgtgaccatgaagctcatggatgaggtcgccgggatcgtggctgcacgccactgcaagaccaacatcgtcacagcttccgtggacgccattaattttcatgacaagatcagaaaaggctgcgtcatcaccatctcgggacgcatgaccttcacgagcaataagtccatggagatcgaggtgttggtggacgccgaccctgttgtggacagctctcagaagcgctaccgggccgccagtgccttcttcacctacgtgtcgctgagccaggaaggcaggtcgctgcctgtgccccagctggtgcccgagaccgaggacgagaagaagcgctttgaggaaggcaaagggcggtacctgcagatgaaggcgaagcgacagggccacgcggagcctcagccctagactccctcctcctgccactggtgcctcgagtagccatggcaacgggcccagtgtccagtcacttagaagttccccccttggccaaaaacccaattcacattgagagctggtgttgtctgaagttttcgtatcacagtgttaacctgtactctctcctgcaaacctacacaccaaagctttatttatatcattccagtatcaatgctacacagtgttgtcccgagcgccgggaggcgttgggcagaaaccctcgggaatgcttccgagcacgctgtagggtatgggaagaacccagcaccactaataaagctgctgcttggctggaccc

SEQ ID NO: 104532 - DNA, 1168 bp, Homo sapiens
  Payload ID: 527
  Gene Symbol: ACOT8
  Gene Name: acyl-CoA thioesterase 8
  Uniprot ID: O14734
  ENST ID: ENST00000217455
  CDS Start-End: 92-1051
tactagggcaatctgccggaagagtcaggttctgtgtatgtctccgcgtcttccgcggagcgggtgtgcagggcctgcagcattgaactagatgtcgtccccgcaggccccagaagatgggcagggctgtggcgaccgcggcgatccccctggggacctccgtagcgtcttggtcacgaccgtgctcaacctcgagccgctggacgaggatctcttcagaggaaggcattactgggtaccggccaagaggctgtttggtggtcagatcgtgggccaggccctggtggctgcagccaagtctgtgagtgaagacgtccacgtgcactccctgcactgctactttgttcgggcaggggacccgaagctgccagtactgtaccaagtggagcggacacgaacagggtcgagcttctcggtgcgctctgtgaaggccgtgcaacatgggaagcccatcttcatctgccaggcctccttccagcaggcccagcccagccccatgcagcaccagttctccatgcccactgtgccaccaccagaagagctgcttgactgtgagaccctcattgaccagtatttaagggaccctaacctccaaaagaggtacccattggcgctcaaccgaattgctgctcaggaggtccccattgagatcaagccagtaaacccatcccccctgagccagctgcagagaatggagcccaaacagatgttctgggtgcgagcccggggctatattggcgagggcgacatgaagatgcactgctgcgtggccgcctatatctccgactatgccttcttgggcactgcactgctgcctcaccagtggcagcacaaggtgcacttcatggtctcactggaccattccatgtggttccacgcccccttccgagctgaccactggatgctctatgaatgcgagagcccctgggccggtggctctcgggggctggtccatgggcggctgtggcgtcaggatggagtcctagctgtgacctgtgcccaggagggcgtgatccgagtgaagccccaggtctcagagagcaagctgtagccagaggtaccagcttcgcctggggcttcaagaacctcccatctatccccattcctgagacaggagttacagtcccttttggccctcacatccaataaagagactgataccactgga

SEQ ID NO: 104533 - DNA, 708 bp, Homo sapiens
  Payload ID: 527
  Gene Symbol: ACOT8
  Gene Name: acyl-CoA thioesterase 8
  ENST ID: ENST00000457981
  CDS Start-End: 1-223
tctcttcagaggaaggcattactgggtaccggccaagaggctgtttggtggtcagatcgtgggccaggccctggtggctgcagccaagtctgtgagtgaagacgtccacgtgcactccctgcactgctactttgttcgggcagagcagatgccctcatgtgttctgcgtagatccccagctgagaagagtttgtggacctttacagtatgtgatttgtattaagaaaaccatggggtttcccccttcattttgtaaatatgaaagttatccctgtaatggtaaatacactttttcatactgtcccgtgtctcttactcctcatccctgaggagtattgattggcccccctcttctcggcccccagtcactgctataaagtatttgaatacttaccttgggctcagccaggttcttatctttatgctagttgggagtaaatatgtgctttgtttctttaatttgtttgtaagtaccagccttttgatattgtaatccttccagcctagtgaaatacctggctgttttcttttgtgtgggtgggggcattacttgaactctgaatctcttcatcctgtgatggaagaattcaatgagtctttgccagtaaagtatctagtgcagggcttggcataatctagttttccataaatattattagtttttgatgattaacttatgggaataattaaaatttgcatgatacagag

SEQ ID NO: 104534 - DNA, 814 bp, Homo sapiens
  Payload ID: 527
  Gene Symbol: ACOT8
  Gene Name: acyl-CoA thioesterase 8
  ENST ID: ENST00000426915
  CDS Start-End: 1-279
tccccgcaggccccagaagatgggcagggctgtggcgaccgcggcgatccccctggggacctccgtagcgtcttggtcacgaccgtgctcaacctcgagccgctggacgaggatctcttcagaggaaggcattactgggtaccggccaagaggctgtttggtggtcagatcgtgggccaggccctggtggctgcagccaagtctgtgagtgaagacgtccacgtgcactccctgcactgctactttgttcgggcagatgccctcatgtgttctgcgtagatccccagctgagaagagtttgtggacctttacagtatgtgatttgtattaagaaaaccatggggtttcccccttcattttgtaaatatgaaagttatccctgtaatggtaaatacactttttcatactgtcccgtgtctcttactcctcatccctgaggagtattgattggcccccctcttctcggcccccagtcactgctataaagtatttgaatacttaccttgggctcagccaggttcttatctttatgctagttgggagtaaatatgtgctttgtttctttaatttgtttgtaagtaccagccttttgatattgtaatccttccagcctagtgaaatacctggctgttttcttttgtgtgggtgggggcattacttgaactctgaatctcttcatcctgtgatggaagaattcaatgagtctttgccagtaaagtatctagtgcagggcttggcataatctagttttccataaatattattagtttttgatgattaacttatgggaataattaaaatttgcatgatacag

SEQ ID NO: 104535 - DNA, 702 bp, Homo sapiens
  Payload ID: 527
  Gene Symbol: ACOT8
  Gene Name: acyl-CoA thioesterase 8
  ENST ID: ENST00000487205
  CDS Start-End: 1-629
attactgggtaccggccaagaggctgtttggtggtcagatcgtgggccaggccctggtggctgcagccaagtctgtgagtgaagacgtccacgtgcactccctgcactgctactttgttcgggcaggggacccgaagctgccagtactgtaccaagtggagcggacacgaacagggtcgagcttctcggtgcgctctgtgaaggccgtgcaacatgggaagcccatcttcatctgccaggcctccttccagcaggcccagcccagccccatgcagcaccagttctccatgcccactgtgccaccaccagaagagctgcttgactgtgagaccctcattgaccagtatttaagggaccctaacctccaaaagaggtacccattggcgctcaaccgaattgctgctcaggaggtccccattgagatcaagccagtaaacccatcccccctgagccagctgcagagaatggagcccaaacagatgttctgggtgcgagcccggggctatattggtggctctcgggggctggtccatgggcggctgtggcgtcaggatggagtcctagctgtgacctgtgcccaggagggcgtgatccgagtgaagccccaggtctcagagagcaagctgtagccagaggtaccagcttcgcctggggcttcaagaacctcccatctatccccattcctgagacaggagttacagt

SEQ ID NO: 104536 - DNA, 552 bp, Homo sapiens
  Payload ID: 527
  Gene Symbol: ACOT8
  Gene Name: acyl-CoA thioesterase 8
  ENST ID: ENST00000481938
  CDS Start-End: 91-375
actagggcaatctgccggaagagtcaggttctgtgtatgtctccgcgtcttccgcggagcgggtgtgcagggcctgcagcattgaactagatgtcgtccccgcaggccccagaagatgggcagggctgtggcgaccgcggcgatccccctggggacctccgtagcgtcttggtcacgaccgtgctcaacctcgagccgctggacgaggatctcttcagaggaaggcattactgggtaccggccaagaggctgtttggtggtcagatcgtgggccaggccctggtggctgcagccaagtctgtgagtgaagacgtccacgtgcactccctgcactgctactttgttcgggcagatgccctcatgtgttctgcgtagatccccagctgagaagagtttgtggacctttacagggacccgaagctgccagtactgtaccaagtggagcggacacgaacagggtcgagcttctcggtgcgctctgtgaaggccgtgcaacatgggaagcccatcttcatctgccaggcctccttccagcaggcccagcccagcccc

SEQ ID NO: 104537 - DNA, 764 bp, Homo sapiens
  Payload ID: 527
  Gene Symbol: ACOT8
  Gene Name: acyl-CoA thioesterase 8
  ENST ID: ENST00000486165
  CDS Start-End: 57-455
gtatgtctccgcgtcttccgcggagcgggtgtgcagggcctgcagcattgaactagatgtcgtccccgcaggccccagaagatgggcagggctgtggcgaccgcggcgatccccctggggacctccgtagcgtcttggtcacgaccgtgctcaacctcgagccgctggacgaggatctcttcagaggaaggcattactgggtaccggccaagaggctgtttggtggtcagatcgtgggccaggccctggtggctgcagccaagtctgtgagtgaagacgtccacgtgcactccctgcactgctactttgttcgggcagagcagatgccctcatgtgttctgcgtagatccccagctgagaagagtttgtggacctttacagggacccgaagctgccagtactgtaccaagtggagcggacacgaacagggtcgagcttctcggtgcgctctgtgaaggccgtgcaacatgggaagcccatcttcatctgccaggcctccttccagcaggcccagcccagccccatgcagcaccagttctccatgcccactgtgccaccaccagaagagctgcttgactgtgagaccctcattgaccagtatttaagggaccctaacctccaaaagaggtacccattggcgctcaaccgaattgctgctcaggaggtccccattgagatcaagccagtaaacccatcccccctgagccagctgcagagaatggagcccaaacagatgttctgggtgcgagcccggggctatattg

SEQ ID NO: 104538 - DNA, 1187 bp, Homo sapiens
  Payload ID: 527
  Gene Symbol: ACOT8
  Gene Name: acyl-CoA thioesterase 8
  ENST ID: ENST00000483141
  CDS Start-End: 55-570
atgtctccgcgtcttccgcggagcgggtgtgcagggcctgcagcattgaactagatgtcgtccccgcaggccccagaagatgggcagggctgtggcgaccgcggcgatccccctggggacctccgtagcgtcttggtcacgaccgtgctcaacctcgagccgctggacgaggatctcttcagggaccctaacctccaaaagaggtacccattggcgctcaaccgaattgctgctcaggaggtccccattgagatcaagccagtaaacccatcccccctgagccagctgcagagaatggagcccaaacagatgttctgggtgcgagcccggggctatattggcgagggcgacatgaagatgcactgctgcgtggccgcctatatctccgactatgccttcttgggcactgcactgctgcctcaccagtggcagcacaaggtgcacttcatggtctcactggaccattccatgtggttccacgcccccttccgagctgaccactggatgctctatgaatgcgagagcccctgggccggctttggcatcttcatcttcaaaatgagagggtgaggccgggacacctgctctgctctaaatttctagaatgtgctggaaatgtgattcaccttctcccagggacccagttctagtcccaaaaccagttcagattctttgtattacaataggcaaatcatatcttccatctgaacctcagtttcctcatctaaacaaagagggttacattacagcagtggtatccaaacccgcagtccatcagactgccatttggggatgccttttcaaaatagattctgattccaccctcaagattctcactcagtaggtcttggataaggtccaggaaactgtatttttaagttctctaagtgattctgattaacctgattgggatcggggcattcagtggtccctaagggcctgcttggaccttccttgcaggggagagaaacaagactcgttcatcaatgtctagcttcagaaccctgacctcctttccaagggagtacatttcaaatgaagaaaagctttgcttgataaaccaaggacaaaactcaaggattctttatactcagataaggggtattctcaagtaccaatagcatcacaatccaagattgataaccttgaagtgaggacatgggttcagatttggcttcatcatgggg

SEQ ID NO: 104539 - DNA, 1013 bp, Homo sapiens
  Payload ID: 527
  Gene Symbol: ACOT8
  Gene Name: acyl-CoA thioesterase 8
  ENST ID: ENST00000488679
  CDS Start-End: 88-411
agggcaatctgccggaagagtcaggttctgtgtatgtctccgcgtcttccgcggagcgggtgtgcagggcctgcagcattgaactagatgtcgtccccgcaggccccagaagatgggcagggctgtggcgaccgcggcgatccccctggggacctccgtagcgtcttggtcacgaccgtgctcaacctcgagccgctggacgaggatctcttcaggggacccgaagctgccagtactgtaccaagtggagcggacacgaacagggtcgagcttctcggtgcgctctgtgaaggccgtgcaacatgggaagcccatcttcatctgccaggcctccttccagcaggcccagcccagccccatgcagcaccagttctccatgcccactgtgccaccaccagaagagctgcttgactgtgagaccctcattgaccagtatttaagggaccctaacctccaaaagaggtacccattggcgctcaaccgaattgctgctcaggaggtccccattgagatcaagccagtaaacccatcccccctgagccagctgcagagaatggagcccaaacagatgttctgggtgcgagcccggggctatattggcgagggcgacatgaagatgcactgctgcgtggccgcctatatctccgactatgccttcttgggcactgcactgctgcctcaccagtggcagcacaaggtgcacttcatggtctcactggaccattccatgtggttccacgcccccttccgagctgaccactggatgctctatgaatgcgagagcccctgggccggtggctctcgggggctggtccatgggcggctgtggcgtcaggatggagtcctagctgtgacctgtgcccaggagggcgtgatccgagtgaagccccaggtctcagagagcaagctgtagccagaggtaccagcttcgcctggggcttcaagaacctcccatctatccccattcctgagacaggagttacagtcccttttggccctcacatccaataaag

SEQ ID NO: 104540 - DNA, 1197 bp, Homo sapiens
  Payload ID: 527
  Gene Symbol: ACOT8
  Gene Name: acyl-CoA thioesterase 8
  ENST ID: ENST00000461272
  CDS Start-End: 75-755
ggaagagtcaggttctgtgtatgtctccgcgtcttccgcggagcgggtgtgcagggcctgcagcattgaactagatgtcgtccccgcaggccccagaagatgggcagggctgtggcgaccgcggcgatccccctggggacctccgtagcgtcttggtcacgaccgtgctcaacctcgagccgctggacgaggatctcttcagaggaaggcattactgggtaccggccaagaggctgtttggtggtcagatcgtgggccaggccctggtggctgcagccaagtctgtgagtgaagacgtccacgtgcactccctgcactgctactttgttcgggcaggggacccgaagctgccagtactgtaccaagtggagcggacacgaacagggtcgagcttctcggtgcgctctgtgaaggccgtgcaacatgggaagcccatcttcatctgccaggcctccttccagcaggcccagcccagccccatgcagcaccagttctccatgcccactgtgccaccaccagaagagctgcttgactgtgagaccctcattgaccagtatttaagggaccctaacctccaaaagaggtacccattggcgctcaaccgaattgctgctcaggaggtccccattgagatcaagccagtaaacccatcccccctgagccagctgcagagaatggagcccaaacagatgttctgggtgcgagcccggggctatattggtcctgagctggaaagcccaggagcccagggctgatggggacctgttgcaggcgagggcgacatgaagatgcactgctgcgtggccgcctatatctccgactatgccttcttgggcactgcactgctgcctcaccagtggcagcacaaggtgcacttcatggtctcactggaccattccatgtggttccacgcccccttccgagctgaccactggatgctctatgaatgcgagagcccctgggccggtggctctcgggggctggtccatgggcggctgtggcgtcaggatggagtcctagctgtgacctgtgcccaggagggcgtgatccgagtgaagccccaggtctcagagagcaagctgtagccagaggtaccagcttcgcctggggcttcaagaacctcccatctatccccattcctgagacaggagttacagtcccttttggccctcacatccaataaagagactgatacca

SEQ ID NO: 104541 - DNA, 1675 bp, Homo sapiens
  Payload ID: 528
  Gene Symbol: ACOT9
  Gene Name: acyl-CoA thioesterase 9
  Uniprot ID: Q9Y305
  ENST ID: ENST00000336430
  CDS Start-End: 133-1452
gctgtccggctcccgggctgtcctcagcaagggcgcggtctggtactcgtgcgtcttttatcgcctcagtttccctccgccgactagcgcgcggggcccggttctccatcgcgcgcacggcagcctagcgcaatgaggcgggcagcactgcggctttgtgccttgggcaaagggcagcttactcctggaagaggactgactcaaggaccccagaaccccaagaaacagggaatcttccacattcatgaagttcgagataagttgcgggagatagtaggagcatccacaaactggagagaccatgtgaaggcaatggaagaaaggaaattacttcatagtttcttggctaaatcacaggatggactgcctcctaggagaatgaaggacagttatattgaagttctcttgcctttgggcagtgagcctgaattacgagagaaatatttgactgttcaaaacaccgtaagatttggcaggattcttgaggatcttgacagcttgggagttcttatttgttacatgcacaacaaaatccactccgccaagatgtctcctttatcgatagttacagccctggtggataagattgatatgtgtaagaagagcttgagcccagaacaggacattaagttcagtggccatgttagctgggtcgggaagacatccatggaagtgaagatgcaaatgttccagttacatggtgatgaattttgtcctgttttggatgcaacatttgtaatggtggctcgtgattctgaaaataaagggccggcatttgtaaatccactcatccctgaaagcccagaggaagaggagctctttagacaaggggaattgaacaaggggagaagaattgccttcagctccacgtcgttactgaaaatggcccccagcgctgaggagaggaccaccatacatgagatgtttctcagcacactggatccaaagactataagttttcggagtcgagttttaccctctaatgcagtgtggatggagaattcaaaactgaagagtttggaaatttgccaccctcaggagcggaacattttcaatcggatctttggtggtttccttatgaggaaggcatatgaacttgcgtgggctactgcttgtagctttggtggttctcgaccgtttgtggtagcagtagatgacatcatgtttcagaaacctgttgaggttggctcattgctctttctttcttcacaggtatgctttactcagaataattatattcaagtcagagtacacagtgaagtggcctccctgcaggagaagcagcatacaaccaccaatgtctttcatttcacgttcatgtcggaaaaagaagtgccattggttttcccaaaaacatatggagagtccatgttgtacttagatgggcagcggcatttcaactccatgagtggcccagcgaccttgagaaaggactaccttgtggagccctaagaacaccacatttgttgaaaactagcactctacccacagtgacgtggtatctgatgaagacctgatcgagtgtattgattttagtattgcttcgtgtcctccacacaggaggaggatgtattcagcctttaggatgatcagaaaagcagaaagagagagtggccggatggggctgaggggagaaagaattattaaacaataaatactttcaagacaattttaa

SEQ ID NO: 104542 - DNA, 2768 bp, Homo sapiens
  Payload ID: 528
  Gene Symbol: ACOT9
  Gene Name: acyl-CoA thioesterase 9
  Uniprot ID: Q9Y305
  ENST ID: ENST00000379295
  CDS Start-End: 1419-2558
aagagcagtaacacaaacagggctgaaacacgccctcctcccgtccccacacccccgcgacttgccatgttgcgggtgatgtgaaggagagaagtgctgtggcccttcagggagcacagacctaggggctccctgagccagggctgtgacaccctctttggggctctgcggtttctggtatcttcaaacttccgggcaccactgcattccccttgtccagacacaggtgcccacagcagaagccgcttgtggttcatcagatccagctgcagacttgcatagaaccggcacctttgccggcgcctggagctgcctgcccagctgcagcagctggtgtgtccggctctgcgcagtggccagaccctgcgttcgctcgcctgcacacccctcgctgttccgtgcctggctcaccctcggcaggcgtggaatcctggctggtagcatgagctgagcacagcctgccaggccacgtcagtggaacaagtctggcgggcctgatcaaaactcaggcaaaggcaccactggtcacagagctttctagctggaaaagcaacacctgaaggatcccgtgacacaatcaacctgctaggagatccctgccaccctgagaggctgcaggaagctgcctccatccaggcctcttcacagaaggagaattgcagagaccgtaggatttttctactcacaggaacagatggtgtccggtcaggaaggtaaaatgcttcaagaaaagtgcaatagggattataatactgatgatctgagactctgataatgactctgagatgattcccaattctatgatgaatcatctcagaatgactccgagatgatgattcctgattctacgatgattgaggcagagctcactggttggtgaatctagttggtagagctgaggcaccgcaataccatcatttctttctgaggaaatctaaagatgaaagaattcatcactaaaactgtactacgagaaatgctaaaggaagttgttcaaactgatggaaaattataccagatggacacttgaatttgcccaaaggaatgaagagcaccagaaatggcaaatgtgtggtcttactgtatcttcatgtcagtgtcatatcaaggacaagacagcagaaatggtccactccagttgcagatagtaaagaccctgtagctccagcatcagctcacctttctggttttgaatttcatgcttattaccatcctgtcatcacctactgtttccatggtagacgggactaagagatgggctttgtgccttgggcaaagggcagcttactcctggaagaggactgactcaaggaccccagaaccccaagaaacagggaatcttccacattcatgaagttcgagataagttgcgggagatagtaggagcatccacaaactggagagaccatgtgaaggcaatggaagaaaggaaattacttcatagtttcttggctaaatcacaggatggactgcctcctaggagaatgaaggacagttatattgaagttctcttgcctttgggcagtgagcctgaattacgagagaaatatttgactgttcaaaacaccgtaagatttggcaggattcttgaggatcttgacagcttgggagttcttatttgttacatgcacaacaaaatccactccgccaagatgtctcctttatcgatagttacagccctggtggataagattgatatgtgtaagaagagcttgagcccagaacaggacattaagttcagtggccatgttagctgggtcgggaagacatccatggaagtgaagatgcaaatgttccagttacatggtgatgaattttgtcctgttttggatgcaacatttgtaatggtggctcgtgattctgaaaataaagggccggcatttgtaaatccactcatccctgaaagcccagaggaagaggagctctttagacaaggggaattgaacaaggggagaagaattgccttcagctccacgtcgttactgaaaatggcccccagcgctgaggagaggaccaccatacatgagatgtttctcagcacactggatccaaagactataagttttcggagtcgagttttaccctctaatgcagtgtggatggagaattcaaaactgaagagtttggaaatttgccaccctcaggagcggaacattttcaatcggatctttggtggtttccttatgaggaaggcatatgaacttgcgtgggctactgcttgtagctttggtggttctcgaccgtttgtggtagcagtagatgacatcatgtttcagaaacctgttgaggttggctcattgctctttctttcttcacaggtatgctttactcagaataattatattcaagtcagagtacacagtgaagtggcctccctgcaggagaagcagcatacaaccaccaatgtctttcatttcacgttcatgtcggaaaaagaagtgccattggttttcccaaaaacatatggagagtccatgttgtacttagatgggcagcggcatttcaactccatgagtggcccagcgaccttgagaaaggactaccttgtggagccctaagaacaccacatttgttgaaaactagcactctacccacagtgacgtggtatctgatgaagacctgatcgagtgtattgattttagtattgcttcgtgtcctccacacaggaggaggatgtattcagcctttaggatgatcagaaaagcagaaagagagagtggccggatggggctgaggggagaaagaattattaaacaataaatactttc

SEQ ID NO: 104543 - DNA, 3117 bp, Homo sapiens
  Payload ID: 528
  Gene Symbol: ACOT9
  Gene Name: acyl-CoA thioesterase 9
  Uniprot ID: Q9Y305
  ENST ID: ENST00000379303
  CDS Start-End: 130-1476
gtccggctcccgggctgtcctcagcaagggcgcggtctggtactcgtgcgtcttttatcgcctcagtttccctccgccgactagcgcgcggggcccggttctccatcgcgcgcacggcagcctagcgcaatgaggcgggcagcactgcggctttgtgccttgggcaaagggcagcttactcctggaagaggactgactcaaggaccccagaaccccaagaaacagggaatcttccacattcatgaagcatgttcatctatacatgtgaatcatgttcgagataagttgcgggagatagtaggagcatccacaaactggagagaccatgtgaaggcaatggaagaaaggaaattacttcatagtttcttggctaaatcacaggatggactgcctcctaggagaatgaaggacagttatattgaagttctcttgcctttgggcagtgagcctgaattacgagagaaatatttgactgttcaaaacaccgtaagatttggcaggattcttgaggatcttgacagcttgggagttcttatttgttacatgcacaacaaaatccactccgccaagatgtctcctttatcgatagttacagccctggtggataagattgatatgtgtaagaagagcttgagcccagaacaggacattaagttcagtggccatgttagctgggtcgggaagacatccatggaagtgaagatgcaaatgttccagttacatggtgatgaattttgtcctgttttggatgcaacatttgtaatggtggctcgtgattctgaaaataaagggccggcatttgtaaatccactcatccctgaaagcccagaggaagaggagctctttagacaaggggaattgaacaaggggagaagaattgccttcagctccacgtcgttactgaaaatggcccccagcgctgaggagaggaccaccatacatgagatgtttctcagcacactggatccaaagactataagttttcggagtcgagttttaccctctaatgcagtgtggatggagaattcaaaactgaagagtttggaaatttgccaccctcaggagcggaacattttcaatcggatctttggtggtttccttatgaggaaggcatatgaacttgcgtgggctactgcttgtagctttggtggttctcgaccgtttgtggtagcagtagatgacatcatgtttcagaaacctgttgaggttggctcattgctctttctttcttcacaggtatgctttactcagaataattatattcaagtcagagtacacagtgaagtggcctccctgcaggagaagcagcatacaaccaccaatgtctttcatttcacgttcatgtcggaaaaagaagtgccattggttttcccaaaaacatatggagagtccatgttgtacttagatgggcagcggcatttcaactccatgagtggcccagcgaccttgagaaaggactaccttgtggagccctaagaacaccacatttgttgaaaactagcactctacccacagtgacgtggtatctgatgaagacctgatcgagtgtattgattttagtattgcttcgtgtcctccacacaggaggaggatgtattcagcctttaggatgatcagaaaagcagaaagagagagtggccggatggggctgaggggagaaagaattattaaacaataaatactttcaagacaattttaattgtgaacctaccatgttgcctcccatcttctgaaaaaacaaaaaaattgagaggctgggcgtggtggctcatgcctataatcccagcactttgggaggctgaggcgggcggatcatgaagtcaggagatcaagaccatcctggccaacatggtgaaaccctgtctctactaaaaatacagaaaattagccgtggtggcatgtgcctgtagtcccagctacttgggaggctgaggcaggagaattgcttgaacccaggaggtggaggttgcagtgagctgagattgcaccattgcactccagcctgggcgacagagagagactgtctcaaaaattaattaattaattaattaattgaggataccattggatgcattcttttcttacacatattgcaactgtcagtatacaaggtttcctgccagggtatttggatgacgttctttaaacctaaccacttgctctgtgctgtctaaatcccatcagccgtacatgattcctttgcttccctctatttcccagcttttgttgtcagagggtagatgaaaagttggggcgaagggatttaacaaaagttactgcatccgtaaagatttgtgggaagatttaggtctgaaaccataccattagaaggtgtttagagatgatctagataaggaaatacaggaccatttggtcattctttcattcaccagacagctatttagcacattctgctagtggctccgcaggatatatctgatttaaaaaataggaaccacaataataatagctgcttatgcttatggagcattgccatgtgctagataggcaccatcctcagcccttggcaggtctgagctcctttatttcttccaatcaacactatgaggcaggttctgtaaccccccttagggttaggccactcgggaaactgaagcacagagagtttaagtaacttcctggaggtccgacgcgtaacatgtggaggtgctgggattcaaaaccaggcaatgtgggtcccgggcactcttgaccagtgcctgtacttcttccaaggaatagagcaagggaggtcataccgaatatcacagtgtcacctaggaagcccaagggaggtattcccgttaatctgcagccaaggccgggcgcggtagctcatgcctgtaatcccagcactttgggaggccaaggcggatggatcatgaggtcaggagttcaagaccagcctggccgagatggtgaaaccccgtttctactaaaaatacaaaaattagccgggcgtggtggcggacgcctgtaatcccagctactcgggaggctgaggcagagaactgcttgaacctgggaggcagaggttgcagtgagctgtgatcatgccactgcactccagcctgggtgacagaacgagactccatctcaaaaaaaaaaaaaaaaaaa

SEQ ID NO: 104544 - DNA, 683 bp, Homo sapiens
  Payload ID: 528
  Gene Symbol: ACOT9
  Gene Name: acyl-CoA thioesterase 9
  ENST ID: ENST00000492081
  CDS Start-End: 189-599
gcaagggcgcggtctggtactcgtgcgtcttttatcgcctcagtttccctccgccgactagcgcgcggggcccggttctccatcgcgcgcacggcagcctagcgcaatgaggcgggcagcactgcgttcgagataagttgcgggagatagtaggagcatccacaaactggagagaccatgtgaaggcaatggaagaaaggaaattacttcatagtttcttggctaaatcacaggatggactgcctcctaggagaatgaaggacagttatattgaagttctcttgcctttgggcagtgagcctgaattacgagagaaatatttgactgttcaaaacaccgtaagatttggcaggattcttgaggatcttgacagcttgggagttcttatttgttacatgcacaacaaaatccactccgccaagatgtctcctttatcgatagttacagccctggtggataagattgatatgtgtaagaagagcttgagcccagaacaggacattaagttcagtggccatgttagctgggtcgggaagacatccatggaagtgaagatgcaaatgttccaggccggcatttgtaaatccactcatccctgaaagcccagaggaagaggagctctttagacaaggggaatgtacattaatttgtttataataaaataaatttgaaaagcacattaa

SEQ ID NO: 104545 - DNA, 1682 bp, Homo sapiens
  Payload ID: 528
  Gene Symbol: ACOT9
  Gene Name: acyl-CoA thioesterase 9
  ENST ID: ENST00000494361
  CDS Start-End: 147-287
cgcccccggacaccgctgtccggctcccgggctgtcctcagcaagggcgcggtctggtactcgtgcgtcttttatcgcctcagtttccctccgccgactagcgcgcggggcccggttctccatcgcgcgcacggcagcctagcgcaatgaggcgggcagcactgcggctttgtgccttgggcaaagggcagcttactcctggaagaggactgactcaaggaccccagaaccccaagaaacagggaatcttccacattcatgaaggcaagcatggtgtctctgtttgatgcctatgtgataagttgcgggagatagtaggagcatccacaaactggagagaccatgtgaaggcaatggaagaaaggaaattacttcatagtttcttggctaaatcacaggatggactgcctcctaggagaatgaaggacagttatattgaagttctcttgcctttgggcagtgagcctgaattacgagagaaatatttgactgttcaaaacaccgtaagatttggcaggattcttgaggatcttgacagcttgggagttcttatttgttacatgcacaacaaaatccactccgccaagatgtctcctttatcgatagttacagccctggtggataagattgatatgtgtaagaagagcttgagcccagaacaggacattaagttcagtggccatgttagctgggtcgggaagacatccatggaagtgaagatgcaaatgttccagttacatggtgatgaattttgtcctgttttggatgcaacatttgtaatggtggctcgtgattctgaaaataaagggccggcatttgtaaatccactcatccctgaaagcccagaggaagaggagctctttagacaaggggaattgaacaaggggagaagaattgccttcagctccacgtcgttactgaaaatggcccccagcgctgaggagaggaccaccatacatgagatgtttctcagcacactggatccaaagactataagttttcggagtcgagttttaccctctaatgcagtgtggatggagaattcaaaactgaagagtttggaaatttgccaccctcaggagcggaacattttcaatcggatctttggtggtttccttatgaggaaggcatatgaacttgcgtgggctactgcttgtagctttggtggttctcgaccgtttgtggtagcagtagatgacatcatgtttcagaaacctgttgaggttggctcattgctctttctttcttcacaggtatgctttactcagaataattatattcaagtcagagtacacagtgaagtggcctccctgcaggagaagcagcatacaaccaccaatgtctttcatttcacgttcatgtcggaaaaagaagtgccattggttttcccaaaaacatatggagagtccatgttgtacttagatgggcagcggcatttcaactccatgagtggcccagcgaccttgagaaaggactaccttgtggagccctaagaacaccacatttgttgaaaactagcactctacccacagtgacgtggtatctgatgaagacctgatcgagtgtattgattttagtattgcttcgtgtcctccacacaggaggaggatgtattcagcctttaggatgatcagaaaagcagaaagagagagtggccggatggggctgaggggagaaagaat

SEQ ID NO: 104546 - DNA, 793 bp, Homo sapiens
  Payload ID: 528
  Gene Symbol: ACOT9
  Gene Name: acyl-CoA thioesterase 9
  ENST ID: ENST00000473710
  CDS Start-End: 1-793
atagtaggagcatccacaaactggagagaccatgtgaaggcaatggaagaaaggaaattacttcatagtttcttggctaaatcacaggatggactgcctcctaggagaatgaaggacagttatattgaagttctcttgcctttgggcagtgagcctgaattacgagagaaatatttgactgttcaaaacaccgtaagatttggcaggattcttgaggatcttgacagcttgggagatatgtgtaagaagagcttgagcccagaacaggacattaagttcagtggccatgttagctgggtcgggaagacatccatggaagtgaagatgcaaatgttccagttacatggtgatgaattttgtcctgttttggatgcaacatttgtaatggtggctcgtgattctgaaaataaagggccggcatttgtaaatccactcatccctgaaagcccagaggaagaggagctctttagacaaggggaattgaacaaggggagaagaattgccttcagctccacgtcgttactgaaaatggcccccagcgctgaggagaggaccaccatacatgagatgtttctcagcacactggatccaaagactataagttttcggagtcgagttttaccctctaatgcagtgtggatggagaattcaaaactgaagagtttggaaatttgccaccctcaggagcggaacattttcaatcggatctttggtggtttccttatgaggaaggcatatgaacttgcgtgggctactgcttgtagctttggtggttctcgaccgtttgtggtag

SEQ ID NO: 104547 - DNA, 1365 bp, Homo sapiens
  Payload ID: 529
  Gene Symbol: AWAT1
  Gene Name: acyl-CoA wax alcohol acyltransferase 1
  Uniprot ID: Q58HT5
  ENST ID: ENST00000374521
  CDS Start-End: 42-1028
actgttctgagatctttgcctccctcaggctcccgagaatcatggctcattccaagcagcctagtcacttccagagtctgatgcttctgcagtggcctttgagctaccttgccatcttttggatcttgcagccattgttcgtctacctgctgtttacatccttgtggccgctaccagtgctttactttgcctggttgttcctggactggaagaccccagagcgaggtggcaggcgttcggcctgggtaaggaactggtgtgtctggacccacatcagggactatttccccattacgatcctgaagacaaaggacctatcacctgagcacaactacctcatgggggttcacccccatggcctcctgacctttggcgccttctgcaacttctgcactgaggccacaggcttctcgaagaccttcccaggcatcactcctcacttggccacgctgtcctggttcttcaagatcccctttgttagggagtacctcatggccaaaggtgtgtgctctgtgagccagccagccatcaactatctgctgagccatggcactggcaacctcgtgggcattgtagtgggaggtgtgggtgaggccctgcaaagtgtgcccaacaccaccaccctcatcctccagaagcgcaaggggttcgtgcgcacagccctccagcatggggctcatctggtccccaccttcacttttggggaaactgaggtgtatgatcaggtgctgttccataaggatagcaggatgtacaagttccagagctgcttccgccgtatctttggtttctactgttgtgtcttctatggacaaagcttctgtcaaggctccactgggctcctgccatactccaggcctattgtcactgtggttggggagcctctgccactgccccaaattgaaaagccaagccaggagatggtggacaaataccatgcactttatatggatgctctgcacaaactgttcgaccagcataagacccactatggctgctcagagacccaaaagctgtttttcctgtgaatgaaggtactgcatgcccaggagcacaggagtgcctgccttgaagaagagactcatctgccactaaccaaagacaggcaggagatgagggaggttatatgtggtaggggagggcatgaggaattccttctttgccttcttgccacagggtccttacaggaattctttctgaagagctgcacacagtcattcctcaaaggagggcatcctagtgcccctcatgctggggcctgatgcctggtcatcatttgagtcctctgggacacattagcagtcactgcatattcccccagcccctgggcaactatctactttctgtctctgtggatttgccaat

SEQ ID NO: 104548 - DNA, 2124 bp, Homo sapiens
  Payload ID: 530
  Gene Symbol: AWAT2
  Gene Name: acyl-CoA wax alcohol acyltransferase 2
  Uniprot ID: Q6E213
  ENST ID: ENST00000276101
  CDS Start-End: 7-1008
ggcacaatgctcttgccctctaagaaggacctcaagactgccctggatgtctttgctgttttccagtggtccttcagtgccttgcttatcacaaccactgtgattgctgtcaacctctacctggtggtgttcacaccatactggcctgtcactgtgcttattcttacctggctggcttttgactggaagacccctcagcgaggcggccgccggtttacctgtgtgaggcactggcgcctgtggaaacactacagcgattatttccctctcaagcttctgaagactcatgacatctgccccagccgcaactacatcctcgtctgccaccctcatgggctctttgcccatggatggtttggccactttgccacagaggcctcaggcttctccaagatatttcctggcatcaccccttacatactcacactgggagcctttttctggatgcctttcctcagagaatatgtaatgtctacaggggcctgctctgtgagtcgatcctccattgactttctgctgactcataaaggcacaggcaacatggtcattgtggtgattggtggactggctgagtgcagatacagcctgccaggttcttctaccctggtgttgaagaaccggtctggctttgtgcgcatggcccttcagcatggggtgcctctaatacctgcctatgcctttggggagacggacctctatgatcagcacattttcactcctggtggctttgtcaaccgcttccagaagtggttccagagcatggtacacatctacccttgtgctttctatggacgtggcttcaccaagaactcctggggccttctgccctatagtcggcctgtaaccaccatcgtcggggagcctctaccaatgcccaagattgagaatccaagccaggagatcgtggctaaatatcacacactctatattgatgccctacgtaaactgtttgaccagcataagaccaagtttggtatctcagagacccaggagctggagataatttgacagacatccccagtagccttcaccctggctggaagctcttttctgccctttctttgcagctactggtgagatagtcccaagaaacagggaagagcctaggggagaggtgccctgacggcactttggtgccagcattgaggaaaacaatggacaaaataaaaagcccatcttctgataactgcgtgtgcaccaactactctgttttgaaggctctgggatgcatgtctctccttctctagctgtcaaacagccccatctcccggcattgagccccatcttctggcattgagtcctgcttcctacaggagtaggactggggccttgagagccagtgggctttgagtttaagctccaccaacttcaagccatgtgactttggggcaatcagtcacctctgagcctcctttcttcttctataaaatgagactaacaatctgtctcttgcttacctcaaaggccgttgggaagatcaaacaatattggatgtgattgaactttataaactggagagctacaccattttcttctccaaccattttacccatttcctgtccctgagcaaacaacgcccgaaataccctctgctacccactagccctcactcagtttctgcctcacaaagctgtaacagaatgggttgggctcaggcctaattttctctgtcattccctcagcaacttgcctatacttgtgtggccctataattctggcctttgtttgagagtcagccagcctgctcaggatgaaaatgaggcgcctggcttttagcagccataaagaactctccttctgaatggcaagtctctcagactcttggtctaatggctgttgcaatgacaggctacaaaatttggctcacatccctctcattccatccctcttgggtgggtgccatttggtccagtgatttacctgcattacgttggtcaatttggtctacaacatcctgcgtgtttactgcagtgtgagctgctgcctctatcctgggtgcctgcctcatgtgatgatttgtatacagtggccaaagacatgcttctgcttttctgctgtctttgttacttcttgtgccagagattacgttttccctgagcttccataaagtgtttttaaacagtc

SEQ ID NO: 104549 - DNA, 986 bp, Homo sapiens
  Payload ID: 530
  Gene Symbol: AWAT2
  Gene Name: acyl-CoA wax alcohol acyltransferase 2
  ENST ID: ENST00000440401
  CDS Start-End: 1-501
gaggcctcaggcttctccaagatatttcctggcatcaccccttacatactcacactgggagcctttttctggatgcctttcctcagagaatatgtaatgtctacaggggcctgctctgtgagtcgatcctccattgactttctgctgactcataaaggcacaggcaacatggtcattgtggtgattggtggactggctgagtgcagatacagcctgccaggttcttctaccctggtgttgaagaaccggtctggctttgtgcgcatggcccttcagcatgggcagccaggggtaggccatggagcccccacactcaacttggacctaggcacagctggactggggtctgagaagcctgtaggcagacccagggatcatgcgccgtcagcgtgtctggcattcgacaaggtccctacctttctgggcttcagaagatatgcttttgctctgcagggtgcctctaatacctgcctatgcctttggggagacggacctctatgatcagcacattttcactcctggtggctttgtcaaccgcttccagaagtggttccagagcatggtacacatctacccttgtgctttctatggacgtggcttcaccaagaactcctggggccttctgccctatagtcggcctgtaaccaccatcgtcggggagcctctaccaatgcccaagattgagaatccaagccaggagatcgtggctaaatatcacacactctatattgatgccctacgtaaactgtttgaccagcataagaccaagtttggtatctcagagacccaggagctggagataatttgacagacatccccagtagccttcaccctggctggaagctcttttctgccctttctttgcagctactggtgagatagtcccaagaaacagggaagagcctaggggagaggtgccctgacggcactttggtgccagcattgaggaaaacaatggacaaaataaaaagcccatcttctgataa

SEQ ID NO: 104550 - DNA, 3849 bp, Homo sapiens
  Payload ID: 531
  Gene Symbol: AGK
  Gene Name: acylglycerol kinase
  Uniprot ID: Q53H12
  ENST ID: ENST00000355413
  CDS Start-End: 261-1529
atgaaaggaagagtgagccaataaacgagggaacgccgggaaaggcagcctcaagccggtgggccctgccacccccaccgtccctgagcatccgagccggttcccgcccccggcccgaactggcccgcgcgcgctcgcagccccgcggcggaacccgagggcggcggcagcggtttcccttgaacgagccggggaatctggagggagcacacaggaaaggcagagccgcgagctggaccagccgtgcaaatctctagaagatgacggtgttctttaaaacgcttcgaaatcactggaagaaaactacagctgggctctgcctgctgacctggggaggccattggctctatggaaaacactgtgataacctcctaaggagagcagcctgtcaagaagctcaggtgtttggcaatcaactcattcctcccaatgcacaagtgaagaaggccactgtttttctcaatcctgcagcttgcaaaggaaaagccaggactctatttgaaaaaaatgctgccccgattttacatttatctggcatggatgtgactattgttaagacagattatgagggacaagccaagaaactcctggaactgatggaaaacacggatgtgatcattgttgcaggaggagatgggacactgcaggaggttgttactggtgttcttcgacgaacagatgaggctaccttcagtaagattcccattggatttatcccactgggagagaccagtagtttgagtcataccctctttgccgaaagtggaaacaaagtccaacatattactgatgccacacttgccattgtgaaaggagagacagttccacttgatgtcttgcagatcaagggtgaaaaggaacagcctgtatttgcaatgaccggccttcgatggggatctttcagagatgctggcgtcaaagttagcaagtactggtatcttgggcctctaaaaatcaaagcagcccactttttcagcactcttaaggagtggcctcagactcatcaagcctctatctcatacacgggacctacagagagacctcccaatgaaccagaggagacccctgtacaaaggccttctttgtacaggagaatattacgaaggcttgcgtcctactgggcacaaccacaggatgccctttcccaagaggtgagcccggaggtctggaaagatgtgcagctgtccaccattgaactgtccatcacaacacggaataatcagcttgacccgacaagcaaagaagattttctgaatatctgcattgaacctgacaccatcagcaaaggagactttataactataggaagtcgaaaggtgagaaaccccaagctgcacgtggagggcacggagtgtctccaagccagccagtgcactttgcttatcccggagggagcagggggctcttttagcattgacagtgaggagtatgaagcgatgcctgtggaggtgaaactgctccccaggaagctgcagttcttctgtgatcctaggaagagagaacagatgctcacaagccccacccagtgagcagcagaagacaagcactctgagaccacactttaggccaccggtgggaccaaaagggaacaggtgcctcagccatcccaacagtgtcgtcagagggtccccagggcattttcatggcaagtacccctctgcccccactccagcagtgcttcccaaagtgtgctctgtcacctgctttgcaatcggcttccattagcgcatgttttattttggtgtgacggttggccctcctaaacacggactttcctcaggctggttcaagacggaaaaggactttcttctgttttcttccaaagtgcaaccacagtggagagcccacggtgggcttagcctgcctaggcccttccatttctcttctttgaccgtgctaggaattccaggaaagtgcattcctgccctggtgaccttttcctatgtctaggctcctccacaggtgctgctattttgtgagctccggctcctgtttagcttttatttcagttctaacctcagtccagaaacatatgtgaggttgtttccctcttcagccacggctacaataccggaaaatgctagtttttatttatttttttaagtagtgcttcctaaatggtttgcatgagagccacctggggtacatgttgaaaacttatttggggtctaccccaaacctaataacccaaatttggggatggggcccaggaatatgcatttttaaaaagtcatctgcccttcccaggtgattctgtaagttgtccctcaactgtacttggagaaatcgtgttttaaagcagtagtccacaaagtattctgctcatgtgcccccaaaagtattttgaaaaatcatgtataccctcacccatctaagttgatatctaaaattttatctaagttggtatctaaaatttttcatgggaagttaaatagttgacaaagtatgtatttgctggtgtcgtgtaaatattggtattttaaaataaaaactgttacatcactattttaaacatatccagtacaatttaaatatcacaacaatttgacacccttcattcatttataaaaataaatgagctagttctttagtagttaaacatttcaaattggcttttctccttctgtatttccataccacttttcagccaagaatcctatcataatgtaatctattatgcccgacatcttttaatcattcaccccattacttcttgtcaacaaaaaatataaatggaaattttttttttagctcttgctttaagtgtttgtttgttatctcagtccagaaccaatattatcgtaattaattattggtatataatgaaaacggtattaattcttggatgattaaaagtttttttattagaatgttctttatcctaattagttcatttatccaagaatacatgaatgtgatttacagctgagatggggttcaacctcagctgtattccttgtttctgtatagatgtaagcacataaattcgatggaatagaattacgttaacaatgtttttacagttctttggattcctttggcattttgacaaagatcacagtgctctatcatcaagaattattaatgatgatctatcaactaacaaacaacttgattagattctcctttagtctgttgaaagcagagaactgaaatccacctgatttaccatggctttgccagccagtcattagcaccatttacttttactatcgctgacattttcctttgttcagtggccctgaggttcttacactctagggggcagtgcaccacaggaagatagatcaatgagggaggattgcgagggggaaggggaggaagcagagctggcaggccttagctacaggctctctctcaggcagatcccttttaagatacatacaccatgcccacacatcccatggagagagaccaatgctttagtagattacagaacagctatgaaaagtccatgaatgaagatcacaaaaaggaaggctttcttatttcatactgtattcttcagggtggtaaaatttctgcttttggcaaaaacataacagacggttccaaacatcagcataaagatcactcatcccataccacccacaggtagggaggaaggatgctgtagtatatgaaaacaaaagttttcacctgagctgagagcatttagcatatcgtggttctgtaacaatatcaaggaccagtgcagaatctggctttcttttctgataggctaccagtgtgtgtttatgtgtgctcattttgtggttctaatcataatggtacatataattagggaaggatatggaagccactttagaatcttattcatttttaaatataaatatgccttgtttcaaa

SEQ ID NO: 104551 - DNA, 951 bp, Homo sapiens
  Payload ID: 531
  Gene Symbol: AGK
  Gene Name: acylglycerol kinase
  ENST ID: ENST00000494688
  CDS Start-End: 15-749
caaatctctagaagatgacggtgttctttaaaacgcttcgaaatcactggaagaaaactacagctgggctctgcctgctgacctggggaggccattggctctatggaaaacactgtgataacctcctaaggagagcagcctgtcaagaagctcaggtgtttggcaatcaactcattcctcccaatgcacaagtgaagaaggccactgtttttctcaatcctgcagcttgcaaagggactctatttgaaaaaaatgctgccccgattttacatttatctggcatggatgtgactattgttaagacagattatgagggacaagccaagaaactcctggaactgatggaaaacacggatgtgatcattgttgcaggaggagatgggacactgcaggaggttgttactggtgttcttcgacgaacagatgaggctaccttcagtaagattcccattggatttatcccactgggagagaccagtagtttgagtcataccctctttgccgaaagtggaaacaaagtccaacatattactgatgccacacttgccattgtgaaaggagagacagttccacttgatgtcttgcagatcaagggtgaaaaggaacagcctgtatttgcaatgaccggccttcgatggggatctttcagagatgctggcgtcaaagttagcaagtactggtatcttgggcctctaaaaatcaaagcagcccactttttcagcactcttaagccctttcccaagaggtgagcccggaggtctggaaagatgtgcagctgtccaccattgaactgtccatcacaacacggaataatcagcttgacccgacaagcaaagaagattttctgaatatctgcattgaacctgacaccatcagcaaaggagactttataactataggaagtcgaaaggtgagaaaccccaagctgcacgtggagggcacggagtgtct

SEQ ID NO: 104552 - DNA, 1046 bp, Homo sapiens
  Payload ID: 531
  Gene Symbol: AGK
  Gene Name: acylglycerol kinase
  Uniprot ID: Q53H12
  ENST ID: ENST00000492693
  CDS Start-End: 15-212
caaatctctagaagatgacggtgttctttaaaacgcttcgaaatcactggaagaaaactacagctgggctctgcctgctgacctggggaggccattggctctatggaaaacactgtgataacctcctaaggagagcagcctgtcaagaagctcagcactatcaggatgaatcacgctgggagccaactctgagtagaactccaggaagttaaccatctggtgaagagcagttctgacgcccacccctatagactgtttgtttctggattggtcccaagaacacagaactggactggtagaagctctgggaatttgtttgtgtctgcagttgtctttgtagatttgtctaacccctgaatcatccctgatctgaataacccccaaggatatcagttcagagcaagtgttacctctaaaagtcaaatcttcttaaaattgttgattcatatttttaaagctcatctccaagttcaactgatccatatcatgtacactgttatattccatgagattttacttaaatattcatttatatggctaattatagctggattataatatttgtcctttcaaatataagacagcatttttgcccccccactgcaaaaatgtgcattataccttgcagatgaaattctgagactgagttgcctttttgttttatatcatttgagcttatgatgtcagaaataccaaaatagaaacatgaaaatcaaaagtggcaaatgtgtgaagcatttagtaataaaaataggtggcagacctcatgtttgtttctgaaatgttttaatggatgacagtgagaatagatactataaattaattcctctctttagcgattgttacaatagatactataaattaattcctctctttagcagttgttacagtatatactataattcctctttttagcgattgttatctagctgttctaaacctgtgttttacgaatttgattacttctttgtttaaatgtattatctttcatatggctctaagttgttttggaaatcaattcaaataaactttaatattaaattaaa

SEQ ID NO: 104553 - DNA, 568 bp, Homo sapiens
  Payload ID: 531
  Gene Symbol: AGK
  Gene Name: acylglycerol kinase
  ENST ID: ENST00000473884
  CDS Start-End: 32-172
gagctggaccagccgtgcaaatctctagaagatgacggtgttctttaaaacgcttcgaaatcactggaagaaaactacagctgggctctgcctgctgacctggggaggccattggctctatggaaaacactggtgtttggcaatcaactcattcctcccaatgcacaagtgaagaaggccactgtttttctcaatcctgcagcttgcaaaggaaaagccaggactctatttgaaaaaaatgctgccccgattttacatttatctggcatggatgtgactattgttaagacagattatgagggacaagccaagaaactcctggaactgatggaaaacacggatgtgatcattgttgcaggaggagatgggacactgcaggaggttgttactggtgttcttcgacgaacagatgaggctaccttcagtaagattcccattggatttatcccactgggagagaccagtagtttgagtcataccctctttgccgaaagtggaaacaaagtccaacatattactgatgccacacttgccattgtgaaaggagagacagttccacttgatgtct

SEQ ID NO: 104554 - DNA, 1550 bp, Homo sapiens
  Payload ID: 531
  Gene Symbol: AGK
  Gene Name: acylglycerol kinase
  ENST ID: ENST00000473247
  CDS Start-End: 143-1327
gcacacaggaaaggcagagccgcgagctggaccagccgtgcaaatctctagaagatgacggtgttctttaaaacgcttcgaaatcactggaagaaaactacagctgggctctgcctgctgacctggggaggccattggctctatggaaaacactgatagtgataacctcctaaggagagcagcctgtcaagaagctcaggtgtttggcaatcaactcattcctcccaatgcacaagtgaagaaggccactgtttttctcaatcctgcagcttgcaaaggaaaagccaggactctatttgaaaaaaatgctgccccgattttacatttatctggcatggatgtgactattgttaagacagattatgagggacaagccaagaaactcctggaactgatggaaaacacggatgtgatcattgttgcaggaggagatgggacactgcaggaggttgttactggtgttcttcgacgaacagatgaggctaccttcagtaagattcccattggatttatcccactgggagagaccagtagtttgagtcataccctctttgccgaaagtggaaacaaagtccaacatattactgatgccacacttgccattgtgaaaggagagacagttccacttgatgtcttgcagatcaagggtgaaaaggaacagcctgtatttgcaatgaccggccttcgatggggatctttcagagatgctggcgtcaaagttagcaagtactggtatcttgggcctctaaaaatcaaagcagcccactttttcagcactcttaaggagtggcctcagactcatcaagcctctatctcatacacgggacctacagagagacctcccaatgaaccagaggagacccctgtacaaaggccttctttgtacaggagaatattacgaaggcttgcgtcctactgggcacaaccacaggatgccctttcccaagaggtgagcccggaggtctggaaagatgtgcagctgtccaccattgaactgtccatcacaacacggaataatcagcttgacccgacaagcaaagaagattttctgaatatctgcattgaacctgacaccatcagcaaaggagactttataactataggaagtcgaaaggtgagaaaccccaagctgcacgtggagggcacggagtgtctccaagccagccagtgcactttgcttatcccggagggagcagggggctcttttagcattgacagtgaggagtatgaagcgatgcctgtggaggtgaaactgctccccaggaagctgcagttcttctgtgatcctaggaagagagaacagatgctcacaagccccacccagtgagcagcagaagacaagcactctgagaccacactttaggccaccggtgggaccaaaagggaacaggtgcctcagccatcccaacagtgtcgtcagagggtccccagggcattttcatggcaagtacccctctgcccccactccagcagtgcttcccaaagtgtgctctgtcacctgctttgcaatcggcttccattagcgcatgttttattttggtgtgacggtt

SEQ ID NO: 104555 - DNA, 3001 bp, Homo sapiens
  Payload ID: 531
  Gene Symbol: AGK
  Gene Name: acylglycerol kinase
  Uniprot ID: Q53H12
  ENST ID: ENST00000575872
  CDS Start-End: 1-681
ggtgaaaaggaacagcctgtatttgcaatgaccggccttcgatggggatctttcagagatgctggcgtcaaagttagcaagtactggtatcttgggcctctaaaaatcaaagcagcccactttttcagcactcttaaggagtggcctcagactcatcaagcctctatctcatacacgggacctacagagagacctcccaatgaaccagaggagacccctgtacaaaggccttctttgtacaggagaatattacgaaggcttgcgtcctactgggcacaaccacaggatgccctttcccaagaggtgagcccggaggtctggaaagatgtgcagctgtccaccattgaactgtccatcacaacacggaataatcagcttgacccgacaagcaaagaagattttctgaatatctgcattgaacctgacaccatcagcaaaggagactttataactataggaagtcgaaaggtgagaaaccccaagctgcacgtggagggcacggagtgtctccaagccagccagtgcactttgcttatcccggagggagcagggggctcttttagcattgacagtgaggagtatgaagcgatgcctgtggaggtgaaactgctccccaggaagctgcagttcttctgtgatcctaggaagagagaacagatgctcacaagccccacccagtgagcagcagaagacaagcactctgagaccacactttaggccaccggtgggaccaaaagggaacaggtgcctcagccatcccaacagtgtcgtcagagggtccccagggcattttcatggcaagtacccctctgcccccactccagcagtgcttcccaaagtgtgctctgtcacctgctttgcaatcggcttccattagcgcatgttttattttggtgtgacggttggccctcctaaacacggactttcctcaggctggttcaagacggaaaaggactttcttctgttttcttccaaagtgcaaccacagtggagagcccacggtgggcttagcctgcctaggcccttccatttctcttctttgaccgtgctaggaattccaggaaagtgcattcctgccctggtgaccttttcctatgtctaggctcctccacaggtgctgctattttgtgagctccggctcctgtttagcttttatttcagttctaacctcagtccagaaacatatgtgaggttgtttccctcttcagccacggctacaataccggaaaatgctagtttttatttatttttttaagtagtgcttcctaaatggtttgcatgagagccacctggggtacatgttgaaaacttatttggggtctaccccaaacctaataacccaaatttggggatggggcccaggaatatgcatttttaaaaagtcatctgcccttcccaggtgattctgtaagttgtccctcaactgtacttggagaaatcgtgttttaaagcagtagtccacaaagtattctgctcatgtgcccccaaaagtattttgaaaaatcatgtataccctcacccatctaagttgatatctaaaattttatctaagttggtatctaaaatttttcatgggaagttaaatagttgacaaagtatgtatttgctggtgtcgtgtaaatattggtattttaaaataaaaactgttacatcactattttaaacatatccagtacaatttaaatatcacaacaatttgacacccttcattcatttataaaaataaatgagctagttctttagtagttaaacatttcaaattggcttttctccttctgtatttccataccacttttcagccaagaatcctatcataatgtaatctattatgcccgacatcttttaatcattcaccccattacttcttgtcaacaaaaaatataaatggaaattttttttttagctcttgctttaagtgtttgtttgttatctcagtccagaaccaatattatcgtaattaattattggtatataatgaaaacggtattaattcttggatgattaaaagtttttttattagaatgttctttatcctaattagttcatttatccaagaatacatgaatgtgatttacagctgagatggggttcaacctcagctgtattccttgtttctgtatagatgtaagcacataaattcgatggaatagaattacgttaacaatgtttttacagttctttggattcctttggcattttgacaaagatcacagtgctctatcatcaagaattattaatgatgatctatcaactaacaaacaacttgattagattctcctttagtctgttgaaagcagagaactgaaatccacctgatttaccatggctttgccagccagtcattagcaccatttacttttactatcgctgacattttcctttgttcagtggccctgaggttcttacactctagggggcagtgcaccacaggaagatagatcaatgagggaggattgcgagggggaaggggaggaagcagagctggcaggccttagctacaggctctctctcaggcagatcccttttaagatacatacaccatgcccacacatcccatggagagagaccaatgctttagtagattacagaacagctatgaaaagtccatgaatgaagatcacaaaaaggaaggctttcttatttcatactgtattcttcagggtggtaaaatttctgcttttggcaaaaacataacagacggttccaaacatcagcataaagatcactcatcccataccacccacaggtagggaggaaggatgctgtagtatatgaaaacaaaagttttcacctgagctgagagcatttagcatatcgtggttctgtaacaatatcaaggaccagtgcagaatctggctttcttttctgataggctaccagtgtgtgtttatgtgtgctcattttgtggttctaatcataatggtacatataattagggaaggatatggaagccactttagaatcttattcatttttaaatataaatatgccttgtttcaaa

SEQ ID NO: 104556 - DNA, 358 bp, Homo sapiens
  Payload ID: 531
  Gene Symbol: AGK
  Gene Name: acylglycerol kinase
  ENST ID: ENST00000573803
  CDS Start-End: 1-156
ggtgaaaaggaacagcctgtatttgcaatgaccggccttcgatggggatctttcagagatgctggcgtcaaagttagcaagtactggtatcttgggcctctaaaaatcaaagcagcccactttttcagcactcttaagccctttcccaagaggtgagcccggaggtctggaaagatgtgcagctgtccaccattgaactgtccatcacaacacggaataatcagcttgacccgacaagcaaagaagattttctgaatatctgcattgaacctgacaccatcagcaaaggagactttataactataggaagtcgaaaggtgagaaaccccaagctgcacgtggagggcacggagtgtct

SEQ ID NO: 104557 - DNA, 904 bp, Homo sapiens
  Payload ID: 531
  Gene Symbol: AGK
  Gene Name: acylglycerol kinase
  ENST ID: ENST00000573706
  CDS Start-End: 1-681
ggtgaaaaggaacagcctgtatttgcaatgaccggccttcgatggggatctttcagagatgctggcgtcaaagttagcaagtactggtatcttgggcctctaaaaatcaaagcagcccactttttcagcactcttaaggagtggcctcagactcatcaagcctctatctcatacacgggacctacagagagacctcccaatgaaccagaggagacccctgtacaaaggccttctttgtacaggagaatattacgaaggcttgcgtcctactgggcacaaccacaggatgccctttcccaagaggtgagcccggaggtctggaaagatgtgcagctgtccaccattgaactgtccatcacaacacggaataatcagcttgacccgacaagcaaagaagattttctgaatatctgcattgaacctgacaccatcagcaaaggagactttataactataggaagtcgaaaggtgagaaaccccaagctgcacgtggagggcacggagtgtctccaagccagccagtgcactttgcttatcccggagggagcagggggctcttttagcattgacagtgaggagtatgaagcgatgcctgtggaggtgaaactgctccccaggaagctgcagttcttctgtgatcctaggaagagagaacagatgctcacaagccccacccagtgagcagcagaagacaagcactctgagaccacactttaggccaccggtgggaccaaaagggaacaggtgcctcagccatcccaacagtgtcgtcagagggtccccagggcattttcatggcaagtacccctctgcccccactccagcagtgcttcccaaagtgtgctctgtcacctgctttgcaatcggcttccattagcgcatgttttattttggtgtgacggtt

SEQ ID NO: 104558 - DNA, 2765 bp, Homo sapiens
  Payload ID: 531
  Gene Symbol: AGK
  Gene Name: acylglycerol kinase
  ENST ID: ENST00000629555
  CDS Start-End: 172-906
atccgagccggttcccgcccccggcccgaactggcccgcgcgcgctcgcagccccgcggcggaacccgagggcggcggcagcggtttcccttgaacgagccggggaatctggagggagcacacaggaaaggcagagccgcgagctggaccagccgtgcaaatctctagaagatgacggtgttctttaaaacgcttcgaaatcactggaagaaaactacagctgggctctgcctgctgacctggggaggccattggctctatggaaaacactgtgataacctcctaaggagagcagcctgtcaagaagctcaggtgtttggcaatcaactcattcctcccaatgcacaagtgaagaaggccactgtttttctcaatcctgcagcttgcaaagggactctatttgaaaaaaatgctgccccgattttacatttatctggcatggatgtgactattgttaagacagattatgagggacaagccaagaaactcctggaactgatggaaaacacggatgtgatcattgttgcaggaggagatgggacactgcaggaggttgttactggtgttcttcgacgaacagatgaggctaccttcagtaagattcccattggatttatcccactgggagagaccagtagtttgagtcataccctctttgccgaaagtggaaacaaagtccaacatattactgatgccacacttgccattgtgaaaggagagacagttccacttgatgtcttgcagatcaagggtgaaaaggaacagcctgtatttgcaatgaccggccttcgatggggatctttcagagatgctggcgtcaaagttagcaagtactggtatcttgggcctctaaaaatcaaagcagcccactttttcagcactcttaagccctttcccaagaggtgagcccggaggtctggaaagatgtgcagctgtccaccattgaactgtccatcacaacacggaataatcagcttgacccgacaagcaaagaagattttctgaatatctgcattgaacctgacaccatcagcaaaggagactttataactataggaagtcgaaaggtgagaaaccccaagctgcacgtggagggcacggagtgtctccaagccagccagtgcactttgcttatcccggagggagcagggggctcttttagcattgacagtgaggagtatgaagcgatgcctgtggaggtgaaactgctccccaggaagctgcagttcttctgtgatcctaggaagagagaacagatgctcacaagccccacccagtgagcagcagaagacaagcactctgagaccacactttaggccaccggtgggaccaaaagggaacaggtgcctcagccatcccaacagtgtcgtcagagggtccccagggcattttcatggcaagtacccctctgcccccactccagcagtgcttcccaaagtgtgctctgtcacctgctttgcaatcggcttccattagcgcatgttttattttggtgtgacggttggccctcctaaacacggactttcctcaggctggttcaagacggaaaaggactttcttctgttttcttccaaagtgcaaccacagtggagagcccacggtgggcttagcctgcctaggcccttccatttctcttctttgaccgtgctaggaattccaggaaagtgcattcctgccctggtgaccttttcctatgtctaggctcctccacaggtgctgctattttgtgagctccggctcctgtttagcttttatttcagttctaacctcagtccagaaacatatgtgaggttgtttccctcttcagccacggctacaataccggaaaatgctagtttttatttatttttttaagtagtgcttcctaaatggtttgcatgagagccacctggggtacatgttgaaaacttatttggggtctaccccaaacctaataacccaaatttggggatggggcccaggaatatgcatttttaaaaagtcatctgcccttcccaggtgattctgtaagttgtccctcaactgtacttggagaaatcgtgttttaaagcagtagtccacaaagtattctgctcatgtgcccccaaaagtattttgaaaaatcatgtataccctcacccatctaagttgatatctaaaattttatctaagttggtatctaaaatttttcatgggaagttaaatagttgacaaagtatgtatttgctggtgtcgtgtaaatattggtattttaaaataaaaactgttacatcactattttaaacatatccagtacaatttaaatatcacaacaatttgacacccttcattcatttataaaaataaatgagctagttctttagtagttaaacatttcaaattggcttttctccttctgtatttccataccacttttcagccaagaatcctatcataatgtaatctattatgcccgacatcttttaatcattcaccccattacttcttgtcaacaaaaaatataaatggaaattttttttttagctcttgctttaagtgtttgtttgttatctcagtccagaaccaatattatcgtaattaattattggtatataatgaaaacggtattaattcttggatgattaaaagtttttttattagaatgttctttatcctaattagttcatttatccaagaatacatgaatgtgatttacagctgagatggggttcaacctcagctgtattccttgtttctgtatagatgtaagcacataaattcgatggaatagaattacgttaacaatg

SEQ ID NO: 104559 - DNA, 678 bp, Homo sapiens
  Payload ID: 532
  Gene Symbol: AOAH
  Gene Name: acyloxyacyl hydrolase (neutrophil)
  ENST ID: ENST00000435386
  CDS Start-End: 353-678
aacttcactgagccagggagcacggaagttgtgccactgtgcaacttgggttttctttatcctgcagtctttacctcagcagaaccgcacaccacagactccctccagctctttgtgtgtggctctctcagggtccaacaagagcaagctgtgggtctgtgagtgtttatgtgtgcttttattcacttcacacttattgaaaagtgtgtatgtgagagggtggggtgtgtgtgtcaaagagagtgaggaagagaaggagagagagatcaattgattctgcagcctcagctccagcatccctcagttgggagcttccaaagccgggtgatcacttggggtgcatagctcggagatgcagtccccctggaaaatccttacggtggcgcctctattcttgctcctgtctcttcagtcctcggcctctccagccaacgatgaccagtccaggcccagcctctcgaatgggcacacctgtgtagaaaaactgttcttgaaaaccacctgctatttagtcattgacaagtttggatcagacatcataaaactgcttagcgcagatatgaatgctgatgtggtatgtcacactctggagttttgtaaacagaacactggccaaccattgtgtcatctctaccctcttcccaaggagacatggaaatttacactacagaaggcaag

SEQ ID NO: 104560 - DNA, 551 bp, Homo sapiens
  Payload ID: 532
  Gene Symbol: AOAH
  Gene Name: acyloxyacyl hydrolase (neutrophil)
  ENST ID: ENST00000414637
  CDS Start-End: 327-485
agttgtgccactgtgcaacttgggttttctttatcctgcagtctttacctcagcagaaccgcacaccacagactccctccagctctttgtgtgtggctctctcagggtccaacaagagcaagctgtgggtctgtgagtgtttatgtgtgcttttattcacttcacacttattgaaaagtgtgtatgtgagagggtggggtgtgtgtgtcaaagagagtgaggaagagaaggagagagagatcaattgattctgcagcctcagctccagcatccctcagttgggagcttccaaagccgggtgatcacttggggtgcatagctcggagatgcagtccccctggaaaatccttacggtggcgcctctattcttgctcctgtctcttcagtcctcggcctctccagccaacgatgaccagtccaggcccagcctctcgaatgggcacacctgtgtagccagcagtgctgagaagccacaactgtcataagagtccttgatgggatttctctgagtgaaattcagaagaaaagcccatatgtggtgtgtgctggtg

SEQ ID NO: 104561 - DNA, 2398 bp, Homo sapiens
  Payload ID: 532
  Gene Symbol: AOAH
  Gene Name: acyloxyacyl hydrolase (neutrophil)
  ENST ID: ENST00000617267
  CDS Start-End: 302-2368
tttctttatcctgcagtctttacctcagcagaaccgcacaccacagactccctccagctctttgtgtgtggctctctcagggtccaacaagagcaagctgtgggtctgtgagtgtttatgtgtgcttttattcacttcacacttattgaaaagtgtgtatgtgagagggtggggtgtgtgtgtcaaagagagtgaggaagagaaggagagagagatcaattgattctgcagcctcagctccagcatccctcagttgggagcttccaaagccgggtgatcacttggggtgcatagctcggagatgcagtccccctggaaaatccttacggtggcgcctctattcttgctcctgtctcttcagtcctcggcctctccagccaacgatgaccagtccaggcccagcctctcgaatgggcacacctgtgtagggtgtgtgctggtggtgtctgtaatagaacagcttgctcaagttcacaactcgacggtccaggcctcgatggagagactgtgcagctacctgcctgaaaaactgttcttgaaaaccacctgctatttagtcattgacaagtttggatcagacatcataaaactgcttagcgcagatatgaatgctgatgtggtatgtcacactctggagttttgtaaacagaacactggccaaccattgtgtcatctctaccctcttcccaaggagacatggaaatttacactacagaaggcaagacaaattgtcaagaagtccccgattctgaaatattctagaagtggttctgacatttgttcactcccggttttggccaagatctgccagaaaattaaattagctatggaacagtctgtgccattcaaagatgtggattcagacaaatacagcgttttcccaacactgcggggctatcactggcgggggagagactgtaatgacagcgacgagtcagtgtacccaggtagaaggccgaacaactgggatgtccatcaggattcaaactgtaatggcatttggggtgtcgatccaaaagatggagttccatatgagaagaaattctgtgaaggttcacagcccaggggaatcattttgctgggagactcagctggggctcattttcacatctctcctgaatggatcacagcgtcgcagatgtctttgaactctttcatcaatctaccaacagcccttaccaacgagcttgactggccccaactctctggtgctacaggatttctggactccactgttggaattaaagaaaaatctatttaccttcgcttatggaaaagaaaccactgtaatcacagggactaccagaatatttcaagaaatggtgcatcttcccgaaacctgaagaaatttatagaaagcttgtctagaaacaaggtgttggactatcccgccatcgttatatatgccatgattggaaatgatgtctgcagtgggaagagtgacccagtcccagccatgaccactcctgagaaactctactccaacgtcatgcagactctgaagcatctaaattcccacctgcccaatggcagccatgttattttgtatggcttaccagatggaacctttctctgggataatttgcacaacagatatcatcctctcggccagctaaataaagacatgacctatgcgcagttgtactccttcctgaactgcctccaggtcagcccctgccacggctggatgtcttccaacaagacgttgcggactctcacttcagagagagcagagcaactctccaacacactgaaaaaaattgcagccagtgagaaatttacaaacttcaatcttttctacatggattttgccttccatgaaatcatacaggagtggcagaagagaggcggacagccctggcagctcatcgagcccgtggatggattccaccccaacgagagaaagagcatcctcctcaaaggcatattaatgacaagccagacactggacaaccaagaatggacccagctaacatcatggataaagggaaacctgacatgcgacagcagaaccagagagtggctttgctgttgttggcggatcatttctggaaaaaggtgcagctccagtggccccaaatcctgggaaaggagaatccgttcaacccccagattaaacaggtgtttggagaccaaggcgggcactgagcctctcaggagcatgcacccctggggagcacagggaggcagaggcttgggtaaactcattccacaaaccctatgggggctgccacgtcacaggcccaaaggactcttcttcagcagcatctttgcaaaatgtctttctctcaatgaagagcatatctggacgactgtgcaatgctgtgtgctcccgggatcagtaacccttccgctgttcctgaaataacctttcataaagtgctttgggtgccattcc

SEQ ID NO: 104562 - DNA, 2381 bp, Homo sapiens
  Payload ID: 532
  Gene Symbol: AOAH
  Gene Name: acyloxyacyl hydrolase (neutrophil)
  Uniprot ID: P28039
  ENST ID: ENST00000617537
  CDS Start-End: 401-2128
acagatcagttccggcaagcctcgaggctcacggggtttatgcacactaacttcactgagccagggagcacggaagttgtgccactgtgcaacttgggttttctttatcctgcagtctttacctcagcagaaccgcacaccacagactccctccagctctttgtgtgtggctctctcagggtccaacaagagcaagctgtgggtctgtgagtgtttatgtgtgcttttattcacttcacacttattgaaaagtgtgtatgtgagagggtggggtgtgtgtgtcaaagagagtgaggaagagaaggagagagagatcaattgattctgcagcctcagctccagcatccctcagttgggagcttccaaagccgggtgatcacttggggtgcatagctcggagatgcagtccccctggaaaatccttacggtggcgcctctattcttgctcctgtctcttcagtcctcggcctctccagccaacgatgaccagtccaggcccagcctctcgaatgggcacacctgtgtagggtgtgtgctggtggtgtctgtaatagaacagcttgctcaagttcacaactcgacggtccaggcctcgatggagagactgtgcagctacctgcctgaaaaactgttcttgaaaaccacctgctatttagtcattgacaagtttggatcagacatcataaaactgcttagcgcagatatgaatgctgatgtggtatgtcacactctggagttttgtaaacagaacactggccaaccattgtgtcatctctaccctcttcccaaggagacatggaaatttacactacagaaggcaagacaaattgtcaagaagtccccgattctgaaatattctagaagtggttctgacatttgttcactcccggttttggccaagatctgccagaaaattaaattagctatggaacagtctgtgccattcaaagatgtggattcagacaaatacagcgttttcccaacactgcggggctatcactggcgggggagagactgtaatgacagcgacgagtcagtgtacccaggtagaaggccgaacaactgggatgtccatcaggattcaaactgtaatggcatttggggtgtcgatccaaaagatggagttccatatgagaagaaattctgtgaaggttcacagcccaggggaatcattttgctgggagactcagctggggctcattttcacatctctcctgaatggatcacagcgtcgcagatgtctttgaactctttcatcaatctaccaacagcccttaccaacgagcttgactggccccaactctctggtgctacaggatttctggactccactgttggaattaaagaaaaatctatttaccttcgcttatggaaaagaaaccactgtaatcacagggactaccagaatatttcaagaaatggtgcatcttcccgaaacctgaagaaatttatagaaagcttgtctagaaacaaggtgttggactatcccgccatcgttatatatgccatgattggaaatgatgtctgcagtgggaagagtgacccagtcccagccatgaccactcctgagaaactctactccaacgtcatgcagactctgaagcatctaaattcccacctgcccaatggcagccatgttattttgtatggcttaccagatggaacctttctctgggataatttgcacaacagatatcatcctctcggccagctaaataaagacatgacctatgcgcagttgtactccttcctgaactgcctccaggtcagcccctgccacggctggatgtcttccaacaagacgttgcggactctcacttcagagagagcagagcaactctccaacacactgaaaaaaattgcagccagtgagaaatttacaaacttcaatcttttctacatggattttgccttccatgaaatcatacaggagtggcagaagagaggcggacagccctggcagctcatcgagcccgtggatggattccaccccaacgaggtggctttgctgttgttggcggatcatttctggaaaaaggtgcagctccagtggccccaaatcctgggaaaggagaatccgttcaacccccagattaaacaggtgtttggagaccaaggcgggcactgagcctctcaggagcatgcacccctggggagcacagggaggcagaggcttgggtaaactcattccacaaaccctatgggggctgccacgtcacaggcccaaaggactcttcttcagcagcatctttgcaaaatgtctttctctcaatgaagagcatatctggacgactgtgcaatgctgtgtgctcccgggatcagtaacccttccgctgttcctgaaataacctttcataaagtgctttgggtgccattccaaa

SEQ ID NO: 104563 - DNA, 2336 bp, Homo sapiens
  Payload ID: 532
  Gene Symbol: AOAH
  Gene Name: acyloxyacyl hydrolase (neutrophil)
  Uniprot ID: P28039
  ENST ID: ENST00000612871
  CDS Start-End: 402-2033
aacagatcagttccggcaagcctcgaggctcacggggtttatgcacactaacttcactgagccagggagcacggaagttgtgccactgtgcaacttgggttttctttatcctgcagtctttacctcagcagaaccgcacaccacagactccctccagctctttgtgtgtggctctctcagggtccaacaagagcaagctgtgggtctgtgagtgtttatgtgtgcttttattcacttcacacttattgaaaagtgtgtatgtgagagggtggggtgtgtgtgtcaaagagagtgaggaagagaaggagagagagatcaattgattctgcagcctcagctccagcatccctcagttgggagcttccaaagccgggtgatcacttggggtgcatagctcggagatgcagtccccctggaaaatccttacggtggcgcctctattcttgctcctgtctcttcagtcctcggcctctccagccaacgatgaccagtccaggcccagcctctcgaatgggcacacctgtgtagaaaaactgttcttgaaaaccacctgctatttagtcattgacaagtttggatcagacatcataaaactgcttagcgcagatatgaatgctgatgtggtatgtcacactctggagttttgtaaacagaacactggccaaccattgtgtcatctctaccctcttcccaaggagacatggaaatttacactacagaaggcaagacaaattgtcaagaagtccccgattctgaaatattctagaagtggttctgacatttgttcactcccggttttggccaagatctgccagaaaattaaattagctatggaacagtctgtgccattcaaagatgtggattcagacaaatacagcgttttcccaacactgcggggctatcactggcgggggagagactgtaatgacagcgacgagtcagtgtacccaggtagaaggccgaacaactgggatgtccatcaggattcaaactgtaatggcatttggggtgtcgatccaaaagatggagttccatatgagaagaaattctgtgaaggttcacagcccaggggaatcattttgctgggagactcagctggggctcattttcacatctctcctgaatggatcacagcgtcgcagatgtctttgaactctttcatcaatctaccaacagcccttaccaacgagcttgactggccccaactctctggtgctacaggatttctggactccactgttggaattaaagaaaaatctatttaccttcgcttatggaaaagaaaccactgtaatcacagggactaccagaatatttcaagaaatggtgcatcttcccgaaacctgaagaaatttatagaaagcttgtctagaaacaaggtgttggactatcccgccatcgttatatatgccatgattggaaatgatgtctgcagtgggaagagtgacccagtcccagccatgaccactcctgagaaactctactccaacgtcatgcagactctgaagcatctaaattcccacctgcccaatggcagccatgttattttgtatggcttaccagatggaacctttctctgggataatttgcacaacagatatcatcctctcggccagctaaataaagacatgacctatgcgcagttgtactccttcctgaactgcctccaggtcagcccctgccacggctggatgtcttccaacaagacgttgcggactctcacttcagagagagcagagcaactctccaacacactgaaaaaaattgcagccagtgagaaatttacaaacttcaatcttttctacatggattttgccttccatgaaatcatacaggagtggcagaagagaggcggacagccctggcagctcatcgagcccgtggatggattccaccccaacgaggtggctttgctgttgttggcggatcatttctggaaaaaggtgcagctccagtggccccaaatcctgggaaaggagaatccgttcaacccccagattaaacaggtgtttggagaccaaggcgggcactgagcctctcaggagcatgcacccctggggagcacagggaggcagaggcttgggtaaactcattccacaaaccctatgggggctgccacgtcacaggcccaaaggactcttcttcagcagcatctttgcaaaatgtctttctctcaatgaagagcatatctggacgactgtgcaatgctgtgtgctcccgggatcagtaacccttccgctgttcctgaaataacctttcataaagtgctttgggtgccattccaaacaagagagtatctgtgccctttacagctaattgttctaaaaggagtttct

SEQ ID NO: 104564 - DNA, 627 bp, Homo sapiens
  Payload ID: 533
  Gene Symbol: ACYP1
  Gene Name: acylphosphatase 1, erythrocyte (common) type
  Uniprot ID: P07311
  ENST ID: ENST00000238618
  CDS Start-End: 105-404
actaaacttccgggcgcggaggtttgcgcgccttggtgagccgttggcgtggtggtcccggagtgatcctggcagccggtggggaagacaaggagggtttgagcatggcagaaggaaacaccctgatatcagtggattatgaaatttttgggaaggtgcaaggggtgtttttccgtaagcatactcaggctgagggtaaaaagctgggattggtaggctgggtccagaacactgaccggggcacagtgcaaggacaattgcaaggtcccatctccaaggtgcgtcatatgcaggaatggcttgaaacaagaggaagtcctaaatcacacatcgacaaagcaaacttcaacaatgaaaaagtcatcttgaagttggattactcagacttccaaattgtaaaataatggcctgaatttaagttttctaagataaactcagtggtttggtttttattattaatagagatagaactattgtgtgttaatattagcattagtcaataagttattttaatgtcagatttttgaatgttattatatattacctgtatgatggaaggattaccactgtacacaaatctaatcaataaaaacgttagaaccttctgcttagagtacttttaaaaaa

SEQ ID NO: 104565 - DNA, 650 bp, Homo sapiens
  Payload ID: 533
  Gene Symbol: ACYP1
  Gene Name: acylphosphatase 1, erythrocyte (common) type
  Uniprot ID: P07311
  ENST ID: ENST00000357971
  CDS Start-End: 71-238
ggtgagccgttggcgtggtggtcccggagtgatcctggcagccggtggggaagacaaggagggtttgagcatggcagaaggaaacaccctgatatcagtggattatgaaatttttgggaaggtgcaaggggtgtttttccgtaagcatactcaggaaatgactgttgaaaacagaattgctgaaactcacagcaagagctgtgttccagttagctttgctaccagttatgcaggctgagggtaaaaagctgggattggtaggctgggtccagaacactgaccggggcacagtgcaaggacaattgcaaggtcccatctccaaggtgcgtcatatgcaggaatggcttgaaacaagaggaagtcctaaatcacacatcgacaaagcaaacttcaacaatgaaaaagtcatcttgaagttggattactcagacttccaaattgtaaaataatggcctgaatttaagttttctaagataaactcagtggtttggtttttattattaatagagatagaactattgtgtgttaatattagcattagtcaataagttattttaatgtcagatttttgaatgttattatatattacctgtatgatggaaggattaccactgtacacaaatctaatcaataaaaacgttagaaccttc

SEQ ID NO: 104566 - DNA, 789 bp, Homo sapiens
  Payload ID: 533
  Gene Symbol: ACYP1
  Gene Name: acylphosphatase 1, erythrocyte (common) type
  ENST ID: ENST00000555463
  CDS Start-End: 193-582
gtccggccaactctgcagctcggtccagccctgcccttggggagccggggaggggcgggagaggcttttctggagctccttcaaagaagaacttgtacttttctgagaacgacgctcccagaccttggggtgtgcccttgtctggcaaagggcggaggccctggctgtgcctccgcgtgcttccgccgcaggatgccggcgtccgcccgcctggcgggagcggggctgctgctggcctttctccgcgcgctcggctgcgctgggcgggccccaggtttgagcatggcagaaggaaacaccctgatatcagtggattatgaaatttttgggaaggtgcaaggggtgtttttccgtaagcatactcaggctgagggtaaaaagctgggattggtaggctgggtccagaacactgaccggggcacagtgcaaggacaattgcaaggtcccatctccaaggtgcgtcatatgcaggaatggcttgaaacaagaggaagtcctaaatcacacatcgacaaagcaaacttcaacaatgaaaaagtcatcttgaagttggattactcagacttccaaattgtaaaataatggcctgaatttaagttttctaagataaactcagtggtttggtttttattattaatagagatagaactattgtgtgttaatattagcattagtcaataagttattttaatgtcagatttttgaatgttattatatattacctgtatgatggaaggattaccactgtacacaaatctaatcaataaaaacgttagaaccttctgctta

SEQ ID NO: 104567 - DNA, 606 bp, Homo sapiens
  Payload ID: 533
  Gene Symbol: ACYP1
  Gene Name: acylphosphatase 1, erythrocyte (common) type
  ENST ID: ENST00000553302
  CDS Start-End: 76-189
gccttggtgagccgttggcgtggtggtcccggagtgatcctggcagccggtggggaagacaaggagggtttgagcatggcagaaggaaacaccctgatatcagtggattatgaaatttttgggaaggtgcaaggggtgtttttccgtaagcatactcaggtatgtggcctgcaggctttggggtggtaacctaggttgtgggcataggaacaagggacgtgttcttgacaaatgtgaactagaagccgctggctatttggtagctgcatggcaaagaggtagtttgtagagcaatgagtatgaaaatgctgtgcaatcggtaaaacatggtgtaaatggaagatcaccctgctgttattattagtcagtggtgcctgagcatctagatacacatattaatgagcttctctcttccaagggaaatagagggcttccccagtgctcgccgttgtggcatcatcaaaccaagtcaggtttcttatagaaaggctaacattgattgaagagctggcatttagatgacctgatgtcatgtatataacatatataaatgcttcctctgcagctgctgcactttcttcagacctctttctccaagcttccctc

SEQ ID NO: 104568 - DNA, 565 bp, Homo sapiens
  Payload ID: 533
  Gene Symbol: ACYP1
  Gene Name: acylphosphatase 1, erythrocyte (common) type
  Uniprot ID: P07311
  ENST ID: ENST00000555694
  CDS Start-End: 65-364
tttgcgcgccttggtgagccgttggcgtggtggtcccggagtgatcctggcagccggtttgagcatggcagaaggaaacaccctgatatcagtggattatgaaatttttgggaaggtgcaaggggtgtttttccgtaagcatactcaggctgagggtaaaaagctgggattggtaggctgggtccagaacactgaccggggcacagtgcaaggacaattgcaaggtcccatctccaaggtgcgtcatatgcaggaatggcttgaaacaagaggaagtcctaaatcacacatcgacaaagcaaacttcaacaatgaaaaagtcatcttgaagttggattactcagacttccaaattgtaaaataatggcctgaatttaagttttctaagataaactcagtggtttggtttttattattaatagagatagaactattgtgtgttaatattagcattagtcaataagttattttaatgtcagatttttgaatgttattatatattacctgtatgatggaaggattaccactgtacacaaatctaatcaataaaaacgttagaaccttc

SEQ ID NO: 104569 - DNA, 639 bp, Homo sapiens
  Payload ID: 533
  Gene Symbol: ACYP1
  Gene Name: acylphosphatase 1, erythrocyte (common) type
  ENST ID: ENST00000555135
  CDS Start-End: 63-251
gttggcgtggtggtcccggagtgatcctggcagccggtggggaagacaaggagggtttgagcatggcagaaggaaacaccctgatatcagtggattatgaaatttttgggaaggtgcaaggggtgtttttccgtaagcatactcaggaaatgactgttgaaaacagaattgctgaaactcacagcaagagctgtgttccagttagctttgctaccagttatgcaggtattaatgaatttaaaaggatttaaatcaaggaatgttctccaactacagtggaactaaaccacattaaaaaaataaaaaggataactggaaaatcccaaaatatttggaaaccatatagcacacttacttctaaaattgtggtagaatacatataacatagaaattattgttctaaccatttttaaatgtacaattcagtggtcttaagcacattcacattgttctgtttatctacagaacgcttttcatcttgcaaaactgaaactctgtattcattaaacactaactccccattttctccttcccccatgcccctgacaatcataaatctacattctattaattcaactgctctagttacctcatataagtggaattttacagtatttgtccttttgtggctggcttatt

SEQ ID NO: 104570 - DNA, 789 bp, Homo sapiens
  Payload ID: 534
  Gene Symbol: ACYP2
  Gene Name: acylphosphatase 2, muscle type
  ENST ID: ENST00000303536
  CDS Start-End: 112-408
cggctgccctcgctcccaggccccgcagtctcatttgccgcttccgacgcgtgaccccggcgcgctagcgtccgggaccggtgacaggcgcggggtgcgccaagcagtcccatgtgtcccctccctctcgcagccgccgcagtcgctgcgccccgagcccctctccggctcctcaacagagggctcgccgccgccatgtctaccgcccagtcactcaaatccgtggactacgaggtgttcggaagagtgcagggtgtttgcttcagaatgtatacagaagatgaagctaggaaaataggagtggttggctgggtgaagaataccagcaaaggcaccgtgacaggccaagtgcaggggccagaagacaaagtcaattccatgaattcatcagctccggaagctgggtgaagaaaagaaacaagatagggcaacagctagaggagaattcaggaagtcctggctgagcaaggttggaagccctagttctcgcattgaccgcacaaacttttctaatgaaaaaaccatctctaagcttgaatactctaattttagtattagatactaatagaagagaaaaattgtaacacactgaacaatagatactgtatgttcttaagactatgtatactagaataatagtagcagagtagggtgaaaaggaactttctgttctgaaagctaagcgactgtacgtgctactaaaaatgtctgacactgaaataattttactcaactatgttttcaacaagcaaaaatatagtattctaagattaaaatgtcattacaaaa

SEQ ID NO: 104571 - DNA, 993 bp, Homo sapiens
  Payload ID: 534
  Gene Symbol: ACYP2
  Gene Name: acylphosphatase 2, muscle type
  Uniprot ID: P14621
  ENST ID: ENST00000394666
  CDS Start-End: 196-495
cggctgccctcgctcccaggccccgcagtctcatttgccgcttccgacgcgtgaccccggcgcgctagcgtccgggaccggtgacaggcgcggggtgcgccaagcagtcccatgtgtcccctccctctcgcagccgccgcagtcgctgcgccccgagcccctctccggctcctcaacagagggctcgccgccgccatgtctaccgcccagtcactcaaatccgtggactacgaggtgttcggaagagtgcagggtgtttgcttcagaatgtatacagaagatgaagctaggaaaataggagtggttggctgggtgaagaataccagcaaaggcaccgtgacaggccaagtgcaggggccagaagacaaagtcaattccatgaagtcctggctgagcaaggttggaagccctagttctcgcattgaccgcacaaacttttctaatgaaaaaaccatctctaagcttgaatactctaattttagtattagatactaatagaagagaaaaattgtaacacactgaacaatagatactgtatgttcttaagactatgtatactagaataatagtagcagagtagggtgaaaaggaactttctgttctgaaagctaagcgactgtacgtgctactaaaaatgtctgacactgaaataattttactcaactatgttttcaacaagcaaaaatatagtattctaagattaaaatgtcattacaaaatatttagtgtgaacatttaatttaaacttgtctcatggaatctttaatttcaatgaacattacagcatatatatgttatttggcgagacatcaaataaagttaaccatttaaaaattattttcatatactgttgtctatgttgaattataaaatcctctgaataatttgttactacggttatttgttattaaactcttcaaaaagaaccagtgattagaaataaatgtgatgatcaatataaccataaaatattatcaacaaagagttttaaaa

SEQ ID NO: 104572 - DNA, 1913 bp, Homo sapiens
  Payload ID: 534
  Gene Symbol: ACYP2
  Gene Name: acylphosphatase 2, muscle type
  ENST ID: ENST00000406041
  CDS Start-End: 213-506
attaaatggtagggagcgctgtggagacagcatcctccccagtccgggaagagaggcctaggatgcctggggcccagcggcctcttccctcctggcgtccccggctgccctcgctcccaggccccgcagtctcatttgccgcttccgacgcgtgaccccggcgcgctagcgtccgggaccggtgacaggcgcggggtgcgccaagcagtcccatgtgtcccctccctctcgcagccgccgcagtcgctgcgccccgagcccctctccggctcctcaacagagggctcgccgccgccatgtctaccgcccagtcactcaaatccgtggactacgaggtgttcggaagagtgcagggtgtttgcttcagaatgtatacagaagatgaagctaggaaaataggagtggttggctgggtgaagaataccagcaaaggcaccgtgacaggccaagtgcaggggccagaagacaaagtcaattccatgctggagtgcagtggtctgatctagactcactgcagccttgaccttctgggctcaagtgatcttcccacgtcaacctcctgagtgcacatgctggctaatttgtgtgtgtgtgtgtgtgtgtgtgtgtgtatattttgttgttgttgttgttgttgttgttgttgttgctttgtagagatagtgtctcactatgttgctcaggctggtataggactcttggcttcaaatgactttcctgcctcagcctcccaaagtgctgggattacaaaaataaactttatttttgagaacagttttatatttacagaaaaattgtgaagatagtacagagactttccatatactccccacacagttttcctcctattaacattttacattaatatgatacgtatgttaacaattaatggaccaatatggatacattagtattaactaaaatccctatttatttagatttcaatttttacctaatgtccattttatgtcttaggatcccattattgtatttgctttttaattgggcattctcttgaaattaagagaagtgacattttggctgggtgcagtggctcatgcctgtaatcccagcacttcgggaggctgaggcgggcggatcacttgaggtcaggagttcaagaccagcctgtccaacacagcgagatcgtgtctctacaaaaaatacaaaaactagctggggttggtggcacacgcctgttgtcccagctacttgggaggctgaggcaagagaatcgcttgagtctgggaggcagaggttgcaatgagatgagattgcaccaccgcactccagtctgggcaatgggagtagcctgtcccaaaaaaaataaaataaaataaaaataaagacagaagtgacatttttatgatattaaatcttcccatttaagaacacacagatgttgttccatttgcttagattttaaaatttatccttcagtatgattttatggttttctttatataggtttttgtacttttcttgctaagttatttctaagtatcttaatgactttttcactattgcatatggatttctttcccatttatgcttctagttgttcatgcttaaatatggaatatctaatgacttttgtgtattaattagatatcatagtattaccttatcagatattcttattaattctatcagttttttaaaaaactatagtctattgggtttttaaaaaatacagttatgcaattagtaaaaatggtgtatctttgtttcagtgacttcatttgtcagacctgccatgacaatgttgaataataatagccatagcaggcatgcctgtttggtttctgactttatttaaaatagttttattgtttcacctagtaaaaagatgtttgctgttggttttaggtaaatatactttatcacaataaattttacttttgcattccttg

SEQ ID NO: 104573 - DNA, 829 bp, Homo sapiens
  Payload ID: 534
  Gene Symbol: ACYP2
  Gene Name: acylphosphatase 2, muscle type
  ENST ID: ENST00000494922
  CDS Start-End: 1-200
ccgcccagtcactcaaatccgtggactacgaggtgttcggaagagtgcagggtgtttgcttcagaatgtatacagaagatgaagctaggaaaataggagtggttggctgggtgaagaataccagcaaaggcaccgtgacaggccaagtgcaggggccagaagacaaagtcaattccatattagcttttcccttctattgaagccttgatagcccagatacccaacaactttggagtcatgcctctaccctcaagctggagtgtcagaagtcctggctgagcaaggttggaagccctagttctcgcattgaccgcacaaacttttctaatgaaaaaaccatctctaagcttgaatactctaattttagtattagatactaatagaagagaaaaattgtaacacactgaacaatagatactgtatgttcttaagactatgtatactagaataatagtagcagagtagggtgaaaaggaactttctgttctgaaagctaagcgactgtacgtgctactaaaaatgtctgacactgaaataattttactcaactatgttttcaacaagcaaaaatatagtattctaagattaaaatgtcattacaaaatatttagtgtgaacatttaatttaaacttgtctcatggaatctttaatttcaatgaacattacagcatatatatgttatttggcgagacatcaaataaagttaaccatttaaaaattattttcatatactgttgtctatgttgaattataaaatcctctgaataatttgttactacggttatttgttattaaactcttcaaaaagaaccagtgattagaaataaa

SEQ ID NO: 104574 - DNA, 674 bp, Homo sapiens
  Payload ID: 534
  Gene Symbol: ACYP2
  Gene Name: acylphosphatase 2, muscle type
  ENST ID: ENST00000606865
  CDS Start-End: 206-457
acacactaatgatacgcctcctcacagaaggaatttccgctagagagaaagatgctttctcctgcagaaataagttataaaatctagagagagctcagtcatttagttctacttgccgtacttcaagaggatcttcactgcagttgttttggtatggagtgataggaaaaagtcagggaggttgtacggtaagcaaaattggagaatgactgcccttgttctacaaatagagtatacagaagatgaagctaggaaaataggagtggttggctgggtgaagaataccagcaaaggcaccgtgacaggccaagtgcaggggccagaagacaaagtcaattccatgaagtcctggctgagcaaggttggaagccctagttctcgcattgaccgcacaaacttttctaatgaaaaaaccatctctaagcttgaatactctaattttagtattagatactaatagaagagaaaaattgtaacacactgaacaatagatactgtatgttcttaagactatgtatactagaataatagtagcagagtagggtgaaaaggaactttctgttctgaaagctaagcgactgtacgtgctactaaaaatgtctgacactgaaataattttactcaactatgttttcaacaagcaaaaatatagtattctaagattaaaatgtcat

SEQ ID NO: 104575 - DNA, 713 bp, Homo sapiens
  Payload ID: 534
  Gene Symbol: ACYP2
  Gene Name: acylphosphatase 2, muscle type
  ENST ID: ENST00000606082
  CDS Start-End: 521-643
acccctctccgggctccgcctcctccgcgtcttcgtcgccctgcggccgctggcggcccgtcgccctcggaccgatcgctaggcccccttccctggccggcgtgctgctgggccccacgcggctctcagttcgttggcggcggcagcggccgctctgcccgccccgcaccggctctgctggtgacgctgcagccgccgggcccagaggttccggaccggcctcaagtcacttccggggcggggcggggcggagcgacggcgtcgggggaggcggtggtggcggcagctggagcccaacgggctgcgccttcttcgccgtgggcccggctcggagcccccaccccaggcctcaccggcccagcgcgaggctgcctcaccggaaacacgaggccgaattccaagctattgtcctgcttcgccgggggtcgcgcactccaagcggcagcccactggagtcccagtcgccacgacaggcggcagccagactcagcctgcctgcacccaggtgaaataaacagccatgttgctcacacaaagcctgtttggtggtctcttcccacggacgcgcgagacaatgaggagagaagcagttccagatgacaatgagctccctagaaacaaacatctgaactggaaaagttgaagaatttacgggagcaagcaaaataaggtctcttcctcttattctaaataaagtttcatggagaacacta

SEQ ID NO: 104576 - DNA, 1115 bp, Homo sapiens
  Payload ID: 534
  Gene Symbol: ACYP2
  Gene Name: acylphosphatase 2, muscle type
  ENST ID: ENST00000422521
  CDS Start-End: 251-601
gcggtggtggcggcagctggagcccaacgggctgcgccttcttcgccgtgggcccggctcggagcccccaccccaggcctcaccggcccagcgcgaggctgcctcaccggaaacacgaggccgaattccaagctattgtcctgcttcgccgggggtcgcgcactccaagcggcagcccactggagtcccagtcgccacgacaggcggcagccagactcagcctgcctgcacccaggtgaaataaacagccatgttgctcacacaaagcctgtttggtggtctcttcccacggacgcgcgagacaatgaggagatacaaggtctcgctgttctacctaggctgttctagaactcctaatgtcaagctatcctcctgcctcggcctcccatgctgttgggattacagctataaattcatacaattatcagagtttggttttggtcaagtcataattgtgagtgaagaaccatggaaggagaacatttcttgctcatcaactactttcataaaatcaacaatttgcttaaatccagactctgaattcagaccatgtttcaatgcttggctatccctgatcagggaaaatgcagttggtctctgagtcacactgtgaaatagtattcagagctgaggcttcatctgcagtgcttgattcaacagatccctgggctggtgtgagtaagtggaaagccattttagagaagccagaattgggttgccatctgtcacgcatgggctttgctccttacacatattggtgaataaaatgtttaacaggctgtagccggaaagtgatatgaagcatctcattcatgaggaaactctacattttgctttctatttaagagcattgtttaaatgtcctctgggctgtgtttatgcatgctcagctgaatagattcttgcctaaagtccactatcatcagcacttacaagatggaacaagaggaaattgtaaaactaatacgtgctgcttaccggtgttcagagcctcttctttcaaacatgacttatttacaaatttctccaactgaagtcatgcaatttttatttgttgtgcacttattttgtaccaatcactcttccaaccactaataaatatgtatttatacaca

SEQ ID NO: 104577 - DNA, 831 bp, Homo sapiens
  Payload ID: 534
  Gene Symbol: ACYP2
  Gene Name: acylphosphatase 2, muscle type
  ENST ID: ENST00000607452
  CDS Start-End: 256-774
gggaggcggtggtggcggcagctggagcccaacgggctgcgccttcttcgccgtgggcccggctcggagcccccaccccaggcctcaccggcccagcgcgaggctgcctcaccggaaacacgaggccgaattccaagctattgtcctgcttcgccgggggtcgcgcactccaagcggcagcccactggagtcccagtcgccacgacaggcggcagccagactcagcctgcctgcacccaggtgaaataaacagccatgttgctcacacaaagcctgtttggtggtctcttcccacggacgcgcgagacaatgaggagatacaaggtctcgctgttctacctaggctgttctagaactcctaatgtcaagctatcctcctgcctcggcctcccatgctgttgggattacagctataaattcatacaattatcagagtttggttttggtcaagtcataattgtgagtgaagaaccatggaaggagaacatttcttgctcatcaactactttcataaaatcaacaatttgcttaagtgtttgcttcagaatgtatacagaagatgaagctaggaaaataggagtggttggctgggtgaagaataccagcaaaggcaccgtgacaggccaagtgcaggggccagaagacaaagtcaattccatgaagtcctggctgagcaaggttggaagccctagttctcgcattgaccgcacaaacttttctaatgaaaaaaccatctctaagcttgaatactctaattttagtattagatactaatagaagagaaaaattgtaacacactgaacaatagatactgtatgttcttaagactat

SEQ ID NO: 104578 - DNA, 1925 bp, Homo sapiens
  Payload ID: 535
  Gene Symbol:
  Gene Name: AD000671.6
  ENST ID: ENST00000589807
  CDS Start-End: 42-335
agtgacgtaagagcagccagacctggagggcttgggtaaaaatggctgaatatttagcttcgatattcgggactgagaaggacaaggttaactgctctttttactttaagatcggggtctgccggcacggggaccggtgctcccggcttcacaacaagccgacattcagccagccctgccctctgagctcaggccccgccccttttaaattctgtgcagaccatagtgctgctcaacctgtaccggaatccacagaacacagcccaaactgcagacggatcacactgaggtgttcacagaactgcaggagaagtatggggagattgaagagatgaatgtgtgcgacaaccttggggaccacctcgtgggcaacgtctatgtcaagttccggagggaggaggatggagagcgggccgtggctgaactcagtaaccgctggttcaacgggcaggctgtgcacgggaatgtacccgaggtggcttctgcaacttcatgcatctgcggcccatttcccagaacctccagaggcagctctatgggcggggacccaggcgcaggctcccgggctccataatgtaatctgttcagcatggagaccttcttctaccgcccctgtcttaataaagctgcgtgtttcacttcggcatcaacttgcttttgctgtggtttggcatttccctccacccacacatgtgacgaaaaggggaaacaagactgggtcctggccacaacttcagctgaggaacttggcacggccagcttgggacccaggaccctaacgtgtagcagaggcgctgtgtttggaagtcccgctatcacggccccccagatggggcctggacgatgcctcctgacggccttgttgcttctggccctggcgccaccgccggaagcctcccagtactgcggccgccttgaatactggaacccagacaacaagtgctgcagcagctgcctgcaacgcttcgggccgcccccctgcccggactatgagttccgggaaaactgcggactcaatgaccacggcgatttcgtaacgcccccgttccgaaagtgttcttctgggcagtgcaaccccgacggcgcggagctatgtagcccctgcggcggcggagccgtgacccctactcccgccgcgggcgggggcagaaccccgtggcgctgcagagagaggccggtccctgccaaggggcactgccccctcacacctggaaacccaggcgcccctagctcccaggagcgcagctcaccagcaagttccattgcctggaggacccctgagcctgtccctcagcaggcctggccgaatttccttccgctcgtggtgctggtcctgctcctgaccttggcggtgatagcgatcctcctgtttattctgctctggcatctctgctggcccaaggagaaagccgacccctatccctatcctggcttggtctgcggagtccccaacacccacaccccttcctcctcgcatctgtcctccccaggcgccctggagacaggggacacatggaaggaggcctcactacttccactcctgagcagggaactgtccagtctggcgtcacaacccctgtctcgcctcctggatgagctggaggtgctggaagagctgattgtactgctggaccctgagcctgggccaggtgggggtatggcccatggcactactcgacacctggccgcaagatatgggctgcctgctgcctggtccacctttgcctattcgctgaggccgagtcgctcgccgctgcgggctctgattgagatggtggtggcaagggagccctctgcctccctgggccagcttggcacacacctcgcccagctagggcgggcagatgcattgcgggtgctgtccaagcttggctcatctggggtttgctgggcttaacacccaataaagaactttgctgactact

SEQ ID NO: 104579 - DNA, 11431 bp, Homo sapiens
  Payload ID: 536
  Gene Symbol: ADAM10
  Gene Name: ADAM metallopeptidase domain 10
  Uniprot ID: O14672
  ENST ID: ENST00000260408
  CDS Start-End: 445-2691
gcggcggcaggcctagcagcacgggaaccgtcccccgcgcgcatgcgcgcgcccctgaagcgcctgggggacgggtaggggcgggaggtaggggcgcggctccgcgtgccagttgggtgcccgcgcgtcacgtggtgaggaaggaggcggaggtctgagtttcgaaggagggggggagagaagagggaacgagcaagggaaggaaagcggggaaaggaggaaggaaacgaacgagggggagggaggtccctgttttggaggagctaggagcgttgccggcccctgaagtggagcgagagggaggtgcttcgccgtttctcctgccaggggaggtcccggcttcccgtggaggctccggaccaagccccttcagcttctccctccggatcgatgtgctgctgttaacccgtgaggaggcggcggcggcggcagcggcagcggaagatggtgttgctgagagtgttaattctgctcctctcctgggcggcggggatgggaggtcagtatgggaatcctttaaataaatatatcagacattatgaaggattatcttacaatgtggattcattacaccaaaaacaccagcgtgccaaaagagcagtctcacatgaagaccaatttttacgtctagatttccatgcccatggaagacatttcaacctacgaatgaagagggacacttcccttttcagtgatgaatttaaagtagaaacatcaaataaagtacttgattatgatacctctcatatttacactggacatatttatggtgaagaaggaagttttagccatgggtctgttattgatggaagatttgaaggattcatccagactcgtggtggcacattttatgttgagccagcagagagatatattaaagaccgaactctgccatttcactctgtcatttatcatgaagatgatattaactatccccataaatacggtcctcaggggggctgtgcagatcattcagtatttgaaagaatgaggaaataccagatgactggtgtagaggaagtaacacagatacctcaagaagaacatgctgctaatggtccagaacttctgaggaaaaaacgtacaacttcagctgaaaaaaatacttgtcagctttatattcagactgatcatttgttctttaaatattacggaacacgagaagctgtgattgcccagatatccagtcatgttaaagcgattgatacaatttaccagaccacagacttctccggaatccgtaacatcagtttcatggtgaaacgcataagaatcaatacaactgctgatgagaaggaccctacaaatcctttccgtttcccaaatattggtgtggagaagtttctggaattgaattctgagcagaatcatgatgactactgtttggcctatgtcttcacagaccgagattttgatgatggcgtacttggtctggcttgggttggagcaccttcaggaagctctggaggaatatgtgaaaaaagtaaactctattcagatggtaagaagaagtccttaaacactggaattattactgttcagaactatgggtctcatgtacctcccaaagtctctcacattacttttgctcacgaagttggacataactttggatccccacatgattctggaacagagtgcacaccaggagaatctaagaatttgggtcaaaaagaaaatggcaattacatcatgtatgcaagagcaacatctggggacaaacttaacaacaataaattctcactctgtagtattagaaatataagccaagttcttgagaagaagagaaacaactgttttgttgaatctggccaacctatttgtggaaatggaatggtagaacaaggtgaagaatgtgattgtggctatagtgaccagtgtaaagatgaatgctgcttcgatgcaaatcaaccagagggaagaaaatgcaaactgaaacctgggaaacagtgcagtccaagtcaaggtccttgttgtacagcacagtgtgcattcaagtcaaagtctgagaagtgtcgggatgattcagactgtgcaagggaaggaatatgtaatggcttcacagctctctgcccagcatctgaccctaaaccaaacttcacagactgtaataggcatacacaagtgtgcattaatgggcaatgtgcaggttctatctgtgagaaatatggcttagaggagtgtacgtgtgccagttctgatggcaaagatgataaagaattatgccatgtatgctgtatgaagaaaatggacccatcaacttgtgccagtacagggtctgtgcagtggagtaggcacttcagtggtcgaaccatcaccctgcaacctggatccccttgcaacgattttagaggttactgtgatgttttcatgcggtgcagattagtagatgctgatggtcctctagctaggcttaaaaaagcaatttttagtccagagctctatgaaaacattgctgaatggattgtggctcattggtgggcagtattacttatgggaattgctctgatcatgctaatggctggatttattaagatatgcagtgttcatactccaagtagtaatccaaagttgcctcctcctaaaccacttccaggcactttaaagaggaggagacctccacagcccattcagcaaccccagcgtcagcggccccgagagagttatcaaatgggacacatgagacgctaactgcagcttttgccttggttcttcctagtgcctacaatgggaaaacttcactccaaagagaaacctattaagtcatcatctccaaactaaaccctcacaagtaacagttgaagaaaaaatggcaagagatcatatcctcagaccaggtggaattacttaaattttaaagcctgaaaattccaatttgggggtgggaggtggaaaaggaacccaattttcttatgaacagatatttttaacttaatggcacaaagtcttagaatattattatgtgccccgtgttccctgttcttcgttgctgcattttcttcacttgcaggcaaacttggctctcaataaacttttaccacaaattgaaataaatatatttttttcaactgccaatcaaggctaggaggctcgaccacctcaacattggagacatcacttgccaatgtacataccttgttatatgcagacatgtatttcttacgtacactgtacttctgtgtgcaattgtaaacagaaattgcaatatggatgtttctttgtattataaaatttttccgctcttaattaaaaattactgtttaattgacatactcaggataacagagaatggtggtattcagtggtccaggattctgtaatgctttacacaggcagttttgaaatgaaaatcaatttacctttctgttacgatggagttggttttgatactcattttttctttatcacatggctgctacgggcacaagtgactatactgaagaacacagttaagtgttgtgcaaactggacatagcagcacatactacttcagagttcatgatgtagatgtctggtttctgcttacgtcttttaaactttctaattcaattccatttttcaattaataggtgaaattttattcatgctttgatagaaattatgtcaatgaaatgattctttttatttgtagcctacttatttgtgtttttcatatatctgaaatatgctaattatgttttctgtctgatatggaaaagaaaagctgtgtctttatcaaaatatttaaacggttttttcagcatatcatcactgatcattggtaaccactaaagatgagtaatttgcttaagtagtagttaaaattgtagataggccttctgacattttttttcctaaaatttttaacagcattgaaggtgaaacagcacaatgtcccattccaaatttatttttgaaacagatgtaaataattggcattttaaagagaaagcaaaaacatttaatgtattaacaggcttattgctatgcaggaaatagaaggggcattacaaaaattgaagcttgtgacatatttattgcttctgttttccaactacatcacttcaactagaagtaaagctatgattttcctgacttcacataggaggcaaatttagagaaagttgtaaagatttctatgttttgggtttttttttttcctttttttttttaagagtataaggtttacacaatcattctcataatgtgacgcaagccagcaaggccaaaaatgctagagaaaataacgggatctcttccttgtaaacttgtacagtatgtggtgactttttcaaaatacagctttttgtacatgatttagagacaaattttgtacatgaaaccccagatagactataaataattctaaacaaacaagtaggtagatatgtatgtaattgcttttaaatcatttaaatgcctttgtttttggactgtgcaaaggttggaagtgggtttgcatttctaaaatggtgacttttattctgcaagagttcttagtaacttcttgagtgtggtagactttggaacatgtaaattttttgcttgtaatgttatcctgtggtaggattttggcaggtacacacactgccctattttattttgagtctaagttaaatgttttctgaaaagagatacatgcactgaactctttccactgcgaatcaagatgtggtaatataaaaggatcaagacaaatgagatctaatactactgtcagttttaatgtccactgtgttttatacagtatctttttttgttcactttggaaatttttactaaaaattgcaaaaaataaagtattgtgcaaagatgtaaggttttttgaaacttgaaatgcattaataaatagacgattaaatcaacttgaaggttctatactctttgaactctgagaactatcacaagaagcttcccacaaggcagtgttttcttacagttgtctcttcctacaaaagtatagattatctttattcttaatactttggaatccatgtagaaaatttccagttagatactctgcgtacacacaataaacctttttaaaacacccaactaatctcaactgcattacattgtttctaatcaatattcagtgcttgtcttggtggaagaggtgagtcattttgaaaacttatggtcttgtttttatgtgtttttcaaagttttgaatgctaagtacctcatttattttaaaaagcctagtttaatgataagtttgtttaaaattttgagccatcatttttctcttcatagcaaataaggagagaattgacatttcagtgttacctagaaaaggaattgtaagcccagaataattccctgcatgaggtaatctgcttcaaattctttttttagtcaaggttagctataagtaatacttgttaaatgagtaaatatgtaatactttgtgaattactttgttaatttaggagcatcaaatgtatattatgtttagttatttatgaaactctcaatattgattgatttgggtaattataaattagttatttttacttgtaattgaatgcttaaattctgtttacagtccgtcctctctccctccatccctccctccccagttttataaattcaggtaccaattcacaaacaaaatcagaaataaaataaatttattgactgcttctggatttagcattccctgtagtgtcaagcaatgtcatgcagtttggggaagcatttatttaaggaaatgacaactttctctgatcagtcttgttttgtgaggtgtcttcaacactttatgctttgggtacttcgtgtttgtcacagtcttaggatagtgaaatctgatttgtccaagcggagcaaactactcgaccctcagtccttgtatttgtccctgtagtaagacctaattattattatttcttaaagatgggattggtgtccttggcaactatgaaatttcggggcttgtgcatgagaaggcatttcttattaagtatttctaattgaaggtatcagagtgtcaagcattacaaacctggacagttcacctggaggagtacaagaagagatattcattatccatatttaaagggtcaaggtttcccaaaaccagggtgcaagccagatgtagttttaaagcagctgccagggacagttcatctttagagaagtcactaaagttgtaagaaattttagtttccccaaaaccactttcaacttcttagaaactagaaagacaattggtttgccccacagaggacaacttcagtttcagcatctctcatgttgtgttcttgattaaaaacaacttccatttgatatacttttccgtttattaccagtttagttttttcactattgtttctgtattcaactctttatatgattaggatagaaatttagcccttctgttttatattactatattgtttgtgtgtcttagatatatacatgtatgtactattttcagtagaaattcatgtattttataattggtaagttcttcagagcatctcttctataaaaagcaacaggatgctaggtaaaacggagcattgagcaaaatactgattagtttttgctttttcctgaaatctacactaaagtgatagggtgtggggtaatccaacaaggacaaggtgaattgaacaagaacgaaatctggaagcagatgaaggagtactattgattgggcagacccagggaagtcaaatcctaaaccagcagtgggaacacaacagaatggtgtagtttgcactggtaagatttgggtacctggcagggctgggtgcggtggctcacacctgtaatcccagcactttgggaggccaaggcgggtggatcacttgaggtcaggagttcgagaccaccctggccaacatggtgaaaccccgtctctactaaaaatacagctgggcgtggtggcacatgcttgtaatcccagctactcgggaggcagaggcaggagatttgcttgaacccgggaggcagaggcaggagatttgcttgaacccaggaggcagaggctgcagtgagccgcgattgcgccattgcactccagcctgggtgacagagcgagactctgtctcaaaaaaaaaaaaaaaaaaaaaaaaaaaaaaaaaaaaaaaaaaaaaaaatttgagtacctggcctttgttactttttttctatgtgtgtgacaaaaacataatatgcacacttttgtaacccacctttctcatttaatggtacattgataatgtatatcacattaactactctaaatatttctgtggatgtatgtttttttttttcttaaccaatttcccattgtttggacatgtaggttccacattgtttattattttaaacaattctaaagaattttaaacaattcttaggaaaatcctcagcctaataatgaaattaattcctaaaagtggaattgttggggtaaaggttttttgagggacattgataaaaattatggtactgtctcccagatagatgtaccaagttatactaccacgatttaatatatatatatatatatattaaatcagagtcccatccttagaaatccacatatatgcagccacatgaatgtattagaaacaataatagaagactcatgcttaattcagttgattagctttagacataattcaaatgcaagtcaaattgagtgccctaattgtggtctcttaagtaccatttttcttcaagggaaccagactcctttggataaatcactaattccacctgtaagaaagaaatgtacaagaagaacctaggaaacattgttttgtaccagatcagaaagattcaggaggcaccttagaagttaccactggccaaggctgagataactttagcatcagcaaggataatatctgcaagagattgaaactcatagtattgtatttaactctgtgagttaatgatggtagtggacagaattatagttacctttgggatacgcttttaaagaaattccaggtaataagagaaatgatagaattaggatatcaccattttacccccccaacaatttatggatctagacaataatcgccagtgactgctaacctcacaaagtgagagcaatcagattttgtgcctcctaatggaagtacatataccacctatgaagcagttctgccaaaagtcacatctcatcatgatgaagcctcctgatctaactaccccttcattagaaatacaggggacagagggacaaataatatacaagggactcaatcagcaaaatccagactctggaaaactacaagacatatggtcctgcttcaacaacagaaatgcaaagagaaaagacaacgatgggttaaaggagacttaagagctacatctatcaagacaatttatggacttatttggatactgatttgaacaaactgttgagaccattggaaaaatgtgaaaagtggatatttgatattaaggtttttaattatttttaggtgtgataatggtattgttacattttttaaaggaccccttttagagatgcaaattgaaacacttaaaaaatgaaatgatacgatgtataagtttttgcttaaaaataaggattgaagttggctggtgtgtgtggatatagttgaaacaagattggctgtgagttgataattattgaagctgggtgatgggcacttggggatttattatactattttctctacctgtgtttatatttgaaatttttcatagaagttttaaaatgtggccagttgtgatggctcatacctgtaatcccaacactttgggaggccaaggtgggaggatcacttgagctcaggagttagagaccagcctgggcaaaatagtgagactccatctcaaagaaaaaaaaaaagtgttttaaatgtgaatcaaattcctatagaagctgattcattactgtttttattttagcagtaattcatgataatgacctgtattcataatgattttcataatgattgttttagtggaattaaacttgaaccagtcaagctaacataattatattctgctccagttacaatgaataattaattgatttcaactgctagggtgaactcttgaagctatcagtcatccagcaatcttagcaagcaggccattgggtccctgtttgctctgtctctctctctctctctcactgttgaagggcttagctaactacttaagtaaaatatttgttctctgttaaacatgtcaaggagtatggtcagcttatccacattaagcctgtgtgtcccacgttggagtaaatgttaagtagctcactacaataaactagattcttctgccctctcttgtttaaatgatcatgttccctggaggtggaaatagatctttaaaaagatattctgtagttgtttgttctcagtgtaaaaaaatgagaataatttgataagagtgtaggttgtcttatataaaaagtggttccatttgcatgaattttagaaaaatcattttggaaaaatgaaggctatgtggttatactgaacacattaagcaattttattctttattttaaatgaatattttattatcgttttcttcccttgccctttgggtatgggagttagcctttgtgtttctaaatacaacaggccggtttttataaattaaggtgtcaatatattcttcattatttagttttgtgattgtggttagttttcatttttcttaagtatctgctagtagcatctgtaattaagtgaagtgacctgttaaccattttcctctttctcctcctttcctcctccttgaaacatatcagagcatgtttgaaattctttggcttttatggtatgcatttgctgatatgcattgaccagttaccttactcacagatacttcttaggcacttgattgtgccagggccttggctagatgataagaatacagtagtgaacttaacagtttccctgccctggtgaagcgtatggtcttgtaggtgagatagatatcagataatcatgtgaataaatgtacaattccagctgtgatacatgctgaggaggaggtttttggtgatccaagagctgatcatgcagagataggactgagaaaggagggtgggacgttgtcacagctgataatgcagagataggactgagaaaggagggtgggacatcaggaaggtcagagaattccttatgaaagtgatgcttgagtcaaaatatgatggatgaagagagtttaaatagattacatagaatttttaataatgtcgattggttatatactgggcactgatagctgatttttctttggggaaaggtatgtcagcctagtcattcagattcctttatttttttaaatgttttttcattttttgctttgcattgcattcatttgctgaagagctggcttgtactttggcaggtgtcatacttggttattctccttaggatattggcccaacaatctgggagttgtgaaaggcgcttcgcttttcagacctgggcgtctgtatcatgactatcataaatttaggattaagacacctagcctcctaccaggatgaatgaggtgtccatgtgacctgctgtgccctggaattttatacatctttctctcatagcacacaccatattacaatataatcctgcctcatctaagccaaactttcgagagaatcatttacactcagtggctacttcagctcccattcacttatcaacctgctgcaatttttcacagcccccaaaggactgcagtctgtgccttcagggagctgagggtctagcggaaggaaagaaaccagcagttacagtacagaggggtttgtgttggaaactctacaaacacaggatgccctggtagctcagaggaagtgcatatcgagcatggtaggtaggtagtgggaagagccaagatgacttcccagaggagaaaagctggacctgagttttggagtttcggtaaaagtttgctctaactagtccaagctgctgtcacaagcttttagaaatgatgtaaccatggggcagttgactgtcgtcatgttctttgctattttcatgactctggatgtgcttttcctattccctggattgccctttccctcgattcctctgcaggactgggctttattaatctccatttccttgagcttggctatagtaggtgttcaataaacatttgttttgttgtgtgctttgtaaataggcaatgaagctgatttcacaagataggcacaaaagttagtttcattacaacacattaccaacagctgtatttttaacttttaacatatctcattctaaatcctgtggcagcacaacctccttccgtcatacctggagataaattttctttcaaaatctaatatgcactgtatttatagaatatgaaacataccgaccatgttttgcaaaaatgggaaaggcataacttagctttggggcatgtaagtaacaactcctgataggagaagaaatgtattcagaaagctcaaattagaaataaaatgggagactctaga

SEQ ID NO: 104580 - DNA, 861 bp, Homo sapiens
  Payload ID: 536
  Gene Symbol: ADAM10
  Gene Name: ADAM metallopeptidase domain 10
  ENST ID: ENST00000402627
  CDS Start-End: 61-276
ggatcgatgtgctgctgttaacccgtgaggaggcggcggcggcggcagcggcagcggaagatggtgttgctgagagtgttaattctgctcctctcctgggcggcggggatgggagaccgagattttgatgatggcgtacttggtctggcttgggttggagcaccttcaggaagctctggaggaatatgtgaaaaaagtaaactctattcagatgtgcctacaatgggaaaacttcactccaaagagaaacctattaagtcatcatctccaaactaaaccctcacaagtaacagttgaagaaaaaatggcaagagatcatatcctcagaccaggtggaattacttaaattttaaagcctgaaaattccaatttgggggtgggaggtggaaaaggaacccaattttcttatgaacagatatttttaacttaatggcacaaagtcttagaatattattatgtgccccgtgttccctgttcttcgttgctgcattttcttcacttgcaggcaaacttggctctcaataaacttttaccacaaattgaaataaatatatttttttcaactgccaatcaaggctaggaggctcgaccacctcaacattggagacatcacttgccaatgtacataccttgttatatgcagacatgtatttcttacgtacactgtacttctgtgtgcaattgtaaacagaaattgcaatatggatgtttctttgtattataaaatttttccgctcttaattaaaaattactgtttaattgacatactcaggataacagagaatggtggtattcagtggtccaggattctgtaatgctttacacaggcagttttgaaatgaaaatcaatttacctttctg

SEQ ID NO: 104581 - DNA, 601 bp, Homo sapiens
  Payload ID: 536
  Gene Symbol: ADAM10
  Gene Name: ADAM metallopeptidase domain 10
  ENST ID: ENST00000439637
  CDS Start-End: 225-601
aaggaaacgaacgagggggagggaggtccctgttttggaggagctaggagcgttgccggcccctgaagtggagcgagagggaggtgcttcgccgtttctcctgccaggggaggtcccggcttcccgtggaggctccggaccaagccccttcagcttctccctccggatcgatgtgctgctgttaacccgtgaggaggcggcggcggcggcagcggcagcggaagatggtgttgctgagagtgttaattctgctcctctcctgggcggcggggatgggaggtcagtatgggaatcctttaaataaatatatcagacattatgaaggattatcttacaatgtggattcattacaccaaaaacaccagcgtgccaaaagagcagtctcacatgaagaccaatttttacgtctagatttccatgcccatggaagacatttcaacctacgaatgaagagggacacttcccttttcagtgatgaatttaaagtagaaacatcaaataaagtacttgattatgatacctctcatatttacactggacatatttatgactatccccataaatacggtcctcaggggggctgtgcagatcattcagtatt

SEQ ID NO: 104582 - DNA, 583 bp, Homo sapiens
  Payload ID: 536
  Gene Symbol: ADAM10
  Gene Name: ADAM metallopeptidase domain 10
  ENST ID: ENST00000561288
  CDS Start-End: 174-290
gttgccggcccctgaagtggagcgagagggaggtgcttcgccgtttctcctgccaggggaggtcccggcttcccgtggaggctccggaccaagccccttcagcttctccctccggatcgatgtgctgctgttaacccgtgaggaggcggcggcggcggcagcggcagcggaagatggtgttgctgagagtgttaattctgctcctctcctgggcggcggggatgggagtgcctacaatgggaaaacttcactccaaagagaaacctattaagtcatcatctccaaactaaaccctcacaagtaacagttgaagaaaaaatggcaagagatcatatcctcagaccaggtggaattacttaaattttaaagcctgaaaattccaatttgggggtgggaggtggaaaaggaacccaattttcttatgaacagatatttttaacttaatggcacaaagtcttagaatattattatgtgccccgtgttccctgttcttcgttgctgcattttcttcacttgcaggcaaacttggctctcaataaacttttaccacaaattgaaataaatatatttttttcaactgcca

SEQ ID NO: 104583 - DNA, 587 bp, Homo sapiens
  Payload ID: 536
  Gene Symbol: ADAM10
  Gene Name: ADAM metallopeptidase domain 10
  ENST ID: ENST00000558004
  CDS Start-End: 241-587
aagcggggaaaggaggaaggaaacgaacgagggggagggaggtccctgttttggaggagctaggagcgttgccggcccctgaagtggagcgagagggaggtgcttcgccgtttctcctgccaggggaggtcccggcttcccgtggaggctccggaccaagccccttcagcttctccctccggatcgatgtgctgctgttaacccgtgaggaggcggcggcggcggcagcggcagcggaagatggtgttgctgagagtgttaattctgctcctctcctgggcggcggggatgggaggtcagtatgggaatcctttaaataaatatatcagacattatgaaggattatcttacaatgtggattcattacaccaaaaacaccagcgtgccaaaagagcagtctcacatgaagaccaatttttacgtctagatttccatgcccatggaagagatggggttttgccgtgttgcccaggctggtctcaaactcctgggttgaaacgatccacctgcctcagcctcccacagtgctgggattacagatgtgagcctagccctatgatatctgtctttgactatccccataaata

SEQ ID NO: 104584 - DNA, 541 bp, Homo sapiens
  Payload ID: 536
  Gene Symbol: ADAM10
  Gene Name: ADAM metallopeptidase domain 10
  ENST ID: ENST00000559053
  CDS Start-End: 97-541
gaggctccggaccaagccccttcagcttctccctccggatcgatgtgctgctgttaacccgtgaggaggcggcggcggcggcagcggcagcggaagatggtgttgctgagagtgttaattctgctcctctcctgggcggcggggatgggagaccgagattttgatgatggcgtacttggtctggcttgggttggagcaccttcaggaagctctggaggaatatgtgaaaaaagtaaactctattcagatggtaagaagaagtccttaaacactggaattattactgttcagaactatgggtctcatgtacctcccaaagtctctcacattacttttgctcacgaagttggacataactttggatccccacatgattctggaacagagtgcacaccaggagaatctaagaatttgggtcaaaaagaaaatggcaattacatcatgtatgcaagagcaacatctggggacaaacttaacaacaataaattctcactctgtagtattagaaatataagccaagttcttgagaagaagagaaaca

SEQ ID NO: 104585 - DNA, 2418 bp, Homo sapiens
  Payload ID: 536
  Gene Symbol: ADAM10
  Gene Name: ADAM metallopeptidase domain 10
  ENST ID: ENST00000396136
  CDS Start-End: 1-176
gtgaagaaggaagttttagccatgggtctgttattgatggaagatttgaaggattcatccagactcgtggtggcacattttatgttgagccagcagagagatatattaaagaccgaactctgccatttcactctgtcatttatcatgaagatgatattagtgaaggcttaaactgaggcttagaaaacttatgtcacttgattgtggacctcctgttctttaccctgtgctcttctgcttcactcatggaagaaagctgtaaattctcactgcctttacttcaaggatttctggggcttttctgaaatctactatccccataaatacggtcctcaggggggctgtgcagatcattcagtatttgaaagaatgaggaaataccagatgactggtgtagaggaagtaacacagatacctcaagaagaacatgctgctaatggtccagaacttctgaggaaaaaacgtacaacttcagctgaaaaaaatacttgtcagctttatattcagactgatcatttgttctttaaatattacggaacacgagaagctgtgattgcccagatatccagtcatgttaaagcgattgatacaatttaccagaccacagacttctccggaatccgtaacatcagtttcatggtgaaacgcataagaatcaatacaactgctgatgagaaggaccctacaaatcctttccgtttcccaaatattggtgtggagaagtttctggaattgaattctgagcagaatcatgatgactactgtttggcctatgtcttcacagaccgagattttgatgatggcgtacttggtctggcttgggttggagcaccttcaggaagctctggaggaatatgtgaaaaaagtaaactctattcagatggtaagaagaagtccttaaacactggaattattactgttcagaactatgggtctcatgtacctcccaaagtctctcacattacttttgctcacgaagttggacataactttggatccccacatgattctggaacagagtgcacaccaggagaatctaagaatttgggtcaaaaagaaaatggcaattacatcatgtatgcaagagcaacatctggggacaaacttaacaacaataaattctcactctgtagtattagaaatataagccaagttcttgagaagaagagaaacaactgttttgttgaatctggccaacctatttgtggaaatggaatggtagaacaaggtgaagaatgtgattgtggctatagtgaccagtgtaaagatgaatgctgcttcgatgcaaatcaaccagagggaagaaaatgcaaactgaaacctgggaaacagtgcagtccaagtcaaggtccttgttgtacagcacagtgtgcattcaagtcaaagtctgagaagtgtcgggatgattcagactgtgcaagggaaggaatatgtaatggcttcacagctctctgcccagcatctgaccctaaaccaaacttcacagactgtaataggcatacacaagtgtgcattaatgggcaatgtgcaggttctatctgtgagaaatatggcttagaggagtgtacgtgtgccagttctgatggcaaagatgataaagaattatgccatgtatgctgtatgaagaaaatggacccatcaacttgtgccagtacagggtctgtgcagtggagtaggcacttcagtggtcgaaccatcaccctgcaacctggatccccttgcaacgattttagaggttactgtgatgttttcatgcggtgcagattagtagatgctgatggtcctctagctaggcttaaaaaagcaatttttagtccagagctctatgaaaacattgctgaatggattgtggctcattggtgggcagtattacttatgggaattgctctgatcatgctaatggctggatttattaagatatgcagtgttcatactccaagtagtaatccaaagttgcctcctcctaaaccacttccaggcactttaaagaggaggagacctccacagcccattcagcaaccccagcgtcagcggccccgagagagttatcaaatgggacacatgagacgctaactgcagcttttgccttggttcttcctagtgcctacaatgggaaaacttcactccaaagagaaacctattaagtcatcatctccaaactaaaccctcacaagtaacagttgaagaaaaaatggcaagagatcatatcctcagaccaggtggaattacttaaattttaaagcctgaaaattccaatttgggggtgggaggtggaaaaggaacccaattttcttatgaacagatatttttaacttaatggcacaaagtcttagaatattattatgtgccccgtgttccctgttcttcgttgctgcattttcttcacttgcaggcaaacttggctctcaataaactttt

SEQ ID NO: 104586 - DNA, 1932 bp, Homo sapiens
  Payload ID: 536
  Gene Symbol: ADAM10
  Gene Name: ADAM metallopeptidase domain 10
  ENST ID: ENST00000461408
  CDS Start-End: 186-365
ggagctaggagcgttgccggcccctgaagtggagcgagagggaggtgcttcgccgtttctcctgccaggggaggtcccggcttcccgtggaggctccggaccaagccccttcagcttctccctccggatcgatgtgctgctgttaacccgtgaggaggcggcggcggcggcagcggcagcggaagatggtgttgctgagagtgttaattctgctcctctcctgggcggcggggatgggagcccctgcccggtggcggattccgaagtcctctccgccgccgagacccgccgcgcagactcgtgggaagttgtgttgtttgcagctgggctcgtgtattgttctttacccggcgcgccggtcctgaccgaccccattctgcagaggggccgcccgtggagtggcagcagtcatcacccgcttatctgagactagtggcctcggttcttcctgtgtcctgtgtttggagagagatcacaggagggtgtgttggtgttcttgaaaacattctgtcgcccaggggaaagggtttggtcgggagaagggtaaaccatttggggatgttctttgatttgtaggctggattgggtctcttagagtagaagttcggtccctgggtgacccaacttgaagagtttcgttaaactttcaggtggagtagatgtacagtgtagttagtggattgtcaaaacagtgccccctcccccctgcacatgaaagtcaaatttgctaaaagcatgtcatttcttgtttcgggttttgaagacaacgatttttatttccggtgtgttctaggaccagctgcatcattttattcttgcttaaagtgctttattttaggtaagctttttgacttgccccagagtaaacttaaaaacctcaaggtgtgcctaaaagcaacgattgaaaaaatttgaggaatgctttggatgagtgtctgtagcctttgataatttagaaaatatctatttcatgtaatgtattgtttctgtttttttctttgccactttgacttatgactgcaggaccaagtgtatttctgtcctgtattctaccgagtccgagggtggtactgcgtaggcagacttctgttatagtttgtagtgttcatttttttgttacacgttttatttaatttttttcaatccaattcatcaagcaagacacacattatagattaagagctgataatagatgtttagttttaaaaaggattatgtgcgggagactctctgttagaggagcctttttcatctgacatttgttatttctgttctaaacgtggctttcaacaaatcgttttcctatcttttttcactttttgtgattaaattcaggagttaagacactgttctctataaggtaataaaaagtaagacaaacacatgaggcactttactgagtagtagtatactaaatgttcttttaaaaataatgaaaacagtaagaaactgatgtagtcttatatttgaagaaaaaacaattgaataacatgtttgtgggttaaaactcttatacaaaaattttctaaattcatatttccagagtcctttattgcattaagcattggttaaaaggctaatttttggtgtttttgttaagcagaactttttcaaaaaacataagacaagttttattagttttattttaaaattagtatcaagattctagcttttgggtacttggagatacttgtaattttattgtaactatggggtatttttatctactaatctgagctatttttggtcacttgtaagatctttgtatgatgatttgtagacttcagcacattgagattgaatgtatttgttttagcatatgagagaaaggagaaatttgtgtagattagaagttgtggtggaaatttaacttaaaatgtaaatcattttcaggtagttaataaatcctttttgttgcttccacctccccaa

SEQ ID NO: 104587 - DNA, 4571 bp, Homo sapiens
  Payload ID: 537
  Gene Symbol: ADAM11
  Gene Name: ADAM metallopeptidase domain 11
  Uniprot ID: O75078
  ENST ID: ENST00000200557
  CDS Start-End: 170-2479
cgctgagccccggcgccgtccctgccgcccccacctctccgcgacccccgcccggccccgcgcccccgccccggctccgcagctggcgcctccccacccccgtccctgctcccgccctccccgcgccgctggcagccgcagcccccggaccgggaggaatgagcgagccatgaggctgctgcggcgctgggcgttcgcggctctgctgctgtcgctgctccccacgcccggtcttgggacccaaggtcctgctggagctctgcgatgggggggcttaccccagctgggaggcccaggagcccctgaggtcacggaacccagccgtctggttagggagagctccgggggagaggtccgaaagcagcagctggacacaagggtccgccaggagccaccagggggcccgcctgtccatctggcccaggtgagtttcgtcatcccagccttcaactcaaacttcaccctggacctggagctgaaccaccacctcctctcctcgcaatacgtggagcgccacttcagccgggaggggacaacccagcacagcaccggggctggagaccactgctactaccaggggaagctccgggggaacccgcactccttcgccgccctctccacctgccaggggctgcatggggtcttctctgatgggaacttgacttacatcgtggagccccaagaggtggctggaccttggggagcccctcagggaccccttccccacctcatttaccggacccctctcctcccagatcccctcggatgcagggaaccaggctgcctgtttgctgtgcctgcccagtcggctcctccaaaccggccgaggctgagaaggaaaaggcaggtccgccggggccaccctacagtgcacagtgaaaccaagtatgtggagctaattgtgatcaacgaccaccagctgttcgagcagatgcgacagtcggtggtcctcaccagcaactttgccaagtccgtggtgaacctggccgatgtgatatacaaggagcagctcaacactcgcatcgtcctggttgccatggaaacatgggcagatggggacaagatccaggtgcaggatgacctcctggagaccctggcccggctcatggtctaccgacgggagggtctgcctgagcccagtgatgccacccacctcttctcgggcaggaccttccagagcacgagcagcggggcagcctacgtggggggcatatgctccctgtcccacggcgggggtgtgaacgagtacggcaacatgggggcgatggccgtgacccttgcccagacgctgggacagaacctgggcatgatgtggaacaaacaccggagctcggcaggggactgcaagtgtccagacatctggctgggctgcatcatggaggacactgggttctacctgccccgcaagttctcgcgctgtagcatcgacgagtacaaccagtttctgcaggagggtggtggcagctgcctcttcaacaagcccctcaagctcctggaccccccagagtgcgggaacggcttcgtggaggcaggggaggagtgcgactgcggctcggtgcaggagtgcagccgcgcaggtggcaactgctgcaagaaatgcaccctgactcacgacgccatgtgcagcgacgggctctgctgtcgccgctgcaagtacgaaccacggggtgtgtcctgccgagaggccgtgaacgagtgcgacatcgcggagacctgcaccggggactctagccagtgcccgcctaacctgcacaagctggacggttactactgtgaccatgagcagggccgctgctacggaggtcgctgcaaaacccgggaccggcagtgccaggttctttggggccatgcggctgctgatcgcttctgctacgagaagctgaatgtggaggggacggagcgtgggagctgtgggcgcaagggatctggctgggtccagtgcagtaagcaggacgtgctgtgtggcttcctcctctgtgtcaacatctctggagctcctcggctaggggacctggtgggagacatcagtagtgtcaccttctaccaccagggcaaggagctggactgcaggggaggccacgtgcagctggcggacggctctgacctgagctatgtggaggatggcacagcctgcgggcctaacatgttgtgcctggaccatcgctgcctgccagcttctgccttcaacttcagcacctgccccggcagtggggagcgccggatttgctcccaccacggggtctgcagcaatgaagggaagtgcatctgtcagccagactggacaggcaaagactgcagtatccataaccccctgcccacgtccccacccacgggggagacggagagatataaaggtcccagcggcaccaacatcatcattggctccattgctggggctgtcctggttgcagccatcgtcctgggcggcacgggctggggatttaaaaacattcgccgaggaaggtccggaggggcctaagtgccaccctcctccctccaagcctggcacccaccgtctcggccctgaaccacgaggctgcccccatccagccacggagggaggcaccatgcaaatgtcttccaggtccaaacccttcaactcctggctccgcaggggtttgggtgggggctgtggccctgcccttggcaccaccagggtggaccaggcctggagggcacttcctccacagtcccccacccacctcctgcggctcagccttgcacacccactgccccgtgtgaatgtagcttccacctcatggattgccacagctcaactcgggggcgcctggagggatgcccccaggcagccaccagtggacctagcctggatggcccctccttgcaaccaggcagctgagaccagggtcttacctctctgggacctagggggacggggctgacatctacattttttaaaactgaatcttaatcgatgaatgtaaactcgggggtgctggggccagggcagatgtggggatgttttgacatttacaggagggcccggagaaactgaggtatggccatgccctagaccctccccaaggatgaccacacccgaagtcctgtcactgagcacagtcaggggctgggcatcccagcttgcccccgcttagccccgctgagcttggaggaagtatgagtgctgattcaaaccaaagctgcctgtgccatgcccaaggcctaggttatgggtacggcaaccacatgtcccagatcgtctccaattcgaaaacaaccgtcctgctgtccctgtcaggacacatggattttggcagggcggggggggttctagaaaatatagttcctataataaaatggcaccttccccctttcaagaagggtgattctggggccgactcagggtttaggtgccccctggtgtggcctagatgtccccacctgggccatctttctggggaggactctcccaggtagggaaggccagaggtggcccagtgcctggagggttagggtctctgcctgggatatgcaagaggaagtaggaaagggaggtctcatggatgatcctaggctgctagaagtccttaaggccccatctagtccattccactccctacccccattccagagccgagtagtaagtttacagatgtttcccccattacgtacccccacccatccctgctgcagcgagcctgagagccaggtagagccaggcacagctcctcagtcttctcacacagtcctgccggtggccttccctcatgacccttgcttgggagggtggagcactggctccttgaccctaaaaggtagctggcaggggcaagatgggggccagctacctaatggatgaaagccacaagtgaatacagttcttgtcaccagggttgccctgccctcactcggcagggagttctgacaccccagggcccgtgagctacctgcttgagcccctgtttctggggcaccttcgaggaggcgttgtggagggcatcgccccctgtttattcacaacaccctcaggggcaaacaggcctgggacccgctgacaccattttgggtagctggatgcacccgacagcagtggggtccacacactgagctccagctggcactgcccactcaagggctgagtggaggggcccctccggccagctctgctccaccagccctgcaagctgatgcagggcgggggaagggctgggtgttgcactattgctgcgctgccttaaggcatctgtcctctggtggtgcacccgtgcacacaggtacagtgcatctgggcacagcttttggatccacacctctgcacaagtgtgaatacctctgcacatatgggcgtatctgtgtgtgctcgtgtatatggggtggggaacatgagacttcctgtgaccagtccaccctggctcccagctgtctgtatcctcctgccccgccctggcgagtgcctaccctggcagaacccagggaggagtggaggctgcctctgcctgggcctccacacagcatcctgtacatacgccacctgggctgggggtggggaggcagggccaggagcatcgattaaagatcacatcctggggcttccagggagctcacaccaa

SEQ ID NO: 104588 - DNA, 4220 bp, Homo sapiens
  Payload ID: 537
  Gene Symbol: ADAM11
  Gene Name: ADAM metallopeptidase domain 11
  ENST ID: ENST00000355638
  CDS Start-End: 22-747
accgggaggaatgagcgagccatgaggctgctgcggcgctgggcgttcgcggctctgctgctgtcgctgctccccacgcccggtcttgggacccaaggtcctgctggagctctgcgatgggggggcttaccccagctgggaggcccaggagcccctgaggtcacggaacccagccgtctggttagggagagctccgggggagaggtccgaaagcagcagctggacacaagggtccgccaggagccaccagggggcccgcctgtccatctggcccaggtgagtttcgtcatcccagccttcaactcaaacttcaccctggacctggagctgaaccaccacctcctctcctcgcaatacgtggagcgccacttcagccgggaggggacaacccagcacagcaccggggctggagaccactgctactaccaggggaagctccgggggaacccgcactccttcgccgccctctccacctgccaggggctgcatggggtcttctctgatgggaacttgacttacatcgtggagccccaagaggtggctggaccttggggagcccctcagggaccccttccccacctcatttaccggacccctctcctcccagatcccctcggatgcagggaaccaggctgcctgtttgctgtgcctgcccagtcggctcctccaaaccggccgaggctgagaaggaaaaggtccgccggggccaccctacagtgcacagtgaaaccaagtatgtggagctaattgtgatcaacgaccaccagctgttcgagcagatgcgacagtcggtggtcctcaccagcaactttgccaagtccgtggtgaacctggccgatgtgatatacaaggagcagctcaacactcgcatcgtcctggttgccatggaaacatgggcagatggggacaagatccaggtgcaggatgacctcctggagaccctggcccggctcatggtctaccgacgggagggtctgcctgagcccagtgatgccacccacctcttctcgggcaggaccttccagagcacgagcagcggggcagcctacgtggggggcatatgctccctgtcccacggcgggggtgtgaacgagtacggcaacatgggggcgatggccgtgacccttgcccagacgctgggacagaacctgggcatgatgtggaacaaacaccggagctcggcaggggactgcaagtgtccagacatctggctgggctgcatcatggaggacactgggttctacctgccccgcaagttctcgcgctgtagcatcgacgagtacaaccagtttctgcaggagggtggtggcagctgcctcttcaacaagcccctcaagctcctggaccccccagagtgcgggaacggcttcgtggaggcaggggaggagtgcgactgcggctcggtgcaggagtgcagccgcgcaggtggcaactgctgcaagaaatgcaccctgactcacgacgccatgtgcagcgacgggctctgctgtcgccgctgcaagtacgaaccacggggtgtgtcctgccgagaggccgtgaacgagtgcgacatcgcggagacctgcaccggggactctagccagtgcccgcctaacctgcacaagctggacggttactactgtgaccatgagcagggccgctgctacggaggtcgctgcaaaacccgggaccggcagtgccaggttctttggggccatgcggctgctgatcgcttctgctacgagaagctgaatgtggaggggacggagcgtgggagctgtgggcgcaagggatctggctgggtccagtgcagtaagcaggacgtgctgtgtggcttcctcctctgtgtcaacatctctggagctcctcggctaggggacctggtgggagacatcagtagtgtcaccttctaccaccagggcaaggagctggactgcaggggaggccacgtgcagctggcggacggctctgacctgagctatgtggaggatggcacagcctgcgggcctaacatgttgtgcctggaccatcgctgcctgccagcttctgccttcaacttcagcacctgccccggcagtggggagcgccggatttgctcccaccacggggtctgcagcaatgaagggaagtgcatctgtcagccagactggacaggcaaagactgcagtatccataaccccctgcccacgtccccacccacgggggagacggagagatataaaggtcccagcggcaccaacatcatcattggctccattgctggggctgtcctggttgcagccatcgtcctgggcggcacgggctggggatttaaaaacattcgccgaggaaggtccggaggggcctaagtgccaccctcctccctccaagcctggcacccaccgtctcggccctgaaccacgaggctgcccccatccagccacggagggaggcaccatgcaaatgtcttccaggtccaaacccttcaactcctggctccgcaggggtttgggtgggggctgtggccctgcccttggcaccaccagggtggaccaggcctggagggcacttcctccacagtcccccacccacctcctgcggctcagccttgcacacccactgccccgtgtgaatgtagcttccacctcatggattgccacagctcaactcgggggcgcctggagggatgcccccaggcagccaccagtggacctagcctggatggcccctccttgcaaccaggcagctgagaccagggtcttacctctctgggacctagggggacggggctgacatctacattttttaaaactgaatcttaatcgatgaatgtaaactcgggggtgctggggccagggcagatgtggggatgttttgacatttacaggagggcccggagaaactgaggtatggccatgccctagaccctccccaaggatgaccacacccgaagtcctgtcactgagcacagtcaggggctgggcatcccagcttgcccccgcttagccccgctgagcttggaggaagtatgagtgctgattcaaaccaaagctgcctgtgccatgcccaaggcctaggttatgggtacggcaaccacatgtcccagatcgtctccaattcgaaaacaaccgtcctgctgtccctgtcaggacacatggattttggcagggcggggggggttctagaaaatatagttcctataataaaatggcaccttccccctttcaagaagggtgattctggggccgactcagggtttaggtgccccctggtgtggcctagatgtccccacctgggccatctttctggggaggactctcccaggtagggaaggccagaggtggcccagtgcctggagggttagggtctctgcctgggatatgcaagaggaagtaggaaagggaggtctcatggatgatcctaggctgctagaagtccttaaggccccatctagtccattccactccctacccccattccagagccgagtagtaagtttacagatgtttcccccattacgtacccccacccatccctgctgcagcgagcctgagagccaggtagagccaggcacagctcctcagtcttctcacacagtcctgccggtggccttccctcatgacccttgcttgggagggtggagcactggctccttgaccctaaaaggtagctggcaggggcaagatgggggccagctacctaatggatgaaagccacaagtgaatacagttcttgtcaccagggttgccctgccctcactcggcagggagttctgacaccccagggcccgtgagctacctgcttgagcccctgtttctggggcaccttcgaggaggcgttgtggagggcatcgccccctgtttattcacaacaccctcaggggcaaacaggcctgggacccgctgacaccattttgggtagctggatgcacccgacagcagtggggtccacacactgagctccagctggcactgcccactcaagggctgagtggaggggcccctccggccagctctgctccaccagccctgcaagctgatgcagggcgggggaagggctgggtgttgcactattgctgcgctgccttaaggcatctgtcctctggtggtgcacccgtgcacacaggtacagtgcatctgggcacagcttttggatccacacctctgcacaagtgtgaatacctctgcacatatgggcgtatctgtgtgtgctcgtgtatatggggtggggaacatgagacttcctgtgaccagtccaccctg

SEQ ID NO: 104589 - DNA, 2529 bp, Homo sapiens
  Payload ID: 537
  Gene Symbol: ADAM11
  Gene Name: ADAM metallopeptidase domain 11
  ENST ID: ENST00000535346
  CDS Start-End: 699-2408
gctgctgcagccaccttttcctgcagtgctcggggtgacagccggtccggagcgcgggagggtaggggagcgggagaggagggaaggtgcgtccacccacctgtccccagctggccgggcccaccgcgtccctgcccctgccgccgaccggccagctctgcaggtcttgggacccaaggtcctgctggagctctgcgatgggggggcttaccccagctgggaggcccaggagcccctgaggtcacggaacccagccgtctggttagggagagctccgggggagaggtccgaaagcagcagctggacacaagggtccgccaggagccaccagggggcccgcctgtccatctggcccaggtgagtttcgtcatcccagccttcaactcaaacttcaccctggacctggagctgaaccaccacctcctctcctcgcaatacgtggagcgccacttcagccgggaggggacaacccagcacagcaccggggctggagaccactgctactaccaggggaagctccgggggaacccgcactccttcgccgccctctccacctgccaggggctgcatggggtcttctctgatgggaacttgacttacatcgtggagccccaagaggtggctggaccttggggagcccctcagggaccccttccccacctcatttaccggacccctctcctcccagatcccctcggatgcagggaaccaggctgcctgtttgctgtgcctgcccagtcggctcctccaaaccggccgaggctgagaaggaaaaggtccgccggggccaccctacagtgcacagtgaaaccaagtatgtggagctaattgtgatcaacgaccaccagctgttcgagcagatgcgacagtcggtggtcctcaccagcaactttgccaagtccgtggtgaacctggccgatgtgatatacaaggagcagctcaacactcgcatcgtcctggttgccatggaaacatgggcagatggggacaagatccaggtgcaggatgacctcctggagaccctggcccggctcatggtctaccgacgggagggtctgcctgagcccagtgatgccacccacctcttctcgggcaggaccttccagagcacgagcagcggggcagcctacgtggggggcatatgctccctgtcccacggcgggggtgtgaacgagtacggcaacatgggggcgatggccgtgacccttgcccagacgctgggacagaacctgggcatgatgtggaacaaacaccggagctcggcaggggactgcaagtgtccagacatctggctgggctgcatcatggaggacactgggttctacctgccccgcaagttctcgcgctgtagcatcgacgagtacaaccagtttctgcaggagggtggtggcagctgcctcttcaacaagcccctcaagctcctggaccccccagagtgcgggaacggcttcgtggaggcaggggaggagtgcgactgcggctcggtgcaggagtgcagccgcgcaggtggcaactgctgcaagaaatgcaccctgactcacgacgccatgtgcagcgacgggctctgctgtcgccgctgcaagtacgaaccacggggtgtgtcctgccgagaggccgtgaacgagtgcgacatcgcggagacctgcaccggggactctagccagtgcccgcctaacctgcacaagctggacggttactactgtgaccatgagcagggccgctgctacggaggtcgctgcaaaacccgggaccggcagtgccaggttctttggggccatgcggctgctgatcgcttctgctacgagaagctgaatgtggaggggacggagcgtgggagctgtgggcgcaagggatctggctgggtccagtgcagtaagcaggacgtgctgtgtggcttcctcctctgtgtcaacatctctggagctcctcggctaggggacctggtgggagacatcagtagtgtcaccttctaccaccagggcaaggagctggactgcaggggaggccacgtgcagctggcggacggctctgacctgagctatgtggaggatggcacagcctgcgggcctaacatgttgtgcctggaccatcgctgcctgccagcttctgccttcaacttcagcacctgccccggcagtggggagcgccggatttgctcccaccacggggtctgcagcaatgaagggaagtgcatctgtcagccagactggacaggcaaagactgcagtatccataaccccctgcccacgtccccacccacgggggagacggagagatataaaggtcccagcggcaccaacatcatcattggctccattgctggggctgtcctggttgcagccatcgtcctgggcggcacgggctggggatttaaaaacattcgccgaggaaggtccggaggggcctaagtgccaccctcctccctccaagcctggcacccaccgtctcggccctgaaccacgaggctgcccccatccagccacggagggaggcaccatgcaaatgtcttccaggtccaaacccttcaac

SEQ ID NO: 104590 - DNA, 2858 bp, Homo sapiens
  Payload ID: 537
  Gene Symbol: ADAM11
  Gene Name: ADAM metallopeptidase domain 11
  ENST ID: ENST00000587773
  CDS Start-End: 1-1554
ctcctctcctcgcaatacgtggagcgccacttcagccgggaggggacaacccagcacagcaccggggctggagaccactgctactaccaggggaagctccgggggaacccgcactccttcgccgccctctccacctgccaggggctgcatggggtcttctctgatgggaacttgacttacatcgtggagccccaagaggtggctggaccttggggagcccctcagggaccccttccccacctcatttaccggacccctctcctcccagatcccctcggatgcagggaaccaggctgcctgtttgctgtgcctgcccagtcggctcctccaaaccggccgaggctgagaaggaaaaggcaggtccgccggggccaccctacagtgcacagtgaaaccaagtatgtggagctaattgtgatcaacgaccaccagctgttcgagcagatgcgacagtcggtggtcctcaccagcaactttgccaagtccgtggtgaacctggccgatgtgatatacaaggagcagctcaacactcgcatcgtcctggttgccatggaaacatgggcagatggggacaagatccaggtgcaggatgacctcctggagaccctggcccggctcatggtctaccgacgggagggtctgcctgagcccagtgatgccacccacctcttctcgggcaggaccttccagagcacgagcagcggggcagcctacgtggggggcatatgctccctgtcccacggcgggggtgtgaacgagtacggcaacatgggggcgatggccgtgacccttgcccagacgctgggacagaacctgggcatgatgtggaacaaacaccggagctcggcaggggactgcaagtgtccagacatctggctgggctgcatcatggaggacactgggttctacctgccccgcaagttctcgcgctgtagcatcgacgagtacaaccagtttctgcaggagggtggtggcagctgcctcttcaacaagcccctcaagctcctggaccccccagagtgcgggaacggcttcgtggaggcaggggaggagtgcgactgcggctcggtgcaggagtgcagccgcgcaggtggcaactgctgcaagaaatgcaccctgactcacgacgccatgtgcagcgacgggctctgctgtcgccgctgcaagtacgaaccacggggtgtgtcctgccgagaggccgtgaacgagtgcgacatcgcggagacctgcaccggggactctagccagtgcccgcctaacctgcacaagctggacggttactactgtgaccatgagcagggccgctgctacggaggtcgctgcaaaacccgggaccggcagtgccaggttctttggggccatgcggctgctgatcgcttctgctacgagaagctgaatgtggaggggacggagcgtgggagctgtgggcgcaagggatctggctgggtccagtgcagtaagcagccccaacagggacgtgctgtgtggcttcctcctctgtgtcaacatctctggagctcctcggctaggggacctggtgggagacatcagtagtgtcaccttctaccaccagggcaaggagctggactgcaggggaggccacgtgcagctggcggacggctctgacctgagctatgtggaggatggcacagcctgcgggcctaacatgttgtgcctggaccatcgctgcctgccagcttctgccttcaacttcagcacctgccccggcagtggggagcgccggatttgctcccaccacggggtctgcagcaatgaagggaagtgcatctgtcagccagactggacaggcaaagactgcagtatccataaccccctgcccacgtccccacccacgggggagacggagagatataaaggtcccagcggcaccaacatcatcattggctccattgctggggctgtcctggttgcagccatcgtcctgggcggcacgggctggggatttaaaaacattcgccgaggaaggtccggaggggcctaagtgccaccctcctccctccaagcctggcacccaccgtctcggccctgaaccacgaggctgcccccatccagccacggagggaggcaccatgcaaatgtcttccaggtccaaacccttcaactcctggctccgcaggggtttgggtgggggctgtggccctgcccttggcaccaccagggtggaccaggcctggagggcacttcctccacagtcccccacccacctcctgcggctcagccttgcacacccactgccccgtgtgaatgtagcttccacctcatggattgccacagctcaactcgggggcgcctggagggatgcccccaggcagccaccagtggacctagcctggatggcccctccttgcaaccaggcagctgagaccagggtcttacctctctgggacctagggggacggggctgacatctacattttttaaaactgaatcttaatcgatgaatgtaaactcgggggtgctggggccagggcagatgtggggatgttttgacatttacaggagggcccggagaaactgaggtatggccatgccctagaccctccccaaggatgaccacacccgaagtcctgtcactgagcacagtcaggggctgggcatcccagcttgcccccgcttagccccgctgagcttggaggaagtatgagtgctgattcaaaccaaagctgcctgtgccatgcccaaggcctaggttatgggtacggcaaccacatgtcccagatcgtctccaattcgaaaacaaccgtcctgctgtccctgtcaggacacatggattttggcagggcggggggggttctagaaaatatagttcctataataaaatggcaccttcccccttt

SEQ ID NO: 104591 - DNA, 3313 bp, Homo sapiens
  Payload ID: 538
  Gene Symbol: ADAM12
  Gene Name: ADAM metallopeptidase domain 12
  Uniprot ID: O43184
  ENST ID: ENST00000368676
  CDS Start-End: 311-2527
cactaacgctcttcctagtccccgggccaactcggacagtttgctcatttattgcaacggtcaaggctggcttgtgccagaacggcgcgcgcgcgcgcacgcacgcacacacacggggggaaacttttttaaaaatgaaaggctagaagagctcagcggcggcgcgggcgctgcgcgagggctccggagctgactcgccgaggcaggaaatccctccggtcgcgacgcccggccccggctcggcgcccgcgtgggatggtgcagcgctcgccgccgggcccgagagctgctgcactgaaggccggcgacgatggcagcgcgcccgctgcccgtgtcccccgcccgcgccctcctgctcgccctggccggtgctctgctcgcgccctgcgaggcccgaggggtgagcttatggaaccaaggaagagctgatgaagttgtcagtgcctctgttgggagtggggacctctggatcccagtgaagagcttcgactccaagaatcatccagaagtgctgaatattcgactacaacgggaaagcaaagaactgatcataaatctggaaagaaatgaaggtctcattgccagcagtttcacggaaacccactatctgcaagacggtactgatgtctccctcgctcgaaattacacggtaattctgggtcactgttactaccatggacatgtacggggatattctgattcagcagtcagtctcagcacgtgttctggtctcaggggacttattgtgtttgaaaatgaaagctatgtcttagaaccaatgaaaagtgcaaccaacagatacaaactcttcccagcgaagaagctgaaaagcgtccggggatcatgtggatcacatcacaacacaccaaacctcgctgcaaagaatgtgtttccaccaccctctcagacatgggcaagaaggcataaaagagagaccctcaaggcaactaagtatgtggagctggtgatcgtggcagacaaccgagagtttcagaggcaaggaaaagatctggaaaaagttaagcagcgattaatagagattgctaatcacgttgacaagttttacagaccactgaacattcggatcgtgttggtaggcgtggaagtgtggaatgacatggacaaatgctctgtaagtcaggacccattcaccagcctccatgaatttctggactggaggaagatgaagcttctacctcgcaaatcccatgacaatgcgcagcttgtcagtggggtttatttccaagggaccaccatcggcatggccccaatcatgagcatgtgcacggcagaccagtctgggggaattgtcatggaccattcagacaatccccttggtgcagccgtgaccctggcacatgagctgggccacaatttcgggatgaatcatgacacactggacaggggctgtagctgtcaaatggcggttgagaaaggaggctgcatcatgaacgcttccaccgggtacccatttcccatggtgttcagcagttgcagcaggaaggacttggagaccagcctggagaaaggaatgggggtgtgcctgtttaacctgccggaagtcagggagtctttcgggggccagaagtgtgggaacagatttgtggaagaaggagaggagtgtgactgtggggagccagaggaatgtatgaatcgctgctgcaatgccaccacctgtaccctgaagccggacgctgtgtgcgcacatgggctgtgctgtgaagactgccagctgaagcctgcaggaacagcgtgcagggactccagcaactcctgtgacctcccagagttctgcacaggggccagccctcactgcccagccaacgtgtacctgcacgatgggcactcatgtcaggatgtggacggctactgctacaatggcatctgccagactcacgagcagcagtgtgtcacgctctggggaccaggtgctaaacctgcccctgggatctgctttgagagagtcaattctgcaggtgatccttatggcaactgtggcaaagtctcgaagagttcctttgccaaatgcgagatgagagatgctaaatgtggaaaaatccagtgtcaaggaggtgccagccggccagtcattggtaccaatgccgtttccatagaaacaaacatccccctgcagcaaggaggccggattctgtgccgggggacccacgtgtacttgggcgatgacatgccggacccagggcttgtgcttgcaggcacaaagtgtgcagatggaaaaatctgcctgaatcgtcaatgtcaaaatattagtgtctttggggttcacgagtgtgcaatgcagtgccacggcagaggggtgtgcaacaacaggaagaactgccactgcgaggcccactgggcacctcccttctgtgacaagtttggctttggaggaagcacagacagcggccccatccggcaagcagaagcaaggcaggaagctgcagagtccaacagggagcgcggccagggccaggagcccgtgggatcgcaggagcatgcgtctactgcctcactgacactcatctgagccctcccatgacatggagaccgtgaccagtgctgctgcagaggaggtcacgcgtccccaaggcctcctgtgactggcagcattgactctgtggctttgccatcgtttccatgacaacagacacaacacagttctcggggctcaggaggggaagtccagcctaccaggcacgtctgcagaaacagtgcaaggaagggcagcgacttcctggttgagcttctgctaaaacatggacatgcttcagtgctgctcctgagagagtagcaggttaccactctggcaggccccagccctgcagcaaggaggaagaggactcaaaagtctggcctttcactgagcctccacagcagtgggggagaagcaagggttgggcccagtgtcccctttccccagtgacacctcagccttggcagccctgatgactggtctctggctgcaacttaatgctctgatatggcttttagcatttattatatgaaaatagcagggttttagtttttaatttatcagagaccctgccacccattccatctccatccaagcaaactgaatggcaatgaaacaaactggagaagaaggtaggagaaagggcggtgaactctggctctttgctgtggacatgcgtgaccagcagtactcaggtttgagggtttgcagaaagccagggaacccacagagtcaccaacccttcatttaacaagtaagaatgttaaaaagtgaaaacaatgtaagagcctaactccatcccccgtggccattactgcataaaatagagtgcatttgaaa

SEQ ID NO: 104592 - DNA, 7938 bp, Homo sapiens
  Payload ID: 538
  Gene Symbol: ADAM12
  Gene Name: ADAM metallopeptidase domain 12
  Uniprot ID: O43184
  ENST ID: ENST00000368679
  CDS Start-End: 311-3040
cactaacgctcttcctagtccccgggccaactcggacagtttgctcatttattgcaacggtcaaggctggcttgtgccagaacggcgcgcgcgcgcgcacgcacgcacacacacggggggaaacttttttaaaaatgaaaggctagaagagctcagcggcggcgcgggcgctgcgcgagggctccggagctgactcgccgaggcaggaaatccctccggtcgcgacgcccggccccggctcggcgcccgcgtgggatggtgcagcgctcgccgccgggcccgagagctgctgcactgaaggccggcgacgatggcagcgcgcccgctgcccgtgtcccccgcccgcgccctcctgctcgccctggccggtgctctgctcgcgccctgcgaggcccgaggggtgagcttatggaaccaaggaagagctgatgaagttgtcagtgcctctgttgggagtggggacctctggatcccagtgaagagcttcgactccaagaatcatccagaagtgctgaatattcgactacaacgggaaagcaaagaactgatcataaatctggaaagaaatgaaggtctcattgccagcagtttcacggaaacccactatctgcaagacggtactgatgtctccctcgctcgaaattacacggtaattctgggtcactgttactaccatggacatgtacggggatattctgattcagcagtcagtctcagcacgtgttctggtctcaggggacttattgtgtttgaaaatgaaagctatgtcttagaaccaatgaaaagtgcaaccaacagatacaaactcttcccagcgaagaagctgaaaagcgtccggggatcatgtggatcacatcacaacacaccaaacctcgctgcaaagaatgtgtttccaccaccctctcagacatgggcaagaaggcataaaagagagaccctcaaggcaactaagtatgtggagctggtgatcgtggcagacaaccgagagtttcagaggcaaggaaaagatctggaaaaagttaagcagcgattaatagagattgctaatcacgttgacaagttttacagaccactgaacattcggatcgtgttggtaggcgtggaagtgtggaatgacatggacaaatgctctgtaagtcaggacccattcaccagcctccatgaatttctggactggaggaagatgaagcttctacctcgcaaatcccatgacaatgcgcagcttgtcagtggggtttatttccaagggaccaccatcggcatggccccaatcatgagcatgtgcacggcagaccagtctgggggaattgtcatggaccattcagacaatccccttggtgcagccgtgaccctggcacatgagctgggccacaatttcgggatgaatcatgacacactggacaggggctgtagctgtcaaatggcggttgagaaaggaggctgcatcatgaacgcttccaccgggtacccatttcccatggtgttcagcagttgcagcaggaaggacttggagaccagcctggagaaaggaatgggggtgtgcctgtttaacctgccggaagtcagggagtctttcgggggccagaagtgtgggaacagatttgtggaagaaggagaggagtgtgactgtggggagccagaggaatgtatgaatcgctgctgcaatgccaccacctgtaccctgaagccggacgctgtgtgcgcacatgggctgtgctgtgaagactgccagctgaagcctgcaggaacagcgtgcagggactccagcaactcctgtgacctcccagagttctgcacaggggccagccctcactgcccagccaacgtgtacctgcacgatgggcactcatgtcaggatgtggacggctactgctacaatggcatctgccagactcacgagcagcagtgtgtcacgctctggggaccaggtgctaaacctgcccctgggatctgctttgagagagtcaattctgcaggtgatccttatggcaactgtggcaaagtctcgaagagttcctttgccaaatgcgagatgagagatgctaaatgtggaaaaatccagtgtcaaggaggtgccagccggccagtcattggtaccaatgccgtttccatagaaacaaacatccccctgcagcaaggaggccggattctgtgccgggggacccacgtgtacttgggcgatgacatgccggacccagggcttgtgcttgcaggcacaaagtgtgcagatggaaaaatctgcctgaatcgtcaatgtcaaaatattagtgtctttggggttcacgagtgtgcaatgcagtgccacggcagaggggtgtgcaacaacaggaagaactgccactgcgaggcccactgggcacctcccttctgtgacaagtttggctttggaggaagcacagacagcggccccatccggcaagcagataaccaaggtttaaccataggaattctggtgaccatcctgtgtcttcttgctgccggatttgtggtttatctcaaaaggaagaccttgatacgactgctgtttacaaataagaagaccaccattgaaaaactaaggtgtgtgcgcccttcccggccaccccgtggcttccaaccctgtcaggctcacctcggccaccttggaaaaggcctgatgaggaagccgccagattcctacccaccgaaggacaatcccaggagattgctgcagtgtcagaatgttgacatcagcagacccctcaacggcctgaatgtccctcagccccagtcaactcagcgagtgcttcctcccctccaccgggctccacgtgcacctagcgtccctgccagacccctgccagccaagcctgcacttaggcaggcccaggggacctgtaagccaaacccccctcagaagcctctgcctgcagatcctctggccagaacaactcggctcactcatgccttggccaggaccccaggacaatgggagactgggctccgcctggcacccctcagacctgctccacaatatccacaccaagtgcccagatccacccacaccgcctatattaagtgagaagccgacaccttttttcaacagtgaagacagaagtttgcactatctttcagctccagttggagttttttgtaccaacttttaggattttttttaatgtttaaaacatcattactataagaactttgagctactgccgtcagtgctgtgctgtgctatggtgctctgtctacttgctcaggtacttgtaaattattaatttatgcagaatgttgattacagtgcagtgcgctgtagtaggcatttttaccatcactgagttttccatggcaggaaggcttgttgtgcttttagtattttagtgaacttgaaatatcctgcttgatgggattctggacaggatgtgtttgctttctgatcaaggccttattggaaagcagtcccccaactacccccagctgtgcttatggtaccagatgcagctcaagagatcccaagtagaatctcagttgattttctggattccccatctcaggccagagccaaggggcttcaggtccaggctgtgtttggctttcagggaggccctgtgccccttgacaactggcaggcaggctcccagggacacctgggagaaatctggcttctggccaggaagctttggtgagaacctgggttgcagacaggaatcttaaggtgtagccacaccaggatagagactggaacactagacaagccagaacttgaccctgagctgaccagccgtgagcatgtttggaaggggtctgtagtgtcactcaaggcggtgcttgatagaaatgccaagcacttctttttctcgctgtcctttctagagcactgccaccagtaggttatttagcttgggaaaggtggtgtttctgtaagaaacctactgcccaggcactgcaaaccgccacctccctatactgcttggagctgagcaaatcaccacaaactgtaatacaatgatcctgtattcagacagatgaggctttccatgggaccacaactattttcagatgtgaaccattaaccagatctagtcaatcaagtctgtttactgcaaggttcaacttattaacaattaggcagactctttatgcttgcaaaaactacaaccaatggaatgtgatgttcatgggtatagttcatgtctgctatcattattcgtagatattggacaaagaaccttctctatggggcatcctctttttccaacttggctgcaggaatctttaaaagatgcttttaacagagtctgaacctatttcttaaacacttgcaacctacctgttgagcatcacagaatgtgataaggaaatcaacttgcttatcaacttcctaaatattatgagatgctggcttgggcagcatccccttgaactcttcactcttcaaatgcctgactagggagccatgtttcacaaggtctttaaagtgactaatggcatgagaaatacaaaaatactcagataaggtaaaatgccatgatgcctctgtcttctggactggttttcacattagaagacaattgacaacagttacataattcactctgagtgttttatgagaaagccttcttttgggggtcaacagttttcctatgctttgaaacagaaaaatatgtaccaagaatcttggtttgccttccagaaaacaaaactgcatttcactttcccggtgttccccactgtatctaggcaacatagtattcatgactatggataaactaaacacgtgacacaaacacacacaaaagggaacccagctctaatacattccaactcgtatagcatgcatctgtttattctatagttattaagttctttaaaatgtaaagccatgctggaaaataatactgctgagatacatacagaattactgtaactgattacacttggtaattgtactaaagccaaacatatatatactattaaaaaggtttacagaattttatggtgcattacgtgggcattgtctttttagatgcccaaatccttagatctggcatgttagcccttcctccaattataagaggatatgaactgagtttttcttttgttgtttgttcttagctgtaattcctatgcttctatttcagagagccaggagagtttgatattaaaggaggttaaaactgtgatcttatgccatgtcatcaatggccacttaggggccatggctgatgacacattcttatctctacagtactaatgtgttattatagagccatgcattttatttctgaataagaacatatttaaactaatattcccttacaatatggacagtattaatccttccaagatgcagtatttatcaagtgaagcatatttagcagcaaattccattttaacataacttaggaaccaataaccagggtgttttgtggttgggggaggcacggggtggagtattcttttttatatcctcaaaacaaaaaaaatcaatacttatatttcaatggcaatctagtatttttttaaaagactgtataggcatgaataatagaggtggtttgagttttgtagggccatcacctggaaagtcaatgtgactagacacaaagtagcccagaggctacttttcttcctacagcttattatagttgtaggttctatgacctcacttcatgggttccaggcaattccgctgaaaggtttgtctcctgaaattttttaagtttgttttcctgacacatgtaatcagatgtgtagcaaccgagggaaacgaagcctaacattctccattgtggaaatacacacaggaggttacatttcacagcgtggatttttccagcttacacatgtgggatgacatcacagaaaccacaaaagcagcaaattaaactgtaggagagtcaatactcctgacgagtctcggggggggggcatttttatgccttcttaactttatgagaattctcaggctgaactataggccattgttcccaggcaaatcaatacatcaatgcatcctcaaaaaaaaaaaaaaaaaaaaaaaaccggctaaaactgtgtcaaaatgttcttaaggagcctatggtctccacggtgctaaaaagagcctggtgctgggccgactggcagggctgagcatcctcctgccccctcgccactgatgtttactaagcactctgagccaatgagacccccagcagcagaaagggcacaaggtggcgccagggcagcagggccagatctttctcatgcacctcgacctcttgcagactttcttcgtgagatgtactactcatttcaaaactgctttgcagggctcccctatgtattcggggggcccacggcacactcaggctggagatccttcctcactgcgctcaagatggcctcagccagacaccagttacccagctgaaagtcacaatccctcccagaagtctcccaacactagtgctgaccagaggtggggctctcaggctaggagtttcacacacaatgacaggctgctgggggacattgcaggaccccttttcctctcctctccatgctagaagccagccctaggcagctgcagttactccctgtgactcagcagcaggctgattcaacacagctgcccacacaaagccagtggctaatacatctgtttacctttccctatcacccagacacaagcccctttcccaggtcaaaccacaggccgatgcatctccagtttgacagtcaaatcactacttccattgctactttagatcagccaaagtggtgactgctgcagtgtgtggctatccctacaaggcccacccaagggatgcccaaagcccaaccttctccagggctgcagcccagagcaaccccaccagcctaagtccagcagaggacctcccacccaatgtcttgttctaattagaaggggaagttagccacagaaaatcaacttatctataattacaaaattctcttgactcaccttaaagttcctattgacatctactgcttttaaacctatttgaaaactctgatactaaaacaaatgacactctaagaaagtttgggagccccatgctgagaaccatttctgtgcagtgaggatgtttccagaagctacttacctacatgtgaatgtgccattttctttccttttgtagagaaaatcccctttactttttggaacagtaatggcagcttctagtacagccattacagtttcatatgagaaaaattaagaataactataaaattgttaaaatatccaataatggataatgatggccagaagatttaacatacaaagtaattctcaatgtaaagctattcagctcttccaggttgaatgccctgtaacccaccctgaccttccacatcatcttcaaaaagcagtttctctgttccccatgattctcctataaggtaactctttagtcctccatttagcacattttaaatcctccaaagaataagtatcatgtgattattttagctttacaaaaaaaaagttgaatggcgttttattttcatggcctataagcaggtaccttagtagggcagatataggaaaaacaaattagagcaaaacaaatcctctacaaatccaaggcaggaaaagtggtggcagagtgactcattctcctgtccctcccatcaggtcaaatcaggaggctgcagtgaatgcctgttctttgaatgtgtagcagttgttcctgtaactctttaaaacttggctataggctgtttagcacagtacagattaaagatacagttacgtaaacagcaaagtaattttatagtgcttcatccatttatcatgctttggtttgctaattttttcacatacctttttctatcacagtctgttgcttttgtacacatttctcatattggggttcgacaggtaaacacaaactgctatttcagtagaaaaagttattgttatgaatattaaacccaataaattgtataaaggtaaatatcaatgtg

SEQ ID NO: 104593 - DNA, 1145 bp, Homo sapiens
  Payload ID: 538
  Gene Symbol: ADAM12
  Gene Name: ADAM metallopeptidase domain 12
  ENST ID: ENST00000448723
  CDS Start-End: 311-1145
cactaacgctcttcctagtccccgggccaactcggacagtttgctcatttattgcaacggtcaaggctggcttgtgccagaacggcgcgcgcgcgcgcacgcacgcacacacacggggggaaacttttttaaaaatgaaaggctagaagagctcagcggcggcgcgggcgctgcgcgagggctccggagctgactcgccgaggcaggaaatccctccggtcgcgacgcccggccccggctcggcgcccgcgtgggatggtgcagcgctcgccgccgggcccgagagctgctgcactgaaggccggcgacgatggcagcgcgcccgctgcccgtgtcccccgcccgcgccctcctgctcgccctggccggtgctctgctcgcgccctgcgaggcccgaggggtgagcttatggaaccaaggaagagctgatgaagttgtcagtgcctctgttgggagtggggacctctggatcccagtgaagagcttcgactccaagaatcatccagaagtgctgaatattcgactacaacgggaaagcaaagaactgatcataaatctggaaagaaatgaaggtctcattgccagcagtttcacggaaacccactatctgcaagacggtactgatgtctccctcgctcgaaattacacgggtcactgttactaccatggacatgtacggggatattctgattcagcagtcagtctcagcacgtgttctggtctcaggggacttattgtgtttgaaaatgaaagctatgtcttagaaccaatgaaaagtgcaaccaacagatacaaactcttcccagcgaagaagctgaaaagcgtccggggatcatgtggatcacatcacaacacaccaaacctcgctgcaaagaatgtgtttccaccaccctctcagacatgggcaagaaggcataaaagagagaccctcaaggcaactaagtatgtggagctggtgatcgtggcagacaaccgagagtttcagaggcaaggaaaagatctggaaaaagttaagcagcgattaatagagattgctaatcacgttgacaagttttacagaccactgaacattcggatcgtgttggtaggcgtggaagtgtggaatgacatggacaaatgctctgtaagtcaggacccattcacca

SEQ ID NO: 104594 - DNA, 2799 bp, Homo sapiens
  Payload ID: 539
  Gene Symbol: ADAM15
  Gene Name: ADAM metallopeptidase domain 15
  Uniprot ID: Q13444
  ENST ID: ENST00000271836
  CDS Start-End: 82-2526
ccgaggcgacctggccgccggccgctcctccgcgcgctgttccgcacttgctgccctcgcccggcccggagcgccgctgccatgcggctggcgctgctctgggccctggggctcctgggcgcgggcagccctctgccttcctggccgctcccaaatataggtggcactgaggagcagcaggcagagtcagagaaggccccgagggagcccttggagccccaggtccttcaggacgatctcccaattagcctcaaaaaggtgcttcagaccagtctgcctgagcccctgaggatcaagttggagctggacggtgacagtcatatcctggagctgctacagaatagggagttggtcccaggccgcccaaccctggtgtggtaccagcccgatggcactcgggtggtcagtgagggacacactttggagaactgctgctaccagggaagagtgcggggatatgcaggctcctgggtgtccatctgcacctgctctgggctcagaggcttggtggtcctgaccccagagagaagctataccctggagcaggggcctggggaccttcagggtcctcccattatttcgcgaatccaagatctccacctgccaggccacacctgtgccctgagctggcgggaatctgtacacactcagaagccaccagagcaccccctgggacagcgccacattcgccggaggcgggatgtggtaacagagaccaagactgtggagttggtgattgtggctgatcactcggaggcccagaaataccgggacttccagcacctgctaaaccgcacactggaagtggccctcttgctggacacattcttccggcccctgaatgtacgagtggcactagtgggcctggaggcctggacccagcgtgacctggtggagatcagcccaaacccagctgtcaccctcgaaaacttcctccactggcgcagggcacatttgctgcctcgattgccccatgacagtgcccagctggtgactggtacttcattctctgggcctacggtgggcatggccattcagaactccatctgttctcctgacttctcaggaggtgtgaacatggaccactccaccagcatcctgggagtcgcctcctccatagcccatgagttgggccacagcctgggcctggaccatgatttgcctgggaatagctgcccctgtccaggtccagccccagccaagacctgcatcatggaggcctccacagacttcctaccaggcctgaacttcagcaactgcagccgacgggccctggagaaagccctcctggatggaatgggcagctgcctcttcgaacggctgcctagcctaccccctatggctgctttctgcggaaatatgtttgtggagccgggcgagcagtgtgactgtggcttcctggatgactgcgtcgatccctgctgtgattctttgacctgccagctgaggccaggtgcacagtgtgcatctgacggaccctgttgtcaaaattgccagctgcgcccgtctggctggcagtgtcgtcctaccagaggggattgtgacttgcctgaattctgcccaggagacagctcccagtgtccccctgatgtcagcctaggggatggcgagccctgcgctggcgggcaagctgtgtgcatgcacgggcgttgtgcctcctatgcccagcagtgccagtcactttggggacctggagcccagcccgctgcgccactttgcctccagacagctaatactcggggaaatgcttttgggagctgtgggcgcaaccccagtggcagttatgtgtcctgcacccctagagatgccatttgtgggcagctccagtgccagacaggtaggacccagcctctgctgggctccatccgggatctactctgggagacaatagatgtgaatgggactgagctgaactgcagctgggtgcacctggacctgggcagtgatgtggcccagcccctcctgactctgcctggcacagcctgtggccctggcctggtgtgtatagaccatcgatgccagcgtgtggatctcctgggggcacaggaatgtcgaagcaaatgccatggacatggggtctgtgacagcaacaggcactgctactgtgaggagggctgggcaccccctgactgcaccactcagctcaaagcaaccagctccctgaccacagggctgctcctcagcctcctggtcttattggtcctggtgatgcttggtgccagctactggtaccgtgcccgcctgcaccagcgactctgccagctcaagggacccacctgccagtacagggcagcccaatctggtccctctgaacggccaggacctccgcagagggccctgctggcacgaggcactaagtctcaggggccagccaagcccccacccccaaggaagccactgcctgccgacccccagggccggtgcccatcgggtgacctgcccggcccaggggctggaatcccgcccctagtggtaccctccagaccagcgccaccgcctccgacagtgtcctcgctctacctctgacctctccggaggttccgctgcctccaagccggacttagggcttcaagaggcgggcgtgccctctggagtcccctaccatgactgaaggcgccagagactggcggtgtcttaagactccgggcaccgccacgcgctgtcaagcaacactctgcggacctgccggcgtagttgcagcgggggcttggggaggggctgggggttggacgggattgaggaaggtccgcacagcctgtctctgctcagttgcaataaacgtgacatcttgggagcgtt

SEQ ID NO: 104595 - DNA, 2877 bp, Homo sapiens
  Payload ID: 539
  Gene Symbol: ADAM15
  Gene Name: ADAM metallopeptidase domain 15
  Uniprot ID: Q13444
  ENST ID: ENST00000355956
  CDS Start-End: 102-2621
gcgcggcgctgctgggttctccgaggcgacctggccgccggccgctcctccgcgcgctgttccgcacttgctgccctcgcccggcccggagcgccgctgccatgcggctggcgctgctctgggccctggggctcctgggcgcgggcagccctctgccttcctggccgctcccaaatataggtggcactgaggagcagcaggcagagtcagagaaggccccgagggagcccttggagccccaggtccttcaggacgatctcccaattagcctcaaaaaggtgcttcagaccagtctgcctgagcccctgaggatcaagttggagctggacggtgacagtcatatcctggagctgctacagaatagggagttggtcccaggccgcccaaccctggtgtggtaccagcccgatggcactcgggtggtcagtgagggacacactttggagaactgctgctaccagggaagagtgcggggatatgcaggctcctgggtgtccatctgcacctgctctgggctcagaggcttggtggtcctgaccccagagagaagctataccctggagcaggggcctggggaccttcagggtcctcccattatttcgcgaatccaagatctccacctgccaggccacacctgtgccctgagctggcgggaatctgtacacactcagaagccaccagagcaccccctgggacagcgccacattcgccggaggcgggatgtggtaacagagaccaagactgtggagttggtgattgtggctgatcactcggaggcccagaaataccgggacttccagcacctgctaaaccgcacactggaagtggccctcttgctggacacattcttccggcccctgaatgtacgagtggcactagtgggcctggaggcctggacccagcgtgacctggtggagatcagcccaaacccagctgtcaccctcgaaaacttcctccactggcgcagggcacatttgctgcctcgattgccccatgacagtgcccagctggtgactggtacttcattctctgggcctacggtgggcatggccattcagaactccatctgttctcctgacttctcaggaggtgtgaacatggaccactccaccagcatcctgggagtcgcctcctccatagcccatgagttgggccacagcctgggcctggaccatgatttgcctgggaatagctgcccctgtccaggtccagccccagccaagacctgcatcatggaggcctccacagacttcctaccaggcctgaacttcagcaactgcagccgacgggccctggagaaagccctcctggatggaatgggcagctgcctcttcgaacggctgcctagcctaccccctatggctgctttctgcggaaatatgtttgtggagccgggcgagcagtgtgactgtggcttcctggatgactgcgtcgatccctgctgtgattctttgacctgccagctgaggccaggtgcacagtgtgcatctgacggaccctgttgtcaaaattgccagctgcgcccgtctggctggcagtgtcgtcctaccagaggggattgtgacttgcctgaattctgcccaggagacagctcccagtgtccccctgatgtcagcctaggggatggcgagccctgcgctggcgggcaagctgtgtgcatgcacgggcgttgtgcctcctatgcccagcagtgccagtcactttggggacctggagcccagcccgctgcgccactttgcctccagacagctaatactcggggaaatgcttttgggagctgtgggcgcaaccccagtggcagttatgtgtcctgcacccctagagatgccatttgtgggcagctccagtgccagacaggtaggacccagcctctgctgggctccatccgggatctactctgggagacaatagatgtgaatgggactgagctgaactgcagctgggtgcacctggacctgggcagtgatgtggcccagcccctcctgactctgcctggcacagcctgtggccctggcctggtgtgtatagaccatcgatgccagcgtgtggatctcctgggggcacaggaatgtcgaagcaaatgccatggacatggggtctgtgacagcaacaggcactgctactgtgaggagggctgggcaccccctgactgcaccactcagctcaaagcaaccagctccctgaccacagggctgctcctcagcctcctggtcttattggtcctggtgatgcttggtgccagctactggtaccgtgcccgcctgcaccagcgactctgccagctcaagggacccacctgccagtacagggcagcccaatctggtccctctgaacggccaggacctccgcagagggccctgctggcacgaggcactaagcaggctagtgctctcagcttcccggcccccccttccaggccgctgccgcctgaccctgtgtccaagagactccagtctcaggggccagccaagcccccacccccaaggaagccactgcctgccgacccccagggccggtgcccatcgggtgacctgcccggcccaggggctggaatcccgcccctagtggtaccctccagaccagcgccaccgcctccgacagtgtcctcgctctacctctgacctctccggaggttccgctgcctccaagccggacttagggcttcaagaggcgggcgtgccctctggagtcccctaccatgactgaaggcgccagagactggcggtgtcttaagactccgggcaccgccacgcgctgtcaagcaacactctgcggacctgccggcgtagttgcagcgggggcttggggaggggctgggggttggacgggattgaggaaggtccgcacagcctgtctctgctcagttgcaataaacgt

SEQ ID NO: 104596 - DNA, 2949 bp, Homo sapiens
  Payload ID: 539
  Gene Symbol: ADAM15
  Gene Name: ADAM metallopeptidase domain 15
  Uniprot ID: Q13444
  ENST ID: ENST00000356955
  CDS Start-End: 102-2693
gcgcggcgctgctgggttctccgaggcgacctggccgccggccgctcctccgcgcgctgttccgcacttgctgccctcgcccggcccggagcgccgctgccatgcggctggcgctgctctgggccctggggctcctgggcgcgggcagccctctgccttcctggccgctcccaaatataggtggcactgaggagcagcaggcagagtcagagaaggccccgagggagcccttggagccccaggtccttcaggacgatctcccaattagcctcaaaaaggtgcttcagaccagtctgcctgagcccctgaggatcaagttggagctggacggtgacagtcatatcctggagctgctacagaatagggagttggtcccaggccgcccaaccctggtgtggtaccagcccgatggcactcgggtggtcagtgagggacacactttggagaactgctgctaccagggaagagtgcggggatatgcaggctcctgggtgtccatctgcacctgctctgggctcagaggcttggtggtcctgaccccagagagaagctataccctggagcaggggcctggggaccttcagggtcctcccattatttcgcgaatccaagatctccacctgccaggccacacctgtgccctgagctggcgggaatctgtacacactcagaagccaccagagcaccccctgggacagcgccacattcgccggaggcgggatgtggtaacagagaccaagactgtggagttggtgattgtggctgatcactcggaggcccagaaataccgggacttccagcacctgctaaaccgcacactggaagtggccctcttgctggacacattcttccggcccctgaatgtacgagtggcactagtgggcctggaggcctggacccagcgtgacctggtggagatcagcccaaacccagctgtcaccctcgaaaacttcctccactggcgcagggcacatttgctgcctcgattgccccatgacagtgcccagctggtgactggtacttcattctctgggcctacggtgggcatggccattcagaactccatctgttctcctgacttctcaggaggtgtgaacatggaccactccaccagcatcctgggagtcgcctcctccatagcccatgagttgggccacagcctgggcctggaccatgatttgcctgggaatagctgcccctgtccaggtccagccccagccaagacctgcatcatggaggcctccacagacttcctaccaggcctgaacttcagcaactgcagccgacgggccctggagaaagccctcctggatggaatgggcagctgcctcttcgaacggctgcctagcctaccccctatggctgctttctgcggaaatatgtttgtggagccgggcgagcagtgtgactgtggcttcctggatgactgcgtcgatccctgctgtgattctttgacctgccagctgaggccaggtgcacagtgtgcatctgacggaccctgttgtcaaaattgccagctgcgcccgtctggctggcagtgtcgtcctaccagaggggattgtgacttgcctgaattctgcccaggagacagctcccagtgtccccctgatgtcagcctaggggatggcgagccctgcgctggcgggcaagctgtgtgcatgcacgggcgttgtgcctcctatgcccagcagtgccagtcactttggggacctggagcccagcccgctgcgccactttgcctccagacagctaatactcggggaaatgcttttgggagctgtgggcgcaaccccagtggcagttatgtgtcctgcacccctagagatgccatttgtgggcagctccagtgccagacaggtaggacccagcctctgctgggctccatccgggatctactctgggagacaatagatgtgaatgggactgagctgaactgcagctgggtgcacctggacctgggcagtgatgtggcccagcccctcctgactctgcctggcacagcctgtggccctggcctggtgtgtatagaccatcgatgccagcgtgtggatctcctgggggcacaggaatgtcgaagcaaatgccatggacatggggtctgtgacagcaacaggcactgctactgtgaggagggctgggcaccccctgactgcaccactcagctcaaagcaaccagctccctgaccacagggctgctcctcagcctcctggtcttattggtcctggtgatgcttggtgccagctactggtaccgtgcccgcctgcaccagcgactctgccagctcaagggacccacctgccagtacagggcagcccaatctggtccctctgaacggccaggacctccgcagagggccctgctggcacgaggcactaagcaggctagtgctctcagcttcccggcccccccttccaggccgctgccgcctgaccctgtgtccaagagactccaggctgagctggctgaccgacccaatccccctacccgccctctgcccgctgacccggtggtgagaagcccgaagtctcaggggccagccaagcccccacccccaaggaagccactgcctgccgacccccagggccggtgcccatcgggtgacctgcccggcccaggggctggaatcccgcccctagtggtaccctccagaccagcgccaccgcctccgacagtgtcctcgctctacctctgacctctccggaggttccgctgcctccaagccggacttagggcttcaagaggcgggcgtgccctctggagtcccctaccatgactgaaggcgccagagactggcggtgtcttaagactccgggcaccgccacgcgctgtcaagcaacactctgcggacctgccggcgtagttgcagcgggggcttggggaggggctgggggttggacgggattgaggaaggtccgcacagcctgtctctgctcagttgcaataaacgt

SEQ ID NO: 104597 - DNA, 2874 bp, Homo sapiens
  Payload ID: 539
  Gene Symbol: ADAM15
  Gene Name: ADAM metallopeptidase domain 15
  Uniprot ID: Q13444
  ENST ID: ENST00000359280
  CDS Start-End: 102-2618
gcgcggcgctgctgggttctccgaggcgacctggccgccggccgctcctccgcgcgctgttccgcacttgctgccctcgcccggcccggagcgccgctgccatgcggctggcgctgctctgggccctggggctcctgggcgcgggcagccctctgccttcctggccgctcccaaatataggtggcactgaggagcagcaggcagagtcagagaaggccccgagggagcccttggagccccaggtccttcaggacgatctcccaattagcctcaaaaaggtgcttcagaccagtctgcctgagcccctgaggatcaagttggagctggacggtgacagtcatatcctggagctgctacagaatagggagttggtcccaggccgcccaaccctggtgtggtaccagcccgatggcactcgggtggtcagtgagggacacactttggagaactgctgctaccagggaagagtgcggggatatgcaggctcctgggtgtccatctgcacctgctctgggctcagaggcttggtggtcctgaccccagagagaagctataccctggagcaggggcctggggaccttcagggtcctcccattatttcgcgaatccaagatctccacctgccaggccacacctgtgccctgagctggcgggaatctgtacacactcagaagccaccagagcaccccctgggacagcgccacattcgccggaggcgggatgtggtaacagagaccaagactgtggagttggtgattgtggctgatcactcggaggcccagaaataccgggacttccagcacctgctaaaccgcacactggaagtggccctcttgctggacacattcttccggcccctgaatgtacgagtggcactagtgggcctggaggcctggacccagcgtgacctggtggagatcagcccaaacccagctgtcaccctcgaaaacttcctccactggcgcagggcacatttgctgcctcgattgccccatgacagtgcccagctggtgactggtacttcattctctgggcctacggtgggcatggccattcagaactccatctgttctcctgacttctcaggaggtgtgaacatggaccactccaccagcatcctgggagtcgcctcctccatagcccatgagttgggccacagcctgggcctggaccatgatttgcctgggaatagctgcccctgtccaggtccagccccagccaagacctgcatcatggaggcctccacagacttcctaccaggcctgaacttcagcaactgcagccgacgggccctggagaaagccctcctggatggaatgggcagctgcctcttcgaacggctgcctagcctaccccctatggctgctttctgcggaaatatgtttgtggagccgggcgagcagtgtgactgtggcttcctggatgactgcgtcgatccctgctgtgattctttgacctgccagctgaggccaggtgcacagtgtgcatctgacggaccctgttgtcaaaattgccagctgcgcccgtctggctggcagtgtcgtcctaccagaggggattgtgacttgcctgaattctgcccaggagacagctcccagtgtccccctgatgtcagcctaggggatggcgagccctgcgctggcgggcaagctgtgtgcatgcacgggcgttgtgcctcctatgcccagcagtgccagtcactttggggacctggagcccagcccgctgcgccactttgcctccagacagctaatactcggggaaatgcttttgggagctgtgggcgcaaccccagtggcagttatgtgtcctgcacccctagagatgccatttgtgggcagctccagtgccagacaggtaggacccagcctctgctgggctccatccgggatctactctgggagacaatagatgtgaatgggactgagctgaactgcagctgggtgcacctggacctgggcagtgatgtggcccagcccctcctgactctgcctggcacagcctgtggccctggcctggtgtgtatagaccatcgatgccagcgtgtggatctcctgggggcacaggaatgtcgaagcaaatgccatggacatggggtctgtgacagcaacaggcactgctactgtgaggagggctgggcaccccctgactgcaccactcagctcaaagcaaccagctccctgaccacagggctgctcctcagcctcctggtcttattggtcctggtgatgcttggtgccagctactggtaccgtgcccgcctgcaccagcgactctgccagctcaagggacccacctgccagtacagggcagcccaatctggtccctctgaacggccaggacctccgcagagggccctgctggcacgaggcactaaggctgagctggctgaccgacccaatccccctacccgccctctgcccgctgacccggtggtgagaagcccgaagtctcaggggccagccaagcccccacccccaaggaagccactgcctgccgacccccagggccggtgcccatcgggtgacctgcccggcccaggggctggaatcccgcccctagtggtaccctccagaccagcgccaccgcctccgacagtgtcctcgctctacctctgacctctccggaggttccgctgcctccaagccggacttagggcttcaagaggcgggcgtgccctctggagtcccctaccatgactgaaggcgccagagactggcggtgtcttaagactccgggcaccgccacgcgctgtcaagcaacactctgcggacctgccggcgtagttgcagcgggggcttggggaggggctgggggttggacgggattgaggaaggtccgcacagcctgtctctgctcagttgcaataaacgt

SEQ ID NO: 104598 - DNA, 2732 bp, Homo sapiens
  Payload ID: 539
  Gene Symbol: ADAM15
  Gene Name: ADAM metallopeptidase domain 15
  Uniprot ID: Q13444
  ENST ID: ENST00000360674
  CDS Start-End: 102-2420
gcgcggcgctgctgggttctccgaggcgacctggccgccggccgctcctccgcgcgctgttccgcacttgctgccctcgcccggcccggagcgccgctgccatgcggctggcgctgctctgggccctggggctcctgggcgcgggcagccctctgccttcctggccgctcccaaatataggtggcactgaggagcagcaggcagagtcagagaaggccccgagggagcccttggagccccaggtccttcaggacgatctcccaattagcctcaaaaaggtgcttcagaccagtctgcctgagcccctgaggatcaagttggagctggacggtgacagtcatatcctggagctgctacagaatagggagttggtcccaggccgcccaaccctggtgtggtaccagcccgatggcactcgggtggtcagtgagggacacactttggagaactgctgctaccagggaagagtgcggggatatgcaggctcctgggtgtccatctgcacctgctctgggctcagaggcttggtggtcctgaccccagagagaagctataccctggagcaggggcctggggaccttcagggtcctcccattatttcgcgaatccaagatctccacctgccaggccacacctgtgccctgagctggcgggaatctgtacacactcagaagccaccagagcaccccctgggacagcgccacattcgccggaggcgggatgtggtaacagagaccaagactgtggagttggtgattgtggctgatcactcggaggcccagaaataccgggacttccagcacctgctaaaccgcacactggaagtggccctcttgctggacacattcttccggcccctgaatgtacgagtggcactagtgggcctggaggcctggacccagcgtgacctggtggagatcagcccaaacccagctgtcaccctcgaaaacttcctccactggcgcagggcacatttgctgcctcgattgccccatgacagtgcccagctggtgactggtacttcattctctgggcctacggtgggcatggccattcagaactccatctgttctcctgacttctcaggaggtgtgaacatggaccactccaccagcatcctgggagtcgcctcctccatagcccatgagttgggccacagcctgggcctggaccatgatttgcctgggaatagctgcccctgtccaggtccagccccagccaagacctgcatcatggaggcctccacagacttcctaccaggcctgaacttcagcaactgcagccgacgggccctggagaaagccctcctggatggaatgggcagctgcctcttcgaacggctgcctagcctaccccctatggctgctttctgcggaaatatgtttgtggagccgggcgagcagtgtgactgtggcttcctggatgactgcgtcgatccctgctgtgattctttgacctgccagctgaggccaggtgcacagtgtgcatctgacggaccctgttgtcaaaattgccagctgcgcccgtctggctggcagtgtcgtcctaccagaggggattgtgacttgcctgaattctgcccaggagacagctcccagtgtccccctgatgtcagcctaggggatggcgagccctgcgctggcgggcaagctgtgtgcatgcacgggcgttgtgcctcctatgcccagcagtgccagtcactttggggacctggagcccagcccgctgcgccactttgcctccagacagctaatactcggggaaatgcttttgggagctgtgggcgcaaccccagtggcagttatgtgtcctgcacccctagagatgccatttgtgggcagctccagtgccagacaggtaggacccagcctctgctgggctccatccgggatctactctgggagacaatagatgtgaatgggactgagctgaactgcagctgggtgcacctggacctgggcagtgatgtggcccagcccctcctgactctgcctggcacagcctgtggccctggcctggtgtgtatagaccatcgatgccagcgtgtggatctcctgggggcacaggaatgtcgaagcaaatgccatggacatggggtctgtgacagcaacaggcactgctactgtgaggagggctgggcaccccctgactgcaccactcagctcaaagcaaccagctccctgaccacagggctgctcctcagcctcctggtcttattggtcctggtgatgcttggtgccagctactggtaccgtgcccgcctgcaccagcgactctgccagctcaagggacccacctgccagtacagtctcaggggccagccaagcccccacccccaaggaagccactgcctgccgacccccagggccggtgcccatcgggtgacctgcccggcccaggggctggaatcccgcccctagtggtaccctccagaccagcgccaccgcctccgacagtgtcctcgctctacctctgacctctccggaggttccgctgcctccaagccggacttagggcttcaagaggcgggcgtgccctctggagtcccctaccatgactgaaggcgccagagactggcggtgtcttaagactccgggcaccgccacgcgctgtcaagcaacactctgcggacctgccggcgtagttgcagcgggggcttggggaggggctgggggttggacgggattgaggaaggtccgcacagcctgtctctgctcagttgcaataaacgt

SEQ ID NO: 104599 - DNA, 2804 bp, Homo sapiens
  Payload ID: 539
  Gene Symbol: ADAM15
  Gene Name: ADAM metallopeptidase domain 15
  Uniprot ID: Q13444
  ENST ID: ENST00000368412
  CDS Start-End: 102-2492
gcgcggcgctgctgggttctccgaggcgacctggccgccggccgctcctccgcgcgctgttccgcacttgctgccctcgcccggcccggagcgccgctgccatgcggctggcgctgctctgggccctggggctcctgggcgcgggcagccctctgccttcctggccgctcccaaatataggtggcactgaggagcagcaggcagagtcagagaaggccccgagggagcccttggagccccaggtccttcaggacgatctcccaattagcctcaaaaaggtgcttcagaccagtctgcctgagcccctgaggatcaagttggagctggacggtgacagtcatatcctggagctgctacagaatagggagttggtcccaggccgcccaaccctggtgtggtaccagcccgatggcactcgggtggtcagtgagggacacactttggagaactgctgctaccagggaagagtgcggggatatgcaggctcctgggtgtccatctgcacctgctctgggctcagaggcttggtggtcctgaccccagagagaagctataccctggagcaggggcctggggaccttcagggtcctcccattatttcgcgaatccaagatctccacctgccaggccacacctgtgccctgagctggcgggaatctgtacacactcagaagccaccagagcaccccctgggacagcgccacattcgccggaggcgggatgtggtaacagagaccaagactgtggagttggtgattgtggctgatcactcggaggcccagaaataccgggacttccagcacctgctaaaccgcacactggaagtggccctcttgctggacacattcttccggcccctgaatgtacgagtggcactagtgggcctggaggcctggacccagcgtgacctggtggagatcagcccaaacccagctgtcaccctcgaaaacttcctccactggcgcagggcacatttgctgcctcgattgccccatgacagtgcccagctggtgactggtacttcattctctgggcctacggtgggcatggccattcagaactccatctgttctcctgacttctcaggaggtgtgaacatggaccactccaccagcatcctgggagtcgcctcctccatagcccatgagttgggccacagcctgggcctggaccatgatttgcctgggaatagctgcccctgtccaggtccagccccagccaagacctgcatcatggaggcctccacagacttcctaccaggcctgaacttcagcaactgcagccgacgggccctggagaaagccctcctggatggaatgggcagctgcctcttcgaacggctgcctagcctaccccctatggctgctttctgcggaaatatgtttgtggagccgggcgagcagtgtgactgtggcttcctggatgactgcgtcgatccctgctgtgattctttgacctgccagctgaggccaggtgcacagtgtgcatctgacggaccctgttgtcaaaattgccagctgcgcccgtctggctggcagtgtcgtcctaccagaggggattgtgacttgcctgaattctgcccaggagacagctcccagtgtccccctgatgtcagcctaggggatggcgagccctgcgctggcgggcaagctgtgtgcatgcacgggcgttgtgcctcctatgcccagcagtgccagtcactttggggacctggagcccagcccgctgcgccactttgcctccagacagctaatactcggggaaatgcttttgggagctgtgggcgcaaccccagtggcagttatgtgtcctgcacccctagagatgccatttgtgggcagctccagtgccagacaggtaggacccagcctctgctgggctccatccgggatctactctgggagacaatagatgtgaatgggactgagctgaactgcagctgggtgcacctggacctgggcagtgatgtggcccagcccctcctgactctgcctggcacagcctgtggccctggcctggtgtgtatagaccatcgatgccagcgtgtggatctcctgggggcacaggaatgtcgaagcaaatgccatggacatggggtctgtgacagcaacaggcactgctactgtgaggagggctgggcaccccctgactgcaccactcagctcaaagcaaccagctccctgaccacagggctgctcctcagcctcctggtcttattggtcctggtgatgcttggtgccagctactggtaccgtgcccgcctgcaccagcgactctgccagctcaagggacccacctgccagtacaggctagtgctctcagcttcccggcccccccttccaggccgctgccgcctgaccctgtgtccaagagactccagtctcaggggccagccaagcccccacccccaaggaagccactgcctgccgacccccagggccggtgcccatcgggtgacctgcccggcccaggggctggaatcccgcccctagtggtaccctccagaccagcgccaccgcctccgacagtgtcctcgctctacctctgacctctccggaggttccgctgcctccaagccggacttagggcttcaagaggcgggcgtgccctctggagtcccctaccatgactgaaggcgccagagactggcggtgtcttaagactccgggcaccgccacgcgctgtcaagcaacactctgcggacctgccggcgtagttgcagcgggggcttggggaggggctgggggttggacgggattgaggaaggtccgcacagcctgtctctgctcagttgcaataaacgt

SEQ ID NO: 104600 - DNA, 1901 bp, Homo sapiens
  Payload ID: 539
  Gene Symbol: ADAM15
  Gene Name: ADAM metallopeptidase domain 15
  Uniprot ID: Q13444
  ENST ID: ENST00000368413
  CDS Start-End: 72-1634
ctggccgccggccgctcctccgcgcgctgttccgcacttgctgccctcgcccggcccggagcgccgctgccatgcggctggcgctgctctgggccctggggctcctgggcgcgggcagccctctgccttcctggccgctcccaaatataggtggcactgaggagcagcaggcagagtcagagaaggccccgagggagcccttggagccccaggtccttcaggacgatctcccaattagcctcaaaaaggtgcttcagaccagtctgcctgagcccctgaggatcaagttggagctggacggtgacagtcatatcctggagctgctacagaatagggagttggtcccaggcctgaacttcagcaactgcagccgacgggccctggagaaagccctcctggatggaatgggcagctgcctcttcgaacggctgcctagcctaccccctatggctgctttctgcggaaatatgtttgtggagccgggcgagcagtgtgactgtggcttcctggatgactgcgtcgatccctgctgtgattctttgacctgccagctgaggccaggtgcacagtgtgcatctgacggaccctgttgtcaaaattgccagctgcgcccgtctggctggcagtgtcgtcctaccagaggggattgtgacttgcctgaattctgcccaggagacagctcccagtgtccccctgatgtcagcctaggggatggcgagccctgcgctggcgggcaagctgtgtgcatgcacgggcgttgtgcctcctatgcccagcagtgccagtcactttggggacctggagcccagcccgctgcgccactttgcctccagacagctaatactcggggaaatgcttttgggagctgtgggcgcaaccccagtggcagttatgtgtcctgcacccctagagatgccatttgtgggcagctccagtgccagacaggtaggacccagcctctgctgggctccatccgggatctactctgggagacaatagatgtgaatgggactgagctgaactgcagctgggtgcacctggacctgggcagtgatgtggcccagcccctcctgactctgcctggcacagcctgtggccctggcctggtgtgtatagaccatcgatgccagcgtgtggatctcctgggggcacaggaatgtcgaagcaaatgccatggacatggggtctgtgacagcaacaggcactgctactgtgaggagggctgggcaccccctgactgcaccactcagctcaaagcaaccagctccctgaccacagggctgctcctcagcctcctggtcttattggtcctggtgatgcttggtgccagctactggtaccgtgcccgcctgcaccagcgactctgccagctcaagggacccacctgccagtacagggcagcccaatctggtccctctgaacggccaggacctccgcagagggccctgctggcacgaggcactaagtctcaggggccagccaagcccccacccccaaggaagccactgcctgccgacccccagggccggtgcccatcgggtgacctgcccggcccaggggctggaatcccgcccctagtggtaccctccagaccagcgccaccgcctccgacagtgtcctcgctctacctctgacctctccggaggttccgctgcctccaagccggacttagggcttcaagaggcgggcgtgccctctggagtcccctaccatgactgaaggcgccagagactggcggtgtcttaagactccgggcaccgccacgcgctgtcaagcaacactctgcggacctgccggcgtagttgcagcgggggcttggggaggggctgggggttggacgggattgaggaaggtccgcacagcctgtctctgctcagttgcaataaacgtgacatcttggg

SEQ ID NO: 104601 - DNA, 2946 bp, Homo sapiens
  Payload ID: 539
  Gene Symbol: ADAM15
  Gene Name: ADAM metallopeptidase domain 15
  Uniprot ID: Q13444
  ENST ID: ENST00000449910
  CDS Start-End: 102-2690
gcgcggcgctgctgggttctccgaggcgacctggccgccggccgctcctccgcgcgctgttccgcacttgctgccctcgcccggcccggagcgccgctgccatgcggctggcgctgctctgggccctggggctcctgggcgcgggcagccctctgccttcctggccgctcccaaatataggtggcactgaggagcagcaggcagagtcagagaaggccccgagggagcccttggagccccaggtccttcaggacgatctcccaattagcctcaaaaaggtgcttcagaccagtctgcctgagcccctgaggatcaagttggagctggacggtgacagtcatatcctggagctgctacagaatagggagttggtcccaggccgcccaaccctggtgtggtaccagcccgatggcactcgggtggtcagtgagggacacactttggagaactgctgctaccagggaagagtgcggggatatgcaggctcctgggtgtccatctgcacctgctctgggctcagaggcttggtggtcctgaccccagagagaagctataccctggagcaggggcctggggaccttcagggtcctcccattatttcgcgaatccaagatctccacctgccaggccacacctgtgccctgagctggcgggaatctgtacacactcagaagccaccagagcaccccctgggacagcgccacattcgccggaggcgggatgtggtaacagagaccaagactgtggagttggtgattgtggctgatcactcggaggcccagaaataccgggacttccagcacctgctaaaccgcacactggaagtggccctcttgctggacacattcttccggcccctgaatgtacgagtggcactagtgggcctggaggcctggacccagcgtgacctggtggagatcagcccaaacccagctgtcaccctcgaaaacttcctccactggcgcagggcacatttgctgcctcgattgccccatgacagtgcccagctggtgactggtacttcattctctgggcctacggtgggcatggccattcagaactccatctgttctcctgacttctcaggaggtgtgaacatggaccactccaccagcatcctgggagtcgcctcctccatagcccatgagttgggccacagcctgggcctggaccatgatttgcctgggaatagctgcccctgtccaggtccagccccagccaagacctgcatcatggaggcctccacagacttcctaccaggcctgaacttcagcaactgcagccgacgggccctggagaaagccctcctggatggaatgggcagctgcctcttcgaacggctgcctagcctaccccctatggctgctttctgcggaaatatgtttgtggagccgggcgagcagtgtgactgtggcttcctggatgactgcgtcgatccctgctgtgattctttgacctgccagctgaggccaggtgcacagtgtgcatctgacggaccctgttgtcaaaattgccagctgcgcccgtctggctggcagtgtcgtcctaccagaggggattgtgacttgcctgaattctgcccaggagacagctcccagtgtccccctgatgtcagcctaggggatggcgagccctgcgctggcgggcaagctgtgtgcatgcacgggcgttgtgcctcctatgcccagcagtgccagtcactttggggacctggagcccagcccgctgcgccactttgcctccagacagctaatactcggggaaatgcttttgggagctgtgggcgcaaccccagtggcagttatgtgtcctgcacccctagagatgccatttgtgggcagctccagtgccagacaggtaggacccagcctctgctgggctccatccgggatctactctgggagacaatagatgtgaatgggactgagctgaactgcagctgggtgcacctggacctgggcagtgatgtggcccagcccctcctgactctgcctggcacagcctgtggccctggcctggtgtgtatagaccatcgatgccagcgtgtggatctcctgggggcacaggaatgtcgaagcaaatgccatggacatggggtctgtgacagcaacaggcactgctactgtgaggagggctgggcaccccctgactgcaccactcagctcaaagcaaccagctccctgaccacagggctgctcctcagcctcctggtcttattggtcctggtgatgcttggtgccagctactggtaccgtgcccgcctgcaccagcgactctgccagctcaagggacccacctgccagtacagggcagcccaatctggtccctctgaacggccaggacctccgcagagggccctgctggcacgaggcactaaggctagtgctctcagcttcccggcccccccttccaggccgctgccgcctgaccctgtgtccaagagactccaggctgagctggctgaccgacccaatccccctacccgccctctgcccgctgacccggtggtgagaagcccgaagtctcaggggccagccaagcccccacccccaaggaagccactgcctgccgacccccagggccggtgcccatcgggtgacctgcccggcccaggggctggaatcccgcccctagtggtaccctccagaccagcgccaccgcctccgacagtgtcctcgctctacctctgacctctccggaggttccgctgcctccaagccggacttagggcttcaagaggcgggcgtgccctctggagtcccctaccatgactgaaggcgccagagactggcggtgtcttaagactccgggcaccgccacgcgctgtcaagcaacactctgcggacctgccggcgtagttgcagcgggggcttggggaggggctgggggttggacgggattgaggaaggtccgcacagcctgtctctgctcagttgcaataaacgt

SEQ ID NO: 104602 - DNA, 3091 bp, Homo sapiens
  Payload ID: 539
  Gene Symbol: ADAM15
  Gene Name: ADAM metallopeptidase domain 15
  Uniprot ID: Q13444
  ENST ID: ENST00000526491
  CDS Start-End: 102-2570
gcgcggcgctgctgggttctccgaggcgacctggccgccggccgctcctccgcgcgctgttccgcacttgctgccctcgcccggcccggagcgccgctgccatgcggctggcgctgctctgggccctggggctcctgggcgcgggcagccctctgccttcctggccgctcccaaatataggtggcactgaggagcagcaggcagagtcagagaaggccccgagggagcccttggagccccaggtccttcaggacgatctcccaattagcctcaaaaaggtgcttcagaccagtctgcctgagcccctgaggatcaagttggagctggacggtgacagtcatatcctggagctgctacagaatagggagttggtcccaggccgcccaaccctggtgtggtaccagcccgatggcactcgggtggtcagtgagggacacactttggagaactgctgctaccagggaagagtgcggggatatgcaggctcctgggtgtccatctgcacctgctctgggctcagaggcttggtggtcctgaccccagagagaagctataccctggagcaggggcctggggaccttcagggtcctcccattatttcgcgaatccaagatctccacctgccaggccacacctgtgccctgagctggcgggaatctgtacacactcagaagccaccagagcaccccctgggacagcgccacattcgccggaggcgggatgtggtaacagagaccaagactgtggagttggtgattgtggctgatcactcggaggcccagaaataccgggacttccagcacctgctaaaccgcacactggaagtggccctcttgctggacacattcttccggcccctgaatgtacgagtggcactagtgggcctggaggcctggacccagcgtgacctggtggagatcagcccaaacccagctgtcaccctcgaaaacttcctccactggcgcagggcacatttgctgcctcgattgccccatgacagtgcccagctggtgactggtacttcattctctgggcctacggtgggcatggccattcagaactccatctgttctcctgacttctcaggaggtgtgaacatggaccactccaccagcatcctgggagtcgcctcctccatagcccatgagttgggccacagcctgggcctggaccatgatttgcctgggaatagctgcccctgtccaggtccagccccagccaagacctgcatcatggaggcctccacagacttcctaccaggcctgaacttcagcaactgcagccgacgggccctggagaaagccctcctggatggaatgggcagctgcctcttcgaacggctgcctagcctaccccctatggctgctttctgcggaaatatgtttgtggagccgggcgagcagtgtgactgtggcttcctggatgactgcgtcgatccctgctgtgattctttgacctgccagctgaggccaggtgcacagtgtgcatctgacggaccctgttgtcaaaattgccagctgcgcccgtctggctggcagtgtcgtcctaccagaggggattgtgacttgcctgaattctgcccaggagacagctcccagtgtccccctgatgtcagcctaggggatggcgagccctgcgctggcgggcaagctgtgtgcatgcacgggcgttgtgcctcctatgcccagcagtgccagtcactttggggacctggagcccagcccgctgcgccactttgcctccagacagctaatactcggggaaatgcttttgggagctgtgggcgcaaccccagtggcagttatgtgtcctgcacccctagagatgccatttgtgggcagctccagtgccagacaggtaggacccagcctctgctgggctccatccgggatctactctgggagacaatagatgtgaatgggactgagctgaactgcagctgggtgcacctggacctgggcagtgatgtggcccagcccctcctgactctgcctggcacagcctgtggccctggcctggtgtgtatagaccatcgatgccagcgtgtggatctcctgggggcacaggaatgtcgaagcaaatgccatggacatggggtctgtgacagcaacaggcactgctactgtgaggagggctgggcaccccctgactgcaccactcagctcaaagcaaccagctccctgaccacagggctgctcctcagcctcctggtcttattggtcctggtgatgcttggtgccagctactggtaccgtgcccgcctgcaccagcgactctgccagctcaagggacccacctgccagtacagggcagcccaatctggtccctctgaacggccaggacctccgcagagggccctgctggcacgaggcactaagcaggctagtgctctcagcttcccggcccccccttccaggccgctgccgcctgaccctgtgtccaagagactccaggctgagctggctgaccgacccaatccccctacccgccctctgcccgctgacccggtggtgagaagcccgaaggtaacggtggggggagagaagggcacggcctctccccccacctagggctgtggtgctggtagccatgacggtggtggccgtggcgagatgccccctcagtgcatgagggcacatatcccggtggtgcctttaatggtgacagtctcaggggccagccaagcccccacccccaaggaagccactgcctgccgacccccagggccggtgcccatcgggtgacctgcccggcccaggggctggaatcccgcccctagtggtaccctccagaccagcgccaccgcctccgacagtgtcctcgctctacctctgacctctccggaggttccgctgcctccaagccggacttagggcttcaagaggcgggcgtgccctctggagtcccctaccatgactgaaggcgccagagactggcggtgtcttaagactccgggcaccgccacgcgctgtcaagcaacactctgcggacctgccggcgtagttgcagcgggggcttggggaggggctgggggttggacgggattgaggaaggtccgcacagcctgtctctgctcagttgcaataaacgt

SEQ ID NO: 104603 - DNA, 2678 bp, Homo sapiens
  Payload ID: 539
  Gene Symbol: ADAM15
  Gene Name: ADAM metallopeptidase domain 15
  Uniprot ID: Q13444
  ENST ID: ENST00000531455
  CDS Start-End: 37-2511
acttgctgccctcgcccggcccggagcgccgctgccatgcggctggcgctgctctgggccctggggctcctgggcgcgggcagccctctgccttcctggccgctcccaaatatagtactgtcttggggtgtcctgggacctgcaggtggcactgaggagcagcaggcagagtcagagaaggccccgagggagcccttggagccccaggtccttcaggacgatctcccaattagcctcaaaaaggtgcttcagaccagtctgcctgagcccctgaggatcaagttggagctggacggtgacagtcatatcctggagctgctacagaatagggagttggtcccaggccgcccaaccctggtgtggtaccagcccgatggcactcgggtggtcagtgagggacacactttggagaactgctgctaccagggaagagtgcggggatatgcaggctcctgggtgtccatctgcacctgctctgggctcagaggcttggtggtcctgaccccagagagaagctataccctggagcaggggcctggggaccttcagggtcctcccattatttcgcgaatccaagatctccacctgccaggccacacctgtgccctgagctggcgggaatctgtacacactcagaagccaccagagcaccccctgggacagcgccacattcgccggaggcgggatgtggtaacagagaccaagactgtggagttggtgattgtggctgatcactcggaggcccagaaataccgggacttccagcacctgctaaaccgcacactggaagtggccctcttgctggacacattcttccggcccctgaatgtacgagtggcactagtgggcctggaggcctggacccagcgtgacctggtggagatcagcccaaacccagctgtcaccctcgaaaacttcctccactggcgcagggcacatttgctgcctcgattgccccatgacagtgcccagctggtgactggtacttcattctctgggcctacggtgggcatggccattcagaactccatctgttctcctgacttctcaggaggtgtgaacatggaccactccaccagcatcctgggagtcgcctcctccatagcccatgagttgggccacagcctgggcctggaccatgatttgcctgggaatagctgcccctgtccaggtccagccccagccaagacctgcatcatggaggcctccacagacttcctaccaggcctgaacttcagcaactgcagccgacgggccctggagaaagccctcctggatggaatgggcagctgcctcttcgaacggctgcctagcctaccccctatggctgctttctgcggaaatatgtttgtggagccgggcgagcagtgtgactgtggcttcctggatgactgcgtcgatccctgctgtgattctttgacctgccagctgaggccaggtgcacagtgtgcatctgacggaccctgttgtcaaaattgccagctgcgcccgtctggctggcagtgtcgtcctaccagaggggattgtgacttgcctgaattctgcccaggagacagctcccagtgtccccctgatgtcagcctaggggatggcgagccctgcgctggcgggcaagctgtgtgcatgcacgggcgttgtgcctcctatgcccagcagtgccagtcactttggggacctggagcccagcccgctgcgccactttgcctccagacagctaatactcggggaaatgcttttgggagctgtgggcgcaaccccagtggcagttatgtgtcctgcacccctagagatgccatttgtgggcagctccagtgccagacaggtaggacccagcctctgctgggctccatccgggatctactctgggagacaatagatgtgaatgggactgagctgaactgcagctgggtgcacctggacctgggcagtgatgtggcccagcccctcctgactctgcctggcacagcctgtggccctggcctggtgtgtatagaccatcgatgccagcgtgtggatctcctgggggcacaggaatgtcgaagcaaatgccatggacatggggtctgtgacagcaacaggcactgctactgtgaggagggctgggcaccccctgactgcaccactcagctcaaagcaaccagctccctgaccacagggctgctcctcagcctcctggtcttattggtcctggtgatgcttggtgccagctactggtaccgtgcccgcctgcaccagcgactctgccagctcaagggacccacctgccagtacagggcagcccaatctggtccctctgaacggccaggacctccgcagagggccctgctggcacgaggcactaagtctcaggggccagccaagcccccacccccaaggaagccactgcctgccgacccccagggccggtgcccatcgggtgacctgcccggcccaggggctggaatcccgcccctagtggtaccctccagaccagcgccaccgcctccgacagtgtcctcgctctacctctgacctctccggaggttccgctgcctccaagccggacttagggcttcaagaggcgggcgtgccctctggagtcccctaccatgactgaaggcgccagagactggcggtgtcttaagactccgggcaccgccacgcgctgtcaagcaacactctgcggacctgccggcgta

SEQ ID NO: 104604 - DNA, 3016 bp, Homo sapiens
  Payload ID: 539
  Gene Symbol: ADAM15
  Gene Name: ADAM metallopeptidase domain 15
  Uniprot ID: Q13444
  ENST ID: ENST00000529473
  CDS Start-End: 102-2495
gcgcggcgctgctgggttctccgaggcgacctggccgccggccgctcctccgcgcgctgttccgcacttgctgccctcgcccggcccggagcgccgctgccatgcggctggcgctgctctgggccctggggctcctgggcgcgggcagccctctgccttcctggccgctcccaaatataggtggcactgaggagcagcaggcagagtcagagaaggccccgagggagcccttggagccccaggtccttcaggacgatctcccaattagcctcaaaaaggtgcttcagaccagtctgcctgagcccctgaggatcaagttggagctggacggtgacagtcatatcctggagctgctacagaatagggagttggtcccaggccgcccaaccctggtgtggtaccagcccgatggcactcgggtggtcagtgagggacacactttggagaactgctgctaccagggaagagtgcggggatatgcaggctcctgggtgtccatctgcacctgctctgggctcagaggcttggtggtcctgaccccagagagaagctataccctggagcaggggcctggggaccttcagggtcctcccattatttcgcgaatccaagatctccacctgccaggccacacctgtgccctgagctggcgggaatctgtacacactcagaagccaccagagcaccccctgggacagcgccacattcgccggaggcgggatgtggtaacagagaccaagactgtggagttggtgattgtggctgatcactcggaggcccagaaataccgggacttccagcacctgctaaaccgcacactggaagtggccctcttgctggacacattcttccggcccctgaatgtacgagtggcactagtgggcctggaggcctggacccagcgtgacctggtggagatcagcccaaacccagctgtcaccctcgaaaacttcctccactggcgcagggcacatttgctgcctcgattgccccatgacagtgcccagctggtgactggtacttcattctctgggcctacggtgggcatggccattcagaactccatctgttctcctgacttctcaggaggtgtgaacatggaccactccaccagcatcctgggagtcgcctcctccatagcccatgagttgggccacagcctgggcctggaccatgatttgcctgggaatagctgcccctgtccaggtccagccccagccaagacctgcatcatggaggcctccacagacttcctaccaggcctgaacttcagcaactgcagccgacgggccctggagaaagccctcctggatggaatgggcagctgcctcttcgaacggctgcctagcctaccccctatggctgctttctgcggaaatatgtttgtggagccgggcgagcagtgtgactgtggcttcctggatgactgcgtcgatccctgctgtgattctttgacctgccagctgaggccaggtgcacagtgtgcatctgacggaccctgttgtcaaaattgccagctgcgcccgtctggctggcagtgtcgtcctaccagaggggattgtgacttgcctgaattctgcccaggagacagctcccagtgtccccctgatgtcagcctaggggatggcgagccctgcgctggcgggcaagctgtgtgcatgcacgggcgttgtgcctcctatgcccagcagtgccagtcactttggggacctggagcccagcccgctgcgccactttgcctccagacagctaatactcggggaaatgcttttgggagctgtgggcgcaaccccagtggcagttatgtgtcctgcacccctagagatgccatttgtgggcagctccagtgccagacaggtaggacccagcctctgctgggctccatccgggatctactctgggagacaatagatgtgaatgggactgagctgaactgcagctgggtgcacctggacctgggcagtgatgtggcccagcccctcctgactctgcctggcacagcctgtggccctggcctggtgtgtatagaccatcgatgccagcgtgtggatctcctgggggcacaggaatgtcgaagcaaatgccatggacatggggtctgtgacagcaacaggcactgctactgtgaggagggctgggcaccccctgactgcaccactcagctcaaagcaaccagctccctgaccacagggctgctcctcagcctcctggtcttattggtcctggtgatgcttggtgccagctactggtaccgtgcccgcctgcaccagcgactctgccagctcaagggacccacctgccagtacagggcagcccaatctggtccctctgaacggccaggacctccgcagagggccctgctggcacgaggcactaaggctgagctggctgaccgacccaatccccctacccgccctctgcccgctgacccggtggtgagaagcccgaaggtaacggtggggggagagaagggcacggcctctccccccacctagggctgtggtgctggtagccatgacggtggtggccgtggcgagatgccccctcagtgcatgagggcacatatcccggtggtgcctttaatggtgacagtctcaggggccagccaagcccccacccccaaggaagccactgcctgccgacccccagggccggtgcccatcgggtgacctgcccggcccaggggctggaatcccgcccctagtggtaccctccagaccagcgccaccgcctccgacagtgtcctcgctctacctctgacctctccggaggttccgctgcctccaagccggacttagggcttcaagaggcgggcgtgccctctggagtcccctaccatgactgaaggcgccagagactggcggtgtcttaagactccgggcaccgccacgcgctgtcaagcaacactctgcggacctgccggcgtagttgcagcgggggcttggggaggggctgggggttggacgggattgaggaaggtccgcacagcctgtctctgctcagttgcaataaacgt

SEQ ID NO: 104605 - DNA, 2146 bp, Homo sapiens
  Payload ID: 539
  Gene Symbol: ADAM15
  Gene Name: ADAM metallopeptidase domain 15
  Uniprot ID: Q13444
  ENST ID: ENST00000447332
  CDS Start-End: 36-1937
cttgctgccctcgcccggcccggagcgccgctgccatgcggctggcgctgctctgggccctggggctcctgggcgcgggcagccctctgccttcctggccgctcccaaatatagtctcagcatgcaatgtggaagcccctcaggtggcactgaggagcagcaggcagagtcagagaaggccccgagggagcccttggagccccaggtccttcaggacgatctcccaattagcctcaaaaaggtgcttcagggagttggtcccaggccgcccaaccctggtgtggtaccagcccgatggcactcgggtggtcagtgagggacacactttggagaactgctgctaccagggaagagtgcggggatatgcaggctcctgggtgtccatctgcacctgctctgggctcagaggcttggtggtcctgaccccagagagaagctataccctggagcaggggcctggggaccttcagggtcctcccattatttcgcgaatccaagatctccacctgccaggccacacctgtgccctgagctggcgggaatctgtacacactcagaagccaccagagcaccccctgggacagcgccacattcgccggaggcgggatgtggtaacagagaccaagactgtggagttggtgattgtggctgatcactcggaggcccagaaataccgggacttccagcacctgctaaaccgcacactggaagtggccctcttgctggacacattcttccggcccctgaatgtacgagtggcactagtgggcctggaggcctggacccagcgtgacctggtggagatcagcccaaacccagctgtcaccctcgaaaacttcctccactggcgcagggcacatttgctgcctcgattgccccatgacagtgcccagctggtgactggtacttcattctctgggcctacggtgggcatggccattcagaactccatctgttctcctgacttctcaggaggtgtgaacatggaccactccaccagcatcctgggagtcgcctcctccatagcccatgagttgggccacagcctgggcctggaccatgatttgcctgggaatagctgcccctgtccaggtccagccccagccaagacctgcatcatggaggcctccacagacttcctaccaggcctgaacttcagcaactgcagccgacgggccctggagaaagccctcctggatggaatgggcagctgcctcttcgaacggctgcctagcctaccccctatggctgctttctgcggaaatatgtttgtggagccgggcgagcagtgtgactgtggcttcctggatgactgcgtcgatccctgctgtgattctttgacctgccagctgaggccaggtgcacagtgtgcatctgacggaccctgttgtcaaaattgccagctgcgcccgtctggctggcagtgtcgtcctaccagaggggattgtgacttgcctgaattctgcccaggagacagctcccagtgtccccctgatgtcagcctaggggatggcgagccctgcgctggcgggcaagctgtgtgcatgcacgggcgttgtgcctcctatgcccagcagtgccagtcactttggggacctggagcccagcccgctgcgccactttgcctccagacagctaatactcggggaaatgcttttgggagctgtgggcgcaaccccagtggcagttatgtgtcctgcacccctagagatgccatttgtgggcagctccagtgccagacaggtaggacccagcctctgctgggctccatccgggatctactctgggagacaatagatgtgaatgggactgagctgaactgcagctgggtgcacctggacctgggcagtgatgtggcccagcccctcctgactctgcctggcacagcctgtggccctggcctggtgagcagcctgggtgggcaagaccaggtgtgagaagggacatttggaccacaatgaacagagcccagacttcaccattcaccaatgtcaaaggcagggactccaagggaagtcagtttcttacttcagatggagcaaagtcctatcaactcactatgccttggtttccccatctgtaaacgcagggtatggcctcaaccttattggcctcccagtcccattaaagctttgtgggaatctga

SEQ ID NO: 104606 - DNA, 4349 bp, Homo sapiens
  Payload ID: 540
  Gene Symbol: ADAM17
  Gene Name: ADAM metallopeptidase domain 17
  Uniprot ID: P78536
  ENST ID: ENST00000310823
  CDS Start-End: 184-2658
acctgcacttctgggggcgtcgagcctggcggtagaatcttcccagtaggcggcgcgggagggaaaagaggattgaggggctaggccgggcggatcccgtcctcccccgatgtgagcagttttccgaaaccccgtcaggcgaaggctgcccagagaggtggagtcggtagcggggccgggaacatgaggcagtctctcctattcctgaccagcgtggttcctttcgtgctggcgccgcgacctccggatgacccgggcttcggcccccaccagagactcgagaagcttgattctttgctctcagactacgatattctctctttatctaatatccagcagcattcggtaagaaaaagagatctacagacttcaacacatgtagaaacactactaactttttcagctttgaaaaggcattttaaattatacctgacatcaagtactgaacgtttttcacaaaatttcaaggtcgtggtggtggatggtaaaaacgaaagcgagtacactgtaaaatggcaggacttcttcactggacacgtggttggtgagcctgactctagggttctagcccacataagagatgatgatgttataatcagaatcaacacagatggggccgaatataacatagagccactttggagatttgttaatgataccaaagacaaaagaatgttagtttataaatctgaagatatcaagaatgtttcacgtttgcagtctccaaaagtgtgtggttatttaaaagtggataatgaagagttgctcccaaaagggttagtagacagagaaccacctgaagagcttgttcatcgagtgaaaagaagagctgacccagatcccatgaagaacacgtgtaaattattggtggtagcagatcatcgcttctacagatacatgggcagaggggaagagagtacaactacaaattacttaatagagctaattgacagagttgatgacatctatcggaacacttcatgggataatgcaggttttaaaggctatggaatacagatagagcagattcgcattctcaagtctccacaagaggtaaaacctggtgaaaagcactacaacatggcaaaaagttacccaaatgaagaaaaggatgcttgggatgtgaagatgttgctagagcaatttagctttgatatagctgaggaagcatctaaagtttgcttggcacaccttttcacataccaagattttgatatgggaactcttggattagcttatgttggctctcccagagcaaacagccatggaggtgtttgtccaaaggcttattatagcccagttgggaagaaaaatatctatttgaatagtggtttgacgagcacaaagaattatggtaaaaccatccttacaaaggaagctgacctggttacaactcatgaattgggacataattttggagcagaacatgatccggatggtctagcagaatgtgccccgaatgaggaccagggagggaaatatgtcatgtatcccatagctgtgagtggcgatcacgagaacaataagatgttttcaaactgcagtaaacaatcaatctataagaccattgaaagtaaggcccaggagtgttttcaagaacgcagcaataaagtttgtgggaactcgagggtggatgaaggagaagagtgtgatcctggcatcatgtatctgaacaacgacacctgctgcaacagcgactgcacgttgaaggaaggtgtccagtgcagtgacaggaacagtccttgctgtaaaaactgtcagtttgagactgcccagaagaagtgccaggaggcgattaatgctacttgcaaaggcgtgtcctactgcacaggtaatagcagtgagtgcccgcctccaggaaatgctgaagatgacactgtttgcttggatcttggcaagtgtaaggatgggaaatgcatccctttctgcgagagggaacagcagctggagtcctgtgcatgtaatgaaactgacaactcctgcaaggtgtgctgcagggacctttctggccgctgtgtgccctatgtcgatgctgaacaaaagaacttatttttgaggaaaggaaagccctgtacagtaggattttgtgacatgaatggcaaatgtgagaaacgagtacaggatgtaattgaacgattttgggatttcattgaccagctgagcatcaatacttttggaaagtttttagcagacaacatcgttgggtctgtcctggttttctccttgatattttggattcctttcagcattcttgtccattgtgtggataagaaattggataaacagtatgaatctctgtctctgtttcaccccagtaacgtcgaaatgctgagcagcatggattctgcatcggttcgcattatcaaaccctttcctgcgccccagactccaggccgcctgcagcctgcccctgtgatcccttcggcgccagcagctccaaaactggaccaccagagaatggacaccatccaggaagaccccagcacagactcacatatggacgaggatgggtttgagaaggaccccttcccaaatagcagcacagctgccaagtcatttgaggatctcacggaccatccggtcaccagaagtgaaaaggctgcctcctttaaactgcagcgtcagaatcgtgttgacagcaaagaaacagagtgctaatttagttctcagctcttctgacttaagtgtgcaaaatatttttatagatttgacctacaaatcaatcacagcttgtattttgtgaagactgggaagtgacttagcagatgctggtcatgtgtttgaacttcctgcaggtaaacagttcttgtgtggtttggcccttctccttttgaaaaggtaaggtgaaggtgaatctagcttattttgaggctttcaggttttagtttttaaaatatcttttgacctgtggtgcaaaagcagaaaatacagctggattgggttatgaatatttacgtttttgtaaattaatcttttatattgataacagcactgactagggaaatgatcagtttttttttatacactgtaatgaaccgctgaatatgaggcatttggcatttatttgtgatgacaactggaatagttttttttttttttttttttttttgccttcaactaaaaacaaaggagataaatctagtatacattgtctctaaattgtgggtctatttctagttattacccagagtttttatgtagcagggaaaatatatatctaaatttagaaatcatttgggttaatatggctcttcataattctaagactaatgctctctagaaacctaaccacctaccttacagtgagggctatacatggtagccagttgaatttatggaatctaccaactgtttagggccctgatttgctgggcagtttttctgtattttataagtatcttcatgtatccctgttactgatagggatacatgctcttagaaaattcactattggctgggagtggtggctcatgcctgtaatcccagcacttggagaggctgaggttgcgccactacactccagcctgggtgacagagtgagactctgcctcaaaaaaaaaaaaaaaaaaaaaaaattcactatctacaaacctagaatatttaaaatacaaagattgcctgttttcaaacactattgaataagagggtgagatatttcttaacaacaacaacaacaaaaaaaacaggttgttttgaatgtgatgagccagccaggagatagaatactacctgcccttagggttgggggctgtccccacaagacttgatacttcagaaaccctttttattgacccacaagcagatatttgaattacttcttactttattgctccaggattctggatgggctgcatttactgtgtgaaggataaaaatcattagcctggattctgatttctataaattgccattaaaagctttttttcccctaagaactgaaatgtgctcaccagccaaaacattttaacttgtaaattttgagggcagttaaccaaacctgtgactaatcatatctcctcctaccccccatttccaaggacatttgttactcagatacttgttatactaatacttgaacttgtaccttatggtatttgctatcttttaactagtcatgatattcttatactttagttacacttttggaatttgatacaaggttgagtggggtgtgtgggtgtatgtatgagtgaaacagttctcaaaagaatgtaagaaaaaccatttttataaaattgtgactttttaaaaacatagtctttgtcatttatagaattaacaagctgctcagggtatattttatagctgtagcactgatatctgcattaataaatactgtcgaaacacaa

SEQ ID NO: 104607 - DNA, 1873 bp, Homo sapiens
  Payload ID: 540
  Gene Symbol: ADAM17
  Gene Name: ADAM metallopeptidase domain 17
  ENST ID: ENST00000497134
  CDS Start-End: 188-1045
cgccacctgcacttctgggggcgtcgagcctggcggtagaatcttcccagtaggcggcgcgggagggaaaagaggattgaggggctaggccgggcggatcccgtcctcccccgatgtgagcagttttccgaaaccccgtcaggcgaaggctgcccagagaggtggagtcggtagcggggccgggaacatgaggcagtctctcctattcctgaccagcgtggttcctttcgtgctggcgccgcgacctccggatgacccgggcttcggcccccaccagagactcgagaagcttgattctttgctctcagactacgatattctctctttatctaatatccagcagcattcggtaagaaaaagagatctacagacttcaacacatgtagaaacactactaactttttcagctttgaaaaggcattttaaattatacctgacatcaagtactgaacgtttttcacaaaatttcaaggtcgtggtggtggatggtaaaaacgaaagcgagtacactgtaaaatggcaggacttcttcactggacacgtggttggtgagcctgactctagggttctagcccacataagagatgatgatgttataatcagaatcaacacagatggggccgaatataacatagagccactttggagatttgttaatgataccaaagacaaaagaatgttagtttataaatctgaagatatcaagaatgtttcacgtttgcagtctccaaaagtgtgtggttatttaaaagtggataatgaagagttgctcccaaaagggttagtagacagagaaccacctgaagagcttgttcatcgagtgaaaagaagagctgacccagatcccatgaagaacacgtgtaaattattggtggtagcagatcatcgcttctacagatacatgggcagaggggaagagagtacaactacaaattacttaatagagctaattgacagagttgatgacatctatcggaacacttcatgggataatgcaggttttaaaggctatggaatacagatagagcagttattatttgaataggtaacatgtacacagtacaaaagccagtgaaaagtaagtctctgcagcctgtttattgtcaaaccagttcctttccccaaagacattcatgtcactagtttcatatgtatctttctagagatgtcgtatgcaggtatagtgtatgtatatgtctgtatttgacacaacggtgctatgcagtacacttttacaccttgctttttcatttcacagtatgttggagagtacttcatgttcatgcatgtaaagctgcttcacttgttttattataaatagctgcatcatgtttgagtttcagggaacctgtaaattttctttttgctttaggcatttggaaccagtcgaagaaacaggaataatataggagattaaaacattaacttctttacatctgatgaaggatggattggagggtgtggtttagatgtgtatcatggtgggcttctaagtagttctatcccagatttgaccttgaccagccaccatcaaaactgcagagtccaccccagtaaacttaccacacagtggcagaggagaccagaatgggccttctctgcaggcaggcaggcaggcaggcaggcagagagactcacagaaactctgagctgagcatggtttccttctttatctcacacttactaatgggagcctttgttacttttttttttcttctttgcaggtttaatatgaatttgtctgaaatgcctgtataaggagaagactctattcttagccttttattcctttgatgcacaaagagatgtatattttattattctttcctgagttgtcgactgtagtcgtaataaatattttaggctcctgtaa

SEQ ID NO: 104608 - DNA, 1881 bp, Homo sapiens
  Payload ID: 540
  Gene Symbol: ADAM17
  Gene Name: ADAM metallopeptidase domain 17
  ENST ID: ENST00000618923
  CDS Start-End: 188-964
cgccacctgcacttctgggggcgtcgagcctggcggtagaatcttcccagtaggcggcgcgggagggaaaagaggattgaggggctaggccgggcggatcccgtcctcccccgatgtgagcagttttccgaaaccccgtcaggcgaaggctgcccagagaggtggagtcggtagcggggccgggaacatgaggcagtctctcctattcctgaccagcgtggttcctttcgtgctggcgccgcgacctccggatgacccgggcttcggcccccaccagagactcgagaagcttgattctttgctctcagactacgatattctctctttatctaatatccagcagcattcggtaagaaaaagagatctacagacttcaacacatgtagaaacactactaactttttcagctttgaaaaggcattttaaattatacctgacatcaagtactgaacgtttttcacaaaatttcaaggtcgtggtggtggatggtaaaaacgaaagcgagtacactgtaaaatggcaggacttcttcactggacacgtggttggtgagcctgactctagggttctagcccacataagagatgatgatgttataatcagaatcaacacagatggggccgaatataacatagagccactttggagatttgttaatgataccaaagacaaaagaatgttagtttataaatctgaagatatcaagaatgtttcacgtttgcagtctccaaaagtgtgtggttatttaaaagtggataatgaagagttgctcccaaaagggttagtagacagagaaccacctgaagagcttgttcatcgagtgaaaagaagagctgacccagatcccatgaagaacacgtgtaaattattggtggtagcagatcatcgcttctacagatacatgggcagaggggaagagagtacaactacaaattacttaatacacacagatagagctaattgacagagttgatgacatctatcggaacacttcatgggataatgcaggttttaaaggctatggaatacagatagagcagttattatttgaataggtaacatgtacacagtacaaaagccagtgaaaagtaagtctctgcagcctgtttattgtcaaaccagttcctttccccaaagacattcatgtcactagtttcatatgtatctttctagagatgtcgtatgcaggtatagtgtatgtatatgtctgtatttgacacaacggtgctatgcagtacacttttacaccttgctttttcatttcacagtatgttggagagtacttcatgttcatgcatgtaaagctgcttcacttgttttattataaatagctgcatcatgtttgagtttcagggaacctgtaaattttctttttgctttaggcatttggaaccagtcgaagaaacaggaataatataggagattaaaacattaacttctttacatctgatgaaggatggattggagggtgtggtttagatgtgtatcatggtgggcttctaagtagttctatcccagatttgaccttgaccagccaccatcaaaactgcagagtccaccccagtaaacttaccacacagtggcagaggagaccagaatgggccttctctgcaggcaggcaggcaggcaggcaggcagagagactcacagaaactctgagctgagcatggtttccttctttatctcacacttactaatgggagcctttgttacttttttttttcttctttgcaggtttaatatgaatttgtctgaaatgcctgtataaggagaagactctattcttagccttttattcctttgatgcacaaagagatgtatattttattattctttcctgagttgtcgactgtagtcgtaataaatattttaggctcctgt

SEQ ID NO: 104609 - DNA, 2388 bp, Homo sapiens
  Payload ID: 541
  Gene Symbol: ADAM18
  Gene Name: ADAM metallopeptidase domain 18
  Uniprot ID: Q9Y3Q7
  ENST ID: ENST00000265707
  CDS Start-End: 46-2265
aacggtctctgtccttggctgtggctcctgcgctctggctgagccatgttccttctcctcgccctcctcactgagcttggaagactgcaagcccacgaaggttctgaaggaatatttctgcatgtcacagttccacggaagattaagtcaaatgacagtgaagtttcagagaggaagatgatttacatcattacaattgatggacaaccttacactctacatctcggaaaacaatcattcttaccccagaactttttggtttatacatataatgaaactggatctttgcattctgtgtctccatattttatgatgcattgccattaccaaggatatgctgccgaatttccaaattcatttgtgacactcagtatatgttctggtctcaggggatttctccagtttgaaaatatcagttatggaattgaaccagtagaatcttcagcaagatttgagcatataatttatcaaatgaaaaataatgatccaaatgtatccattttagcagtaaattacagtcatatttggcagaaagaccagccctacaaagttcctttaaactcacagataaaaaatctttcaaaactattaccccaatatctggaaatatacattatagtggaaaaagctttgtatgattatatgggatctgaaatgatggctgtaacacaaaaaattgtccaggttattgggcttgtcaacactatgtttacccagttcaaattgactgttatactgtcttccttggaattgtggtcaaatgaaaaccagatttccaccagtggggatgctgatgatatattacaaagatttttggcatggaaacgggactatctcatcctacggccccatgacatagcatacttacttgtttacaggaaacatcctaaatatgtgggagcaacatttcctggcactgtatgcaataaaagctatgatgcaggtattgctatgtatccagatgcaataggtttggagggattttcggttattatagctcaactgcttggccttaatgtaggattaacatatgatgacatcactcagtgtttctgtctgagagctacatgcatcatgaatcatgaagcagtgagtgccagtggtagaaagatttttagcaactgcagcatgcacgactatagatattttgtttcaaaatttgagactaaatgccttcagaagctttcaaatttgcaaccattacatcaaaatcaaccagtgtgtggtaatgggattttggaatccaatgaagaatgtgactgtggtaataaaaatgaatgtcaatttaagaagtgctgtgattataacacatgtaaactgaagggctcagtaaaatgtggttctggaccatgttgtacatcaaagtgtgagttgtcaatagcaggcactccatgtagaaagagtattgatccagagtgtgattttacagagtactgcaatggaacctctagtaattgtgttcctgacacttatgcattgaatggccgtttgtgcaagttgggaactgcctattgctataacggacaatgtcaaactactgataaccagtgtgccaagatatttggaaaaggtgctcaaggtgctccatttgcctgttttaaagaagttaattctctgcatgaaagatctgaaaactgtggttttaaaaattcacaaccattaccttgtgaacggaaggatgttctctgtggaaaattagcttgtgttcagccacataaaaatgctaataaaagtgacgctcaatctacagtttattcatatattcaagaccatgtatgtgtatctatagccactggttcctccatgagatcagatggaacagacaatgcctatgtggctgatggcaccatgtgtggtccagaaatgtactgtgtaaataaaacctgcagaaaagttcatttaatgggatataactgtaatgccaccacaaaatgcaaagggaaagggatatgtaataattttggtaattgtcaatgcttccctggacatagacctccagattgtaaattccagtttggttccccagggggtagtattgatgatggaaattttcagaaatctggtgacttttatactgaaaaaggctacaatacacactggaacaactggtttattctgagtttctgcatttttctgccgtttttcatagttttcaccactgtgatctttaaaagaaatgaaataagtaaatcatgtaacagagagaatgcagagtataatcgtaattcatccgttgtatcagaaagcgatgacgtgggacattaatattgcacagaacttccatagcaaataacctaaaggaacgaatgtgctttatttataaccttacgttatccccaatgcattgtaaatgtcaaacttttggaaaataaagcctgcgtgccctcc

SEQ ID NO: 104610 - DNA, 2314 bp, Homo sapiens
  Payload ID: 541
  Gene Symbol: ADAM18
  Gene Name: ADAM metallopeptidase domain 18
  Uniprot ID: Q9Y3Q7
  ENST ID: ENST00000379866
  CDS Start-End: 43-2190
ggtctctgtccttggctgtggctcctgcgctctggctgagccatgttccttctcctcgccctcctcactgagcttggaagactgcaagcccacgaaggttctgaaggaatatttctgcatgtcacagttccacggaagattaagtcaaatgacagtgaagtttcagagaggaagatgatttacatcattacaattgatggacaaccttacactctacatctcggaaaacaatcattcttaccccagaactttttggtttatacatataatgaaactggatctttgcattctgtgtctccatattttatgatgcattgccattaccaaggatatgctgccgaatttccaaattcatttgtgacactcagtatatgttctggtctcaggggatttctccagtttgaaaatatcagttatggaattgaaccagtagaatcttcagcaagatttgagcatataatttatcaaatgaaaaataatgatccaaatgtatccattttagcagtaaattacagtcatatttggcagaaagaccagccctacaaagttcctttaaactcacagataaaaaatctttcaaaactattaccccaatatctggaaatatacattatagtggaaaaagctttgatgtttacccagttcaaattgactgttatactgtcttccttggaattgtggtcaaatgaaaaccagatttccaccagtggggatgctgatgatatattacaaagatttttggcatggaaacgggactatctcatcctacggccccatgacatagcatacttacttgtttacaggaaacatcctaaatatgtgggagcaacatttcctggcactgtatgcaataaaagctatgatgcaggtattgctatgtatccagatgcaataggtttggagggattttcggttattatagctcaactgcttggccttaatgtaggattaacatatgatgacatcactcagtgtttctgtctgagagctacatgcatcatgaatcatgaagcagtgagtgccagtggtagaaagatttttagcaactgcagcatgcacgactatagatattttgtttcaaaatttgagactaaatgccttcagaagctttcaaatttgcaaccattacatcaaaatcaaccagtgtgtggtaatgggattttggaatccaatgaagaatgtgactgtggtaataaaaatgaatgtcaatttaagaagtgctgtgattataacacatgtaaactgaagggctcagtaaaatgtggttctggaccatgttgtacatcaaagtgtgagttgtcaatagcaggcactccatgtagaaagagtattgatccagagtgtgattttacagagtactgcaatggaacctctagtaattgtgttcctgacacttatgcattgaatggccgtttgtgcaagttgggaactgcctattgctataacggacaatgtcaaactactgataaccagtgtgccaagatatttggaaaaggtgctcaaggtgctccatttgcctgttttaaagaagttaattctctgcatgaaagatctgaaaactgtggttttaaaaattcacaaccattaccttgtgaacggaaggatgttctctgtggaaaattagcttgtgttcagccacataaaaatgctaataaaagtgacgctcaatctacagtttattcatatattcaagaccatgtatgtgtatctatagccactggttcctccatgagatcagatggaacagacaatgcctatgtggctgatggcaccatgtgtggtccagaaatgtactgtgtaaataaaacctgcagaaaagttcatttaatgggatataactgtaatgccaccacaaaatgcaaagggaaagggatatgtaataattttggtaattgtcaatgcttccctggacatagacctccagattgtaaattccagtttggttccccagggggtagtattgatgatggaaattttcagaaatctggtgacttttatactgaaaaaggctacaatacacactggaacaactggtttattctgagtttctgcatttttctgccgtttttcatagttttcaccactgtgatctttaaaagaaatgaaataagtaaatcatgtaacagagagaatgcagagtataatcgtaattcatccgttgtatcagaaagcgatgacgtgggacattaatattgcacagaacttccatagcaaataacctaaaggaacgaatgtgctttatttataaccttacgttatccccaatgcattgtaaatgtcaaacttttggaaaataaagcctgcgtgccctccc

SEQ ID NO: 104611 - DNA, 1886 bp, Homo sapiens
  Payload ID: 541
  Gene Symbol: ADAM18
  Gene Name: ADAM metallopeptidase domain 18
  ENST ID: ENST00000520087
  CDS Start-End: 1-348
atgttccttctcctcgccctcctcactgagcttggaagactgcaagcccacgaaggttctgaaggaatatttctgcatgtcacagttccacggaagattaagtcaaatgacagtgaagtttcagagaggaagatgatttacatcattacaattgatggacaaccttacactctacatctcggaaaacaatcattcttaccccagaactttttggtttatacatataatgaaactggatctttgcattctgtgtctccatattttatgatgcattgccattaccaaggatatgctgccgaatttccaaattcatttgtgacactcagtatatgttctggtctcagataaaaaatctttcaaaactattaccccaatatctggaaatatacattatagtggaaaaagctttgtatgattatatgggatctgaaatgatggctgtaacacaaaaaattgtccaggttattgggcttgtcaacactatgtttacccagttcaaattgactgttatactgtcttccttggaattgtggtcaaatgaaaaccagatttccaccagtggggatgctgatgatatattacaaagatttttggcatggaaacgggactatctcatcctacggccccatgacatagcatacttacttgtttacaggaaacatcctaaatatgtgggagcaacatttcctggcactgtatgcaataaaagctatgatgcaggtattgctatgtatccagatgcaataggtttggagggattttcggttattatagctcaactgcttggccttaatgtaggattaacatatgatgacatcactcagtgtttctgtctgagagctacatgcatcatgaatcatgaagcagtgaatgtcaatttaagaagtgctgtgattataacacatgtaaactgaagggctcagtaaaatgtggttctggaccatgttgtacatcaaagtgtgagttgtcaatagcaggcactccatgtagaaagagtattgatccagagtgtgattttacagagtactgcaatggaacctctagtaattgtgttcctgacacttatgcattgaatggccgtttgtgcaagttgggaactgcctattgctataacggacaatgtcaaactactgataaccagtgtgccaagatatttggaaaaggtgctcaaggtgctccatttgcctgttttaaagaagttaattctctgcatgaaagatctgaaaactgtggttttaaaaattcacaaccattaccttgtgaacggaaggatgttctctgtggaaaattagcttgtgttcagccacataaaaatgctaataaaagtgacgctcaatctacagtttattcatatattcaagaccatgtatgtgtatctatagccactggttcctccatgagatcagatggaacagacaatgcctatgtggctgatggcaccatgtgtggtccagaaatgtactgtgtaaataaaacctgcagaaaagttcatttaatgggatataactgtaatgccaccacaaaatgcaaagggaaagggatatgtaataattttggtaattgtcaatgcttccctggacatagacctccagattgtaaattccagtttggttccccagggggtagtattgatgatggaaattttcagaaatctggtgacttttatactgaaaaaggctacaatacacactggaacaactggtttattctgagtttctgcatttttctgccgtttttcatagttttcaccactgtgatctttaaaagaaatgaaataagtaaatcatgtaacagagagaatgcagagtataatcgtaattcatccgttgtatcagaaagcgatgacgtgggacattaatattgcacagaacttccatagcaaataa

SEQ ID NO: 104612 - DNA, 728 bp, Homo sapiens
  Payload ID: 541
  Gene Symbol: ADAM18
  Gene Name: ADAM metallopeptidase domain 18
  ENST ID: ENST00000520001
  CDS Start-End: 135-323
ctcacccccagggtcctggggcagcacagggtcctccctggcccaggcgcccggtggccgagagcctgcccgcgagctcaacgctgctcaacggtctctgtccttggctgtggctcctgcgctctggctgagccatgttccttctcctcgccctcctcactgagcttggaagactgcaagcccacgaaggttctgaaggaatatttctgcatgtcacagttccacggaagattaagtcaaatgacagtgaagtttcagagaggaaggtttttggggagcaggtggtatttggttacatgaatgatttacatcattacaattgatggacaaccttacactctacatctcggaaaacaatcattcttaccccagaactttttggtttatacatataatgaaactggatctttgcattctgtgtctccatattttatgatgcattgccattaccaaggatatgctgccgaatttccaaattcatttgtgacactcagtatatgttctggtctcaggggatttctccagtttgaaaatatcagttatggaattgaaccagtagaatcttcagcaagatttgagcatataatttatcaaatgaaaaataatgatccaaatgtatccattttagcagtaaattacagtcatatttggcagaaagaccagccctacaaagttcctttaaactcacaggtgactgtcatcattctgatgttatgacatactagaac

SEQ ID NO: 104613 - DNA, 1429 bp, Homo sapiens
  Payload ID: 541
  Gene Symbol: ADAM18
  Gene Name: ADAM metallopeptidase domain 18
  Uniprot ID: Q9Y3Q7
  ENST ID: ENST00000520772
  CDS Start-End: 39-587
tctgtccttggctgtggctcctgcgctctggctgagccatgttccttctcctcgccctcctcactgagcttggaagactgcaagcccacgaaggttctgaaggaatatttctgcatgtcacagttccacggaagattaagtcaaatgacagtgaagtttcagagaggaagatgatttacatcattacaattgatggacaaccttacactctacatctcggaaaacaatcattcttaccccagaactttttggtttatacatataatgaaactggatctttgcattctgtgtctccatattttatgatgcattgccattaccaaggatatgctgccgaatttccaaattcatttgtgacactcagtatatgttctggtctcaggggatttctccagtttgaaaatatcagttatggaattgaaccagtagaatcttcagcaagatttgagcatataatttatcaaatgaaaaataatgatccaaatgtatccattttagcagtaaattacagtcatatttggcagaaagaccagccctacaaagttcctttaaactcacaggtgactgtcatcattctgatgttatgacatactagaacattgcctgtgtagttttcttgtaaatcatgaaaggaatttagttagctgttgagtaggaatattaaattttatgtatttttctacctttaaataaaacattgaaacttcatctaaaatatttggaaagttacatatttcaagcttaatattttatgatgtattatgtaacattaatttttatatttttttcaaacaaaatgatactattgaaaaagtttagaaatgcagaaagaacagagtcactgttattctagtaccttggtaaaattacttttaatattttgttatatatcttacatactacctgaacatatctttctaaaatgcacagccatttgcatgttgccagatgctcttaatttgctggtagactaggtatagaattcttgctggcagtttctttctttcagcactttgaatatttcaatccatcaccatgtggcctctgttttttctgataaaaatattctattattcttattgggaattccttggacaaaatgagttgcttctcttttgtttcttttgagattcttcctttgcctttgtcttatggcagtgtgcttatcatgtttctatgaatggatctctttgtgtttaccatacttggagctcaaagcacttcttgggtctgtaaatggatgtgttttgaaattaaattagcttgtgtgaatcctgaaaaaaaaaatcccatgaagctatgaaaccaactatctgtatggttcctagagacttcacacttttattctactttaaaatttgtctcgattttgtagttcattattgccaaaagtatttactgggataaataaaaaaagcattcttctcgg

SEQ ID NO: 104614 - DNA, 2388 bp, Homo sapiens
  Payload ID: 541
  Gene Symbol: ADAM18
  Gene Name: ADAM metallopeptidase domain 18
  Uniprot ID: Q9Y3Q7
  ENST ID: ENST00000613609
  CDS Start-End: 46-2265
aacggtctctgtccttggctgtggctcctgcgctctggctgagccatgttccttctcctcgccctcctcactgagcttggaagactgcaagcccacgaaggttctgaaggaatatttctgcatgtcacagttccacggaagattaagtcaaatgacagtgaagtttcagagaggaagatgatttacatcattacaattgatggacaaccttacactctacatctcggaaaacaatcattcttaccccagaactttttggtttatacatataatgaaactggatctttgcattctgtgtctccatattttatgatgcattgccattaccaaggatatgctgccgaatttccaaattcatttgtgacactcagtatatgttctggtctcaggggatttctccagtttgaaaatatcagttatggaattgaaccagtagaatcttcagcaagatttgagcatataatttatcaaatgaaaaataatgatccaaatgtatccattttagcagtaaattacagtcatatttggcagaaagaccagccctacaaagttcctttaaactcacagataaaaaatctttcaaaactattaccccaatatctggaaatatacattatagtggaaaaagctttgtatgattatatgggatctgaaatgatggctgtaacacaaaaaattgtccaggttattgggcttgtcaacactatgtttacccagttcaaattgactgttatactgtcttccttggaattgtggtcaaatgaaaaccagatttccaccagtggggatgctgatgatatattacaaagatttttggcatggaaacgggactatctcatcctacggccccatgacatagcatacttacttgtttacaggaaacatcctaaatatgtgggagcaacatttcctggcaccgtatgcaataaaagctatgatgcaggtattgctatgtatccagatgcaataggtttggagggattttcggttattatagctcaactgcttggccttaatgtaggattaacatatgatgacatcactcagtgtttctgtctgagagctacatgcatcatgaatcatgaagcagtgagtgccagtggtagaaagatttttagcaactgcagcatgcacgactatagatattttgtttcaaaatttgagactaaatgccttcagaagctttcaaatttgcaaccattacatcaaaatcaaccagtgtgtggtaatgggattttggaatccaatgaagaatgtgactgtggtaataaaaatgaatgtcaatttaagaagtgctgtgattataacacatgtaaactgaagggctcagtaaaatgtggttctggaccatgttgtacatcaaagtgtgagttgtcaatagcaggcactccatgtagaaagagtattgatccagagtgtgattttacagagtactgcaatggaacctctagtaattgtgttcctgacacttatgcattgaatggccgtttgtgcaagttgggaactgcctattgctataacggacaatgtcaaactactgataaccagtgtgccaagatatttggaaaaggtgctcaaggtgctccatttgcctgttttaaagaagttaattctctgcatgaaagatctgaaaactgtggttttaaaaattcacaaccattaccttgtgaacggaaggatgttctctgtggaaaattagcttgtgttcagccacataaaaatgctaataaaagtgacgctcaatctacagtttattcatatattcaagaccatgtatgtgtatctatagccactggttcctccatgagatcagatggaacagacaatgcctatgtggctgatggcaccatgtgtggtccagaaatgtactgtgtaaataaaacctgcagaaaagttcatttaatgggatataactgtaatgccaccacaaaatgcaaagggaaagggatatgtaataattttggtaattgtcaatgcttccctggacatagacctccagattgtaaattccagtttggttccccagggggtagtattgatgatggaaattttcagaaatctggtgacttttatactgaaaaaggctacaatacacactggaacaactggtttattctgagtttctgcatttttctgccgtttttcatagttttcaccactgtgatctttaaaagaaatgaaataagtaaatcatgtaacagagagaatgcagagtataatcgtaattcatccgttgtatcagaaagcgatgacgtgggacattaatattgcacagaacttccatagcaaataacctaaaggaacgaatgtgctttatttataaccttacgttatccccaatgcattgtaaatgtcaaacttttggaaaataaagcctgcgtgccctcc

SEQ ID NO: 104615 - DNA, 1886 bp, Homo sapiens
  Payload ID: 541
  Gene Symbol: ADAM18
  Gene Name: ADAM metallopeptidase domain 18
  ENST ID: ENST00000614391
  CDS Start-End: 1-348
atgttccttctcctcgccctcctcactgagcttggaagactgcaagcccacgaaggttctgaaggaatatttctgcatgtcacagttccacggaagattaagtcaaatgacagtgaagtttcagagaggaagatgatttacatcattacaattgatggacaaccttacactctacatctcggaaaacaatcattcttaccccagaactttttggtttatacatataatgaaactggatctttgcattctgtgtctccatattttatgatgcattgccattaccaaggatatgctgccgaatttccaaattcatttgtgacactcagtatatgttctggtctcagataaaaaatctttcaaaactattaccccaatatctggaaatatacattatagtggaaaaagctttgtatgattatatgggatctgaaatgatggctgtaacacaaaaaattgtccaggttattgggcttgtcaacactatgtttacccagttcaaattgactgttatactgtcttccttggaattgtggtcaaatgaaaaccagatttccaccagtggggatgctgatgatatattacaaagatttttggcatggaaacgggactatctcatcctacggccccatgacatagcatacttacttgtttacaggaaacatcctaaatatgtgggagcaacatttcctggcaccgtatgcaataaaagctatgatgcaggtattgctatgtatccagatgcaataggtttggagggattttcggttattatagctcaactgcttggccttaatgtaggattaacatatgatgacatcactcagtgtttctgtctgagagctacatgcatcatgaatcatgaagcagtgaatgtcaatttaagaagtgctgtgattataacacatgtaaactgaagggctcagtaaaatgtggttctggaccatgttgtacatcaaagtgtgagttgtcaatagcaggcactccatgtagaaagagtattgatccagagtgtgattttacagagtactgcaatggaacctctagtaattgtgttcctgacacttatgcattgaatggccgtttgtgcaagttgggaactgcctattgctataacggacaatgtcaaactactgataaccagtgtgccaagatatttggaaaaggtgctcaaggtgctccatttgcctgttttaaagaagttaattctctgcatgaaagatctgaaaactgtggttttaaaaattcacaaccattaccttgtgaacggaaggatgttctctgtggaaaattagcttgtgttcagccacataaaaatgctaataaaagtgacgctcaatctacagtttattcatatattcaagaccatgtatgtgtatctatagccactggttcctccatgagatcagatggaacagacaatgcctatgtggctgatggcaccatgtgtggtccagaaatgtactgtgtaaataaaacctgcagaaaagttcatttaatgggatataactgtaatgccaccacaaaatgcaaagggaaagggatatgtaataattttggtaattgtcaatgcttccctggacatagacctccagattgtaaattccagtttggttccccagggggtagtattgatgatggaaattttcagaaatctggtgacttttatactgaaaaaggctacaatacacactggaacaactggtttattctgagtttctgcatttttctgccgtttttcatagttttcaccactgtgatctttaaaagaaatgaaataagtaaatcatgtaacagagagaatgcagagtataatcgtaattcatccgttgtatcagaaagcgatgacgtgggacattaatattgcacagaacttccatagcaaataa

SEQ ID NO: 104616 - DNA, 1430 bp, Homo sapiens
  Payload ID: 541
  Gene Symbol: ADAM18
  Gene Name: ADAM metallopeptidase domain 18
  Uniprot ID: Q9Y3Q7
  ENST ID: ENST00000633688
  CDS Start-End: 39-587
tctgtccttggctgtggctcctgcgctctggctgagccatgttccttctcctcgccctcctcactgagcttggaagactgcaagcccacgaaggttctgaaggaatatttctgcatgtcacagttccacggaagattaagtcaaatgacagtgaagtttcagagaggaagatgatttacatcattacaattgatggacaaccttacactctacatctcggaaaacaatcattcttaccccagaactttttggtttatacatataatgaaactggatctttgcattctgtgtctccatattttatgatgcattgccattaccaaggatatgctgccgaatttccaaattcatttgtgacactcagtatatgttctggtctcaggggatttctccagtttgaaaatatcagttatggaattgaaccagtagaatcttcagcaagatttgagcatataatttatcaaatgaaaaataatgatccaaatgtatccattttagcagtaaattacagtcatatttggcagaaagaccagccctacaaagttcctttaaactcacaggtgactgtcatcattctgatgttatgacatactagaacattgcctgtgtagttttcttgtaaatcatgaaaggaatttagttagctgttgagtaggaatattaaattttatgtatttttctacctttaaataaaacattgaaacttcatctaaaatatttggaaagttacatatttcaagcttaatattttatgatgtattatgtaacattaatttttatatttttttcaaacaaaatgatactattgaaaaagtttagaaatgcagaaagaacagagtcactgttattctagtaccttggtaaaattacttttaatattttgttatatatcttacatactacctgaacatatctttctaaaatgcacagccatttgcatgttgccagatgctcttaatttgctggtagactaggtatagaattcttgctggcagtttctttctttcagcactttgaatatttcaatccatcaccatgtggcctctgttttttctgataaaaatattctattattcttattgggaattccttggacaaaatgagttgcttctcttttgtttcttttgagattcttcctttgcctttgtcttatggcagtgtgcttatcatgtttctatgaatgtatctctttgtgtttaccatacttggagctcaaagcacttcttgggtctgaaaatggatgtgttttgaaattaaattagcttgtgtgaatcctgaaaaaaaaaaatcccatgaagctatgaaaccaactatctgtatggttcctagagacttcacacttttattctactttaaaatttgtctcgattttgtagttcattattgccaaaagtatttactgggataaataaaaaaagcattcttctcgg

SEQ ID NO: 104617 - DNA, 2314 bp, Homo sapiens
  Payload ID: 541
  Gene Symbol: ADAM18
  Gene Name: ADAM metallopeptidase domain 18
  Uniprot ID: Q9Y3Q7
  ENST ID: ENST00000633768
  CDS Start-End: 43-2190
ggtctctgtccttggctgtggctcctgcgctctggctgagccatgttccttctcctcgccctcctcactgagcttggaagactgcaagcccacgaaggttctgaaggaatatttctgcatgtcacagttccacggaagattaagtcaaatgacagtgaagtttcagagaggaagatgatttacatcattacaattgatggacaaccttacactctacatctcggaaaacaatcattcttaccccagaactttttggtttatacatataatgaaactggatctttgcattctgtgtctccatattttatgatgcattgccattaccaaggatatgctgccgaatttccaaattcatttgtgacactcagtatatgttctggtctcaggggatttctccagtttgaaaatatcagttatggaattgaaccagtagaatcttcagcaagatttgagcatataatttatcaaatgaaaaataatgatccaaatgtatccattttagcagtaaattacagtcatatttggcagaaagaccagccctacaaagttcctttaaactcacagataaaaaatctttcaaaactattaccccaatatctggaaatatacattatagtggaaaaagctttgatgtttacccagttcaaattgactgttatactgtcttccttggaattgtggtcaaatgaaaaccagatttccaccagtggggatgctgatgatatattacaaagatttttggcatggaaacgggactatctcatcctacggccccatgacatagcatacttacttgtttacaggaaacatcctaaatatgtgggagcaacatttcctggcaccgtatgcaataaaagctatgatgcaggtattgctatgtatccagatgcaataggtttggagggattttcggttattatagctcaactgcttggccttaatgtaggattaacatatgatgacatcactcagtgtttctgtctgagagctacatgcatcatgaatcatgaagcagtgagtgccagtggtagaaagatttttagcaactgcagcatgcacgactatagatattttgtttcaaaatttgagactaaatgccttcagaagctttcaaatttgcaaccattacatcaaaatcaaccagtgtgtggtaatgggattttggaatccaatgaagaatgtgactgtggtaataaaaatgaatgtcaatttaagaagtgctgtgattataacacatgtaaactgaagggctcagtaaaatgtggttctggaccatgttgtacatcaaagtgtgagttgtcaatagcaggcactccatgtagaaagagtattgatccagagtgtgattttacagagtactgcaatggaacctctagtaattgtgttcctgacacttatgcattgaatggccgtttgtgcaagttgggaactgcctattgctataacggacaatgtcaaactactgataaccagtgtgccaagatatttggaaaaggtgctcaaggtgctccatttgcctgttttaaagaagttaattctctgcatgaaagatctgaaaactgtggttttaaaaattcacaaccattaccttgtgaacggaaggatgttctctgtggaaaattagcttgtgttcagccacataaaaatgctaataaaagtgacgctcaatctacagtttattcatatattcaagaccatgtatgtgtatctatagccactggttcctccatgagatcagatggaacagacaatgcctatgtggctgatggcaccatgtgtggtccagaaatgtactgtgtaaataaaacctgcagaaaagttcatttaatgggatataactgtaatgccaccacaaaatgcaaagggaaagggatatgtaataattttggtaattgtcaatgcttccctggacatagacctccagattgtaaattccagtttggttccccagggggtagtattgatgatggaaattttcagaaatctggtgacttttatactgaaaaaggctacaatacacactggaacaactggtttattctgagtttctgcatttttctgccgtttttcatagttttcaccactgtgatctttaaaagaaatgaaataagtaaatcatgtaacagagagaatgcagagtataatcgtaattcatccgttgtatcagaaagcgatgacgtgggacattaatattgcacagaacttccatagcaaataacctaaaggaacgaatgtgctttatttataaccttacgttatccccaatgcattgtaaatgtcaaacttttggaaaataaagcctgcgtgccctccc

SEQ ID NO: 104618 - DNA, 728 bp, Homo sapiens; identical to SEQ ID NO: 104612
  Payload ID: 541
  Gene Symbol: ADAM18
  Gene Name: ADAM metallopeptidase domain 18
  ENST ID: ENST00000633693
  CDS Start-End: 135-323

SEQ ID NO: 104619 - DNA, 6481 bp, Homo sapiens
  Payload ID: 542
  Gene Symbol: ADAM19
  Gene Name: ADAM metallopeptidase domain 19
  Uniprot ID: Q9H013
  ENST ID: ENST00000257527
  CDS Start-End: 80-2836
agacgcgcctccaccgccgggcagtgggcaggtatggctgagggcgtgtgagcgccgagcgctaagggccgccgccaccatgccagggggcgcaggcgccgcccggctctgcttgctggcgtttgccctgcagcccctccggccgcgggcggcgcgggagcctggatggacaagaggaagtgaggaaggcagccccaagctgcagcatgaacttatcatacctcagtggaagacttcagaaagccccgtgagagaaaagcatccactcaaagctgagctcagggtaatggctgaggggcgagaactgatcctggacctggagaagaatgagcaactttttgctccttcctacacagaaacccattatacttcaagtggtaaccctcaaaccaccacacggaaattggaggatcactgcttttaccacggcacggtgagggagacagaactgtccagcgtcacgctcagcacttgccgaggaattagaggactgattacggtgagcagcaacctcagctacgtcatcgagcccctccctgacagcaagggccaacaccttatttacagatctgaacatctcaagccgcccccgggaaactgtgggttcgagcactccaagcccaccaccagggactgggctcttcagtttacacaacagaccaagaagcgacctcgcaggatgaaaagggaagatttaaactccatgaagtatgtggagctttacctcgtggctgattatttagagtttcagaagaatcgacgagaccaggacgccaccaaacacaagctcatagagatcgccaactatgttgataagttttaccgatccttgaacatccggattgctctcgtgggcttggaagtgtggacccacgggaacatgtgtgaagtttcagagaatccatattctaccctctggtcctttctcagttggaggcgcaagctgcttgcccagaagtaccatgacaacgcccaattaatcacgggcatgtccttccacggcaccaccatcggcctggcccccctcatggccatgtgctctgtgtaccagtctggaggagtcaacatggaccactccgagaatgccattggcgtggctgccaccatggcccacgagatgggccacaactttggcatgacccatgattctgcagattgctgctcggccagtgcggctgatggtgggtgcatcatggcagctgccactgggcacccctttcccaaagtgttcaatggatgcaacaggagggagctggacaggtatctgcagtcaggtggtggaatgtgtctctccaacatgccagacaccaggatgttgtatggaggccggaggtgtgggaacgggtatctggaagatggggaagagtgtgactgtggagaagaagaggaatgtaacaacccctgctgcaatgcctctaattgtaccctgaggccgggggcggagtgtgctcacggctcctgctgccaccagtgtaagctgttggctcctgggaccctgtgccgcgagcaggccaggcagtgtgacctcccggagttctgtacgggcaagtctccccactgccctaccaacttctaccagatggatggtaccccctgtgagggcggccaggcctactgctacaacggcatgtgcctcacctaccaggagcagtgccagcagctgtggggacccggagcccgacctgcccctgacctctgcttcgagaaggtgaatgtggcaggagacacctttggaaactgtggaaaggacatgaatggtgaacacaggaagtgcaacatgagagatgcgaagtgtgggaagatccagtgtcagagctctgaggcccggcccctggagtccaacgcggtgcccattgacaccactatcatcatgaatgggaggcagatccagtgccggggcacccacgtctaccgaggtcctgaggaggagggtgacatgctggacccagggctggtgatgactggaaccaagtgtggctacaaccatatttgctttgaggggcagtgcaggaacacctccttctttgaaactgaaggctgtgggaagaagtgcaatggccatggggtctgtaacaacaaccagaactgccactgcctgccgggctgggccccgcccttctgcaacacaccgggccacgggggcagtatcgacagtgggcctatgccccctgagagtgtgggtcctgtggtagctggagtgttggtggccatcttggtgctggcggtcctcatgctgatgtactactgctgcagacagaacaacaaactaggccaactcaagccctcagctctcccttccaagctgaggcaacagttcagttgtcccttcagggtttctcagaacagcgggactggtcatgccaacccaactttcaagctgcagacgccccagggcaagcgaaaggtgatcaacactccggaaatcctgcggaagccctcccagcctcctccccggccccctccagattatctgcgtggtgggtccccacctgcaccactgccagctcacctgagcagggctgctaggaactccccagggcccgggtctcaaatagagaggacggagtcgtccaggaggcctcctccaagccggccaattccccccgcaccaaattgcatcgtttcccaggacttctccaggcctcggccgccccagaaggcactcccggcaaacccagtgccaggccgcaggagcctccccaggccaggaggtgcatccccactgcggccccctggtgctggccctcagcagtcccggcctctggcagcacttgccccaaagtttccagaatacagatcacagagggctggagggatgattagctcgaaaatctagacctgtccaaggggcttctccctttccttgagctctctggacactgcagaggacccatggccatggaaccctgaagaagcatgtctggccgcctctgagctcctcccaccctcctccaggaacctccacatctccaaaaatctccctgttgactcagtgcctcctcggcttccttggaagcccagagggactatgatctgatggcctctaggtgttgttttgtgcaatatacagccccaggtagggaggggagagtatgaggagggtgactggcagcttctcctccagactcctagccccgaggtgctgatggagatgctcaaggccagcaagcccctcaggccagcacttcgcttgcagaagccatccattcactcctggggtgcagggcacgcaagagagcttcccattgcttctgctctcctcagaggtcccgggctggatggaggctggtacttacccaccccttttagcttttagggattaaggaagggtcaagccagccactgctgtggccctgcccagggcttggttgagggaacggcttctggctgtatggctgcatgtgacaagccacgtcccctcccacctctccccaaacccctgcatccctgtattcacacgggtcactctgactcagacaggtactattcgtaggcagtgtagacagcaggaggagcaccgggcttgggcttcctctgagccgtgatgccaaaggttgcgactcctgactctggataatttttagttgctctttgttttctctgccgcactttcctggtgccccacgcttttctctcttccttcccctctcattctccctctaatgtgtggtgctttggtgagcaaaccctcagcagtcctgaccttcgggtgaccaggtgcttgtgacctacaagtcagagtcctctctcacagtcggccactggatttccctcactggctctcaggagtgtgaccagagtagacttggggcatggccattggggtcatatgtttatttttcattgtgttttgtgacctcagcagggtgggggtcttcctccttactctaagctaaatctaggtgaggtttccccttagggagcccagctatttacaaagtacacacgagggagcaggctggtcattgacttcgggctggaccgttgccctctgagcagagaacagacccatttctgggagctgcccgagatcactggagaaggcagccagcagcagctgcactggaacagtcagagcagggagcctcttcctcaacccagctttttgtcattcacttccttttgttctctctctggtcactgcccttacctgaccctcacagaaagagagctctgagcaggtgagggggtctgcggtggctcctgtcttccctgcagcagggaaggagggccgtgtggtgctttgctagataggacggtttttgcaaagcacctggagatgtttgctgggagatagactcccactccacaaaggtgctgggtggctctccggacaggagctggcctgactctcactcctctgaggctttcctggggcctcctcccatcctgccatgagcaattgtttgctcttgaaaacctcactgcaaggctgaggctgagcttctgattcaccaccccagggcctccttatagttctctgcacacaataggtgcttcttggatgttcttgggtttggaaataagtggaaaatacgggatgtacccctgggggaaaagcctgggttgggtttagaaagatctcaggaaaatgagtttctcttccctcagggtggctgtgatacaggttccccatgtccttgccgtgggtcatccttgctgtgggtcatccttgctgtggagatccattccccacctttcctgtggcccaaccttttatttaaatgtgctaccctctgcctcaaggcttggttcctggaaagtaaaggtgaaaacatcccctttcacccctctgcaaaacaaacaagcaacatcctcaaaacccaaccccatgcctcacagagcttcctgtggcttctccagcctttctccctcacatcaggaggtagatagctctgaaatgacagcgccacagccatagtgactgcatgagccatctgaacctgcagtccaccctccctggaaccacaccagaaagagacctgggttgtcgttttcttgctttttgttttgttttgttttattattttcatatcacctccatcccataaagttgtactgtgaactggaagatggtggaatgttttggaatttgatagactttcggcaaccagttctactaatgcttcactcctggctctgttcagggaggctgcccaggaggaagactggccattatgcatccccttttctttccagtgcccagtatgctgttttgaggtgtcaaatacaaataaatctgggcttagggaaggagagaccttattccaaagcacgattgcagaaggggaaagggaatattgcaaaagggagaggaaggggccttatgggaatagtgaaaaggctcagaccgaccgatggcaagatctgcaagcgtctcaaagcccaggcagaaaaggacttttcttttattggaagaagtaaacatggctagaaagaaccacgttcagggaatgacgttgtgcccagcctttttttttttttttttttttttgtctccaggggaggggctgtttgctggctcaggctgaggatggcccaaagtccagggtctggtggggaggagggaagcttaactcaagtttgggttagtgagttagcaagctctttgtgcagatggggatgtaggtaaatctttttaaaagtgaaattaacctcctgccaattttacaacccaagaatttttttttaagggccttggagccatctctaaaacaaacctcaagggatttagtgccctgtctccctgtctctagaagccttagcctgggcacctggctcaatcttgtaactgcctgctagccatagattcctttcagccttgctgacttctccctataaaagtaaagcctttttctgccccagctctgagacacttgcagatcttaaggtctgagacttgctgattttctggttggagtgtttttttgtattgccatagtcccttccccctgaagcaatagcccctccccacctcctgcaatacgcctttccaatctttattggaagtctctccctgcctacttcctaatttattcttatttgacagagggtatggaagacttgcaatttgaaaactggggaccagttccaaagtcagtaattgtgttaaccacgtgtataacagctctgctggacacccaagaaagccatgggaacgccaactggaaaggtccccttccccaggggagcctgcgaaggagaggttctgtagaatccaagcccacatttccaaagtcacccccaacgcgtcctctcacaccgtccactgtgcgtttgtatgtgtctgggatccagggcaatgtgaattttctttttatttgggagattgttcacggaaaacagatcttcttctctcttgtccacctattaattgtttacaatatttgtacatctatgcaaaatacttgaatgggccatggtgccttttttccttgttagtatttaattaaaaatgaattgtttgtcatttgcaatgtta

SEQ ID NO: 104620 - DNA, 2839 bp, Homo sapiens
  Payload ID: 542
  Gene Symbol: ADAM19
  Gene Name: ADAM metallopeptidase domain 19
  ENST ID: ENST00000517951
  CDS Start-End: 80-898
agacgcgcctccaccgccgggcagtgggcaggtatggctgagggcgtgtgagcgccgagcgctaagggccgccgccaccatgccagggggcgcaggcgccgcccggctctgcttgctggcgtttgccctgcagcccctccggccgcgggcggcgcgggagcctggatggacaagaggaagtgaggaaggcagccccaagctgcagcatgaacttatcatacctcagtggaagacttcagaaagccccgtgagagaaaagcatccactcaaagctgagctcagggtaatggctgaggggcgagaactgatcctggacctggagaagaatgagcaactttttgctccttcctacacagaaacccattatacttcaagtggtaaccctcaaaccaccacacggaaattggaggatcactgcttttaccacggcacggtgagggagacagaactgtccagcgtcacgctcagcacttgccgaggaattagaggactgattacggtgagcagcaacctcagctacgtcatcgagcccctccctgacagcaagggccaacaccttatttacagatctgaacatctcaagccgcccccgggaaactgtgggttcgagcactccaagcccaccaccagggactgggctcttcagtttacacaacagaccaagaagcgacctcgcaggatgaaaagggaagatttaaactccatgaagtatgtggagctttacctcgtggctgattatttagagtttcagaagaatcgacgagaccaggacgccaccaaacacaagctcatagagatcgccaactatgttgataaggtgagaccagttttaccgatccttgaacatccggattgctctcgtgggcttggaagtgtggacccacgggaacatgtgtgaagtttcagagaatccatattctaccctctggtcctttctcagttggaggcgcaagctgcttgcccagaagtaccatgacaacgcccaattaatcacgggcatgtccttccacggcaccaccatcggcctggcccccctcatggccatgtgctctgtgtaccagtctggaggagtcaacatggaccactccgagaatgccattggcgtggctgccaccatggcccacgagatgggccacaactttggcatgacccatgattctgcagattgctgctcggccagtgcggctgatggtgggtgcatcatggcagctgccactgggcacccctttcccaaagtgttcaatggatgcaacaggagggagctggacaggtatctgcagtcaggtggtggaatgtgtctctccaacatgccagacaccaggatgttgtatggaggccggaggtgtgggaacgggtatctggaagatggggaagagtgtgactgtggagaagaagaggaatgtaacaacccctgctgcaatgcctctaattgtaccctgaggccgggggcggagtgtgctcacggctcctgctgccaccagtgtaagctgttggctcctgggaccctgtgccgcgagcaggccaggcagtgtgacctcccggagttctgtacgggcaagtctccccactgccctaccaacttctaccagatggatggtaccccctgtgagggcggccaggcctactgctacaacggcatgtgcctcacctaccaggagcagtgccagcagctgtggggacccggagcccgacctgcccctgacctctgcttcgagaaggtgaatgtggcaggagacacctttggaaactgtggaaaggacatgaatggtgaacacaggaagtgcaacatgagagatgcgaagtgtgggaagatccagtgtcagagctctgaggcccggcccctggagtccaacgcggtgcccattgacaccactatcatcatgaatgggaggcagatccagtgccggggcacccacgtctaccgaggtcctgaggaggagggtgacatgctggacccagggctggtgatgactggaaccaagtgtggctacaaccatatttgctttgaggggcagtgcaggaacacctccttctttgaaactgaaggctgtgggaagaagtgcaatggccatggggtctgtaacaacaaccagaactgccactgcctgccgggctgggccccgcccttctgcaacacaccgggccacgggggcagtatcgacagtgggcctatgccccctgagagtgtgggtcctgtggtagctggagtgttggtggccatcttggtgctggcggtcctcatgctgatgtactactgctgcagacagaacaacaaactaggccaactcaagccctcagctctcccttccaagctgaggcaacagttcagttgtcccttcagggtttctcagaacagcgggactggtcatgccaacccaactttcaagctgcagacgccccagggcaagcgaaaggtgatcaacactccggaaatcctgcggaagccctcccagcctcctccccggccccctccagattatctgcgtggtgggtccccacctgcaccactgccagctcacctgagcagggctgctaggaactccccagggcccgggtctcaaatagagaggacggagtcgtccaggaggcctcctccaagccggccaattccccccgcaccaaattgcatcgtttcccagaagtgccttttgcctcctgccatgattctgagggctccccagccaagtggaactgttgtttgcttagtaattagttttaatatggccttctacaggtcaatgaggattagaatagaaccaggaatcaagaccaagttgctggttttactagtttggaagcagttttaatgaagatggaaatgtttatcaactcaacacag

SEQ ID NO: 104621 - DNA, 3312 bp, Homo sapiens
  Payload ID: 542
  Gene Symbol: ADAM19
  Gene Name: ADAM metallopeptidase domain 19
  Uniprot ID: Q9H013
  ENST ID: ENST00000517905
  CDS Start-End: 46-2913
tggctgagggcgtgtgagcgccgagcgctaagggccgccgccaccatgccagggggcgcaggcgccgcccggctctgcttgctggcgtttgccctgcagcccctccggccgcgggcggcgcgggagcctggatggacaagaggaagtgaggaaggcagccccaagctgcagcatgaacttatcatacctcagtggaagacttcagaaagccccgtgagagaaaagcatccactcaaagctgagctcagggtaatggctgaggggcgagaactgatcctggacctggagaagaatgagcaactttttgctccttcctacacagaaacccattatacttcaagtggtaaccctcaaaccaccacacggaaattggaggatcactgcttttaccacggcacggtgagggagacagaactgtccagcgtcacgctcagcacttgccgaggaattagaggactgattacggtgagcagcaacctcagctacgtcatcgagcccctccctgacagcaagggccaacaccttatttacagatctgaacatctcaagccgcccccgggaaactgtgggttcgagcactccaagcccaccaccagggactgggctcttcagtttacacaacagaccaagaagcgacctcgcaggatgaaaagggaagatttaaactccatgaagtatgtggagctttacctcgtggctgattatttagagtttcagaagaatcgacgagaccaggacgccaccaaacacaagctcatagagatcgccaactatgttgataagttttaccgatccttgaacatccggattgctctcgtgggcttggaagtgtggacccacgggaacatgtgtgaagtttcagagaatccatattctaccctctggtcctttctcagttggaggcgcaagctgcttgcccagaagtaccatgacaacgcccaattaatcacgggcatgtccttccacggcaccaccatcggcctggcccccctcatggccatgtgctctgtgtaccagtctggaggagtcaacatggaccactccgagaatgccattggcgtggctgccaccatggcccacgagatgggccacaactttggcatgacccatgattctgcagattgctgctcggccagtgcggctgatggtgggtgcatcatggcagctgccactgggcacccctttcccaaagtgttcaatggatgcaacaggagggagctggacaggtatctgcagtcaggtggtggaatgtgtctctccaacatgccagacaccaggatgttgtatggaggccggaggtgtgggaacgggtatctggaagatggggaagagtgtgactgtggagaagaagaggaatgtaacaacccctgctgcaatgcctctaattgtaccctgaggccgggggcggagtgtgctcacggctcctgctgccaccagtgtaagctgttggctcctgggaccctgtgccgcgagcaggccaggcagtgtgacctcccggagttctgtacgggcaagtctccccactgccctaccaacttctaccagatggatggtaccccctgtgagggcggccaggcctactgctacaacggcatgtgcctcacctaccaggagcagtgccagcagctgtggggacccggagcccgacctgcccctgacctctgcttcgagaaggtgaatgtggcaggagacacctttggaaactgtggaaaggacatgaatggtgaacacaggaagtgcaacatgagagatgcgaagtgtgggaagatccagtgtcagagctctgaggcccggcccctggagtccaacgcggtgcccattgacaccactatcatcatgaatgggaggcagatccagtgccggggcacccacgtctaccgaggtcctgaggaggagggtgacatgctggacccagggctggtgatgactggaaccaagtgtggctacaaccatatttgctttgaggggcagtgcaggaacacctccttctttgaaactgaaggctgtgggaagaagtgcaatggccatggggtctgtaacaacaaccagaactgccactgcctgccgggctgggccccgcccttctgcaacacaccgggccacgggggcagtatcgacagtgggcctatgccccctgagagtgtgggtcctgtggtagctggagtgttggtggccatcttggtgctggcggtcctcatgctgatgtactactgctgcagacagaacaacaaactaggccaactcaagccctcagctctcccttccaagctgaggcaacagttcagttgtcccttcagggtttctcagaacagcgggactggtcatgccaacccaactttcaagctgcagacgccccagggcaagcgaaaggtgatcaacactccggaaatcctgcggaagccctcccagcctcctccccggccccctccagattatctgcgtggtgggtccccacctgcaccactgccagctcacctgagcagggctgctaggaactccccagggcccgggtctcaaatagagaggacggagtcgtccaggaggcctcctccaagccggccaattccccccgcaccaaattgcatcgtttcccaggacttctccaggcctcggccgccccagaaggcactcccggcaaacccagtgccaggccgcaggagcctccccaggccaggaggtgcatccccactgcggccccctggtgctggccctcagcagtcccggcctctggcagcacttgccccaaaggtgagtccacgggaagccctcaaggtgaaagctggtaccagagggctccaggggggcaggtgtagagttgagaaaacaaagcaattcatgcttcttgtggtctggactgaacttccagaacaaaagccaagggcaaaacattcatgtttcttggtgcccgcttgactgtggagttttggcttcatgtgaaaggtgattcttagaatcctgagctgtggtggcttcagtcctgcccctgcacctgacctggggagggaccctgagcaagtccctcttgagtctgtttcctcatttgtacagaggctatgatgagcagtagtaccagccccatcaggttgttgtgaagagcaaggaagtgcattagtagaagccacctggcctgcgggaggctgtgtacacttggcccctcctcgtacttcttctgtgtggctgacagtctcagtttgccagtcttggcagtcaggtcagaaagggatgaggtgaagaagctggctgaccatgctgtattcccacgaggcattgagaaaactatggactgtgctgctgccttagcagggaagggaa

SEQ ID NO: 104622 - DNA, 1847 bp, Homo sapiens
  Payload ID: 542
  Gene Symbol: ADAM19
  Gene Name: ADAM metallopeptidase domain 19
  ENST ID: ENST00000517374
  CDS Start-End: 1-1469
gtgactgtggagaagaagaggaatgtaacaacccctgctgcaatgcctctaattgtaccctgaggccgggggcggagtgtgctcacggctcctgctgccaccagtgtaagctgttggctcctgggaccctgtgccgcgagcaggccaggcagtgtgacctcccggagttctgtacgggcaagtctccccactgccctaccaacttctaccagatggatggtaccccctgtgagggcggccaggcctactgctacaacggcatgtgcctcacctaccaggagcagtgccagcagctgtggggacccggagcccgacctgcccctgacctctgcttcgagaaggtgaatgtggcaggagacacctttggaaactgtggaaaggacatgaatggtgaacacaggaagtgcaacatgagagatgcgaagtgtgggaagatccagtgtcagagctctgaggcccggcccctggagtccaacgcggtgcccattgacaccactatcatcatgaatgggaggcagatccagtgccggggcacccacgtctaccgaggtcctgaggaggagggtgacatgctggacccagggctggtgatgactggaaccaagtgtggctacaaccatatttgctttgaggggcagtgcaggaacacctccttctttgaaactgaaggctgtgggaagaagtgcaatggccatggggtctgtaacaacaaccagaactgccactgcctgccgggctgggccccgcccttctgcaacacaccgggccacgggggcagtatcgacagtgggcctatgccccctgagagtgtgggtcctgtggtagctggagtgttggtggccatcttggtgctggcggtcctcatgctgatgtactactgctgcagacagaacaacaaactaggccaactcaagccctcagctctcccttccaagctgaggcaacagttcagttgtcccttcagggtttctcagaacagcgggactggtcatgccaacccaactttcaagctgcagacgccccagggcaagcgaaaggtgatcaacactccggaaatcctgcggaagccctcccagcctcctccccggccccctccagattatctgcgtggtgggtccccacctgcaccactgccagctcacctgagcagggctgctaggaactccccagggcccgggtctcaaatagagaggacggagtcgtccaggaggcctcctccaagccggccaattccccccgcaccaaattgcatcgtttcccaggacttctccaggcctcggccgccccagaaggcactcccggcaaacccagtgccaggccgcaggagcctccccaggccaggaggtgcatccccactgcggccccctggtgctggccctcagcagtcccggcctctggcagcacttgccccaaagagggtatggaagacttgcaatttgaaaactggggaccagttccaaagtcagtaattgtgttaaccacgtgtataacagctctgctggacacccaagaaagccatgggaacgccaactggaaaggtccccttccccaggggagcctgcgaaggagaggttctgtagaatccaagcccacatttccaaagtcacccccaacgcgtcctctcacaccgtccactgtgcgtttgtatgtgtctgggatccagggcaatgtgaattttctttttatttgggagattgttcacggaaaacagatcttcttctctcttgtccacctattaattgtttacaatatttgtacatctatgcaaaatacttgaatgggccatggtgccttttttccttgttagtatttaattaaaaatgaattgtttgtcatttgcaatgtta

SEQ ID NO: 104623 - DNA, 2672 bp, Homo sapiens
  Payload ID: 543
  Gene Symbol: ADAM2
  Gene Name: ADAM metallopeptidase domain 2
  Uniprot ID: Q99965
  ENST ID: ENST00000265708
  CDS Start-End: 105-2312
gcctacctcttccaggctgcgtggccggggcgtcatctcgcgcttccaactgccctgtaaccaccaactgccattattccggctgggacccaggacttcaagccatgtggcgcgtcttgtttctgctcagcgggctcggcgggctgcggatggacagtaattttgatagtttacctgtgcaaattacagttccggagaaaatacggtcaataataaaggaaggaattgaatcgcaggcatcctacaaaattgtaattgaagggaaaccatatactgtgaatttaatgcaaaaaaactttttaccccataattttagagtttacagttatagtggcacaggaattatgaaaccacttgaccaagattttcagaatttctgccactaccaagggtatattgaaggttatccaaaatctgtggtgatggttagcacatgtactggactcaggggcgtactacagtttgaaaatgttagttatggaatagaacccctggagtcttcagttggctttgaacatgtaatttaccaagtaaaacataagaaagcagatgtttccttatataatgagaaggatattgaatcaagagatctgtcctttaaattacaaagcgtagagccacagcaagattttgcaaagtatatagaaatgcatgttatagttgaaaaacaattgtataatcatatggggtctgatacaactgttgtcgctcaaaaagttttccagttgattggattgacgaatgctatttttgtttcatttaatattacaattattctgtcttcattggagctttggatagatgaaaataaaattgcaaccactggagaagctaatgagttattacacacatttttaagatggaaaacatcttatcttgttttacgtcctcatgatgtggcatttttacttgtttacagagaaaagtcaaattatgttggtgcaacctttcaagggaagatgtgtgatgcaaactatgcaggaggtgttgttctgcaccccagaaccataagtctggaatcacttgcagttattttagctcaattattgagccttagtatggggatcacttatgatgacattaacaaatgccagtgctcaggagctgtctgcattatgaatccagaagcaattcatttcagtggtgtgaagatctttagtaactgcagcttcgaagactttgcacattttatttcaaagcagaagtcccagtgtcttcacaatcagcctcgcttagatccttttttcaaacagcaagcagtgtgtggtaatgcaaagctggaagcaggagaggagtgtgactgtgggactgaacaggattgtgcccttattggagaaacatgctgtgatattgccacatgtagatttaaagccggttcaaactgtgctgaaggaccatgctgcgaaaactgtctatttatgtcaaaagaaagaatgtgtaggccttcctttgaagaatgcgacctccctgaatattgcaatggatcatctgcatcatgcccagaaaaccactatgttcagactgggcatccgtgtggactgaatcaatggatctgtatagatggagtttgtatgagtggggataaacaatgtacagacacatttggcaaagaagtagagtttggcccttcagaatgttattctcaccttaattcaaagactgatgtatctggaaactgtggtataagtgattcaggatacacacagtgtgaagctgacaatctgcagtgcggaaaattaatatgtaaatatgtaggtaaatttttattacaaattccaagagccactattatttatgccaacataagtggacatctctgcattgctgtggaatttgccagtgatcatgcagacagccaaaagatgtggataaaagatggaacttcttgtggttcaaataaggtttgcaggaatcaaagatgtgtgagttcttcatacttgggttatgattgtactactgacaaatgcaatgatagaggtgtatgcaataacaaaaagcactgtcactgtagtgcttcatatttacctccagattgctcagttcaatcagatctatggcctggtgggagtattgacagtggcaattttccacctgtagctataccagccagactccctgaaaggcgctacattgagaacatttaccattccaaaccaatgagatggccatttttcttattcattcctttctttattattttctgtgtactgattgctataatggtgaaagttaatttccaaaggaaaaaatggagaactgaggactattcaagcgatgagcaacctgaaagtgagagtgaacctaaagggtagtctggacaacagagatgccatgatatcacttcttctagagtaattatctgtgatggatggacacaaaaaaatggaaagaaaagaatgtacattacctggtttcctgggattcaaacctgcatattgtgattttaatttgaccagaaaatatgatatatatgtataatttcacagataatttacttatttaaaaatgcatgataatgagttttacattacaaatttctgtttttttaaagttatcttacgctatttctgttggttagtagacactaattctgtcagtaggggcatggtataaggaaatatcataatgtaatgaggtggtactatgattaaaagccactgttacatttcaaa

SEQ ID NO: 104624 - DNA, 2535 bp, Homo sapiens
  Payload ID: 543
  Gene Symbol: ADAM2
  Gene Name: ADAM metallopeptidase domain 2
  Uniprot ID: Q99965
  ENST ID: ENST00000347580
  CDS Start-End: 25-2175
ggctgggacccaggacttcaagccatgtggcgcgtcttgtttctgctcagcgggctcggcgggctgcggatggacagtaattttgatagtttacctgtgcaaattacagttccggagaaaatacggtcaataataaaggaaggaattgaatcgcaggcatcctacaaaattgtaattgaagggaaaccatatactgtgaatttaatgcaaaaaaactttttaccccataattttagagtttacagttatagtggcacaggaattatgaaaccacttgaccaagattttcagaatttctgccactaccaagggtatattgaaggttatccaaaatctgtggtgatggttagcacatgtactggactcaggggcgtactacagtttgaaaatgttagttatggaatagaacccctggagtcttcagttggctttgaacatgtaatttaccaagtaaaacataagaaagcagatgtttccttatataatgagaaggatattgaatcaagagatctgtcctttaaattacaaagcgtagagtataatcatatggggtctgatacaactgttgtcgctcaaaaagttttccagttgattggattgacgaatgctatttttgtttcatttaatattacaattattctgtcttcattggagctttggatagatgaaaataaaattgcaaccactggagaagctaatgagttattacacacatttttaagatggaaaacatcttatcttgttttacgtcctcatgatgtggcatttttacttgtttacagagaaaagtcaaattatgttggtgcaacctttcaagggaagatgtgtgatgcaaactatgcaggaggtgttgttctgcaccccagaaccataagtctggaatcacttgcagttattttagctcaattattgagccttagtatggggatcacttatgatgacattaacaaatgccagtgctcaggagctgtctgcattatgaatccagaagcaattcatttcagtggtgtgaagatctttagtaactgcagcttcgaagactttgcacattttatttcaaagcagaagtcccagtgtcttcacaatcagcctcgcttagatccttttttcaaacagcaagcagtgtgtggtaatgcaaagctggaagcaggagaggagtgtgactgtgggactgaacaggattgtgcccttattggagaaacatgctgtgatattgccacatgtagatttaaagccggttcaaactgtgctgaaggaccatgctgcgaaaactgtctatttatgtcaaaagaaagaatgtgtaggccttcctttgaagaatgcgacctccctgaatattgcaatggatcatctgcatcatgcccagaaaaccactatgttcagactgggcatccgtgtggactgaatcaatggatctgtatagatggagtttgtatgagtggggataaacaatgtacagacacatttggcaaagaagtagagtttggcccttcagaatgttattctcaccttaattcaaagactgatgtatctggaaactgtggtataagtgattcaggatacacacagtgtgaagctgacaatctgcagtgcggaaaattaatatgtaaatatgtaggtaaatttttattacaaattccaagagccactattatttatgccaacataagtggacatctctgcattgctgtggaatttgccagtgatcatgcagacagccaaaagatgtggataaaagatggaacttcttgtggttcaaataaggtttgcaggaatcaaagatgtgtgagttcttcatacttgggttatgattgtactactgacaaatgcaatgatagaggtgtatgcaataacaaaaagcactgtcactgtagtgcttcatatttacctccagattgctcagttcaatcagatctatggcctggtgggagtattgacagtggcaattttccacctgtagctataccagccagactccctgaaaggcgctacattgagaacatttaccattccaaaccaatgagatggccatttttcttattcattcctttctttattattttctgtgtactgattgctataatggtgaaagttaatttccaaaggaaaaaatggagaactgaggactattcaagcgatgagcaacctgaaagtgagagtgaacctaaagggtagtctggacaacagagatgccatgatatcacttcttctagagtaattatctgtgatggatggacacaaaaaaatggaaagaaaagaatgtacattacctggtttcctgggattcaaacctgcatattgtgattttaatttgaccagaaaatatgatatatatgtataatttcacagataatttacttatttaaaaatgcatgataatgagttttacattacaaatttctgtttttttaaagttatcttacgctatttctgttggttagtagacactaattctgtcagtaggggcatggtataaggaaatatcataatgtaatgaggtggtactatgattaaaagccactgttacatttcaaa

SEQ ID NO: 104625 - DNA, 2125 bp, Homo sapiens
  Payload ID: 543
  Gene Symbol: ADAM2
  Gene Name: ADAM metallopeptidase domain 2
  ENST ID: ENST00000379853
  CDS Start-End: 26-1765
cggctgggacccaggacttcaagccatgtggcgcgtcttgtttctgctcagcgggctcggcgggctgcggatggacagtaattttgatagtttacctgtgcaaattacagttccggagaaaatacggtcaataataaaggaaggaattgaatcgcaggcatcctacaaaattgtaattgaagggaaaccatatactgtgaatttaatgcaaaaaaactttttaccccataattttagagtttacagttatagtggcacaggaattatgaaaccacttgaccaagattttcagaatttctgccactaccaagggtatattgaaggttatccaaaatctgtggtgatggttagcacatgtactggactcaggggcgtactacagtttgaaaatgttagttatggaatagaacccctggagtcttcagttggctttgaacatgtaatttaccaagtaaaacataagaaagcagatgtttccttatataatgagaaggatattgaatcaagagatctgtcctttaaattacaaagcgtagagcaccccagaaccataagtctggaatcacttgcagttattttagctcaattattgagccttagtatggggatcacttatgatgacattaacaaatgccagtgctcaggagctgtctgcattatgaatccagaagcaattcatttcagtggtgtgaagatctttagtaactgcagcttcgaagactttgcacattttatttcaaagcagaagtcccagtgtcttcacaatcagcctcgcttagatccttttttcaaacagcaagcagtgtgtggtaatgcaaagctggaagcaggagaggagtgtgactgtgggactgaacaggattgtgcccttattggagaaacatgctgtgatattgccacatgtagatttaaagccggttcaaactgtgctgaaggaccatgctgcgaaaactgtctatttatgtcaaaagaaagaatgtgtaggccttcctttgaagaatgcgacctccctgaatattgcaatggatcatctgcatcatgcccagaaaaccactatgttcagactgggcatccgtgtggactgaatcaatggatctgtatagatggagtttgtatgagtggggataaacaatgtacagacacatttggcaaagaagtagagtttggcccttcagaatgttattctcaccttaattcaaagactgatgtatctggaaactgtggtataagtgattcaggatacacacagtgtgaagctgatggacatctctgcattgctgtggaatttgccagtgatcatgcagacagccaaaagatgtggataaaagatggaacttcttgtggttcaaataaggtttgcaggaatcaaagatgtgtgagttcttcatacttgggttatgattgtactactgacaaatgcaatgatagaggtgtatgcaataacaaaaagcactgtcactgtagtgcttcatatttacctccagattgctcagttcaatcagatctatggcctggtgggagtattgacagtggcaattttccacctgtagctataccagccagactccctgaaaggcgctacattgagaacatttaccattccaaaccaatgagatggccatttttcttattcattcctttctttattattttctgtgtactgattgctataatggtgaaagttaatttccaaaggaaaaaatggagaactgaggactattcaagcgatgagcaacctgaaagtgagagtgaacctaaagggtagtctggacaacagagatgccatgatatcacttcttctagagtaattatctgtgatggatggacacaaaaaaatggaaagaaaagaatgtacattacctggtttcctgggattcaaacctgcatattgtgattttaatttgaccagaaaatatgatatatatgtataatttcacagataatttacttatttaaaaatgcatgataatgagttttacattacaaatttctgtttttttaaagttatcttacgctatttctgttggttagtagacactaattctgtcagtaggggcatggtataaggaaatatcataatgtaatgaggtggtactatgattaaaagccactgttacatttcaaa

SEQ ID NO: 104626 - DNA, 2125 bp, Homo sapiens
  Payload ID: 543
  Gene Symbol: ADAM2
  Gene Name: ADAM metallopeptidase domain 2
  ENST ID: ENST00000521880
  CDS Start-End: 43-2061
accaactgccattattccggctgggacccaggacttcaagccatgtggcgcgtcttgtttctgctcagcgggctcggcgggctgcggatggacagtaattttgatagtttacctgtgcaaattacagttccggagaaaatacggtcaataataaaggaaggaattgaatcgcaggcatcctacaaaattgtaattgaagggaaaccatatactgtgaatttaatgcaaaaaaactttttaccccataattttagagtttacagttatagtggcacaggaattatgaaaccacttgaccaagattttcagaatttctgccactaccaagggtatattgaaggttatccaaaatctgtggtgatggttagcacatgtactggactcaggggcgtactacagtttgaaaatgttagttatggaatagaacccctggagtcttcagttggctttgaacatgtaatttaccaagtaaaacataagaaagcagatgtttccttatataatgagaaggatattgaatcaagagatctgtcctttaaattacaaagcgtagagccacagcaagattttgcaaagtatatagaaatgcatgttatagttgaaaaacaattgtataatcatatggggtctgatacaactgttgtcgctcaaaaagttttccagttgattggattgacgaatgctatttttgtttcatttaatattacaattattctgtcttcattggagctttggatagatgaaaataaaattgcaaccactggagaagctaatgagttattacacacatttttaagatggaaaacatcttatcttgttttacgtcctcatgatgtggcatttttacttgtttacagagaaaagtcaaattatgttggtgcaacctttcaagggaagatgtgtgatgcaaactatgcaggaggtgttgttctgcaccccagaaccataagtctggaatcacttgcagttattttagctcaattattgagccttagtatggggatcacttatgatgacattaacaaatgccagtgctcaggagctgtctgcattatgaatccagaagcaattcatttcagtggtgtgaagatctttagtaactgcagcttcgaagactttgcacattttatttcaaagcagaagtcccagtgtcttcacaatcagcctcgcttagatccttttttcaaacagcaagcagtgtgtggtaatgcaaagctggaagcaggagaggagtgtgactgtgggactgaacaggattgtgcccttattggagaaacatgctgtgatattgccacatgtagatttaaagccggttcaaactgtgctgaaggaccatgctgcgaaaactgtctatttatgtcaaaagaaagaatgtgtaggccttcctttgaagaatgcgacctccctgaatattgcaatggatcatctgcatcatgcccagaaaaccactatgttcagactgggcatccgtgtggactgaatcaatggatctgtatagatggagtttgtatgagtggggataaacaatgtacagacacatttggcaaagaagtagagtttggcccttcagaatgttattctcaccttaattcaaagactgatgtatctggaaactgtggtataagtgattcaggatacacacagtgtgaagtttgcaggaatcaaagatgtgtgagttcttcatacttgggttatgattgtactactgacaaatgcaatgatagaggtgtatgcaataacaaaaagcactgtcactgtagtgcttcatatttacctccagattgctcagttcaatcagatctatggcctggtgggagtattgacagtggcaattttccacctgtagctataccagccagactccctgaaaggcgctacattgagaacatttaccattccaaaccaatgagatggccatttttcttattcattcctttctttattattttctgtgtactgattgctataatggtgaaagttaatttccaaaggaaaaaatggagaactgaggactattcaagcgatgagcaacctgaaagtgagagtgaacctaaagggtagtctggacaacagagatgccatgatatcacttcttctagagtaattatctgtgatggatggacac

SEQ ID NO: 104627 - DNA, 2480 bp, Homo sapiens
  Payload ID: 543
  Gene Symbol: ADAM2
  Gene Name: ADAM metallopeptidase domain 2
  ENST ID: ENST00000611998
  CDS Start-End: 105-2123
gcctacctcttccaggctgcgtggccggggcgtcatctcgcgcttccaactgccctgtaaccaccaactgccattattccggctgggacccaggacttcaagccatgtggcgcgtcttgtttctgctcagcgggctcggcgggctgcggatggacagtaattttgatagtttacctgtgcaaattacagttccggagaaaatacggtcaataataaaggaaggaattgaatcgcaggcatcctacaaaattgtaattgaagggaaaccatatactgtgaatttaatgcaaaaaaactttttaccccataattttagagtttacagttatagtggcacaggaattatgaaaccacttgaccaagattttcagaatttctgccactaccaagggtatattgaaggttatccaaaatctgtggtgatggttagcacatgtactggactcaggggcgtactacagtttgaaaatgttagttatggaatagaacccctggagtcttcagttggctttgaacatgtaatttaccaagtaaaacataagaaagcagatgtttccttatataatgagaaggatattgaatcaagagatctgtcctttaaattacaaagcgtagagccacagcaagattttgcaaagtatatagaaatgcatgttatagttgaaaaacaattgtataatcatatggggtctgatacaactgttgtcgctcaaaaagttttccagttgattggattgacgaatgctatttttgtttcatttaatattacaattattctgtcttcattggagctttggatagatgaaaataaaattgcaaccactggagaagctaatgagttattacacacatttttaagatggaaaacatcttatcttgttttacgtcctcatgatgtggcatttttacttgtttacagagaaaagtcaaattatgttggtgcaacctttcaagggaagatgtgtgatgcaaactatgcaggaggtgttgttctgcaccccagaaccataagtctggaatcacttgcagttattttagctcaattattgagccttagtatggggatcacttatgatgacattaacaaatgccagtgctcaggagctgtctgcattatgaatccagaagcaattcatttcagtggtgtgaagatctttagtaactgcagcttcgaagactttgcacattttatttcaaagcagaagtcccagtgtcttcacaatcagcctcgcttagatccttttttcaaacagcaagcagtgtgtggtaatgcaaagctggaagcaggagaggagtgtgactgtgggactgaacaggattgtgcccttattggagaaacatgctgtgatattgccacatgtagatttaaagccggttcaaactgtgctgaaggaccatgctgcgaaaactgtctatttatgtcaaaagaaagaatgtgtaggccttcctttgaagaatgcgacctccctgaatattgcaatggatcatctgcatcatgcccagaaaaccactatgttcagactgggcatccgtgtggactgaatcaatggatctgtatagatggagtttgtatgagtggggataaacaatgtacagacacatttggcaaagaagtagagtttggcccttcagaatgttattctcaccttaattcaaagactgatgtatctggaaactgtggtataagtgattcaggatacacacagtgtgaagtttgcaggaatcaaagatgtgtgagttcttcatacttgggttatgattgtactactgacaaatgcaatgatagaggtgtatgcaataacaaaaagcactgtcactgtagtgcttcatatttacctccagattgctcagttcaatcagatctatggcctggtgggagtattgacagtggcaattttccacctgtagctataccagccagactccctgaaaggcgctacattgagaacatttaccattccaaaccaatgagatggccatttttcttattcattcctttctttattattttctgtgtactgattgctataatggtgaaagttaatttccaaaggaaaaaatggagaactgaggactattcaagcgatgagcaacctgaaagtgagagtgaacctaaagggtagtctggacaacagagatgccatgatatcacttcttctagagtaattatctgtgatggatggacacaaaaaaatggaaagaaaagaatgtacattacctggtttcctgggattcaaacctgcatattgtgattttaatttgaccagaaaatatgatatatatgtataatttcacagataatttacttatttaaaaatgcatgataatgagttttacattacaaatttctgtttttttaaagttatcttacgctatttctgttggttagtagacactaattctgtcagtaggggcatggtataaggaaatatcataatgtaatgaggtggtactatgattaaaagccactgttacatttc

SEQ ID NO: 104628 - DNA, 2125 bp, Homo sapiens; identical to SEQ ID NO: 104625
  Payload ID: 543
  Gene Symbol: ADAM2
  Gene Name: ADAM metallopeptidase domain 2
  ENST ID: ENST00000619491
  CDS Start-End: 26-1765

SEQ ID NO: 104629 - DNA, 2672 bp, Homo sapiens; identical to SEQ ID NO: 104623
  Payload ID: 543
  Gene Symbol: ADAM2
  Gene Name: ADAM metallopeptidase domain 2
  Uniprot ID: Q99965
  ENST ID: ENST00000620181
  CDS Start-End: 105-2312

SEQ ID NO: 104630 - DNA, 2480 bp, Homo sapiens; identical to SEQ ID NO: 104627
  Payload ID: 543
  Gene Symbol: ADAM2
  Gene Name: ADAM metallopeptidase domain 2
  ENST ID: ENST00000622267
  CDS Start-End: 105-2123

SEQ ID NO: 104631 - DNA, 2535 bp, Homo sapiens; identical to SEQ ID NO: 104624
  Payload ID: 543
  Gene Symbol: ADAM2
  Gene Name: ADAM metallopeptidase domain 2
  Uniprot ID: Q99965
  ENST ID: ENST00000613160
  CDS Start-End: 25-2175

SEQ ID NO: 104632 - DNA, 2125 bp, Homo sapiens; identical to SEQ ID NO: 104626
  Payload ID: 543
  Gene Symbol: ADAM2
  Gene Name: ADAM metallopeptidase domain 2
  ENST ID: ENST00000633755
  CDS Start-End: 43-2061

SEQ ID NO: 104633 - DNA, 2795 bp, Homo sapiens
  Payload ID: 544
  Gene Symbol: ADAM20
  Gene Name: ADAM metallopeptidase domain 20
  Uniprot ID: O43506
  ENST ID: ENST00000256389
  CDS Start-End: 246-2576
gggagttcagcagtgtgtttaagactagggtcatgcccacatcaatctcagattcccattttatctttcttttttggtatcactcctagtaccaagtcttgtgtctgtcaatatcctgtccaaaaaagaaaaacacaccaaggaaaattaatataggaaaaatttaaaaagttattagaggactgaaaatataaaaatggaacactgaaagacacagagtttttattttcagcactgcagctctgatggtccagctccaccaggacacagatccccagatccctaaaggtcagccatgcaccctgaacagctcagagggaggagccagaccagcagtgcctcacaccttgttctcttctgctctagacagatggctccataatgacagcttcataatggcagtgggtgagcccctggtgcacatcagggtcactcttctgctgctctggtttgggatgtttttgtctatttctggccactctcaggccaggccctcccagtatttcacttctccagaagtggtgatccctttgaaggtgatcagcaggggcagaggtgcaaaggctcctggatggctctcctatagcctgcggtttgggggacagagatacattgtccacatgagggtaaataagctgttgtttgctgcacaccttcctgtgttcacctacacagagcagcatgccctgctccaggatcagcccttcatccaggatgactgctactaccatggttatgtggagggggtccctgagtccttggttgcccttagtacctgttctgggggctttcttggaatgctacagataaatgaccttgtttatgaaatcaagccaattagtgtttctgccacatttgaacacctagtatataagatagacagtgatgatacacagtttccacctatgagatgtgggttaacagaagagaaaatagcacaccagatggagttgcaattgtcatataatttcactctgaagcaaagttcttttgtgggctggtggacccatcagcggtttgttgagctggtagtggtcgtggataatattagatatcttttctctcaaagtaatgcaacaacagtgcagcatgaagtatttaacgttgtcaatatagtggattccttctatcatcctttggaggttgatgtaattttgactggaattgatatatggactgcatcaaatccacttcctaccagtggagacctagataatgttttagaggacttttctatttggaagaattataaccttaataatcgactacaacatgatgttgcacatcttttcataaaagacacacaaggcatgaagcttggtgttgcctatgttaaaggaatatgccagaatccttttaatactggagttgatgtttttgaagacaacaggttggtcgtttttgcaattactttgggccacgagcttggtcataatttgggtatgcaacatgacacccagtggtgtgtgtgcgagctacagtggtgcataatgcatgcctatagaaaggtgacaactaaatttagcaactgcagttatgcccaatattgggacagtactatcagtagtggattatgtattcaaccgcctccatatccagggaatatatttagactgaagtactgtgggaatctagtggttgaagaaggggaggaatgtgactgtggaaccatacggcagtgtgcaaaagatccctgttgtctgttaaactgtactctacatcctggggctgcttgtgcttttggaatatgttgcaaagactgcaaatttctgccatcaggaactttatgtagacaacaagttggtgaatgtgaccttccagagtggtgcaatgggacatcccatcaatgcccagatgatgtgtatgtgcaggacgggatctcctgtaatgtgaatgccttctgctatgaaaagacgtgtaataaccatgatatacaatgtaaagagatttttggccaagatgcaaggagtgcatctcagagttgctaccaagaaatcaacacccaaggaaaccgtttcggtcactgtggtattgtaggcacaacatatgtaaaatgttggacccctgatatcatgtgtgggagggttcagtgtgaaaatgtgggagtaattcccaatctgatagagcattctacagtgcagcagtttcacctcaatgacaccacttgctggggcactgattatcatttagggatggctatacctgatattggtgaggtgaaagatggcacagtatgtggtccagaaaagatctgcatccgtaagaagtgtgccagtatggttcatctgtcacaagcctgtcagcctaagacctgcaacatgaggggaatctgcaacaacaaacaacactgtcactgcaaccatgaatgggcacccccatactgcaaggacaaaggctatggaggtagtgctgatagtggcccacctcctaagaacaacatggaaggattaaatgtgatgggaaagttgcgttacctgtcactattgtgccttcttcctttggttgcttttttattattttgcttacatgtgctttttaagaaacgcacaaaaagtaaagaagatgaagaaggataagagaaatgggaaaaagaaggagactaaactttatacttcatttttaatatccaattttttaatagaaaaatatgaagccatgtctcactgtttaaataaaacttcatggacatttcatgtcaggattgcaagcattagctatcacagcaaaggattcctagcctattcttacttactctacagtgtcttaagcaatattaaaggttccttttcccagaa

SEQ ID NO: 104634 - DNA, 2658 bp, Homo sapiens
  Payload ID: 545
  Gene Symbol: ADAM21
  Gene Name: ADAM metallopeptidase domain 21
  Uniprot ID: Q9UKJ8
  ENST ID: ENST00000603540
  CDS Start-End: 259-2427
ggcttatgtttccctttgttctgtggcctcagctacaaaccattgataaagcatggtataaaccatctagacagaaatggccatggaaactactgtttcttctgatgcactgcagttctgatctaactctgccaggacacagatccacagggtcagccctgcatcctgagcagcttagagggagaagccagaccagcagtgcctcacaccttgtcctcttctgctctggacagatggctccataacgacagcttcataatggcagtggatgggaccctcgtgtacatcagagtcactcttctgctgctctggcttggggtatttttgtctatttccggctactgtcaggctgggccctcccagcatttcacttccccggaagtggtgatccccttgaaggtgatcagcaggggcagaagtgcaaaggctcctggatggctctcctatagtctgcggtttgggggccagaaacacgttgttcatatgagggtcaagaagctcttagtttctagacacctcccagtgttcacctacacagatgaccgtgcactcctggaggatcagctcttcatcccagatgactgttactatcatggttacgtggaggcagcccctgagtctctggttgtgttcagtgcttgttttgggggctttcgaggagtattaaaaataagtggcctcacttatgaaattgaacccatcaggcactctgccacatttgaacacctggtttataagataaacagtaatgagacacaattcccagctatgagatgtggcttaacagagaaggaagtagcacgccaacagttggaatttgaagaggctgagaactcagctctggaaccaaaatctgctggtgactggtggactcatgcatggtttctggagctagttgttgtggtgaaccatgatttcttcatttactctcaaagcaacatctcaaaggtgcaagaggatgtatttcttgttgtcaacatagtggattccatgtataagcagttaggtacttacataattttgattggaattgaaatttggaatcaaggaaatgttttcccaatgacaagcatagaacaggtcctgaacgatttctctcaatggaaacaaatcagtctttcccagctacagcatgatgctgcacatatgttcataaaaaattcacttataagtatacttggcctagcctatgttgcaggaatatgtcgtccacctattgattgtggagttgataattttcaaggagatacctggtctctttttgccaacactgtggcccatgagttaggtcatacgttaggtatgcagcatgatgaagaattctgtttttgtggggaaagaggttgcatcatgaatacttttagagtgccagcagagaaattcaccaattgcagttacgctgattttatgaagaccaccttaaaccagggatcatgtctgcataatcctccaagattgggggaaatctttatgctaaagcgctgtgggaatggtgtggttgaaagagaagagcagtgtgactgtggatccgtacagcagtgtgaacaagacgcctgttgtctgttgaactgcactctaaggcctggggctgcctgtgcttttgggctttgttgcaaagactgcaagttcatgccatcaggggaactctgtagacaagaggtcaatgaatgtgaccttccagaatggtgcaatggaacatctcatcagtgtccagaagatagatatgtgcaggacgggatcccctgtagtgacagtgcctactgctatcaaaagaggtgtaataaccatgaccagcattgcagggagatttttggtaaagatgcaaaaagtgcatctcagaattgctataaagaaatcaattctcagggaaaccgttttggtcactgtggtataaatggcacaacatacctaaaatgtcatatctctgatgtcttttgtgggagagttcaatgtgagaatgtgagagacattcctcttctccaagatcattttactttgcagcacactcatatcaatggtgtcacctgctggggtattgactatcatttaaggatgaacatatctgacattggtgaagtgaaagatggtactgtgtgtggcccaggaaagatctgcatccataagaagtgtgtcagtctgtctgtcttgtcacatgtctgccttcctgagacctgcaatatgaaggggatctgcaataacaaacatcactgccactgtggctatgggtggtccccaccctactgccagcacagaggctatgggggcagtattgacagtggcccagcatctgcaaagagaggagtttttttgccgctgattgtgattccttctttgtctgttttgactttcctgtttactgtcgggcttcttatgtatctacgacaatgttctggtcccaaagaaactaaggctcattcatcaggttaagaaaatgtctctaacttaatattccatgcattagtacactttagtctcttggcagtagaaacattagtacatccctgaaactgagcacatttctgaccatttccagaaagctgcaaagatcttcccttacattagtaccacaaacattgtcattaagttcaagttattcttaacatgtttctatctattgtttattgttttaagcagcaaataaagctacatccttccctc

SEQ ID NO: 104635 - DNA, 2891 bp, Homo sapiens
  Payload ID: 546
  Gene Symbol: ADAM22
  Gene Name: ADAM metallopeptidase domain 22
  Uniprot ID: Q9P0K1
  ENST ID: ENST00000265727
  CDS Start-End: 80-2800
gcggagcgagggaaacggactcggcggcgccggcatgaggagctgagcgtctcgggcgaggcgggctgacggcagcaccatgcaggcggcagtggctgtgtccgtgcccttcttgctgctctgtgtcctggggacctgccctccggcgcgctgcggccaggcaggagacgcctcattgatggagctagagaagaggaaggaaaaccgcttcgtggagcgccagagcatcgtgccactgcgcctcatctaccgctcgggcggcgaagacgaaagtcggcacgacgcgctcgacacgcgggtgcggggcgacctcggtggcccgcagttgactcatgttgaccaagcaagcttccaggttgatgcctttggaacgtcattcattctcgatgtcgtgctaaatcatgatttgctgtcctctgaatacatagagagacacattgaacatggaggcaagactgtggaagttaaaggaggagagcactgttactaccagggccatatccgaggaaaccctgactcatttgttgcattgtcaacatgccacggacttcatgggatgttctatgacgggaaccacacatatctcattgagccagaagaaaatgacactactcaagaggatttccattttcattcagtttacaaatccagactgtttgaattttccttggatgatcttccatctgaatttcagcaagtaaacattactccatcaaaatttattttgaagccaagaccaaaaaggagtaaacggcagcttcgtcgatatcctcgtaatgtagaagaagaaaccaaatacattgaactgatgattgtgaatgatcaccttatgtttaaaaaacatcggctttccgttgtacataccaatacctatgcgaaatctgtggtgaacatggcagatttaatatataaagaccaacttaagaccaggatagtattggttgctatggaaacctgggcgactgacaacaagtttgccatatctgaaaatccattgatcaccctacgtgagtttatgaaatacaggagggattttatcaaagagaaaagtgatgcagttcaccttttttcgggaagtcaatttgagagtagccggagcggggcagcttatattggtgggatttgctcgttgctgaaaggaggaggcgtgaatgaatttgggaaaactgatttaatggctgttacacttgcccagtcattagcccataatattggtattatctcagacaaaagaaagttagcaagtggtgaatgtaaatgcgaggacacgtggtccgggtgcataatgggagacactggctattatcttcctaaaaagttcacccagtgtaatattgaagagtatcatgacttcctgaatagtggaggtggtgcctgccttttcaacaaaccttctaagcttcttgatcctcctgagtgtggcaatggcttcattgaaactggagaggagtgtgattgtggaaccccggccgaatgtgtccttgaaggagcagagtgttgtaagaaatgcaccttgactcaagactctcaatgcagtgacggtctttgctgtaaaaagtgcaagtttcagcctatgggcactgtgtgccgagaagcagtaaatgattgtgatattcgtgaaacgtgctcaggaaattcaagccagtgtgcccctaatattcataaaatggatggatattcatgtgatggtgttcagggaatttgctttggaggaagatgcaaaaccagagatagacaatgcaaatacatttgggggcaaaaggtgacagcatcagacaaatattgctatgagaaactgaatattgaagggacggagaagggtaactgtgggaaagacaaagacacatggatacagtgcaacaaacgggatgtgctttgtggttaccttttgtgtaccaatattggcaatatcccaaggcttggagaactcgatggtgaaatcacatctactttagttgtgcagcaaggaagaacattaaactgcagtggtgggcatgttaagcttgaagaagatgtagatcttggctatgtggaagatgggacaccttgtggtccccaaatgatgtgcttagaacacaggtgtcttcctgtggcttctttcaactttagtacttgcttgagcagtaaagaaggcactatttgctcaggaaatggagtttgcagtaatgagctgaagtgtgtgtgtaacagacactggataggttctgattgcaacacttacttccctcacaatgatgatgcaaagactggtatcactctgtctggcaatggtgttgctggcaccaatatcataataggcataattgctggcaccattttagtgctggccctcatattaggaataactgcgtggggttataaaaactatcgagaacagagacagttaccccagggagattatgtaaaaaagcctggagatggtgactctttttatagcgacattcctcccggagtcagcacaaactcagcatctagttctaagaagaggtcaaatgggctctctcattcttggagtgaaaggattccagacacaaaacatatttcagacatctgtgaaaatgggcgacctcgaagtaactcttggcaaggtaacctgggaggcaacaaaaagaaaatcagaggcaaaagatttagacctcggtctaattcaactgagactttatctcctgccaagtctccttcttcatcaactgggtctattgcctccagcagaaaatacccttacccaatgcctccacttcctgatgaggacaagaaagtgaaccgacaaagtgccaggctatgggagacatccatttaagatcaactgtttacatgtgatacatcgaaaactgtttacttcaacttttatagaaacccaggctcatggaatcactgcaaatctatctgct

SEQ ID NO: 104636 - DNA, 2784 bp, Homo sapiens
  Payload ID: 546
  Gene Symbol: ADAM22
  Gene Name: ADAM metallopeptidase domain 22
  Uniprot ID: Q9P0K1
  ENST ID: ENST00000398201
  CDS Start-End: 120-2699
gccggggctgggtggaggtggccgcggggaccccgggggcgcggagcgagggaaacggactcggcggcgccggcatgaggagctgagcgtctcgggcgaggcgggctgacggcagcaccatgcaggcggcagtggctgtgtccgtgcccttcttgctgctctgtgtcctggggacctgccctccggcgcgctgcggccaggcaggagacgcctcattgatggagctagagaagaggaaggaaaaccgcttcgtggagcgccagagcatcgtgccactgcgcctcatctaccgctcgggcggcgaagacgaaagtcggcacgacgcgctcgacacgcgggtgcggggcgacctcggtggcccgcagttgactcatgttgaccaagcaagcttccaggttgatgcctttggaacgtcattcattctcgatgtcgtgctaaatcatgatttgctgtcctctgaatacatagagagacacattgaacatggaggcaagactgtggaagttaaaggaggagagcactgttactaccagggccatatccgaggaaaccctgactcatttgttgcattgtcaacatgccacggacttcatgggatgttctatgacgggaaccacacatatctcattgagccagaagaaaatgacactactcaagaggatttccattttcattcagtttacaaatccagactgtttgaattttccttggatgatcttccatctgaatttcagcaagtaaacattactccatcaaaatttattttgaagccaagaccaaaaaggagtaaacggcagcttcgtcgatatcctcgtaatgtagaagaagaaaccaaatacattgaactgatgattgtgaatgatcaccttatgtttaaaaaacatcggctttccgttgtacataccaatacctatgcgaaatctgtggtgaacatggcagatttaatatataaagaccaacttaagaccaggatagtattggttgctatggaaacctgggcgactgacaacaagtttgccatatctgaaaatccattgatcaccctacgtgagtttatgaaatacaggagggattttatcaaagagaaaagtgatgcagttcaccttttttcgggaagtcaatttgagagtagccggagcggggcagcttatattggtgggatttgctcgttgctgaaaggaggaggcgtgaatgaatttgggaaaactgatttaatggctgttacacttgcccagtcattagcccataatattggtattatctcagacaaaagaaagttagcaagtggtgaatgtaaatgcgaggacacgtggtccgggtgcataatgggagacactggctattatcttcctaaaaagttcacccagtgtaatattgaagagtatcatgacttcctgaatagtggaggtggtgcctgccttttcaacaaaccttctaagcttcttgatcctcctgagtgtggcaatggcttcattgaaactggagaggagtgtgattgtggaaccccggccgaatgtgtccttgaaggagcagagtgttgtaagaaatgcaccttgactcaagactctcaatgcagtgacggtctttgctgtaaaaagtgcaagtttcagcctatgggcactgtgtgccgagaagcagtaaatgattgtgatattcgtgaaacgtgctcaggaaattcaagccagtgtgcccctaatattcataaaatggatggatattcatgtgatggtgttcagggaatttgctttggaggaagatgcaaaaccagagatagacaatgcaaatacatttgggggcaaaaggtgacagcatcagacaaatattgctatgagaaactgaatattgaagggacggagaagggtaactgtgggaaagacaaagacacatggatacagtgcaacaaacgggatgtgctttgtggttaccttttgtgtaccaatattggcaatatcccaaggcttggagaactcgatggtgaaatcacatctactttagttgtgcagcaaggaagaacattaaactgcagtggtgggcatgttaagcttgaagaagatgtagatcttggctatgtggaagatgggacaccttgtggtccccaaatgatgtgcttagaacacaggtgtcttcctgtggcttctttcaactttagtacttgcttgagcagtaaagaaggcactatttgctcaggaaatggagtttgcagtaatgagctgaagtgtgtgtgtaacagacactggataggttctgattgcaacacttacttccctcacaatgatgatgcaaagactggtatcactctgtctggcaatggtgttgctggcaccaatatcataataggcataattgctggcaccattttagtgctggccctcatattaggaataactgcgtggggttataaaaactatcgagaacagagacagttaccccagggagattatgtaaaaaagcctggagatggtgactctttttatagcgacattcctcccggagtcagcacaaactcagcatctagttctaagaagaggtcaaatgggctctctcattcttggagtgaaaggattccagacacaaaacatatttcagacatctgtgaaaatgggcgacctcgaagtaactcttggcaaggtaacctgggaggcaacaaaaagaaaatcagaggcaaaagatttagacctcggtctaattcaactgagtaagtctgaacctctaatggaaaaaggcactccaaggtcctgtgcaaatagtgtcaaaagtaaattaagcagatagtcaaagaactgt

SEQ ID NO: 104637 - DNA, 2697 bp, Homo sapiens
  Payload ID: 546
  Gene Symbol: ADAM22
  Gene Name: ADAM metallopeptidase domain 22
  ENST ID: ENST00000398203
  CDS Start-End: 285-2697
aaagcctgtttttctccttctgaagaggaatggggagaatgggaaaggggtgccctgcttctgggccccgctcctggttgctctcggatgagctggtccaaggctctcgggctggtgtctctgcgtccttcccagttgggttccgagagggagggggcggtggggattttcgtaggggagacgtaggactgcaggatggaggagtgagggtcagggtcattattttcgccttttctctccactccctcctttcccggttcctgcctggaggagacgcctcattgatggagctagagaagaggaaggaaaaccgcttcgtggagcgccagagcatcgtgccactgcgcctcatctaccgctcgggcggcgaagacgaaagtcggcacgacgcgctcgacacgcgggtgcggggcgacctcggtggcccgcagttgactcatgttgaccaagcaagcttccaggttgatgcctttggaacgtcattcattctcgatgtcgtgctaaatcatgatttgctgtcctctgaatacatagagagacacattgaacatggaggcaagactgtggaagttaaaggaggagagcactgttactaccagggccatatccgaggaaaccctgactcatttgttgcattgtcaacatgccacggacttcatgggatgttctatgacgggaaccacacatatctcattgagccagaagaaaatgacactactcaagaggatttccattttcattcagtttacaaatccagactgtttgaattttccttggatgatcttccatctgaatttcagcaagtaaacattactccatcaaaatttattttgaagccaagaccaaaaaggagtaaacggcagcttcgtcgatatcctcgtaatgtagaagaagaaaccaaatacattgaactgatgattgtgaatgatcaccttatgtttaaaaaacatcggctttccgttgtacataccaatacctatgcgaaatctgtggtgaacatggcagatttaatatataaagaccaacttaagaccaggatagtattggttgctatggaaacctgggcgactgacaacaagtttgccatatctgaaaatccattgatcaccctacgtgagtttatgaaatacaggagggattttatcaaagagaaaagtgatgcagttcaccttttttcgggaagtcaatttgagagtagccggagcggggcagcttatattggtgggatttgctcgttgctgaaaggaggaggcgtgaatgaatttgggaaaactgatttaatggctgttacacttgcccagtcattagcccataatattggtattatctcagacaaaagaaagttagcaagtggtgaatgtaaatgcgaggacacgtggtccgggtgcataatgggagacactggctattatcttcctaaaaagttcacccagtgtaatattgaagagtatcatgacttcctgaatagtggaggtggtgcctgccttttcaacaaaccttctaagcttcttgatcctcctgagtgtggcaatggcttcattgaaactggagaggagtgtgattgtggaaccccggccgaatgtgtccttgaaggagcagagtgttgtaagaaatgcaccttgactcaagactctcaatgcagtgacggtctttgctgtaaaaagtgcaagtttcagcctatgggcactgtgtgccgagaagcagtaaatgattgtgatattcgtgaaacgtgctcaggaaattcaagccagtgtgcccctaatattcataaaatggatggatattcatgtgatggtgttcagggaatttgctttggaggaagatgcaaaaccagagatagacaatgcaaatacatttgggggcaaaaggtgacagcatcagacaaatattgctatgagaaactgaatattgaagggacggagaagggtaactgtgggaaagacaaagacacatggatacagtgcaacaaacgggatgtgctttgtggttaccttttgtgtaccaatattggcaatatcccaaggcttggagaactcgatggtgaaatcacatctactttagttgtgcagcaaggaagaacattaaactgcagtggtgggcatgttaagcttgaagaagatgtagatcttggctatgtggaagatgggacaccttgtggtccccaaatgatgtgcttagaacacaggtgtcttcctgtggcttctttcaactttagtacttgcttgagcagtaaagaaggcactatttgctcaggaaatggagtttgcagtaatgagctgaagtgtgtgtgtaacagacactggataggttctgattgcaacacttacttccctcacaatgatgatgcaaagactggtatcactctgtctggcaatggtgttgctggcaccaatatcataataggcataattgctggcaccattttagtgctggccctcatattaggaataactgcgtggggttataaaaactatcgagaacagagacagttaccccagggagattatgtaaaaaagcctggagatggtgactctttttatagcgacattcctcccggagtcagcacaaactcagcatctagttctaagaagaggtcaaatgggctctctcattcttggagtgaaaggattccagacacaaaacatatttcagacatctgtgaaaatgggcgacctcgaagtaactcttggcaaggta

SEQ ID NO: 104638 - DNA, 9334 bp, Homo sapiens
  Payload ID: 546
  Gene Symbol: ADAM22
  Gene Name: ADAM metallopeptidase domain 22
  Uniprot ID: Q9P0K1
  ENST ID: ENST00000398204
  CDS Start-End: 324-2936
cgggcgctcgctccctgccgagctcttgtcgcccgcccgagcctttgccaggggatgaggtgggaggcgctagaaaccacttagctacagccaaccgcccaatgcagcactcgctcgctccccccgccagcggaagcgtccgcgaagcacaatgcagcactgagccgcggtggaggttgcagcgccacggccgccgcagcaccggccggggctgggtggaggtggccgcggggaccccgggggcgcggagcgagggaaacggactcggcggcgccggcatgaggagctgagcgtctcgggcgaggcgggctgacggcagcaccatgcaggcggcagtggctgtgtccgtgcccttcttgctgctctgtgtcctggggacctgccctccggcgcgctgcggccaggcaggagacgcctcattgatggagctagagaagaggaaggaaaaccgcttcgtggagcgccagagcatcgtgccactgcgcctcatctaccgctcgggcggcgaagacgaaagtcggcacgacgcgctcgacacgcgggtgcggggcgacctcggtggcccgcagttgactcatgttgaccaagcaagcttccaggttgatgcctttggaacgtcattcattctcgatgtcgtgctaaatcatgatttgctgtcctctgaatacatagagagacacattgaacatggaggcaagactgtggaagttaaaggaggagagcactgttactaccagggccatatccgaggaaaccctgactcatttgttgcattgtcaacatgccacggacttcatgggatgttctatgacgggaaccacacatatctcattgagccagaagaaaatgacactactcaagaggatttccattttcattcagtttacaaatccagactgtttgaattttccttggatgatcttccatctgaatttcagcaagtaaacattactccatcaaaatttattttgaagccaagaccaaaaaggagtaaacggcagcttcgtcgatatcctcgtaatgtagaagaagaaaccaaatacattgaactgatgattgtgaatgatcaccttatgtttaaaaaacatcggctttccgttgtacataccaatacctatgcgaaatctgtggtgaacatggcagatttaatatataaagaccaacttaagaccaggatagtattggttgctatggaaacctgggcgactgacaacaagtttgccatatctgaaaatccattgatcaccctacgtgagtttatgaaatacaggagggattttatcaaagagaaaagtgatgcagttcaccttttttcgggaagtcaatttgagagtagccggagcggggcagcttatattggtgggatttgctcgttgctgaaaggaggaggcgtgaatgaatttgggaaaactgatttaatggctgttacacttgcccagtcattagcccataatattggtattatctcagacaaaagaaagttagcaagtggtgaatgtaaatgcgaggacacgtggtccgggtgcataatgggagacactggctattatcttcctaaaaagttcacccagtgtaatattgaagagtatcatgacttcctgaatagtggaggtggtgcctgccttttcaacaaaccttctaagcttcttgatcctcctgagtgtggcaatggcttcattgaaactggagaggagtgtgattgtggaaccccggccgaatgtgtccttgaaggagcagagtgttgtaagaaatgcaccttgactcaagactctcaatgcagtgacggtctttgctgtaaaaagtgcaagtttcagcctatgggcactgtgtgccgagaagcagtaaatgattgtgatattcgtgaaacgtgctcaggaaattcaagccagtgtgcccctaatattcataaaatggatggatattcatgtgatggtgttcagggaatttgctttggaggaagatgcaaaaccagagatagacaatgcaaatacatttgggggcaaaaggtgacagcatcagacaaatattgctatgagaaactgaatattgaagggacggagaagggtaactgtgggaaagacaaagacacatggatacagtgcaacaaacgggatgtgctttgtggttaccttttgtgtaccaatattggcaatatcccaaggcttggagaactcgatggtgaaatcacatctactttagttgtgcagcaaggaagaacattaaactgcagtggtgggcatgttaagcttgaagaagatgtagatcttggctatgtggaagatgggacaccttgtggtccccaaatgatgtgcttagaacacaggtgtcttcctgtggcttctttcaactttagtacttgcttgagcagtaaagaaggcactatttgctcaggaaatggagtttgcagtaatgagctgaagtgtgtgtgtaacagacactggataggttctgattgcaacacttacttccctcacaatgatgatgcaaagactggtatcactctgtctggcaatggtgttgctggcaccaatatcataataggcataattgctggcaccattttagtgctggccctcatattaggaataactgcgtggggttataaaaactatcgagaacagaggtcaaatgggctctctcattcttggagtgaaaggattccagacacaaaacatatttcagacatctgtgaaaatgggcgacctcgaagtaactcttggcaaggtaacctgggaggcaacaaaaagaaaatcagaggcaaaagatttagacctcggtctaattcaactgagactttatctcctgccaagtctccttcttcatcaactgggtctattgcctccagcagaaaatacccttacccaatgcctccacttcctgatgaggacaagaaagtgaaccgacaaagtgccaggctatgggagacatccatttaagatcaactgtttacatgtgatacatcgaaaactgtttacttcaacttttatagaaacccaggctcatggaatcactgcaaatctatctgctcttcagacaatacgaagaccctctgagatgctacagaggagaggaagcggagtttcacatctggttaccattttctttttgtcattggcttaggatttaactaaccatgaaaagaactactgaaatattacactataacatggaacaataaaggtactggtatgttaatggataatccgcatgacagataatatgtagaaatattcataaagttaactcacatgacccaaatgtagcaagtttcctaaggtacaatagtggattcagaacttgacgttctgaggcacatcctcactgtaaacagtaatgctatatgcatgaagcttctgtttattgttttccatatttaaggaaacaacatcccataatagaaatgagcatgcagggctaaggcatataggatttttctgcaggactttaaagctttgaaaggccaatatcccataggctaactttaaacatgtatttttatttttgttttgttttttacttttcatatttatattagcatacaaggacaattgtatatatgtaacatttttaaaattttaaaaaaatgcagctgttacacacaagtgtattttgccaaatgcctaaaaattccgtcacaatcacatcatcgtcatccatccagtgatcttcaaagactataagcaggtaatgtaaatatagtggtcaatgctgtaaatgtgtctctccataattcgtatttgtccaaaacatgtgatatccctttaacctgtgcacagtctggaggcagttttattgagtgagtagttgagtgagagaacaaaatgcccagcaaaacttctggcctccacagtttgctgatgcaggagcccactctgctgccgatgggctgctccctggaaatcatctatcccatccgtccatcccatctcatcccagtgagccagcccctcagcagtgtgtgctgctgagattaagcaagtgcaccaaagacacatgagacaacgtactgccagtgagctggtagcttctggtttgccaatactctaaccctttgtggcctgaagttttgttccttggcaaaactttgtagtcacccttatctgtgaaatgaatgacttgttttaacaaaaacaactttgacactgttgattaagaatatttgtcatcactgggatgtgaatcccaacaagtcattctgcactgactctgaagcaagatgacggaagattctactgtttgagttgagcagcttcaaccattcataaagggttaagttagatctaaaccacagagatgcagcatctgcgaagttacactaacagctggtgggggaaagaatctgatgctttgaaacatatatttttaatccataggaaaataagattctattttaaaagacccttctttaaaaccaaagtttgatagctgttataatggcagatctgtcattccaaaagaaagctagctaccctagtgaggctggagattgatgggctcaatcacatggtctgctctgaagtatacttctgatttcctcatttgctgtgtgttcttaagaggaatggaatctgcagacaggttttcagatatactctcttaaatttgatcctctcccatagtatccatggacaaaatccatatcatcttcatatgtaatcaatttgattacatatcatgcccaaactgaagggccgagttagaaggcagcattttatactgtgtgtttatgtcttctgtaatggacctctcttttgaaagtctttgaaatgtttggaaagcaatttaatgatccaaaattacataatgtaaaacagcatttttcatgacaggaagggatgtgattgttgatatgaccataaagcgatccatcaggccaaggtttgggtgagtgttgggcagtgttgccacatagctcaagccaagaacagaagggcagacagattgaaagatgtagcaaataaagtgactttttaccaagatcactgtaacgtgcactgaatgtttcctggtactgagtgtacaaaaggctaatgctataaggtttattttgactataaaagagtttatagatttgaatataaggtgcctcatgtaaatatgcttcctagttacaggtacacaaactctaatttgaaagaatccacaaatggctagctgagaagttaacagatctctatcattcgtctgtgtgtctttcttccctcacctatttttacatgaaattattatttcaaatgaaaatcatgatcatgtgccttttgggagacatggtttctctagaggtatatagtttgtaattacccgccttggtaataaccttcctgtggaactgactaaaaatttttgttttatttgtagagattatgatttgaggtatacagtaactttaatgttctattcttggaatctactctatctcccatgtttaaacattcttagagccatttgtgggattcattgacaaatttatagtctcaagggagagtttcaagaagtatctatatgtatactcatggttggggttctagaggcattacatctaaatatttatgacttttcatccaccgaggtaggtagcattaaatatacaagcacagcattatttctctttaaatatctattttggagagaaactttgaggccgtatcacagtttatatcatgcaactaatatttatatttcccaatccactacaaaatcattgctaagcagaagagagcagttatttggcctttatgttccattgtatgcctttttcccctcttccagttttatgcattgataagactacagattggcaccctgctgcctgagaagttccatttatccatagtcattgcagtgcagtaaaccctgatttaaaggaacatttaagtctctccagtaagtgtgaacaggaaggcatgggatagaagagagtccttatggagtggactggccacatgaactgtcctccagccactctttatttagatgggaagtggcatggtcctctgaacgctgcaggctggaaatgatccccagggcacatgcaatctgtggaaaggaatacatcggacagtgcaacatggtgagggctttcaatttgctgtggttgctgtatttttaacaagacacccggagcttcgattaggaataacctatcattagagttgttcctttaaaaaatgttgatgaataaagcaaatgtgggtttaaaatgccaacttatttttcactttgatattggtgctttattaagtgataccatagtttctctctcttttccctgttactttaaaaagaattttaaaattgtgtttgtatataaggtcagtctggcatagaatttctgaaagtaacattaataggatttctaaagaagttgtcagaaagacaaaattggatattctctgcactttcagagaaggactatttatgtttgaatttcataacaggcttacatttcttttctattgattcccttgcatatctacataatttaatcctgtctattgtcccagatctcttgtggctactttacctgttaccttttttgggattttgttctttatgttttacagttaccttcggaccagaagatatatggtatttttattcacttttttcagtgttttaaaataaggtttgttcatttattcattttatccattcatttcctattgtcgtatagttctaaccatatatatagtactttaaatattttcttatgttattatttaacacaataataaattcttatctaaagaaaagattattttactttattttacttaaaggaaagagaatttattggcaggatattgagtagcttgtagagtatatggaaggggagagccaagttaggaactggcaggagcgaggagggacaagacagctgcctgcacagtctgataggacacatctggctgctgccactggatgcccacatgggcagcgtgttgtaaatatcaccctaccagttggtaagttggcatgaattttccatgaaacacttgactgccatttgcagcatcatatctactttttatgcacctaattatatttttcctttcacttttatgtttttttctaaaactgccacctaaatacctttccactccgttaaatgtatggagtcaagataaatttctcattcttgctctacagtttaagatgtataagaagtaaacacttccgtggaatagggcttaatttggggctcaaatgttttgttttcctcctgagatgtttttgaatggataagactactctggttttggatgcagcaacttttctcctggcatggaagaactaaggactttgataaacagtttcccattgatagtataatataatgaggggcccagtctgctcttgtgaaaattggctgagcggcagcagcccatcccagctgtgtgtgagtagccccgctgttaaaagtacacctgctgggaattgttggcacatgctcatagcatatgctctgtgggggaggtgcttttaattccaagaggagcttttctcccacatctgcggatgcagaacaaagatgcagcaggactttagaaaacaggagtgtttctactgacattttattcattgctttgttagtcccgcaaatggagcaacttctggttgtttgtaagcagaaaaacaaaacattcaaaaccaaaaacctaattagtacttttgtcctttatatccctaggatgctctagggagtagaggtggcaggcatctttatcttcacccactggcacattagcagcttatgcaacttaggaagtcactgggagatgagtcctaaaagcctgaatttcaggatggggaggagataagaagcagagaactttgggagaccatggggcatttagtcctggcatagacacagaatggatattcacaggaagattcctgaggccagatatgcaggagagcacacattgtcacaaggggtgtggtgggaagagaggtgctggatgcctaagacagacttctgtgcttggcagattgactgagtgttgactctgaatactttgtggtccagtccataataggccagtcactcctgcctgatgcatccctgttgcactgttcataaaacctgtatcatatggggaagcttcaaggctggcaggcttttcatcaagtaatcatcattccatgttcctacgtatccttgaaatcaaaaccaggcaatatgtgtgtttttggttttgttttacaaaaaggcatacaatgagacgaattcttaagataatgcacatacagaatcatcaataaagtttcaaagagtttatgaagaaaaggtattttcctttcttgtaaaaaatgttatatatatataatattctgatctgcattcaccttagggcttagcctcttattttatgaattttcaggctgtgatttgtgttggatggctaagctctaaaataatgcaaatagccccaatctttaaatatagcggtgctaagttgaacaagtaacacaatacagaaaatgctgatatgaatacttagtaataatacaaaagttcctgctaaattatatatgtgtatcactgcctgactagaaaccccacttttcttttctaatccagcacaaaatcaaactctgattctacaaccagtctttttaaagggcaaaaatgactcaacacctttgttttgtatggaaaacttttttttttacactaactgcaaaactgctttaaaaaaaggcttattcaggatagataagcatgtactccttttttaacttgctggaagacttgcccctccaaactagcacccccaaaagacaacttctttcagaaacggggtgttttacctaaacatagtagcttacatgttagccagcagtaggtcggcactagtgttttccacggttatcacctttgacaggtgatgtgcatctatagatagtggaagccaccccatgaggaggtgttaatagcagcatggtttcacttttggtaatcaggtaatcatgtgtatatacttagattcgcattattttaacatttctctgctactctgcacttcaggttcgttaagctattttaataattactggggttatggcaaacaccaatggaaatgtatatggcaactgctttcctgagcaagtgtgatttgttttatggctgttcaagttataaaattgttcttacattgtaggtaaacaaaatcttgatgtttttaaaggtcactgtaacttaaggttcaaatttctggcacagttttattagtattcacttcggaagctaataagataccatggttttctatgttactcccattgtaacattagtaaagtgactttcaataaaagatttatgttattttga

SEQ ID NO: 104639 - DNA, 9144 bp, Homo sapiens
  Payload ID: 546
  Gene Symbol: ADAM22
  Gene Name: ADAM metallopeptidase domain 22
  Uniprot ID: Q9P0K1
  ENST ID: ENST00000398209
  CDS Start-End: 47-2746
catgaggagctgagcgtctcgggcgaggcgggctgacggcagcaccatgcaggcggcagtggctgtgtccgtgcccttcttgctgctctgtgtcctggggacctgccctccggcgcgctgcggccaggcaggagacgcctcattgatggagctagagaagaggaaggaaaaccgcttcgtggagcgccagagcatcgtgccactgcgcctcatctaccgctcgggcggcgaagacgaaagtcggcacgacgcgctcgacacgcgggtgcggggcgacctcggtggcccgcagttgactcatgttgaccaagcaagcttccaggttgatgcctttggaacgtcattcattctcgatgtcgtgctaaatcatgatttgctgtcctctgaatacatagagagacacattgaacatggaggcaagactgtggaagttaaaggaggagagcactgttactaccagggccatatccgaggaaaccctgactcatttgttgcattgtcaacatgccacggacttcatgggatgttctatgacgggaaccacacatatctcattgagccagaagaaaatgacactactcaagaggatttccattttcattcagtttacaaatccagactgtttgaattttccttggatgatcttccatctgaatttcagcaagtaaacattactccatcaaaatttattttgaagccaagaccaaaaaggagtaaacggcagcttcgtcgatatcctcgtaatgtagaagaagaaaccaaatacattgaactgatgattgtgaatgatcaccttatgtttaaaaaacatcggctttccgttgtacataccaatacctatgcgaaatctgtggtgaacatggcagatttaatatataaagaccaacttaagaccaggatagtattggttgctatggaaacctgggcgactgacaacaagtttgccatatctgaaaatccattgatcaccctacgtgagtttatgaaatacaggagggattttatcaaagagaaaagtgatgcagttcaccttttttcgggaagtcaatttgagagtagccggagcggggcagcttatattggtgggatttgctcgttgctgaaaggaggaggcgtgaatgaatttgggaaaactgatttaatggctgttacacttgcccagtcattagcccataatattggtattatctcagacaaaagaaagttagcaagtggtgaatgtaaatgcgaggacacgtggtccgggtgcataatgggagacactggctattatcttcctaaaaagttcacccagtgtaatattgaagagtatcatgacttcctgaatagtggaggtggtgcctgccttttcaacaaaccttctaagcttcttgatcctcctgagtgtggcaatggcttcattgaaactggagaggagtgtgattgtggaaccccggccgaatgtgtccttgaaggagcagagtgttgtaagaaatgcaccttgactcaagactctcaatgcagtgacggtctttgctgtaaaaagtgcaagtttcagcctatgggcactgtgtgccgagaagcagtaaatgattgtgatattcgtgaaacgtgctcaggaaattcaagccagtgtgcccctaatattcataaaatggatggatattcatgtgatggtgttcagggaatttgctttggaggaagatgcaaaaccagagatagacaatgcaaatacatttgggggcaaaaggtgacagcatcagacaaatattgctatgagaaactgaatattgaagggacggagaagggtaactgtgggaaagacaaagacacatggatacagtgcaacaaacgggatgtgctttgtggttaccttttgtgtaccaatattggcaatatcccaaggcttggagaactcgatggtgaaatcacatctactttagttgtgcagcaaggaagaacattaaactgcagtggtgggcatgttaagcttgaagaagatgtagatcttggctatgtggaagatgggacaccttgtggtccccaaatgatgtgcttagaacacaggtgtcttcctgtggcttctttcaactttagtacttgcttgagcagtaaagaaggcactatttgctcaggaaatggagtttgcagtaatgagctgaagtgtgtgtgtaacagacactggataggttctgattgcaacacttacttccctcacaatgatgatgcaaagactggtatcactctgtctggcaatggtgttgctggcaccaatatcataataggcataattgctggcaccattttagtgctggccctcatattaggaataactgcgtggggttataaaaactatcgagaacagaggtcaaatgggctctctcattcttggagtgaaaggattccagacacaaaacatatttcagacatctgtgaaaatgggcgacctcgaagtaactcttggcaaggtaacctgggaggcaacaaaaagaaaatcagaggcaaaagatttagacctcggtctaattcaactgagtatttaaacccatggttcaaaagagactataatgtagctaagtgggtagaagatgtgaataaaaacactgaaggaccatactttaggactttatctcctgccaagtctccttcttcatcaactgggtctattgcctccagcagaaaatacccttacccaatgcctccacttcctgatgaggacaagaaagtgaaccgacaaagtgccaggctatgggagacatccatttaagatcaactgtttacatgtgatacatcgaaaactgtttacttcaacttttatagaaacccaggctcatggaatcactgcaaatctatctgctcttcagacaatacgaagaccctctgagatgctacagaggagaggaagcggagtttcacatctggttaccattttctttttgtcattggcttaggatttaactaaccatgaaaagaactactgaaatattacactataacatggaacaataaaggtactggtatgttaatggataatccgcatgacagataatatgtagaaatattcataaagttaactcacatgacccaaatgtagcaagtttcctaaggtacaatagtggattcagaacttgacgttctgaggcacatcctcactgtaaacagtaatgctatatgcatgaagcttctgtttattgttttccatatttaaggaaacaacatcccataatagaaatgagcatgcagggctaaggcatataggatttttctgcaggactttaaagctttgaaaggccaatatcccataggctaactttaaacatgtatttttatttttgttttgttttttacttttcatatttatattagcatacaaggacaattgtatatatgtaacatttttaaaattttaaaaaaatgcagctgttacacacaagtgtattttgccaaatgcctaaaaattccgtcacaatcacatcatcgtcatccatccagtgatcttcaaagactataagcaggtaatgtaaatatagtggtcaatgctgtaaatgtgtctctccataattcgtatttgtccaaaacatgtgatatccctttaacctgtgcacagtctggaggcagttttattgagtgagtagttgagtgagagaacaaaatgcccagcaaaacttctggcctccacagtttgctgatgcaggagcccactctgctgccgatgggctgctccctggaaatcatctatcccatccgtccatcccatctcatcccagtgagccagcccctcagcagtgtgtgctgctgagattaagcaagtgcaccaaagacacatgagacaacgtactgccagtgagctggtagcttctggtttgccaatactctaaccctttgtggcctgaagttttgttccttggcaaaactttgtagtcacccttatctgtgaaatgaatgacttgttttaacaaaaacaactttgacactgttgattaagaatatttgtcatcactgggatgtgaatcccaacaagtcattctgcactgactctgaagcaagatgacggaagattctactgtttgagttgagcagcttcaaccattcataaagggttaagttagatctaaaccacagagatgcagcatctgcgaagttacactaacagctggtgggggaaagaatctgatgctttgaaacatatatttttaatccataggaaaataagattctattttaaaagacccttctttaaaaccaaagtttgatagctgttataatggcagatctgtcattccaaaagaaagctagctaccctagtgaggctggagattgatgggctcaatcacatggtctgctctgaagtatacttctgatttcctcatttgctgtgtgttcttaagaggaatggaatctgcagacaggttttcagatatactctcttaaatttgatcctctcccatagtatccatggacaaaatccatatcatcttcatatgtaatcaatttgattacatatcatgcccaaactgaagggccgagttagaaggcagcattttatactgtgtgtttatgtcttctgtaatggacctctcttttgaaagtctttgaaatgtttggaaagcaatttaatgatccaaaattacataatgtaaaacagcatttttcatgacaggaagggatgtgattgttgatatgaccataaagcgatccatcaggccaaggtttgggtgagtgttgggcagtgttgccacatagctcaagccaagaacagaagggcagacagattgaaagatgtagcaaataaagtgactttttaccaagatcactgtaacgtgcactgaatgtttcctggtactgagtgtacaaaaggctaatgctataaggtttattttgactataaaagagtttatagatttgaatataaggtgcctcatgtaaatatgcttcctagttacaggtacacaaactctaatttgaaagaatccacaaatggctagctgagaagttaacagatctctatcattcgtctgtgtgtctttcttccctcacctatttttacatgaaattattatttcaaatgaaaatcatgatcatgtgccttttgggagacatggtttctctagaggtatatagtttgtaattacccgccttggtaataaccttcctgtggaactgactaaaaatttttgttttatttgtagagattatgatttgaggtatacagtaactttaatgttctattcttggaatctactctatctcccatgtttaaacattcttagagccatttgtgggattcattgacaaatttatagtctcaagggagagtttcaagaagtatctatatgtatactcatggttggggttctagaggcattacatctaaatatttatgacttttcatccaccgaggtaggtagcattaaatatacaagcacagcattatttctctttaaatatctattttggagagaaactttgaggccgtatcacagtttatatcatgcaactaatatttatatttcccaatccactacaaaatcattgctaagcagaagagagcagttatttggcctttatgttccattgtatgcctttttcccctcttccagttttatgcattgataagactacagattggcaccctgctgcctgagaagttccatttatccatagtcattgcagtgcagtaaaccctgatttaaaggaacatttaagtctctccagtaagtgtgaacaggaaggcatgggatagaagagagtccttatggagtggactggccacatgaactgtcctccagccactctttatttagatgggaagtggcatggtcctctgaacgctgcaggctggaaatgatccccagggcacatgcaatctgtggaaaggaatacatcggacagtgcaacatggtgagggctttcaatttgctgtggttgctgtatttttaacaagacacccggagcttcgattaggaataacctatcattagagttgttcctttaaaaaatgttgatgaataaagcaaatgtgggtttaaaatgccaacttatttttcactttgatattggtgctttattaagtgataccatagtttctctctcttttccctgttactttaaaaagaattttaaaattgtgtttgtatataaggtcagtctggcatagaatttctgaaagtaacattaataggatttctaaagaagttgtcagaaagacaaaattggatattctctgcactttcagagaaggactatttatgtttgaatttcataacaggcttacatttcttttctattgattcccttgcatatctacataatttaatcctgtctattgtcccagatctcttgtggctactttacctgttaccttttttgggattttgttctttatgttttacagttaccttcggaccagaagatatatggtatttttattcacttttttcagtgttttaaaataaggtttgttcatttattcattttatccattcatttcctattgtcgtatagttctaaccatatatatagtactttaaatattttcttatgttattatttaacacaataataaattcttatctaaagaaaagattattttactttattttacttaaaggaaagagaatttattggcaggatattgagtagcttgtagagtatatggaaggggagagccaagttaggaactggcaggagcgaggagggacaagacagctgcctgcacagtctgataggacacatctggctgctgccactggatgcccacatgggcagcgtgttgtaaatatcaccctaccagttggtaagttggcatgaattttccatgaaacacttgactgccatttgcagcatcatatctactttttatgcacctaattatatttttcctttcacttttatgtttttttctaaaactgccacctaaatacctttccactccgttaaatgtatggagtcaagataaatttctcattcttgctctacagtttaagatgtataagaagtaaacacttccgtggaatagggcttaatttggggctcaaatgttttgttttcctcctgagatgtttttgaatggataagactactctggttttggatgcagcaacttttctcctggcatggaagaactaaggactttgataaacagtttcccattgatagtataatataatgaggggcccagtctgctcttgtgaaaattggctgagcggcagcagcccatcccagctgtgtgtgagtagccccgctgttaaaagtacacctgctgggaattgttggcacatgctcatagcatatgctctgtgggggaggtgcttttaattccaagaggagcttttctcccacatctgcggatgcagaacaaagatgcagcaggactttagaaaacaggagtgtttctactgacattttattcattgctttgttagtcccgcaaatggagcaacttctggttgtttgtaagcagaaaaacaaaacattcaaaaccaaaaacctaattagtacttttgtcctttatatccctaggatgctctagggagtagaggtggcaggcatctttatcttcacccactggcacattagcagcttatgcaacttaggaagtcactgggagatgagtcctaaaagcctgaatttcaggatggggaggagataagaagcagagaactttgggagaccatggggcatttagtcctggcatagacacagaatggatattcacaggaagattcctgaggccagatatgcaggagagcacacattgtcacaaggggtgtggtgggaagagaggtgctggatgcctaagacagacttctgtgcttggcagattgactgagtgttgactctgaatactttgtggtccagtccataataggccagtcactcctgcctgatgcatccctgttgcactgttcataaaacctgtatcatatggggaagcttcaaggctggcaggcttttcatcaagtaatcatcattccatgttcctacgtatccttgaaatcaaaaccaggcaatatgtgtgtttttggttttgttttacaaaaaggcatacaatgagacgaattcttaagataatgcacatacagaatcatcaataaagtttcaaagagtttatgaagaaaaggtattttcctttcttgtaaaaaatgttatatatatataatattctgatctgcattcaccttagggcttagcctcttattttatgaattttcaggctgtgatttgtgttggatggctaagctctaaaataatgcaaatagccccaatctttaaatatagcggtgctaagttgaacaagtaacacaatacagaaaatgctgatatgaatacttagtaataatacaaaagttcctgctaaattatatatgtgtatcactgcctgactagaaaccccacttttcttttctaatccagcacaaaatcaaactctgattctacaaccagtctttttaaagggcaaaaatgactcaacacctttgttttgtatggaaaacttttttttttacactaactgcaaaactgctttaaaaaaaggcttattcaggatagataagcatgtactccttttttaacttgctggaagacttgcccctccaaactagcacccccaaaagacaacttctttcagaaacggggtgttttacctaaacatagtagcttacatgttagccagcagtaggtcggcactagtgttttccacggttatcacctttgacaggtgatgtgcatctatagatagtggaagccaccccatgaggaggtgttaatagcagcatggtttcacttttggtaatcaggtaatcatgtgtatatacttagattcgcattattttaacatttctctgctactctgcacttcaggttcgttaagctattttaataattactggggttatggcaaacaccaatggaaatgtatatggcaactgctttcctgagcaagtgtgatttgttttatggctgttcaagttataaaattgttcttacattgtaggtaaacaaaatcttgatgtttttaaaggtcactgtaacttaaggttcaaatttctggcacagttttattagtattcacttcggaagctaataagataccatggttttctatgttactcccattgtaacattagtaaagtgactttcaataaaagatttatgttattttga

SEQ ID NO: 104640 - DNA, 2576 bp, Homo sapiens
  Payload ID: 546
  Gene Symbol: ADAM22
  Gene Name: ADAM metallopeptidase domain 22
  ENST ID: ENST00000439864
  CDS Start-End: 216-1244
actcgctcgctccccccgccagcggaagcgtccgcgaagcacaatgcagcactgagccgcggtggaggttgcagcgccacggccgccgcagcaccggccggggctgggtggaggtggccgcggggaccccgggggcgcggagcgagggaaacggactcggcggcgccggcatgaggagctgagcgtctcgggcgaggcgggctgacggcagcaccatgcaggcggcagtggctgtgtccgtgcccttcttgctgctctgtgtcctggggacctgccctccggcgcgctgcggccaggcaggagacgcctcattgatggagctagagaagaggaaggaaaaccgcttcgtggagcgccagagcatcgtgccactgcgcctcatctaccgctcgggcggcgaagacgaaagtcggcacgacgcgctcgacacgcgggtgcggggcgacctcggtggcccgcagttgactcatgttgaccaagcaagcttccaggttgatgcctttggaacgtcattcattctcgatgtcgtgctaaatcatgatttgctgtcctctgaatacatagagagacacattgaacatggaggcaagactgtggaagttaaaggaggagagcactgttactaccagggccatatccgaggaaaccctgactcatttgttgcattgtcaacatgccacggacttcatgggatgttctatgacgggaaccacacatatctcattgagccagaagaaaatgacactactcaagaggatttccattttcattcagtttacaaatccagactgtttgaattttccttggatgatcttccatctgaatttcagcaagtaaacattactccatcaaaatttattttgaagccaagaccaaaaaggagtaaacggcagcttcgtcgatatcctcgtaatgtagaagaagaaaccaaatacattgaactgatgattgtgaatgatcaccttatgtttaaaaaacatcggctttccgttgtacataccaatacctatgcgaaatctgtggtgaacatggcagatttaatatataaagaccaacttaagaccaggatagtattggttgctatggaaacctgggcgactgacaacaagtttgccatatctgaaaatccattgatcaccctacgtgagtttatgaaatacaggagggattttatcaaagagaaaagtgatgcagttcaccttttttcgtacgtaacttctgtaatgatgtattactttttttgattccatgttaaatgctttattgtgactgaaatgtatcctttctgctacataacacaattaggatttgacatggcagatggcagatagatttggaaaaagttttcaagtatagattgcttaaaattgccatgaaaatgtaaaagttttaattttgagttattttattatttaatgtttaatttttcaagatatttaaatagagcatttactgagtaaaaatactgctaatactcatatatagtattcttaactacagataaattatattctttaaagttactgtcttttaaatgttaatgttttctctgtttttggttctaagatgagagcttagtatttctggaatttatttttaattttttctcactcttatgttctttttttgatagcatgcatatttgacgtaatagcaaattatatatagtagaattttaaaaatctatcatctaaagtcagagctgttgaagaaagttataaaaggaagaaaagatgtattttggggtaactttatatataattccaaatttagagaaaagttgcaagaatactacaaggaaattgcatatgccctctattcagattcatcaattattcacattttccccatttgtttcataattttcttccattctccctcccttccttccattcatccatccttcagttttttttttgtttttttttgttttttttcctgaacctcttgaaagtaagttgaagacacttactggggatttattattaaatagtatatattctctaagagtaaaaagacattctcttatataaccacagtaaattattaaaaccagaaaatttaacacaaacataatacttttatgtaacccatggtctatattcaaatttcaccaattacctcaataatgtcttttaaagctaattttccccatccaaatccaatccaggatcacacattgcatttaatcatcatgtctctttagtctcctttaatctgaaagatttcctcagctttcctttgtctattttgagtttaatacttttgaagagtataggccaattattttattgactgttcctcattatgggaatgcctgatgttaagatatgtatttttggcagaaataccagagaagtgattttgtgtctgtctcagagtacatcatatcaaccaattattttttaatagatatacttcaatttaagatatttattaatcttgcaagaaaacatccctcataaacctttttctttggttacatgtataaacaattttcacattcttcccttgcaatgtgaatatattgtatagaaatcttatgtatagagaaaataaatgtagtaaactaataa

SEQ ID NO: 104641 - DNA, 1259 bp, Homo sapiens
  Payload ID: 546
  Gene Symbol: ADAM22
  Gene Name: ADAM metallopeptidase domain 22
  ENST ID: ENST00000426930
  CDS Start-End: 1-993
gaagaagatgtagatcttggctatgtggaagatgggacaccttgtggtccccaaatgatgtgcttagaacacaggtgtcttcctgtggcttctttcaactttagtacttgcttgagcagtaaagaaggcactatttgctcaggaaatggagtttgcagtaatgagctgaagtgtgtgtgtaacagacactggataggttctgattgcaacacttacttccctcacaatgatgatgcaaagactggtatcactctgtctggcaatggtgttgctggcaccaatatcataataggcataattgctggcaccattttagtgctggccctcatattaggaataactgcgtggggttataaaaactatcgagaacagagacagttaccccagggagattatgtaaaaaagcctggagatggtgactctttttatagcgacattcctcccggagtcagcacaaactcagcatctagttctaagaagaggtcaaatgggctctctcattcttggagtgaaaggattccagacacaaaacatatttcagacatctgtgaaaatgggcgacctcgaagtaactcttggcaaggtaacctgggaggcaacaaaaagaaaatcagaggcaaaagatttagacctcggtctaattcaactgagagggagccccaagcacctgagcctgggcactccctcgcccagacagtcccatcccaaggcataagcccagggggctctgacagcccccagacagggagtctggatcacaggtatttaaacccatggttcaaaagagactataatgtagctaagtgggtagaagatgtgaataaaaacactgaaggaccatactttaggactttatctcctgccaagtctccttcttcatcaactgggtctattgcctccagcagaaaatacccttacccaatgcctccacttcctgatgaggacaagaaagtgaaccgacaaagtgccaggctatgggagacatccatttaagatcaactgtttacatgtgatacatcgaaaactgtttacttcaacttttatagaaacccaggctcatggaatcactgcaaatctatctgctcttcagacaatacgaagaccctctgagatgctacagaggagaggaagcggagtttcacatctggttaccattttctttttgtcattggcttaggatttaactaaccatgaaaagaactactgaaatattacactataacatggaacaataaaggtactggtatgttaatggataa

SEQ ID NO: 104642 - DNA, 793 bp, Homo sapiens
  Payload ID: 546
  Gene Symbol: ADAM22
  Gene Name: ADAM metallopeptidase domain 22
  ENST ID: ENST00000413139
  CDS Start-End: 1-793
gtgtaacagacactggataggttctgattgcaacacttacttccctcacaatgatgatgcaaagactggtatcactctgtctggcaatggtgttgctggcaccaatatcataataggcataattgctggcaccattttagtgctggccctcatattaggaataactgcgtggggttataaaaactatcgagaacagagacagttaccccagggagattatgtaaaaaagcctggagatggtgactctttttatagcgacattcctcccggagtcagcacaaactcagcatctagttctaagaagaggtctgcttttctgtcgcattttcagatttctacctgttccatcacacattattccattagtcagaacatttcattattttgcagcaggtcaaatgggctctctcattcttggagtgaaaggattccagacacaaaacatatttcagacatctgtgaaaatgggcgacctcgaagtaactcttggcaaggtaacctgggaggcaacaaaaagaaaatcagaggcaaaagatttagacctcggtctaattcaactgagtatttaaacccatggttcaaaagagactataatgtagctaagtgggtagaagatgtgaataaaaacactgaaggaccatactttaggactttatctcctgccaagtctccttcttcatcaactgggtctattgcctccagcagaaaatacccttacccaatgcctccacttcctgatgaggacaagaaagtgaaccgacaaagtgccaggctatgggagacatccatttaa

SEQ ID NO: 104643 - DNA, 726 bp, Homo sapiens
  Payload ID: 546
  Gene Symbol: ADAM22
  Gene Name: ADAM metallopeptidase domain 22
  ENST ID: ENST00000412441
  CDS Start-End: 138-726
acggccgccgcagcaccggccggggctgggtggaggtggccgcggggaccccgggggcgcggagcgagggaaacggactcggcggcgccggcatgaggagctgagcgtctcgggcgaggcgggctgacggcagcaccatgcaggcggcagtggctgtgtccgtgcccttcttgctgctctgtgtcctggggacctgccctccggcgcgctgcggccaggcaggagacgcctcattgatggagctagagaagaggaaggaaaaccgcttcgtggagcgccagagcatcgtgccactgcgcctcatctaccgctcgggcggcgaagacgaaagtcggcacgacgcgctcgacacgcgggtgcggggcgacctcggtggcccgcagattcagatgtttttgaagtcagaatcccagaagaccatataccagatacagttgactcatgttgaccaagcaagcttccaggttgatgcctttggaacgtcattcattctcgatgtcgtgctaaatcatgatttgctgtcctctgaatacatagagagacacattgaacatggaggcaagactgtggaagttaaaggaggagagcactgttactaccagggccatatccgaggaaaccctgactcatttgttgcattgtcaacatgccacggacttcatgggatgttctatgacgggaaccacacatatctcattgagccagaagaaaatgacactactcaag

SEQ ID NO: 104644 - DNA, 6330 bp, Homo sapiens
  Payload ID: 547
  Gene Symbol: ADAM23
  Gene Name: ADAM metallopeptidase domain 23
  Uniprot ID: O75077
  ENST ID: ENST00000264377
  CDS Start-End: 329-2827
ggcccggcggcagcccccgcagtcgctgaagcggccgcgcccgccgggggagggagtagccgctggggaggctccaagttggcggagcggcgaggacccctggactcctctgcgtcccgccccgggagtggctgcgaggctaggcgagccgggaaagggggcgccgcccagccccgagccccgcgccccgtgccccgagcccggagccccctgcccgccgcggcaccatgcgcgccgagccggcgtgaccggctccgcccgcggccgccccgcagctagcccggcgctctcgccggccacacggagcggcgcccgggagctatgagccatgaagccgcccggcagcagctcgcggcagccgcccctggcgggctgcagccttgccggcgcttcctgcggcccccaacgcggccccgccggctcggtgcctgccagcgccccggcccgcacgccgccctgccgcctgcttctcgtccttctcctgctgcctccgctcgccgcctcgtcccggccccgcgcctggggggctgctgcgcccagcgctccgcattggaatgaaactgcagaaaaaaatttgggagtcctggcagatgaagacaatacattgcaacagaatagcagcagtaatatcagttacagcaatgcaatgcagaaagaaatcacactgccttcaagactcatatattacatcaaccaagactcggaaagcccttatcacgttcttgacacaaaggcaagacaccagcaaaaacataataaggctgtccatctggcccaggcaagcttccagattgaagccttcggctccaaattcattcttgacctcatactgaacaatggtttgttgtcttctgattatgtggagattcactacgaaaatgggaaaccacagtactctaagggtggagagcactgttactaccatggaagcatcagaggcgtcaaagactccaaggtggctctgtcaacctgcaatggacttcatggcatgtttgaagatgataccttcgtgtatatgatagagccactagagctggttcatgatgagaaaagcacaggtcgaccacatataatccagaaaaccttggcaggacagtattctaagcaaatgaagaatctcactatggaaagaggtgaccagtggccctttctctctgaattacagtggttgaaaagaaggaagagagcagtgaatccatcacgtggtatatttgaagaaatgaaatatttggaacttatgattgttaatgatcacaaaacgtataagaagcatcgctcttctcatgcacataccaacaactttgcaaagtccgtggtcaaccttgtggattctatttacaaggagcagctcaacaccagggttgtcctggtggctgtagagacctggactgagaaggatcagattgacatcaccaccaaccctgtgcagatgctccatgagttctcaaaataccggcagcgcattaagcagcatgctgatgctgtgcacctcatctcgcgggtgacatttcactataagagaagcagtctgagttactttggaggtgtctgttctcgcacaagaggagttggtgtgaatgagtatggtcttccaatggcagtggcacaagtattatcgcagagcctggctcaaaaccttggaatccaatgggaaccttctagcagaaagccaaaatgtgactgcacagaatcctggggtggctgcatcatggaggaaacaggggtgtcccattctcgaaaattttcaaagtgcagcattttggagtatagagactttttacagagaggaggtggagcctgccttttcaacaggccaacaaagctatttgagcccacggaatgtggaaatggatacgtggaagctggggaggagtgtgattgtggttttcatgtggaatgctatggattatgctgtaagaaatgttccctctccaacggggctcactgcagcgacgggccctgctgtaacaatacctcatgtctttttcagccacgagggtatgaatgccgggatgctgtgaacgagtgtgatattactgaatattgtactggagactctggtcagtgcccaccaaatcttcataagcaagacggatatgcatgcaatcaaaatcagggccgctgctacaatggcgagtgcaagaccagagacaaccagtgtcagtacatctggggaacaaaggctgcagggtctgacaagttctgctatgaaaagctgaatacagaaggcactgagaagggaaactgcgggaaggatggagaccggtggattcagtgcagcaaacatgatgtgttctgtggattcttactctgtaccaatcttactcgagctccacgtattggtcaacttcagggtgagatcattccaacttccttctaccatcaaggccgggtgattgactgcagtggtgcccatgtagttttagatgatgatacggatgtgggctatgtagaagatggaacgccatgtggcccgtctatgatgtgtttagatcggaagtgcctacaaattcaagccctaaatatgagcagctgtccactcgattccaagggtaaagtctgttcgggccatggggtgtgtagtaatgaagccacctgcatttgtgatttcacctgggcagggacagattgcagtatccgggatccagttaggaaccttcacccccccaaggatgaaggacccaagggtcctagtgccaccaatctcataataggctccatcgctggtgccatcctggtagcagctattgtccttgggggcacaggctggggatttaaaaatgtcaagaagagaaggttcgatcctactcagcaaggccccatctgaatcagctgcgctggatggacaccgccttgcactgttggattctgggtatgacatactcgcagcagtgttactggaactattaagtttgtaaacaaaacctttgggtggtaatgactacggagctaaagttggggtgacaaggatggggtaaaagaaaactgtctcttttggaaataatgtcaaagaacacctttcaccacctgtcagtaaacgggggagggggcaaaagaccatgctataaaaagaactgttccagaatcttttttttccctaatggacgaaggaacaacacacacacaaaaattaaatgcaataaaggaatcattaaaaaaaatagtaaatgattttttttccctcagcctgctggcacttaatatcttctaaatgatttggcatgatttttttttctttactaccgatgacaaactccagtggcatgaagatctaattttcaaaagggtaaaaactgcatggcatatatacaacaagctagcaagccaattctcagcaaaacctgcaacagaattcctaaagtgaagatgacagatgaacacaaagaagctgcctgggcctcttcacttaaacatgtccccacaccccatcctctcggagccccacttcttaccccccacctcccaccctctataatccccactccccattggagaccaggccagggcagaactccacggaccttgctcttgttgattcactttccccattgtgttttctcctggactgagcatcctttggaaatgggagctggaatttgaacaatgatgctattgtatagttcttttataaatgtaaatatggaaataagagattttgacacatcattttcacttgtctgtattgagatattttccttgtaaaggttctctgtaaacttgagttgattttttgctccccatcttttttgtttcttgtctctctttctctgtctctgtccttctctcttgtaacgtgttatacaatgactcttgggcttgcttaaaaagacagatatagccacagatgcagggagtttgggcacaaaacacgtgcagtttaaagttggtgtgcgttaaaccaaaaataaaaggggggacataaacaacaaaataacccatatcaaagacacaaaattatgtaaatggaaatatatgtactaagtttcgaaaattttttgatgtcattataaacctatgtaaataatgtaagaaagtagacaccctttcagattaatcacaaaagtgccaagctcatgattttggttttcggttttgacaattttctttccctgtctttaatgtgaaaggaggataaacttaaagccttaaataaaaaaatttttttaaatgttaaaagcttggaaaaaattaagctttccattttatttgtatttgttagtgtcaatatttcatccatgctcattttcctgcctcaaaatatatatggtagaaccctattggaaaagtggtaatgggaatagaaggagcagttacctttgtatccgcattgttaaaataggcttttatgctgtgctgtgctttcaagaaaccttgtttgacctctggcattttactgatcagtggaccgttgcactggattataatgggattctactatatacaaatccacattgttcttctccctccagccagatttgcagatgtaatctgggctttccaagtccctctgagtttccttcacttttactgatttttttcttctaaatatggtcaagatagcttctgtcacatgttaagtaaataagctgaagaaatttggtcccggctttgttttaatgtacaaaccggtatgtgatcacttcagtgagcatccctctatagatgggctttagtaaagactgtcccaaagagcccctacttctctaatgcccccccccttttttttttaggaaaagaacatgcagttttactcatcacttcttcatgacaccaaatccattgctaggtttagctcctggtcccttttcagcaagattcatgttatccgtcttacaactttgattttggaaagtattatgtcctaaaaatgcactgcttaacacagtggggtttttttcccccgaggtgtctttaactggggaagtaccacaaacatagagcagagactttaatttctatattctacaatagaccatcaccaaacatcttatcatgttgttgctttctgagtaataggtgctacgcaggtaggcgggctttctctaggactaggtgtacgtttattttgtaataacagggctatctacaaggcctctcagccttactcctggcttcataggacacaggtagcatccctctagtcattggcaatggctctttcagctcggaggaagcttggaggaaactcagattacttggtatcttttcctgttgctgcattgcttagtgtttccttgttgctgggtcctactctctagtagatactaaactgctgtgaagtacaccatacacatttcactaagattccagagccaccttggtgacataacagaaacaaaatcatgttggttacaaaacaaattaaatctctattgttaacttttaagcatttcacaaacaacattgtaaatgtgcgatgttacgttttaaatcagaccacagtggtccccaaatattatgtacatatggcaaatgtcagtgtaactttttgttacactggcaatttcataggtaatcgaacctatgctccaatgttaaattatttgtgtatatgtaaaatacacaagctttaagctatgtgtgtatgaatatgaaagttaatgcaaccatatcaattgtaaaaatggattataattatttttgatggtattaggttatgtagtttcaaactctttgctgtattttgttttgcacctgccattcatttgctaatttttgtggcgtggagattcttttttattaatttgagctcacagcacaagtgtatcactgtttaatgttacccaacaagagttagtgttaagtgatgatcaagttcccatttcacctgctctacttttgctgcattaattaatgacacccggatgaggagacgtgcgctaacttcattgctcatctgggatagtgcatgagcccattgaattagagctgctcctactagataactgagcagtacacataagtgcatgttatgaaacatgaatcacatagagcagtggagttttaccaagtggtgtgtgtggtttttgttttttactatgcaaagatgggaaatgcacaaacttttcaaagactagtgtctgaagaactttacaaacaatacttgaaccctttctttaaagttatcccatcatgttttatagtcattgttgcttccattgttagtttccattttcaagtgctttgtaattttttaagtgcactacctgaaattttgtttgaaattaataaattcattcgtatcttgttggctgcctatgaatggagattcagtagtcattgtatgcatctttaagtcaaatgtgtattaaaactttcgttaacgtagaa

SEQ ID NO: 104645 - DNA, 2714 bp, Homo sapiens
  Payload ID: 547
  Gene Symbol: ADAM23
  Gene Name: ADAM metallopeptidase domain 23
  ENST ID: ENST00000374415
  CDS Start-End: 1-2499
atgaagccgcccggcagcagctcgcggcagccgcccctggcgggctgcagccttgccggcgcttcctgcggcccccaacgcggccccgccggctcggtgcctgccagcgccccggcccgcacgccgccctgccgcctgcttctcgtccttctcctgctgcctccgctcgccgcctcgtcccggccccgcgcctggggggctgctgcgcccagcgctccgcattggaatgaaactgcagaaaaaaatttgggagtcctggcagatgaagacaatacattgcaacagaatagcagcagtaatatcagttacagcaatgcaatgcagaaagaaatcacactgccttcaagactcatatattacatcaaccaagactcggaaagcccttatcacgttcttgacacaaaggcaagacaccagcaaaaacataataaggctgtccatctggcccaggcaagcttccagattgaagccttcggctccaaattcattcttgacctcatactgaacaatggtttgttgtcttctgattatgtggagattcactacgaaaatgggaaaccacagtactctaagggtggagagcactgttactaccatggaagcatcagaggcgtcaaagactccaaggtggctctgtcaacctgcaatggacttcatggcatgtttgaagatgataccttcgtgtatatgatagagccactagagctggttcatgatgagaaaagcacaggtcgaccacatataatccagaaaaccttggcaggacagtattctaagcaaatgaagaatctcactatggaaagaggtgaccagtggccctttctctctgaattacagtggttgaaaagaaggaagagagcagtgaatccatcacgtggtatatttgaagaaatgaaatatttggaacttatgattgttaatgatcacaaaacgtataagaagcatcgctcttctcatgcacataccaacaactttgcaaagtccgtggtcaaccttgtggattctatttacaaggagcagctcaacaccagggttgtcctggtggctgtagagacctggactgagaaggatcagattgacatcaccaccaaccctgtgcagatgctccatgagttctcaaaataccggcagcgcattaagcagcatgctgatgctgtgcacctcatctcgcgggtgacatttcactataagagaagcagtctgagttactttggaggtgtctgttctcgcacaagaggagttggtgtgaatgagtatggtcttccaatggcagtggcacaagtattatcgcagagcctggctcaaaaccttggaatccaatgggaaccttctagcagaaagccaaaatgtgactgcacagaatcctggggtggctgcatcatggaggaaacaggggtgtcccattctcgaaaattttcaaagtgcagcattttggagtatagagactttttacagagaggaggtggagcctgccttttcaacaggccaacaaagctatttgagcccacggaatgtggaaatggatacgtggaagctggggaggagtgtgattgtggttttcatgtggaatgctatggattatgctgtaagaaatgttccctctccaacggggctcactgcagcgacgggccctgctgtaacaatacctcatgtctttttcagccacgagggtatgaatgccgggatgctgtgaacgagtgtgatattactgaatattgtactggagactctggtcagtgcccaccaaatcttcataagcaagacggatatgcatgcaatcaaaatcagggccgctgctacaatggcgagtgcaagaccagagacaaccagtgtcagtacatctggggaacaaaggctgcagggtctgacaagttctgctatgaaaagctgaatacagaaggcactgagaagggaaactgcgggaaggatggagaccggtggattcagtgcagcaaacatgatgtgttctgtggattcttactctgtaccaatcttactcgagctccacgtattggtcaacttcagggtgagatcattccaacttccttctaccatcaaggccgggtgattgactgcagtggtgcccatgtagttttagatgatgatacggatgtgggctatgtagaagatggaacgccatgtggcccgtctatgatgtgtttagatcggaagtgcctacaaattcaagccctaaatatgagcagctgtccactcgattccaagggtaaagtctgttcgggccatggggtgtgtagtaatgaagccacctgcatttgtgatttcacctgggcagggacagattgcagtatccgggatccagttaggaaccttcacccccccaaggatgaaggacccaaggtgaatatggccacaagcaggctaataggggccgtggccggcaccattctggccctgggggtgatttttggaggcacagggtggggaatagaaaatgtcaagaagagaaggttcgatcctactcagcaaggccccatctgaatcagctgcgctggatggacaccgccttgcactgttggattctgggtatgacatactcgcagcagtgttactggaactattaagtttgtaaacaaaacctttgggtggtaatgactacggagctaaagttggggtgacaaggatggggtaaaagaaaactgtctcttttggaaataatgtcaaagaacacctttcaccacctgtcagtaaacggg

SEQ ID NO: 104646 - DNA, 460 bp, Homo sapiens
  Payload ID: 547
  Gene Symbol: ADAM23
  Gene Name: ADAM metallopeptidase domain 23
  ENST ID: ENST00000444281
  CDS Start-End: 1-323
tacaaattcaagccctaaatatgagcagctgtccactcgattccaagggtaaagtctgttcgggccatggggtgtgtagtaatgaagccacctgcatttgtgatttcacctgggcagggacagattgcagtatccgggatccagttaggaaccttcacccccccaaggatgaaggacccaaggaaatgtcaagaagagaaggttcgatcctactcagcaaggccccatctgaatcagctgcgctggatggacaccgccttgcactgttggattctgggtatgacatactcgcagcagtgttactggaactattaagtttgtaaacaaaacctttgggtggtaatgactacggagctaaagttggggtgacaaggatggggtaaaagaaaactgtctcttttggaaataatgtcaaagaacacctttcaccacctgtcagtaaacgggggagggggcaaaa

SEQ ID NO: 104647 - DNA, 7052 bp, Homo sapiens
  Payload ID: 548
  Gene Symbol: ADAM28
  Gene Name: ADAM metallopeptidase domain 28
  Uniprot ID: Q9UKQ2
  ENST ID: ENST00000265769
  CDS Start-End: 111-2438
gaatgaaccagggagtttcattctgtctcactggagaggaggcagggacagacccagcagcacccacctgagcgagaagagcagacaccgtgctcctggaatcacccagcatgttgcaaggtctcctgccagtcagtctcctcctctctgttgcagtaagtgctataaaagaactccctggggtgaagaagtatgaagtggtttatcctataagacttcatccactgcataaaagagaggccaaagagccagagcaacaggaacaatttgaaactgaattaaagtataaaatgacaattaatggaaaaattgcagtgctttatttgaaaaaaaacaagaacctccttgcaccaggctacacggaaacatattataattccactggaaaggagatcaccacaagcccacaaattatggatgattgttattatcaaggacatattcttaatgaaaaggtttctgacgctagcatcagcacatgtaggggtctaaggggctacttcagtcagggggatcaaagatactttattgaacctttaagccccatacatcgggatggacaggagcatgcactcttcaagtataaccctgatgaaaagaattatgacagcacctgtgggatggatggtgtgttgtgggcccacgatttgcagcagaacattgccctacctgccaccaaactagtaaaattgaaagacaggaaggttcaggaacatgagaaatacatagaatattatttggtcctggataatggtgagtttaaaaggtacaatgagaatcaagatgagatcagaaagagggtatttgagatggctaattatgtcaacatgctttataaaaagctcaatactcatgtggccttagttggtatggaaatctggactgacaaggataagataaagataaccccaaatgcaagcttcaccttggagaatttttctaaatggagggggagtgttctctcaagaagaaagcgtcatgatattgctcagttaatcacagcaacagaacttgctggaacgactgtgggtcttgcatttatgtctacaatgtgttctccttattctgttggcgttgttcaggaccacagcgataatcttcttagagttgcagggacaatggcacatgaaatgggccacaactttggaatgtttcatgacgactattcttgcaagtgtccttctacaatatgtgtgatggacaaagcactgagcttctatatacccacagacttcagttcctgcagccgtctcagctatgacaagttttttgaagataaattatcaaattgcctctttaatgctccattgcctacagatatcatatccactccaatttgtgggaaccagttggtggaaatgggagaggactgtgattgtgggacatctgaggaatgtaccaatatttgctgtgatgctaagacatgtaaaatcaaagcaacttttcaatgtgcattaggagaatgttgtgaaaaatgccaatttaaaaaggctgggatggtgtgcagaccagcaaaagatgagtgcgacctgcctgaaatgtgtaatggtaaatctggtaattgtcctgatgatagattccaagtcaatggcttcccttgccatcacgggaagggccactgcttgatggggacatgccccacactgcaggagcagtgcacagagctgtggggaccaggaactgaggttgcagataagtcatgttacaacaggaatgaaggtgggtcaaagtacgggtactgtcgcagagtggatgacacactcattccctgcaaagcaaatgataccatgtgtgggaagttgttctgtcaaggtgggtcggataatttgccctggaaaggacggatagtgactttcctgacatgtaaaacatttgatcctgaagacacaagtcaagaaataggcatggtggccaatggaactaagtgtggcgataacaaggtttgcattaatgcagaatgtgtggatattgagaaagcctacaaatcaaccaattgctcatctaagtgcaaaggacatgctgtgtgtgaccatgagctccagtgtcaatgtgaggaaggatggatccctcccgactgcgatgactcctcagtggtcttccacttctccattgtggttggggtgctgttcccaatggcggtcatttttgtggtggttgctatggtaatccggcaccagagctccagagaaaagcagaagaaagatcagaggccactatctaccactggcaccaggccacacaaacagaagaggaaaccccagatggtaaaggctgttcaaccccaagagatgagtcagatgaagccccatgtgtatgatctgccagtagaaggcaatgagcccccagcctcttttcataaagacacaaacgcacttccccctactgttttcaaggataatccagtgtctacacctaaggactcaaatccaaaagcatgaagcaacagctaagcaagaactaatggctaaattatcaacttggaaaactggaaaatctggatggcagagaaatatactatctatctcaccagtatttgctctcgactcaagaaggttaacattttctgattcatgttagactttgaagagactaaagaaaattttcaagaggaacatatgcctgagaacctttgcatgaatttaaaatttcaattatccattcttataagaaggaagatgattgtaaagaaatatctccgaagttaaaatctgtaataggaattgattcattctctaatgaaaacaaaacataaaaacatcacactaatcttggaggaataagaaaaattgtacatccattaaatgtacaattgattgcaacatcttgattgttttaaccattaacttgtcaaattacaatcacagttaagaaaatgatgtaaaattctgttttgtggatctctttcctagattagcttctgaaatcattattagctatatcatttgaggttttctacaatttggtataactaagaatttaaaaatgttttatcatatatatttgtataattaattactggcatggttaaagtggttttcactttttaaatggagaaaatttcagttaaattaataggataaaccaggttgcgaactggtgacctgtaggccatgtttgcactgcaaatatatttggtctgaatgatattgatattggacacatagtacttttacatgttttgaatgtattgctaatatttaaaaattgagagatcttgcataaacaatagattcccagctttgtcagatgtaatctaaaagtaatccgatgctttgtcaacaacagacttacattgcccatagcaaccgtcagcttagttgatgggtaatgtagcaaacactattggtttcctaccaaataatcccctttttcctggcttttagaacaataattttgttcacctgcccacttctaggaaagaatatcctatctaatctatctatctcagggataaatccctatccttttaagtaagtcaagtcaattaaaataacctcatttttccttgctagtggtcgacttggagatgattttataatcctccccctccctttttttttttgctagtaagacgacagaggaattatgttacaacacttctggaaaatttttcctcgtctctttttctggatatgggcatctgaatactctagctggtactgctgcgctccacacggtgattatgaaggctgaaaaagatagatagagcagaaagatgaaaagaataaaacctggcctttcaatgatgtcatggaattggtagatcagtgactgctggagttacctcacactttcttggtactccttattatatgagccatacattttccttgttgtttaagccattttgaattggattttctctcactttcaacagagatcatcctaactagtaaagtagctgtttccataatcagggaacatgctttagttcatcatcacagctacagtttttcttgtatttgtctgcttcacccatttctatcaatcacttacctggtccccacaggcctgtcgcttcatgaggaactttatggttcatttacccttgcagtatgaggttctagataagcccactctggcctcaaaagtgaagctcagtcctcaggaaatccagagtccactgatcaaatcactgtcaaggatacaggctttttctccatgtggcatttgcagaagaacaactttaaaagtagagctttatctgccctgtgaggtttcagaagaccctcccctgacccagaaataaatccctatttcctggaaagccattatgtactcgtgaccaacttgtgaacttttctgtgttgttgttgttgttttttaaatatctgtccccagtaatagattcacctaatccttttttatactgatggaatggaaatcttaaatctatgaatcctcaactagccatgtaccataacccaagcaaaaactaaaccatacactctcaaaagcagtggcatgtgaacatgcctgcaagttcctaaatgatgtcactaggtccctgatgcagatgcatcatacgtcctatttgaagagaagaaatgcagtacaatgacaggaaaaccattattttatcatagaactgcgaacccaagtcctacaatgtttccctttcagctcaactgcagaatagtttagaacagactttttgatttcacaatactgtttccacacttacttatatccgtaactttctaactttaagggaattccgcttatttgacatttaactacctcagatatgccaccaaacctgttttcatcattagttatttttaccttgtctactttaaaacagtgaaattattaggttaaattatgtttttatccagttactctaagataccttagtgtttgtctacttattacaactcaccaaattactggttttatatggcctttgggaaggcttttagctttttataaaataatgaagtatgcatgaaaagaaagcaaattttagttggttgcagtcagagaatatggaaagggttattattataattaggattttattattcacattggaaatcactgctatgtgttaaggaattgaaggtggcctctggctagcagccattaagaaaatgagcccctgagttcaacgaccctcaaatgaagtgaagtctaccaataaccactgaataagcttggaattttagattccttcccagctgaatcttgacttcagccttgtgagacaccctgaagtagaggatgcagctaaattttgtccagattacacacccacagaaactgtatgataattaatatgtgttgtttaaagttgttatggtttggagatatttgttatgcagcaatagatagctgatacaaggaagtagagaacaaacattttctattagtctgttttcacatggctataaagaataccacctgagactgggtaatttataaagaaaggaggattaattgactcagatttccacatggcctaggaggcctcaggaaacttacaatcatgatgaaagaggaagcagaaacatctcatatgatggaagatgtgtatgaaggaggaactgtcaaacacttataaaaccatcagatctcttgagagcttactatctcgacaaaagcatgggggaaaccacccccatgatccaatcacctcccacctggtccctccctcaacatgtggagattatagcaattaaaaaaatgagatttggggggatggacacagagccaaaccatataatgttttaaatgctccagataggtttaggtaaaattaactatatttaataggctttcatcactgcaaaactttttttcctttctttgtgtctctagtctcttccatttgttctcccttctttactagcaccgaggatttgcttgaaatctctgatagccagtattctcatttatcatattctttctcactttgtgtttccttggtaattttggataactccttaaatttatcttccaaattactggtttttatattctgtactgtcagtcctcctgttcactaatttcaaaatttatagttgtttctcttgtttacttatatagttgtttctcttgtttacttaataacattctcttctttcctatcagtttaattttataaaggctaaccaattaactgtttttaacttatatttccagatattttaaaaattaaagcaaaatgtgtataaactttattactgcttcccacagtaaatatttttcagaagtacatgctttctcagccacttgactagtatgttccccatcattcaaagacaccattatttcctaagtgttatattgctatttttcagttggtgcatccaatattattatcagctttaatattgtttcatcatatgtcattgttcaaagaatccatctcttgagcgtaagctaaataatttgcatacactagcatctggatgtaatatggaaaaatatggaaatggttggggtgataagcaagtcttgcatattcttttctcctcaattttttttctccaaagtgggccaagccaagagtggcacagctgtgtggagatactgagctccaccttgtcagggaagatcccaactcaggagaaaacacctctaacaaaatctgtagccacgttggcacatctgcccttgaattcactttgtctcttttgctgcttccataaaaaggctttcccttgacaatgttaggcactttttagcaactaggcctgggtggtctgctacaatgcccaacacttaatacagtatcactattactgttagtagtatgctaagcgaatactattgttataaaaaaaatcctaagcatgaaaattacggtatacaatttattgtgaaggcaacttcttgtgaacattaaacggtttatctccttcacctcatattaaagtccatactcttgggatatatctgacatctcaatattaaatgactaagatgactaagtcgtttatgttgctcccacctcacacaaagttaaaactatttgttactttaaatagtttgacaatgttattttaaaatctggacaaatcacaaatataaaatacttatttaatttt

SEQ ID NO: 104648 - DNA, 2085 bp, Homo sapiens
  Payload ID: 548
  Gene Symbol: ADAM28
  Gene Name: ADAM metallopeptidase domain 28
  Uniprot ID: Q9UKQ2
  ENST ID: ENST00000437154
  CDS Start-End: 40-1662
gcgagaagagcagacaccgtgctcctggaatcacccagcatgttgcaaggtctcctgccagtcagtctcctcctctctgttgcagtaagtgctataaaagaactccctggggtgaagaagtatgaagtggtttatcctataagacttcatccactgcataaaagagaggccaaagagccagagcaacaggaacaatttgaaactgaattaaagtataaaatgacaattaatggaaaaattgcagtgctttatttgaaaaaaaacaagaacctccttgcaccaggctacacggaaacatattataattccactggaaaggagatcaccacaagcccacaaattatggatgattgttattatcaaggacatattcttaatgaaaaggtttctgacgctagcatcagcacatgtaggggtctaaggggctacttcagtcagggggatcaaagatactttattgaacctttaagccccatacatcgggatggacaggagcatgcactcttcaagtataaccctgatgaaaagaattatgacagcacctgtgggatggatggtgtgttgtgggcccacgatttgcagcagaacattgccctacctgccaccaaactagtaaaattgaaagacaggaaggttcaggaacatgagaaatacatagaatattatttggtcctggataatggtgagtttaaaaggtacaatgagaatcaagatgagatcagaaagagggtatttgagatggctaattatgtcaacatgctttataaaaagctcaatactcatgtggccttagttggtatggaaatctggactgacaaggataagataaagataaccccaaatgcaagcttcaccttggagaatttttctaaatggagggggagtgttctctcaagaagaaagcgtcatgatattgctcagttaatcacagcaacagaacttgctggaacgactgtgggtcttgcatttatgtctacaatgtgttctccttattctgttggcgttgttcaggaccacagcgataatcttcttagagttgcagggacaatggcacatgaaatgggccacaactttggaatgtttcatgacgactattcttgcaagtgtccttctacaatatgtgtgatggacaaagcactgagcttctatatacccacagacttcagttcctgcagccgtctcagctatgacaagttttttgaagataaattatcaaattgcctctttaatgctccattgcctacagatatcatatccactccaatttgtgggaaccagttggtggaaatgggagaggactgtgattgtgggacatctgaggaatgtaccaatatttgctgtgatgctaagacatgtaaaatcaaagcaacttttcaatgtgcattaggagaatgttgtgaaaaatgccaatttaaaaaggctgggatggtgtgcagaccagcaaaagatgagtgcgacctgcctgaaatgtgtaatggtaaatctggtaattgtcctgatgatagattccaagtcaatggcttcccttgccatcacgggaagggccactgcttgatggggacatgccccacactgcaggagcagtgcacagagctgtggggaccaggtaggaggacaaatcctttcccctgtgcatgtgcgaaggaaaatcatttcagatgacagtgtttaaccatggtcaaaggaccattctgtcctatccttcttagaagctttgaactcaaaatcatggaaaggttttaagatttgaggttggttttagggttgctagatttagcaagtaaaaataaggatggccccgttaaattttaacttaaaattaacaagttttttgttaattttttgttttttgtctcagcatcagtatatcccatgcaatatttgaggtgtgctcatactaaaattatttgtgtatctgaaattcaaattaaactgggtgtctttttcttttcatctggcaaccctactaagatcataaacccttggaaatctgtgtgtgtgcgggtgtgtgtgtgtgtgtgtgtgcaggggtggcagaagtactgtgggatgggacagaaataagaaaagatggaaaaaagaaaa

SEQ ID NO: 104649 - DNA, 1828 bp, Homo sapiens
  Payload ID: 548
  Gene Symbol: ADAM28
  Gene Name: ADAM metallopeptidase domain 28
  ENST ID: ENST00000521629
  CDS Start-End: 1-1162
cttctatatacccacagacttcagttcctgcagccgtctcagctatgacaagttttttgaagataaattatcaaattgcctctttaatgctccattgcctacagatatcatatccactccaatttgtgggaaccagttggtggaaatgggagaggactgtgattgtgggacatctgaggaatgtaccaatatttgctgtgatgctaagacatgtaaaatcaaagcaacttttcaatgtgcattaggagaatgttgtgaaaaatgccaatttaaaaaggctgggatggtgtgcagaccagcaaaagatgagtgcgacctgcctgaaatgtgtaatggtaaatctggtaattgtcctgatgatagattccaagtcaatggcttcccttgccatcacgggaagggccactgcttgatggggacatgccccacactgcaggagcagtgcacagagctgtggggaccaggaactgaggttgcagataagtcatgttacaacaggaatgaaggtgggtcaaagtacgggtactgtcgcagagtggatgacacactcattccctgcaaagcaaatgataccatgtgtgggaagttgttctgtcaaggtgggtcggataatttgccctggaaaggacggatagtgactttcctgacatgtaaaacatttgatcctgaagacacaagtcaagaaataggcatggtggccaatggaactaagtgtggcgataacaaggtttgcattaatgcagaatgtgtggatattgagaaagcctacaaatcaaccaattgctcatctaagtgcaaaggacatgctgtgtgtgaccatgagctccagtgtcaatgtgaggaaggatggatccctcccgactgcgatgactcctcagtggtcttccacttctccattgtggttggggtgctgttcccaatggcggtcatttttgtggtggttgctatggtaatccggcaccagagctccagagaaaagcagaagaaagatcagaggccactatctaccactggcaccaggccacacaaacagaagaggaaaccccagatggtaaaggctgttcaaccccaagagatgagtcagatgaagccccatgtgtatgatctgccagtagaaggcaatgagcccccagcctcttttgactcaaatccaaaagcatgaagcaacagctaagcaagaactaatggctaaattatcaacttggaaaactggaaaatctggatggcagagaaatatactatctatctcaccagtatttgctctcgactcaagaaggttaacattttctgattcatgttagactttgaagagactaaagaaaattttcaagaggaacatatgcctgagaacctttgcatgaatttaaaatttcaattatccattcttataagaaggaagatgattgtaaagaaatatctccgaagttaaaatctgtaataggaattgattcattctctaatgaaaacaaaacataaaaacatcacactaatcttggaggaataagaaaaattgtacatccattaaatgtacaattgattgcaacatcttgattgttttaaccattaacttgtcaaattacaatcacagttaagaaaatgatgtaaaattctgttttgtggatctctttcctagattagcttctgaaatcattattagctatatcatttgaggttttctacaatttggtataactaagaatttaaaaatgttttatcatatatatttgtataattaattactggcatggttaaagtggttttcactttttaaatggagaaaatttcagttaaattaataggataaaccaggttgcgaactggtgacctg

SEQ ID NO: 104650 - DNA, 2543 bp, Homo sapiens
  Payload ID: 548
  Gene Symbol: ADAM28
  Gene Name: ADAM metallopeptidase domain 28
  ENST ID: ENST00000520448
  CDS Start-End: 82-735
actggagaggaggcagggacagacccagcagcacccacctgagcgagaagagcagacaccgtgctcctggaatcacccagcatgttgcaaggtctcctgccagtcagtctcctcctctctgttgcagtaagtgctataaaagaactccctggggtgaagaagtatgaagtggtttatcctataagacttcatccactgcataaaagagaggccaaagagccagagcaacaggaacaatttgaaactgaattaaagtataaaatgacaattaatggaaaaattgcagtgctttatttgaaaaaaaacaagaacctccttgcaccaggctacacggaaacatattataattccactggaaaggagatcaccacaagcccacaaattatggatgattgttattatcaaggacatattcttaatgaaaaggtttctgacgctagcatcagcacatgtaggggtctaaggggctacttcagtcagggggatcaaagatactttattgaacctttaagccccatacatcgggatggacaggagcatgcactcttcaagtataaccctgatgaaaagaattatgacagcacctgtgggatggatggtgtgttgtgggcccacgatttgcagcagaacattgccctacctgccaccaaactagtaaaattgaaagacaggaaggttcaggaacatgagaaatacatagaatattatttggtcctggataatggtgagttttaaacagtttgctgggagatgtcactgggtttttcaatgaacgcacatgaagcatggaagcaaagtcaagacatttgagaccaatgtggctgactggctcccaaaggatgaccacaacttttgctacatagctttataaaaagctcaatactcatgtggccttagttggtatggaaatctggactgacaaggataagataaagataaccccaaatgcaagcttcaccttggagaatttttctaaatggagggggagtgttctctcaagaagaaagcgtcatgatattgctcagttaatcacagcaacagaacttgctggaacgactgtgggtcttgcatttatgtctacaatgtgttctccttattctgttggcgttgttcaggaccacagcgataatcttcttagagttgcagggacaatggcacatgaaatgggccacaactttggaatgtttcatgacgactattcttgcaagtgtccttctacaatatgtgtgatggacaaagcactgagcttctatatacccacagacttcagttcctgcagccgtctcagctatgacaagttttttgaagataaattatcaaattgcctctttaatgctccattgcctacagatatcatatccactccaatttgtgggaaccagttggtggaaatgggagaggactgtgattgtgggacatctgaggaatgtaccaatatttgctgtgatgctaagacatgtaaaatcaaagcaacttttcaatgtgcattaggagaatgttgtgaaaaatgccaatttaaaaaggctgggatggtgtgcagaccagcaaaagatgagtgcgacctgcctgaaatgtgtaatggtaaatctggtaattgtcctgatgatagattccaagtcaatggcttcccttgccatcacgggaagggccactgcttgatggggacatgccccacactgcaggagcagtgcacagagctgtggggaccaggaactgaggttgcagataagtcatgttacaacaggaatgaaggtgggtcaaagtacgggtactgtcgcagagtggatgacacactcattccctgcaaagcaaatgataccatgtgtgggaagttgttctgtcaaggtgggtcggataatttgccctggaaaggacggatagtgactttcctgacatgtaaaacatttgatcctgaagacacaagtcaagaaataggcatggtggccaatggaactaagtgtggcgataacaaggtttgcattaatgcagaatgtgtggatattgagaaagcctacaaatcaaccaattgctcatctaagtgcaaaggacatgctgtgtgtgaccatgagctccagtgtcaatgtgaggaaggatggatccctcccgactgcgatgactcctcagtggtcttccgtagacttctccattgtggttggggtgctgttcccaatggcggtcatttttgtggtggttgctatggtaatccggcaccagagctccagagaaaagcagaagaaagatcagaggccactatctaccactggcaccaggccacacaaacagaagaggaaaccccagatggtaaaggctgttcaaccccaagagatgagtcagatgaagccccatgtgtatgatctgccagtagaaggcaatgagcccccagcctcttttcataaagacacaaacgcacttccccctactgttttcaaggataatccagtgtctacacctaaggactcaaatccaaaagcatgaagcaacagctaagcaagaactaatggctaaattatcaacttggaaaactggaaaatctggatggcaga

SEQ ID NO: 104651 - DNA, 684 bp, Homo sapiens
  Payload ID: 548
  Gene Symbol: ADAM28
  Gene Name: ADAM metallopeptidase domain 28
  ENST ID: ENST00000518326
  CDS Start-End: 1-523
gaaaggacggatagtgactttcctgacatgtaaaacatttgatcctgaagacacaagtcaagaaataggcatggtggccaatggaactaagtgtggcgataacaaggtttgcattaatgcagaatgtgtggatattgagaaagcctacaaatcaaccaattgctcatctaagtgcaaaggacatgctgtgtgtgaccatgagctccagtgtcaatgtgaggaaggatggatccctcccgactgcgatgactcctcagtggtcttccacttctccattgtggttggggtgctgttcccaatggcggtcatttttgtggtggttgctatggtaatccggcaccagagctccagagaaaagcagaagaaagatcagaggccactatctaccactggcaccaggccacacaaacagaagaggaaaccccagatggtaaaggctgttcaaccccaagaggtgaactatatagtctgggctgtgattaccatggccccactttgcgtttctctcacactcttatcctgactacctatctatcatttctacccagcagcgttttgcagtaacacattcagaaatgtctcctttgccttttgttaaaggcaaaagagtccctaaaatgccgaggctactttgccggggttcatgaaatgcaaacagaataaagagaacaaagaatgcacata

SEQ ID NO: 104652 - DNA, 582 bp, Homo sapiens
  Payload ID: 548
  Gene Symbol: ADAM28
  Gene Name: ADAM metallopeptidase domain 28
  ENST ID: ENST00000523379
  CDS Start-End: 82-258
actggagaggaggcagggacagacccagcagcacccacctgagcgagaagagcagacaccgtgctcctggaatcacccagcatgttgcaaggtctcctgccagtcagtctcctcctctctgttgcagtaagtgctataaaagaactccctggggtgaagaagtatgaagtggtttatcctataagacttcatccactgcataaaagagaggccaaagagccagagcaacagttcctgtcatccatgaaaataagctgagtccatcaacctctacttatctaggcccacatttgggggaaatttatagcctgggattactgacagcagagcagacctcaacaactgaggatttaagcaaagaacaatttgaaactgaattaaagtataaaatgacaattaatggaaaaattgcagtgctttatttgaaaaaaaacaagaacctccttgcaccaggctacacggaaacatattataattccactggaaaggagatcaccacaagcccacaaattatggatgattgttattatcaaggacatattcttaatgaaaaggtttctgacgctagcatcagcacatgta

SEQ ID NO: 104653 - DNA, 3325 bp, Homo sapiens
  Payload ID: 549
  Gene Symbol: ADAM29
  Gene Name: ADAM metallopeptidase domain 29
  Uniprot ID: Q9UKF5
  ENST ID: ENST00000359240
  CDS Start-End: 671-3133
gtgacatcacatccactaaccaaatggggtggtgtgagtatctcctataaaataaaagctctcctgatggcctgttcctgcacatttcctgaggacgccctcgatcacaagcagcttgctggatgaataaaggaaagaaggtttatatacactaataatagaaatgttttgggatggttcatgatttcgaaaagcttcagagaaaataaagatgcttaatgttagagtacaaaacattctccctgcagtctcacgaactgtgaacaaaaactgaagtgaaaactcatagtgcataactcgtcaatactcctgtgatcgtataaccatcagcaagaaaacaaatttgattgagcccccatccagtcctctttgcgtggaatcagacctcttttgcagtggaaaggagcagagaatgtgactttcctgaacaacaggagcaagaatcaatgccagattctcttctctaaaaataatcaatttgttactacagtgctgcagctctgatggttcaactctgccaaaagatggatctttaatgattagcactacacactgaccaactcagaagaaggagccacaccacctgtgactccagccctgacttctgctctggaccagtgtttccataacagggacttcaaaatcactgtgatttgaagcctttttgaacatgaagatgttactcctgctgcattgccttggggtgtttctgtcctgttctggacacatccaggatgagcacccccaatatcacagccctccggatgtggtgattcctgtgaggataactggcaccaccagaggcatgacacctccaggctggctctcctatatcctgccctttggaggccagaaacacattatccacataaaggtcaagaagcttttgttttccaaacacctccctgtgttcacctacacagaccagggtgctatccttgaggaccagccatttgtccagaataactgctactatcatggttatgtggaaggggacccagaatccctggtttccctcagtacctgttttgggggttttcaaggaatattacagataaatgactttgcttatgaaatcaagcccctagcattttctaccacgtttgaacatctggtatacaagatggacagtgaggagaaacaattttcaaccatgagatccggatttatgcaaaatgaaataacatgccgaatggaatttgaagaaattgataattccactcagaagcaaagttcttatgtgggctggtggatccattttaggattgttgaaattgtagtcgtcattgataattatctgtacattcgttatgaaaggaacgactcaaagttgctggaggatctatatgttattgttaatatagtggattccattttggatgtcattggtgttaaggtgttattatttggtttggagatctggaccaataaaaacctcattgtagtagatgatgtaaggaaatctgtgcacctgtattgcaagtggaagtcggagaacattacgccccggatgcaacatgacacctcacatcttttcacaactctaggattaagagggttaagtggcataggagcttttagaggaatgtgtacaccacaccgtagttgtgcaattgttactttcatgaacaaaactttgggcactttttcaattgcagtggctcatcatctaggtcataatttgggcatgaaccatgatgaggatacatgtcgttgttcacaacctagatgcataatgcatgaaggcaacccaccaataactaaatttagcaattgtagttatggtgatttttgggaatatactgtagagaggacaaagtgtttgcttgaaacagtacacacaaaggacatctttaatgtgaagcgctgtgggaatggtgttgttgaagaaggagaagagtgtgactgtggacctttaaagcattgtgcaaaagatccctgctgtctgtcaaattgcactctgactgatggttctacttgtgcttttgggctttgttgcaaagactgcaagttcctaccatcagggaaagtgtgtagaaaggaggtcaatgaatgtgatcttccagagtggtgcaatggtacttcccataagtgcccagatgacttttatgtggaagatggaattccctgtaaggagaggggctactgctatgaaaagagctgtcatgaccgcaatgaacagtgtaggaggatttttggtgcaggcgcaaatactgcaagtgagacttgctacaaagaattgaacaccttaggtgaccgtgttggtcactgtggtatcaaaaatgctacatatataaagtgtaatatctcagatgtccagtgtggaagaattcagtgtgagaatgtgacagaaattcccaatatgagtgatcatactactgtgcattgggctcgcttcaatgacataatgtgctggagtactgattaccatttggggatgaagggacctgatattggtgaagtgaaagatggaacagagtgtgggatagatcatatatgcatccacaggcactgtgtccatataaccatcttgaatagtaattgctcacctgcattttgtaacaagaggggcatctgcaacaataaacatcactgccattgcaattatctgtgggaccctcccaactgcctgataaaaggctatggaggtagtgttgacagtggcccaccccctaagagaaagaagaaaaagaagttctgttatctgtgtatattgttgcttattgttttgtttattttattatgttgtctttatcgactttgtaaaaaaagtaaaccaataaaaaagcagcaagatgttcaaactccatctgcaaaagaagaggaaaaaattcagcgtcgacctcatgagttacctccccagagtcaaccttgggtgatgccttcccagagtcaacctcctgtgacgccttcccagagtcatcctcaggtgatgccttcccagagtcaacctcctgtgacaccctcccagagtcaacctcgggtgatgccttctcagagtcaacctcctgtgatgccttcccagagtcatcctcagttgacgccttcccagagtcaacctcctgtgacaccctcccagaggcaacctcagttgatgccttcccagagtcaacctcctgtgacgccctcctagagccaacctcagttgatgccttcccagagtcaacctcctgtgacgccctcccagagccaacctcgggtgacaccctcccagagtcaacctcatgtgacaccttaccggagtaaaagtggtaaacaaaagcaatcagtaccaattccaaaaactgtatccagaaaaggtacattaaaaaaataattcctagta

SEQ ID NO: 104654 - DNA, 3171 bp, Homo sapiens
  Payload ID: 549
  Gene Symbol: ADAM29
  Gene Name: ADAM metallopeptidase domain 29
  Uniprot ID: Q9UKF5
  ENST ID: ENST00000404450
  CDS Start-End: 517-2979
aaaataaaagctctcctgatggcctgttcctgcacatttcctgaggacgccctcgatcacaagcaggttagagtacaaaacattctccctgcagtctcacgaactgtgaacaaaaactgaagtgaaaactcatagtgcataactcgtcaatactcctgtgatcgtataaccatcagcaagaaaacaaatttgattgagcccccatccagtcctctttgcgtggaatcagacctcttttgcagtggaaaggagcagagaatgtgactttcctgaacaacaggagcaagaatcaatgccagattctcttctctaaaaataatcaatttgttactacagtgctgcagctctgatggttcaactctgccaaaagatggatctttaatgattagcactacacactgaccaactcagaagaaggagccacaccacctgtgactccagccctgacttctgctctggaccagtgtttccataacagggacttcaaaatcactgtgatttgaagcctttttgaacatgaagatgttactcctgctgcattgccttggggtgtttctgtcctgttctggacacatccaggatgagcacccccaatatcacagccctccggatgtggtgattcctgtgaggataactggcaccaccagaggcatgacacctccaggctggctctcctatatcctgccctttggaggccagaaacacattatccacataaaggtcaagaagcttttgttttccaaacacctccctgtgttcacctacacagaccagggtgctatccttgaggaccagccatttgtccagaataactgctactatcatggttatgtggaaggggacccagaatccctggtttccctcagtacctgttttgggggttttcaaggaatattacagataaatgactttgcttatgaaatcaagcccctagcattttctaccacgtttgaacatctggtatacaagatggacagtgaggagaaacaattttcaaccatgagatccggatttatgcaaaatgaaataacatgccgaatggaatttgaagaaattgataattccactcagaagcaaagttcttatgtgggctggtggatccattttaggattgttgaaattgtagtcgtcattgataattatctgtacattcgttatgaaaggaacgactcaaagttgctggaggatctatatgttattgttaatatagtggattccattttggatgtcattggtgttaaggtgttattatttggtttggagatctggaccaataaaaacctcattgtagtagatgatgtaaggaaatctgtgcacctgtattgcaagtggaagtcggagaacattacgccccggatgcaacatgacacctcacatcttttcacaactctaggattaagagggttaagtggcataggagcttttagaggaatgtgtacaccacaccgtagttgtgcaattgttactttcatgaacaaaactttgggcactttttcaattgcagtggctcatcatctaggtcataatttgggcatgaaccatgatgaggatacatgtcgttgttcacaacctagatgcataatgcatgaaggcaacccaccaataactaaatttagcaattgtagttatggtgatttttgggaatatactgtagagaggacaaagtgtttgcttgaaacagtacacacaaaggacatctttaatgtgaagcgctgtgggaatggtgttgttgaagaaggagaagagtgtgactgtggacctttaaagcattgtgcaaaagatccctgctgtctgtcaaattgcactctgactgatggttctacttgtgcttttgggctttgttgcaaagactgcaagttcctaccatcagggaaagtgtgtagaaaggaggtcaatgaatgtgatcttccagagtggtgcaatggtacttcccataagtgcccagatgacttttatgtggaagatggaattccctgtaaggagaggggctactgctatgaaaagagctgtcatgaccgcaatgaacagtgtaggaggatttttggtgcaggcgcaaatactgcaagtgagacttgctacaaagaattgaacaccttaggtgaccgtgttggtcactgtggtatcaaaaatgctacatatataaagtgtaatatctcagatgtccagtgtggaagaattcagtgtgagaatgtgacagaaattcccaatatgagtgatcatactactgtgcattgggctcgcttcaatgacataatgtgctggagtactgattaccatttggggatgaagggacctgatattggtgaagtgaaagatggaacagagtgtgggatagatcatatatgcatccacaggcactgtgtccatataaccatcttgaatagtaattgctcacctgcattttgtaacaagaggggcatctgcaacaataaacatcactgccattgcaattatctgtgggaccctcccaactgcctgataaaaggctatggaggtagtgttgacagtggcccaccccctaagagaaagaagaaaaagaagttctgttatctgtgtatattgttgcttattgttttgtttattttattatgttgtctttatcgactttgtaaaaaaagtaaaccaataaaaaagcagcaagatgttcaaactccatctgcaaaagaagaggaaaaaattcagcgtcgacctcatgagttacctccccagagtcaaccttgggtgatgccttcccagagtcaacctcctgtgacgccttcccagagtcatcctcaggtgatgccttcccagagtcaacctcctgtgacaccctcccagagtcaacctcgggtgatgccttctcagagtcaacctcctgtgatgccttcccagagtcatcctcagttgacgccttcccagagtcaacctcctgtgacaccctcccagaggcaacctcagttgatgccttcccagagtcaacctcctgtgacgccctcctagagccaacctcagttgatgccttcccagagtcaacctcctgtgacgccctcccagagccaacctcgggtgacaccctcccagagtcaacctcatgtgacaccttaccggagtaaaagtggtaaacaaaagcaatcagtaccaattccaaaaactgtatccagaaaaggtacattaaaaaaataattcctagta

SEQ ID NO: 104655 - DNA, 3244 bp, Homo sapiens
  Payload ID: 549
  Gene Symbol: ADAM29
  Gene Name: ADAM metallopeptidase domain 29
  Uniprot ID: Q9UKF5
  ENST ID: ENST00000445694
  CDS Start-End: 590-3052
gtgacatcacatccactaaccaaatggggtggtgtgagtatctcctataaaataaaagctctcctgatggcctgttcctgcacatttcctgaggacgccctcgatcacaagcagcttgctggatgaataaaggaaagaaggtttatatacactaataatagaaatgttttgggatggttcatgatttcgaaaagcttcagagaaaataaagatgcttaatgttagagtacaaaacattctccctgcagtctcacgaactgtgaacaaaaactgaagtgaaaactcatagtgcataactcgtcaatactcctgtgatcgtataaccatcagcaagaaaacaaatttgattgagcccccatccagtcctctttgcgtggaatcagacctcttttgcagtggaaaggagcagtgctgcagctctgatggttcaactctgccaaaagatggatctttaatgattagcactacacactgaccaactcagaagaaggagccacaccacctgtgactccagccctgacttctgctctggaccagtgtttccataacagggacttcaaaatcactgtgatttgaagcctttttgaacatgaagatgttactcctgctgcattgccttggggtgtttctgtcctgttctggacacatccaggatgagcacccccaatatcacagccctccggatgtggtgattcctgtgaggataactggcaccaccagaggcatgacacctccaggctggctctcctatatcctgccctttggaggccagaaacacattatccacataaaggtcaagaagcttttgttttccaaacacctccctgtgttcacctacacagaccagggtgctatccttgaggaccagccatttgtccagaataactgctactatcatggttatgtggaaggggacccagaatccctggtttccctcagtacctgttttgggggttttcaaggaatattacagataaatgactttgcttatgaaatcaagcccctagcattttctaccacgtttgaacatctggtatacaagatggacagtgaggagaaacaattttcaaccatgagatccggatttatgcaaaatgaaataacatgccgaatggaatttgaagaaattgataattccactcagaagcaaagttcttatgtgggctggtggatccattttaggattgttgaaattgtagtcgtcattgataattatctgtacattcgttatgaaaggaacgactcaaagttgctggaggatctatatgttattgttaatatagtggattccattttggatgtcattggtgttaaggtgttattatttggtttggagatctggaccaataaaaacctcattgtagtagatgatgtaaggaaatctgtgcacctgtattgcaagtggaagtcggagaacattacgccccggatgcaacatgacacctcacatcttttcacaactctaggattaagagggttaagtggcataggagcttttagaggaatgtgtacaccacaccgtagttgtgcaattgttactttcatgaacaaaactttgggcactttttcaattgcagtggctcatcatctaggtcataatttgggcatgaaccatgatgaggatacatgtcgttgttcacaacctagatgcataatgcatgaaggcaacccaccaataactaaatttagcaattgtagttatggtgatttttgggaatatactgtagagaggacaaagtgtttgcttgaaacagtacacacaaaggacatctttaatgtgaagcgctgtgggaatggtgttgttgaagaaggagaagagtgtgactgtggacctttaaagcattgtgcaaaagatccctgctgtctgtcaaattgcactctgactgatggttctacttgtgcttttgggctttgttgcaaagactgcaagttcctaccatcagggaaagtgtgtagaaaggaggtcaatgaatgtgatcttccagagtggtgcaatggtacttcccataagtgcccagatgacttttatgtggaagatggaattccctgtaaggagaggggctactgctatgaaaagagctgtcatgaccgcaatgaacagtgtaggaggatttttggtgcaggcgcaaatactgcaagtgagacttgctacaaagaattgaacaccttaggtgaccgtgttggtcactgtggtatcaaaaatgctacatatataaagtgtaatatctcagatgtccagtgtggaagaattcagtgtgagaatgtgacagaaattcccaatatgagtgatcatactactgtgcattgggctcgcttcaatgacataatgtgctggagtactgattaccatttggggatgaagggacctgatattggtgaagtgaaagatggaacagagtgtgggatagatcatatatgcatccacaggcactgtgtccatataaccatcttgaatagtaattgctcacctgcattttgtaacaagaggggcatctgcaacaataaacatcactgccattgcaattatctgtgggaccctcccaactgcctgataaaaggctatggaggtagtgttgacagtggcccaccccctaagagaaagaagaaaaagaagttctgttatctgtgtatattgttgcttattgttttgtttattttattatgttgtctttatcgactttgtaaaaaaagtaaaccaataaaaaagcagcaagatgttcaaactccatctgcaaaagaagaggaaaaaattcagcgtcgacctcatgagttacctccccagagtcaaccttgggtgatgccttcccagagtcaacctcctgtgacgccttcccagagtcatcctcaggtgatgccttcccagagtcaacctcctgtgacaccctcccagagtcaacctcgggtgatgccttctcagagtcaacctcctgtgatgccttcccagagtcatcctcagttgacgccttcccagagtcaacctcctgtgacaccctcccagaggcaacctcagttgatgccttcccagagtcaacctcctgtgacgccctcctagagccaacctcagttgatgccttcccagagtcaacctcctgtgacgccctcccagagccaacctcgggtgacaccctcccagagtcaacctcatgtgacaccttaccggagtaaaagtggtaaacaaaagcaatcagtaccaattccaaaaactgtatccagaaaaggtacattaaaaaaataattcctagta

SEQ ID NO: 104656 - DNA, 788 bp, Homo sapiens
  Payload ID: 549
  Gene Symbol: ADAM29
  Gene Name: ADAM metallopeptidase domain 29
  ENST ID: ENST00000502305
  CDS Start-End: 657-788
actaaccaaatggggtggtgtgagtatctcctataaaataaaagctctcctgatggcctgttcctgcacatttcctgaggacgccctcgatcacaagcagcttgctggatgaataaaggaaagaaggtttatatacactaataatagaaatgttttgggatggttcatgatttcgaaaagcttcagagaaaataaagatgcttaatgttagagtacaaaacattctccctgcagtctcacgaactgtgaacaaaaactgaagtgaaaactcatagtgcataactcgtcaatactcctgtgatcgtataaccatcagcaagaaaacaaatttgattgagcccccatccagtcctctttgcgtggaatcagacctcttttgcagtggaaaggagcagagaatgtgactttcctgaacaacaggagcaagaatcaatgccagattctcttctctaaaaataatcaatttgttactacagtgctgcagctctgatggttcaactctgccaaaagatggatctttaatgattagcactacacactgaccaactcagaagaaggagccacaccacctgtgactccagccctgacttctgctctggaccagtgtttccataacagggacttcaaaatcactgtgatttgaagcctttttgaacatgaagatgttactcctgctgcattgccttggggtgtttctgtcctgttctggacacatccaggatgagcacccccaatatcacagccctccggatgtggtgattcctgtgaggataactggcaccaccaga

SEQ ID NO: 104657 - DNA, 3010 bp, Homo sapiens
  Payload ID: 549
  Gene Symbol: ADAM29
  Gene Name: ADAM metallopeptidase domain 29
  Uniprot ID: Q9UKF5
  ENST ID: ENST00000514159
  CDS Start-End: 431-2893
aaaagctctcctgatggcctgttcctgcacatttcctgaggacgccctcgatcacaagcaggttagagtacaaaacattctccctgcagtctcacgaactgtgaacaaaaactgaagtgaaaactcatagtgcataactcgtcaatactcctgtgatcgtataaccatcagcaagaaaacaaatttgattgagcccccatccagtcctctttgcgtggaatcagacctcttttgcagtggaaaggagcagtgctgcagctctgatggttcaactctgccaaaagatggatctttaatgattagcactacacactgaccaactcagaagaaggagccacaccacctgtgactccagccctgacttctgctctggaccagtgtttccataacagggacttcaaaatcactgtgatttgaagcctttttgaacatgaagatgttactcctgctgcattgccttggggtgtttctgtcctgttctggacacatccaggatgagcacccccaatatcacagccctccggatgtggtgattcctgtgaggataactggcaccaccagaggcatgacacctccaggctggctctcctatatcctgccctttggaggccagaaacacattatccacataaaggtcaagaagcttttgttttccaaacacctccctgtgttcacctacacagaccagggtgctatccttgaggaccagccatttgtccagaataactgctactatcatggttatgtggaaggggacccagaatccctggtttccctcagtacctgttttgggggttttcaaggaatattacagataaatgactttgcttatgaaatcaagcccctagcattttctaccacgtttgaacatctggtatacaagatggacagtgaggagaaacaattttcaaccatgagatccggatttatgcaaaatgaaataacatgccgaatggaatttgaagaaattgataattccactcagaagcaaagttcttatgtgggctggtggatccattttaggattgttgaaattgtagtcgtcattgataattatctgtacattcgttatgaaaggaacgactcaaagttgctggaggatctatatgttattgttaatatagtggattccattttggatgtcattggtgttaaggtgttattatttggtttggagatctggaccaataaaaacctcattgtagtagatgatgtaaggaaatctgtgcacctgtattgcaagtggaagtcggagaacattacgccccggatgcaacatgacacctcacatcttttcacaactctaggattaagagggttaagtggcataggagcttttagaggaatgtgtacaccacaccgtagttgtgcaattgttactttcatgaacaaaactttgggcactttttcaattgcagtggctcatcatctaggtcataatttgggcatgaaccatgatgaggatacatgtcgttgttcacaacctagatgcataatgcatgaaggcaacccaccaataactaaatttagcaattgtagttatggtgatttttgggaatatactgtagagaggacaaagtgtttgcttgaaacagtacacacaaaggacatctttaatgtgaagcgctgtgggaatggtgttgttgaagaaggagaagagtgtgactgtggacctttaaagcattgtgcaaaagatccctgctgtctgtcaaattgcactctgactgatggttctacttgtgcttttgggctttgttgcaaagactgcaagttcctaccatcagggaaagtgtgtagaaaggaggtcaatgaatgtgatcttccagagtggtgcaatggtacttcccataagtgcccagatgacttttatgtggaagatggaattccctgtaaggagaggggctactgctatgaaaagagctgtcatgaccgcaatgaacagtgtaggaggatttttggtgcaggcgcaaatactgcaagtgagacttgctacaaagaattgaacaccttaggtgaccgtgttggtcactgtggtatcaaaaatgctacatatataaagtgtaatatctcagatgtccagtgtggaagaattcagtgtgagaatgtgacagaaattcccaatatgagtgatcatactactgtgcattgggctcgcttcaatgacataatgtgctggagtactgattaccatttggggatgaagggacctgatattggtgaagtgaaagatggaacagagtgtgggatagatcatatatgcatccacaggcactgtgtccatataaccatcttgaatagtaattgctcacctgcattttgtaacaagaggggcatctgcaacaataaacatcactgccattgcaattatctgtgggaccctcccaactgcctgataaaaggctatggaggtagtgttgacagtggcccaccccctaagagaaagaagaaaaagaagttctgttatctgtgtatattgttgcttattgttttgtttattttattatgttgtctttatcgactttgtaaaaaaagtaaaccaataaaaaagcagcaagatgttcaaactccatctgcaaaagaagaggaaaaaattcagcgtcgacctcatgagttacctccccagagtcaaccttgggtgatgccttcccagagtcaacctcctgtgacgccttcccagagtcatcctcaggtgatgccttcccagagtcaacctcctgtgacaccctcccagagtcaacctcgggtgatgccttctcagagtcaacctcctgtgatgccttcccagagtcatcctcagttgacgccttcccagagtcaacctcctgtgacaccctcccagaggcaacctcagttgatgccttcccagagtcaacctcctgtgacgccctcctagagccaacctcagttgatgccttcccagagtcaacctcctgtgacgccctcccagagccaacctcgggtgacaccctcccagagtcaacctcatgtgacaccttaccggagtaaaagt

SEQ ID NO: 104658 - DNA, 632 bp, Homo sapiens
  Payload ID: 549
  Gene Symbol: ADAM29
  Gene Name: ADAM metallopeptidase domain 29
  ENST ID: ENST00000505141
  CDS Start-End: 590-632
gtgacatcacatccactaaccaaatggggtggtgtgagtatctcctataaaataaaagctctcctgatggcctgttcctgcacatttcctgaggacgccctcgatcacaagcagcttgctggatgaataaaggaaagaaggtttatatacactaataatagaaatgttttgggatggttcatgatttcgaaaagcttcagagaaaataaagatgcttaatgttagagtacaaaacattctccctgcagtctcacgaactgtgaacaaaaactgaagtgaaaactcatagtgcataactcgtcaatactcctgtgatcgtataaccatcagcaagaaaacaaatttgattgagcccccatccagtcctctttgcgtggaatcagacctcttttgcagtggaaaggagcagtgctgcagctctgatggttcaactctgccaaaagatggatctttaatgattagcactacacactgaccaactcagaagaaggagccacaccacctgtgactccagccctgacttctgctctggaccagtgtttccataacagggacttcaaaatcactgtgatttgaagcctttttgaacatgaagatgttactcctgctgcattgccttggggtgtttctgt

SEQ ID NO: 104659 - DNA, 555 bp, Homo sapiens
  Payload ID: 549
  Gene Symbol: ADAM29
  Gene Name: ADAM metallopeptidase domain 29
  ENST ID: ENST00000502940
  CDS Start-End: 287-555
acatccactaaccaaatggggtggtgtgagtatctcctataaaataaaagctctcctgatggcctgttcctgcacatttcctgaggacgccctcgatcacaagcagtgctgcagctctgatggttcaactctgccaaaagatggatctttaatgattagcactacacactgaccaactcagaagaaggagccacaccacctgtgactccagccctgacttctgctctggaccagtgtttccataacagggacttcaaaatcactgtgatttgaagcctttttgaacatgaagatgttactcctgctgcattgccttggggtgtttctgtcctgttctggacacatccaggatgagcacccccaatatcacagccctccggatgtggtgattcctgtgaggataactggcaccaccagaggcatgacacctccaggctggctctcctatatcctgccctttggaggccagaaacacattatccacataaaggtcaagaagcttttgttttccaaacacctccctgtgttcacctacacagaccagggtgctatcct

SEQ ID NO: 104660 - DNA, 2949 bp, Homo sapiens
  Payload ID: 549
  Gene Symbol: ADAM29
  Gene Name: ADAM metallopeptidase domain 29
  Uniprot ID: Q9UKF5
  ENST ID: ENST00000618444
  CDS Start-End: 295-2757
gtgacatcacatccactaaccaaatggggtggtgtgagtatctcctataaaataaaagctctcctgatggcctgttcctgcacatttcctgaggacgccctcgatcacaagcagtgctgcagctctgatggttcaactctgccaaaagatggatctttaatgattagcactacacactgaccaactcagaagaaggagccacaccacctgtgactccagccctgacttctgctctggaccagtgtttccataacagggacttcaaaatcactgtgatttgaagcctttttgaacatgaagatgttactcctgctgcattgccttggggtgtttctgtcctgttctggacacatccaggatgagcacccccaatatcacagccctccggatgtggtgattcctgtgaggataactggcaccaccagaggcatgacacctccaggctggctctcctatatcctgccctttggaggccagaaacacattatccacataaaggtcaagaagcttttgttttccaaacacctccctgtgttcacctacacagaccagggtgctatccttgaggaccagccatttgtccagaataactgctactatcatggttatgtggaaggggacccagaatccctggtttccctcagtacctgttttgggggttttcaaggaatattacagataaatgactttgcttatgaaatcaagcccctagcattttctaccacgtttgaacatctggtatacaagatggacagtgaggagaaacaattttcaaccatgagatccggatttatgcaaaatgaaataacatgccgaatggaatttgaagaaattgataattccactcagaagcaaagttcttatgtgggctggtggatccattttaggattgttgaaattgtagtcgtcattgataattatctgtacattcgttatgaaaggaacgactcaaagttgctggaggatctatatgttattgttaatatagtggattccattttggatgtcattggtgttaaggtgttattatttggtttggagatctggaccaataaaaacctcattgtagtagatgatgtaaggaaatctgtgcacctgtattgcaagtggaagtcggagaacattacgccccggatgcaacatgacacctcacatcttttcacaactctaggattaagagggttaagtggcataggagcttttagaggaatgtgtacaccacaccgtagttgtgcaattgttactttcatgaacaaaactttgggcactttttcaattgcagtggctcatcatctaggtcataatttgggcatgaaccatgatgaggatacatgtcgttgttcacaacctagatgcataatgcatgaaggcaacccaccaataactaaatttagcaattgtagttatggtgatttttgggaatatactgtagagaggacaaagtgtttgcttgaaacagtacacacaaaggacatctttaatgtgaagcgctgtgggaatggtgttgttgaagaaggagaagagtgtgactgtggacctttaaagcattgtgcaaaagatccctgctgtctgtcaaattgcactctgactgatggttctacttgtgcttttgggctttgttgcaaagactgcaagttcctaccatcagggaaagtgtgtagaaaggaggtcaatgaatgtgatcttccagagtggtgcaatggtacttcccataagtgcccagatgacttttatgtggaagatggaattccctgtaaggagaggggctactgctatgaaaagagctgtcatgaccgcaatgaacagtgtaggaggatttttggtgcaggcgcaaatactgcaagtgagacttgctacaaagaattgaacaccttaggtgaccgtgttggtcactgtggtatcaaaaatgctacatatataaagtgtaatatctcagatgtccagtgtggaagaattcagtgtgagaatgtgacagaaattcccaatatgagtgatcatactactgtgcattgggctcgcttcaatgacataatgtgctggagtactgattaccatttggggatgaagggacctgatattggtgaagtgaaagatggaacagagtgtgggatagatcatatatgcatccacaggcactgtgtccatataaccatcttgaatagtaattgctcacctgcattttgtaacaagaggggcatctgcaacaataaacatcactgccattgcaattatctgtgggaccctcccaactgcctgataaaaggctatggaggtagtgttgacagtggcccaccccctaagagaaagaagaaaaagaagttctgttatctgtgtatattgttgcttattgttttgtttattttattatgttgtctttatcgactttgtaaaaaaagtaaaccaataaaaaagcagcaagatgttcaaactccatctgcaaaagaagaggaaaaaattcagcgtcgacctcatgagttacctccccagagtcaaccttgggtgatgccttcccagagtcaacctcctgtgacgccttcccagagtcatcctcaggtgatgccttcccagagtcaacctcctgtgacaccctcccagagtcaacctcgggtgatgccttctcagagtcaacctcctgtgatgccttcccagagtcatcctcagttgacgccttcccagagtcaacctcctgtgacaccctcccagaggcaacctcagttgatgccttcccagagtcaacctcctgtgacgccctcctagagccaacctcagttgatgccttcccagagtcaacctcctgtgacgccctcccagagccaacctcgggtgacaccctcccagagtcaacctcatgtgacaccttaccggagtaaaagtggtaaacaaaagcaatcagtaccaattccaaaaactgtatccagaaaaggtacattaaaaaaataattcctagta

SEQ ID NO: 104661 - DNA, 3386 bp, Homo sapiens
  Payload ID: 549
  Gene Symbol: ADAM29
  Gene Name: ADAM metallopeptidase domain 29
  Uniprot ID: Q9UKF5
  ENST ID: ENST00000615367
  CDS Start-End: 732-3194
gtgacatcacatccactaaccaaatggggtggtgtgagtatctcctataaaataaaagctctcctgatggcctgttcctgcacatttcctgaggacgccctcgatcacaagcagaatctgtttaattcagagtcatatgtttgctttcttctgagaaattcgataacgtacactgcttgctggatgaataaaggaaagaaggtttatatacactaataatagaaatgttttgggatggttcatgatttcgaaaagcttcagagaaaataaagatgcttaatgttagagtacaaaacattctccctgcagtctcacgaactgtgaacaaaaactgaagtgaaaactcatagtgcataactcgtcaatactcctgtgatcgtataaccatcagcaagaaaacaaatttgattgagcccccatccagtcctctttgcgtggaatcagacctcttttgcagtggaaaggagcagagaatgtgactttcctgaacaacaggagcaagaatcaatgccagattctcttctctaaaaataatcaatttgttactacagtgctgcagctctgatggttcaactctgccaaaagatggatctttaatgattagcactacacactgaccaactcagaagaaggagccacaccacctgtgactccagccctgacttctgctctggaccagtgtttccataacagggacttcaaaatcactgtgatttgaagcctttttgaacatgaagatgttactcctgctgcattgccttggggtgtttctgtcctgttctggacacatccaggatgagcacccccaatatcacagccctccggatgtggtgattcctgtgaggataactggcaccaccagaggcatgacacctccaggctggctctcctatatcctgccctttggaggccagaaacacattatccacataaaggtcaagaagcttttgttttccaaacacctccctgtgttcacctacacagaccagggtgctatccttgaggaccagccatttgtccagaataactgctactatcatggttatgtggaaggggacccagaatccctggtttccctcagtacctgttttgggggttttcaaggaatattacagataaatgactttgcttatgaaatcaagcccctagcattttctaccacgtttgaacatctggtatacaagatggacagtgaggagaaacaattttcaaccatgagatccggatttatgcaaaatgaaataacatgccgaatggaatttgaagaaattgataattccactcagaagcaaagttcttatgtgggctggtggatccattttaggattgttgaaattgtagtcgtcattgataattatctgtacattcgttatgaaaggaacgactcaaagttgctggaggatctatatgttattgttaatatagtggattccattttggatgtcattggtgttaaggtgttattatttggtttggagatctggaccaataaaaacctcattgtagtagatgatgtaaggaaatctgtgcacctgtattgcaagtggaagtcggagaacattacgccccggatgcaacatgacacctcacatcttttcacaactctaggattaagagggttaagtggcataggagcttttagaggaatgtgtacaccacaccgtagttgtgcaattgttactttcatgaacaaaactttgggcactttttcaattgcagtggctcatcatctaggtcataatttgggcatgaaccatgatgaggatacatgtcgttgttcacaacctagatgcataatgcatgaaggcaacccaccaataactaaatttagcaattgtagttatggtgatttttgggaatatactgtagagaggacaaagtgtttgcttgaaacagtacacacaaaggacatctttaatgtgaagcgctgtgggaatggtgttgttgaagaaggagaagagtgtgactgtggacctttaaagcattgtgcaaaagatccctgctgtctgtcaaattgcactctgactgatggttctacttgtgcttttgggctttgttgcaaagactgcaagttcctaccatcagggaaagtgtgtagaaaggaggtcaatgaatgtgatcttccagagtggtgcaatggtacttcccataagtgcccagatgacttttatgtggaagatggaattccctgtaaggagaggggctactgctatgaaaagagctgtcatgaccgcaatgaacagtgtaggaggatttttggtgcaggcgcaaatactgcaagtgagacttgctacaaagaattgaacaccttaggtgaccgtgttggtcactgtggtatcaaaaatgctacatatataaagtgtaatatctcagatgtccagtgtggaagaattcagtgtgagaatgtgacagaaattcccaatatgagtgatcatactactgtgcattgggctcgcttcaatgacataatgtgctggagtactgattaccatttggggatgaagggacctgatattggtgaagtgaaagatggaacagagtgtgggatagatcatatatgcatccacaggcactgtgtccatataaccatcttgaatagtaattgctcacctgcattttgtaacaagaggggcatctgcaacaataaacatcactgccattgcaattatctgtgggaccctcccaactgcctgataaaaggctatggaggtagtgttgacagtggcccaccccctaagagaaagaagaaaaagaagttctgttatctgtgtatattgttgcttattgttttgtttattttattatgttgtctttatcgactttgtaaaaaaagtaaaccaataaaaaagcagcaagatgttcaaactccatctgcaaaagaagaggaaaaaattcagcgtcgacctcatgagttacctccccagagtcaaccttgggtgatgccttcccagagtcaacctcctgtgacgccttcccagagtcatcctcaggtgatgccttcccagagtcaacctcctgtgacaccctcccagagtcaacctcgggtgatgccttctcagagtcaacctcctgtgatgccttcccagagtcatcctcagttgacgccttcccagagtcaacctcctgtgacaccctcccagaggcaacctcagttgatgccttcccagagtcaacctcctgtgacgccctcctagagccaacctcagttgatgccttcccagagtcaacctcctgtgacgccctcccagagccaacctcgggtgacaccctcccagagtcaacctcatgtgacaccttaccggagtaaaagtggtaaacaaaagcaatcagtaccaattccaaaaactgtatccagaaaaggtacattaaaaaaataattcctagta

SEQ ID NO: 104662 - DNA, 2963 bp, Homo sapiens
  Payload ID: 550
  Gene Symbol: ADAM30
  Gene Name: ADAM metallopeptidase domain 30
  Uniprot ID: Q9UKF2
  ENST ID: ENST00000369400
  CDS Start-End: 160-2532
agaccgagccctgggaggctacgggctcccccggaaaccctgccaggggagccgggttttgagctcaggcgcctctagcggcggcccccagaaatctgactcgcgaggccagagttgcagggactgaatagcaaactgaggctgagtagggaacagaccatgaggtcagtgcagatcttcctctcccaatgccgtttgctccttctactagttccgacaatgctccttaagtctcttggcgaagatgtaatttttcaccctgaaggggagtttgactcgtatgaagtcaccattcctgagaagctgagcttccggggagaggtgcagggtgtggtcagtcccgtgtcctacctactgcagttaaaaggcaagaagcacgtcctccatttgtggcccaagagacttctgttgccccgacatctgcgcgttttctccttcacagaacatggggaactgctggaggatcatccttacataccaaaggactgcaactacatgggctccgtgaaagagtctctggactctaaagctactataagcacatgcatggggggtctccgaggtgtatttaacattgatgccaaacattaccaaattgagcccctcaaggcctctcccagttttgaacatgtcgtctatctcctgaagaaagagcagtttgggaatcaggtttgtggcttaagtgatgatgaaatagaatggcagatggccccttatgagaataaggcgaggctaagggactttcctggatcctataaacacccaaagtacttggaattgatcctactctttgatcaaagtaggtataggtttgtgaacaacaatctttctcaagtcatacatgatgccattcttttgactgggattatggacacctactttcaagatgttcgtatgaggatacacttaaaggctcttgaagtatggacagattttaacaaaatacgcgttggatatccagagttagctgaagttttaggcagatttgtaatatataaaaaaagtgtattaaatgctcgcctgtcatcagattgggcacatttatatcttcaaagaaaatataatgatgctcttgcatggtcgtttggaaaagtgtgttctctagaatatgctggatcagtgagtactttactagatacaaatatccttgcccctgctacctggtctgctcatgagctgggtcatgctgtaggaatgtcacatgatgaacaatactgccaatgtaggggtaggcttaattgcatcatgggctcaggacgcactgggtttagcaattgcagttatatctctttttttaaacatatctcttcgggagcaacatgtctaaataatatcccaggactaggttatgtgcttaagagatgtggaaacaaaattgtggaggacaatgaggaatgtgactgtggttccacagaggagtgtcagaaagatcggtgttgccaatcaaattgtaagttgcaaccaggtgccaactgtagcattggactttgctgtcatgattgtcggtttcgtccatctggatacgtgtgtaggcaggaaggaaatgaatgtgaccttgcagagtactgcgacgggaattcaagttcctgcccaaatgacgtttataagcaggatggaaccccttgcaagtatgaaggccgttgtttcaggaaggggtgcagatccagatatatgcagtgccaaagcatttttggacctgatgccatggaggctcctagtgagtgctatgatgcagttaacttaataggtgatcaatttggtaactgtgagattacaggaattcgaaattttaaaaagtgtgaaagtgcaaattcaatatgtggcaggctacagtgtataaatgttgaaaccatccctgatttgccagagcatacgactataatttctactcatttacaggcagaaaatctcatgtgctggggcacaggctatcatctatccatgaaacccatgggaatacctgacctaggtatgataaatgatggcacctcctgtggagaaggccgggtatgttttaaaaaaaattgcgtcaatagctcagtcctgcagtttgactgtttgcctgagaaatgcaatacccggggtgtttgcaacaacagaaaaaactgccactgcatgtatgggtgggcacctccattctgtgaggaagtggggtatggaggaagcattgacagtgggcctccaggactgctcagaggggcgattccctcgtcaatttgggttgtgtccatcataatgtttcgccttattttattaatcctttcagtggtttttgtgtttttccggcaagtgataggaaaccacttaaaacccaaacaggaaaaaatgccactatccaaagcaaaaactgaacaggaagaatctaaaacaaaaactgtacaggaagaatctaaaacaaaaactggacaggaagaatctgaagcaaaaactggacaggaagaatctaaagcaaaaactggacaggaagaatctaaagcaaacattgaaagtaaacgacccaaagcaaagagtgtcaagaaacaaaaaaagtaaccgggcaatccatactcattcagtaacacaggctcatttatttaaccagctaatcatttatccaaaggctttccattcttctcccaatatttttttactttaatttttcccacaagttttgatcagcaaataaacagcattcttgttttggaaacaaaccagtgcattctacttctcgagtgttcacttgcccctcagtttgtgaccaagttgtgggtattctgagaatcatgctctaatggcttttccatacactaaagctctgaaagtagtgagtttcctagaattaccatgctattcaaggtatagtcttgtttctcagaatcccagggaacaaagcaattgtctgcctctccctctgcctccctcaacttgatccatgtgaacatccgcacctgcacccatgctgatcaataaatgccgacaacaca

SEQ ID NO: 104663 - DNA, 2601 bp, Homo sapiens
  Payload ID: 551
  Gene Symbol: ADAM32
  Gene Name: ADAM metallopeptidase domain 32
  Uniprot ID: Q8TC27
  ENST ID: ENST00000379907
  CDS Start-End: 128-2491
ccggggcctccggagaacgctgtcccatgaacgtgcggggagcggcccccggcgtccgcgcgtccccgcgtccctggcaattcccgacttcccaacggcttcccgctggcagccccgaagccgcaccatgttccgcctctggttgctgctggccgggctctgcggcctcctggcgtcaagacccggttttcaaaattcacttctacagatcgtaattccagagaaaatccaaacaaatacaaatgacagttcagaaatagaatatgaacaaatatcctatattattccaatagatgagaaactgtacactgtgcaccttaaacaaagatattttttagcagataattttatgatctatttgtacaatcaaggatctatgaatacttattcttcagatattcagactcaatgctactatcaaggaaatattgaaggatatccagattccatggtcacactcagcacgtgctctggactaagaggaatactgcaatttgaaaatgtttcttatggaattgagcctctggaatctgcagttgaatttcagcatgttctttacaaattaaagaatgaagacaatgatattgcaatttttattgacagaagcctgaaagaacaaccaatggatgacaacatttttataagtgaaaaatcagaaccagctgttccagatttatttcctctttatctagaaatgcatattgtggtggacaaaactttgtatgattactggggctctgatagcatgatagtaacaaataaagtcatcgaaattgttggccttgcaaattcaatgttcacccaatttaaagttactattgtgctgtcatcattggagttatggtcagatgaaaataagatttctacagttggtgaggcagatgaattattgcaaaaatttttagaatggaaacaatcttatcttaacctaaggcctcatgatattgcatatctactaatttatatggattatcctcgttatttgggagcagtgtttcctggaacaatgtgtattactcgttattctgcaggagttgcattgtaccccaaggagataactctggaggcatttgcagttattgtcacccagatgctggcactcagtctgggaatatcatatgacgacccaaagaaatgtcaatgttcagaatccacctgtataatgaatccagaagttgtgcaatccaatggtgtgaagacttttagcagttgcagtttgaggagctttcaaaatttcatttcaaatgtgggtgtcaaatgtcttcagaataagccacaaatgcaaaaaaaatctccgaaaccagtctgtggcaatggcagattggagggaaatgaaatctgtgattgtggtactgaggctcaatgtggacctgcaagctgttgtgattttcgaacttgtgtactgaaagacggagcaaaatgttataaaggactgtgctgcaaagactgtcaaattttacaatcaggcgttgaatgtaggccgaaagcacatcctgaatgtgacatcgctgaaaattgtaatggaacctcaccagaatgtggtcctgacataactttaatcaatggactttcatgcaaaaataataagtttatttgttatgacggagactgccatgatctcgatgcacgttgtgagagtgtatttggaaaaggttcaagaaatgctccatttgcctgctatgaagaaatacaatctcaatcagacagatttgggaactgtggtagggatagaaataacaaatatgtgttctgtggatggaggaatcttatatgtggaagattagtttgtacctaccctactcgaaagcctttccatcaagaaaatggtgatgtgatttatgctttcgtacgagattctgtatgcataactgtagactacaaattgcctcgaacagttccagatccactggctgtcaaaaatggctctcagtgtgatattgggagggtttgtgtaaatcgtgaatgtgtagaatcaaggataattaaggcttcagcacatgtttgttcacaacagtgttctggacatggagtgtgtgattccagaaacaagtgccattgttcgccaggctataagcctccaaactgccaaatacgttccaaaggattttccatatttcctgaggaagatatgggttcaatcatggaaagagcatctgggaagactgaaaacacctggcttctaggtttcctcattgctcttcctattctcattgtaacaaccgcaatagttttggcaaggaaacagttgaaaaagtggttcgccaaggaagaggaattcccaagtagcgaatctaaatcggaaggtagcacacagacatatgccagccaatccagctcagaaggcagcactcagacatatgccagccaaaccagatcagaaagcagcagtcaagctgatactagcaaatccaaatcagaagatagtgctgaagcatatactagcagatccaaatcacaggacagtacccaaacacaaagcagtagtaactagtgattccttcagaaggcaacggataacatcgagagtctcgctaagaaatgaaaattctgtctttccttccgtggtcacagctgaaagaaacaataaattgagtgtggatc

SEQ ID NO: 104664 - DNA, 712 bp, Homo sapiens
  Payload ID: 551
  Gene Symbol: ADAM32
  Gene Name: ADAM metallopeptidase domain 32
  ENST ID: ENST00000399831
  CDS Start-End: 248-712
agtggctccagcaaccacgcggctggggtgcgccgggaagggagctggatgttttagcctcggggcgcacgctgcgggcccttcgtgttccggacgctaaacaccgagagcaccccgtctccggggcctccggagaacgctgtcccatgaacgtgcggggagcggcccccggcgtccgcgcgtccccgcgtccctggcaattcccgacttcccaacggcttcccgctggcagccccgaagccgcaccatgttccgcctctggttgctgctggccgggctctgcggcctcctggcgtcaagacccggttttcaaaattcacttctacagatcgtaattccagagaaaatccaaacaaatacaaatgacagttcagaaatagaatatgaacaaatatcctatattattccaatagatgagaaactgtacactgtgcaccttaaacaaagatattttttagcagataattttatgatctatttgtacaatcaaggatctatgaatacttattcttcagatattcagactcaatgctactatcaaggaaatattgaaggatatccagattccatggtcacactcagcacgtgctctggactaagaagcctgaaagaacaaccaatggatgacaacatttttataagtgaaaaatcagaaccagctgttccagatttatttcctctttatctagaaatgcatattgtggtggacaaa

SEQ ID NO: 104665 - DNA, 2281 bp, Homo sapiens
  Payload ID: 551
  Gene Symbol: ADAM32
  Gene Name: ADAM metallopeptidase domain 32
  ENST ID: ENST00000437682
  CDS Start-End: 105-2171
agctggatgttttagcctcggggcgcacgctgcgggcccttcgtgttccggacgctaaacaccgagagcaccccgtctccggggcctccggagaacgctgtcccatgaacgtgcggggagcggcccccggcgtccgcgcgtccccgcgtccctggcaattcccgacttcccaacggcttcccgctggcagccccgaagccgcaccatgttccgcctctggttgctgctggccgggctctgcggcctcctggcgtcaagacccggaacaaatatcctatattattccaatagatgagaaactgtacactgtgcaccttaaacaaagatattttttagcagataattttatgatctatttgtacaatcaaggatctatgaatacttattcttcagatattcagactcaatgctactatcaaggaaatattgaaggatatccagattccatggtcacactcagcacgtgctctggactaagaggaatactgcaatttgaaaatgtttcttatggaattgagcctctggaatctgcagttgaatttcagcatgttctttacaaattaaagaatgaagacaatgatattgcaatttttattgacagaagcctgaaagaacaaccaatggatgacaacatttttataagtgaaaaatcagaaccagctgttccagatttatttcctctttatctagaaatgcatattgtggtggacaaaactttgtatgattactggggctctgatagcatgatagtaacaaataaagtcatcgaaattgttggccttgcaaattcaatgttcacccaatttaaagttactattgtgctgtcatcattggagttatggtcagatgaaaataagatttctacagttggtgaggcagatgaattattgcaaaaatttttagaatggaaacaatcttatcttaacctaaggcctcatgatattgcatatctactaatttatatggattatcctcgttatttgggagcagtgtttcctggaacaatgtgtattactcgttattctgcaggagttgcattgcaatgtggacctgcaagctgttgtgattttcgaacttgtgtactgaaagacggagcaaaatgttataaaggactgtgctgcaaagactgtcaaattttacaatcaggcgttgaatgtaggccgaaagcacatcctgaatgtgacatcgctgaaaattgtaatggaacctcaccagaatgtggtcctgacataactttaatcaatggactttcatgcaaaaataataagtttatttgttatgacggagactgccatgatctcgatgcacgttgtgagagtgtatttggaaaaggttcaagaaatgctccatttgcctgctatgaagaaatacaatctcaatcagacagatttgggaactgtggtagggatagaaataacaaatatgtgttctgtggatggaggaatcttatatgtggaagattagtttgtacctaccctactcgaaagcctttccatcaagaaaatggtgatgtgatttatgctttcgtacgagattctgtatgcataactgtagactacaaattgcctcgaacagttccagatccactggctgtcaaaaatggctctcagtgtgatattgggagggtttgtgtaaatcgtgaatgtgtagaatcaaggataattaaggcttcagcacatgtttgttcacaacagtgttctggacatggagtgtgtgattccagaaacaagtgccattgttcgccaggctataagcctccaaactgccaaatacgttccaaaggattttccatatttcctgaggaagatatgggttcaatcatggaaagagcatctgggaagactgaaaacacctggcttctaggtttcctcattgctcttcctattctcattgtaacaaccgcaatagttttggcaaggaaacagttgaaaaagtggttcgccaaggaagaggaattcccaagtagcgaatctaaatcggaaggtagcacacagacatatgccagccaatccagctcagaaggcagcactcagacatatgccagccaaaccagatcagaaagcagcagtcaagctgatactagcaaatccaaatcagaagatagtgctgaagcatatactagcagatccaaatcacaggacagtacccaaacacaaagcagtagtaactagtgattccttcagaaggcaacggataacatcgagagtctcgctaagaaatgaaaattctgtctttccttccgtggtcacagctgaaagaaacaataaattgagtgtggatc

SEQ ID NO: 104666 - DNA, 577 bp, Homo sapiens
  Payload ID: 551
  Gene Symbol: ADAM32
  Gene Name: ADAM metallopeptidase domain 32
  ENST ID: ENST00000523400
  CDS Start-End: 60-577
agattggaggaaaaagcctggttgtgaagtccatttgggcagcgtcagtggggaaaaaaatgcagctggcgctcttcaaaaatatgaagagctggcatttcatattgaaaagcggctcacttttcccttctttggaatgttcacacatctggctaaatagttttgaaaaaatattagaaacaggtttggcaaatatgaatatatatttaggttttcaaaattcacttctacagatcgtaattccagagaaaatccaaacaaatacaaatgacagttcagaaatagaatatgaacaaatatcctatattattccaatagatgagaaactgtacactgtgcaccttaaacaaagatattttttagcagataattttatgatctatttgtacaatcaaggatctatgaatacttattcttcagatattcagactcaatgctactatcaaggaaatattgaaggatatccagattccatggtcacactcagcacgtgctctggactaagaggaatactgcaatttgaaaatgtttcttatggaattgagcctctggaatctgcagttgaatttcagcatgt

SEQ ID NO: 104667 - DNA, 557 bp, Homo sapiens
  Payload ID: 551
  Gene Symbol: ADAM32
  Gene Name: ADAM metallopeptidase domain 32
  ENST ID: ENST00000522506
  CDS Start-End: 4-557
accatgttccgcctctggttgctgctggccgggctctgcggcctcctggcgtcaagacccggttttcaaaattcacttctacagatcgtaattccagagaaaatccaaacaaatacaaatgacagttcagaaatagaatatgaacaaatatcctatattattccaatagatgagaaactgtacactgtgcaccttaaacaaagatattttttagcagataattttatgatctatttgtacaatcaaggatctatgaatacttattcttcagatattcagactcaatgctactatcaaggaaatattgaaggatatccagattccatggtcacactcagcacgtgctctggactaagaggaatactgcaatttgaaaatgtttcttatggaattgagcctctggaatctgcagttgaatttcagcatgttctttacaaattaaagaatgaagacaatgatattgcaatttttattgacagaagcctgaaagaacaaccaatggatgacaacatttttataagtgaaaaatatgattactggggctctgatagcatgat

SEQ ID NO: 104668 - DNA, 2168 bp, Homo sapiens
  Payload ID: 551
  Gene Symbol: ADAM32
  Gene Name: ADAM metallopeptidase domain 32
  ENST ID: ENST00000519315
  CDS Start-End: 169-2058
ccttcgtgttccggacgctaaacaccgagagcaccccgtctccggggcctccggagaacgctgtcccatgaacgtgcggggagcggcccccggcgtccgcgcgtccccgcgtccctggcaattcccgacttcccaacggcttcccgctggcagccccgaagccgcaccatgttccgcctctggttgctgctggccgggctctgcggcctcctggcgtcaagacccggttttcaaaattcacttctacagatcgtaattccagagaaaatccaaacaaatacaaatgacagttcagaaatagaatatgaacaaatatcctatattattccaatagatgagaaactgtacactgtgcaccttaaacaaagatattttttagcagataattttatgatctatttgtacaatcaaggatctatgaatacttattcttcagatattcagactcaatgctactatcaaggaaatattgaaggatatccagattccatggtcacactcagcacgtgctctggactaagaggaatactgcaatttgaaaatgtttcttatggaattgagcctctggaatctgcagttgaatttcagcatgttctttacaaattaaagaatgaagacaatgatattgcaatttttattgacagaagcctgaaagaacaaccaatggatgacaacatttttataagtgaaaaatcagaaccagctgttccagatttatttcctctttatctagaaatgcatattgtggtggacaaaactttgtatgattactggggctctgatagcatgatagtaacaaataaagtcatcgaaattgttggccttgcaaattcaatgttcacccaatttaaagttactattgtgctgtcatcattggagttatggtcagatgaaaataagatttctacagttggtgaggcagatgaattattgcaaaaatttttagaatggaaacaatcttatcttaacctaaggcctcatgatattgcatatctactaatttatatggattatcctcgttatttgggagcagtgtttcctggaacaatgtgtattactcgttattctgcaggagttgcattgcaatgtggacctgcaagctgttgtgattttcgaacttgtgtactgaaagacggagcaaaatgttataaaggactgtgctgcaaagactgtcaaattttacaatcaggcgttgaatgtaggccgaaagcacatcctgaatgtgacatcgctgaaaattgtaatggaacctcaccagaatgtggtcctgacataactttaatcaatggactttcatgcaaaaataataagtttatttgttatgacggagactgccatgatctcgatgcacgttgtgagagtgtatttggaaaaggttcaagaaatgctccatttgcctgctatgaagaaatacaatctcaatcagacagatttgggaactgtggtagggatagaaataacaaatatgtgttctgtggatggaggaatcttatatgtggaagattagtttgtacctaccctactcgaaagcctttccatcaagaaaatggtgatgtgatttatgctttcgtacgagattctgtatgcataactgtagactacaaattgcctcgaacagttccagatccactggctgtcaaaaatggctctcagtgtgatattgggagggtttgtgtaaatcgtgaatgtgtagaatcaaggataattaaggcttcagcacatgtttgttcacaacagtgttctggacatggagtgtgtgattccagaaacaagtgccattgttcgccaggctataagcctccaaactgccaaatacgttccaaaggattttccatatttcctgaggaagatatgggttcaatcatggaaagagcatctgggaagactgaaaacacctggcttctaggtttcctcattgctcttcctattctcattgtaacaaccgcaatagttttggcaaggaaacagttgaaaaagtggttcgccaaggaagaggaattcccaagtagcgaatccaaatcacaggacagtacccaaacacaaagcagtagtaactagtgattccttcagaaggcaacggataacatcgagagtctcgctaagaaatgaaaattctgtctttccttccgtggtcacagctgaaagaaacaataaattgagtgtggatc

SEQ ID NO: 104669 - DNA, 571 bp, Homo sapiens
  Payload ID: 551
  Gene Symbol: ADAM32
  Gene Name: ADAM metallopeptidase domain 32
  ENST ID: ENST00000521741
  CDS Start-End: 411-571
ttttccaggggattaggcgccccgtccggatggagaagcgactcagggcccagcaccagggctcacgcctgtaatcccagggctttgagagactgaggcgagctgattgtttgacctcggagttggagaccagcttgggcaacacagcaagaccccatctctacaaaaaaatttaaaaaaatgttccgaggtggtggtgcgcacctgtgatcccagctacccgggaggctgagggaggaggaccacgttttcaaaattcacttctacagatcgtaattccagagaaaatccaaacaaatacaaatgacagttcagaaatagaatatgaacaaatatcctatattattccaatagatgagaaactgtacactgtgcaccttaaacaaagatattttttagcagataattttatgatctatttgtacaatcaaggatctatgaatacttattcttcagatattcagactcaatgctactatcaaggaaatattgaaggatatccagattccatggtcacactcagcacgtgctctggactaagaggaatactgcaatttgaaaatgtttctta

SEQ ID NO: 104670 - DNA, 2168 bp, Homo sapiens
  Payload ID: 551
  Gene Symbol: ADAM32
  Gene Name: ADAM metallopeptidase domain 32
  ENST ID: ENST00000618895
  CDS Start-End: 169-2058
ccttcgtgttccggacgctaaacaccgagagcaccccgtctccggggcctccggagaacgctgtcccatgaacgtgcggggagcggcccccggcgtccgcgcgtccccgcgtccctggcaattcccgacttcccaacggcttcccgctggcagccccgaagccgcaccatgttccgcctctggttgctgctggccgggctctgcggcctcctggcgtcaagacccggttttcaaaattcacttctacagatcgtaattccagagaaaatccaaacaaatacaaatgacagttcagaaatagaatatgaacaaatatcctatattattccaatagatgagaaactgtacactgtgcaccttaaacaaagatattttttagcagataattttatgatctatttgtacaatcaaggatctatgaatacttattcttcagatattcagactcaatgctactatcaaggaaatattgaaggatatccagattccatggtcacactcagcacgtgctctggactaagaggaatactgcaatttgaaaatgtttcttatggaattgagcctctggaatctgcagttgaatttcagcatgttctttacaaattaaagaatgaagacaatgatattgcaatttttattgacagaagcctgaaagaacaaccaatggatgacaacatttttataagtgaaaaatcagaaccagctgttccagatttatttcctctttatctagaaatgcatattgtggtggacaaaactttgtatgattactggggctctgatagcatgatagtaacaaataaagtcatcgaaattgttggccttgcaaattcaatgttcacccaatttaaagttactattgtgctgtcatcattggagttatggtcagatgaaaataagatttctacagttggtgaggcagatgaattattgcaaaaatttttagaatggaaacaatcttatcttaacctaaggcctcatgatattgcatatctactaatttatatggattatcctcgttatttgggagcagtgtttcctggaacaatgtgtattactcgttattctgcaggagttgcattgcaatgtggacctgcaagctgttgtgattttcgaacttgtgtactgaaagacggagcaaaatgttataaaggactgtgctgcaaagactgtcaaattttacaatcaggcgttgaatgtaggccgaaagcacatcctgaatgtgacatcgctgaaaattgtaatggaagctcaccagaatgtggtcctgacataactttaatcaatggactttcatgcaaaaataataagtttatttgttatgacggagactgccatgatctcgatgcacgttgtgagagtgtatttggaaaaggttcaagaaatgctccatttgcctgctatgaagaaatacaatctcaatcagacagatttgggaactgtggtagggatagaaataacaaatatgtgttctgtggatggaggaatcttatatgtggaagattagtttgtacctaccctactcgaaagcctttccatcaagaaaatggtgatgtgatttatgctttcgtacgagattctgtatgcataaccgtagactacaaattgcctcgaacagttccagatccactggctgtcaaaaatggctctcagtgtgatattgggagggtttgtgtaaatcgtgaatgtgtagaatcaaggataattaaggcttcagcacatgtttgttcacaacagtgttctggacatggagtgtgtgattccagaaacaagtgccattgttcgccaggctataagcctccaaactgccaaatacgttccaaaggattttccatatttcctgaggaagatatgggttcaatcatggaaagagcatctgggaagactgaaaacacctggcttctaggtttcctcattgctcttcctattctcattgtaacaaccgcaatagttttggcaaggaaacagttgaaaaagtggttcgccaaggaagaggaattcccaagtagcgaatccaaatcacaggacagtacccaaacacaaagcagtagtaactagtgattccttcagaaggcaacggataacatcgagagtctcgctaagaaatgaaaattctgtctttccttccgtggtcacagctgaaagaaacaataaattgagtgtggatc

SEQ ID NO: 104671 - DNA, 2601 bp, Homo sapiens
  Payload ID: 551
  Gene Symbol: ADAM32
  Gene Name: ADAM metallopeptidase domain 32
  Uniprot ID: Q8TC27
  ENST ID: ENST00000615420
  CDS Start-End: 128-2491
ccggggcctccggagaacgctgtcccatgaacgtgcggggagcggcccccggcgtccgcgcgtccccgcgtccctggcaattcccgacttcccaacggcttcccgctggcagccccgaagccgcaccatgttccgcctctggttgctgctggccgggctctgcggcctcctggcgtcaagacccggttttcaaaattcacttctacagatcgtaattccagagaaaatccaaacaaatacaaatgacagttcagaaatagaatatgaacaaatatcctatattattccaatagatgagaaactgtacactgtgcaccttaaacaaagatattttttagcagataattttatgatctatttgtacaatcaaggatctatgaatacttattcttcagatattcagactcaatgctactatcaaggaaatattgaaggatatccagattccatggtcacactcagcacgtgctctggactaagaggaatactgcaatttgaaaatgtttcttatggaattgagcctctggaatctgcagttgaatttcagcatgttctttacaaattaaagaatgaagacaatgatattgcaatttttattgacagaagcctgaaagaacaaccaatggatgacaacatttttataagtgaaaaatcagaaccagctgttccagatttatttcctctttatctagaaatgcatattgtggtggacaaaactttgtatgattactggggctctgatagcatgatagtaacaaataaagtcatcgaaattgttggccttgcaaattcaatgttcacccaatttaaagttactattgtgctgtcatcattggagttatggtcagatgaaaataagatttctacagttggtgaggcagatgaattattgcaaaaatttttagaatggaaacaatcttatcttaacctaaggcctcatgatattgcatatctactaatttatatggattatcctcgttatttgggagcagtgtttcctggaacaatgtgtattactcgttattctgcaggagttgcattgtaccccaaggagataactctggaggcatttgcagttattgtcacccagatgctggcactcagtctgggaatatcatatgacgacccaaagaaatgtcaatgttcagaatccacctgtataatgaatccagaagttgtgcaatccaatggtgtgaagacttttagcagttgcagtttgaggagctttcaaaatttcatttcaaatgtgggtgtcaaatgtcttcagaataagccacaaatgcaaaaaaaatctccgaaaccagtctgtggcaatggcagattggagggaaatgaaatctgtgattgtggtactgaggctcaatgtggacctgcaagctgttgtgattttcgaacttgtgtactgaaagacggagcaaaatgttataaaggactgtgctgcaaagactgtcaaattttacaatcaggcgttgaatgtaggccgaaagcacatcctgaatgtgacatcgctgaaaattgtaatggaagctcaccagaatgtggtcctgacataactttaatcaatggactttcatgcaaaaataataagtttatttgttatgacggagactgccatgatctcgatgcacgttgtgagagtgtatttggaaaaggttcaagaaatgctccatttgcctgctatgaagaaatacaatctcaatcagacagatttgggaactgtggtagggatagaaataacaaatatgtgttctgtggatggaggaatcttatatgtggaagattagtttgtacctaccctactcgaaagcctttccatcaagaaaatggtgatgtgatttatgctttcgtacgagattctgtatgcataaccgtagactacaaattgcctcgaacagttccagatccactggctgtcaaaaatggctctcagtgtgatattgggagggtttgtgtaaatcgtgaatgtgtagaatcaaggataattaaggcttcagcacatgtttgttcacaacagtgttctggacatggagtgtgtgattccagaaacaagtgccattgttcgccaggctataagcctccaaactgccaaatacgttccaaaggattttccatatttcctgaggaagatatgggttcaatcatggaaagagcatctgggaagactgaaaacacctggcttctaggtttcctcattgctcttcctattctcattgtaacaaccgcaatagttttggcaaggaaacagttgaaaaagtggttcgccaaggaagaggaattcccaagtagcgaatctaaatcggaaggtagcacacagacatatgccagccaatccagctcagaaggcagcactcagacatatgccagccaaaccagatcagaaagcagcagtcaagctgatactagcaaatccaaatcagaagatagtgctgaagcatatactagcagatccaaatcacaggacagtacccaaacacaaagcagtagtaactagtgattccttcagaaggcaacggataacatcgagagtctcgctaagaaatgaaaattctgtctttccttccgtggtcacagctgaaagaaacaataaattgagtgtggatc

SEQ ID NO: 104672 - DNA, 712 bp, Homo sapiens; identical to SEQ ID NO: 104664
  Payload ID: 551
  Gene Symbol: ADAM32
  Gene Name: ADAM metallopeptidase domain 32
  ENST ID: ENST00000633822
  CDS Start-End: 248-712

SEQ ID NO: 104673 - DNA, 571 bp, Homo sapiens; identical to SEQ ID NO: 104669
  Payload ID: 551
  Gene Symbol: ADAM32
  Gene Name: ADAM metallopeptidase domain 32
  ENST ID: ENST00000634221
  CDS Start-End: 411-571

SEQ ID NO: 104674 - DNA, 275 bp, Homo sapiens
  Payload ID: 551
  Gene Symbol: ADAM32
  Gene Name: ADAM metallopeptidase domain 32
  ENST ID: ENST00000632855
  CDS Start-End: 1-163
atctaaatcggaaggtagcacacagacatatgccagccaatccagctcagaaggcagcactcagacatatgccagccaaaccagatcagaaagcagcagtcaagctgatactagcaaatccaaatcacaggacagtacccaaacacaaagcagtagtaactagtgattccttcagaaggcaacggataacatcgagagtctcgctaagaaatgaaaattctgtctttccttccgtggtcacagctgaaagaaacaataaattgagtgtggatcaa

SEQ ID NO: 104675 - DNA, 2281 bp, Homo sapiens
  Payload ID: 551
  Gene Symbol: ADAM32
  Gene Name: ADAM metallopeptidase domain 32
  ENST ID: ENST00000634081
  CDS Start-End: 105-2171
agctggatgttttagcctcggggcgcacgctgcgggcccttcgtgttccggacgctaaacaccgagagcaccccgtctccggggcctccggagaacgctgtcccatgaacgtgcggggagcggcccccggcgtccgcgcgtccccgcgtccctggcaattcccgacttcccaacggcttcccgctggcagccccgaagccgcaccatgttccgcctctggttgctgctggccgggctctgcggcctcctggcgtcaagacccggaacaaatatcctatattattccaatagatgagaaactgtacactgtgcaccttaaacaaagatattttttagcagataattttatgatctatttgtacaatcaaggatctatgaatacttattcttcagatattcagactcaatgctactatcaaggaaatattgaaggatatccagattccatggtcacactcagcacgtgctctggactaagaggaatactgcaatttgaaaatgtttcttatggaattgagcctctggaatctgcagttgaatttcagcatgttctttacaaattaaagaatgaagacaatgatattgcaatttttattgacagaagcctgaaagaacaaccaatggatgacaacatttttataagtgaaaaatcagaaccagctgttccagatttatttcctctttatctagaaatgcatattgtggtggacaaaactttgtatgattactggggctctgatagcatgatagtaacaaataaagtcatcgaaattgttggccttgcaaattcaatgttcacccaatttaaagttactattgtgctgtcatcattggagttatggtcagatgaaaataagatttctacagttggtgaggcagatgaattattgcaaaaatttttagaatggaaacaatcttatcttaacctaaggcctcatgatattgcatatctactaatttatatggattatcctcgttatttgggagcagtgtttcctggaacaatgtgtattactcgttattctgcaggagttgcattgcaatgtggacctgcaagctgttgtgattttcgaacttgtgtactgaaagacggagcaaaatgttataaaggactgtgctgcaaagactgtcaaattttacaatcaggcgttgaatgtaggccgaaagcacatcctgaatgtgacatcgctgaaaattgtaatggaagctcaccagaatgtggtcctgacataactttaatcaatggactttcatgcaaaaataataagtttatttgttatgacggagactgccatgatctcgatgcacgttgtgagagtgtatttggaaaaggttcaagaaatgctccatttgcctgctatgaagaaatacaatctcaatcagacagatttgggaactgtggtagggatagaaataacaaatatgtgttctgtggatggaggaatcttatatgtggaagattagtttgtacctaccctactcgaaagcctttccatcaagaaaatggtgatgtgatttatgctttcgtacgagattctgtatgcataaccgtagactacaaattgcctcgaacagttccagatccactggctgtcaaaaatggctctcagtgtgatattgggagggtttgtgtaaatcgtgaatgtgtagaatcaaggataattaaggcttcagcacatgtttgttcacaacagtgttctggacatggagtgtgtgattccagaaacaagtgccattgttcgccaggctataagcctccaaactgccaaatacgttccaaaggattttccatatttcctgaggaagatatgggttcaatcatggaaagagcatctgggaagactgaaaacacctggcttctaggtttcctcattgctcttcctattctcattgtaacaaccgcaatagttttggcaaggaaacagttgaaaaagtggttcgccaaggaagaggaattcccaagtagcgaatctaaatcggaaggtagcacacagacatatgccagccaatccagctcagaaggcagcactcagacatatgccagccaaaccagatcagaaagcagcagtcaagctgatactagcaaatccaaatcagaagatagtgctgaagcatatactagcagatccaaatcacaggacagtacccaaacacaaagcagtagtaactagtgattccttcagaaggcaacggataacatcgagagtctcgctaagaaatgaaaattctgtctttccttccgtggtcacagctgaaagaaacaataaattgagtgtggatc

SEQ ID NO: 104676 - DNA, 577 bp, Homo sapiens; identical to SEQ ID NO: 104666
  Payload ID: 551
  Gene Symbol: ADAM32
  Gene Name: ADAM metallopeptidase domain 32
  ENST ID: ENST00000631545
  CDS Start-End: 60-577

SEQ ID NO: 104677 - DNA, 557 bp, Homo sapiens; identical to SEQ ID NO: 104667
  Payload ID: 551
  Gene Symbol: ADAM32
  Gene Name: ADAM metallopeptidase domain 32
  ENST ID: ENST00000631415
  CDS Start-End: 4-557

SEQ ID NO: 104678 - DNA, 3480 bp, Homo sapiens
  Payload ID: 552
  Gene Symbol: ADAM33
  Gene Name: ADAM metallopeptidase domain 33
  Uniprot ID: Q9BZ11
  ENST ID: ENST00000350009
  CDS Start-End: 128-2491
gggaggtgggggcgggaaggtccgaaggcggcggcctgaggctgcaccgggcacgggtcggccgcaatccagcctgggcggagccggagttgcgagccgctgcctagaggccgaggagctcacagctatgggctggaggccccggagagctcgggggaccccgttgctgctgctgctactactgctgctgctctggccagtgccaggcgccggggtgcttcaaggacatatccctgggcagccagtcaccccgcactgggtcctggatggacaaccctggcgcaccgtcagcctggaggagccggtctcgaagccagacatggggctggtggccctggaggctgaaggccaggagctcctgcttgagctggagaagaaccacaggctgctggccccaggatacatagaaacccactacggcccagatgggcagccagtggtgctggcccccaaccacacggatcattgccactaccaagggcgagtaaggggcttccccgactcctgggtagtcctctgcacctgctctgggatgagtggcctgatcaccctcagcaggaatgccagctattatctgcgtccctggccaccccggggctccaaggacttctcaacccacgagatctttcggatggagcagctgctcacctggaaaggaacctgtggccacagggatcctgggaacaaagcgggcatgaccagccttcctggtggtccccagagcaggggcaggcgagaagcgcgcaggacccggaagtacctggaactgtacattgtggcagaccacaccctgttcttgactcggcaccgaaacttgaaccacaccaaacagcgtctcctggaagtcgccaactacgtggaccagcttctcaggactctggacattcaggtggcgctgaccggcctggaggtgtggaccgagcgggaccgcagccgcgtcacgcaggacgccaacgccacgctctgggccttcctgcagtggcgccgggggctgtgggcgcagcggccccacgactccgcgcagctgctcacgggccgcgccttccagggcgccacagtgggcctggcgcccgtcgagggcatgtgccgcgccgagagctcgggaggcgtgagcacggaccactcggagctccccatcggcgccgcagccaccatggcccatgagatcggccacagcctcggcctcagccacgaccccgacggctgctgcgtggaggctgcggccgagtccggaggctgcgtcatggctgcggccaccgggcacccgtttccgcgcgtgttcagcgcctgcagccgccgccagctgcgcgccttcttccgcaaggggggcggcgcttgcctctccaatgccccggaccccggactcccggtgccgccggcgctctgcgggaacggcttcgtggaagcgggcgaggagtgtgactgcggccctggccaggagtgccgcgacctctgctgctttgctcacaactgctcgctgcgcccgggggcccagtgcgcccacggggactgctgcgtgcgctgcctgctgaagccggctggagcgctgtgccgccaggccatgggtgactgtgacctccctgagttttgcacgggcacctcctcccactgtcccccagacgtttacctactggacggctcaccctgtgccaggggcagtggctactgctgggatggcgcatgtcccacgctggagcagcagtgccagcagctctgggggcctggctcccacccagctcccgaggcctgtttccaggtggtgaactctgcgggagatgctcatggaaactgcggccaggacagcgagggccacttcctgccctgtgcagggagggatgccctgtgtgggaagctgcagtgccagggtggaaagcccagcctgctcgcaccgcacatggtgccagtggactctaccgttcacctagatggccaggaagtgacttgtcggggagccttggcactccccagtgcccagctggacctgcttggcctgggcctggtagagccaggcacccagtgtggacctagaatggtttgcaatagcaaccataactgccactgtgctccaggctgggctccacccttctgtgacaagccaggctttggtggcagcatggacagtggccctgtgcaggctgaaaaccatgacaccttcctgctggccatgctcctcagcgtcctgctgcctctgctcccaggggccggcctggcctggtgttgctaccgactcccaggagcccatctgcagcgatgcagctggggctgcagaagggaccctgcgtgcagtggccccaaagatggcccacacagggaccaccccctgggcggcgttcaccccatggagttgggccccacagccactggacagccctggcccctggaccctgagaactctcatgagcccagcagccaccctgagaagcctctgccagcagtctcgcctgacccccaagcagatcaagtccagatgccaagatcctgcctctggtgagaggtagctcctaaaatgaacagatttaaagacaggtggccactgacagccactccaggaacttgaactgcaggggcagagccagtgaatcaccggacctccagcacctgcaggcagcttggaagtttcttccccgagtggagcttcgacccacccactccaggaacccagagccacattagaagttcctgagggctggagaacactgctgggcacactctccagctcaataaaccatcagtcccagaagcaaaggtcacacagcccctgacctccctcaccagtggaggctgggtagtgctggccatcccaaaagggctctgtcctgggagtctggtgtgtctcctacatgcaatttccacggacccagctctgtggagggcatgactgctggccagaagctagtggtcctggggccctatggttcgactgagtccacactcccctggagcctggctggcctctgcaaacaaacataattttggggaccttccttcctgtttcttcccaccctgtcttctcccctaggtggttcctgagcccccacccccaatcccagtgctacacctgaggttctggagctcagaatctgacagcctctcccccattctgtgtgtgtcggggggacagagggaaccatttaagaaaagataccaaagtagaagtcaaaagaaagacatgttggctataggcgtggtggctcatgcctataatcccagcactttgggaagccggggtaggaggatcaccagaggccagcaggtccacaccagcctgggcaacacagcaagacaccgcatctacagaaaaattttaaaattagctgggcgtggtggtgtgtacctgtaggcctagctgctcaggaggctgaagcaggaggatcacttgagcctgagttcaacactgcagtgagctatggtggcaccactgcactccagcctgggtgacagagcaagaccctgtctctaaaataaattttaaaaagacat

SEQ ID NO: 104679 - DNA, 3677 bp, Homo sapiens
  Payload ID: 552
  Gene Symbol: ADAM33
  Gene Name: ADAM metallopeptidase domain 33
  Uniprot ID: Q9BZ11
  ENST ID: ENST00000356518
  CDS Start-End: 243-2684
gggcggcggtccgggagtggcgacccggctcccccatggcgcgcgccgtcggggcccctggccaggctccgagcggggttggcggggaggggaggcgggagcgagggcgggcggtgggaggtgggggcgggaaggtccgaaggcggcggcctgaggctgcaccgggcacgggtcggccgcaatccagcctgggcggagccggagttgcgagccgctgcctagaggccgaggagctcacagctatgggctggaggccccggagagctcgggggaccccgttgctgctgctgctactactgctgctgctctggccagtgccaggcgccggggtgcttcaaggacatatccctgggcagccagtcaccccgcactgggtcctggatggacaaccctggcgcaccgtcagcctggaggagccggtctcgaagccagacatggggctggtggccctggaggctgaaggccaggagctcctgcttgagctggagaagaaccacaggctgctggccccaggatacatagaaacccactacggcccagatgggcagccagtggtgctggcccccaaccacacggatcattgccactaccaagggcgagtaaggggcttccccgactcctgggtagtcctctgcacctgctctgggatgagtggcctgatcaccctcagcaggaatgccagctattatctgcgtccctggccaccccggggctccaaggacttctcaacccacgagatctttcggatggagcagctgctcacctggaaaggaacctgtggccacagggatcctgggaacaaagcgggcatgaccagccttcctggtggtccccagagcaggggcaggcgagaagcgcgcaggacccggaagtacctggaactgtacattgtggcagaccacaccctgttcttgactcggcaccgaaacttgaaccacaccaaacagcgtctcctggaagtcgccaactacgtggaccagcttctcaggactctggacattcaggtggcgctgaccggcctggaggtgtggaccgagcgggaccgcagccgcgtcacgcaggacgccaacgccacgctctgggccttcctgcagtggcgccgggggctgtgggcgcagcggccccacgactccgcgcagctgctcacgggccgcgccttccagggcgccacagtgggcctggcgcccgtcgagggcatgtgccgcgccgagagctcgggaggcgtgagcacggaccactcggagctccccatcggcgccgcagccaccatggcccatgagatcggccacagcctcggcctcagccacgaccccgacggctgctgcgtggaggctgcggccgagtccggaggctgcgtcatggctgcggccaccgggcacccgtttccgcgcgtgttcagcgcctgcagccgccgccagctgcgcgccttcttccgcaaggggggcggcgcttgcctctccaatgccccggaccccggactcccggtgccgccggcgctctgcgggaacggcttcgtggaagcgggcgaggagtgtgactgcggccctggccaggagtgccgcgacctctgctgctttgctcacaactgctcgctgcgcccgggggcccagtgcgcccacggggactgctgcgtgcgctgcctgctgaagccggctggagcgctgtgccgccaggccatgggtgactgtgacctccctgagttttgcacgggcacctcctcccactgtcccccagacgtttacctactggacggctcaccctgtgccaggggcagtggctactgctgggatggcgcatgtcccacgctggagcagcagtgccagcagctctgggggcctggctcccacccagctcccgaggcctgtttccaggtggtgaactctgcgggagatgctcatggaaactgcggccaggacagcgagggccacttcctgccctgtgcagggagggatgccctgtgtgggaagctgcagtgccagggtggaaagcccagcctgctcgcaccgcacatggtgccagtggactctaccgttcacctagatggccaggaagtgacttgtcggggagccttggcactccccagtgcccagctggacctgcttggcctgggcctggtagagccaggcacccagtgtggacctagaatggtgtgccagagcaggcgctgcaggaagaatgccttccaggagcttcagcgctgcctgactgcctgccacagccacggggtttgcaatagcaaccataactgccactgtgctccaggctgggctccacccttctgtgacaagccaggctttggtggcagcatggacagtggccctgtgcaggctgaaaaccatgacaccttcctgctggccatgctcctcagcgtcctgctgcctctgctcccaggggccggcctggcctggtgttgctaccgactcccaggagcccatctgcagcgatgcagctggggctgcagaagggaccctgcgtgcagtggccccaaagatggcccacacagggaccaccccctgggcggcgttcaccccatggagttgggccccacagccactggacagccctggcccctggaccctgagaactctcatgagcccagcagccaccctgagaagcctctgccagcagtctcgcctgacccccaagcagatcaagtccagatgccaagatcctgcctctggtgagaggtagctcctaaaatgaacagatttaaagacaggtggccactgacagccactccaggaacttgaactgcaggggcagagccagtgaatcaccggacctccagcacctgcaggcagcttggaagtttcttccccgagtggagcttcgacccacccactccaggaacccagagccacattagaagttcctgagggctggagaacactgctgggcacactctccagctcaataaaccatcagtcccagaagcaaaggtcacacagcccctgacctccctcaccagtggaggctgggtagtgctggccatcccaaaagggctctgtcctgggagtctggtgtgtctcctacatgcaatttccacggacccagctctgtggagggcatgactgctggccagaagctagtggtcctggggccctatggttcgactgagtccacactcccctggagcctggctggcctctgcaaacaaacataattttggggaccttccttcctgtttcttcccaccctgtcttctcccctaggtggttcctgagcccccacccccaatcccagtgctacacctgaggttctggagctcagaatctgacagcctctcccccattctgtgtgtgtcggggggacagagggaaccatttaagaaaagataccaaagtagaagtcaaaagaaagacatgttggctataggcgtggtggctcatgcctataatcccagcactttgggaagccggggtaggaggatcaccagaggccagcaggtccacaccagcctgggcaacacagcaagacaccgcatctacagaaaaattttaaaattagctgggcgtggtggtgtgtacctgtaggcctagctgctcaggaggctgaagcaggaggatcacttgagcctgagttcaacactgcagtgagctatggtggcaccactgcactccagcctgggtgacagagcaagaccctgtctctaaaataaattttaaaaagacatatta

SEQ ID NO: 104680 - DNA, 3674 bp, Homo sapiens
  Payload ID: 552
  Gene Symbol: ADAM33
  Gene Name: ADAM metallopeptidase domain 33
  ENST ID: ENST00000379861
  CDS Start-End: 243-2681
gggcggcggtccgggagtggcgacccggctcccccatggcgcgcgccgtcggggcccctggccaggctccgagcggggttggcggggaggggaggcgggagcgagggcgggcggtgggaggtgggggcgggaaggtccgaaggcggcggcctgaggctgcaccgggcacgggtcggccgcaatccagcctgggcggagccggagttgcgagccgctgcctagaggccgaggagctcacagctatgggctggaggccccggagagctcgggggaccccgttgctgctgctgctactactgctgctgctctggccagtgccaggcgccggggtgcttcaaggacatatccctgggcagccagtcaccccgcactgggtcctggatggacaaccctggcgcaccgtcagcctggaggagccggtctcgaagccagacatggggctggtggccctggaggctgaaggccaggagctcctgcttgagctggagaagaaccacaggctgctggccccaggatacatagaaacccactacggcccagatgggcagccagtggtgctggcccccaaccacacggatcattgccactaccaagggcgagtaaggggcttccccgactcctgggtagtcctctgcacctgctctgggatgagtggcctgatcaccctcagcaggaatgccagctattatctgcgtccctggccaccccggggctccaaggacttctcaacccacgagatctttcggatggagcagctgctcacctggaaaggaacctgtggccacagggatcctgggaacaaagcgggcatgaccagccttcctggtggtccccagagcaggggcaggcgagaagcgcgcaggacccggaagtacctggaactgtacattgtggcagaccacaccctgttcttgactcggcaccgaaacttgaaccacaccaaacagcgtctcctggaagtcgccaactacgtggaccagcttctcaggactctggacattcaggtggcgctgaccggcctggaggtgtggaccgagcgggaccgcagccgcgtcacgcaggacgccaacgccacgctctgggccttcctgcagtggcgccgggggctgtgggcgcagcggccccacgactccgcgcagctgctcacgggccgcgccttccagggcgccacagtgggcctggcgcccgtcgagggcatgtgccgcgccgagagctcgggaggcgtgagcacggaccactcggagctccccatcggcgccgcagccaccatggcccatgagatcggccacagcctcggcctcagccacgaccccgacggctgctgcgtggaggctgcggccgagtccggaggctgcgtcatggctgcggccaccgggcacccgtttccgcgcgtgttcagcgcctgcagccgccgccagctgcgcgccttcttccgcaaggggggcggcgcttgcctctccaatgccccggaccccggactcccggtgccgccggcgctctgcgggaacggcttcgtggaagcgggcgaggagtgtgactgcggccctggccaggagtgccgcgacctctgctgctttgctcacaactgctcgctgcgcccgggggcccagtgcgcccacggggactgctgcgtgcgctgcctgctgaagccggctggagcgctgtgccgccaggccatgggtgactgtgacctccctgagttttgcacgggcacctcctcccactgtcccccagacgtttacctactggacggctcaccctgtgccaggggcagtggctactgctgggatggcgcatgtcccacgctggagcagcagtgccagcagctctgggggcctggctcccacccagctcccgaggcctgtttccaggtggtgaactctgcgggagatgctcatggaaactgcggccaggacagcgagggccacttcctgccctgtgcagggagggatgccctgtgtgggaagctgcagtgccagggtggaaagcccagcctgctcgcaccgcacatggtgccagtggactctaccgttcacctagatggccaggaagtgacttgtcggggagccttggcactccccagtgcccagctggacctgcttggcctgggcctggtagagccaggcacccagtgtggacctagaatggtgtgccagagcaggcgctgcaggaagaatgccttccaggagcttcagcgctgcctgactgcctgccacagccacggggtttgcaatagcaaccataactgccactgtgctccaggctgggctccacccttctgtgacaagccaggctttggtggcagcatggacagtggccctgtgcaggctgaaaaccatgacaccttcctgctggccatgctcctcagcgtcctgctgcctctgctcccaggggccggcctggcctggtgttgctaccgactcccaggagcccatctgcagcgatgcagctggggctgcagaagggaccctgcgtgcagtggccccaaagatggcccacacagggaccaccccctgggcggcgttcaccccatggagttgggccccacagccactggacagccctggcccctggaccctgagaactctcatgagcccagcagccaccctgagaagcctctgccagcagtctcgcctgacccccaagatcaagtccagatgccaagatcctgcctctggtgagaggtagctcctaaaatgaacagatttaaagacaggtggccactgacagccactccaggaacttgaactgcaggggcagagccagtgaatcaccggacctccagcacctgcaggcagcttggaagtttcttccccgagtggagcttcgacccacccactccaggaacccagagccacattagaagttcctgagggctggagaacactgctgggcacactctccagctcaataaaccatcagtcccagaagcaaaggtcacacagcccctgacctccctcaccagtggaggctgggtagtgctggccatcccaaaagggctctgtcctgggagtctggtgtgtctcctacatgcaatttccacggacccagctctgtggagggcatgactgctggccagaagctagtggtcctggggccctatggttcgactgagtccacactcccctggagcctggctggcctctgcaaacaaacataattttggggaccttccttcctgtttcttcccaccctgtcttctcccctaggtggttcctgagcccccacccccaatcccagtgctacacctgaggttctggagctcagaatctgacagcctctcccccattctgtgtgtgtcggggggacagagggaaccatttaagaaaagataccaaagtagaagtcaaaagaaagacatgttggctataggcgtggtggctcatgcctataatcccagcactttgggaagccggggtaggaggatcaccagaggccagcaggtccacaccagcctgggcaacacagcaagacaccgcatctacagaaaaattttaaaattagctgggcgtggtggtgtgtacctgtaggcctagctgctcaggaggctgaagcaggaggatcacttgagcctgagttcaacactgcagtgagctatggtggcaccactgcactccagcctgggtgacagagcaagaccctgtctctaaaataaattttaaaaagacatatta

SEQ ID NO: 104681 - DNA, 1971 bp, Homo sapiens
  Payload ID: 552
  Gene Symbol: ADAM33
  Gene Name: ADAM metallopeptidase domain 33
  ENST ID: ENST00000617732
  CDS Start-End: 48-464
gagccggagttgcgagccgctgcctagaggccgaggagctcacagctatgggctggaggccccggagagctcgggggaccccgttgctgctgctgctactactgctgctgctctggccagtgccaggcgccggggtgcttcaaggacatatccctgggcagccagtcaccccgcactgggtcctggatggacaaccctggcgcaccgtcagcctggaggagccggtctcgaagccagacatggggctggtggccctggaggctgaaggccaggagctcctgcttgagctggagaagaaccacaggctgctggccccaggatacatagaaacccactacggcccagatgggcagccagtggtgctggcccccaaccacacggtgagatgcttccatgggctctgggatgcaccgccagaggtacccccccaccattcctacccctactcctccttgcattcctaaggggcggttggagccagcccctaccacaccctccctcttgcccctcttgctccagccctggctgagatttggggctggccccttcctccctaggatcattgccactaccaagggcgagtaaggggcttccccgactcctgggtagtcctctgcacctgctctgggatgaggtgagctctgggagaggaggctgggcctgggatggggaaagagctccctcacacccgctcctacccctctgcaccctagtggcctgatcaccctcagcaggaatgccagctattatctgcgtccctggccaccccggggctccaaggacttctcaacccacgagatctttcggatggagcagctgctcacctggaaaggaacctgtggccacagggatcctgggaacaaagcgggcatgaccagccttcctggtggtccccagagcagggtcaggggcatcgatcggatgggagtgggaatgctgtatctatagccctccaaatcagaagagacgggaattcacaggcctcgagtcccagtatttttattgaagtctgaagaaacaagttccagaaaacatgttaaacttccttctgggagctgggattggtggtcagggctcaagcccagcagcttccacgagcttcagcgctgcctgactgcctgccacagccacggggtttgcaatagcaaccataactgccactgtgctccaggctgggctccacccttctgtgacaagccaggctttggtggcagcatggacagtggccctgtgcaggctgaaaaccatgacaccttcctgctggccatgctcctcagcgtcctgctgcctctgctcccaggggccggcctggcctggtgttgctaccgactcccaggagcccatctgcagcgatgcagctggggctgcagaagggaccctgcgtgcagtggccccaaagatggcccacacagggaccaccccctgggcggcgttcaccccatggagttgggccccacagccactggacagccctggcccctggaccctgagaactctcatgagcccagcagccaccctgagaagcctctgccagcagtctcgcctgacccccaagatcaagtccagatgccaagatcctgcctctggtgagaggtagctcctaaaatgaacagatttaaagacaggtggccactgacagccactccaggaacttgaactgcaggggcagagccagtgaatcaccggacctccagcacctgcaggcagcttggaagtttcttccccgagtggagcttcgacccacccactccaggaacccagagccacattagaagttcctgagggctggagaacactgctgggcacactctccagctcaataaaccatcagtcccagaagcaaaggtcacacagcccctgacctccctcaccagtggaggctgggtagtgctggccatcccaaaagggctctgtcctgggagtctggtgtgtctcctacatgcaatttccacggacccagctctgtggagg

SEQ ID NO: 104682 - DNA, 3195 bp, Homo sapiens
  Payload ID: 552
  Gene Symbol: ADAM33
  Gene Name: ADAM metallopeptidase domain 33
  ENST ID: ENST00000619289
  CDS Start-End: 128-2206
gggaggtgggggcgggaaggtccgaaggcggcggcctgaggctgcaccgggcacgggtcggccgcaatccagcctgggcggagccggagttgcgagccgctgcctagaggccgaggagctcacagctatgggctggaggccccggagagctcgggggaccccgttgctgctgctgctactactgctgctgctctggccagtgccaggcgccggggtgcttcaaggacatatccctgggcagccagtcaccccgcactgggtcctggatggacaaccctggcgcaccgtcagcctggaggagccggtctcgaagccagacatggggctggtggccctggaggctgaaggccaggagctcctgcttgagctggagaagaaccacaggctgctggccccaggatacatagaaacccactacggcccagatgggcagccagtggtgctggcccccaaccacacggatcattgccactaccaagggcgagtaaggggcttccccgactcctgggtagtcctctgcacctgctctgggatgagtggcctgatcaccctcagcaggaatgccagctattatctgcgtccctggccaccccggggctccaaggacttctcaacccacgagatctttcggatggagcagctgctcacctggaaaggaacctgtggccacagggatcctgggaacaaagcgggcatgaccagccttcctggtggtccccagagcaggggcaggcgagaagcgcgcaggacccggaagtacctggaactgtacattgtggcagaccacaccctgttcttgactcggcaccgaaacttgaaccacaccaaacagcgtctcctggaagtcgccaactacgtggaccagcttctcaggactctggacattcaggtggcgctgaccggcctggaggtgtggaccgagcgggaccgcagccgccgccagctgcgcgccttcttccgcaaggggggcggcgcttgcctctccaatgccccggaccccggactcccggtgccgccggcgctctgcgggaacggcttcgtggaagcgggcgaggagtgtgactgcggccctggccaggagtgccgcgacctctgctgctttgctcacaactgctcgctgcgcccgggggcccagtgcgcccacggggactgctgcgtgcgctgcctgctgaagccggctggagcgctgtgccgccaggccatgggtgactgtgacctccctgagttttgcacgggcacctcctcccactgtcccccagacgtttacctactggacggctcaccctgtgccaggggcagtggctactgctgggatggcgcatgtcccacgctggagcagcagtgccagcagctctgggggcctggctcccacccagctcccgaggcctgtttccaggtggtgaactctgcgggagatgctcatggaaactgcggccaggacagcgagggccacttcctgccctgtgcagggagggatgccctgtgtgggaagctgcagtgccagggtggaaagcccagcctgctcgcaccgcacatggtgccagtggactctaccgttcacctagatggccaggaagtgacttgtcggggagccttggcactccccagtgcccagctggacctgcttggcctgggcctggtagagccaggcacccagtgtggacctagaatggtgtgccagagcaggcgctgcaggaagaatgccttccaggagcttcagcgctgcctgactgcctgccacagccacggggtttgcaatagcaaccataactgccactgtgctccaggctgggctccacccttctgtgacaagccaggctttggtggcagcatggacagtggccctgtgcaggctgaaaaccatgacaccttcctgctggccatgctcctcagcgtcctgctgcctctgctcccaggggccggcctggcctggtgttgctaccgactcccaggagcccatctgcagcgatgcagctggggctgcagaagggaccctgcgtgcagtggccccaaagatggcccacacagggaccaccccctgggcggcgttcaccccatggagttgggccccacagccactggacagccctggcccctggaccctgagaactctcatgagcccagcagccaccctgagaagcctctgccagcagtctcgcctgacccccaagatcaagtccagatgccaagatcctgcctctggtgagaggtagctcctaaaatgaacagatttaaagacaggtggccactgacagccactccaggaacttgaactgcaggggcagagccagtgaatcaccggacctccagcacctgcaggcagcttggaagtttcttccccgagtggagcttcgacccacccactccaggaacccagagccacattagaagttcctgagggctggagaacactgctgggcacactctccagctcaataaaccatcagtcccagaagcaaaggtcacacagcccctgacctccctcaccagtggaggctgggtagtgctggccatcccaaaagggctctgtcctgggagtctggtgtgtctcctacatgcaatttccacggacccagctctgtggagggcatgactgctggccagaagctagtggtcctggggccctatggttcgactgagtccacactcccctggagcctggctggcctctgcaaacaaacataattttggggaccttccttcctgtttcttcccaccctgtcttctcccctaggtggttcctgagcccccacccccaatcccagtgctacacctgaggttctggagctcagaatctgacagcctctcccccattctgtgtgtgtcggggggacagagggaaccatttaagaaaagataccaaagtagaagtcaaaagaaagacatgttggctataggcgtggtggctcatgcctataatcccagcactttgggaagccggggtaggaggatcaccagaggccagcaggtccacaccagcctgggcaacacagcaagacaccgcatctacagaaaaattttaaaattagctgggcgtggtggtgtgtacctgtaggcctagctgctcaggaggctgaagcaggaggatcacttgagcctgagttcaacactgcagtgagctatggtggcaccactgcactccagcctgggtgacagagcaagaccctgtctctaaaataaattttaaaaagacat

SEQ ID NO: 104683 - DNA, 3367 bp, Homo sapiens
  Payload ID: 553
  Gene Symbol: ADAM7
  Gene Name: ADAM metallopeptidase domain 7
  Uniprot ID: Q9H2U9
  ENST ID: ENST00000175238
  CDS Start-End: 84-2348
atccctgcagtggaagtgaggaggaagaaaggtgaactccttttctcaagcacttctgctctcctctaccagaatcactcagaatgcttcccgggtgtatattcttgatgattttactcattcctcaggttaaagaaaagttcatccttggagtagagggtcaacaactggttcgtcctaaaaagcttcctctgatacagaagcgagatactggacacacccatgatgatgacatactgaaaacgtatgaagaagaattgttgtatgaaataaaactaaatagaaaaaccttagtccttcatcttctaagatccagggagttcctaggctcaaattacagtgaaacattctactccatgaaaggagaagcgttcaccaggcatcctcagatcatggatcattgtttttaccaaggatccatagtacacgaatatgattcagctgccagtatcagtacgtgtaatggtctaaggggattcttcagaataaacgaccaaagatacctcattgaaccagtgaaatactcagatgagggagaacatttggtgttcaaatataacctgagggtgccgtatggtgccaattattcctgtacagagcttaattttaccagaaaaactgttccaggggataatgaatctgaagaagactccaaaataaaaggcatccatgatgaaaagtatgttgaattgttcattgttgctgatgatactgtgtatcgcagaaatggtcatcctcacaataaactaaggaaccgaatttggggaatggtcaattttgtcaacatgatttataaaaccttaaacatccatgtgacgttggttggcattgaaatatggacacatgaagataaaatagaactatattcaaatatagaaactaccttattgcgtttttcattttggcaagaaaagatccttaaaacacggaaggattttgatcatgttgtattactcagtgggaagtggctctactcacatgtgcaaggaatttcttatccagggggtatgtgcctgccctattattccaccagtatcattaaggatcttttacctgacacaaacataattgcaaacagaatggcacatcaactggggcataaccttgggatgcagcatgacgagttcccatgcacctgtccttcaggaaaatgcgtgatggacagtgatggaagcattcctgcactgaaattcagtaaatgcagccaaaaccaataccaccagtacttgaaggattataagccaacatgcatgctcaacattccatttccttacaattttcatgatttccaattttgtggaaacaagaagttggatgagggtgaagagtgtgactgtggccctgctcaggagtgtactaatccttgctgtgatgcacacacatgtgtactgaagccaggatttacttgtgcagaaggagaatgctgtgaatcttgtcagataaaaaaagcagggtccatatgcagaccggcgaaagatgaatgtgattttcctgagatgtgcactggccactcgcctgcctgtcctaaggaccagttcagggtcaatggatttccttgcaagaactcagaaggctactgtttcatggggaaatgtccaactcgtgaggatcagtgctctgaactatttgatgatgaggcaatagagagtcatgatatctgctacaagatgaatacaaaaggaaataaatttggatactgcaaaaacaaggaaaacagatttcttccctgtgaggagaaagatgtcagatgtggaaagatctactgcactggaggggagctttcctctctccttggagaagacaagacttatcaccttaaggatccccagaagaatgctactgtcaaatgcaaaactatttttttataccatgattctacagacattggcctggtggcgtcaggaacaaaatgtggagagggaatggtgtgcaacaatggtgaatgtctaaacatggaaaaggtctatatctcaaccaattgcccctctcagtgcaatgaaaatcctgtggatggccacggactccagtgccactgtgaggaaggacaggcacctgtagcctgtgaagaaaccttacatgttaccaatatcaccatcttggttgttgtgcttgtcctggttattgtcggtatcggagttcttatactattagttcgttaccgaaaatgtatcaagttgaagcaagttcagagcccacctacagaaaccctgggagtggagaacaaaggatactttggtgatgagcagcagataaggactgagccaatcctgccagaaattcatttcctaaataaacctgcaagtaaagattcaagaggaatcgcagatcccaatcaaagtgccaagtgagcttgaagttggatatccaaaatggccgtgcaagcttaggctggggattctggatgcaacgtctttacaaccttacctagatatctgctactcacatttttggtagtgtttcaaacgttctttatccagacagacaatgtttaagagaaacaacttatttctgttaatatttaccggtagaattcacaccctctatcataaacatatgctgcagaaaaaaaatgtcttgtggtctttcaaatgctctttagcacaatataaaaattcgtaaccttgctgtagtattttcctacaaaatgttactctgctttcttttaagaatccaaactttaaggatgataacttacagtctaagaagaaaacattgcatataaaaagttacttttttggaaacataaaagtacgttttaaaacttgaacatgacatcattagcactaattctggtttaaatgaaagtcctgcagaaatgccaaagaaggcagggcagagcggcacggattctaggtaattaaaagtgaaagaggcagaagaatagtggacagaactgcaggatagtccttaaaataatggtggtgggaaaggaaaacacagaatgctcctggcaattctaaattcctaggtttgcctttctagaattccttaagaagctgacagagaaatcagagggttacaagaatttcagaaaatttactccaagtgagaggacatactcacaactcctatgaagggtttctaaggtctttgtcctgtgcaatttgacaatgtgccatttctgtgctgtctctgccctctccctatccgtttgttatgggatgggggattaccctgggaatgatttcagctgcttcttacacagatgcctctcaaggtgttcttttgtgtcctctattttcttcttgtgaactgttaaagctacatgcattattttttttccatttactgaaataaagttttcaagttctaaataaaaatattctgactcgatgaaataaataaaggctacaaaagaaggaagaaa

SEQ ID NO: 104684 - DNA, 3358 bp, Homo sapiens
  Payload ID: 553
  Gene Symbol: ADAM7
  Gene Name: ADAM metallopeptidase domain 7
  ENST ID: ENST00000380789
  CDS Start-End: 26-2356
ctctcctctaccagaatcactcagaatgcttcccgggtgtatattcttgatgattttactcattcctcaggttaaagaaaagttcatccttggagtagagggtcaacaactggttcgtcctaaaaagcttcctctgatacagaagcgagatactggacacacccatgatgatgacatactgaaaacgtatgaagaagaattgttgtatgaaataaaactaaatagaaaaaccttagtccttcatcttctaagatccagggagttcctaggctcaaattacagtgaaacattctactccatgaaaggagaagcgttcaccaggcatcctcagatcatggatcattgtttttaccaaggatccatagtacacgaatatgattcagctgccagtatcagtacgtgtaatggtctaaggggattcttcagaataaacgaccaaagatacctcattgaaccagtgaaatactcagatgagggagaacatttggtgttcaaatataacctgagggtgccgtatggtgccaattattcctgtacagagcttaattttaccagaaaaactgttccaggggataatgaatctgaagaagactccaaaataaaaggcatccatgatgaaaagtatgttgaattgttcattgttgctgatgatactgtgtatcgcagaaatggtcatcctcacaataaactaaggaaccgaatttggggaatggtcaattttgtcaacatgatttataaaaccttaaacatccatgtgacgttggttggcattgaaatatggacacatgaagataaaatagaactatattcaaatatagaaactaccttattgcgtttttcattttggcaagaaaagatccttaaaacacggaaggattttgatcatgttgtattactcagtgggaagtggctctactcacatgtgcaaggaatttcttatccagggggtatgtgcctgccctattattccaccagtatcattaaggatcttttacctgacacaaacataattgcaaacagaatggcacatcaactggggcataaccttgggatgcagcatgacgagttcccatgcacctgtccttcaggaaaatgcgtgatggacagtgatggaagcattcctgcactgaaattcagtaaatgcagccaaaaccaataccaccagtacttgaaggattataagccaacatgcatgctcaacattccatttccttacaattttcatgatttccaattttgtggaaacaagaagttggatgagggtgaagagtgtgactgtggccctgctcaggagtgtactaatccttgctgtgatgcacacacatgtgtactgaagccaggatttacttgtgcagaaggagaatgctgtgaatcttgtcagataaaaaaagcagggtccatatgcagaccggcgaaagatgaatgtgattttcctgagatgtgcactggccactcgcctgcctgtcctaaggaccagttcagggtcaatggatttccttgcaagaactcagaaggctactgtttcatggggaaatgtccaactcgtgaggatcagtgctctgaactatttgatgatgaggcaatagagagtcatgatatctgctacaagatgaatacaaaaggaaataaatttggatactgcaaaaacaaggaaaacagatttcttccctgtgaggagaaagatgtcagatgtggaaagatctactgcactggaggggagctttcctctctccttggagaagacaagacttatcaccttaaggatccccagaagaatgctactgtcaaatgcaaaactatttttttataccatgattctacagacattggcctggtggcgtcaggaacaaaatgtggagagggaatggtgtgcaacaatggtgaatgtctaaacatggaaaaggtctatatctcaaccaattgcccctctcagtgcaatgaaaatcctgtggatggccacggactccagtgccactgtgaggaaggacaggcacctgtagcctgtgaagaaaccttacatgttaccaatatcaccatcttggttgttgtgcttgtcctggttattgtcggtatcggagttcttatactattagttcgttaccgaaaatgtatcaagttgaagcaagttcagagcccacctacagaaaccctgggagtggagaacaaaggatactttggtgatgagcagcagataaggactgagccaatcctgccagaaattcatttcctaaatcagagaactccagaatccttggaaagcctgcccactagtttttcaagtccccactacatcacactgaaacctgcaagtaaagattcaagaggaatcgcagatcccaatcaaagtgccaagtgagcttgaagttggatatccaaaatggccgtgcaagcttaggctggggattctggatgcaacgtctttacaaccttacctagatatctgctactcacatttttggtagtgtttcaaacgttctttatccagacagacaatgtttaagagaaacaacttatttctgttaatatttaccggtagaattcacaccctctatcataaacatatgctgcagaaaaaaaatgtcttgtggtctttcaaatgctctttagcacaatataaaaattcgtaaccttgctgtagtattttcctacaaaatgttactctgctttcttttaagaatccaaactttaaggatgataacttacagtctaagaagaaaacattgcatataaaaagttacttttttggaaacataaaagtacgttttaaaacttgaacatgacatcattagcactaattctggtttaaatgaaagtcctgcagaaatgccaaagaaggcagggcagagcggcacggattctaggtaattaaaagtgaaagaggcagaagaatagtggacagaactgcaggatagtccttaaaataatggtggtgggaaaggaaaacacagaatgctcctggcaattctaaattcctaggtttgcctttctagaattccttaagaagctgacagagaaatcagagggttacaagaatttcagaaaatttactccaagtgagaggacatactcacaactcctatgaagggtttctaaggtctttgtcctgtgcaatttgacaatgtgccatttctgtgctgtctctgccctctccctatccgtttgttatgggatgggggattaccctgggaatgatttcagctgcttcttacacagatgcctctcaaggtgttcttttgtgtcctctattttcttcttgtgaactgttaaagctacatgcattattttttttccatttactgaaataaagttttcaagttctaaataaaaatattctgactcgatgaaataaataaaggct

SEQ ID NO: 104685 - DNA, 1417 bp, Homo sapiens
  Payload ID: 553
  Gene Symbol: ADAM7
  Gene Name: ADAM metallopeptidase domain 7
  Uniprot ID: Q9H2U9
  ENST ID: ENST00000441335
  CDS Start-End: 180-812
ggttttagcctcaagcacctagcaagttgtgtaactccctcaaggaacacttccttgttgtggatcaaaactgcccacctatctgtgaggtgcttcatccctgcagtggaagtgaggaggaagaaaggtgaactccttttctcaagcacttctgctctcctctaccagaatcactcagaatgcttcccgggtgtatattcttgatgattttactcattcctcaggttaaagaaaagttcatccttggagtagagggtcaacaactggttcgtcctaaaaagcttcctctgatacagaagcgagatactggacacacccatgatgatgacatactgaaaacgtatgaagaagaattgttgtatgaaataaaactaaatagaaaaaccttagtccttcatcttctaagatccagggagttcctaggctcaaattacagtgaaacattctactccatgaaaggagaagcgttcaccaggcatcctcagatcatggatcattgtttttaccaaggatccatagtacacgaatatgattcagctgccagtatcagtacgtgtaatggtctaaggggattcttcagaataaacgaccaaagatacctcattgaaccagtgaaatactcagatgagggagaacatttggtgttcaaatataacctgagggtgccgtatggtgccaattattcctgtacagagcttaattttaccagaaaaactgttccaggggataatgaatctgaagaagactccaaaataaaagtgagtactttattattatctttaccccaaatgaaacaccttttattttcttgatgatgtctagggataaagtatgagtccagttactgaaatatatgtgctactttcagtctggcacttcatctgatatttgaaattggaaaattttttcttgtctatgtaaaaagtgtttatttcatagagtttgtttaatcagtttcaagaaaggatgattctacaattctatgtatagattgataacattggggctatgagtagttggaaatcatgaaattttcaatgtcctaaaacctaatctagagatagtgtctttccttttcttccctgccatttttttttgcagagttattgatgacaagctatgttctcccctttttatcattcaaatgttttaatggttaaggatgattaaggataaaacaagttcagtttttggtgggatggttgtataaaagtagtccttggagctttaggcttttctatacaactaatccatatccccttaaattcccagtggatgttagtctgtaagctacttggttgtttttcttcttcgtatgtccatgatttgtatagtgtctgacacatactgtatgcctaatggatgtttcctgattgaataaatcaacaaataaatgattacttagtccatagaaaaa

SEQ ID NO: 104686 - DNA, 1870 bp, Homo sapiens
  Payload ID: 553
  Gene Symbol: ADAM7
  Gene Name: ADAM metallopeptidase domain 7
  ENST ID: ENST00000520720
  CDS Start-End: 131-1681
ggtttgccctcgtagctatttcctggagggaaggggtagctacagtttcctgtccctcttcagcacttctccagctccatatcgcagaaatggtcatcctcacaataaactaaggaaccgaatttggggaatggtcaattttgtcaacatgatttataaaaccttaaacatccatgtgacgttggttggcattgaaatatggacacatgaagataaaatagaactatattcaaatatagaaactaccttattgcgtttttcattttggcaagaaaagatccttaaaacacggaaggattttgatcatgttgtattactcagtgggaagtggctctactcacatgtgcaaggaatttcttatccagggggtatgtgcctgccctattattccaccagtatcattaaggatcttttacctgacacaaacataattgcaaacagaatggcacatcaactggggcataaccttgggatgcagcatgacgagttcccatgcacctgtccttcaggaaaatgcgtgatggacagtgatggaagcattcctgcactgaaattcagtaaatgcagccaaaaccaataccaccagtacttgaaggattataagccaacatgcatgctcaacattccatttccttacaattttcatgatttccaattttgtggaaacaagaagttggatgagggtgaagagtgtgactgtggccctgctcaggagtgtactaatccttgctgtgatgcacacacatgtgtactgaagccaggatttacttgtgcagaaggagaatgctgtgaatcttgtcagataaaaaaagcagggtccatatgcagaccggcgaaagatgaatgtgattttcctgagatgtgcactggccactcgcctgcctgtcctaaggaccagttcagggtcaatggatttccttgcaagaactcagaaggctactgtttcatggggaaatgtccaactcgtgaggatcagtgctctgaactatttgatgatgaggcaatagagagtcatgatatctgctacaagatgaatacaaaaggaaataaatttggatactgcaaaaacaaggaaaacagatttcttccctgtgaggagaaagatgtcagatgtggaaagatctactgcactggaggggagctttcctctctccttggagaagacaagacttatcaccttaaggatccccagaagaatgctactgtcaaatgcaaaactatttttttataccatgattctacagacattggcctggtggcgtcaggaacaaaatgtggagagggaatggtgtgcaacaatggtgaatgtctaaacatggaaaaggtctatatctcaaccaattgcccctctcagtgcaatgaaaatcctgtggatggccacggactccagtgccactgtgaggaaggacaggcacctgtagcctgtgaagaaaccttacatgttaccaatatcaccatcttggttgttgtgcttgtcctggttattgtcggtatcggagttcttatactattagttcgttaccgaaaatgtatcaagttgaagcaagttcagagcccacctacagaaaccctgggagtggagaacaaaggatactttggtgatgagcagcagataaggactgagccaatcctgccagaaattcatttcctaaatcacctcttatatggaaggcatcaatgagaaccaaaataaaaactacaatccctcactcaagaagtttaaaatgaagtgaatggacaattgtgagaagaaatgctattgatcttccaaagttgtatattcgatagtgaatattgtatgtttaaagtaaccttgcaaaatgtgtcatgtcaaatgtaataaattgtatgttctgacgaaggaatggaa

SEQ ID NO: 104687 - DNA, 818 bp, Homo sapiens
  Payload ID: 554
  Gene Symbol: ADAM8
  Gene Name: ADAM metallopeptidase domain 8
  ENST ID: ENST00000560135
  CDS Start-End: 47-376
gtgtcccgcggggctgtcacctccgcctctgctccccgacccggccatgcgcggcctcgggctctggctgctgggcgcgatgatgctgcctgggcctgcacccagagagggtgagctacgtccttggggccacagggcacaacttcaccctccacctgcggaagaacagggacctgctgggctccggctacacagagacctatacggctgccaatggctccgaggtgacggagcagcctcgcgggcaggaccactgcttctaccagggccacgtagaggggtacccggactcagccgccagcctcagcacctgtgccggcctcaggggtttcttccaggtggggtcagacctgcacctgatcgagcccctggatgaaggtggcgagggcggacggcacgccgtgtaccaggctgagcacctgctgcagacggccgggacctgcggggtcagcgacgacagcctgggcagcctcctgggaccccggacggcagccgtcttcaggcctcggcccggggactctctgccatcccgagagacccgctacgtggagctgtatgtggtcgtggacaatgcagagttccagatgctggggagcgaagcagccgtgcgtcatcgggtgctggaggtggtgaatcacgtggacaagctatatcagaaactcaacttccgtgtggtcctggtgggcctggagatttggaatagtcaggacaggttccacgtcagccccgaccccagtgtcacactggagaacctcctgacctggcaggcacggcaacggacacggcggcacctgcatgacaacgtacagctcatcacg

SEQ ID NO: 104688 - DNA, 2441 bp, Homo sapiens
  Payload ID: 554
  Gene Symbol: ADAM8
  Gene Name: ADAM metallopeptidase domain 8
  Uniprot ID: P78325
  ENST ID: ENST00000485491
  CDS Start-End: 52-2253
agaccgtgtcccgcggggctgtcacctccgcctctgctccccgacccggccatgcgcggcctcgggctctggctgctgggcgcgatgatgctgcctgggcctgcacccagagagggtgagctacgtccttggggccacagggcacaacttcaccctccacctgcggaagaacagggacctgctgggctccggctacacagagacctatacggctgccaatggctccgaggtgacggagcagcctcgcgggcaggaccactgcttctaccagggccacgtagaggggtacccggactcagccgccagcctcagcacctgtgccggcctcaggtggggtcagacctgcacctgatcgagcccctggatgaaggtggcgagggcggacggcacgccgtgtaccaggctgagcacctgctgcagacggccgggacctgcggggtcagcgacgacagcctgggcagcctcctgggaccccggacggcagccgtcttcaggcctcggcccggggactctctgccatcccgagagacccgctacgtggagctgtatgtggtcgtggacaatgcagagttccagatgctggggagcgaagcagccgtgcgtcatcgggtgctggaggtggtgaatcacgtggacaagctatatcagaaactcaacttccgtgtggtcctggtgggcctggagatttggaatagtcaggacaggttccacgtcagccccgaccccagtgtcacactggagaacctcctgacctggcaggcacggcaacggacacggcggcacctgcatgacaacgtacagctcatcacgggtgtcgacttcaccgggactaccgtggggtttgccagggtgtccgccatgtgctcccacagctcaggggctgtgaaccaggaccacagcaagaaccccgtgggcgtggcctgtaccatggcccatgagatgggccacaacctgggcatggaccatgatgagaacgtccagggctgccgctgccaggaacgcttcgaggccggccgctgcatcatggcgggcagcattggctccagtttccccaggatgttcagtgactgcagccaggcctacctggagagctttttggagcggccgcagtcggtgtgcctcgccaacgcccctgacctcagccacctggtgggcggccccgtgtgtgggaacctgtttgtggagcgtggggagcagtgcgactgcggcccccccgaggactgccggaaccgctgctgcaactctaccacctgccagctggctgagggggcccagtgtgcgcacggtacctgctgccaggagtgcaaggtgaagccggctggtgagctgtgccgtcccaagaaggacatgtgtgacctcgaggagttctgtgacggccggcaccctgagtgcccggaagacgccttccaggagaacggcacgccctgctccgggggctactgctacaacggggcctgtcccacactggcccagcagtgccaggccttctgggggccaggtgggcaggctgccgaggagtcctgcttctcctatgacatcctaccaggctgcaaggccagccggtacagggctgacatgtgtggcgttctgcagtgcaagggtgggcagcagcccctggggcgtgccatctgcatcgtggatgtgtgccacgcgctcaccacagaggatggcactgcgtatgaaccagtgcccgagggcacccggtgtggaccagagaaggtgtgcaaccacaagcaggagtgccactgccacgcgggctgggccccgccccactgcgcgaagctgctgactgaggtgcacgcagcgtccgggagcctccccgtcttcgtggtggtggttctggtgctcctggcagttgtgctggtcaccctggcaggcatcatcgtctaccgcaaagcccggagccgcatcctgagcaggaacgtggctcccaagaccacaatggggcgctccaaccccctgttccaccaggctgccagccgcgtgccggccaagggcggggctccagccccatccaggggcccccaagagctggtccccaccacccacccgggccagcccgcccgacacccggcctcctcggtggctctgaagaggccgccccctgctcctccggtcactgtgtccagcccacccttcccagttcctgtctacacccggcaggcaccaaagcagggtgctgttggcccaaaggttgccctgaagccccccatccagaggaagcaaggagccggagctcccacagcaccctaggggggcacctgcgcctgtgtggaaatttggagaagttgcggcagagaagccatgcgttccagcattccacggtccagctagtgccgctcagccctagaccctgactttgcaggctcagctgctgttctaacctcaggaatgcatctacctgagaggctcctgctgtccacgccctcagccaattcctt

SEQ ID NO: 104689 - DNA, 3279 bp, Homo sapiens
  Payload ID: 554
  Gene Symbol: ADAM8
  Gene Name: ADAM metallopeptidase domain 8
  Uniprot ID: P78325
  ENST ID: ENST00000445355
  CDS Start-End: 52-2526
agaccgtgtcccgcggggctgtcacctccgcctctgctccccgacccggccatgcgcggcctcgggctctggctgctgggcgcgatgatgctgcctgcgattgcccccagccggccctgggccctcatggagcagtatgaggtcgtgttgccgtggcgtctgccaggcccccgagtccgccgagctctgccctcccacttgggcctgcacccagagagggtgagctacgtccttggggccacagggcacaacttcaccctccacctgcggaagaacagggacctgctgggctccggctacacagagacctatacggctgccaatggctccgaggtgacggagcagcctcgcgggcaggaccactgcttctaccagggccacgtagaggggtacccggactcagccgccagcctcagcacctgtgccggcctcaggggtttcttccaggtggggtcagacctgcacctgatcgagcccctggatgaaggtggcgagggcggacggcacgccgtgtaccaggctgagcacctgctgcagacggccgggacctgcggggtcagcgacgacagcctgggcagcctcctgggaccccggacggcagccgtcttcaggcctcggcccggggactctctgccatcccgagagacccgctacgtggagctgtatgtggtcgtggacaatgcagagttccagatgctggggagcgaagcagccgtgcgtcatcgggtgctggaggtggtgaatcacgtggacaagctatatcagaaactcaacttccgtgtggtcctggtgggcctggagatttggaatagtcaggacaggttccacgtcagccccgaccccagtgtcacactggagaacctcctgacctggcaggcacggcaacggacacggcggcacctgcatgacaacgtacagctcatcacgggtgtcgacttcaccgggactaccgtggggtttgccagggtgtccgccatgtgctcccacagctcaggggctgtgaaccaggaccacagcaagaaccccgtgggcgtggcctgtaccatggcccatgagatgggccacaacctgggcatggaccatgatgagaacgtccagggctgccgctgccaggaacgcttcgaggccggccgctgcatcatggcgggcagcattggctccagtttccccaggatgttcagtgactgcagccaggcctacctggagagctttttggagcggccgcagtcggtgtgcctcgccaacgcccctgacctcagccacctggtgggcggccccgtgtgtgggaacctgtttgtggagcgtggggagcagtgcgactgcggcccccccgaggactgccggaaccgctgctgcaactctaccacctgccagctggctgagggggcccagtgtgcgcacggtacctgctgccaggagtgcaaggtgaagccggctggtgagctgtgccgtcccaagaaggacatgtgtgacctcgaggagttctgtgacggccggcaccctgagtgcccggaagacgccttccaggagaacggcacgccctgctccgggggctactgctacaacggggcctgtcccacactggcccagcagtgccaggccttctgggggccaggtgggcaggctgccgaggagtcctgcttctcctatgacatcctaccaggctgcaaggccagccggtacagggctgacatgtgtggcgttctgcagtgcaagggtgggcagcagcccctggggcgtgccatctgcatcgtggatgtgtgccacgcgctcaccacagaggatggcactgcgtatgaaccagtgcccgagggcacccggtgtggaccagagaaggtttgctggaaaggacgttgccaggacttacacgtttacagatccagcaactgctctgcccagtgccacaaccatggggtgtgcaaccacaagcaggagtgccactgccacgcgggctgggccccgccccactgcgcgaagctgctgactgaggtgcacgcagcgtccgggagcctccccgtcttcgtggtggtggttctggtgctcctggcagttgtgctggtcaccctggcaggcatcatcgtctaccgcaaagcccggagccgcatcctgagcaggaacgtggctcccaagaccacaatggggcgctccaaccccctgttccaccaggctgccagccgcgtgccggccaagggcggggctccagccccatccaggggcccccaagagctggtccccaccacccacccgggccagcccgcccgacacccggcctcctcggtggctctgaagaggccgccccctgctcctccggtcactgtgtccagcccacccttcccagttcctgtctacacccggcaggcaccaaagcaggtcatcaagccaacgttcgcacccccagtgcccccagtcaaacccggggctggtgcggccaaccctggtccagctgagggtgctgttggcccaaaggttgccctgaagccccccatccagaggaagcaaggagccggagctcccacagcaccctaggggggcacctgcgcctgtgtggaaatttggagaagttgcggcagagaagccatgcgttccagcattccacggtccagctagtgccgctcagccctagaccctgactttgcaggctcagctgctgttctaacctcaggaatgcatctacctgagaggctcctgctgtccacgccctcagccaattccttctccccgccttggccacgtgtagccccagctgtctgcaggcaccaggctgggatgagctgtgtgcttgcgggtgcgtgtgtgtgtacgtgtctccaggtggccgctggtctcccgctgtgttcaggaggccacatatacagcccctcccagccacacctgcccctgctctggggcctgctgagccggctgccctgggcacccggttccaggcagcacagacgtggggcatccccagaaagactccatcccaggaccaggttcccctgcgtgctcttcgagagggtgtcagtgagcagactgcaccccaagctcccgactccaggtcccctgatcttggggcctgtttcccatgggattcaagagggacagccccagctttgtgtgtgtttaagcttaggaatcgcctttatggaaagggctatgtgggagagtcagctatcttgtctggttttcttgagacctcagatgtgtgttcagcagggctgaaagcttttattctttaataatgagaaatgtatattttactaataaattattgaccgagttctgtagattcttgttaga

SEQ ID NO: 104690 - DNA, 776 bp, Homo sapiens
  Payload ID: 554
  Gene Symbol: ADAM8
  Gene Name: ADAM metallopeptidase domain 8
  ENST ID: ENST00000486609
  CDS Start-End: 41-776
cgcggggctgtcacctccgcctctgctccccgacccggccatgcgcggcctcgggctctggctgctgggcgcgatgatgctgcctgcgattgcccccagccggccctgggccctcatggagcagtatgaggtcgtgttgccgtggcgtctgccaggcccccgagtccgccgagctctgccctcccacttgggagggcagttccggccccagccctgtccttacctcagcatccggggaacctactaccgacctgcccgctgccctgggctcatccagccggtggcacagctaaggctgtcccagagctctgcaggccgagccccagcctgcacatgggggctggagatgcagtggtccagcaggaggctctgcaggcaccaccagggcctgcacccagagagggtgagctacgtccttggggccacagggcacaacttcaccctccacctgcggaagaacagggacctgctgggctccggctacacagagacctatacggctgccaatggctccgaggtgacggagcagcctcgcgggcaggaccactgcttctaccagggccacgtagaggggtacccggactcagccgccagcctcagcacctgtgccggcctcaggggtttcttccaggtggggtcagacctgcacctgatcgagcccctggatgaaggtggcgagggcggacggcacgccgtgtaccaggctgagcacctgctgcagacggccgggacctgcggggtcagcgacgacagcctgggcagcctcctgggacccc

SEQ ID NO: 104691 - DNA, 3077 bp, Homo sapiens
  Payload ID: 554
  Gene Symbol: ADAM8
  Gene Name: ADAM metallopeptidase domain 8
  Uniprot ID: P78325
  ENST ID: ENST00000415217
  CDS Start-End: 34-2262
ctgtcacctccgcctctgctccccgacccggccatgcgcggcctcgggctctggctgctgggcgcgatgatgctgcctgcgattgcccccagccggccctgggccctcatggagcagtatgaggtcgtgttgccgtggcgtctgccaggcccccgagtccgccgagctctgccctcccacttgggcctgcacccagagagggtgagctacgtccttggggccacagggcacaacttcaccctccacctgcggaagaacagggacctgctgggctccggctacacagagacctatacggctgccaatggctccgaggtgacggagcagcctcgcgggcaggaccactgcttctaccagggccacgtagaggggtacccggactcagccgccagcctcagcacctgtgccggcctcaggggtttcttccaggtggggtcagacctgcacctgatcgagcccctggatgaaggtggcgagggcggacggcacgccgtgtaccaggctgagcacctgctgcagacggccgggacctgcggggtcagcgacgacagcctgggcagcctcctgggaccccggacggcagccgtcttcaggcctcggcccggggactctctgccatcccgagagacccgctacgtggagctgtatgtggtcgtggacaatgcagagttccagatgctggggagcgaagcagccgtgcgtcatcgggtgctggaggtggtgaatcacgtggacaagctatatcagaaactcaacttccgtgtggtcctggtgggcctggagatttggaatagtcaggacaggttccacgtcagccccgaccccagtgtcacactggagaacctcctgacctggcaggcacggcaacggacacggcggcacctgcatgacaacgtacagctcatcacgggtgtcgacttcaccgggactaccgtggggtttgccagggtgtccgccatgtgctcccacagctcaggggctgtgaaccaggaccacagcaagaaccccgtgggcgtggcctgtaccatggcccatgagatgggccacaacctgggcatggaccatgatgagaacgtccagggctgccgctgccaggaacgcttcgaggccggccgctgcatcatggcgggcagcattggctccagtttccccaggatgttcagtgactgcagccaggcctacctggagagctttttggagcggccgcagtcggtgtgcctcgccaacgcccctgacctcagccacctggtgggcggccccgtgtgtgggaacctgtttgtggagcgtggggagcagtgcgactgcggcccccccgaggactgccggaaccgctgctgcaactctaccacctgccagctggctgagggggcccagtgtgcgcacggtacctgctgccaggagtgcaaggtgaagccggctggtgagctgtgccgtcccaagaaggacatgtgtgacctcgaggagttctgtgacggccggcaccctgagtgcccggaagacgccttccaggagaacggcacgccctgctccgggggctactgctacaacggggcctgtcccacactggcccagcagtgccaggccttctgggggccaggtgggcaggctgccgaggagtcctgcttctcctatgacatcctaccaggctgcaaggccagccggtacagggctgacatgtgtggcgttctgcagtgcaagggtgggcagcagcccctggggcgtgccatctgcatcgtggatgtgtgccacgcgctcaccacagaggatggcactgcgtatgaaccagtgcccgagggcacccggtgtggaccagagaaggtttgctggaaaggacgttgccaggacttacacgtttacagatccagcaactgctctgcccagtgccacaaccatggggtgtgcaaccacaagcaggagtgccactgccacgcgggctgggccccgccccactgcgcgaagctgctgactgaggtgcacgcaggctgccagccgcgtgccggccaagggcggggctccagccccatccaggggcccccaagagctggtccccaccacccacccgggccagcccgcccgacacccggcctcctcggtggctctgaagaggccgccccctgctcctccggtcactgtgtccagcccacccttcccagttcctgtctacacccggcaggcaccaaagcaggtcatcaagccaacgttcgcacccccagtgcccccagtcaaacccggggctggtgcggccaaccctggtccagctgagggtgctgttggcccaaaggttgccctgaagccccccatccagaggaagcaaggagccggagctcccacagcaccctaggggggcacctgcgcctgtgtggaaatttggagaagttgcggcagagaagccatgcgttccagcattccacggtccagctagtgccgctcagccctagaccctgactttgcaggctcagctgctgttctaacctcaggaatgcatctacctgagaggctcctgctgtccacgccctcagccaattccttctccccgccttggccacgtgtagccccagctgtctgcaggcaccaggctgggatgagctgtgtgcttgcgggtgcgtgtgtgtgtacgtgtctccaggtggccgctggtctcccgctgtgttcaggaggccacatatacagcccctcccagccacacctgcccctgctctggggcctgctgagccggctgccctgggcacccggttccaggcagcacagacgtggggcatccccagaaagactccatcccaggaccaggttcccctgcgtgctcttcgagagggtgtcagtgagcagactgcaccccaagctcccgactccaggtcccctgatcttggggcctgtttcccatgggattcaagagggacagccccagctttgtgtgtgtttaagcttaggaatcgcctttatggaaagggctatgtgggagagtcagctatcttgtctggttttcttgagacctcagatgtgtgttcagcagggctgaaagcttttattctttaataatgagaaatgtatattttactaataaattattgaccgagttc

SEQ ID NO: 104692 - DNA, 3836 bp, Homo sapiens
  Payload ID: 555
  Gene Symbol: ADAM9
  Gene Name: ADAM metallopeptidase domain 9
  Uniprot ID: Q13443
  ENST ID: ENST00000379917
  CDS Start-End: 39-2006
cgaccgagtgctgagaggaacctgcggaatcggccgagatggggtctggcgcgcgctttccctcggggacccttcgtgtccggtggttgctgttgcttggcctggtgggcccagtcctcggtgcggcgcggccaggctttcaacagacctcacatctttcttcttatgaaattataactccttggagattaactagagaaagaagagaagcccctaggccctattcaaaacaagtatcttatgttattcaggctgaaggaaaagagcatattattcacttggaaaggaacaaagaccttttgcctgaagattttgtggtttatacttacaacaaggaagggactttaatcactgaccatcccaatatacagaatcattgtcattatcggggctatgtggagggagttcataattcatccattgctcttagcgactgttttggactcagaggattgctgcatttagagaatgcgagttatgggattgaacccctgcagaacagctctcattttgagcacatcatttatcgaatggatgatgtctacaaagagcctctgaaatgtggagtttccaacaaggatatagagaaagaaactgcaaaggatgaagaggaagagcctcccagcatgactcagctacttcgaagaagaagagctgtcttgccacagacccggtatgtggagctgttcattgtcgtagacaaggaaaggtatgacatgatgggaagaaatcagactgctgtgagagaagagatgattctcctggcaaactacttggatagtatgtatattatgttaaatattcgaattgtgctagttggactggagatttggaccaatggaaacctgatcaacatagttgggggtgctggtgatgtgctggggaacttcgtgcagtggcgggaaaagtttcttatcacacgtcggagacatgacagtgcacagctagttctaaagaaaggttttggtggaactgcaggaatggcatttgtgggaacagtgtgttcaaggagccacgcaggcgggattaatgtgtttggacaaatcactgtggagacatttgcttccattgttgctcatgaattgggtcataatcttggaatgaatcacgatgatgggagagattgttcctgtggagcaaagagctgcatcatgaattcaggagcatcgggttccagaaactttagcagttgcagtgcagaggactttgagaagttaactttaaataaaggaggaaactgccttcttaatattccaaagcctgatgaagcctatagtgctccctcctgtggtaataagttggtggacgctggggaagagtgtgactgtggtactccaaaggaatgtgaattggacccttgctgcgaaggaagtacctgtaagcttaaatcatttgctgagtgtgcatatggtgactgttgtaaagactgtcggttccttccaggaggtactttatgccgaggaaaaaccagtgagtgtgatgttccagagtactgcaatggttcttctcagttctgtcagccagatgtttttattcagaatggatatccttgccagaataacaaagcctattgctacaacggcatgtgccagtattatgatgctcaatgtcaagtcatctttggctcaaaagccaaggctgcccccaaagattgtttcattgaagtgaattctaaaggtgacagatttggcaattgtggtttctctggcaatgaatacaagaagtgtgccactgggaatgctttgtgtggaaagcttcagtgtgagaatgtacaagagatacctgtatttggaattgtgcctgctattattcaaacgcctagtcgaggcaccaaatgttggggtgtggatttccagctaggatcagatgttccagatcctgggatggttaacgaaggcacaaaatgtggtgctggaaagatctgtagaaacttccagtgtgtagatgcttctgttctgaattatgactgtgatgttcagaaaaagtgtcatggacatgggaaatgaatactgcattgagggacggacttctggtcttcttcttcctaattgttccccttattgtctgtgctatttttatcttcatcaagagggatcaactgtggagaagctacttcagaaagaagagatcacaaacatatgagtcagatggcaaaaatcaagcaaacccttctagacagccggggagtgttcctcgacatgtttctccagtgacacctcccagagaagttcctatatatgcaaacagatttgcagtaccaacctatgcagccaagcaacctcagcagttcccatcaaggccacctccaccacaaccgaaagtatcatctcagggaaacttaattcctgcccgtcctgctcctgcacctcctttatatagttccctcacttgatttttttaaccttctttttgcaaatgtcttcagggaactgagctaatactttttttttttcttgatgttttcttgaaaagcctttctgttgcaactatgaatgaaaacaaaacaccacaaaacagacttcactaacacagaaaaacagaaactgagtgtgagagttgtgaaatacaaggaaatgcagtaaagccagggaatttacaataacatttccgtttccatcattgaataagtcttattcagtcatcggtgaggttaatgcactaatcatggattttttgaacatgttattgcagtgattctcaaattaactgtattggtgtaagagttttgtcattaagtgtttaagtgttattctgaattttctaccttagttatcattaatgtagttcctcattgaacatgtgataatctaatacctgtgaaaactgactaatcagctgccaataatatctaatatttttcatcatgcacgaattaataatcatcatactctagaatcttgtctgtcactcactacatgaataagcaaatattgtcttcaaaagaatgcacaagaaccacaattaagatgtcatattattttgaaagtacaaaatatactaaaagagtgtgtgtgtattcacgcagttactcgcttccatttttatgacctttcaactataggtaataactcttagagaaattaatttaatattagaatttctattatgaatcatgtgaaagcatgacattcgttcacaatagcactattttaaataaattataagctttaaggtacgaagtatttaatagatctaatcaaatatgttgattcatggctataataaagcaggagcaattataaaatcttcaatcaattgaacttttacaaaaccacttgagaatttcatgagcactttaaaatctgaactttcaaagcttgctattaaatcatttagaatgtttacatttactaaggtgtgctgggtcatgtaaaatattagacactaatattttcatagaaattaggctggagaaagaaggaagaaatggttttcttaaatacctacaaaaaagttactgtggtatctatgagttatcatcttagctgtgttaaaaatgaatttttactatggcagatatggtatggatcgtaaaattttaagcactaaaaattttttcataacctttcataataaagtttaataataggtttattaactgaatttcattagttttttaaaagtgtttttggtttgtgtatatatacatatacaaatacaacatttacaataaataaaatacttgaaattctcttttgtgtctcctagtagcttcctactcaactatttataatctcattaattaaaaagttataattttagataaaaattctagtcaaatttttacagatattatctcactaattttcagacttttgccaaagtgtgcacaatgg

SEQ ID NO: 104693 - DNA, 2387 bp, Homo sapiens
  Payload ID: 555
  Gene Symbol: ADAM9
  Gene Name: ADAM metallopeptidase domain 9
  ENST ID: ENST00000481513
  CDS Start-End: 79-465
cggcagggttggaaaatgatggaagaggcggaggtggaggcgaccgagtgctgagaggaacctgcggaatcggccgagatggggtctggcgcgcgctttccctcggggacccttcgtgtccggtggttgctgttgcttggcctggtgggcccagtcctcggtgcggcgcggccaggctttcaacagacctcacatctttcttcttatgaaattataactccttggagattaactagagaaagaagagaagcccctaggccctattcaaaacaagtatcttatgttattcaggctgaaggaaaagagcatattattcacttggaaaggaacaaagaccttttgcctgaagattttgtggtttatacttacaacaaggaagggactttaatcactgaccatcccaatatacaggtaatgtatttttctcttgatcccatagcaaattttaaaacaattataatttaaaaatgagttctgtataggcactcaggactgttacattgcacagccccacagggtacctttaacattataacatatgggttatcttgggaaaagtgggtgcatttctatagactaagctgtaccttacagctctccaggtactcagtagttaaggttttttttttaaagactaggaaaataaatcttctatttaatggtaatccttactgatgagaaaatttgatatgttttgaaaataggagtttctgatttttttgttgaaagttaatatctctaaaagtgcacttattaaaacatttaatttgtcagtgatatttagtaaagaaaaacactcatttgatgttatgtgttctaatgttctaaattttttctgaaaataattgtttcctaaaagaggtgtggtcctctctgcatcagagaacagagtactcctggggacagagctggccagaatacccaaaataattggcagatgtcaaatttggctttctgtgtttattactagagcataaacatttctagttttgtttgagtgttttacagtcctttttggcagttaggtattatacctttttttcttttgcaatggttttcatgagaaatctttattcccattacatgtgtatgttttatttttcttctgaactttgtaatactttgctatgttgaattgtttctgttggtagcgcacttttgcagcattcttcaaataggaggcaaaaaaatctttagattaattattagtacttacaaaaaccaaggaaatgctgacttaggcctatcttctggtccactatctgatttctttatcttagtgtgttgttggtccattgtttaatagaaaattagtagaggagtttgaatttaccttacagcataaaccagatagaaaataacgcattcatccagtcatgcatccaatgattaccaaggcagaaggccaaacaccacataatttgtgtcacttgacaaaagcagtaatgttaaaaggcatttttttcctcatagaggtttcttggcatactttcttcagacatacactgtttgggcttgagttttgactcattatttgctgatgaagctactttaatctgtttgtgccttggtatcttcgctttaaaatgtaataatagttaccactttatggatatactgggaaacttaactgagttaatacttacaagatgcttagaacagtctgacaatttttaactcaacgaatgttattatttgttgctattattgacagcgtatgttcttaaaactgccaaaaattgatttaattatatagaaacttatgtaactattatcttatataatacttaagtatcataagtatgatagagttatgcttttctgggtgtttgaaaaatgtcaactaagacagatggtgtctcacttatttcttggttatttaatattgttcagttagatgaaagtgtgattgtagatttgaaatacaaaataaaacttggatactgtgatttttttaacatggccagactgtcatgtattataatgacatatacttttgtccataaaatgaaattaagtttcactgaaaaatttacatactttcccctggggattctattgcttcagattaaagtttataaagtatcattagtgtcttccacagggtcattttacacaaacacagttttagtgagatgtcaactggcttttgttggttgttggattgactgtgatttaaaatgttaaagatgatataatgcatcttgttctgcttctaggctgaaaggtcactgaggcagagctgtttgtaccttgtatcccctggaattttgcctaaacatttgtgtactcatagggtggtaggagatagtccgcagatggtctaaagaatgccatgtgatactgtgagatgccaataatataaataaaactttgttattattaaa

SEQ ID NO: 104694 - DNA, 3793 bp, Homo sapiens
  Payload ID: 555
  Gene Symbol: ADAM9
  Gene Name: ADAM metallopeptidase domain 9
  ENST ID: ENST00000481873
  CDS Start-End: 39-2177
cgaccgagtgctgagaggaacctgcggaatcggccgagatggggtctggcgcgcgctttccctcggggacccttcgtgtccggtggttgctgttgcttggcctggtgggcccagtcctcggtgcggcgcggccaggctttcaacagacctcacatctttcttcttatgaaattataactccttggagattaactagagaaagaagagaagcccctaggccctattcaaaacaagtatcttatgttattcaggctgaaggaaaagagcatattattcacttggaaaggaacaaagaccttttgcctgaagattttgtggtttatacttacaacaaggaagggactttaatcactgaccatcccaatatacagaatcattgtcattatcggggctatgtggagggagttcataattcatccattgctcttagcgactgttttggactcagaggattgctgcatttagagaatgcgagttatgggattgaacccctgcagaacagctctcattttgagcacatcatttatcgaatggatgatgtctacaaagagcctctgaaatgtggagtttccaacaaggatatagagaaagaaactgcaaaggatgaagaggaagagcctcccagcatgactcagctacttcgaagaagaagagctgtcttgccacagacccggtatgtggagctgttcattgtcgtagacaaggaaaggtatgacatgatgggaagaaatcagactgctgtgagagaagagatgattctcctggcaaactacttggatagtatgtatattatgttaaatattcgaattgtgctagttggactggagatttggaccaatggaaacctgatcaacatagttgggggtgctggtgatgtgctggggaacttcgtgcagtggcgggaaaagtttcttatcacacgtcggagacatgacagtgcacagctagttctaaagaaaggttttggtggaactgcaggaatggcatttgtgggaacagtgtgttcaaggagccacgcaggcgggattaatgtgtttggacaaatcactgtggagacatttgcttccattgttgctcatgaattgggtcataatcttggaatgaatcacgatgatgggagagattgttcctgtggagcaaagagctgcatcatgaattcaggagcatcgggttccagaaactttagcagttgcagtgcagaggactttgagaagttaactttaaataaaggaggaaactgccttcttaatattccaaagcctgatgaagcctatagtgctccctcctgtggtaataagttggtggacgctggggaagagtgtgactgtggtactccaaaggaatgtgaattggacccttgctgcgaaggaagtacctgtaagcttaaatcatttgctgagtgtgcatatggtgactgttgtaaagactgtcggttccttccaggaggtactttatgccgaggaaaaaccagtgagtgtgatgttccagagtactgcaatggttcttctcagttctgtcagccagatgtttttattcagaatggatatccttgccagaataacaaagcctattgctacaacggcatgtgccagtattatgatgctcaatgtcaagtcatctttggctcaaaagccaaggctgcccccaaagattgtttcattgaagtgaattctaaaggtgacagatttggcaattgtggtttctctggcaatgaatacaagaagtgtgccactgggaatgctttgtgtggaaagcttcagtgtgagaatgtacaagagatacctgtatttggaattgtgcctgctattattcaaacgcctagtcgaggcaccaaatgttggggtgtggatttccagctaggatcagatgttccagatcctgggatggttaacgaaggcacaaaatgtggtgctggaaagatctgtagaaacttccagtgtgtagatgcttctgttctgaattatgactgtgatgttcagaaaaagtgtcatggacatggggtatgtaatagcaataagaattgtcactgtgaaaatggctgggctcccccaaattgtgagactaaaggatacggaggaagtgtggacagtggacctacatacaatggtcagatggcaaaaatcaagcaaacccttctagacagccggggagtgttcctcgacatgtttctccagtgacacctcccagagaagttcctatatatgcaaacagatttgcagtaccaacctatgcagccaagcaacctcagcagttcccatcaaggccacctccaccacaaccgaaagtatcatctcagggaaacttaattcctgcccgtcctgctcctgcacctcctttatatagttccctcacttgatttttttaaccttctttttgcaaatgtcttcagggaactgagctaatactttttttttttcttgatgttttcttgaaaagcctttctgttgcaactatgaatgaaaacaaaacaccacaaaacagacttcactaacacagaaaaacagaaactgagtgtgagagttgtgaaatacaaggaaatgcagtaaagccagggaatttacaataacatttccgtttccatcattgaataagtcttattcagtcatcggtgaggttaatgcactaatcatggattttttgaacatgttattgcagtgattctcaaattaactgtattggtgtaagagttttgtcattaagtgtttaagtgttattctgaattttctaccttagttatcattaatgtagttcctcattgaacatgtgataatctaatacctgtgaaaactgactaatcagctgccaataatatctaatatttttcatcatgcacgaattaataatcatcatactctagaatcttgtctgtcactcactacatgaataagcaaatattgtcttcaaaagaatgcacaagaaccacaattaagatgtcatattattttgaaagtacaaaatatactaaaagagtgtgtgtgtattcacgcagttactcgcttccatttttatgacctttcaactataggtaataactcttagagaaattaatttaatattagaatttctattatgaatcatgtgaaagcatgacattcgttcacaatagcactattttaaataaattataagctttaaggtacgaagtatttaatagatctaatcaaatatgttgattcatggctataataaagcaggagcaattataaaatcttcaatcaattgaacttttacaaaaccacttgagaatttcatgagcactttaaaatctgaactttcaaagcttgctattaaatcatttagaatgtttacatttactaaggtgtgctgggtcatgtaaaatattagacactaatattttcatagaaattaggctggagaaagaaggaagaaatggttttcttaaatacctacaaaaaagttactgtggtatctatgagttatcatcttagctgtgttaaaaatgaatttttactatggcagatatggtatggatcgtaaaattttaagcactaaaaattttttcataacctttcataataaagtttaataataggtttattaactgaatttcattagttttttaaaagtgtttttggtttgtgtatatatacatatacaaatacaacatttacaataaataaaatacttgaaattctcttttgtgtctcctagtagcttcctactcaactatttataatctcattaattaaaaagttataattttagataaaaattctagtcaaatttttacagatattatctcactaattttcagacttttgccaaagtgtgc

SEQ ID NO: 104695 - DNA, 3755 bp, Homo sapiens
  Payload ID: 555
  Gene Symbol: ADAM9
  Gene Name: ADAM metallopeptidase domain 9
  ENST ID: ENST00000468065
  CDS Start-End: 39-1925
cgaccgagtgctgagaggaacctgcggaatcggccgagatggggtctggcgcgcgctttccctcggggacccttcgtgtccggtggttgctgttgcttggcctggtgggcccagtcctcggtgcggcgcggccaggctttcaacagacctcacatctttcttcttatgaaattataactccttggagattaactagagaaagaagagaagcccctaggccctattcaaaacaagtatcttatgttattcaggctgaaggaaaagagcatattattcacttggaaaggaacaaagaccttttgcctgaagattttgtggtttatacttacaacaaggaagggactttaatcactgaccatcccaatatacagaatcattgtcattatcggggctatgtggagggagttcataattcatccattgctcttagcgactgttttggactcagaggattgctgcatttagagaatgcgagttatgggattgaacccctgcagaacagctctcattttgagcacatcatttatcgaatggatgatgtctacaaagagcctctgaaatgtggagtttccaacaaggatatagagaaagaaactgcaaaggatgaagaggaagagcctcccagcatgactcagctacttcgaagaagaagagctgtcttgccacagacccggtatgtggagctgttcattgtcgtagacaaggaaaggtatgacatgatgggaagaaatcagactgctgtgagagaagagatgattctcctggcaaactacttggatagtatgtatattatgttaaatattcgaattgtgctagttggactggagatttggaccaatggaaacctgatcaacatagttgggggtgctggtgatgtgctggggaacttcgtgcagtggcgggaaaagtttcttatcacacgtcggagacatgacagtgcacagctagttctaaagaaaggttttggtggaactgcaggaatggcatttgtgggaacagtgtgttcaaggagccacgcaggcgggattaatgtgtttggacaaatcactgtggagacatttgcttccattgttgctcatgaattgggtcataatcttggaatgaatcacgatgatgggagagattgttcctgtggagcaaagagctgcatcatgaattcaggagcatcgggttccagaaactttagcagttgcagtgcagaggactttgagaagttaactttaaataaaggaggaaactgccttcttaatattccaaagcctgatgaagcctatagtgctccctcctgtggtaataagttggtggacgctggggaagagtgtgactgtggtactccaaaggaatgtgaattggacccttgctgcgaaggaagtacctgtaagcttaaatcatttgctgagtgtgcatatggtgactgttgtaaagactgtcggttccttccaggaggtactttatgccgaggaaaaaccagtgagtgtgatgttccagagtactgcaatggttcttctcagttctgtcagccagatgtttttattcagaatggatatccttgccagaataacaaagcctattgctacaacggcatgtgccagtattatgatgctcaatgtcaagtcatctttggctcaaaagccaaggctgcccccaaagattgtttcattgaagtgaattctaaaggtgacagatttggcaattgtggtttctctggcaatgaatacaagaagtgtgccactgggaatgctttgtgtggaaagcttcagtgtgagaatgtacaagagatacctgtatttggaattgtgcctgctattattcaaacgcctagtcgaggcaccaaatgttggggtgtggatttccagctaggatcagatgttccagatcctgggatggttaacgaaggcacaaaatgtggtgctggaaagaaatgaatactgcattgagggacggacttctggtcttcttcttcctaattgttccccttattgtctgtgctatttttatcttcatcaagagggatcaactgtggagaagctacttcagaaagaagagatcacaaacatatgagtcagatggcaaaaatcaagcaaacccttctagacagccggggagtgttcctcgacatgtttctccagtgacacctcccagagaagttcctatatatgcaaacagatttgcagtaccaacctatgcagccaagcaacctcagcagttcccatcaaggccacctccaccacaaccgaaagtatcatctcagggaaacttaattcctgcccgtcctgctcctgcacctcctttatatagttccctcacttgatttttttaaccttctttttgcaaatgtcttcagggaactgagctaatactttttttttttcttgatgttttcttgaaaagcctttctgttgcaactatgaatgaaaacaaaacaccacaaaacagacttcactaacacagaaaaacagaaactgagtgtgagagttgtgaaatacaaggaaatgcagtaaagccagggaatttacaataacatttccgtttccatcattgaataagtcttattcagtcatcggtgaggttaatgcactaatcatggattttttgaacatgttattgcagtgattctcaaattaactgtattggtgtaagagttttgtcattaagtgtttaagtgttattctgaattttctaccttagttatcattaatgtagttcctcattgaacatgtgataatctaatacctgtgaaaactgactaatcagctgccaataatatctaatatttttcatcatgcacgaattaataatcatcatactctagaatcttgtctgtcactcactacatgaataagcaaatattgtcttcaaaagaatgcacaagaaccacaattaagatgtcatattattttgaaagtacaaaatatactaaaagagtgtgtgtgtattcacgcagttactcgcttccatttttatgacctttcaactataggtaataactcttagagaaattaatttaatattagaatttctattatgaatcatgtgaaagcatgacattcgttcacaatagcactattttaaataaattataagctttaaggtacgaagtatttaatagatctaatcaaatatgttgattcatggctataataaagcaggagcaattataaaatcttcaatcaattgaacttttacaaaaccacttgagaatttcatgagcactttaaaatctgaactttcaaagcttgctattaaatcatttagaatgtttacatttactaaggtgtgctgggtcatgtaaaatattagacactaatattttcatagaaattaggctggagaaagaaggaagaaatggttttcttaaatacctacaaaaaagttactgtggtatctatgagttatcatcttagctgtgttaaaaatgaatttttactatggcagatatggtatggatcgtaaaattttaagcactaaaaattttttcataacctttcataataaagtttaataataggtttattaactgaatttcattagttttttaaaagtgtttttggtttgtgtatatatacatatacaaatacaacatttacaataaataaaatacttgaaattctcttttgtgtctcctagtagcttcctactcaactatttataatctcattaattaaaaagttataattttagataaaaattctagtcaaatttttacagatattatctcactaattttcagacttttgccaaagtgtgcacaatgg

SEQ ID NO: 104696 - DNA, 3839 bp, Homo sapiens
  Payload ID: 555
  Gene Symbol: ADAM9
  Gene Name: ADAM metallopeptidase domain 9
  Uniprot ID: Q13443
  ENST ID: ENST00000487273
  CDS Start-End: 79-2538
cggcagggttggaaaatgatggaagaggcggaggtggaggcgaccgagtgctgagaggaacctgcggaatcggccgagatggggtctggcgcgcgctttccctcggggacccttcgtgtccggtggttgctgttgcttggcctggtgggcccagtcctcggtgcggcgcggccaggctttcaacagacctcacatctttcttcttatgaaattataactccttggagattaactagagaaagaagagaagcccctaggccctattcaaaacaagtatcttatgttattcaggctgaaggaaaagagcatattattcacttggaaaggaacaaagaccttttgcctgaagattttgtggtttatacttacaacaaggaagggactttaatcactgaccatcccaatatacagaatcattgtcattatcggggctatgtggagggagttcataattcatccattgctcttagcgactgttttggactcagaggattgctgcatttagagaatgcgagttatgggattgaacccctgcagaacagctctcattttgagcacatcatttatcgaatggatgatgtctacaaagagcctctgaaatgtggagtttccaacaaggatatagagaaagaaactgcaaaggatgaagaggaagagcctcccagcatgactcagctacttcgaagaagaagagctgtcttgccacagacccggtatgtggagctgttcattgtcgtagacaaggaaaggtatgacatgatgggaagaaatcagactgctgtgagagaagagatgattctcctggcaaactacttggatagtatgtatattatgttaaatattcgaattgtgctagttggactggagatttggaccaatggaaacctgatcaacatagttgggggtgctggtgatgtgctggggaacttcgtgcagtggcgggaaaagtttcttatcacacgtcggagacatgacagtgcacagctagttctaaagaaaggttttggtggaactgcaggaatggcatttgtgggaacagtgtgttcaaggagccacgcaggcgggattaatgtgtttggacaaatcactgtggagacatttgcttccattgttgctcatgaattgggtcataatcttggaatgaatcacgatgatgggagagattgttcctgtggagcaaagagctgcatcatgaattcaggagcatcgggttccagaaactttagcagttgcagtgcagaggactttgagaagttaactttaaataaaggaggaaactgccttcttaatattccaaagcctgatgaagcctatagtgctccctcctgtggtaataagttggtggacgctggggaagagtgtgactgtggtactccaaaggaatgtgaattggacccttgctgcgaaggaagtacctgtaagcttaaatcatttgctgagtgtgcatatggtgactgttgtaaagactgtcggttccttccaggaggtactttatgccgaggaaaaaccagtgagtgtgatgttccagagtactgcaatggttcttctcagttctgtcagccagatgtttttattcagaatggatatccttgccagaataacaaagcctattgctacaacggcatgtgccagtattatgatgctcaatgtcaagtcatctttggctcaaaagccaaggctgcccccaaagattgtttcattgaagtgaattctaaaggtgacagatttggcaattgtggtttctctggcaatgaatacaagaagtgtgccactgggaatgctttgtgtggaaagcttcagtgtgagaatgtacaagagatacctgtatttggaattgtgcctgctattattcaaacgcctagtcgaggcaccaaatgttggggtgtggatttccagctaggatcagatgttccagatcctgggatggttaacgaaggcacaaaatgtggtgctggaaagatctgtagaaacttccagtgtgtagatgcttctgttctgaattatgactgtgatgttcagaaaaagtgtcatggacatggggtatgtaatagcaataagaattgtcactgtgaaaatggctgggctcccccaaattgtgagactaaaggatacggaggaagtgtggacagtggacctacatacaatgaaatgaatactgcattgagggacggacttctggtcttcttcttcctaattgttccccttattgtctgtgctatttttatcttcatcaagagggatcaactgtggagaagctacttcagaaagaagagatcacaaacatatgagtcagatggcaaaaatcaagcaaacccttctagacagccggggagtgttcctcgacatgtttctccagtgacacctcccagagaagttcctatatatgcaaacagatttgcagtaccaacctatgcagccaagcaacctcagcagttcccatcaaggccacctccaccacaaccgaaagtatcatctcagggaaacttaattcctgcccgtcctgctcctgcacctcctttatatagttccctcacttgatttttttaaccttctttttgcaaatgtcttcagggaactgagctaatactttttttttttcttgatgttttcttgaaaagcctttctgttgcaactatgaatgaaaacaaaacaccacaaaacagacttcactaacacagaaaaacagaaactgagtgtgagagttgtgaaatacaaggaaatgcagtaaagccagggaatttacaataacatttccgtttccatcattgaataagtcttattcagtcatcggtgaggttaatgcactaatcatggattttttgaacatgttattgcagtgattctcaaattaactgtattggtgtaagagttttgtcattaagtgtttaagtgttattctgaattttctaccttagttatcattaatgtagttcctcattgaacatgtgataatctaatacctgtgaaaactgactaatcagctgccaataatatctaatatttttcatcatgcacgaattaataatcatcatactctagaatcttgtctgtcactcactacatgaataagcaaatattgtcttcaaaagaatgcacaagaaccacaattaagatgtcatattattttgaaagtacaaaatatactaaaagagtgtgtgtgtattcacgcagttactcgcttccatttttatgacctttcaactataggtaataactcttagagaaattaatttaatattagaatttctattatgaatcatgtgaaagcatgacattcgttcacaatagcactattttaaataaattataagctttaaggtacgaagtatttaatagatctaatcaaatatgttgattcatggctataataaagcaggagcaattataaaatcttcaatcaattgaacttttacaaaaccacttgagaatttcatgagcactttaaaatctgaactttcaaagcttgctattaaatcatttagaatgtttacatttactaaggtgtgctgggtcatgtaaaatattagacactaatattttcatagaaattaggctggagaaagaaggaagaaatggttttcttaaatacctacaaaaaagttactgtggtatctatgagttatcatcttagctgtgttaaaaatgaatttttactatggcagatatggtatggatcgtaaaattttaagcactaaaaattttttcataacctttcataataaagtttaataataggtttattaactgaatttcattagttttttaaaagtgtttttggtttgtgtatatatacatatacaaatacaacatttacaataaataaaatacttgaaattctc

SEQ ID NO: 104697 - DNA, 2053 bp, Homo sapiens
  Payload ID: 555
  Gene Symbol: ADAM9
  Gene Name: ADAM metallopeptidase domain 9
  ENST ID: ENST00000466936
  CDS Start-End: 196-639
taggcgatgtcgggagcgagctcggaccgagggctcagttgcgtcagtgccgcgcgcgtgctcgtcgggcgcgcgtgctcgtcgggcgcgcgcgcttcccggccagacttggggccccggcagggttggaaaatgatggaagaggcggaggtggaggcgaccgagtgctgagaggaacctgcggaatcggccgagatggggtctggcgcgcgctttccctcggggacccttcgtgtccggtggttgctgttgcttggcctggtgggcccagtcctcggtgcggcgcggccaggctttcaacagacctcacatctttcttcttatgaaattataactccttggagattaactagagaaagaagagaagcccctaggccctattcaaaacaagtatcttatgttattcaggctgaaggaaaagagcatattattcacttggaaaggaacaaagaccttttgcctgaagattttgtggtttatacttacaacaaggaagggactttaatcactgaccatcccaatatacagaggtgtggtcctctctgcatcagagaacagagtactcctggggacagagctggccagaatacccaaaataattggcagatgtcaaatttggctttctgtgtttattactagagcataaacatttctagttttgtttgagtgttttacagtcctttttggcagttaggtattatacctttttttcttttgcaatggttttcatgagaaatctttattcccattacatgtgtatgttttatttttcttctgaactttgtaatactttgctatgttgaattgtttctgttggtagcgcacttttgcagcattcttcaaataggaggcaaaaaaatctttagattaattattagtacttacaaaaaccaaggaaatgctgacttaggcctatcttctggtccactatctgatttctttatcttagtgtgttgttggtccattgtttaatagaaaattagtagaggagtttgaatttaccttacagcataaaccagatagaaaataacgcattcatccagtcatgcatccaatgattaccaaggcagaaggccaaacaccacataatttgtgtcacttgacaaaagcagtaatgttaaaaggcatttttttcctcatagaggtttcttggcatactttcttcagacatacactgtttgggcttgagttttgactcattatttgctgatgaagctactttaatctgtttgtgccttggtatcttcgctttaaaatgtaataatagttaccactttatggatatactgggaaacttaactgagttaatacttacaagatgcttagaacagtctgacaatttttaactcaacgaatgttattatttgttgctattattgacagcgtatgttcttaaaactgccaaaaattgatttaattatatagaaacttatgtaactattatcttatataatacttaagtatcataagtatgatagagttatgcttttctgggtgtttgaaaaatgtcaactaagacagatggtgtctcacttatttcttggttatttaatattgttcagttagatgaaagtgtgattgtagatttgaaatacaaaataaaacttggatactgtgatttttttaacatggccagactgtcatgtattataatgacatatacttttgtccataaaatgaaattaagtttcactgaaaaatttacatactttcccctggggattctattgcttcagattaaagtttataaagtatcattagtgtcttccacagggtcattttacacaaacacagttttagtgagatgtcaactggcttttgttggttgttggattgactgtgatttaaaatgttaaagatgatataatgcatcttgttctgcttctaggctgaaaggtcactgaggcagagctgtttgtaccttgtatcccctggaattttgcctaaacatttgtgtactcatagggtggtaggagatagtccgcagatggtctaaagaatgccatgtgatactgtgagatgccaataatataaataaaactttgttattatt

SEQ ID NO: 104698 - DNA, 1463 bp, Homo sapiens
  Payload ID: 555
  Gene Symbol: ADAM9
  Gene Name: ADAM metallopeptidase domain 9
  ENST ID: ENST00000631491
  CDS Start-End: 1-162
cctatatatgcaaacagatttgcagtaccaacctatgcagccaagcaacctcagcagttcccatcaaggccacctccaccacaaccgaaagtatcatctcagggaaacttaattcctgcccgtcctgctcctgcacctcctttatatagttccctcacttgatttttttaaccttctttttgcaaatgtcttcagggaactgagctaatactttttttttttcttgatgttttcttgaaaagcctttctgttgcaactatgaatgaaaacaaaacaccacaaaacagacttcactaacacagaaaaacagaaactgagtgtgagagttgtgaaatacaaggaaatgcagtaaagccagggaatttacaataacatttccgtttccatcattgaataagtcttattcagtcatcggtgaggttaatgcactaatcatggattttttgaacatgttattgcagtgattctcaaattaactgtattggtgtaagagttttgtcattaagtgtttaagtgttattctgaattttctaccttagttatcattaatgtagttcctcattgaacatgtgataatctaatacctgtgaaaactgactaatcagctgccaataatatctaatatttttcatcatgcacgaattaataatcatcatactctagaatcttgtctgtcactcactacatgaataagcaaatattgtcttcaaaagaatgcacaagaaccacaattaagatgtcatattattttgaaagtacaaaatatactaaaagagtgtgtgtgtattcacgcagttactcgcttccatttttatgacctttcaactataggtaataactcttagagaaattaatttaatattagaatttctattatgaatcatgtgaaagcatgacattcgttcacaatagcactattttaaataaattataagctttaaggtacgaagtatttaatagatctaatcaaatatgttgattcatggctataataaagcaggagcaattataaaatcttcaatcaattgaacttttacaaaaccacttgagaatttcatgagcactttaaaatctgaactttcaaagcttgctattaaatcatttagaatgtttacatttactaaggtgtgctgggtcatgtaaaatattagacactaatattttcatagaaattaggctggagaaagaaggaagaaatggttttcttaaatacctacaaaaaagttactgtggtatctatgagttatcatcttagctgtgttaaaaatgaatttttactatggcagatatggtatggatcgtaaaattttaagcactaaaaattttttcataacctttcataataaagtttaataataggtttattaactgaatttcattagttttttaaaagtgtttttggtttgtgtatatatacatatacaaatacaacatttacaataaataaaatacttgaaattctc

SEQ ID NO: 104699 - DNA, 3022 bp, Homo sapiens
  Payload ID: 556
  Gene Symbol: ADAMTS13
  Gene Name: ADAM metallopeptidase with thrombospondin type 1 motif 13
  ENST ID: ENST00000626079
  CDS Start-End: 121-1155
acactgcctaatcgtcccgcccagtagtgagcaggcctgtcccattccatactgaccagattcccagtcaccaaggccccctctcactccgctccactcctcgggctggctctcctgaggatgcaccagcgtcacccccgggcaagatgccctcccctctgtgtggccggaatccttgcctgtggctttctcctgggctgctggggaccctcccatttccagcagagttgtcttcaggctttggagccacaggccgtgtcttcttacttgagccctggtgctcccttaaaaggccgccctccttcccctggcttccagaggcagaggcagaggcagaggcgggctgcaggcggcatcctacacctggagctgctggtggccgtgggccccgatgtcttccaggctcaccaggaggacacagagcgctatgtgctcaccaacctcaacatcggggcagaactgcttcgggacccgtccctgggggctcagtttcgggtgcacctggtgaagatggtcattctgacagagcctgagggtgctccaaatatcacagccaacctcacctcgtccctgctgagcgtctgtgggtggagccagaccatcaaccctgaggacgacacggatcctggccatgctgacctggtcctctatatcactaggtttgacctggagttgcctgatggtaaccggcaggtgcggggcgtcacccagctgggcggtgcctgctccccaacctggagctgcctcattaccgaggacactggcttcgacctgggagtcaccattgcccatgagattgggcacagcttcggcctggagcacgacggcgcgcccggcagcggctgcggccccagcggacacgtgatggcttcggacggcgccgcgccccgcgccggcctcgcctggtccccctgcagccgccggcagctgctgagcctgctcagacccgtccctccgtcgccgctccctctgctggccacccacctctgcgccggcaggagccttagtcttggtcccagccaagagccggctcctggtggggggcgcgggccgagaactcctgttcccactcacaaaaggccacgcttccaaacgcttccatcctcgtgcccactcctccgtcccgcctcctcccggtgtacaccccgggactgagccgggcctgagccgggccttgtcgcagcgcaggacgggcgcgctgcgtgtgggacccgccgcggcctcaacccgggtccgcggggcacccgccggatgcgcagcctggcctctactacagcgccaacgagcagtgccgcgtggccttcggccccaaggctgtcgcctgcaccttcgccagggagcacctggtgagtctgccggcggtggcctgggattggctgtgaggtccctccgcatcacccagctcacgtcccccaaaacgtgcatggatatgtgccaggccctctcctgccacacagacccgctggaccaaagcagctgcagccgcctcctcgttcctctcctggatgggacagaatgtggcgtggagaagtggtgctccaagggtcgctgccgctccctggtggagctgacccccatagcagcagtgcatgggcgctggtctagctggggtccccgaagtccttgctcccgctcctgcggaggaggtgtggtcaccaggaggcggcagtgcaacaaccccagacctgcctttggggggcgtgcatgtgttggtgctgacctccaggccgagatgtgcaacactcaggcctgcgagaagacccagctggagttcatgtcgcaacagtgcgccaggaccgacggccagccgctgcgctcctcccctggcggcgcctccttctaccactggggtgctgctgtaccacacagccaaggggatgctctgtgcagacacatgtgccgggccattggcgagagcttcatcatgaagcgtggagacagcttcctcgatgggacccggtgtatgccaagtggcccccgggaggacgggaccctgagcctgtgtgtgtcgggcagctgcaggacatttggctgtgatggtaggatggactcccagcaggtatgggacaggtgccaggtgtgtggtggggacaacagcacgtgcagcccacggaagggctctttcacagctggcagagcgagagaatatgtcacgtttctgacagttacccccaacctgaccagtgtctacattgccaaccacaggcctctcttcacacacttggcggtgaggatcggagggcgctatgtcgtggctgggaagatgagcatctcccctaacaccacctacccctccctcctggaggatggtcgtgtcgagtacagagtggccctcaccgaggaccggctgccccgcctggaggagatccgcatctggggacccctccaggaagatgctgacatccaggtgggaggtgtcagagcccagctcatgcacatcagctggtggagcaggcctggccttggagaacgagacctgtgtgccaggggcagatggcctggaggctccagtgactgaggggcctggctccgtagatgagaagctgcctgcccctgagccctgtgtcgggatgtcatgtcctccaggctggggccatctggatgccacctctgcaggggagaaggctccctccccatggggcagcatcaggacgggggctcaagctgcacacgtgtggacccctgcggcagggtcgtgctccgtctcctgcgggcgaggtctgatggagctgcgtttcctgtgcatggactctgccctcagggtgcctgtccaggaagagctgtgtggcctggcaagcaagcctgggagccggcgggaggtctgccaggctgtcccgtgccctgctcggtggcagtacaagctggcggcctgcagcgtgagctgtgggagaggggtcgtgcggaggatcctgtattgtgcccgggcccatggggaggacgatggtgaggagatcctgttggacacccagtgccaggggctgcctcgcccggaaccccaggaggcctgcagcctggagccctg

SEQ ID NO: 104700 - DNA, 4349 bp, Homo sapiens
  Payload ID: 556
  Gene Symbol: ADAMTS13
  Gene Name: ADAM metallopeptidase with thrombospondin type 1 motif 13
  ENST ID: ENST00000630465
  CDS Start-End: 121-4143
acactgcctaatcgtcccgcccagtagtgagcaggcctgtcccattccatactgaccagattcccagtcaccaaggccccctctcactccgctccactcctcgggctggctctcctgaggatgcaccagcgtcacccccgggcaagatgccctcccctctgtgtggccggaatccttgcctgtggctttctcctgggctgctggggaccctcccatttccagcagagttgtcttcaggctttggagccacaggccgtgtcttcttacttgagccctggtgctcccttaaaaggccgccctccttcccctggcttccagaggcagaggcagaggcagaggcgggctgcaggcggcatcctacacctggagctgctggtggccgtgggccccgatgtcttccaggctcaccaggaggacacagagcgctatgtgctcaccaacctcaacatcggggcagaactgcttcgggacccgtccctgggggctcagtttcgggtgcacctggtgaagatggtcattctgacagagcctgagggtgctccaaatatcacagccaacctcacctcgtccctgctgagcgtctgtgggtggagccagaccatcaaccctgaggacgacacggatcctggccatgctgacctggtcctctatatcactaggtttgacctggagttgcctgatggtaaccggcaggtgcggggcgtcacccagctgggcggtgcctgctccccaacctggagctgcctcattaccgaggacactggcttcgacctgggagtcaccattgcccatgagattgggcacagcttcggcctggagcacgacggcgcgcccggcagcggctgcggccccagcggacacgtgatggcttcggacggcgccgcgccccgcgccggcctcgcctggtccccctgcagccgccggcagctgctgagcctgctcagcgccaacgagcagtgccgcgtggccttcggccccaaggctgtcgcctgcaccttcgccagggagcacctggatatgtgccaggccctctcctgccacacagacccgctggaccaaagcagctgcagccgcctcctcgttcctctcctggatgggacagaatgtggcgtggagaagtggtgctccaagggtcgctgccgctccctggtggagctgacccccatagcagcagtgcatgggcgctggtctagctggggtccccgaagtccttgctcccgctcctgcggaggaggtgtggtcaccaggaggcggcagtgcaacaaccccagacctgcctttggggggcgtgcatgtgttggtgctgacctccaggccgagatgtgcaacactcaggcctgcgagaagacccagctggagttcatgtcgcaacagtgcgccaggaccgacggccagccgctgcgctcctcccctggcggcgcctccttctaccactggggtgctgctgtaccacacagccaaggggatgctctgtgcagacacatgtgccgggccattggcgagagcttcatcatgaagcgtggagacagcttcctcgatgggacccggtgtatgccaagtggcccccgggaggacgggaccctgagcctgtgtgtgtcgggcagctgcaggacatttggctgtgatggtaggatggactcccagcaggtatgggacaggtgccaggtgtgtggtggggacaacagcacgtgcagcccacggaagggctctttcacagctggcagagcgagagaatatgtcacgtttctgacagttacccccaacctgaccagtgtctacattgccaaccacaggcctctcttcacacacttggcggtgaggatcggagggcgctatgtcgtggctgggaagatgagcatctcccctaacaccacctacccctccctcctggaggatggtcgtgtcgagtacagagtggccctcaccgaggaccggctgccccgcctggaggagatccgcatctggggacccctccaggaagatgctgacatccaggtttacaggcggtatggcgaggagtatggcaacctcacccgcccagacatcaccttcacctacttccagcctaagccacggcaggcctgggtgtgggccgctgtgcgtgggccctgctcggtgagctgtggggcagggctgcgctgggtaaactacagctgcctggaccaggccaggaaggagttggtggagactgtccagtgccaagggagccagcagccaccagcgtggccagaggcctgcgtgctcgaaccctgccctccctactgggcggtgggagacttcggcccatgcagcgcctcctgtgggggtggcctgcgggagcggccagtgcgctgcgtggaggcccagggcagcctcctgaagacattgcccccagcccggtgcagagcaggggcccagcagccagctgtggcgctggaaacctgcaacccccagccctgccctgccaggtgggaggtgtcagagcccagctcatgcacatcagctggtggagcaggcctggccttggagaacgagacctgtgtgccaggggcagatggcctggaggctccagtgactgaggggcctggctccgtagatgagaagctgcctgcccctgagccctgtgtcgggatgtcatgtcctccaggctggggccatctggatgccacctctgcaggggagaaggctccctccccatggggcagcatcaggacgggggctcaagctgcacacgtgtggacccctgcggcagggtcgtgctccgtctcctgcgggcgaggtctgatggagctgcgtttcctgtgcatggactctgccctcagggtgcctgtccaggaagagctgtgtggcctggcaagcaagcctgggagccggcgggaggtctgccaggctgtcccgtgccctgctcggtggcagtacaagctggcggcctgcagcgtgagctgtgggagaggggtcgtgcggaggatcctgtattgtgcccgggcccatggggaggacgatggtgaggagatcctgttggacacccagtgccaggggctgcctcgcccggaaccccaggaggcctgcagcctggagccctgcccacctaggtggaaagtcatgtcccttggcccatgttcggccagctgtggccttggcactgctagacgctcggtggcctgtgtgcagctcgaccaaggccaggacgtggaggtggacgaggcggcctgtgcggcgctggtgcggcccgaggccagtgtcccctgtctcattgccgactgcacctaccgctggcatgttggcacctggatggagtgctctgtttcctgtggggatggcatccagcgccggcgtgacacctgcctcggaccccaggcccaggcgcctgtgccagctgatttctgccagcacttgcccaagccggtgactgtgcgtggctgctgggctgggccctgtgtgggacagggtgcctgtggcaggcagcaccttgagccaacaggaaccattgacatgcgaggcccagggcaggcagactgtgcagtggccattgggcggcccctcggggaggtggtgaccctccgcgtccttgagagttctctcaactgcagtgcgggggacatgttgctgctttggggccggctcacctggaggaagatgtgcaggaagctgttggacatgactttcagctccaagaccaacacgctggtggtgaggcagcgctgcgggcggccaggaggtggggtgctgctgcggtatgggagccagcttgctcctgaaaccttctacagagaatgtgacatgcagctctttgggccctggggtgaaatcgtgagcccctcgctgagtccagccacgagtaatgcagggggctgccggctcttcattaatgtggctccgcacgcacggattgccatccatgccctggccaccaacatgggcgctgggaccgagggagccaatgccagctacatcttgatccgggacacccacagcttgaggaccacagcgttccatgggcagcaggtgctctactgggagtcagagagcagccaggctgagatggagttcagcgagggcttcctgaaggctcaggccagcctgcggggccagtactggaccctccaatcatgggtaccggagatgcaggaccctcagtcctggaagggaaaggaaggaacctgagggtcattgaacatttgttccgtgtctggccagccctggagggttgacccctggtctcagtgctttccaattcgaactttttccaatcttaggtatctactttagagtcttctccaatgtccaaaaggctagggggttggaggtggggactctggaaaagcagcccccatttcctcgggtaccaataaataaaacatgcaggctga

SEQ ID NO: 104701 - DNA, 1155 bp, Homo sapiens
  Payload ID: 556
  Gene Symbol: ADAMTS13
  Gene Name: ADAM metallopeptidase with thrombospondin type 1 motif 13
  ENST ID: ENST00000630700
  CDS Start-End: 121-1155
acactgcctaatcgtcccgcccagtagtgagcaggcctgtcccattccatactgaccagattcccagtcaccaaggccccctctcactccgctccactcctcgggctggctctcctgaggatgcaccagcgtcacccccgggcaagatgccctcccctctgtgtggccggaatccttgcctgtggctttctcctgggctgctggggaccctcccatttccagcagagttgtcttcaggctttggagccacaggccgtgtcttcttacttgagccctggtgctcccttaaaaggccgccctccttcccctggcttccagaggcagaggcagaggcagaggcgggctgcaggcggcatcctacacctggagctgctggtggccgtgggccccgatgtcttccaggctcaccaggaggacacagagcgctatgtgctcaccaacctcaacatcggggcagaactgcttcgggacccgtccctgggggctcagtttcgggtgcacctggtgaagatggtcattctgacagagcctgagggtgctccaaatatcacagccaacctcacctcgtccctgctgagcgtctgtgggtggagccagaccatcaaccctgaggacgacacggatcctggccatgctgacctggtcctctatatcactaggtttgacctggagttgcctgatggtaaccggcaggtgcggggcgtcacccagctgggcggtgcctgctccccaacctggagctgcctcattaccgaggacactggcttcgacctgggagtcaccattgcccatgagattgggcacagcttcggcctggagcacgacggcgcgcccggcagcggctgcggccccagcggacacgtgatggcttcggacggcgccgcgccccgcgccggcctcgcctggtccccctgcagccgccggcagctgctgagcctgctcagacccgtccctccgtcgccgctccctctgctggccacccacctctgcgccggcaggagccttagtcttggtcccagccaagagccggctcctggtggggggcgcgggccgagaactcctgttcccactcacaaaaggccacgcttccaaacgcttccatcctcgtgcccactcctccgtcccgcctcctcccggtgtacaccccgggactga

SEQ ID NO: 104702 - DNA, 4934 bp, Homo sapiens
  Payload ID: 556
  Gene Symbol: ADAMTS13
  Gene Name: ADAM metallopeptidase with thrombospondin type 1 motif 13
  ENST ID: ENST00000626597
  CDS Start-End: 445-4728
aaccacgatgtctttggcacagcctctcatctgtcagatgggagcggggaccccggagagggagtcagccgaggtcctggcattccttgtgaacccccgtctgtgggtttctggtccagtgtcccttctccagattagatggcttaggcctcctctaagggggtgggcgtgcacatccggagagctgtctggtgtgcaggactgggctgcaggttaccctgaactgcaaccatcttagagcaaggcccagcttgcagcaggaggagctgcaggccgcccaccctagccacggcccctgccctggcaggaagcttccaagagtaaacactgcctaatcgtcccgcccagtagtgagcaggcctgtcccattccatactgaccagattcccagtcaccaaggccccctctcactccgctccactcctcgggctggctctcctgaggatgcaccagcgtcacccccgggcaagatgccctcccctctgtgtggccggaatccttgcctgtggctttctcctgggctgctggggaccctcccatttccagcagagttgtcttcaggctttggagccacaggccgtgtcttcttacttgagccctggtgctcccttaaaaggccgccctccttcccctggcttccagaggcagaggcagaggcagaggcgggctgcaggcggcatcctacacctggagctgctggtggccgtgggccccgatgtcttccaggctcaccaggaggacacagagcgctatgtgctcaccaacctcaacatcggggcagaactgcttcgggacccgtccctgggggctcagtttcgggtgcacctggtgaagatggtcattctgacagagcctgagggtgctccaaatatcacagccaacctcacctcgtccctgctgagcgtctgtgggtggagccagaccatcaaccctgaggacgacacggatcctggccatgctgacctggtcctctatatcactaggtttgacctggagttgcctgatggtaaccggcaggtgcggggcgtcacccagctgggcggtgcctgctccccaacctggagctgcctcattaccgaggacactggcttcgacctgggagtcaccattgcccatgagattgggcacagcttcggcctggagcacgacggcgcgcccggcagcggctgcggccccagcggacacgtgatggcttcggacggcgccgcgccccgcgccggcctcgcctggtccccctgcagccgccggcagctgctgagcctgctcagcgcaggacgggcgcgctgcgtgtgggacccgccgcggcctcaacccgggtccgcggggcacccgccggatgcgcagcctggcctctactacagcgccaacgagcagtgccgcgtggccttcggccccaaggctgtcgcctgcaccttcgccagggagcacctggatatgtgccaggccctctcctgccacacagacccgctggaccaaagcagctgcagccgcctcctcgttcctctcctggatgggacagaatgtggcgtggagaagtggtgctccaagggtcgctgccgctccctggtggagctgacccccatagcagcagtgcatgggcgctggtctagctggggtccccgaagtccttgctcccgctcctgcggaggaggtgtggtcaccaggaggcggcagtgcaacaaccccagacctgcctttggggggcgtgcatgtgttggtgctgacctccaggccgagatgtgcaacactcaggcctgcgagaagacccagctggagttcatgtcgcaacagtgcgccaggaccgacggccagccgctgcgctcctcccctggcggcgcctccttctaccactggggtgctgctgtaccacacagccaaggggatgctctgtgcagacacatgtgccgggccattggcgagagcttcatcatgaagcgtggagacagcttcctcgatgggacccggtgtatgccaagtggcccccgggaggacgggaccctgagcctgtgtgtgtcgggcagctgcaggacatttggctgtgatggtaggatggactcccagcaggtatgggacaggtgccaggtgtgtggtggggacaacagcacgtgcagcccacggaagggctctttcacagctggcagagcgagagaatatgtcacgtttctgacagttacccccaacctgaccagtgtctacattgccaaccacaggcctctcttcacacacttggcggtgaggatcggagggcgctatgtcgtggctgggaagatgagcatctcccctaacaccacctacccctccctcctggaggatggtcgtgtcgagtacagagtggccctcaccgaggaccggctgccccgcctggaggagatccgcatctggggacccctccaggaagatgctgacatccaggtttacaggcggtatggcgaggagtatggcaacctcacccgcccagacatcaccttcacctacttccagcctaagccacggcaggcctgggtgtgggccgctgtgcgtgggccctgctcggtgagctgtggggcagggctgcgctgggtaaactacagctgcctggaccaggccaggaaggagttggtggagactgtccagtgccaagggagccagcagccaccagcgtggccagaggcctgcgtgctcgaaccctgccctccctactgggcggtgggagacttcggcccatgcagcgcctcctgtgggggtggcctgcgggagcggccagtgcgctgcgtggaggcccagggcagcctcctgaagacattgcccccagcccggtgcagagcaggggcccagcagccagctgtggcgctggaaacctgcaacccccagccctgccctgccaggtgggaggtgtcagagcccagctcatgcacatcagctggtggagcaggcctggccttggagaacgagacctgtgtgccaggggcagatggcctggaggctccagtgactgaggggcctggctccgtagatgagaagctgcctgcccctgagccctgtgtcgggatgtcatgtcctccaggctggggccatctggatgccacctctgcaggggagaaggctccctccccatggggcagcatcaggacgggggctcaagctgcacacgtgtggacccctgcggcagggtcgtgctccgtctcctgcgggcgaggtctgatggagctgcgtttcctgtgcatggactctgccctcagggtgcctgtccaggaagagctgtgtggcctggcaagcaagcctgggagccggcgggaggtctgccaggctgtcccgtgccctgctcggtggcagtacaagctggcggcctgcagcgtgagctgtgggagaggggtcgtgcggaggatcctgtattgtgcccgggcccatggggaggacgatggtgaggagatcctgttggacacccagtgccaggggctgcctcgcccggaaccccaggaggcctgcagcctggagccctgcccacctaggtggaaagtcatgtcccttggcccatgttcggccagctgtggccttggcactgctagacgctcggtggcctgtgtgcagctcgaccaaggccaggacgtggaggtggacgaggcggcctgtgcggcgctggtgcggcccgaggccagtgtcccctgtctcattgccgactgcacctaccgctggcatgttggcacctggatggagtgctctgtttcctgtggggatggcatccagcgccggcgtgacacctgcctcggaccccaggcccaggcgcctgtgccagctgatttctgccagcacttgcccaagccggtgactgtgcgtggctgctgggctgggccctgtgtgggacagggtacgcccagcctggtgccccacgaagaagccgctgctccaggacggaccacagccacccctgctggtgcctccctggagtggtcccaggcccggggcctgctcttctccccggctccccagcctcggcggctcctgcccgggccccaggaaaactcagtgcagtccagtgcctgtggcaggcagcaccttgagccaacaggaaccattgacatgcgaggcccagggcaggcagactgtgcagtggccattgggcggcccctcggggaggtggtgaccctccgcgtccttgagagttctctcaactgcagtgcgggggacatgttgctgctttggggccggctcacctggaggaagatgtgcaggaagctgttggacatgactttcagctccaagaccaacacgctggtggtgaggcagcgctgcgggcggccaggaggtggggtgctgctgcggtatgggagccagcttgctcctgaaaccttctacagagaatgtgacatgcagctctttgggccctggggtgaaatcgtgagcccctcgctgagtccagccacgagtaatgcagggggctgccggctcttcattaatgtggctccgcacgcacggattgccatccatgccctggccaccaacatgggcgctgggaccgagggagccaatgccagctacatcttgatccgggacacccacagcttgaggaccacagcgttccatgggcagcaggtgctctactgggagtcagagagcagccaggctgagatggagttcagcgagggcttcctgaaggctcaggccagcctgcggggccagtactggaccctccaatcatgggtaccggagatgcaggaccctcagtcctggaagggaaaggaaggaacctgagggtcattgaacatttgttccgtgtctggccagccctggagggttgacccctggtctcagtgctttccaattcgaactttttccaatcttaggtatctactttagagtcttctccaatgtccaaaaggctagggggttggaggtggggactctggaaaagcagcccccatttcctcgggtaccaataaataaaacatgcaggctga

SEQ ID NO: 104703 - DNA, 2230 bp, Homo sapiens
  Payload ID: 556
  Gene Symbol: ADAMTS13
  Gene Name: ADAM metallopeptidase with thrombospondin type 1 motif 13
  ENST ID: ENST00000626661
  CDS Start-End: 120-950
cactgcctaatcgtcccgcccagtagtgagcaggcctgtcccattccatactgaccagattcccagtcaccaaggccccctctcactccgctccactcctcgggctggctctcctgaggatgcaccagcgtcacccccgggcaagatgccctcccctctgtgtggccggaatccttgcctgtggctttctcctgggctgctggggaccctcccatttccagcagagttgtcttcaggctttggagccacaggccgtgtcttcttacttgagccctggtgctcccttaaaaggccgccctccttcccctggcttccagaggcagaggcagaggcagaggcgggctgcaggcggcatcctacacctggagctgctggtggccgtgggccccgatgtcttccaggctcaccaggaggacacagagcgctatgtgctcaccaacctcaacatcggggcagaactgcttcgggacccgtccctgggggctcagtttcgggtgcacctggtgaagatggtcattctgacagagcctgagggtgctccaaatatcacagccaacctcacctcgtccctgctgagcgtctgtgggtggagccagaccatcaaccctgaggacgacacggatcctggccatgctgacctggtcctctatatcactaggtttgacctggagttgcctgatggtaaccggcaggtgcggggcgtcacccagctgggcggtgcctgctccccaacctggagctgcctcattaccgaggacactggcttcgacctgggagtcaccattgcccatgagattgggcacaggatatgtgccaggccctctcctgccacacagacccgctggaccaaagcagctgcagccgcctcctcgttcctctcctggatgggacagaatgtggcgtggagaagtggtgctccaagggtcgctgccgctccctggtggagctgacccccatagcagcagtgcatgggcgctggtctagctggggtccccgaagtccttgctcccgctcctgcggaggaggtgtggtcaccaggaggcggcagtgcaacaaccccaggcctgcgagaagacccagctggagttcatgtcgcaacagtgcgccaggaccgacggccagccgctgcgctcctcccctggcggcgcctccttctaccactggggtgctgctgtaccacacagccaaggggatgctctgtgcagacacatgtgccgggccattggcgagagcttcatcatgaagcgtggagacagcttcctcgatgggacccggtgtatgccaagtggcccccgggaggacgggaccctgagcctgtgtgtgtcgggcagctgcaggacatttggctgtgatggtaggatggactcccagcaggtatgggacaggtgccaggtgtgtggtggggacaacagcacgtgcagcccacggaagggctctttcacagctggcagagcgagagaatatgtcacgtttctgacagttacccccaacctgaccagtgtctacattgccaaccacaggcctctcttcacacacttggcggtgaggatcggagggcgctatgtcgtggctgggaagatgagcatctcccctaacaccacctacccctccctcctggaggatggtcgtgtcgagtacagagtggccctcaccgaggaccggctgccccgcctggaggagatccgcatctggggacccctccaggaagatgctgacatccagctgggcggtgggagacttcggcccatgcagcgcctcctgtgggggtggcctgcgggagcggccagtgcgctgcgtggaggcccagggcagcctcctgaagacattgcccccagcccggtgcagagcaggggcccagcagccagctgtggcgctggaaacctgcaacccccagccctgccctgccaggtgggaggtgtcagagcccagctcatgcacatcagctggtggagcaggcctggccttggagaacgagacctgtgtgccaggggcagatggcctggaggctccagtgactgaggggcctggctccgtagatgagaagctgcctgcccctgagccctgtgtcgggatgtcatgtcctccaggctggggccatctggatgccacctctgcaggggagaaggctccctccccatggggcagcatcaggacgggggctcaagctgcacacgtgtggacccctgcggcagggtcgtgctccgtctcctgcgggcgaggtctgatggag

SEQ ID NO: 104704 - DNA, 4442 bp, Homo sapiens
  Payload ID: 556
  Gene Symbol: ADAMTS13
  Gene Name: ADAM metallopeptidase with thrombospondin type 1 motif 13
  ENST ID: ENST00000626744
  CDS Start-End: 121-4236
acactgcctaatcgtcccgcccagtagtgagcaggcctgtcccattccatactgaccagattcccagtcaccaaggccccctctcactccgctccactcctcgggctggctctcctgaggatgcaccagcgtcacccccgggcaagatgccctcccctctgtgtggccggaatccttgcctgtggctttctcctgggctgctggggaccctcccatttccagcagagttgtcttcaggctttggagccacaggccgtgtcttcttacttgagccctggtgctcccttaaaaggccgccctccttcccctggcttccagaggcagaggcagaggcagaggcgggctgcaggcggcatcctacacctggagctgctggtggccgtgggccccgatgtcttccaggctcaccaggaggacacagagcgctatgtgctcaccaacctcaacatcggggcagaactgcttcgggacccgtccctgggggctcagtttcgggtgcacctggtgaagatggtcattctgacagagcctgagggtgctccaaatatcacagccaacctcacctcgtccctgctgagcgtctgtgggtggagccagaccatcaaccctgaggacgacacggatcctggccatgctgacctggtcctctatatcactaggtttgacctggagttgcctgatggtaaccggcaggtgcggggcgtcacccagctgggcggtgcctgctccccaacctggagctgcctcattaccgaggacactggcttcgacctgggagtcaccattgcccatgagattgggcacagcttcggcctggagcacgacggcgcgcccggcagcggctgcggccccagcggacacgtgatggcttcggacggcgccgcgccccgcgccggcctcgcctggtccccctgcagccgccggcagctgctgagcctgctcagcgcaggacgggcgcgctgcgtgtgggacccgccgcggcctcaacccgggtccgcggggcacccgccggatgcgcagcctggcctctactacagcgccaacgagcagtgccgcgtggccttcggccccaaggctgtcgcctgcaccttcgccagggagcacctggatatgtgccaggccctctcctgccacacagacccgctggaccaaagcagctgcagccgcctcctcgttcctctcctggatgggacagaatgtggcgtggagaagtggtgctccaagggtcgctgccgctccctggtggagctgacccccatagcagcagtgcatgggcgctggtctagctggggtccccgaagtccttgctcccgctcctgcggaggaggtgtggtcaccaggaggcggcagtgcaacaaccccagacctgcctttggggggcgtgcatgtgttggtgctgacctccaggccgagatgtgcaacactcaggcctgcgagaagacccagctggagttcatgtcgcaacagtgcgccaggaccgacggccagccgctgcgctcctcccctggcggcgcctccttctaccactggggtgctgctgtaccacacagccaaggggatgctctgtgcagacacatgtgccgggccattggcgagagcttcatcatgaagcgtggagacagcttcctcgatgggacccggtgtatgccaagtggcccccgggaggacgggaccctgagcctgtgtgtgtcgggcagctgcaggacatttggctgtgatggtaggatggactcccagcaggtatgggacaggtgccaggtgtgtggtggggacaacagcacgtgcagcccacggaagggctctttcacagctggcagagcgagagaatatgtcacgtttctgacagttacccccaacctgaccagtgtctacattgccaaccacaggcctctcttcacacacttggcggtgaggatcggagggcgctatgtcgtggctgggaagatgagcatctcccctaacaccacctacccctccctcctggaggatggtcgtgtcgagtacagagtggccctcaccgaggaccggctgccccgcctggaggagatccgcatctggggacccctccaggaagatgctgacatccaggtttacaggcggtatggcgaggagtatggcaacctcacccgcccagacatcaccttcacctacttccagcctaagccacggcaggcctgggtgtgggccgctgtgcgtgggccctgctcggtgagctgtggggcagggctgcgctgggtaaactacagctgcctggaccaggccaggaaggagttggtggagactgtccagtgccaagggagccagcagccaccagcgtggccagaggcctgcgtgctcgaaccctgccctccctactgggcggtgggagacttcggcccatgcagcgcctcctgtgggggtggcctgcgggagcggccagtgcgctgcgtggaggcccagggcagcctcctgaagacattgcccccagcccggtgcagagcaggggcccagcagccagctgtggcgctggaaacctgcaacccccagccctgccctgccaggtgggaggtgtcagagcccagctcatgcacatcagctggtggagcaggcctggccttggagaacgagacctgtgtgccaggggcagatggcctggaggctccagtgactgaggggcctggctccgtagatgagaagctgcctgcccctgagccctgtgtcgggatgtcatgtcctccaggctggggccatctggatgccacctctgcaggggagaaggctccctccccatggggcagcatcaggacgggggctcaagctgcacacgtgtggacccctgcggcagggtcgtgctccgtctcctgcgggcgaggtctgatggagctgcgtttcctgtgcatggactctgccctcagggtgcctgtccaggaagagctgtgtggcctggcaagcaagcctgggagccggcgggaggtctgccaggctgtcccgtgccctgctcggtggcagtacaagctggcggcctgcagcgtgagctgtgggagaggggtcgtgcggaggatcctgtattgtgcccgggcccatggggaggacgatggtgaggagatcctgttggacacccagtgccaggggctgcctcgcccggaaccccaggaggcctgcagcctggagccctgcccacctaggtggaaagtcatgtcccttggcccatgttcggccagctgtggccttggcactgctagacgctcggtggcctgtgtgcagctcgaccaaggccaggacgtggaggtggacgaggcggcctgtgcggcgctggtgcggcccgaggccagtgtcccctgtctcattgccgactgcacctaccgctggcatgttggcacctggatggagtgctctgtttcctgtggggatggcatccagcgccggcgtgacacctgcctcggaccccaggcccaggcgcctgtgccagctgatttctgccagcacttgcccaagccggtgactgtgcgtggctgctgggctgggccctgtgtgggacagggtgcctgtggcaggcagcaccttgagccaacaggaaccattgacatgcgaggcccagggcaggcagactgtgcagtggccattgggcggcccctcggggaggtggtgaccctccgcgtccttgagagttctctcaactgcagtgcgggggacatgttgctgctttggggccggctcacctggaggaagatgtgcaggaagctgttggacatgactttcagctccaagaccaacacgctggtggtgaggcagcgctgcgggcggccaggaggtggggtgctgctgcggtatgggagccagcttgctcctgaaaccttctacagagaatgtgacatgcagctctttgggccctggggtgaaatcgtgagcccctcgctgagtccagccacgagtaatgcagggggctgccggctcttcattaatgtggctccgcacgcacggattgccatccatgccctggccaccaacatgggcgctgggaccgagggagccaatgccagctacatcttgatccgggacacccacagcttgaggaccacagcgttccatgggcagcaggtgctctactgggagtcagagagcagccaggctgagatggagttcagcgagggcttcctgaaggctcaggccagcctgcggggccagtactggaccctccaatcatgggtaccggagatgcaggaccctcagtcctggaagggaaaggaaggaacctgagggtcattgaacatttgttccgtgtctggccagccctggagggttgacccctggtctcagtgctttccaattcgaactttttccaatcttaggtatctactttagagtcttctccaatgtccaaaaggctagggggttggaggtggggactctggaaaagcagcccccatttcctcgggtaccaataaataaaacatgcaggctga

SEQ ID NO: 104705 - DNA, 4330 bp, Homo sapiens
  Payload ID: 556
  Gene Symbol: ADAMTS13
  Gene Name: ADAM metallopeptidase with thrombospondin type 1 motif 13
  ENST ID: ENST00000630344
  CDS Start-End: 1189-2523
aaccacgatgtctttggcacagcctctcatctgtcagatgggagcggggaccccggagagggagtcagccgaggtcctggcattccttgtgaacccccgtctgtgggtttctggtccagtgtcccttctccagattagatggcttaggcctcctctaagggggtgggcgtgcacatccggagagctgtctggtgtgcaggactgggctgcaggttaccctgaactgcaaccatcttagagcaaggcccagcttgcagcaggaggagctgcaggccgcccaccctagccacggcccctgccctggcaggaagcttccaagagtaaacactgcctaatcgtcccgcccagtagtgagcaggcctgtcccattccatactgaccagattcccagtcaccaaggccccctctcactccgctccactcctcgggctggctctcctgaggatgcaccagcgtcacccccgggcaagatgccctcccctctgtgtggccggaatccttgcctgtggctttctcctgggctgctggggaccctcccatttccagcagagttgtcttcaggctttggagccacaggccgtgtcttcttacttgagccctggtgctcccttaaaaggccgccctccttcccctggcttccagaggcagaggcagaggcagaggcgggctgcaggcggcatcctacacctggagctgctggtggccgtgggccccgatgtcttccaggctcaccaggaggacacagagcgctatgtgctcaccaacctcaacatcggggcagaactgcttcgggacccgtccctgggggctcagtttcgggtgcacctggtgaagatggtcattctgacagagcctgagggtgctccaaatatcacagccaacctcacctcgtccctgctgagcgtctgtgggtggagccagaccatcaaccctgaggacgacacggatcctggccatgctgacctggtcctctatatcactaggtttgacctggagttgcctgatggtaaccggcaggtgcggggcgtcacccagctgggcggtgcctgctccccaacctggagctgcctcattaccgaggacactggcttcgacctgggagtcaccattgcccatgagattgggcacagcttcggcctggagcacgacggcgcgcccggcagcggctgcggccccagcggacacgtgatggcttcggacggcgccgcgccccgcgccggcctcgcctggtccccctgcagccgccggcagctgctgagcctgctcagcgcaggacgggcgcgctgcgtgtgggacccgccgcggcctcaacccgggtccgcggggcacccgccggatgcgcagcctggcctctactacagcgccaacgagcagtgccgcgtggccttcggccccaaggctgtcgcctgcaccttcgccagggagcacctggatatgtgccaggccctctcctgccacacagacccgctggaccaaagcagctgcagccgcctcctcgttcctctcctggatgggacagaatgtggcgtggagaagtggtgctccaagggtcgctgccgctccctggtggagctgacccccatagcagcagtgcatgggcgctggtctagctggggtccccgaagtccttgctcccgctcctgcggaggaggtgtggtcaccaggaggcggcagtgcaacaaccccagacctgcctttggggggcgtgcatgtgttggtgctgacctccaggccgagatgtgcaacactcaggcctgcgagaagacccagctggagttcatgtcgcaacagtgcgccaggaccgacggccagccgctgcgctcctcccctggcggcgcctccttctaccactggggtgctgctgtaccacacagccaaggggatgctctgtgcagacacatgtgccgggccattggcgagagcttcatcatgaagcgtggagacagcttcctcgatgggacccggtgtatgccaagtggcccccgggaggacgggaccctgagcctgtgtgtgtcgggcagctgcaggacatttggctgtgatggtaggatggactcccagcaggtatgggacaggtgccaggtgtgtggtggggacaacagcacgtgcagcccacggaagggctctttcacagctggcagagcgagagaatatgtcacgtttctgacagttacccccaacctgaccagtgtctacattgccaaccacaggcctctcttcacacacttggcggtgaggatcggagggcgctatgtcgtggctgggaagatgagcatctcccctaacaccacctacccctccctcctggaggatggtcgtgtcgagtacagagtggccctcaccgaggaccggctgccccgcctggaggagatccgcatctggggacccctccaggaagatgctgacatccaggtgggaggtgtcagagcccagctcatgcacatcagctggtggagcaggcctggccttggagaacgagacctgtgtgccaggggcagatggcctggaggctccagtgactgaggggcctggctccgtagatgagaagctgcctgcccctgagccctgtgtcgggatgtcatgtcctccaggctggggccatctggatgccacctctgcaggggagaaggctccctccccatggggcagcatcaggacgggggctcaagctgcacacgtgtggacccctgcggcagggtcgtgctccgtctcctgcgggcgaggtctgatggagctgcgtttcctgtgcatggactctgccctcagggtgcctgtccaggaagagctgtgtggcctggcaagcaagcctgggagccggcgggaggtctgccaggctgtcccgtgccctgctcggtggcagtacaagctggcggcctgcagcgtgagctgtgggagaggggtcgtgcggaggatcctgtattgtgcccgggcccatggggaggacgatggtgaggagatcctgttggacacccagtgccaggggctgcctcgcccggaaccccaggaggcctgcagcctggagccctgcccacctaggtggaaagtcatgtcccttggcccatgttcggccagctgtggccttggcactgctagacgctcggtggcctgtgtgcagctcgaccaaggccaggacgtggaggtggacgaggcggcctgtgcggcgctggtgcggcccgaggccagtgtcccctgtctcattgccgactgcacctaccgctggcatgttggcacctggatggagtgctctgtttcctgtggggatggcatccagcgccggcgtgacacctgcctcggaccccaggcccaggcgcctgtgccagctgatttctgccagcacttgcccaagccggtgactgtgcgtggctgctgggctgggccctgtgtgggacagggtgcctgtggcaggcagcaccttgagccaacaggaaccattgacatgcgaggcccagggcaggcagactgtgcagtggccattgggcggcccctcggggaggtggtgaccctccgcgtccttgagagttctctcaactgcagtgcgggggacatgttgctgctttggggccggctcacctggaggaagatgtgcaggaagctgttggacatgactttcagctccaagaccaacacgctggtggtgaggcagcgctgcgggcggccaggaggtggggtgctgctgcggtatgggagccagcttgctcctgaaaccttctacagagaatgtgacatgcagctctttgggccctggggtgaaatcgtgagcccctcgctgagtccagccacgagtaatgcagggggctgccggctcttcattaatgtggctccgcacgcacggattgccatccatgccctggccaccaacatgggcgctgggaccgagggagccaatgccagctacatcttgatccgggacacccacagcttgaggaccacagcgttccatgggcagcaggtgctctactgggagtcagagagcagccaggctgagatggagttcagcgagggcttcctgaaggctcaggccagcctgcggggccagtactggaccctccaatcatgggtaccggagatgcaggaccctcagtcctggaagggaaaggaaggaacctgagggtcattgaacatttgttccgtgtctggccagccctggagggttgacccctggtctcagtgctttccaattcgaactttttccaatcttaggtatctactttagagtcttctccaatgtccaaaaggctagggggttggaggtggggactctggaaaagcagcccccatttcctcgggtaccaataaataaaacatgcaggctgaccggcgtttttttctt

SEQ ID NO: 104706 - DNA, 1074 bp, Homo sapiens
  Payload ID: 556
  Gene Symbol: ADAMTS13
  Gene Name: ADAM metallopeptidase with thrombospondin type 1 motif 13
  ENST ID: ENST00000629604
  CDS Start-End: 197-868
ggtgggcaaaggcatcttcctctgggaaggactggcacaagcacttggtccctgggttgtgtgcctgggaggccgggatcagggctggccctctttctccctggcaaagcaaaacctcccttttactactatcaaggggaagtaacttgaaggtgcctgtggcaggcagcaccttgagccaacaggaaccattgacatgcgaggcccagggcaggcagactgtgcagtggccattgggcggcccctcggggaggtggtgaccctccgcgtccttgagagttctctcaactgcagtgcgggggacatgttgctgctttggggccggctcacctggaggaagatgtgcaggaagctgttggacatgactttcagctccaagaccaacacgctggtggtgaggcagcgctgcgggcggccaggaggtggggtgctgctgcggtatgggagccagcttgctcctgaaaccttctacagagaatgtgacatgcagctctttgggccctggggtgaaatcgtgagcccctcgctgagtccagccacgagtaatgcagggggctgccggctcttcattaatgtggctccgcacgcacggattgccatccatgccctggccaccaacatgggcgctgggaccgagggagccaatgccagctacatcttgatccgggacacccacagcttgaggaccacagcgttccatgggcagcaggtgctctactgggagtcagagagcagccaggctgagatggagttcagcgagggcttcctgaaggctcaggccagcctgcggggccagtactggaccctccaatcatgggtaccggagatgcaggaccctcagtcctggaagggaaaggaaggaacctgagggtcattgaacatttgttccgtgtctggccagccctggagggttgacccctggtctcagtgctttccaattcgaactttttccaatcttaggtatctactttagagtcttctccaatgtccaaaaggctagggggttggaggtggggactctggaaaagcagcccccatttcctcgggtaccaataaataaaacatgcaggctga

SEQ ID NO: 104707 - DNA, 5191 bp, Homo sapiens
  Payload ID: 557
  Gene Symbol: ADAMTS1
  Gene Name: ADAM metallopeptidase with thrombospondin type 1 motif, 1
  Uniprot ID: Q9UHI8
  ENST ID: ENST00000284984
  CDS Start-End: 456-3359
gcactcgctggaaagcggctccgagccaggggctattgcaaagccagggtgcgctaccggacggagaggggagagccctgagcagagtgagcaacatcgcagccaaggcggaggccgaagaggggcgccaggcaccaatctccgcgttgcctcagccccggaggcgccccagagcgcttcttgtcccagcagagccactctgcctgcgcctgcctctcagtgtctccaactttgcgctggaagaaaaacttcccgcgcgccggcagaactgcagcgcctccttttagtgactccgggagcttcggctgtagccggctctgcgcgcccttccaacgaataatagaaattgttaattttaacaatccagagcaggccaacgaggctttgctctcccgacccgaactaaaggtccctcgctccgtgcgctgctacgagcggtgtctcctggggctccaatgcagcgagctgtgcccgaggggttcggaaggcgcaagctgggcagcgacatggggaacgcggagcgggctccggggtctcggagctttgggccagtacccacgctgctgctgctcgccgcggcgctactggccgtgtcggacgcactcgggcgcccctccgaggaggacgaggagctagtggtgccggagctggagcgcgccccgggacacgggaccacgcgcctccgcctgcacgcctttgaccagcagctggatctggagctgcggcccgacagcagctttttggcgcccggcttcacgctccagaacgtggggcgcaaatccgggtccgagacgccgcttccggaaaccgacctggcgcactgcttctactccggcaccgtgaatggcgatcccagctcggctgccgccctcagcctctgcgagggcgtgcgcggcgccttctacctgctgggggaggcgtatttcatccagccgctgcccgccgccagcgagcgcctcgccaccgccgccccaggggagaagccgccggcaccactacagttccacctcctgcggcggaatcggcagggcgacgtcggcggcacgtgcggggtcgtggacgacgagccccggccgactgggaaagcggagaccgaagacgaggacgaagggactgagggcgaggacgaaggggctcagtggtcgccgcaggacccggcactgcaaggcgtaggacagcccacaggaactggaagcataagaaagaagcgatttgtgtccagtcaccgctatgtggaaaccatgcttgtggcagaccagtcgatggcagaattccacggcagtggtctaaagcattaccttctcacgttgttttcggtggcagccagattgtacaaacaccccagcattcgtaattcagttagcctggtggtggtgaagatcttggtcatccacgatgaacagaaggggccggaagtgacctccaatgctgccctcactctgcggaacttttgcaactggcagaagcagcacaacccacccagtgaccgggatgcagagcactatgacacagcaattcttttcaccagacaggacttgtgtgggtcccagacatgtgatactcttgggatggctgatgttggaactgtgtgtgatccgagcagaagctgctccgtcatagaagatgatggtttacaagctgccttcaccacagcccatgaattaggccacgtgtttaacatgccacatgatgatgcaaagcagtgtgccagccttaatggtgtgaaccaggattcccacatgatggcgtcaatgctttccaacctggaccacagccagccttggtctccttgcagtgcctacatgattacatcatttctggataatggtcatggggaatgtttgatggacaagcctcagaatcccatacagctcccaggcgatctccctggcacctcgtacgatgccaaccggcagtgccagtttacatttggggaggactccaaacactgccccgatgcagccagcacatgtagcaccttgtggtgtaccggcacctctggtggggtgctggtgtgtcaaaccaaacacttcccgtgggcggatggcaccagctgtggagaagggaaatggtgtatcaacggcaagtgtgtgaacaaaaccgacagaaagcattttgatacgccttttcatggaagctggggaatgtgggggccttggggagactgttcgagaacgtgcggtggaggagtccagtacacgatgagggaatgtgacaacccagtcccaaagaatggagggaagtactgtgaaggcaaacgagtgcgctacagatcctgtaaccttgaggactgtccagacaataatggaaaaacctttagagaggaacaatgtgaagcacacaacgagttttcaaaagcttcctttgggagtgggcctgcggtggaatggattcccaagtacgctggcgtctcaccaaaggacaggtgcaagctcatctgccaagccaaaggcattggctacttcttcgttttgcagcccaaggttgtagatggtactccatgtagcccagattccacctctgtctgtgtgcaaggacagtgtgtaaaagctggttgtgatcgcatcatagactccaaaaagaagtttgataaatgtggtgtttgcgggggaaatggatctacttgtaaaaaaatatcaggatcagttactagtgcaaaacctggatatcatgatatcatcacaattccaactggagccaccaacatcgaagtgaaacagcggaaccagaggggatccaggaacaatggcagctttcttgccatcaaagctgctgatggcacatatattcttaatggtgactacactttgtccaccttagagcaagacattatgtacaaaggtgttgtcttgaggtacagcggctcctctgcggcattggaaagaattcgcagctttagccctctcaaagagcccttgaccatccaggttcttactgtgggcaatgcccttcgacctaaaattaaatacacctacttcgtaaagaagaagaaggaatctttcaatgctatccccactttttcagcatgggtcattgaagagtggggcgaatgttctaagtcatgtgaattgggttggcagagaagactggtagaatgccgagacattaatggacagcctgcttccgagtgtgcaaaggaagtgaagccagccagcaccagaccttgtgcagaccatccctgcccccagtggcagctgggggagtggtcatcatgttctaagacctgtgggaagggttacaaaaaaagaagcttgaagtgtctgtcccatgatggaggggtgttatctcatgagagctgtgatcctttaaagaaacctaaacatttcatagacttttgcacaatggcagaatgcagttaagtggtttaagtggtgttagctttgagggcaaggcaaagtgaggaagggctggtgcagggaaagcaagaaggctggagggatccagcgtatcttgccagtaaccagtgaggtgtatcagtaaggtgggattatgggggtagatagaaaaggagttgaatcatcagagtaaactgccagttgcaaatttgataggatagttagtgaggattattaacctctgagcagtgatatagcataataaagccccgggcattattattattatttcttttgttacatctattacaagtttagaaaaaacaaagcaattgtcaaaaaaagttagaactattacaacccctgtttcctggtacttatcaaatacttagtatcatgggggttgggaaatgaaaagtaggagaaaagtgagattttactaagacctgttttactttacctcactaacaatggggggagaaaggagtacaaataggatctttgaccagcactgtttatggctgctatggtttcagagaatgtttatacattatttctaccgagaattaaaacttcagattgttcaacatgagagaaaggctcagcaacgtgaaataacgcaaatggcttcctctttccttttttggaccatctcagtctttatttgtgtaattcattttgaggaaaaaacaactccatgtatttattcaagtgcattaaagtctacaatggaaaaaaagcagtgaagcattagatgctggtaaaagctagaggagacacaatgagcttagtacctccaacttcctttctttcctaccatgtaaccctgctttgggaatatggatgtaaagaagtaacttgtgtctcatgaaaatcagtacaatcacacaaggaggatgaaacgccggaacaaaaatgaggtgtgtagaacagggtcccacaggtttggggacattgagatcacttgtcttgtggtggggaggctgctgaggggtagcaggtccatctccagcagctggtccaacagtcgtatcctggtgaatgtctgttcagctcttctgtgagaatatgattttttccatatgtatatagtaaaatatgttactataaattacatgtactttataagtattggtttgggtgttccttccaagaaggactatagttagtaataaatgcctataataacatatttatttttatacatttatttctaatgaaaaaaacttttaaattatatcgcttttgtggaagtgcatataaaatagagtatttatacaatatatgttactagaaataaaagaacacttttggaatgtgtgtgtctgttttttgaagtgggaattcattcctaggaaggaaacctgaggcacaaatattgaatctgaagaccgaattattttcttaaattatttggcaataagattttgttctagaggaaggtgaagcaagacggctgaatagaagatttttttctaatgagatgtatttcttatatccttggtatacatgattgctaaaaagaaagaaatttatgatgtcatttgttactaatgtatctaataatatacatcagtggttggcaaacttcttttgtaaaaagccaaatggtaaatatttgcaactttgtcaatcctgtcaataactatcctgtcaataccatctatgtcacaactgctcaactgtgctgttgtagcacaaaactagccataaagaatgagtaagtgaatggacatggctgtgttctaaaaaaactacttgcaaaaacaaataatgggtcagatttgttctgcagattcagtttgccaaccctggtatataccataaattaaatggaaagagctttcagttctgga

SEQ ID NO: 104708 - DNA, 601 bp, Homo sapiens
  Payload ID: 557
  Gene Symbol: ADAMTS1
  Gene Name: ADAM metallopeptidase with thrombospondin type 1 motif, 1
  ENST ID: ENST00000451462
  CDS Start-End: 1-601
actgccggtccttcctgctacggccttctctctgtgcagtgcttattctccagttctttttgtttcatcactttggaactggaagcataagaaagaagcgatttgtgtccagtcaccgctatgtggaaaccatgcttgtggcagaccagtcgatggcagaattccacggcagtggtctaaagcattaccttctcacgttgttttcggtggcagccagattgtacaaacaccccagcattcgtaattcagttagcctggtggtggtgaagatcttggtcatccacgatgaacagaaggggccggaagtgacctccaatgctgccctcactctgcggaacttttgcaactggcagaagcagcacaacccacccagtgaccgggatgcagagcactatgacacagcaattcttttcaccagacaggacttgtgtgggtcccagacatgtgatactcttgggatggctgatgttggaactgtgtgtgatccgagcagaagctgctccgtcatagaagatgatggtttacaagctgccttcaccacagcccatgaattaggccacgtgtttaacatgccacatgatgatgcaaagcagtgtgccag

SEQ ID NO: 104709 - DNA, 598 bp, Homo sapiens
  Payload ID: 557
  Gene Symbol: ADAMTS1
  Gene Name: ADAM metallopeptidase with thrombospondin type 1 motif, 1
  ENST ID: ENST00000517777
  CDS Start-End: 86-598
ctcttgctccaagattttactacaattgggaactggaagcataagaaagaagcgatttgtgtccagtcaccgctatgtggaaaccatgcttgtggcagaccagtcgatggcagaattccacggcagtggtctaaagcattaccttctcacgttgttttcggtggcagccagattgtacaaacaccccagcattcgtaattcagttagcctggtggtggtgaagatcttggtcatccacgatgaacagaaggggccggaagtgacctccaatgctgccctcactctgcggaacttttgcaactggcagaagcagcacaacccacccagtgaccgggatgcagagcactatgacacagcaattcttttcaccagacaggacttgtgtgggtcccagacatgtgatactcttgggatggctgatgttggaactgtgtgtgatccgagcagaagctgctccgtcatagaagatgatggtttacaagctgccttcaccacagcccatgaattaggccacgtgtttaacatgccacatgatgatgcaaagcagtgtgccagccttaatggtgtgaaccaggattcccacatgatggcgtcaatg

SEQ ID NO: 104710 - DNA, 405 bp, Homo sapiens
  Payload ID: 557
  Gene Symbol: ADAMTS1
  Gene Name: ADAM metallopeptidase with thrombospondin type 1 motif, 1
  ENST ID: ENST00000517452
  CDS Start-End: 21-405
gtggagagggcagaggagcaatggtgacctgggaaggaactggaagcataagaaagaagcgatttgtgtccagtcaccgctatgtggaaaccatgcttgtggcagaccagtcgatggcagaattccacggcagtggtctaaagcattaccttctcacgttgttttcggtggcagccagattgtacaaacaccccagcattcgtaattcagttagcctggtggtggtgaagatcttggtcatccacgatgaacagaaggggccggaagtgacctccaatgctgccctcactctgcggaacttttgcaactggcagaagcagcacaacccacccagtgaccgggatgcagagcactatgacacagcaattcttttcaccagacaggacttgtgtgggtcccagacat

SEQ ID NO: 104711 - DNA, 4194 bp, Homo sapiens
  Payload ID: 558
  Gene Symbol: ADAMTS10
  Gene Name: ADAM metallopeptidase with thrombospondin type 1 motif, 10
  ENST ID: ENST00000270328
  CDS Start-End: 232-3543
gacccctccctgcccaggctccaaagaagaagaaaccaaggcccagagagggaggcccaggtgcagggagcaggcgagggaaggatccgtacaggggcccaacactactccaccaaccgaagcccccaaaaggagcccggtgatgctgcgaaggctgtgaacaggggaggcggcactgtgggggctgccggcagccggggctggggagagacatgtggacacgtggcctctatggctcccgcctgccagatcctccgctgggccctcgccctggggctgggcctcatgttcgaggtcacgcacgccttccggtctcaagatgagttcctgtccagtctggagagctatgagatcgccttccccacccgcgtggaccacaacggggcactgctggccttctcgccacctcctccccggaggcagcgccgcggcacgggggccacagccgagtcccgcctcttctacaaagtggcctcgcccagcacccacttcctgctgaacctgacccgcagctcccgtctactggcagggcacgtctccgtggagtactggacacgggagggcctggcctggcagagggcggcccggccccactgcctctacgctggtcacctgcagggccaggccagcagctcccatgtggccatcagcacctgtggaggcctgcacggcctgatcgtggcagacgaggaagagtacctgattgagcccctgcacggtgggcccaagggttctcggagcccggaggaaagtggaccacatgtggtgtacaagcgttcctctctgcgtcacccccacctggacacagcctgtggagtgagagatgagaaaccgtggaaagggcggccatggtggctgcggaccttgaagccaccgcctgccaggcccctggggaatgaaacagagcgtggccagccaggcctgaagcgatcggtcagccgagagcgctacgtggagaccctggtggtggctgacaagatgatggtggcctatcacgggcgccgggatgtggagcagtatgtcctggccatcatgaacattgttgccaaacttttccaggactcgagtctgggaagcaccgttaacatcctcgtaactcgcctcatcctgctcacggaggaccagcccactctggagatcacccaccatgccgggaagtccctggacagcttctgtaagtggcagaaatccatcgtgaaccacagcggccatggcaatgccattccagagaacggtgtggctaaccatgacacagcagtgctcatcacacgctatgacatctgcatctacaagaacaaaccctgcggcacactaggcctggccccggtgggcggaatgtgtgagcgcgagagaagctgcagcgtcaatgaggacattggcctggccacagcgttcaccattgcccacgagatcgggcacacattcggcatgaaccatgacggcgtgggaaacagctgtggggcccgtggtcaggacccagccaagctcatggctgcccacattaccatgaagaccaacccattcgtgtggtcatcctgcagccgtgactacatcaccagctttctagactcgggcctggggctctgcctgaacaaccggccccccagacaggactttgtgtacccgacagtggcaccgggccaagcctacgatgcagatgagcaatgccgctttcagcatggagtcaaatcgcgtcagtgtaaatacggggaggtctgcagcgagctgtggtgtctgagcaagagcaaccggtgcatcaccaacagcatcccggccgccgagggcacgctgtgccagacgcacaccatcgacaaggggtggtgctacaaacgggtctgtgtcccctttgggtcgcgcccagagggtgtggacggagcctgggggccgtggactccatggggcgactgcagccggacctgtggcggcggcgtgtcctcttctagccgtcactgcgacagccccaggccaaccatcgggggcaagtactgtctgggtgagagaaggcggcaccgctcctgcaacacggatgactgtccccctggctcccaggacttcagagaagtgcagtgttctgaatttgacagcatccctttccgtgggaaattctacaagtggaaaacgtaccggggagggggcgtgaaggcctgctcgctcacgtgcctagcggaaggcttcaacttctacacggagagggcggcagccgtggtggacgggacaccctgccgtccagacacggtggacatttgcgtcagtggcgaatgcaagcacgtgggctgcgaccgagtcctgggctccgacctgcgggaggacaagtgccgagtgtgtggcggtgacggcagtgcctgcgagaccatcgagggcgtcttcagcccagcctcacctggggccgggtacgaggatgtcgtctggattcccaaaggctccgtccacatcttcatccaggatctgaacctctctctcagtcacttggccctgaagggagaccaggagtccctgctgctggaggggctgcctgggaccccccagccccaccgtctgcctctagctgggaccacctttcaactgcgacaggggccagaccaggtccagagcctcgaagccctgggaccgattaatgcatctctcatcgtcatggtgctggcccggaccgagctgcctgccctccgctaccgcttcaatgcccccatcgcccgtgactcgctgcccccctactcctggcactatgcgccctggaccaagtgctcggcccagtgtgcaggcggtagccaggtgcaggcggtggagtgccgcaaccagctggacagctccgcggtcgccccccactactgcagtgcccacagcaagctgcccaaaaggcagcgcgcctgcaacacggagccttgccctccagactgggttgtagggaactggtcgctctgcagccgcagctgcgatgcaggcgtgcgcagccgctcggtcgtgtgccagcgccgcgtctctgccgcggaggagaaggcgctggacgacagcgcatgcccgcagccgcgcccacctgtactggaggcctgccacggccccacttgccctccggagtgggcggccctcgactggtctgagtgcacccccagctgcgggccgggcctccgccaccgcgtggtcctttgcaagagcgcagaccaccgcgccacgctgcccccggcgcactgctcacccgccgccaagccaccggccaccatgcgctgcaacttgcgccgctgccccccggcccgctgggtggctggcgagtggggtgagtgctctgcacagtgcggcgtcgggcagcggcagcgctcggtgcgctgcaccagccacacgggccaggcgtcgcacgagtgcacggaggccctgcggccgcccaccacgcagcagtgtgaggccaagtgcgacagcccaacccccggggacggccctgaagagtgcaaggatgtgaacaaggtcgcctactgccccctggtgctcaaatttcagttctgcagccgagcctacttccgccagatgtgctgcaaaacctgccatggccactagggggcgcgcggcacccggagccacagctggcggggtctccgccgccagccctgcagcgggccggccagagggggccccgggggggcgggaactgggagggaagggtgagacggagccggaagttatttattgggaacccctgcagggccctggctggggggatggagaggggctggctatccccccagagcccctcttcagcatccgccccttccagttcacatagtgagaccccccctccagggtgggtctggggaggggacagctgttcaccccagcaccctttgaacccacccttagggagtccccaacactccccccctcctttgatcggaatatgtactgtgaagagtaggggtggggaggtggtctgccggtgccctgccccccagcactgccctacccctccactccgagctgggggggaatctgtgtctgctatgggaggggggggggtagcaccacctccctgacaccctcccctgacctgactagggggaggatccaccccaacctctgccctgcccgccccaggggcaccccgacatccaggccaccccctcatggtgctacagaccctgccctggggcccacacactcctgccaggaagccctacatcaataaagttctgtcttgtgtagatttctacg

SEQ ID NO: 104712 - DNA, 831 bp, Homo sapiens
  Payload ID: 558
  Gene Symbol: ADAMTS10
  Gene Name: ADAM metallopeptidase with thrombospondin type 1 motif, 10
  ENST ID: ENST00000593826
  CDS Start-End: 55-435
cccatcccggagaggctgatatctctggctggggcctggagtggggaacggtgcatggggccgacgagtgtcctccgggctggactcactccttcctgtctccccccacccagtggtgctacaaacgggtctgtgtcccctttgggtcgcgcccagagggtgtggacggagcctgggggccgtggactccatggggcgactgcagccggacctgtggcggcggcgtgtcctcttctagccgtcactgcgacagccccaggccaaccatcgggggcaagtactgtctgggtgagagaaggcggcaccgctcctgcaacacggatgactgtccccctggctcccaggacttcagagaagtgcagtgttctgaatttgacagcatccctttccgtgggaaattctacaagtggaaaacgtaccggggagggggcgtgaaggcctgctcgctcacgtgcctagcggaaggcttcaacttctacacggagagggcggcagccgtggtggacgggacaccctgccgtccagacacggtggacatttgcgtcagtggcgaatgcaagcacgtgggctgcgaccgagtcctgggctccgacctgcgggaggacaagtgccgagtgtgtggcggtgacggcagtgcctgcgagaccatcgagggcgtcttcagcccagcctcacctggggccgggtacgaggatgtcgtctggattcccaaaggctccgtccacatcttcatccaggatctgaacctctctctcagtcacttggccctgaagggagaccaggagtccctgctgctggaggggctgcctgggaccccccagccccaccgtc

SEQ ID NO: 104713 - DNA, 3423 bp, Homo sapiens
  Payload ID: 558
  Gene Symbol: ADAMTS10
  Gene Name: ADAM metallopeptidase with thrombospondin type 1 motif, 10
  ENST ID: ENST00000596851
  CDS Start-End: 138-1007
gcggcggcgacggcgcggaggccccgggcgcggcgcaggagcccggtgatgctgcgaaggctgtgaacaggggaggcggcactgtgggggctgccggcagccggggctggggagagacatgtggacacgtggcctctatggctcccgcctgccagatcctccgctgggccctcgccctggggctgggcctcatgttcgaggtcacgcacgccttccggtctcaagatgagttcctgtccagtctggagagctatgagatcgccttccccacccgcgtggaccacaacggggcactgctggccttctcgccacctcctccccggaggcagcgccgcggcacgggggccacagccgagtcccgcctcttctacaaagtggcctcgcccagcacccacttcctgctgaacctgacccgcagctcccgtctactggcagggcacgtctccgtggagtactggacacgggagggcctggcctggcagagggcggcccggccccactgcctctacgctggtcacctgcagggccaggccagcagctcccatgtggccatcagcacctgtggaggcctgcacggcctgatcgtggcagacgaggaagagtacctgattgagcccctgcacggtgggcccaagggttctcggagcccggaggaaagtggaccacatgtggtgtacaagcgttcctctctgcgtcacccccacctggacacagcctgtggagtgagagatgagaaaccgtggaaagggcggccatggtggctgcggaccttgaagccaccgcctgccaggcccctggggaatgaaacagagcgtggccagccaggcctgaagcgatcggtcagccgagagcgctacgtggagaccctggtggtggctgacaagatgatggtggcctatcacgggcgccgggatgtggagcagtatgtcctggccatcatgaacattgtcaggttgccaaacttttccaggactcgagtctgggaagcaccgttaacatcctcgtaactcgcctcatcctgctcacggaggaccagcccactctggagatcacccaccatgccgggaagtccctggacagcttctgtaagtggcagaaatccatcgtgaaccacagcggccatggcaatgccattccagagaacggtgtggctaaccatgacacagcagtgctcatcacacgctatgacatctgcatctacaagaacaaaccctgcggcacactaggcctggccccggtgggcggaatgtgtgagcgcgagagaagctgcagcgtcaatgaggacattggcctggccacagcgttcaccattgcccacgagatcgggcacacattcggcatgaaccatgacggcgtgggaaacagctgtggggcccgtggtcaggacccagccaagctcatggctgcccacattaccatgaagaccaacccattcgtgtggtcatcctgcagccgtgactacatcaccagctttctagactcgggcctggggctctgcctgaacaaccggccccccagacaggactttgtgtacccgacagtggcaccgggccaagcctacgatgcagatgagcaatgccgctttcagcatggagtcaaatcgcgtcagtgtaaatacggggaggtctgcagcgagctgtggtgtctgagcaagagcaaccggtgcatcaccaacagcatcccggccgccgagggcacgctgtgccagacgcacaccatcgacaaggggtggtgctacaaacgggtctgtgtcccctttgggtcgcgcccagagggtgtggacggagcctgggggccgtggactccatggggcgactgcagccggacctgtggcggcggcgtgtcctcttctagccgtcactgcgacagccccaggccaaccatcgggggcaagtactgtctgggtgagagaaggcggcaccgctcctgcaacacggatgactgtccccctggctcccaggacttcagagaagtgcagtgttctgaatttgacagcatccctttccgtgggaaattctacaagtggaaaacgtaccggggagggggcgtgaaggcctgctcgctcacgtgcctagcggaaggcttcaacttctacacggagagggcggcagccgtggtggacgggacaccctgccgtccagacacggtggacatttgcgtcagtggcgaatgcaagcacgtgggctgcgaccgagtcctgggctccgacctgcgggaggacaagtgccgagtgtgtggcggtgacggcagtgcctgcgagaccatcgagggcgtcttcagcccagcctcacctggggccgggtacgaggatgtcgtctggattcccaaaggctccgtccacatcttcatccaggatctgaacctctctctcagtcacttggccctgaagggagaccaggagtccctgctgctggaggggctgcctgggaccccccagccccaccgtctgcctctagctgggaccacctttcaactgcgacaggggccagaccaggtccagagcctcgaagccctgggaccgattaatgcatctctcatcgtcatggtgctggcccggaccgagctgcctgccctccgctaccgcttcaatgcccccatcgcccgtgactcgctgcccccctactcctggcactatgcgccctggaccaagtgctcggcccagtgtgcaggcggtagccaggtgcaggcggtggagtgccgcaaccagctggacagctccgcggtcgccccccactactgcagtgcccacagcaagctgcccaaaaggcagcgcgcctgcaacacggagccttgccctccagactgggttgtagggaactggtcgctctgcagccgcagctgcgatgcaggcgtgcgcagccgctcggtcgtgtgccagcgccgcgtctctgccgcggaggagaaggcgctggacgacagcgcatgcccgcagccgcgcccacctgtactggaggcctgccacggccccacttgccctccggagtgggcggccctcgactggtctgaggtcagccgcccccttccttcgcgcccactgggatgcccaggtggggtgtccacggagacgcctctgcgcggtctccaggttagctgtcccctcctcacttcgcactggggcagcaccctgagcacgaaacgccccttccaactgcagtgcacccccagctgcgggccgggcctccgccaccgcgtggtcctttgcaagagcgcagaccaccgcgccacgctgcccccggcgcactgctcacccgccgccaagccaccggccaccatgcgctgcaacttgcgccgctgccccccggcccgctgggtggctggcgagtggggtgagtgctctgcacagtgcggcgtcgggcagcggcagcgctcggtgcgctgcaccagccacacgggccaggcgtcgcacgagtgcacggaggccct

SEQ ID NO: 104714 - DNA, 3333 bp, Homo sapiens
  Payload ID: 558
  Gene Symbol: ADAMTS10
  Gene Name: ADAM metallopeptidase with thrombospondin type 1 motif, 10
  ENST ID: ENST00000593913
  CDS Start-End: 70-939
aggggaggcggcactgtgggggctgccggcagccggggctggggagagacatgtggacacgtggcctctatggctcccgcctgccagatcctccgctgggccctcgccctggggctgggcctcatgttcgaggtcacgcacgccttccggtctcaagatgagttcctgtccagtctggagagctatgagatcgccttccccacccgcgtggaccacaacggggcactgctggccttctcgccacctcctccccggaggcagcgccgcggcacgggggccacagccgagtcccgcctcttctacaaagtggcctcgcccagcacccacttcctgctgaacctgacccgcagctcccgtctactggcagggcacgtctccgtggagtactggacacgggagggcctggcctggcagagggcggcccggccccactgcctctacgctggtcacctgcagggccaggccagcagctcccatgtggccatcagcacctgtggaggcctgcacggcctgatcgtggcagacgaggaagagtacctgattgagcccctgcacggtgggcccaagggttctcggagcccggaggaaagtggaccacatgtggtgtacaagcgttcctctctgcgtcacccccacctggacacagcctgtggagtgagagatgagaaaccgtggaaagggcggccatggtggctgcggaccttgaagccaccgcctgccaggcccctggggaatgaaacagagcgtggccagccaggcctgaagcgatcggtcagccgagagcgctacgtggagaccctggtggtggctgacaagatgatggtggcctatcacgggcgccgggatgtggagcagtatgtcctggccatcatgaacattgtcaggttgccaaacttttccaggactcgagtctgggaagcaccgttaacatcctcgtaactcgcctcatcctgctcacggaggaccagcccactctggagatcacccaccatgccgggaagtccctggacagcttctattcggcatgaaccatgacggcgtgggaaacagctgtggggcccgtggtcaggacccagccaagctcatggctgcccacattaccatgaagaccaacccattcgtgtggtcatcctgcagccgtgactacatcaccagctttctagactcgggcctggggctctgcctgaacaaccggccccccagacaggactttgtgtacccgacagtggcaccgggccaagcctacgatgcagatgagcaatgccgctttcagcatggagtcaaatcgcgtcagtgaggtctgcagcgagctgtggtgtctgagcaagagcaaccggtgcatcaccaacagcatcccggccgccgagggcacgctgtgccagacgcacaccatcgacaaggggtggtgctacaaacgggtctgtgtcccctttgggtcgcgcccagagggtgtggacggagcctgggggccgtggactccatggggcgactgcagccggacctgtggcggcggcgtgtcctcttctagccgtcactgcgacagccccaggccaaccatcgggggcaagtactgtctgggtgagagaaggcggcaccgctcctgcaacacggatgactgtccccctggctcccaggacttcagagaagtgcagtgttctgaatttgacagcatccctttccgtgggaaattctacaagtggaaaacgtaccggggagggggcgtgaaggcctgctcgctcacgtgcctagcggaaggcttcaacttctacacggagagggcggcagccgtggtggacgggacaccctgccgtccagacacggtggacatttgcgtcagtggcgaatgcaagcacgtgggctgcgaccgagtcctgggctccgacctgcgggaggacaagtgccgagtgtgtggcggtgacggcagtgcctgcgagaccatcgagggcgtcttcagcccagcctcacctggggccgggtacgaggatgtcgtctggattcccaaaggctccgtccacatcttcatccaggatctgaacctctctctcagtcacttggccctgaagggagaccaggagtccctgctgctggaggggctgcctgggaccccccagccccaccgtctgcctctagctgggaccacctttcaactgcgacaggggccagaccaggtccagagcctcgaagccctgggaccgattaatgcatctctcatcgtcatggtgctggcccggaccgagctgcctgccctccgctaccgcttcaatgcccccatcgcccgtgactcgctgcccccctactcctggcactatgcgccctggaccaagtgctcggcccagtgtgcaggcggtagccaggtgcaggcggtggagtgccgcaaccagctggacagctccgcggtcgccccccactactgcagtgcccacagcaagctgcccaaaaggcagcgcgcctgcaacacggagccttgccctccagactgggttgtagggaactggtcgctctgcagccgcagctgcgatgcaggcgtgcgcagccgctcggtcgtgtgccagcgccgcgtctctgccgcggaggagaaggcgctggacgacagcgcatgcccgcagccgcgcccacctgtactggaggcctgccacggccccacttgccctccggagtgggcggccctcgactggtctgagtgcacccccagctgcgggccgggcctccgccaccgcgtggtcctttgcaagagcgcagaccaccgcgccacgctgcccccggcgcactgctcacccgccgccaagccaccggccaccatgcgctgcaacttgcgccgctgccccccggcccgctgggtggctggcgagtggggtgagtgctctgcacagtgcggcgtcgggcagcggcagcgctcggtgcgctgcaccagccacacgggccaggcgtcgcacgagtgcacggaggccctgcggccgcccaccacgcagcagtgtgaggccaagtgcgacagcccaacccccggggacggccctgaagagtgcaaggatgtgaacaaggtcgcctactgccccctggtgctcaaatttcagttctgcagccgagcctacttccgccagatgtgctgcaaaacctgccatggccactagggggcgcgcggcacccggagccacagctggcggggtctccgccgccagccctgcagcgggccggccagagggggccccgggggggcgggaactgggagggaagggtgagacggagccggaagttatttattgggaacccctgcagggccctggctggggggatggagaggggctggctatccccccagagcccctcttcagcatc

SEQ ID NO: 104715 - DNA, 2458 bp, Homo sapiens
  Payload ID: 558
  Gene Symbol: ADAMTS10
  Gene Name: ADAM metallopeptidase with thrombospondin type 1 motif, 10
  Uniprot ID: Q9H324
  ENST ID: ENST00000595838
  CDS Start-End: 35-1807
atctctggctggggcctggagtggggaacggtgcatggggccgacgagtgtcctccgggctggactcactccttcctgtctccccccacccagtggtgctacaaacgggtctgtgtcccctttgggtcgcgcccagagggtgtggacggagcctgggggccgtggactccatggggcgactgcagccggacctgtggcggcggcgtgtcctcttctagccgtcactgcgacagccccaggccaaccatcgggggcaagtactgtctgggtgagagaaggcggcaccgctcctgcaacacggatgactgtccccctggctcccaggacttcagagaagtgcagtgttctgaatttgacagcatccctttccgtgggaaattctacaagtggaaaacgtaccggggaggcctgctcgctcacgtgcctagcggaaggcttcaacttctacacggagagggcggcagccgtggtggacgggacaccctgccgtccagacacggtggacatttgcgtcagtggcgaatgcaagcacgtgggctgcgaccgagtcctgggctccgacctgcgggaggacaagtgccgagtgtgtggcggtgacggcagtgcctgcgagaccatcgagggcgtcttcagcccagcctcacctggggccgggtacgaggatgtcgtctggattcccaaaggctccgtccacatcttcatccaggatctgaacctctctctcagtcacttggccctgaagggagaccaggagtccctgctgctggaggggctgcctgggaccccccagccccaccgtctgcctctagctgggaccacctttcaactgcgacaggggccagaccaggtccagagcctcgaagccctgggaccgattaatgcatctctcatcgtcatggtgctggcccggaccgagctgcctgccctccgctaccgcttcaatgcccccatcgcccgtgactcgctgcccccctactcctggcactatgcgccctggaccaagtgctcggcccagtgtgcaggcggtagccaggtgcaggcggtggagtgccgcaaccagctggacagctccgcggtcgccccccactactgcagtgcccacagcaagctgcccaaaaggcagcgcgcctgcaacacggagccttgccctccagactgggttgtagggaactggtcgctctgcagccgcagctgcgatgcaggcgtgcgcagccgctcggtcgtgtgccagcgccgcgtctctgccgcggaggagaaggcgctggacgacagcgcatgcccgcagccgcgcccacctgtactggaggcctgccacggccccacttgccctccggagtgggcggccctcgactggtctgagtgcacccccagctgcgggccgggcctccgccaccgcgtggtcctttgcaagagcgcagaccaccgcgccacgctgcccccggcgcactgctcacccgccgccaagccaccggccaccatgcgctgcaacttgcgccgctgccccccggcccgctgggtggctggcgagtggggtgagtgctctgcacagtgcggcgtcgggcagcggcagcgctcggtgcgctgcaccagccacacgggccaggcgtcgcacgagtgcacggaggccctgcggccgcccaccacgcagcagtgtgaggccaagtgcgacagcccaacccccggggacggccctgaagagtgcaaggatgtgaacaaggtcgcctactgccccctggtgctcaaatttcagttctgcagccgagcctacttccgccagatgtgctgcaaaacctgccatggccactagggggcgcgcggcacccggagccacagctggcggggtctccgccgccagccctgcagcgggccggccagagggggccccgggggggcgggaactgggagggaagggtgagacggagccggaagttatttattgggaacccctgcagggccctggctggggggatggagaggggctggctatccccccagagcccctcttcagcatccgccccttccagttcacatagtgagaccccccctccagggtgggtctggggaggggacagctgttcaccccagcaccctttgaacccacccttagggagtccccaacactccccccctcctttgatcggaatatgtactgtgaagagtaggggtggggaggtggtctgccggtgccctgccccccagcactgccctacccctccactccgagctgggggggaatctgtgtctgctatgggaggggggggggtagcaccacctccctgacaccctcccctgacctgactagggggaggatccaccccaacctctgccctgcccgccccaggggcaccccgacatccaggccaccccctcatggtgctacagaccctgccctggggcccacacactcctgccaggaagccctacatcaataaagttctgtcttgtgtagatttctacg

SEQ ID NO: 104716 - DNA, 3749 bp, Homo sapiens
  Payload ID: 558
  Gene Symbol: ADAMTS10
  Gene Name: ADAM metallopeptidase with thrombospondin type 1 motif, 10
  ENST ID: ENST00000597188
  CDS Start-End: 272-3583
cgcgcggggcggcgagacagcggcggcgacggcgcggaggccccgggcgcggcgcaggctccaaagaagaagaaaccaaggcccagagagggaggcccaggtgcagggagcaggcgagggaaggatccgtacaggggcccaacactactccaccaaccgaagcccccaaaaggagcccggtgatgctgcgaaggctgtgaacaggggaggcggcactgtgggggctgccggcagccggggctggggagagacatgtggacacgtggcctctatggctcccgcctgccagatcctccgctgggccctcgccctggggctgggcctcatgttcgaggtcacgcacgccttccggtctcaagatgagttcctgtccagtctggagagctatgagatcgccttccccacccgcgtggaccacaacggggcactgctggccttctcgccacctcctccccggaggcagcgccgcggcacgggggccacagccgagtcccgcctcttctacaaagtggcctcgcccagcacccacttcctgctgaacctgacccgcagctcccgtctactggcagggcacgtctccgtggagtactggacacgggagggcctggcctggcagagggcggcccggccccactgcctctacgctggtcacctgcagggccaggccagcagctcccatgtggccatcagcacctgtggaggcctgcacggcctgatcgtggcagacgaggaagagtacctgattgagcccctgcacggtgggcccaagggttctcggagcccggaggaaagtggaccacatgtggtgtacaagcgttcctctctgcgtcacccccacctggacacagcctgtggagtgagagatgagaaaccgtggaaagggcggccatggtggctgcggaccttgaagccaccgcctgccaggcccctggggaatgaaacagagcgtggccagccaggcctgaagcgatcggtcagccgagagcgctacgtggagaccctggtggtggctgacaagatgatggtggcctatcacgggcgccgggatgtggagcagtatgtcctggccatcatgaacattgttgccaaacttttccaggactcgagtctgggaagcaccgttaacatcctcgtaactcgcctcatcctgctcacggaggaccagcccactctggagatcacccaccatgccgggaagtccctggacagcttctgtaagtggcagaaatccatcgtgaaccacagcggccatggcaatgccattccagagaacggtgtggctaaccatgacacagcagtgctcatcacacgctatgacatctgcatctacaagaacaaaccctgcggcacactaggcctggccccggtgggcggaatgtgtgagcgcgagagaagctgcagcgtcaatgaggacattggcctggccacagcgttcaccattgcccacgagatcgggcacacattcggcatgaaccatgacggcgtgggaaacagctgtggggcccgtggtcaggacccagccaagctcatggctgcccacattaccatgaagaccaacccattcgtgtggtcatcctgcagccgtgactacatcaccagctttctagactcgggcctggggctctgcctgaacaaccggccccccagacaggactttgtgtacccgacagtggcaccgggccaagcctacgatgcagatgagcaatgccgctttcagcatggagtcaaatcgcgtcagtgtaaatacggggaggtctgcagcgagctgtggtgtctgagcaagagcaaccggtgcatcaccaacagcatcccggccgccgagggcacgctgtgccagacgcacaccatcgacaaggggtggtgctacaaacgggtctgtgtcccctttgggtcgcgcccagagggtgtggacggagcctgggggccgtggactccatggggcgactgcagccggacctgtggcggcggcgtgtcctcttctagccgtcactgcgacagccccaggccaaccatcgggggcaagtactgtctgggtgagagaaggcggcaccgctcctgcaacacggatgactgtccccctggctcccaggacttcagagaagtgcagtgttctgaatttgacagcatccctttccgtgggaaattctacaagtggaaaacgtaccggggagggggcgtgaaggcctgctcgctcacgtgcctagcggaaggcttcaacttctacacggagagggcggcagccgtggtggacgggacaccctgccgtccagacacggtggacatttgcgtcagtggcgaatgcaagcacgtgggctgcgaccgagtcctgggctccgacctgcgggaggacaagtgccgagtgtgtggcggtgacggcagtgcctgcgagaccatcgagggcgtcttcagcccagcctcacctggggccgggtacgaggatgtcgtctggattcccaaaggctccgtccacatcttcatccaggatctgaacctctctctcagtcacttggccctgaagggagaccaggagtccctgctgctggaggggctgcctgggaccccccagccccaccgtctgcctctagctgggaccacctttcaactgcgacaggggccagaccaggtccagagcctcgaagccctgggaccgattaatgcatctctcatcgtcatggtgctggcccggaccgagctgcctgccctccgctaccgcttcaatgcccccatcgcccgtgactcgctgcccccctactcctggcactatgcgccctggaccaagtgctcggcccagtgtgcaggcggtagccaggtgcaggcggtggagtgccgcaaccagctggacagctccgcggtcgccccccactactgcagtgcccacagcaagctgcccaaaaggcagcgcgcctgcaacacggagccttgccctccagactgggttgtagggaactggtcgctctgcagccgcagctgcgatgcaggcgtgcgcagccgctcggtcgtgtgccagcgccgcgtctctgccgcggaggagaaggcgctggacgacagcgcatgcccgcagccgcgcccacctgtactggaggcctgccacggccccacttgccctccggagtgggcggccctcgactggtctgagtgcacccccagctgcgggccgggcctccgccaccgcgtggtcctttgcaagagcgcagaccaccgcgccacgctgcccccggcgcactgctcacccgccgccaagccaccggccaccatgcgctgcaacttgcgccgctgccccccggcccgctgggtggctggcgagtggggtgagtgctctgcacagtgcggcgtcgggcagcggcagcgctcggtgcgctgcaccagccacacgggccaggcgtcgcacgagtgcacggaggccctgcggccgcccaccacgcagcagtgtgaggccaagtgcgacagcccaacccccggggacggccctgaagagtgcaaggatgtgaacaaggtcgcctactgccccctggtgctcaaatttcagttctgcagccgagcctacttccgccagatgtgctgcaaaacctgccatggccactagggggcgcgcggcacccggagccacagctggcggggtctccgccgccagccctgcagcgggccggccagagggggccccgggggggcgggaactgggagggaagggtgagacggagccggaagttatttattgggaacccctgcagggccctggctggggggatgga

SEQ ID NO: 104717 - DNA, 4622 bp, Homo sapiens
  Payload ID: 559
  Gene Symbol: ADAMTS12
  Gene Name: ADAM metallopeptidase with thrombospondin type 1 motif, 12
  Uniprot ID: P58397
  ENST ID: ENST00000352040
  CDS Start-End: 86-4615
tcctgctgggccacaggcgagcgctttatttctggagctgagggctaaaacttttttgacttttcttctcctcaacatctgaatcatgccatgtgcccagaggagctggcttgcaaacctttccgtggtggctcagctccttaactttggggcgctttgctatgggagacagcctcagccaggcccggttcgcttcccggacaggaggcaagagcattttatcaagggcctgccagaataccacgtggtgggtccagtccgagtagatgccagtgggcattttttgtcatatggcttgcactatcccatcacgagcagcaggaggaagagagatttggatggctcagaggactgggtgtactacagaatttctcacgaggagaaggacctgttttttaacttgacggtcaatcaaggatttctttccaatagctacatcatggagaagagatatgggaacctctcccatgttaagatgatggcttcctctgcccccctctgccatctcagtggcacggttctacagcagggcaccagagttgggacggcagccctcagtgcctgccatggactgactggatttttccaactaccacatggagactttttcattgaacccgtgaagaagcatccactggttgagggagggtaccacccgcacatcgtttacaggaggcagaaagttccagaaaccaaggagccaacctgtggattaaaggacagtgttaacatctcccagaagcaagagctatggcgggagaagtgggagaggcacaacttgccaagcagaagcctctctcggcgttccatcagcaaggagagatgggtggagacactggtggtggccgacacaaagatgattgaataccatgggagtgagaatgtggagtcctacatcctcaccatcatgaacatggtcactgggttgttccataacccaagcattggcaatgcaattcacattgttgtggttcggctcattctactcgaagaagaagagcaaggactgaaaatagttcaccatgcagaaaagacactgtctagcttctgcaagtggcagaagagtatcaatcccaagagtgacctcaatcctgttcatcacgacgtggctgtccttctcaccagaaaggacatctgtgctggtttcaatcgcccctgcgagaccctgggcctgtctcacctttcaggaatgtgtcagcctcaccgcagttgtaacatcaatgaagattcgggactccctctggctttcacaattgcccatgagctaggacacagcttcggcatccagcatgatgggaaagaaaatgactgtgagcctgtgggcagacatccgtacatcatgtcccgccagctccagtacgatcccactccgctgacatggtccaagtgcagcgaggagtacatcacccgcttcttggaccgaggctgggggttctgtcttgatgacatacctaaaaagaaaggcttgaagtccaaggtcattgcccccggagtgatctatgatgttcaccaccagtgccagctacaatatggacccaatgctaccttctgccaggaagtagaaaacgtctgccagacactgtggtgctccgtgaagggcttttgtcgctctaagctggacgctgctgcagatggaactcaatgtggtgagaagaagtggtgtatggcaggcaagtgcatcacagtggggaagaaaccagagagcattcctggaggctggggccgctggtcaccctggtcccactgttccaggacctgtggggctggagtccagagcgcagagaggctctgcaacaaccccgagccaaagtttggagggaaatattgcactggagaaagaaaacgctatcgcttgtgcaacgtccacccctgtcgctcagaggcaccaacatttcggcagatgcagtgcagtgaatttgacactgttccctacaagaatgaactctaccactggtttcccatttttaacccaggttatgttgacattgggctcattccaaaaggagcaagggacataagagtgatggaaattgagggagctggaaacttcctggccatcaggagtgaagatcctgaaaaatattacctgaatggagggtttattatccagtggaacgggaactataagctggcagggactgtctttcagtatgacaggaaaggagacctggaaaagctgatggccacaggtcccaccaatgagtctgtgtggatccagcttctattccaggtgactaaccctggcatcaagtatgagtacacaatccagaaagatggccttgacaatgatgttgagcagcagatgtacttctggcagtacggccactggacagagtgcagtgtgacctgcgggacaggtatccgccgccaaactgcccattgcataaagaagggccgcgggatggtgaaagctacattctgtgacccagaaacacagcccaatgggagacagaagaagtgccatgaaaaggcttgtccacccaggtggtgggcaggggagtgggaagcatgctcggcgacatgcgggccccacggggagaagaagcgaaccgtgctgtgcatccagaccatggtctctgacgagcaggctctcccgcccacagactgccagcacctgctgaagcccaagaccctcctttcctgcaacagagacatcctgtgcccctcggactggacagtgggcaactggagtgagtgttctgtttcctgtggtggtggagtgcggattcgcagtgtcacatgtgccaagaaccatgatgaaccttgcgatgtgacaaggaaacccaacagccgagctctgtgtggcctccagcaatgcccttctagccggagagttctgaaaccaaacaaaggcactatttccaatggaaaaaacccaccaacactaaagcccgtccctccacctacatccaggcccagaatgctgaccacacccacagggcctgagtctatgagcacaagcactccagcaatcagcagccctagtcctaccacagcctccaaagaaggagacctgggtgggaaacagtggcaagatagctcaacccaacctgagctgagctctcgctatctcatttccactggaagcacttcccagcccatcctcacttcccaatccttgagcattcagccaagtgaggaaaatgtttccagttcagatactggtcctacctcggagggaggccttgtagctacaacaacaagtggttctggcttgtcatcttcccgcaaccctatcacttggcctgtgactccattttacaataccttgaccaaaggtccagaaatggagattcacagtggctcaggggaagaaagagaacagcctgaggacaaagatgaaagcaatcctgtaatatggaccaagatcagagtacctggaaatgacgctccagtggaaagtacagaaatgccacttgcacctccactaacaccagatctcagcagggagtcctggtggccacccttcagcacagtaatggaaggactgctccccagccaaaggcccactacttccgaaactgggacacccagagttgaggggatggttactgaaaagccagccaacactctgctccctctgggaggagaccaccagccagaaccctcaggaaagacggcaaaccgtaaccacctgaaacttccaaacaacatgaaccaaacaaaaagttctgaaccagtcctgactgaggaggatgcaacaagtctgattactgagggctttttgctaaatgcctccaattacaagcagctcacaaacggccacggctctgcacactggatcgtcggaaactggagcgagtgctccaccacatgtggcctgggggcctactggagaagggtggagtgcagcacccagatggattctgactgtgcggccatccagagacctgaccctgcaaaaagatgccacctccgtccctgtgctggctggaaagtgggaaactggagcaagtgctccagaaactgcagtgggggcttcaagatacgcgagattcagtgcgtggacagccgggaccaccggaacctgaggccatttcactgccagttcctggccggcattcctcccccattgagcatgagctgtaacccggagccctgtgaggcgtggcaggtggagccttggagccagtgctccaggtcctgtggaggtggagttcaggagagaggagtgttctgtccaggaggcctctgtgattggacaaaaagacccacatccaccatgtcttgcaatgagcacctgtgctgtcactgggccactgggaactgggacctgtgttccacttcctgtggaggtggctttcagaagaggactgtccaatgtgtgccctcagagggcaataaaactgaagaccaagaccaatgtctatgtgatcacaaacccagacctccagaattcaaaaaatgcaaccagcaggcctgcaagaaaagtgccgatttactttgcactaaggacaaactgtcagccagtttctgccagacactgaaagccatgaagaaatgttctgtgcccaccgtgagggctgagtgctgcttctcgtgtccccagacacacatcacacacacccaaaggcaaagaaggcaacggttgctccaaaagtcaaaagaactctaagcccaaa

SEQ ID NO: 104718 - DNA, 1003 bp, Homo sapiens
  Payload ID: 559
  Gene Symbol: ADAMTS12
  Gene Name: ADAM metallopeptidase with thrombospondin type 1 motif, 12
  ENST ID: ENST00000515401
  CDS Start-End: 164-862
gcttaaaaaagcacagggagatcgcgggcagctttgcagtcgctgccttctcgcgcctgaccatgcacccctgcatcttcctgctgggccacaggcgagcgctttatttctggagctgagggctaaaacttttttgacttttcttctcctcaacatctgaatcatgccatgtgcccagaggagctggcttgcaaacctttccgtggtggctcagctccttaactttggggcgctttgctatgggagacagcctcagccaggcccggttcgcttcccggacaggaggcaagagcattttatcaagggcctgccagaataccacgtggtgggtccagtccgagtagatgccagtgggcattttttgtcatatggcttgcactatcccatcacgagcagcaggaggaagagagatttggatggctcagaggactgggtgtactacagaatttctcacgaggagaaggacctgttttttaacttgacggtcaatcaaggatttctttccaatagctacatcatggagaagagatatgggaacctctcccatgttaagatgatggcttcctctgcccccctctgccatctcagtggcacggttctacagcagggcaccagagttgggacggcagccctcagtgcctgccatggactgactggatttttccaactaccacatggagactttttcattgaacccgtgaagaagcatccactggttgagggagggtaccacccgcacatcgtttacaggaggcagaaagttccagaaaccaaggagccaacctgtggattaaagggtattgtgactcacatgtcctcctgggttgaagaatctgttttgttcttttggttgttttattaaaacatgacctattcttactcaagtctcttatctcctctgtattcttttttttttaatatcttcatgacattcaaatctcttctgtattctcttgccagaaagtgtacattctttttgcttgtataaaccctttcacttgtc

SEQ ID NO: 104719 - DNA, 8774 bp, Homo sapiens
  Payload ID: 559
  Gene Symbol: ADAMTS12
  Gene Name: ADAM metallopeptidase with thrombospondin type 1 motif, 12
  Uniprot ID: P58397
  ENST ID: ENST00000504830
  CDS Start-End: 337-5121
gagcgggcgggctgcgaggccgcggggcatgcgggaggcggaggggtggggaccggggtgggctgcgccctcccgctctggcccattccacaccccgccgaaagcggacactgtcagctgaatcactccccttttaggaggagggaggggaaaaaggtgtctagctcctttctgcttaaaaaagcacagggagatcgcgggcagctttgcagtcgctgccttctcgcgcctgaccatgcacccctgcatcttcctgctgggccacaggcgagcgctttatttctggagctgagggctaaaacttttttgacttttcttctcctcaacatctgaatcatgccatgtgcccagaggagctggcttgcaaacctttccgtggtggctcagctccttaactttggggcgctttgctatgggagacagcctcagccaggcccggttcgcttcccggacaggaggcaagagcattttatcaagggcctgccagaataccacgtggtgggtccagtccgagtagatgccagtgggcattttttgtcatatggcttgcactatcccatcacgagcagcaggaggaagagagatttggatggctcagaggactgggtgtactacagaatttctcacgaggagaaggacctgttttttaacttgacggtcaatcaaggatttctttccaatagctacatcatggagaagagatatgggaacctctcccatgttaagatgatggcttcctctgcccccctctgccatctcagtggcacggttctacagcagggcaccagagttgggacggcagccctcagtgcctgccatggactgactggatttttccaactaccacatggagactttttcattgaacccgtgaagaagcatccactggttgagggagggtaccacccgcacatcgtttacaggaggcagaaagttccagaaaccaaggagccaacctgtggattaaaggacagtgttaacatctcccagaagcaagagctatggcgggagaagtgggagaggcacaacttgccaagcagaagcctctctcggcgttccatcagcaaggagagatgggtggagacactggtggtggccgacacaaagatgattgaataccatgggagtgagaatgtggagtcctacatcctcaccatcatgaacatggtcactgggttgttccataacccaagcattggcaatgcaattcacattgttgtggttcggctcattctactcgaagaagaagagcaaggactgaaaatagttcaccatgcagaaaagacactgtctagcttctgcaagtggcagaagagtatcaatcccaagagtgacctcaatcctgttcatcacgacgtggctgtccttctcaccagaaaggacatctgtgctggtttcaatcgcccctgcgagaccctgggcctgtctcacctttcaggaatgtgtcagcctcaccgcagttgtaacatcaatgaagattcgggactccctctggctttcacaattgcccatgagctaggacacagcttcggcatccagcatgatgggaaagaaaatgactgtgagcctgtgggcagacatccgtacatcatgtcccgccagctccagtacgatcccactccgctgacatggtccaagtgcagcgaggagtacatcacccgcttcttggaccgaggctgggggttctgtcttgatgacatacctaaaaagaaaggcttgaagtccaaggtcattgcccccggagtgatctatgatgttcaccaccagtgccagctacaatatggacccaatgctaccttctgccaggaagtagaaaacgtctgccagacactgtggtgctccgtgaagggcttttgtcgctctaagctggacgctgctgcagatggaactcaatgtggtgagaagaagtggtgtatggcaggcaagtgcatcacagtggggaagaaaccagagagcattcctggaggctggggccgctggtcaccctggtcccactgttccaggacctgtggggctggagtccagagcgcagagaggctctgcaacaaccccgagccaaagtttggagggaaatattgcactggagaaagaaaacgctatcgcttgtgcaacgtccacccctgtcgctcagaggcaccaacatttcggcagatgcagtgcagtgaatttgacactgttccctacaagaatgaactctaccactggtttcccatttttaacccagcacatccttgtgagctctactgccgacccatagatggccagttttctgagaaaatgctggatgctgtcattgatggtaccccttgctttgaaggcggcaacagcagaaatgtctgtattaatggcatatgtaagatggttggctgtgactatgagatcgattccaatgccaccgaggatcgctgcggtgtgtgcctgggagatggctcttcctgccagactgtgagaaagatgtttaagcagaaggaaggatctggttatgttgacattgggctcattccaaaaggagcaagggacataagagtgatggaaattgagggagctggaaacttcctggccatcaggagtgaagatcctgaaaaatattacctgaatggagggtttattatccagtggaacgggaactataagctggcagggactgtctttcagtatgacaggaaaggagacctggaaaagctgatggccacaggtcccaccaatgagtctgtgtggatccagcttctattccaggtgactaaccctggcatcaagtatgagtacacaatccagaaagatggccttgacaatgatgttgagcagcagatgtacttctggcagtacggccactggacagagtgcagtgtgacctgcgggacaggtatccgccgccaaactgcccattgcataaagaagggccgcgggatggtgaaagctacattctgtgacccagaaacacagcccaatgggagacagaagaagtgccatgaaaaggcttgtccacccaggtggtgggcaggggagtgggaagcatgctcggcgacatgcgggccccacggggagaagaagcgaaccgtgctgtgcatccagaccatggtctctgacgagcaggctctcccgcccacagactgccagcacctgctgaagcccaagaccctcctttcctgcaacagagacatcctgtgcccctcggactggacagtgggcaactggagtgagtgttctgtttcctgtggtggtggagtgcggattcgcagtgtcacatgtgccaagaaccatgatgaaccttgcgatgtgacaaggaaacccaacagccgagctctgtgtggcctccagcaatgcccttctagccggagagttctgaaaccaaacaaaggcactatttccaatggaaaaaacccaccaacactaaagcccgtccctccacctacatccaggcccagaatgctgaccacacccacagggcctgagtctatgagcacaagcactccagcaatcagcagccctagtcctaccacagcctccaaagaaggagacctgggtgggaaacagtggcaagatagctcaacccaacctgagctgagctctcgctatctcatttccactggaagcacttcccagcccatcctcacttcccaatccttgagcattcagccaagtgaggaaaatgtttccagttcagatactggtcctacctcggagggaggccttgtagctacaacaacaagtggttctggcttgtcatcttcccgcaaccctatcacttggcctgtgactccattttacaataccttgaccaaaggtccagaaatggagattcacagtggctcaggggaagaaagagaacagcctgaggacaaagatgaaagcaatcctgtaatatggaccaagatcagagtacctggaaatgacgctccagtggaaagtacagaaatgccacttgcacctccactaacaccagatctcagcagggagtcctggtggccacccttcagcacagtaatggaaggactgctccccagccaaaggcccactacttccgaaactgggacacccagagttgaggggatggttactgaaaagccagccaacactctgctccctctgggaggagaccaccagccagaaccctcaggaaagacggcaaaccgtaaccacctgaaacttccaaacaacatgaaccaaacaaaaagttctgaaccagtcctgactgaggaggatgcaacaagtctgattactgagggctttttgctaaatgcctccaattacaagcagctcacaaacggccacggctctgcacactggatcgtcggaaactggagcgagtgctccaccacatgtggcctgggggcctactggagaagggtggagtgcagcacccagatggattctgactgtgcggccatccagagacctgaccctgcaaaaagatgccacctccgtccctgtgctggctggaaagtgggaaactggagcaagtgctccagaaactgcagtgggggcttcaagatacgcgagattcagtgcgtggacagccgggaccaccggaacctgaggccatttcactgccagttcctggccggcattcctcccccattgagcatgagctgtaacccggagccctgtgaggcgtggcaggtggagccttggagccagtgctccaggtcctgtggaggtggagttcaggagagaggagtgttctgtccaggaggcctctgtgattggacaaaaagacccacatccaccatgtcttgcaatgagcacctgtgctgtcactgggccactgggaactgggacctgtgttccacttcctgtggaggtggctttcagaagaggactgtccaatgtgtgccctcagagggcaataaaactgaagaccaagaccaatgtctatgtgatcacaaacccagacctccagaattcaaaaaatgcaaccagcaggcctgcaagaaaagtgccgatttactttgcactaaggacaaactgtcagccagtttctgccagacactgaaagccatgaagaaatgttctgtgcccaccgtgagggctgagtgctgcttctcgtgtccccagacacacatcacacacacccaaaggcaaagaaggcaacggttgctccaaaagtcaaaagaactctaagcccaaaaggaagccagcttccaccagactgcagcagcctgctgaccatgacatgctttagccctgggagctgcttcgttgaggttttgcttcatatatttcagattcagctttgggtcatgatgaaacaaaatccattgtgttcctctagccaccgaatgtccctcacaggaggcctaggctgccgtacttgctgctccctgataggaaggtgaaatagctaggagaatcaggcagcacctggtatcggctcctgggaaaggtgccaggttagacagatttgtgaaatactgtatttttgttctcccttaaagataaaaacaaagagaccagctatttccctgactacctcaagagtatcaggcaacacttacccaggggacaaataatcttcttaatttatcttgatgaatacctttcttttttttttcttgcctccctgcctggggcagctgctatttaaaatgtcacagcggagctttaggaacattcctttaattcatccaggcagaggactgctttcttcaccccatgttcaactagggcaggaagtgctggttacatccctcagtctcttcctccatccctgtagggctccatatctgggctgcttagagtctcctgccaaccttgggacactagactaagaggaaacaggcataagaaacacagcctaaggggtttaggtcacttacacagaaaacacttctggtttgaagagcatttctatgaaaactcgtaaaatgcaaatgagcagaaatcaatttcttaatattacagaaaaggaactgtgggcctttattcttcccactttcctggcaaatacacactcctttgcagaagggaaaatgtgtcttcctggctgacttcctcccatcctccagtccccacaggaggcctgagctcaggtcccaccatcgtcttgctgcaggggctgtatatgcaaagaccactatgaccagctctagggctgccacctgtcctcacctcttctcaggttggaaaatggaggttccatattaaaatatttcaaagaaccaggtaaattgtactaagtacaagaacatagtgcaaacttctaatctagagaaaaaacatttctaaaaagtaaggtaaaggggatctactcctcagtgtacccaatatgtagttagtcttaaagatcttttactttggggagaacaggtgaatcagggagtccaaagaaactgaaatgaaagttagaatgcttgttctggatgttcctacctcccaccagaagtcaaagtaggcttggtctcaaattcagagcaaatttctagacaaagtgatttctaagggaaggtacttacatgaactgaacccagagaaagagggtaagtgggtgggtggaggggcataagcttcaaatgaaagaagatatcagaaccaattcttgacagggagaaaggcaaggatgtggccttcatgtgatgggcagcatattttctgactcatgcacagatacacttaatactcctcatggaacacaatatcccacgtctccctttacctatccgttcagcagaatggtgctattaaaaaaatggtgctaatatctagatggtggcagaattaatgtaaacatagataggcatacaaatgggtaagtgtatgtgaaactctccatatacatcttctgttaaacatgtaacggtgttgctgaccaatgccagttttattgcttgggtaccttgaatttaagatttaatattatgtgctttttatttttttccaagccattaacgtgtattactctcatgaattcctgtgaaaaataaaacagtgggattgggatgaaattcaagatagaccagaaacaggaggaaagtacaaatgtttacctaaagccagagaatttatttctagatgataattacattattgtattctctgcctttaaacataaacattgctggccgatagcaatctctggtgaataatggttttcgaggagaggagacacttaaattgttagtgacatgagtggaggagaatctgatatttactaatgaggcagtttgcaaagactgtccctgaagtgtagtgtagtctttcagggggattcatttagtaagctagattgatttaacctggtactgtactagcatagggtcaaatacgtgtcatcagagacctgggtatgaccaggcttacaaaactcaggaacaaactcagattcctactgacctcaaccaactaaactaggccaaatttctccgtgtacaaaatggaccacgttatttacaatccacgtggtggagaagatggtagacatgtggagagagtttggccaggtgctccattctaggtctttttccagtttctcaaaggcagaacattggctcctaattatttgccatggatatttgcttcctgttctggagctatgttgtaagacagctgtgtgatgtccatcattcttgactccagaatgaagacagggcttgctgttttctgtcctgttggtatcatctgttgccttggcgatcactcagtgatgagtcgtcagtattttgacatgtcccagtgcttgctgtacaagaggggactcagatcaacaggaagactctgaagacaggaacctgcatggtatcttacatctttgatacttgggtgctgatatgaagcagagttgttgatttactttatctaggcccttctttcttctcacctggatcaagcaactgagaagtgtatcaggagacactggatacatatctctatgaaatagagagggccatcgcagggcctggtacttaactacattaacgttctaaaacccagtttggtttacgttgtctttcacagtagtatatttagctcttctctggaaagttgtgggttaatataattcttaaacatgaaaatgtaattaaacacaccacgagagaacaatattccaggagacttaatagtgattactttcttcaatcaggaaatcgtttcagtgcctcctttgtaggaatgctttgttttgtgatgggttttcttaaagaagagcacacctccgtccaatctcctgagacagccacgtctccgctgacatcccactgtgatgctttcagatagtcagtgaatgtttctgataaccttcatccagtatctgaaacacaatgtgagagattatattgttttagataataacatcccatttagttgactaaaatcttccaaactctgaaagctgcacactgctactccagagagtgcaggtcttagctcttctcctttctgacttcaagatgaatctttgggacgatgtttctggtgcttggtccacagtgattcacttttgaaggagaggccacatgacatgaactgcctggtgttacaacctagctaacatatttgatgctactcctgttgtctgtactgcttattcaagtagtattctaagttatgttactaaaaaacatggtgggtaaagcacaatcctacccatcattgtcctccaaaataattgtatgacatacacggcccagcccattgccctccctgcatctctgtgctgctttgccatttccccttctacccagcctcctcaaggggtaccttggtggatatttcagtacttaaaaccagactgtaatcataacctccctctgtgtggcatcaataaatagccaaactca

SEQ ID NO: 104720 - DNA, 825 bp, Homo sapiens
  Payload ID: 559
  Gene Symbol: ADAMTS12
  Gene Name: ADAM metallopeptidase with thrombospondin type 1 motif, 12
  ENST ID: ENST00000630002
  CDS Start-End: 337-825
gagcgggcgggctgcgaggccgcggggcatgcgggaggcggaggggtggggaccggggtgggctgcgccctcccgctctggcccattccacaccccgccgaaagcggacactgtcagctgaatcactccccttttaggaggagggaggggaaaaaggtgtctagctcctttctgcttaaaaaagcacagggagatcgcgggcagctttgcagtcgctgccttctcgcgcctgaccatgcacccctgcatcttcctgctgggccacaggcgagcgctttatttctggagctgagggctaaaacttttttgacttttcttctcctcaacatctgaatcatgccatgtgcccagaggagctggcttgcaaacctttccgtggtggctcagctccttaactttggggcgctttgctatgggagacagcctcagccaggcccggttcgcttcccggacaggaggcaagagcattttatcaagggcctgccagaataccacgtggtgggtccagtccgagtagatgccagtgggcattttttgtcatatggcttgcactatcccatcacgagcagcaggaggaagagagatttggatggctcagaggactgggtgtactacagaatttctcacgaggagaaggacctgttttttaacttgacggtcaatcaaggatttctttccaatagctacatcatggagaagagatatgggaacctctcccatgttaagatgatggcttcctctgcccccctctgccatctcagtggcacggttctacagcagggcaccagagttgggacggcagccctcagtgcctgccatggactg

SEQ ID NO: 104721 - DNA, 574 bp, Homo sapiens
  Payload ID: 559
  Gene Symbol: ADAMTS12
  Gene Name: ADAM metallopeptidase with thrombospondin type 1 motif, 12
  ENST ID: ENST00000630537
  CDS Start-End: 86-574
tcctgctgggccacaggcgagcgctttatttctggagctgagggctaaaacttttttgacttttcttctcctcaacatctgaatcatgccatgtgcccagaggagctggcttgcaaacctttccgtggtggctcagctccttaactttggggcgctttgctatgggagacagcctcagccaggcccggttcgcttcccggacaggaggcaagagcattttatcaagggcctgccagaataccacgtggtgggtccagtccgagtagatgccagtgggcattttttgtcatatggcttgcactatcccatcacgagcagcaggaggaagagagatttggatggctcagaggactgggtgtactacagaatttctcacgaggagaaggacctgttttttaacttgacggtcaatcaaggatttctttccaatagctacatcatggagaagagatatgggaacctctcccatgttaagatgatggcttcctctgcccccctctgccatctcagtggcacggttctacagcagggcaccagagttgggacggcagccctcagtgcctgccatggactg

SEQ ID NO: 104722 - DNA, 4442 bp, Homo sapiens; identical to SEQ ID NO: 104704
  Payload ID: 560
  Gene Symbol: ADAMTS13
  Gene Name: ADAM metallopeptidase with thrombospondin type 1 motif, 13
  Uniprot ID: Q76LX8
  ENST ID: ENST00000355699
  CDS Start-End: 121-4236

SEQ ID NO: 104723 - DNA, 4349 bp, Homo sapiens; identical to SEQ ID NO: 104700
  Payload ID: 560
  Gene Symbol: ADAMTS13
  Gene Name: ADAM metallopeptidase with thrombospondin type 1 motif, 13
  Uniprot ID: Q76LX8
  ENST ID: ENST00000356589
  CDS Start-End: 121-4143

SEQ ID NO: 104724 - DNA, 1074 bp, Homo sapiens; identical to SEQ ID NO: 104706
  Payload ID: 560
  Gene Symbol: ADAMTS13
  Gene Name: ADAM metallopeptidase with thrombospondin type 1 motif, 13
  ENST ID: ENST00000371910
  CDS Start-End: 197-868

SEQ ID NO: 104725 - DNA, 1155 bp, Homo sapiens; identical to SEQ ID NO: 104701
  Payload ID: 560
  Gene Symbol: ADAMTS13
  Gene Name: ADAM metallopeptidase with thrombospondin type 1 motif, 13
  ENST ID: ENST00000371911
  CDS Start-End: 121-1155

SEQ ID NO: 104726 - DNA, 4330 bp, Homo sapiens; identical to SEQ ID NO: 104705
  Payload ID: 560
  Gene Symbol: ADAMTS13
  Gene Name: ADAM metallopeptidase with thrombospondin type 1 motif, 13
  ENST ID: ENST00000371916
  CDS Start-End: 1189-2523

SEQ ID NO: 104727 - DNA, 4934 bp, Homo sapiens; identical to SEQ ID NO: 104702
  Payload ID: 560
  Gene Symbol: ADAMTS13
  Gene Name: ADAM metallopeptidase with thrombospondin type 1 motif, 13
  Uniprot ID: Q76LX8
  ENST ID: ENST00000371929
  CDS Start-End: 445-4728

SEQ ID NO: 104728 - DNA, 3022 bp, Homo sapiens; identical to SEQ ID NO: 104699
  Payload ID: 560
  Gene Symbol: ADAMTS13
  Gene Name: ADAM metallopeptidase with thrombospondin type 1 motif, 13
  ENST ID: ENST00000495234
  CDS Start-End: 121-1155

SEQ ID NO: 104729 - DNA, 2230 bp, Homo sapiens; identical to SEQ ID NO: 104703
  Payload ID: 560
  Gene Symbol: ADAMTS13
  Gene Name: ADAM metallopeptidase with thrombospondin type 1 motif, 13
  ENST ID: ENST00000474918
  CDS Start-End: 120-950

SEQ ID NO: 104730 - DNA, 5260 bp, Homo sapiens
  Payload ID: 561
  Gene Symbol: ADAMTS14
  Gene Name: ADAM metallopeptidase with thrombospondin type 1 motif, 14
  Uniprot ID: Q8WXS8
  ENST ID: ENST00000373207
  CDS Start-End: 1-3672
atggctccactccgcgcgctgctgtcctacctgctgcctttgcactgtgcgctctgcgccgccgcgggcagccggaccccagagctgcacctctctggaaagctcagtgactatggtgtgacagtgccctgcagcacagactttcggggacgcttcctctcccacgtggtgtctggcccagcagcagcctctgcagggagcatggtagtggacacgccacccacactaccacgacactccagtcacctccgggtggctcgcagccctctgcacccaggagggaccctgtggcctggcagggtggggcgccactccctctacttcaatgtcactgttttcgggaaggaactgcacttgcgcctgcggcccaatcggaggttggtagtgccaggatcctcagtggagtggcaggaggattttcgggagctgttccggcagcccttacggcaggagtgtgtgtacactggaggtgtcactggaatgcctggggcagctgttgccatcagcaactgtgacggattggcgggcctcatccgcacagacagcaccgacttcttcattgagcctctggagcggggccagcaggagaaggaggccagcgggaggacacatgtggtgtaccgccgggaggccgtccagcaggagtgggcagaacctgacggggacctgcacaatgaagcctttggcctgggagaccttcccaacctgctgggcctggtgggggaccagctgggcgacacagagcggaagcggcggcatgccaagccaggcagctacagcatcgaggtgctgctggtggtggacgactcggtggttcgcttccatggcaaggagcatgtgcagaactatgtcctcaccctcatgaatatcgtagatgagatttaccacgatgagtccctgggggttcatataaatattgccctcgtccgcttgatcatggttggctaccgacagtccctgagcctgatcgagcgcgggaacccctcacgcagcctggagcaggtgtgtcgctgggcacactcccagcagcgccaggaccccagccacgctgagcaccatgaccacgttgtgttcctcacccggcaggactttgggccctcagggtatgcacccgtcactggcatgtgtcaccccctgaggagctgtgccctcaaccatgaggatggcttctcctcagccttcgtgatagctcatgagaccggccacgtgctcggcatggagcatgacggtcaggggaatggctgtgcagatgagaccagcctgggcagcgtcatggcgcccctggtgcaggctgccttccaccgcttccattggtcccgctgcagcaagctggagctcagccgctacctcccctcctacgactgcctcctcgatgacccctttgatcctgcctggccccagcccccagagctgcctgggatcaactactcaatggatgagcagtgccgctttgactttggcagtggctaccagacctgcttggcattcaggacctttgagccctgcaagcagctgtggtgcagccatcctgacaacccgtacttctgcaagaccaagaaggggcccccgctggatgggactgagtgtgcacccggcaagtggtgcttcaaaggtcactgcatctggaagtcgccggagcagacatatggccaggatggaggctggagctcctggaccaagtttgggtcatgttcgcggtcatgtgggggcggggtgcgatcccgcagccggagctgcaacaacccctccccagcctatggaggccgcctgtgcttagggcccatgttcgagtaccaggtctgcaacagcgaggagtgccctgggacctacgaggacttccgggcccagcagtgtgccaagcgcaactcctactatgtgcaccagaatgccaagcacagctgggtgccctacgagcctgacgatgacgcccagaagtgtgagctgatctgccagtcggcggacacgggggacgtggtgttcatgaaccaggtggttcacgatgggacacgctgcagctaccgggacccatacagcgtctgtgcgcgtggcgagtgtgtgcctgtcggctgtgacaaggaggtggggtccatgaaggcggatgacaagtgtggagtctgcgggggtgacaactcccactgcaggactgtgaaggggacgctgggcaaggcctccaagcaggcaggagctctcaagctggtgcagatcccagcaggtgccaggcacatccagattgaggcactggagaagtccccccaccgcattgtggtgaagaaccaggtcaccggcagcttcatcctcaaccccaagggcaaggaagccacaagccggaccttcaccgccatgggcctggagtgggaggatgcggtggaggatgccaaggaaagcctcaagaccagcgggcccctgcctgaagccattgccatcctggctctccccccaactgagggtggcccccgcagcagcctggcctacaagtacgtcatccatgaggacctgctgccccttatcgggagcaacaatgtgctcctggaggagatggacacctatgagtgggcgctcaagagctgggccccctgcagcaaggcctgtggaggagggatccagttcaccaaatacggctgccggcgcagacgagaccaccacatggtgcagcgacacctgtgtgaccacaagaagaggcccaagcccatccgccggcgctgcaaccagcacccgtgctctcagcctgtgtgggtgacggaggagtggggtgcctgcagccggagctgtgggaagctgggggtgcagacacgggggatacagtgcctgctgcccctctccaatggaacccacaaggtcatgccggccaaagcctgcgccggggaccggcctgaggcccgacggccctgtctccgagtgccctgcccagcccagtggaggctgggagcctggtcccagtgctctgccacctgtggagagggcatccagcagcggcaggtggtgtgcaggaccaacgccaacagcctcgggcattgcgagggggataggccagacactgtccaggtctgcagcctgcccgcctgtggaggaaatcaccagaactccacggtgagggccgatgtctgggaacttgggacgccagaggggcagtgggtgccacaatctgaacccctacatcccattaacaagatatcatcaacggagccctgcacgggagacaggtctgtcttctgccagatggaagtgctcgatcgctactgctccattcccggctaccaccggctctgctgtgtgtcctgcatcaagaaggcctcgggccccaaccctggcccagaccctggcccaacctcactgccccccttctccactcctggaagccccttaccaggaccccaggaccctgcagatgctgcagagcctcctggaaagccaacgggatcagaggaccatcagcatggccgagccacacagctcccaggagctctggatacaagctccccagggacccagcatccctttgcccctgagacaccaatccctggagcatcctggagcatctcccctaccacccccggggggctgccttggggctggactcagacacctacgccagtccctgaggacaaagggcaacctggagaagacctgagacatcccggcaccagcctccctgctgcctccccggtgacatgagctgtgccctgccatcccactggcacgtttacactctgtgtactgccccgtgactcccagctcagaggacacacatagcagggcaggcgcaagcacagacttcattttaaatcattcgccttcttctcgtttggggctgtgatgctctttaccccacaaagcggggtgggaggaagacaaagatcagggaaagccctaatcggagatacctcagcaagctgcccccggcgggactgaccctctcagggcccctgttggtctcccctgccaagaccagggtcaactattgctccctcctcacagaccctgggcctgggcaggtctgaatcccggctggtctgtagctagaagctgtcagggctgcctgccttcccggaactgtgaggacccctgtggaggccctgcatatttggcccctctccccagaaaggcaaagcagggccagggtaggtgggggactgttcacagccaggccgagaggaggggggcctgggaatgtggcatgaggcttcccagctgcagggctggagggggtggaacacaaggtgatcgcaggcccagctcctggaagccaagagctccatgcagttccaccagctgaggccaggcagcagaggccagtttgtctttgctggccagaagatggtgctcatggccatactctggccttgcagatgtcactagtgttacttctagtgactccagattacagactggccccccaatctcaccccagcccaccagagaagggggctcaggacaccctggaccccaagtcctcagcatccagggatttccaaactggcgctcactccctgactccaccaggatggcaacttcaattatcactctcagcctggaaggggactctgtgggacacagagggaacacgatttctcaggctgtcccttcaatcattgcccttctccgaagatcgctcctgctggagtcggacatcttcatcttctacctggctcaagctgggccagagtgtgtggttctcccaggggtggttggaccccaggactgaggaccagagtccactcatagcctggccctggagatgacaagggccacccaggccaagtgccccagggcagggtgccagcccctggcctggtgctggagtggggaagacacactcacccacggtgctgtaagggcctgagctgtgctcagctgccggccatgctacctccaagggacaggtaacagtcttagatcctctggctctcaggaagtggcagggggtcccaggacacctccggggtcttggaggatgtctcctaaactcctgccaggtgatagaggtgcttctcacttcttccttccccaaggcaaaggggctgttctgagccagcctggaggaacatgagtagtgggcccctggcctgcaacccctttggagagtggaggtcctggggggctccccgccctccccctgttgccctcccctccctgggatgctggggcacacgcggagtcattcctgtgagaaccagcctggcctgtgttaaactcttgtgccttggaaatccagatctttaaaattttatgtatttattaacatcgccattggaccccaaaa

SEQ ID NO: 104731 - DNA, 5269 bp, Homo sapiens
  Payload ID: 561
  Gene Symbol: ADAMTS14
  Gene Name: ADAM metallopeptidase with thrombospondin type 1 motif, 14
  Uniprot ID: Q8WXS8
  ENST ID: ENST00000373208
  CDS Start-End: 1-3681
atggctccactccgcgcgctgctgtcctacctgctgcctttgcactgtgcgctctgcgccgccgcgggcagccggaccccagagctgcacctctctggaaagctcagtgactatggtgtgacagtgccctgcagcacagactttcggggacgcttcctctcccacgtggtgtctggcccagcagcagcctctgcagggagcatggtagtggacacgccacccacactaccacgacactccagtcacctccgggtggctcgcagccctctgcacccaggagggaccctgtggcctggcagggtggggcgccactccctctacttcaatgtcactgttttcgggaaggaactgcacttgcgcctgcggcccaatcggaggttggtagtgccaggatcctcagtggagtggcaggaggattttcgggagctgttccggcagcccttacggcaggagtgtgtgtacactggaggtgtcactggaatgcctggggcagctgttgccatcagcaactgtgacggattggcgggcctcatccgcacagacagcaccgacttcttcattgagcctctggagcggggccagcaggagaaggaggccagcgggaggacacatgtggtgtaccgccgggaggccgtccagcaggagtgggcagaacctgacggggacctgcacaatgaagcctttggcctgggagaccttcccaacctgctgggcctggtgggggaccagctgggcgacacagagcggaagcggcggcatgccaagccaggcagctacagcatcgaggtgctgctggtggtggacgactcggtggttcgcttccatggcaaggagcatgtgcagaactatgtcctcaccctcatgaatatcgtagatgagatttaccacgatgagtccctgggggttcatataaatattgccctcgtccgcttgatcatggttggctaccgacagtccctgagcctgatcgagcgcgggaacccctcacgcagcctggagcaggtgtgtcgctgggcacactcccagcagcgccaggaccccagccacgctgagcaccatgaccacgttgtgttcctcacccggcaggactttgggccctcaggtatgcaagggtatgcacccgtcactggcatgtgtcaccccctgaggagctgtgccctcaaccatgaggatggcttctcctcagccttcgtgatagctcatgagaccggccacgtgctcggcatggagcatgacggtcaggggaatggctgtgcagatgagaccagcctgggcagcgtcatggcgcccctggtgcaggctgccttccaccgcttccattggtcccgctgcagcaagctggagctcagccgctacctcccctcctacgactgcctcctcgatgacccctttgatcctgcctggccccagcccccagagctgcctgggatcaactactcaatggatgagcagtgccgctttgactttggcagtggctaccagacctgcttggcattcaggacctttgagccctgcaagcagctgtggtgcagccatcctgacaacccgtacttctgcaagaccaagaaggggcccccgctggatgggactgagtgtgcacccggcaagtggtgcttcaaaggtcactgcatctggaagtcgccggagcagacatatggccaggatggaggctggagctcctggaccaagtttgggtcatgttcgcggtcatgtgggggcggggtgcgatcccgcagccggagctgcaacaacccctccccagcctatggaggccgcctgtgcttagggcccatgttcgagtaccaggtctgcaacagcgaggagtgccctgggacctacgaggacttccgggcccagcagtgtgccaagcgcaactcctactatgtgcaccagaatgccaagcacagctgggtgccctacgagcctgacgatgacgcccagaagtgtgagctgatctgccagtcggcggacacgggggacgtggtgttcatgaaccaggtggttcacgatgggacacgctgcagctaccgggacccatacagcgtctgtgcgcgtggcgagtgtgtgcctgtcggctgtgacaaggaggtggggtccatgaaggcggatgacaagtgtggagtctgcgggggtgacaactcccactgcaggactgtgaaggggacgctgggcaaggcctccaagcaggcaggagctctcaagctggtgcagatcccagcaggtgccaggcacatccagattgaggcactggagaagtccccccaccgcattgtggtgaagaaccaggtcaccggcagcttcatcctcaaccccaagggcaaggaagccacaagccggaccttcaccgccatgggcctggagtgggaggatgcggtggaggatgccaaggaaagcctcaagaccagcgggcccctgcctgaagccattgccatcctggctctccccccaactgagggtggcccccgcagcagcctggcctacaagtacgtcatccatgaggacctgctgccccttatcgggagcaacaatgtgctcctggaggagatggacacctatgagtgggcgctcaagagctgggccccctgcagcaaggcctgtggaggagggatccagttcaccaaatacggctgccggcgcagacgagaccaccacatggtgcagcgacacctgtgtgaccacaagaagaggcccaagcccatccgccggcgctgcaaccagcacccgtgctctcagcctgtgtgggtgacggaggagtggggtgcctgcagccggagctgtgggaagctgggggtgcagacacgggggatacagtgcctgctgcccctctccaatggaacccacaaggtcatgccggccaaagcctgcgccggggaccggcctgaggcccgacggccctgtctccgagtgccctgcccagcccagtggaggctgggagcctggtcccagtgctctgccacctgtggagagggcatccagcagcggcaggtggtgtgcaggaccaacgccaacagcctcgggcattgcgagggggataggccagacactgtccaggtctgcagcctgcccgcctgtggaggaaatcaccagaactccacggtgagggccgatgtctgggaacttgggacgccagaggggcagtgggtgccacaatctgaacccctacatcccattaacaagatatcatcaacggagccctgcacgggagacaggtctgtcttctgccagatggaagtgctcgatcgctactgctccattcccggctaccaccggctctgctgtgtgtcctgcatcaagaaggcctcgggccccaaccctggcccagaccctggcccaacctcactgccccccttctccactcctggaagccccttaccaggaccccaggaccctgcagatgctgcagagcctcctggaaagccaacgggatcagaggaccatcagcatggccgagccacacagctcccaggagctctggatacaagctccccagggacccagcatccctttgcccctgagacaccaatccctggagcatcctggagcatctcccctaccacccccggggggctgccttggggctggactcagacacctacgccagtccctgaggacaaagggcaacctggagaagacctgagacatcccggcaccagcctccctgctgcctccccggtgacatgagctgtgccctgccatcccactggcacgtttacactctgtgtactgccccgtgactcccagctcagaggacacacatagcagggcaggcgcaagcacagacttcattttaaatcattcgccttcttctcgtttggggctgtgatgctctttaccccacaaagcggggtgggaggaagacaaagatcagggaaagccctaatcggagatacctcagcaagctgcccccggcgggactgaccctctcagggcccctgttggtctcccctgccaagaccagggtcaactattgctccctcctcacagaccctgggcctgggcaggtctgaatcccggctggtctgtagctagaagctgtcagggctgcctgccttcccggaactgtgaggacccctgtggaggccctgcatatttggcccctctccccagaaaggcaaagcagggccagggtaggtgggggactgttcacagccaggccgagaggaggggggcctgggaatgtggcatgaggcttcccagctgcagggctggagggggtggaacacaaggtgatcgcaggcccagctcctggaagccaagagctccatgcagttccaccagctgaggccaggcagcagaggccagtttgtctttgctggccagaagatggtgctcatggccatactctggccttgcagatgtcactagtgttacttctagtgactccagattacagactggccccccaatctcaccccagcccaccagagaagggggctcaggacaccctggaccccaagtcctcagcatccagggatttccaaactggcgctcactccctgactccaccaggatggcaacttcaattatcactctcagcctggaaggggactctgtgggacacagagggaacacgatttctcaggctgtcccttcaatcattgcccttctccgaagatcgctcctgctggagtcggacatcttcatcttctacctggctcaagctgggccagagtgtgtggttctcccaggggtggttggaccccaggactgaggaccagagtccactcatagcctggccctggagatgacaagggccacccaggccaagtgccccagggcagggtgccagcccctggcctggtgctggagtggggaagacacactcacccacggtgctgtaagggcctgagctgtgctcagctgccggccatgctacctccaagggacaggtaacagtcttagatcctctggctctcaggaagtggcagggggtcccaggacacctccggggtcttggaggatgtctcctaaactcctgccaggtgatagaggtgcttctcacttcttccttccccaaggcaaaggggctgttctgagccagcctggaggaacatgagtagtgggcccctggcctgcaacccctttggagagtggaggtcctggggggctccccgccctccccctgttgccctcccctccctgggatgctggggcacacgcggagtcattcctgtgagaaccagcctggcctgtgttaaactcttgtgccttggaaatccagatctttaaaattttatgtatttattaacatcgccattggaccccaaaa

SEQ ID NO: 104732 - DNA, 5673 bp, Homo sapiens
  Payload ID: 562
  Gene Symbol: ADAMTS15
  Gene Name: ADAM metallopeptidase with thrombospondin type 1 motif, 15
  Uniprot ID: Q8TE58
  ENST ID: ENST00000299164
  CDS Start-End: 1-2853
atgcttctgctgggcatcctaaccctggctttcgccgggcgaaccgctggaggctctgagccagagcgggaggtagtcgttcccatccgactggacccggacattaacggccgccgctactactggcggggtcccgaggactccggggatcagggactcatttttcagatcacagcatttcaggaggacttttacctacacctgacgccggatgctcagttcttggctcccgccttctccactgagcatctgggcgtccccctccaggggctcaccgggggctcttcagacctgcgacgctgcttctattctggggacgtgaacgccgagccggactcgttcgctgctgtgagcctgtgcggggggctccgcggagcctttggctaccgaggcgccgagtatgtcattagcccgctgcccaatgctagcgcgccggcggcgcagcgcaacagccagggcgcacaccttctccagcgccggggtgttccgggcgggccttccggagaccccacctctcgctgcggggtggcctcgggctggaaccccgccatcctacgggccctggacccttacaagccgcggcgggcgggcttcggggagagtcgtagccggcgcaggtctgggcgcgccaagcgtttcgtgtctatcccgcggtacgtggagacgctggtggtcgcggacgagtcaatggtcaagttccacggcgcggacctggaacattatctgctgacgctgctggcaacggcggcgcgactctaccgccatcccagcatcctcaaccccatcaacatcgttgtggtcaaggtgctgcttcttagagatcgtgactccgggcccaaggtcaccggcaatgcggccctgacgctgcgcaacttctgtgcctggcagaagaagctgaacaaagtgagtgacaagcaccccgagtactgggacactgccatcctcttcaccaggcaggacctgtgtggagccaccacctgtgacaccctgggcatggctgatgtgggtaccatgtgtgaccccaagagaagctgctctgtcattgaggacgatgggcttccatcagccttcaccactgcccacgagctgggccacgtgttcaacatgccccatgacaatgtgaaagtctgtgaggaggtgtttgggaagctccgagccaaccacatgatgtccccgaccctcatccagatcgaccgtgccaacccctggtcagcctgcagtgctgccatcatcaccgacttcctggacagcgggcacggtgactgcctcctggaccaacccagcaagcccatctccctgcccgaggatctgccgggcgccagctacaccctgagccagcagtgcgagctggcttttggcgtgggctccaagccctgtccttacatgcagtactgcaccaagctgtggtgcaccgggaaggccaagggacagatggtgtgccagacccgccacttcccctgggccgatggcaccagctgtggcgagggcaagctctgcctcaaaggggcctgcgtggagagacacaacctcaacaagcacagggtggatggttcctgggccaaatgggatccctatggcccctgctcgcgcacatgtggtgggggcgtgcagctggccaggaggcagtgcaccaaccccacccctgccaacgggggcaagtactgcgagggagtgagggtgaaataccgatcctgcaatctggagccctgccccagctcagcctccggaaagagcttccgggaggagcagtgtgaggctttcaacggctacaaccacagcaccaaccggctcactctcgccgtggcatgggtgcccaagtactccggcgtgtctccccgggacaagtgcaagctcatctgccgagccaatggcactggctacttctatgtgctggcacccaaggtggtggacggcacgctgtgctctcctgactccacctccgtctgtgtccaaggcaagtgcatcaaggctggctgtgatgggaacctgggctccaagaagagattcgacaagtgtggggtgtgtgggggagacaataagagctgcaagaaggtgactggactcttcaccaagcccatgcatggctacaatttcgtggtggccatccccgcaggcgcctcaagcatcgacatccgccagcgcggttacaaagggctgatcggggatgacaactacctggctctgaagaacagccaaggcaagtacctgctcaacgggcatttcgtggtgtcggcggtggagcgggacctggtggtgaagggcagtctgctgcggtacagcggcacgggcacagcggtggagagcctgcaggcttcccggcccatcctggagccgctgaccgtggaggtcctctccgtggggaagatgacaccgccccgggtccgctactccttctatctgcccaaagagcctcgggaggacaagtcctctcatcccaaggacccccggggaccctctgtcttgcacaacagcgtcctcagcctctccaaccaggtggagcagccggacgacaggccccctgcacgctgggtggctggcagctgggggccgtgctccgcgagctgcggcagtggcctgcagaagcgggcggtggactgccggggctccgccgggcagcgcacggtccctgcctgtgatgcagcccatcggcccgtggagacacaagcctgcggggagccctgccccacctgggagctcagcgcctggtcaccctgctccaagagctgcggccggggatttcagaggcgctcactcaagtgtgtgggccacggaggccggctgctggcccgggaccagtgcaacttgcaccgcaagccccaggagctggacttctgcgtcctgaggccgtgctgagtggggtcatcgctttctccccctcactctccaccccactgatatgccagcgttctgccagctggagtagcgggcagaggacggtggccaggggctcacgccacgatgtcacccacatccggggacaaggaccatgggctggggcgagaggttccctcctcctccctggactgggcagagggaagcccaggaactcccgcacagtctacctcaggccccgctcctcgggccggttgcggggagaggctttgaggtgcagggcagaaggtgctgaggcccagtttccaaggaacttggaggatgggcaccttccaggcagaacttcagggaccccggcccccagaacggaggccacaggctgctggaagagccatgtcccagcagcttggcaccctcaggtggccccatgggctctgagccgtgtctgaacgaggcagggttttcacggtgcttttagcccactttcctttttgaactgacatggactaagcaataaaagctggctggggctgggcagaagccacggggagagtgagattagggcccctggagcctggcactccaccttggaagacgtggacgtgcacagggagtcccgaggtttctcatcctgcactcttggccctcctataaagaagcagcctctccttcctctgatgtgcagggtgtaggactagtggtagggctgccacggaagtgtcctctgaggctctgcaggtagcggggaaagccagtagggagtctgctgtcttcttcaagatggagccggccattacagaaagatgttgacatttgctaggggctatgcagtctgtggctgatgcagggagttttcagaaagttctggagggttctgctgtcactggactggggttggtgctgagctctgggcctggctttgggagatgtcaccctgggatagggaggaggaagctgcatttctaatggcttcctcctccagagaggcacgtatatgcaggctgacatccgagggtctgtgtcgcctcagacagccctgacagtggccacagtcccgtacccattgtgaggggctggggcatgcctaggagggctaggtgctgaacatctatgtgcctataaactcgtcttcgttccaaacagctactgctgtctgccctgggcacgtcacgttgcatcctaggccttagcttctccactgtttgctacctcagattatgccctctgggaacccagccgtatccctcccctaggacagtggtgacctggtccttccaccacactcagtctttggagagcgagctgtccagccacagaaatgagggtgtggtgcgtggcttcctgctccccacagcccagccccctgttggggctccaaagccgaagacagggcctcttcagactccttgggagtaggtttcaggaggcaccaagaatcaatgactgacccagggggcctggcagccactagtatgaactgctggagacctgtctgtcttatagacatgtcaggaaaatagaaacaggcattttctctagctccaagtggggagatattttggggtcacagcttctttggctaagcagggtgtttcttgaaggttcagatgccccactgtgtacatgggatattctgcttctgagtgtaggtgatgaatccaggtcctcagtggagaattttctggagctaagatcaaagcatgtgtcttcctgggagagaagagttccgttcttttatgtgggtttccctaatagtcagaatccacaaaccagccagccagccagccaagcctctgcgatgatgttctcatccggtctaacgctgggctggaaaccttggacagagttcatgcgggggcagagggggtgccagtctctgaggcagggctgcagtcacccctgaagaactaagtgaacaggaacccctctgtgccagtgaccactgtggggctaaagggacaaaaaggaccagggtaccaggcagaagcagatccttgatagctgacgacagcactgcgccctgtgcttggtgcactccctccttcaggaggagagggtggcatggggtctgtgcgggatggcagggggattgggtgggtgggaagagaggtgccatcggtaggaggctggcctccagtagaggagagcagcttttgccatcagtcactttacaaaccatttcaaggaaggacaacctctctggctcctgacacaagccaggcctcggtgcttttatctgttgtggtggtttttcttctttccctttttaaaagacgcatgaccaagacaacctagggagtttgtcttgcttgcctttgactatttccttaatccaaccatgctctcgagggctgagcagagactagactcaaggcacaggtttctggtgatggagtaaagttacagcggtatctcatgtctacacaagaagaggaacgttctgaaagctccaacaacttcttgagggggatggaccaatacagctttgggctcaggattccctagcctcctctgcccatcgcgtgcactgattggaggagtctggcccaaacactctcatatgaacctcgacatgctggagtggggtctggcaggagctgatgacagtttgagggacttgagtgtccctagcctggcagttggctcccggaagcactagacactgacactcattggtagaccctccctccccgccgttgtgtttggttcttttgcactccatgtactgcagaaggatggaaggacctgggtgctggctgggctgtgtatactgtgtatacaagggagctggctgctgaggtgaccacagccttctcctaataaagctgtaagtatttaaaa

SEQ ID NO: 104733 - DNA, 4979 bp, Homo sapiens
  Payload ID: 563
  Gene Symbol: ADAMTS16
  Gene Name: ADAM metallopeptidase with thrombospondin type 1 motif, 16
  Uniprot ID: Q8TE57
  ENST ID: ENST00000274181
  CDS Start-End: 139-3813
agtaataaccccggcgcggcggcggagtcgctgtggggaatcctcccgcgctctgcctgggtcgggtcctccctgcccgctcgcacgctgccggccggggaccctccggtggcccctagcccctcggagcgctcctggatgaagccccgcgcgcgcggatggcggggcttggcggcgctgtggatgctgttggcgcaggtggccgagcaggcacctgcgtgcgccatgggacccgcagcggcagcgcctgggagcccgagcgtcccgcgtcctcctccacccgcggagcggccgggctggatggaaaagggcgaatatgacctggtctctgcctacgaggttgaccacaggggcgattacgtgtcccatgaaatcatgcaccatcagcggcggagaagagcagtgcccgtgtccgaggttgagtctcttcaccttcggctgaaaggctccaggcacgacttccacatggatctgaggacttccagcagcctagtggctcctggctttattgtgcagacgttgggaaagacaggcactaagtctgtgcagactttaccgccagaggacttctgtttctatcaaggctctttgcgatcacacagaaactcctcagtggccctttcaacctgccaaggcttgtcaggcatgatacgaacagaagaggcagattacttcctaaggccacttccttcacacctctcatggaaactcggcagagctgcccaaggcagctcgccatcccacgtactgtacaagagatccacagagccccatgctcctggggccagtgaggtcctggtgacctcaaggacatgggagctggcacatcaacccctgcacagcagcgaccttcgcctgggactgccacaaaagcagcatttctgtggaagacgcaagaaatacatgccccagcctcccaaggaagacctcttcatcttgccagatgagtataagtcttgcttacggcataagcgctctcttctgaggtcccatagaaatgaagaactgaacgtggagaccttggtggtggtcgacaaaaagatgatgcaaaaccatggccatgaaaatatcaccacctacgtgctcacgatactcaacatggtatctgctttattcaaagatggaacaataggaggaaacatcaacattgcaattgtaggtctgattcttctagaagatgaacagccaggactggtgataagtcaccacgcagaccacaccttaagtagcttctgccagtggcagtctggattgatggggaaagatgggactcgtcatgaccacgccatcttactgactggtctggatatatgttcctggaagaatgagccctgtgacactttgggatttgcacccataagtggaatgtgtagtaaatatcgcagctgcacgattaatgaagatacaggtcttggactggccttcaccattgcccatgagtctggacacaactttggcatgattcatgatggagaagggaacatgtgcaaaaagtccgagggcaacatcatgtcccctacattggcaggacgcaatggagtcttctcctggtcaccctgcagccgccagtatctacacaaatttctaagcaccgctcaagctatctgccttgctgatcagccaaagcctgtgaaggaatacaagtatcctgagaaattgccaggagaattatatgatgcaaacacacagtgcaagtggcagttcggagagaaagccaagctctgcatgctggactttaaaaaggacatctgtaaagccctgtggtgccatcgtattggaaggaaatgtgagactaaatttatgccagcagcagaaggcacaatttgtgggcatgacatgtggtgccggggaggacagtgtgtgaaatatggtgatgaaggccccaagcccacccatggccactggtcggactggtcttcttggtccccatgctccaggacctgcggagggggagtatctcataggagtcgcctctgcaccaaccccaagccatcgcatggagggaagttctgtgagggctccactcgcactctgaagctctgcaacagtcagaaatgtccccgggacagtgttgacttccgtgctgctcagtgtgccgagcacaacagcagacgattcagagggcggcactacaagtggaagccttacactcaagtagaagatcaggacttatgcaaactctactgtatcgcagaaggatttgatttcttcttttctttgtcaaataaagtcaaagatgggactccatgctcggaggatagccgtaatgtttgtatagatgggatatgtgagagagttggatgtgacaatgtccttggatctgatgctgttgaagacgtctgtggggtgtgtaacgggaataactcagcctgcacgattcacaggggtctctacaccaagcaccaccacaccaaccagtattatcacatggtcaccattccttctggagcccggagtatccgcatctatgaaatgaacgtctctacctcctacatttctgtgcgcaatgccctcagaaggtactacctgaatgggcactggaccgtggactggcccggccggtacaaattttcgggcactactttcgactacagacggtcctataatgagcccgagaacttaatcgctactggaccaaccaacgagacactgattgtggagctgctgtttcagggaaggaacccgggtgttgcctgggaatactccatgcctcgcttggggaccgagaagcagccccctgcccagcccagctacacttgggccatcgtgcgctctgagtgctccgtgtcctgcggagggggacagatgaccgtgagagagggctgctacagagacctgaagtttcaagtaaatatgtccttctgcaatcccaagacacgacctgtcacggggctggtgccttgcaaagtatctgcctgtcctcccagctggtccgtggggaactggagtgcctgcagtcggacgtgtggcgggggtgcccagagccgccccgtgcagtgcacacggcgggtgcactatgactcggagccagtcccggccagcctgtgccctcagcctgctccctccagcaggcaggcctgcaactctcagagctgcccacctgcatggagcgccgggccctgggcagagtgctcacacacctgtgggaaggggtggaggaagcgggcagtggcctgtaagagcaccaacccctcggccagagcgcagctgctgcccgacgctgtctgcacctccgagcccaagcccaggatgcatgaagcctgtctgcttcagcgctgccacaagcccaagaagctgcagtggctggtgtccgcctggtcccagtgctctgtgacatgtgaaagaggaacacagaaaagattcttaaaatgtgctgaaaagtatgtttctggaaagtatcgagagctggcctcaaagaagtgctcacatttgccgaagcccagcctggagctggaacgtgcctgcgccccgcttccatgccccaggcaccccccatttgctgctgcgggaccctcgaggggcagctggtttgcctcaccctggtctcagtgcacggccagctgtgggggaggcgttcagacgaggtccgtgcagtgcctggctgggggccggccggcctcaggctgcctcctgcaccagaagccttcggcctccctggcctgcaacactcacttctgccccattgcagagaagaaagatgccttctgcaaagactacttccactggtgctacctggtaccccagcacgggatgtgcagccacaagttctacggcaagcagtgctgcaagacttgctctaagtccaacttgtgagttgggaccgctctccgtagcagagaaagtgcctgcgtggcacagaaatttcccacaaatgagctgtgcaatctacgtcggaatacatccaaggaagagcaaagccaaaagaagaaaaccgtgttaggctctttgaccaggagtgtatgtatgtgtttcactgtgagcctgggtgcagacctgtgtccccatgcacacagtgtctcctgtcaggctgaaatgtggcaccctggcagacagagctgtggctcgtgaggcagaaggcaggcaccacaacgggagaggcagcactcacccctgcctgttgcagctaaatcaagtcaaaaagacaggcgaggctgaacttgctaaatgtctggtgccttagaaaaagaaggaaaggccatgaaataaggaaaacatacaaaatatgtaccccctagttcaccagcctcccctcccactaggagggcccctcgagccatcaggagtgaccaacttcctgggtggaggtcaggggagctccaggaggctgcccaggctcctcctcctcctccccagcggccgagcatctcttaccaggaacctggagccaccgccggagccagcgtcatctctagggtcactggccaggggactgcattctggtttgggactttgcctatggaaatgggaaaaatgaaattcctgctaaggtgcttctatctctttcagattcatgcattgaaggagagattttttatactttatgttttatctttctcagttatttgcaagtgagtgtccttttaaaaacacacttcttcatgcttttctttgtaaatgacagatcgaagtataggttacatcaaaaccctaccatcctgagaagagttatggttctattatagcagacgtcagccacacagcctatgtgacaataaccttagagtcctgtgttttgtttttgtgtgttgtgagattttaatcttttttttttcggtgagtctggccatttctataatgccaggtgggaagccaggctgcgggtgttagggtgggaatctgcccggcgtctctggcaccctccctgccatcctcagtgcggctgctgttctcctgtccggtgctgtggctccattccaaaggggcacctggatatttatatttgctgaagttttataataaagtttatatggtacagtgtg

SEQ ID NO: 104734 - DNA, 2682 bp, Homo sapiens
  Payload ID: 563
  Gene Symbol: ADAMTS16
  Gene Name: ADAM metallopeptidase with thrombospondin type 1 motif, 16
  ENST ID: ENST00000511368
  CDS Start-End: 139-1851
agtaataaccccggcgcggcggcggagtcgctgtggggaatcctcccgcgctctgcctgggtcgggtcctccctgcccgctcgcacgctgccggccggggaccctccggtggcccctagcccctcggagcgctcctggatgaagccccgcgcgcgcggatggcggggcttggcggcgctgtggatgctgttggcgcaggtggccgagcaggcacctgcgtgcgccatgggacccgcagcggcagcgcctgggagcccgagcgtcccgcgtcctcctccacccgcggagcggccgggctggatggaaaagggcgaatatgacctggtctctgcctacgaggttgaccacaggggcgattacgtgtcccatgaaatcatgcaccatcagcggcggagaagagcagtgcccgtgtccgaggttgagtctcttcaccttcggctgaaaggctccaggcacgacttccacatggatctgaggacttccagcagcctagtggctcctggctttattgtgcagacgttgggaaagacaggcactaagtctgtgcagactttaccgccagaggacttctgtttctatcaaggctctttgcgatcacacagaaactcctcagtggccctttcaacctgccaaggcttgtcaggcatgatacgaacagaagaggcagattacttcctaaggccacttccttcacacctctcatggaaactcggcagagctgcccaaggcagctcgccatcccacgtactgtacaagagatccacagagccccatgctcctggggccagtgaggtcctggtgacctcaaggacatgggagctggcacatcaacccctgcacagcagcgaccttcgcctgggactgccacaaaagcagcatttctgtggaagacgcaagaaatacatgccccagcctcccaaggaagacctcttcatcttgccagatgagtataagtcttgcttacggcataagcgctctcttctgaggtcccatagaaatgaagaactgaacgtggagaccttggtggtggtcgacaaaaagatgatgcaaaaccatggccatgaaaatatcaccacctacgtgctcacgatactcaacatggtatctgctttattcaaagatggaacaataggaggaaacatcaacattgcaattgtaggtctgattcttctagaagatgaacagccaggactggtgataagtcaccacgcagaccacaccttaagtagcttctgccagtggcagtctggattgatggggaaagatgggactcgtcatgaccacgccatcttactgactggtctggatatatgttcctggaagaatgagccctgtgacactttgggatttgcacccataagtggaatgtgtagtaaatatcgcagctgcacgattaatgaagatacaggtcttggactggccttcaccattgcccatgagtctggacacaactttggcatgattcatgatggagaagggaacatgtgcaaaaagtccgagggcaacatcatgtcccctacattggcaggacgcaatggagtcttctcctggtcaccctgcagccgccagtatctacacaaatttctaagcaccgctcaagctatctgccttgctgatcagccaaagcctgtgaaggaatacaagtatcctgagaaattgccaggagaattatatgatgcaaacacacagtgcaagtggcagttcggagagaaagccaagctctgcatgctggactttaaaaaggacatctgtaaagccctgtggtgccatcgtattggaaggaaatgtgagactaaatttatgccagcagcagaaggcacaatttgtgggcatgacatggtaagaagctaactgtaggtacagcatcgtattcagatgctagtctttcaacccatgcatctttgctcctcttgcataggtatttttaaaacatgtatttctcatatacatatgcatacccatgctcctatcaaacactgtgtttattttatattgataatgtgaagaggaatccttttctcacttttgtgaaaataaaattgatgagctacctggaattcatagacatagaaatcagacaacaggtgatgacagattcagtctattgaggggaaacattaagccattgaccaccatttatcatggaaaggaccagcattaaacagtgctgtgaaagccacagaacatcggtttgaagaccctggagcacatcattttcacctattgttgcctctgtgagaagagagagagctatggtagagaaaagaagaagtatacaagatgttgcagcaatgtggacgtagttggaggccattcattatcctaggcaaactaatgcaggaacagaaaaccaaatactgcatgttgttacttataagcaggagctaaacactgagtacacatggacacaaagatgggaaccatagaccccggggactacttaaggggggatggtgggagggggcaagggttgaaacactatcccatattgtgcttgctgcatgggtgatgaggttattcgaatgccaaactttagtgacacgtaatctacccatgtaacaaatctgcacatgtacccctgaacctaaaacaaaagtcggaaaaaaaagaaatatacaagataacaagtttattactaaatggtaaagaatgacaatttcattattaaaactttaaaaaatt

SEQ ID NO: 104735 - DNA, 6207 bp, Homo sapiens
  Payload ID: 564
  Gene Symbol: ADAMTS17
  Gene Name: ADAM metallopeptidase with thrombospondin type 1 motif, 17
  Uniprot ID: Q8TE56
  ENST ID: ENST00000268070
  CDS Start-End: 107-3394
aattactttttccaaaggctggagggcttcactccggctggcgccgccgcctagcgcgctcctgcttcgccgccacggtccgggggggctgccggtcccgggtaccatgtgtgacggcgccctgctgcctccgctcgtcctgcccgtgctgctgctgctggtttggggactggacccgggcacagctgtcggcgacgcggcggccgacgtggaggtggtgctcccgtggcgggtgcgccccgacgacgtgcacctgccgccgctgcccgcagcccccgggccccgacggcggcgacgcccccgcacgcccccagccgccccgcgcgcccggcccggagagcgcgccctgctgctgcacctgccggccttcgggcgcgacctgtaccttcagctgcgccgcgacctgcgcttcctgtcccgaggcttcgaggtggaggaggcgggcgcggcccggcgccgcggccgccccgccgagctgtgcttctactcgggccgtgtgctcggccaccccggctccctcgtctcgctcagcgcctgcggcgccgccggcggcctggttggcctcattcagcttgggcaggagcaggtgctaatccagcccctcaacaactcccagggcccattcagtggacgagaacatctgatcaggcgcaaatggtccttgacccccagcccttctgctgaggcccagagacctgagcagctctgcaaggttctaacagaaaagaagaagccgacgtggggcaggccttcgcgggactggcgggagcggaggaacgctatccggctcaccagcgagcacacggtggagaccctggtggtggccgacgccgacatggtgcagtaccacggggccgaggccgcccagaggttcatcctgaccgtcatgaacatggtatacaatatgtttcagcaccagagcctggggattaaaattaacattcaagtgaccaagcttgtcctgctacgacaacgtcccgctaagttgtccattgggcaccatggtgagcggtccctggagagcttctgtcactggcagaacgaggagtatggaggagcgcgatacctcggcaataaccaggttcccggcgggaaggacgacccgcccctggtggatgctgccgtgtttgtgaccaggacagatttctgtgtacacaaggatgaaccgtgtgacactgttggaattgcttacttaggaggtgtgtgcagtgctaagaggaagtgtgtgcttgccgaagacaatggtctcaatttggcctttaccatcgcccatgagctgggccacaacttgggcatgaaccacgacgatgaccactcatcttgcgctggcaggtcccacatcatgtcaggagagtgggtgaaaggccggaacccaagtgacctctcttggtcctcctgcagccgagatgaccttgaaaacttcctcaagtcaaaagtcagcacctgcttgctagtcacggaccccagaagccagcacacagtacgcctcccgcacaagctgccgggcatgcactacagtgccaacgagcagtgccagatcctgtttggcatgaatgccaccttctgcagaaacatggagcatctaatgtgtgctggactgtggtgcctggtagaaggagacacatcctgcaagaccaagctggaccctcccctggatggcaccgagtgtggggcagacaagtggtgccgcgcgggggagtgcgtgagcaagacgcccatcccggagcatgtggacggagactggagcccgtggggcgcctggagcatgtgcagccgaacatgtgggacgggagcccgcttcaggcagaggaaatgtgacaaccccccccctgggcctggaggcacacactgcccgggtgccagtgtagaacatgcggtctgcgagaacctgccctgccccaagggtctgcccagcttccgggaccagcagtgccaggcacacgaccggctgagccccaagaagaaaggcctgctgacagccgtggtggttgacgataagccatgtgaactctactgctcgcccctcgggaaggagtccccactgctggtggccgacagggtcctggacggtacaccctgcgggccctacgagactgatctctgcgtgcacggcaagtgccagaaaatcggctgtgacggcatcatcgggtctgcagccaaagaggacagatgcggggtctgcagcggggacggcaagacctgccacttggtgaagggcgacttcagccacgcccgggggacagctctcaaagactcgggtaaggggtccatcaacagtgactggaagatagagctccccggagagttccagattgcaggcacaactgttcgctatgtgagaagggggctgtgggagaagatctctgccaagggaccaaccaaactaccgctgcacttgatggtgttgttatttcacgaccaagattatggaattcattatgaatacactgttcctgtaaaccgcactgcggaaaatcaaagcgaaccagaaaaaccgcaggactctttgttcatctggacccacagcggctgggaagggtgcagtgtgcagtgcggcggaggggagcgcagaaccatcgtctcgtgtacacggattgtcaacaagaccacaactctggtgaacgacagtgactgccctcaagcaagccgcccagagccccaggtccgaaggtgcaacttgcacccctgccagtcacggtgggtggcaggcccgtggagcccctgctcggcgacctgtgagaaaggcttccagcaccgggaggtgacctgcgtgtaccagctgcagaacggcacacacgtcgctacgcggcccctctactgcccgggcccccggccggcggcagtgcagagctgtgaaggccaggactgcctgtccatctgggaggcgtctgagtggtcacagtgctctgccagctgtggtaaaggggtgtggaaacggaccgtggcgtgcaccaactcacaagggaaatgcgacgcatccacgaggccgagagccgaggaggcctgcgaggactactcaggctgctacgagtggaaaactggggactggtctacgtgctcgtcgacctgcgggaagggcctgcagtcccgggtggtgcagtgcatgcacaaggtcacagggcgccacggcagcgagtgccccgccctctcgaagcctgccccctacagacagtgctaccaggaggtctgcaacgacaggatcaacgccaacaccatcacctccccccgccttgctgctctgacctacaaatgcacacgagaccagtggacggtatattgccgggtcatccgagaaaagaacctctgccaggacatgcggtggtaccagcgctgctgccagacctgcagggacttctatgcaaacaagatgcgccagccaccgccgaactcgtgacacgcagtcccaagggtcgctcaaagctcagactcaggtctgaaacccacccacccgcaagcctaccagccttgtggccacgcccccacccggctgccacaagaatccaactacatagaacatgagcgtggacttggcgtttgccattagtgcttccgtacttaatatattgttaacagccactggctggctttctacagtgaggagaaagtaggcatgagtcacaaagtaacttcaatttctaggatttcaggtacctcgaagggaagcacctctggcagacaaccgtcaagagagagacatcatttagtgttcttgtcttgactcgcttttgacatttgaatttccagtgcttggtatatcatggaggaaacatccccaaaacgagacatgctagaaaaggctttattctgaaagccggcgacaccatggagggaggggcaggtgttggtgagcctctgcccgtggcttctctggggagggccgggctgcttagcacacgtttctctccatctaccttcttgaccacatgagaaccaggacgttgcctccatgcccgtctctgagaacatagtctctaaatcctaggtgttgccttggaagtctcgtgcgtggagtgtaaatctatatatgccagcgaggacagcagtgccacgcagttcataccacccgcatgggaagaatgttccaagagagtctgggtttggggaagcatctaattttcagagctctgctgtccaccgtgtagggaaacagaagggcctctcttcaaggtgctgtgacataagaaacggtaattgcggtgatggggttgcttcctaaggcaaaggtaagcttgggccagcttcactggggcggatgggcacctgccccgccttccgggaacatccactctggcctgcacttcctaaagctttgtaccttagagatgctgtaccacatcccagtggctttctaccgaccgtggccatttatctgaaggtaagacgacatttgggacctctgaggacacaagcccaggcctaggatctgtagagcaaggcctgactgctctatcctggcacggagcagcctgatgtgccaggaccaggggaggaacgccatctggctggcactgctgcacacccgccgagccttcctgtagccccagactttgtggtacccattatcatcacgcctgtcatcattgacccatcttcttggtggggcaaggatgatgcatgatgaaggaaggtccttcccccctgcagcccccttacgcctggcagcagacaagcagagtggcctctttgagagcacagaggatggtagcaccctacctgcaaggaggccgggcagggaccctagatgccaggaggcctgttttgctcaccaacttggtgggcatttcatgggtgcttatgttctaggactttaccgtaaataacacctcctccctgatttcagacggaaggtctcacttggacttccatgggatcatctccctgtgcttcttgatttattggtgctgtgtttctgtgttttgttttgttacatgtcacaaccgtagagttagcttaaatcagaaagaagcctctctgccttctccaccctgtcttacgagctgtgtttttgtttttactaccctagaggcagagaagcggtagggatgtcagggaatttactcacttccacttgaatcaacgagaagtgttgagaaacttccgtgggtgctctgtggaaagaaccgagggtgtcaggatggagcggcccaccctcgccccgcggcctgcgcagactgctgtcctccccttcaggcctggccaccagcagactcccatgaattcccattttcacaaagccctcaaaattttgggggcgctgaggttcaattttcttcatccccaaatgaactgttaattcactgaaagacatttagacttttgcagccaaggagcagagccgggcaagctcactaaggaagccttagcttggtctcctgcatgggccccggggcctccagatatgcccactgtcaccctggcaagggccccacaccctcagaatgaaaaggattgattgggttattgtcagatacccccattagttcccctaaagtctgcatctgcagagctcttttagctcatctttttgttgtcggtgttgttttttgagacagagtctccctctgttgcccaggctggagtgcagtggcgcgatctcagctcattgaaagctccgcctcccgggttcaggccattcttctgcctcaccctccccagtagctgggactacaggcgcccaccaccacgcccacctacttttttgtatttttactagagacggggtttcaccatgttagccaggatggtctcgatctcctgacctcatgatccacccgcctcagccttccaaagtgctgggattacaggagtgagccaccgcgcccggccttttagcttatcttgaaatccaccagcctaccttctgttcatggcacgagcagtgatttcagtgaaaccatcataaacattcttgttccactagatgctgatcacagcagtgatgtttctgtgttaataccctgtactgtccctcgagtactgtacctttgtgcttgcacacgtgtcactaacgcacgtgttaccagagtctcacgaccctacggtgctatttttattggtgcaaaattaaaccctctcagctgaccgttgctggataggatcagaatgcaggaaaagagcctctatggcaatacgattgtccttttttcgtttcagagtcaaatgtatctattttccattcgttaacttgcattacatactgtacccatg

SEQ ID NO: 104736 - DNA, 571 bp, Homo sapiens
  Payload ID: 564
  Gene Symbol: ADAMTS17
  Gene Name: ADAM metallopeptidase with thrombospondin type 1 motif, 17
  ENST ID: ENST00000558960
  CDS Start-End: 107-313
aattactttttccaaaggctggagggcttcactccggctggcgccgccgcctagcgcgctcctgcttcgccgccacggtccgggggggctgccggtcccgggtaccatgtgtgacggcgccctgctgcctccgctcgtcctgcccgtgctgctgctgctggtttggggactggacccgggcacaggttggcctcattcagcttgggcaggagcaggtgctaatccagcccctcaacaactcccagggcccattcagtggacgagaacatctgatcaggcgcaaatggtccttgacccccagcccttctgctgaggcccagagacctgagcagctctgcaaggttctaacagaaaagaagaagccgacgtggggcaggccttcgcgggactggcgggagcggaggaacgctatccggctcaccagcgagcacacggtggagaccctggtggtggccgacgccgacatggtgcagtaccacggggccgaggccgcccagaggttcatcctgaccgtcatgaacatggtatacaatatgtttcagcaccagagcctggggattaaaattaacat

SEQ ID NO: 104737 - DNA, 643 bp, Homo sapiens
  Payload ID: 564
  Gene Symbol: ADAMTS17
  Gene Name: ADAM metallopeptidase with thrombospondin type 1 motif, 17
  ENST ID: ENST00000568565
  CDS Start-End: 1-643
gtgaactctactgctcgcccctcgggaaggagtccccactgctggtggccgacagggtcctggacggtacaccctgcgggccctacgagactgatctctgcgtgcacggcaagtgccagaaaatcggctgtgacggcatcatcgggtctgcagccaaagaggacagatgcggggtctgcagcggggacggcaagacctgccacttggtgaagggcgacttcagccacgcccgggggacaggttatatcgaagctgccgtcattcctgctggagctcggaggatccgtgtggtggaggataaacctgcccacagctttctggctctcaaagactcgggtaaggggtccatcaacagtgactggaagatagagctccccggagagttccagattgcaggcacaactgttcgctatgtgagaagggggctgtgggagaagatctctgccaagggaccaaccaaactaccgctgcacttgatggtgttgttatttcacgaccaagattatggaattcattatgaatacactgttcctgtaaaccgcactgcggaaaatcaaagcgaaccagaaaaaccgcaggactctttgttcatctggacccacagcggctgggaagggtgcagtgtgcagtgcggcggaggtga

SEQ ID NO: 104738 - DNA, 954 bp, Homo sapiens
  Payload ID: 564
  Gene Symbol: ADAMTS17
  Gene Name: ADAM metallopeptidase with thrombospondin type 1 motif, 17
  ENST ID: ENST00000561355
  CDS Start-End: 1-362
gcggccgccccgccgagctgtgcttctactcgggccgtgtgctcggccaccccggctccctcgtctcgctcagcgcctgcggcgccgccggcggcctggttggcctcattcagcttgggcaggagcaggtgctaatccagcccctcaacaactcccagggcccattcagtggacgagaacatctgatcaggcgcaaatggtccttgacccccagcccttctgctgaggcccagagacctgagcagctctgcaaggttctaacagttccacagtgtctgggcctcacctgggaggacttgaaatctggaggctggagtgatctggaggtgcctcattcatgtgtctggcctggaggtggatgacttgaagacaaggacaacaacgtggagcgtctacctgtggcctctgcagcttggcgtccataccttggtggcagacatacttcttctatggccaccagggctcccaatgcaagagttcccgcaagcccagcaggagctgtgctgcctttgaggatcagcctcagaaatcctagagcatcactctgaaggtactctgttggctgaagcggttagaaacctacccaggttcaagggcagagagatagaccccaccgctcaatgtcaaagaatttgggggccttatttaaaacctcttcacacctctataactgtaggtaggtgacaccgctagtgacaaagggctactgtgcagagggatcagagacagctcgaggagagagcatattccatagttcagagacagcataccgggtatggggctcttcagcccagctttggacattggtgtgcatcaactgtgggcattgggcctagagaaggctttggtgtcagagctgtggtgtagtcactctgagtgtccttggtcagttaattgattatagctttacggagataaaattaacatgcaataaactgaatatattcaaatgta

SEQ ID NO: 104739 - DNA, 5913 bp, Homo sapiens
  Payload ID: 565
  Gene Symbol: ADAMTS18
  Gene Name: ADAM metallopeptidase with thrombospondin type 1 motif, 18
  Uniprot ID: Q8TE60
  ENST ID: ENST00000282849
  CDS Start-End: 420-4085
aatcaccgcgcggtggagaggcgggcgctcggctccggcgcgctgggggagccagctggcgctgtcttccccatcgcctcagacgctcacaccgacacagacagacgcacagacgggcgggcagacaccgacagtctcccaaccgtttgcgctccagtcccggcccagggagccccccgtaccctctggggtgccgcaaactgcagctcggcaggcccgcgccgggagaagggagggcgcgcaggcggccggaggaggggaggtcccagcgcgcccccgctgcgatgtgaacggcggcggctctcacctggagccgcacctggggcgccgagctccggggccgcggaaagaatgcgcgccgcccgtgcgctccgcctgccgcgtctggccacccgcagccgccgcgtccgcacctgaccatggagtgcgccctcctgctcgcgtgtgccttcccggctgcgggttcgggcccgccgaggggcctggcgggactggggcgcgtggccaaggcgctccagctgtgctgcctctgctgtgcgtcggtcgccgcggccttagccagtgacagcagcagcggcgccagcggattaaatgatgattacgtctttgtcacgccagtagaagtagactcagccgggtcatatatttcacacgacattttgcacaacggcaggaaaaagcgatcggcgcagaatgccagaagctccctgcactaccgattttcagcatttggacaggaactgcacttagaacttaagccctcggcgattttgagcagtcactttattgtccaggtacttggaaaagatggtgcttcagagactcagaaacccgaggtgcagcaatgcttctatcagggatttatcagaaatgacagctcctcctctgtcgctgtgtctacgtgtgctggcttgtcaggtttaataaggacacgaaaaaatgaattcctcatctcgccattacctcagcttctggcccaggaacacaactacagctcccctgcgggtcaccatcctcacgtactgtacaaaaggacagcagaggagaagatccagcggtaccgtggctaccccggctctggccggaattatcctggttactccccaagtcacattccccatgcatctcagagtcgagagacagagtatcaccatcgaaggttgcaaaagcagcatttttgtggacgacgcaagaaatatgctcccaagcctcccacagaggacacctatctaaggtttgatgaatatgggagctctgggcgacccagaagatcagctggaaaatcacaaaagggcctcaatgtggaaaccctcgtggtggcagacaagaaaatggtggaaaagcatggcaagggaaatgtcaccacatacattctcacagtaatgaacatggtttctggcctatttaaagatgggactattggaagtgacataaacgtggttgtggtgagcctaattcttctggaacaagaacctggaggattattgatcaaccatcatgcagaccagtctctgaatagtttttgtcaatggcagtctgccctcattggaaagaatggcaagagacatgatcatgccatcttactaacaggatttgatatttgttcttggaagaatgaaccatgtgacactctagggtttgcccccatcagtggaatgtgctctaagtaccgaagttgtaccatcaatgaggacacaggacttggccttgccttcaccatcgctcatgagtcagggcacaactttggtatgattcacgatggagaagggaatccctgcagaaaggctgaaggcaatatcatgtctcccacactgaccggaaacaatggagtgttttcatggtcttcctgcagccgccagtatctcaagaaattcctcagcacacctcaggcggggtgtctagtggatgagcccaagcaagcaggacagtataaatatccggacaaactaccaggacagatttatgatgctgacacacagtgtaaatggcaatttggagcaaaagccaagttatgcagccttggttttgtgaaggatatttgcaaatcactttggtgccaccgagtaggccacaggtgtgagaccaagtttatgcccgcagcagaagggaccgtttgtggcttgagtatgtggtgtcggcaaggccagtgcgtaaagtttggggagctcgggccccggcccatccacggccagtggtccgcctggtcgaagtggtcagaatgttcccggacatgtggtggaggagtcaagttccaggagagacactgcaataaccccaagcctcagtatggtggcttattctgtccaggttctagccgtatttatcagctgtgcaatattaacccttgcaatgaaaatagcttggattttcgggctcaacagtgtgcagaatataacagcaaacctttccgtggatggttctaccagtggaaaccctatacaaaagtggaagaggaagatcgatgcaaactgtactgcaaggctgagaactttgaatttttttttgcaatgtccggcaaagtgaaagatggaactccctgctccccaaacaaaaatgatgtttgtattgacggggtttgtgaactagtgggatgtgatcatgaactaggctctaaagcagtttcagatgcttgtggcgtttgcaaaggtgataattcaacttgcaagttttataaaggcctgtacctcaaccagcataaagcaaatgaatattatccggtggtcctcattccagctggcgcccgaagcatcgaaatccaggagctgcaggtttcctccagttacctcgcagttcgaagcctcagtcaaaagtattacctcaccgggggctggagcatcgactggcctggggagttccccttcgctgggaccacgtttgaataccagcgctctttcaaccgcccggaacgtctgtacgcgccagggcccacaaatgagacgctggtctttgaaattctgatgcaaggcaaaaatccagggatagcttggaagtatgcacttcccaaggtcatgaatggaactccaccagccacaaaaagacctgcctatacctggagtatcgtgcagtcagagtgctccgtctcctgtggtggaggttacataaatgtaaaggccatttgcttgcgagatcaaaatactcaagtcaattcctcattctgcagtgcaaaaaccaagccagtaactgagcccaaaatctgcaacgctttctcctgcccggcttactggatgccaggtgaatggagtacatgcagcaaggcctgtgctggaggccagcagagccgaaagatccagtgtgtgcaaaagaagcccttccaaaaggaggaagcagtgttgcattctctctgtccagtgagcacacccactcaggtccaagcctgcaacagccatgcctgccctccacaatggagccttggaccctggtctcagtgttccaagacctgtggacgaggggtgaggaagcgtgaactcctctgcaagggctctgccgcagaaaccctccccgagagccagtgtaccagtctccccagacctgagctgcaggagggctgtgtgcttggacgatgccccaagaacagccggctacagtgggtcgcttcttcgtggagcgagtgttctgcaacctgtggtttgggtgtgaggaagagggagatgaagtgcagcgagaagggcttccagggaaagctgataactttcccagagcgaagatgccgtaatattaagaaaccaaatctggacttggaagagacctgcaaccgacgggcttgcccagcccatccagtgtacaacatggtagctggatggtattcattgccgtggcagcagtgcacagtcacctgtgggggaggggtccagacccggtcagtccactgtgttcagcaaggccggccttcctcaagttgtctgctccatcagaaacctccggtgctacgagcctgtaatacaaacttctgtccagctcctgaaaagagagaggatccatcctgcgtagatttcttcaactggtgtcacctagttcctcagcatggtgtctgcaaccacaagttttacggaaaacaatgctgcaagtcatgcacaaggaagatctgatcttggtgtcctccccagcaccttagggccaggggcttacctttcaacctctagagagaccagctgcctttgagaccaggagctgagcaccgagaaccatctgtgagctgccgctgtgatgaaggagcctgctctgaggaacagacaggttgccagtaggcttctagctcaattccctgaagcacgtggtactctgaagcacttgaaaatgggaagcgatgacaaatctgactttaaaaaaaatctttgatttgcactgttatatgcaagaagtggtgaatcacactgagatacgtcgatttggggagagacccccttttgaacttcaaagggttcaagggcaaagacatctgttttaaaaaggtcctttatgacttcaggtcaaagactgagactcagaactttcaaatctggatggaataccttgcctaactgttgcgtggagttcacagttcgactaaccctgtgaacacccaagccaggagttctatgagaagccaaatggtgctcgcaattgtgcttgctgctggactggcaagcttcatgttatgtttatttggtgtgcgtgtgtctttattattttgtgtaaactatattctgcttatagagagtctctgagactaaaattgacaacttgaaaagtattccaaggaatattatgaaaatagggcaacatggactgtttaagatctccatgtaattgaaattcatgcaaggaaacaactcatagaaaagataaatatggatgcccttcacatgttatcaacctcgtaacttttggtgcttgctgaatcagtccatgaaaagctacagcccgctctttgggaatgctacatacccatttctggtatttaaaaaatatctaggaggagctaaatgacaaaacacagcagtgttttgagggagaaaggaccatcatttataatgctctgtacatactaccagagctgcttggaaaattaaaggccacttgtggctttttcctaccaactgatacgtttaaatttgccctaggattgagctaacagcaaaaaaaaaaaaaaaaaaaagagagaaagaaaggagtaaacagtggtaataaaaaaatccatctgtcttcttgctatgttaatattaataaatcataatatgacaagaccctcactgaataagagtattttcagtcatcagaagccagctgttggtaggcattaatgagtttaaaattgttctcaattgaaaaaacatcacactattttgccaaaaccaaagtaattataatactgtgtcctcctgtaattttttgagaagtggttataaagggcatatttacataaattctactttattcctcaacttctttgatgaatgtaacccaattttacttctttaaaaagtctcaattcaagctggattagccagctcagcataatcaactagacagtggtttgttaaatttagcagcatacttcgttcccattctaattaaagtcatgagttcttgaatcccagagaaataatgcttaggaacttctctcaatctgcttggcttggcctagagaagtggccattttatcaacaggaaaaaaaaaaattttctctactacaaccccgttgccttctgaaaaacagcaagttatttctttatataattatcattttattattttatggaaaattaatttattaattaatagcctattatgtgttctcacttgcttctctaagtaatattttgagataaaatgttgaataaaaccatggattatagagaaaagtcaaaatatatgtgtaatatttaattattttataagttttataataaagtattccatttctttatctttga

SEQ ID NO: 104740 - DNA, 1632 bp, Homo sapiens
  Payload ID: 565
  Gene Symbol: ADAMTS18
  Gene Name: ADAM metallopeptidase with thrombospondin type 1 motif, 18
  ENST ID: ENST00000449265
  CDS Start-End: 340-1164
agacgctcacaccgacacagacagacgcacagacgggcgggcagacaccgacagtctcccaaccgtttgcgctccagtcccggcccagggagccccccgtaccctctggggtgccgcaaactgcagctcggcaggcccgcgccgggagaagggagggcgcgcaggcggccggaggaggggaggtcccagcgcgcccccgctgcgatgtgaacggcggcggctctcacctggagccgcacctggggcgccgagctccggggccgcggaaagaatgcgcgccgcccgtgcgctccgcctgccgcgtctggccacccgcagccgccgcgtccgcacctgaccatggagtgcgccctcctgctcgcgtgtgccttcccggctgcgggttcgggcccgccgaggggcctggcgggactggggcgcgtggccaaggcgctccagctgtgctgcctctgctgtgcgtcggtcgccgcggccttagccagtgacagcagcagcggcgccagcggattaaatgatgattacgtctttgtcacgccagtagaagtagactcagccgggtcatatatttcacacgacattttgcacaacggcaggaaaaagcgatcggcgcagaatgccagaagctccctgcactaccgattttcagcatttggacaggaactgcacttagaacttaagccctcggcgattttgagcagtcactttattgtccaggtacttggaaaagatggtgcttcagagactcagaaacccgaggtgcagcaatgcttctatcagggatttatcagaaatgacagctcctcctctgtcgctgtgtctacgtgtgctggcttgtcaggtttaataaggacacgaaaaaatgaattcctcatctcgccattacctcagcttctggcccaggaacacaactacagctcccctgcgggtcaccatcctcacgtactgtacaaaaggacagcagaggagaagatccagcggtaccgtggctaccccggctctggccggaattatcctggttactccccaagtcacattccccatgcatctcagagtcgagagacagagtatcaccatcgaaggttgcaaaagcagcatttttgtggacgacgcaagaaatgtatatgctcccaagcctcccacagaggacacctatctaaggtttgatgaatatgggagctctgggcgacccagaagatcagctggaaaatcacaaaagggcctcaatgtggaaaccctcgtggtggcagacaagaaaatggtggaaaagcatggcaagggaaatgtcaccacatacattctcacagtaatgaacatggtttctggcctatttaaagatgggactattggaagtgacataaacgtggttgtggtgagcctaattcttctggaacaagaacctggtttgcccccatcagtggaatgtgctctaagtaccgaagttgtaccatcaatgaggacacaggacttggccttgccttcaccatcgctcatgagtcagggcacaactttggtatgattcacgatggagaagggaatccctgcagaaaggctgaaggcaatatcatgtctcccacactgaccggaaacaatggagtgttttcatggtcttcctgcagccgccagtatctcaag

SEQ ID NO: 104741 - DNA, 349 bp, Homo sapiens
  Payload ID: 565
  Gene Symbol: ADAMTS18
  Gene Name: ADAM metallopeptidase with thrombospondin type 1 motif, 18
  ENST ID: ENST00000562332
  CDS Start-End: 1-188
agcaaggccggccttcctcaagttgtctgctccatcagaaacctccggtgctacgagcctgtaatacaaacttctgtccagctcctgaaaagagagattctgcaggaagccagttaccatgttgtgatggtcctcaagcagtccatgaagaaggactgaggtttcctgacaaccactgggctatgtgagaaagccttccagaagcagattccccagcccagccgagtattcagataactacagccccacctccaatctttcttgcagcctgatgagagacctcaagccagaaccacacagctaaccatttctgaatttccatgcaataaatgcataatgttataagcca

SEQ ID NO: 104742 - DNA, 556 bp, Homo sapiens
  Payload ID: 565
  Gene Symbol: ADAMTS18
  Gene Name: ADAM metallopeptidase with thrombospondin type 1 motif, 18
  ENST ID: ENST00000562345
  CDS Start-End: 1-556
aagtagactcagccgggtcatatatttcacacgacattttgcacaacggcaggaaaaagcgatcggcgcagaatgccagaagctccctgcactaccgattttcagcatttggacaggaactgcacttagaacttaagccctcggcgattttgagcagtcactttattgtccaggtacttggaaaagatggtgcttcagagactcagaaacccgaggtgcagcaatgcttctatcagggatttatcagaaatgacagctcctcctctgtcgctgtgtctacgtgtgctggcttgcttctggcccaggaacacaactacagctcccctgcgggtcaccatcctcacgtactgtacaaaaggacagcagaggagaagatccagcggtaccgtggctaccccggctctggccggaattatcctggttactccccaagtcacattccccatgcatctcagagtcgagagacagagtatcaccatcgaaggttgcaaaagcagcatttttgtggacgacgcaagaaatgtatatgctcccaagcctcccacagaggacacct

SEQ ID NO: 104743 - DNA, 5234 bp, Homo sapiens
  Payload ID: 566
  Gene Symbol: ADAMTS19
  Gene Name: ADAM metallopeptidase with thrombospondin type 1 motif, 19
  Uniprot ID: Q8TE59
  ENST ID: ENST00000274487
  CDS Start-End: 146-3769
ggcagacaaagggcctgggcaaattcgccgcccggcctcctagcgctccggggaggccgctgcgccccggagtggatcgcgctggaggcgtgcgccgggcgagaagccgcggccgcgggagcgcagtatggggaagaaccgcgagatgcgcctgactcacatctgctgctgctgcctcctttaccagctggggttcctgtcgaatgggatcgtttcagagctgcagttcgcccccgaccgcgaggagtgggaagtcgtgtttcctgcgctctggcgccgggagccggtggacccggctggcggcagcgggggcagcgcggacccgggctgggtgcgcggcgttgggggcggcggaagcgcccgggcgcaggctgccggcagctcacgcgaggtgcgctctgtggctccggtgcctttggaggagcccgtggagggccgatcagagtcccggctccggcccccgccgccgtcggagggtgaggaggacgaggagctcgagtcgcaggagctgccgcggggatccagcggggctgccgccttgtccccgggcgccccggcctcgtggcagccgccgcctcccccgcagccgcccccgtccccgcccccggcccagcatgccgagccggatggcgacgaagtgttgctgcggatcccggccttctctcgggacctgtacctgctgctccggagagacggccgcttcctggcgccgcgcttcgcagtggaacagcggccaaatcccggccccggccccacgggggcagcatccgccccgcaacctcccgcgccaccagacgcaggctgcttctacaccggagctgtgctgcggcaccctggctcgctggcttctttcagcacctgtggaggtggcctgatgggatttatacagctcaatgaggacttcatatttattgagccactcaatgatacaatggccataacaggtcacccacaccgtgtatataggcagaaaaggtccatggaggaaaaggtcacagagaagtcagctcttcacagtcattactgtggtatcatttcagataaaggaagacctaggtctagaaaaatagcagaaagtggaagagggaaacgatattcatacaaattacctcaagaatacaacatagagactgtagtggttgcagacccagcaatggtttcctatcatggagcagatgcagccaggagattcattctaaccatcttaaatatggtatttaaccttttccaacacaagagtctgagtgtgcaggtcaatcttcgtgtgataaagcttattctgctccatgaaactccaccagaactatatattgggcatcatggagaaaaaatgctagagagtttttgtaagtggcaacatgaagaatttggcaaaaagaatgatatacatttagagatgtcaacaaactggggggaagacatgacttcagtggatgcagctatacttataacaaggaaagatttctgtgtgcacaaagatgaaccatgtgatactgttggtatagcttacttgagtggaatgtgtagtgaaaagagaaaatgtattattgctgaagacaatggcttgaatcttgcttttacaattgctcatgaaatgggtcacaacatgggcattaaccatgacaatgaccacccatcgtgtgctgatggtcttcatatcatgtctggtgaatggattaaaggacagaatcttggtgacgtttcatggtctcgatgtagcaaggaagatttggaaagatttctcaggtcaaaggccagtaactgcttgctacaaacaaatccgcagagtgtcaattctgtgatggttccctccaagctgccagggatgacatacactgctgatgaacaatgccagatcctttttgggccattggcttctttttgtcaggagatgcagcatgttatttgcacaggattatggtgcaaggtagaaggtgagaaagaatgcagaaccaagctagacccaccaatggatggaactgactgtgaccttggtaagtggtgtaaggctggagaatgtaccagcaggacctcagcacctgaacatctggccggagagtggagcctgtggagtccttgtagccgaacctgcagtgctgggatcagcagtcgagagcgcaaatgtcctgggctagattctgaagcaagggattgtaatggtcccagaaaacaatacagaatatgtgagaatccaccttgtcctgcaggtttgcctggattcagagactggcaatgtcaggcttatagtgttagaacttcctccccaaagcatatacttcagtggcaagctgtcctggatgaagaaaaaccatgtgccttgttttgctctcctgttggaaaagaacagcctattcttctatcagaaaaagtgatggatggaacttcttgtggctatcagggattagatatctgtgcaaatggcaggtgccagaaagttggctgtgatggtttattagggtctcttgcaagagaagatcattgtggtgtatgcaatggcaatggaaaatcatgcaagatcattaaaggggattttaatcacaccagaggagcaggttatgtagaagtgctggtgatacctgctggagcaagaagaatcaaagttgtggaggaaaagccggcacatagctatttagctctccgagatgctggcaaacagtctattaatagtgactggaagattgaacactctggagccttcaatttggctggaactaccgttcattatgtaagacgaggcctctgggagaagatctctgccaaaggtcctactacagcacctttacatcttctggtgctcctgtttcaggatcagaattatggtcttcactatgaatacactatcccatcagaccctcttccagaaaaccagagctctaaagcacctgagcccctcttcatgtggacacacacaagctgggaagattgcgatgccacttgtggaggaggagaaaggaagacaacagtgtcctgcacaaaaatcatgagcaaaaatatcagcattgtggacaatgagaaatgcaaatacttaaccaagccagagccacagattcgaaagtgcaatgagcaaccatgtcaaacaaggtggatgatgacagaatggaccccttgttcacgaacttgtggaaaaggaatgcagagcagacaagtggcctgtacccaacaactgagcaatggaacactgattagagcccgagagagggactgcattgggcccaagcccgcctctgcccagcgctgtgagggccaggactgcatgaccgtgtgggaggcgggagtgtggtctgagtgttcagtcaagtgtggcaaaggcatacgtcatcggaccgttagatgtaccaacccaagaaagaagtgtgtcctctctaccagacccagggaggctgaagactgtgaggattattcaaaatgctatgtgtggcgaatgggtgactggtctaagtgctcaattacctgtggcaaaggaatgcagtcccgtgtaatccaatgcatgcataagatcacaggaagacatggaaatgaatgtttttcctcagaaaaacctgcagcatacaggccatgccatcttcaaccctgcaatgagaaaattaatgtaaataccataacatcacccagactggctgctctgactttcaagtgcctgggagatcagtggccagtgtactgccgagtgatacgtgaaaagaacctatgtcaggacatgcggtggtatcagcgctgctgtgaaacatgcagggacttctatgcccaaaagctgcagcagaagagttgacctctagcaggctggctggatcacagctcttggcaattacattatttataaacacacacactagcatgtttttcagaccaaatattatcagattacatataatttaatcaaattaatttatttttttgcctgccaaacatccaatgtggtgcttgttttggttacacaaacattttgatttatactatatggcttcataaataattttatatgaatgaattagttggatccagtaatataataaaaagaaaaaggaaaaaaatagatcattatacttaaaacaagttttcgttgtttgttagggctatctctaaggtgctactctctccccaccaataacattgaattatccagaatgtatactgacttagcataatagtttaggtgtatatgaagagaaactatttttgttttttggtgtcctgctgcagaattagcccattttctgtcacctgcaggagatgtgtaaacataatgaacctcatgctgttgaacaggtttttagagaatgtattatgaatttggttcagatttatagacatccataggaaaaattctgctgtaattataaccttattttgatatggaaaagaaaagtcaaaatagagactttgatcatgttcatgaacatgtacttgaacacaagtattgtaacaatgaaacactgtaatgatttacactgaatcacaattgcactgttgatatagtgtagagaaatcgttagaaatggtgacatcttacaaaaaatgtgtattattttaacatgttatcactagattttagctttttttaaatatttttaacaaagaaaacattgatccacccatttccctgtatctttttagcagatttattaaagagtatagtacttagcctcacgaatcataattagaaaatttactagtatttctcagccttttccctaggaacaaggaaaaacagaaagcatataatacggtggtcgtttcattgtgtttttcttccttttaaaaattaaaaagttttacaattatgtgaaacgttcaaaagccagcttaaaatttttcttgtgagaaaatattatacatgattcacatgatttcttagatttttcaataaaatatgtaaaacttcccactgagagacaattcttcatagacttgtcacatatccacatgtctgatgaacaaaggtactgtctacttttgttctggagtatcttctagaggatgtttatagagtgaactgccttggaagatagtatgtctcttgggagcaaagggcaaacatacttctcattataaaagtttcaggttccctaaaattggggtttctttactataagacaatccaatgtatgttctgaggtcacctggctctcttcatgtcaccctttgggaaatggggctcaacgagccagtacaggaaaagctgattccctggctactactatcgctgtgagtaataaagtcctttgtgtctaatg

SEQ ID NO: 104744 - DNA, 588 bp, Homo sapiens
  Payload ID: 566
  Gene Symbol: ADAMTS19
  Gene Name: ADAM metallopeptidase with thrombospondin type 1 motif, 19
  ENST ID: ENST00000502709
  CDS Start-End: 1-436
agacgcaggctgcttctacaccggagctgtgctgcggcaccctggctcgctggcttctttcagcacctgtggaggtggcctgatgggatttatacagctcaatgaggacttcatatttattgagccactcaatgatacaatggccataacaggtcacccacaccgtgtatataggcagaaaaggtccatggaggaaaaggtcacagagaagtcagctcttcacagtcattactgtggtatcatttcagataaaggaagacctaggtctagaaaaatagcagaaagtggaagagggaaacgatattcatacaaattacctcaagaatacaacatagagactgtagtggttgcagacccagcaatggtttcctatcatggagcagatgcagccaggagattcattctaaccatcttaaatatggtaggcaaactttaaagtgcgcttggaattttttcaagaaaactctaaggaagacatgtgtatttaaccttttccaacacaagagtctgagtgtgcaggtcaatcttcgtgtgataaagcttattctgctccatgaaactccaccagaactatatattgggcatcat

SEQ ID NO: 104745 - DNA, 684 bp, Homo sapiens
  Payload ID: 566
  Gene Symbol: ADAMTS19
  Gene Name: ADAM metallopeptidase with thrombospondin type 1 motif, 19
  ENST ID: ENST00000505791
  CDS Start-End: 130-225
gggcaaattcgccgcccggcctcctagcgctccggggaggccgctgcgccccggagtggatcgcgctggaggcgtgcgccgggcgagaagccgcggccgcgggagcgcagtatggggaagaaccgcgagatgcgcctgactcacatctgctgctgctgcctcctttaccagctggggttcctgtcgaatgggatcgtttcagatgggatttatacagctcaatgaggacttcatatttattgagccactcaatgatacaatggccataacaggtcacccacaccgtgtatataggcagaaaaggtccatggaggaaaaggtcacagagaagtcagctcttcacagtcattactgtggtatcatttcagataaaggaagacctaggtctagaaaaatagcagaaagtggaagagggaaacgatattcatacaaattacctcaagaatacaacatagagactgtagtggttgcagacccagcaatggtttcctatcatggagcagatgcagccaggagattcattctaaccatcttaaatatggtaggcaaactttaaagtgcgcttggaattttttcaagaaaactctaaggaagacatgtgtatttaaccttttccaacacaagagtctgagtgtgcaggtcaatcttcgtgtgataaagcttattctgctccatgaaactcca

SEQ ID NO: 104746 - DNA, 6754 bp, Homo sapiens
  Payload ID: 567
  Gene Symbol: ADAMTS2
  Gene Name: ADAM metallopeptidase with thrombospondin type 1 motif, 2
  Uniprot ID: O95450
  ENST ID: ENST00000251582
  CDS Start-End: 103-3738
agctgcgggcggctccagctgcccccagatgtgggctgggcggctcgcggggaactttcgcgccggctgcgagtgcggggccccggctgcagtccggctgccatggatccgccggcgggagccgctcgccgcctgctctgccccgcgctgctgctgctgctgctgctgctgccgccgccgctcctgccgccgccgccgccgcccgcgaacgccaggctcgccgccgccgccgaccccccaggcgggcccctggggcacggagcggagcgcatcctggcggtgcccgtgcgcactgacgcccagggccgcttggtgtcccacgtggtgtcggcagctacgtccagagcaggggtacgagcccgcagggccgccccggtccggaccccgagcttccccggaggcaacgaggaggagcctggcagtcacctcttctacaatgtcacggtctttggccgagacctgcacctgcggctgcggcccaacgcccgcctcgtggcgcccggggccactatggagtggcagggcgagaagggcaccacccgcgtggagcccctgctcgggagctgtctctacgtcggagacgtggccggcctagccgaagcctcctctgtggcgctcagcaactgcgatgggctggctggtctgatccggatggaggaggaggagttcttcatcgaacccttggagaaggggctggcggcgcaggaggctgagcaaggccgtgtgcatgtggtgtatcgccggccacccacgtcccctcctctcggggggccacaggccctggacacaggggcctccctggacagcctggacagcctcagccgcgccctgggcgtcctagaggagcacgccaacagctcgaggcggagggcacgcaggcatgctgcggacgatgactacaacatcgaggtcctgctgggcgtggatgactctgtggtgcagttccacgggaaggagcacgtacagaagtacctgctgacactcatgaacattgtcaatgaaatctaccatgacgagtccttgggtgcccacatcaacgtggtcctggtgcggatcatcctcctgagctatggaaagtccatgagcctcatcgagatcgggaacccctctcagagcctggagaatgtctgccgctgggcctacctccagcagaagccagacacgggccacgatgaataccacgatcacgccatcttcctcacacggcaggactttgggccttccggcatgcaaggctatgctcctgtcaccggcatgtgccatccggtccgcagctgcaccctgaaccatgaggacggcttctcctcagcgtttgtggtggcccatgagactggccacgtgctgggcatggagcacgacgggcagggcaaccgctgtggcgacgaggtgcggctgggcagcatcatggcgcccctggtgcaggccgccttccaccgcttccactggtcccgctgcagccagcaggagctgagccgctacctgcactcctatgactgcctgctggatgaccccttcgcccacgactggccggcgctgccccagctcccgggactgcactactccatgaacgagcaatgccgctttgacttcggcctgggctacatgatgtgcacggcgttccggacctttgacccctgcaagcagctgtggtgcagccatcctgacaacccctacttttgcaagaccaagaaggggccccccttggacgggactatgtgtgcacctggcaagcattgttttaaaggacactgcatctggctgacacctgacatcctcaaacgggacggcagctggggcgcttggagtccgtttggctcctgctcacgtacctgtggcacgggcgtgaagttcaggacccgccagtgtgacaacccacacccggccaacgggggccgcacctgctcgggccttgcctacgacttccagctctgcagccgccaggactgccccgactccctggctgacttccgcgaggagcagtgccgccagtgggacctgtacttcgagcacggcgacgcccagcaccactggctgccccacgagcaccgggatgccaaggagagatgccacctgtactgcgagtccagggagaccggggaggtggtgtccatgaagcgcatggtgcatgacgggacgcgctgctcctacaaggacgccttcagcctctgtgtgcgcggggactgcaggaaggtgggctgtgacggtgtgatcggctccagcaagcaggaagacaagtgtggcgtgtgcggaggggacaacagccactgcaaagtggtcaagggcacgttcacacggtcacccaagaagcatggttacatcaagatgtttgagatccctgcaggagccagacacctgctcattcaggaggtagacgccaccagccaccatctggccgtcaagaacctggagacaggcaagttcatcttaaatgaagagaatgacgtggatgccagttccaaaaccttcattgccatgggcgtggagtgggagtacagagacgaggacggccgggagacgctgcagaccatgggccccctccacggcaccatcaccgttctggtcatcccggtgggagacacccgggtctcactgacgtacaaatacatgatccatgaggactcactgaatgtcgacgacaacaacgtcctggaagaggactctgtggtctacgagtgggccctgaagaagtggtctccgtgctccaagccctgtggcggagggtcccagttcaccaagtatggctgccgccggaggctggaccacaagatggtacaccgtggcttctgtgccgccctctcgaagcccaaagccatccgcagagcgtgcaacccacaggaatgctcccagccagtgtgggtcacaggcgaatgggagccatgtagccagacctgtgggcggacaggcatgcaggtgcgctccgtgcgctgcattcagccgctacacgacaacaccacccgctccgtgcacgccaagcactgcaatgacgcccggcccgagagccgccgggcctgcagccgcgagctctgccctggtcgttggcgagccgggccctggtcccagtgctcagtaacctgtggcaacggcacccaggagcggccagtgctctgccgcaccgcggacgacagcttcggcatctgccaggaggagcgtcctgagacagcgaggacctgcaggcttggcccctgtccccgaaacatctcagatccctccaagaagagctacgtagttcagtggctgtcccgcccggaccccgactcgcccatccggaagatctcgtcaaagggccactgccaaggcgacaagtcaatattctgtaggatggaagtcttgtcccgctattgctccatcccaggctacaacaagctgtgctgcaagtcctgtaacctgtacaacaacctcaccaacgtggagggcaggatagagccaccgcctgggaagcacaacgacattgacgtgttcatgcctaccctcccagtgcccactgtagccatggaggtgcggccatcaccaagcacccccctggaggtccctctcaatgcctccagcaccaatgccacagaggatcacccagaaaccaatgccgtagatgaaccctacaaaatccatggcctggaagatgaagtccagccacccaacctaatccctcgacgaccgagcccctatgaaaagaccagaaaccaaagaatccaagagctcattgatgagatgcggaagaaagagatgctcggaaagttctaataaaatggaaagatagcatccctagcatttttttcttgcttatagagatattccatgggatagcaaatcctgtgtcatggagatgaagtcaaaattcctgattccaaaaggttttgagaaaacaaagagggggaatgacgtaagaaagataggcatgagcatgtggtaactaggttagcacgtgtgcttcccagcccaggagcgaccaaatactgtggtggcgtcaggtgtgcagtggagaggaatatagaggctgtatggcctccctcagtgagggcagggcaagagggatcactctgagagaacaaaaataggccccaagttgctaagcagtgattgggaaccttcctttccttggcggagatgcatgacattccctaccgatccccagacacagcctgtgggactcttaggagaaatggtgatttactgaataactgacccgttgccgagatgagtacaatgaagtggaggtgatgaactcaaatcgtcttccagggccaggcggctgaccggggtgagcgtagtggcccgctggggaccatggccgccctgacagccacacccacctggagctgacttggttctggctgttgctgccactgtgaaatctgtatctctctccatctctgctctactatccccggccttgccagacagtgttctttttcggaagaagtctagatttttgcatgaaaaaaactcaatctttaaaggtcgactcagaacattttaaggaggcctccacttggtctgatgcagtcttgctaattaagaactaaaggccttctgaccttcttggtgctcatgctgtacggcatctgaatgtctcgaccgagtctgagccgtgcagctgtcctccacctgcgaaagtaatgagaatcctatcacgggacataaggataggtctaaacagggtccatgccaagaaaacagtggggtgctctcccaggcctctcccctgtccactaaccctggccttgccggctgccttccaggctctgggggaagagctcctgcattcttccctggccaccttggctccagggctccccagagagcctcttccctccccaagtacctgagaaagatgagagaggcacgtgctctgctgggaaggtccagtgagcggttcaagggcctggaatctccctacggccaagtctaagggttctgggattctgggctttgtgggctttgcttgcttgctgggaatgggctttccctgtcccgccctgccccacctcgcctctgtctctcagaagctccagaacccagcagtgacctgcaaaatgtggcctctgatgggggcttagggtgggagatggggagagcctacattgtcttttgctccttgaaaactttaatagctcctattttccagagaatggtgctttgtgagcaacatgcgagtaagagagaaataggaggaagggggagtaggggcggatgggagaagagtggctcatttttacctctcactgccttgacattttgtgaacgtgaagcttaaactttctgggcttacaagacccaggggcacgtcagctccttagatgggctcagcctgacacataattcttaaacctttcctgtttaagaaacttctagaggctgtgtactctcaccaatcctcttcgagaatttgttcatgtgtatttccccattatatggatgaggctcaggataacagcatagtggctaccttctactgagttttgaggtgctaataagtatgtttgtctgaggctgcacatgtgggtggctctgtgtgtatgatccaagggacaaaatgacgatgtaggaaccagcaagaacggaatctgggctgatgcttcagtctccacctgggtgatggctagcctcccgccctccaccaccgcatcccacacgtgctgcgcactgtccccgtgtctcctggagaaccaaactggagaaaacctttctgagtatctctcatagtaccccttccttaagaagatgtggtttagagcatgtgtgcaatcctgcctctgtaattaggaaacggagcccgaggctttccattgttggttgaacccaggacagctggtgctattcacaggctgaagaactgggcagttcttacttgggtctgtcctaggatgtggaggaagttcaggactaacgctaggcagagagtatgactcggtttacccagcctaggggcctctggatgggaacactccattccaagatctcagcagagcagggcttcctggcttgaggctggaagcctttgggaagaggcccagctgggacattccctgggcacctgtcttccgctgaagggagcaaggtgccctctgggactgacagccatgaccctctgtgccatcctcaatccttgagccatatatcaagagtcctctagagccggatggtcctcaaaagtctgtccaaggaatgccaacgttcaccgggctctgagaaacgacgcaaatctctgagctggggaccacttggagaaccggcttagtaacagtcctgatcttcgcaagccagcttcttctgcatctgaggggctcctggcgcccagaggaggcagacagatgtcttctagctgagtttctaaccgcatgatgagactcagaccttccgctgcactagaaaatctgcaacagtgtccctgagtcacttctccttagtgggcagactcgtgttagatttgtggaacccagctctctgatttactccttttggaaaacccatggaatttcatgtataaggctttcatttgtattttaaggtttttctgtttgttttgagtatatacatggtgctcaatagcaacatcttagcagatgaagcagtttatgattccactccctcctgtatgacaggtagccactatactgaatcaaggtgctgaactcaaatcacaaaattctggcttaccgatacaacaaccaatacatctttgttctgtaatgtaaaatttgactccttacttttataacttattaaagttaaaatgtctgtgtttttgcaaatcatg

SEQ ID NO: 104747 - DNA, 2044 bp, Homo sapiens
  Payload ID: 567
  Gene Symbol: ADAMTS2
  Gene Name: ADAM metallopeptidase with thrombospondin type 1 motif, 2
  Uniprot ID: O95450
  ENST ID: ENST00000274609
  CDS Start-End: 103-1803
agctgcgggcggctccagctgcccccagatgtgggctgggcggctcgcggggaactttcgcgccggctgcgagtgcggggccccggctgcagtccggctgccatggatccgccggcgggagccgctcgccgcctgctctgccccgcgctgctgctgctgctgctgctgctgccgccgccgctcctgccgccgccgccgccgcccgcgaacgccaggctcgccgccgccgccgaccccccaggcgggcccctggggcacggagcggagcgcatcctggcggtgcccgtgcgcactgacgcccagggccgcttggtgtcccacgtggtgtcggcagctacgtccagagcaggggtacgagcccgcagggccgccccggtccggaccccgagcttccccggaggcaacgaggaggagcctggcagtcacctcttctacaatgtcacggtctttggccgagacctgcacctgcggctgcggcccaacgcccgcctcgtggcgcccggggccactatggagtggcagggcgagaagggcaccacccgcgtggagcccctgctcgggagctgtctctacgtcggagacgtggccggcctagccgaagcctcctctgtggcgctcagcaactgcgatgggctggctggtctgatccggatggaggaggaggagttcttcatcgaacccttggagaaggggctggcggcgcaggaggctgagcaaggccgtgtgcatgtggtgtatcgccggccacccacgtcccctcctctcggggggccacaggccctggacacaggggcctccctggacagcctggacagcctcagccgcgccctgggcgtcctagaggagcacgccaacagctcgaggcggagggcacgcaggcatgctgcggacgatgactacaacatcgaggtcctgctgggcgtggatgactctgtggtgcagttccacgggaaggagcacgtacagaagtacctgctgacactcatgaacattgtcaatgaaatctaccatgacgagtccttgggtgcccacatcaacgtggtcctggtgcggatcatcctcctgagctatggaaagtccatgagcctcatcgagatcgggaacccctctcagagcctggagaatgtctgccgctgggcctacctccagcagaagccagacacgggccacgatgaataccacgatcacgccatcttcctcacacggcaggactttgggccttccggcatgcaaggctatgctcctgtcaccggcatgtgccatccggtccgcagctgcaccctgaaccatgaggacggcttctcctcagcgtttgtggtggcccatgagactggccacgtgctgggcatggagcacgacgggcagggcaaccgctgtggcgacgaggtgcggctgggcagcatcatggcgcccctggtgcaggccgccttccaccgcttccactggtcccgctgcagccagcaggagctgagccgctacctgcactcctatgactgcctgctggatgaccccttcgcccacgactggccggcgctgccccagctcccgggactgcactactccatgaacgagcaatgccgctttgacttcggcctgggctacatgatgtgcacggcgttccggacctttgacccctgcaagcagctgtggtgcagccatcctgacaacccctacttttgcaagaccaagaaggggccccccttggacgggactatgtgtgcacctggcaagttcaggccgggcgcggtggctcatgcctgttatcccagcactttgggaggccaaggtaggtggatcgcctgaggtcagaagttcaagacaagtctggttaacatggcaaaatcccgtctctactaaaaatacaaaaattagctgggcgcggtggtgggtgcctgtaatcccagctactccggaggctgaggcatgaaaatcgtttgagcccaggaggcggaggttgcggtgagccaagatcgcgtcgctgctctccagtctggatcacacagcaagaccctgtctcaaaaaataaaaataaaagtgaagtgca

SEQ ID NO: 104748 - DNA, 6076 bp, Homo sapiens
  Payload ID: 568
  Gene Symbol: ADAMTS20
  Gene Name: ADAM metallopeptidase with thrombospondin type 1 motif, 20
  Uniprot ID: P59510
  ENST ID: ENST00000389420
  CDS Start-End: 1-5733
atgtgggtggccaagtggctgactgggctgctctaccatctctcgctcttcatcaccaggtcttgggaagttgacttccaccccaggcaagaagccctggtgaggacactgacctcctacgaagtagtgatccccgagcgggtcaatgagtttggagaagtgttccctcagagccaccacttcagccggcagaaacgcagctccgaggcgctggaacccatgccgttccgaacccactatcgcttcactgcctacgggcagctcttccagctgaacctgaccgccgatgcatcctttctggccgccggctacaccgaggtgcacttgggaaccccggagcgcggggcctgggagagcgacgcagggccctcggacctgcgccactgcttctaccgcggccaggtcaactcacaggaggattacaaggccgtcgtcagcttatgcggaggcctgacgggaacatttaaaggacagaacggtgaatatttcttagaacctataatgaaggcagatgggaatgaatatgaagatggtcacaacaagccacatcttatatacagacaagacttaaataactcttttctgcagactctgaagtattgcagtgtgtcagaaagtcaaataaaggaaaccagtttaccctttcatacctacagcaacatgaatgaagatcttaatgtaatgaaagaaagagttttaggacacacatcaaaaaatgtaccattgaaagatgaaagaagacattccaggaaaaaacgtcttatatcatatccaagatacattgaaattatggttacagctgatgctaaagtggtttctgctcatggatcgaatttgcaaaactatatactgactctaatgtcaattgttgcaacaatctacaaagatccaagtattggaaatttgatacacatagtagtggtaaaattagttatgattcaccgtgaggaggaaggaccagtcattaattttgatggtgctaccacattaaagaacttttgttcatggcaacaaactcagaatgaccttgatgatgttcacccttcccaccatgacactgctgttcttatcactagggaagacatttgttcatctaaagagaaatgtaacatgttaggtttatcatatttaggtaccatatgtgatcctttacaaagctgctttattaatgaagaaaaaggactcatttctgcttttactatagcccatgagcttgggcacacacttggtgttcaacatgatgataatcctagatgtaaagaaatgaaagttacaaagtatcatgtaatggcccctgctttaagttttcacatgagtccttggagctggtcaaactgtagtcggaaatatgttactgaattcctagatactggttacggggaatgtcttcttgacaaaccagatgaagaaatatataatctgccttcagaacttcctggatcacgatatgatggaaacaagcagtgtgagcttgcgtttggtcctgggtcacaaatgtgtccccatataaatatatgcatgcatctgtggtgcacaagcacagaaaagcttcacaaaggctgtttcactcaacacgtgccaccagcagatggaacagactgcggtcctggaatgcattgccgtcatgggctatgtgtaaacaaagaaacggaaacacgtcctgtaaatggtgaatggggaccatgggaaccttacagttcttgttcaagaacatgtggaggcggaatcgaaagtgcaaccaggcgctgtaatcgtcctgagccaagaaacggaggaaattactgtgtgggccgcaggatgaaatttcgatcatgtaatactgattcatgtccaaaaggcacacaagactttcgagagaagcagtgctctgattttaatggtaaacatttggacatcagtggcattccctctaatgtgaggtggcttccaagatacagtggcattggcacaaaggatcgttgtaaactctattgtcaggttgctggaaccaattatttctacctattgaaggatatggttgaagatggtactccttgtggaactgaaactcatgacatctgtgttcaaggccagtgtatggcagctggttgtgatcacgtgttaaactccagtgccaagatagacaaatgtggagtgtgtggtggggacaactcttcatgcaagacaataacaggtgtcttcaacagttctcattatggttataatgttgttgtaaagattcccgcaggagcaacaaacgttgacattcgtcagtacagctattctggacaaccagatgacagttaccttgcattatctgacgctgaagggaattttcttttcaatggaaattttcttctaagtacgtcaaaaaaagaaatcaatgtgcaaggaacaagaactgttattgaatacagtggatcaaataacgcagttgaaagaattaatagtactaatcgacaagagaaagaacttattttgcaggtgttgtgtgtgggtaatttatacaaccctgatgtacattattccttcaatatccctttggaagagaggagtgacatgttcacatgggacccctatggaccatgggaaggctgtaccaaaatgtgtcaaggtcttcagcgaagaaacataacttgcatacataagagtgatcatagtgttgtgtctgataaagaatgtgaccacttgccacttccatcatttgttactcaaagttgcaatacagactgtgaactaaggtggcatgttattggcaaaagtgaatgttcatcccaatgtggtcaaggatatagaaccttggacatccattgcatgaagtattccattcatgaaggacagactgttcaagttgatgaccactactgtggtgaccagcttaaacctcctacccaagaactatgccatggtaactgtgtcttcacaagatggcattattcagaatggtctcagtgttccaggagttgtggaggaggggaaaggtctcgagaatcttattgtatgaataactttggccatcgtcttgctgacaatgaatgccaagaactgtcccgagtgacgagagagaattgcaatgaattttcctgtcccagttgggctgctagtgaatggagcgagtgccttgttacatgtggtaaaggaacaaagcagcggcaggtatggtgtcagctgaatgtagatcacttgagtgatggcttctgtaattcaagtaccaaacctgaatctctgagtccatgtgaacttcatacatgtgcttcctggcaagtaggaccatggggtccttgcacaaccacatgtggacatgggtatcagatgcgagatgttaaatgtgtcaatgagctagctagtgcagtgttagaggacacagaatgccatgaagctagtcgccccagtgacagacagagctgtgtacttacaccttgctcatttatttctaaacttgagaccgctttattaccaactgttctcataaaaaagatggcacaatggcgacatggttcttggaccccatgctccgtatcttgtggaagaggtactcaagcccgctatgtaagctgtcgtgatgctcttgatagaatagcagatgaatcatattgtgcccacttaccccgacctgctgaaatatgggactgttttaccccttgtggagagtggcaagcaggggattggtcaccctgttcagcttcctgtggccatggaaaaacaactcgacaagttttatgcatgaactaccatcagccaattgatgagaattactgtgatcctgaagttcgccctttgatggaacaggaatgtagcctggcagcctgccctcctgcacacagccactttcctagttcccctgtgcagccaagctattatctaagcacgaatttgccattaactcaaaaacttgaagataatgaaaatcaggtggtccatccatcagtcagaggaaaccagtggagaaccggaccatggggatcatgctccagcagttgttctggaggtcttcagcatagggctgtggtctgccaggatgaaaatggacaaagtgctagttactgcgatgcagcctccaagcctccagagttacagcaatgtggtccagggccttgtccacagtggaactacggaaattggggagaatgttcacaaacatgtggaggaggaataaaatcaagacttgtaatatgtcaatttcccaatggccaaatattagaagatcacaactgtgaaattgtaaacaagccacctagcgtaatacagtgtcatatgcatgcttgccctgctgatgtgtcatggcatcaggaaccatggacatcgtgctcagcttcttgtggtaaaggtagaaagtaccgtgaagtgttttgcattgaccaattccaaaggaaattagaagacacaaattgcagtcaagtacagaaacctccaactcacaaagcctgtagatctgtcagatgcccttcatggaaagccaatagctggaatgagtgctctgtgacctgtggctctggagttcagcagagggatgtatactgcagactgaaaggtgttggtcaggtggttgaagaaatgtgtgatcagtccacccgaccttgttctcagaggcgatgttggagtcaggactgtgtgcagcacaaggggatggaaagagggaggctgaattgttcaacatcatgtgagagaaaagattcacatcaacgaatggagtgcacagataaccaaatcagacaagtgaatgaaatagtctataattcttcaaccatatctcttacatccaagaattgcaggaaccctccttgcaattacattgtggtaacagcagactcatcacagtgtgcaaacaactgtggatttagttacagacaaaggattacatattgcaccgagatcccatctactaagaaacataagctccatcgacttcggcctatagtttatcaagaatgccctgtggtgccttcctctcaggtttaccaatgcattaacagctgtttgcatttggccacttggaaagttggaaaatggagcaagtgctcagtgacttgtggaattgggataatgaagagacaagtgaaatgcattaccaaacatggtttgtccagtgacttatgtttaaaccatttaaaaccaggtgctcaaaagaaatgttatgccaatgactgtaaatcatttaccacctgcaaagaaattcaagtgaaaaaccacattagaaaggatggtgactattaccttaacattaagggaagaataataaagatttattgtgcagacatgtacttggagaaccctaaggaatatttaacactggtccaaggtgaagaaaacttttctgaagtgtatggctttagactaaaaaatccatatcaatgtccttttaatgggagtagaagggaagactgtgaatgtgacaatggacacttagctgctggatacactgttttcagcaaaataagaattgatctcacttccatgcaaattaaaactacggaccttcttttttccaaaacaatatttggaaatgcagttccatttgccacagctggagattgctacagtgctttcagatgcccacagggacagtttagcattaatttgtcaggaactgggatgaagatatccagcacagcaaagtggctcactcaggggagttatacctctgtcagcatacgaagatcagaggatggaactagatttttcggcaaatgtggagggtactgtggaaagtgtcttcctcacatgactactggtctcccaattcaagtcatatgaacatttagaagggggaagtatgccctaaagaggggatattctctggaatattcaaataactggtgctcatttctttatatctcccttcccgagatttccatgtccaatatgtctctgcctttttttcagggtgctcatcagggattcaaatcactgcttaataaggtctataaaagaaatttaagagctatcttaatttattttatatctaatcaggatattttttaaagaacataataatttataatagagaataccaggattgaatgaattataccaagacagtgttgctcttaacatcttggcctggaccacacttattttatacctataaacacacatg

SEQ ID NO: 104749 - DNA, 4633 bp, Homo sapiens
  Payload ID: 568
  Gene Symbol: ADAMTS20
  Gene Name: ADAM metallopeptidase with thrombospondin type 1 motif, 20
  ENST ID: ENST00000395541
  CDS Start-End: 1-4515
atgtgggtggccaagtggctgactgggctgctctaccatctctcgctcttcatcaccaggtcttgggaagttgacttccaccccaggcaagaagccctggtgaggacactgacctcctacgaagtagtgatccccgagcgggtcaatgagtttggagaagtgttccctcagagccaccacttcagccggcagaaacgcagctccgaggcgctggaacccatgccgttccgaacccactatcgcttcactgcctacgggcagctcttccagctgaacctgaccgccgatgcatcctttctggccgccggctacaccgaggtgcacttgggaaccccggagcgcggggcctgggagagcgacgcagggccctcggacctgcgccactgcttctaccgcggccaggtcaactcacaggaggattacaaggccgtcgtcagcttatgcggaggcctggtgggaacatttaaaggacagaacggtgaatatttcttagaacctataatgaaggcagatgggaatgaatatgaagatggtcacaacaagccacatcttatatacagacaagacttaaataactcttttctgcagactctgaagtattgcagtgtgtcagaaagtcaaataaaggaaaccagtttaccctttcatacctacagcaacatgaatgaagatcttaatgtaatgaaagaaagagttttaggacacacatcaaaaaatgtaccattgaaagatgaaagaagacattccaggaaaaaacgtcttatatcatatccaagatacattgaaattatggttacagctgatgctaaagtggtttctgctcatggatcgaatttgcaaaactatatactgactctaatgtcaattgttgcaacaatctacaaagatccaagtattggaaatttgatacacatagtagtggtaaaattagttatgattcaccgtgaggaggaaggaccagtcattaattttgatggtgctaccacattaaagaacttttgttcatggcaacaaactcagaatgaccttgatgatgttcacccttcccaccatgacactgctgttcttatcactaggtatgacatttgttcatctaaagagaaatgtaacatgttaggtttatcatatttaggtaccatatgtgatcctttacaaagctgctttattaatgaagaaaaaggactcatttctgcttttactatagcccatgagcttgggcacacacttggtgttcaacatgatgataatcctagatgtaaagaaatgaaagttacaaagtatcatgtaatggcccctgctttaagttttcacatgagtccttggagctggtcaaactgtagtcggaaatatgttactgaattcctagatactggttacggggaatgtcttcttgacaaaccagatgaagaaatatataatctgccttcagaacttcctggatcacgatatgatggaaacaagcagtgtgagcttgcgtttggtcctgggtcacaaatgtgtccccatataaatatatgcatgcatctgtggtgcacaagcacagaaaagcttcacaaaggctgtttcactcaacacgtgccaccagcagatggaacagactgcggtcctggaatgcattgccgtcatgggctatgtgtaaacaaagaaacggaaacacgtcctgtaaatggtgaatggggaccatgggaaccttacagttcttgttcaagaacatgtggaggcggaatcgaaagtgcaaccaggcgctgtaatcgtcctgagccaagaaacggaggaaattactgtgtgggccgcaggatgaaatttcgatcatgtaatactgattcatgtccaaaaggcacacaagactttcgagagaagcagtgctctgattttaatggtaaacatttggacatcagtggcattccctctaatgtgaggtggcttccaagatacagtggcattggcacaaaggatcgttgtaaactctattgtcaggttgctggaaccaattatttctacctattgaaggatatggttgaagatggtactccttgtggaactcattcttataatattgattgtaattgtgtcttgaaggcagctggttgtgatcacgtgttaaactccagtgccaagatagacaaatgtggagtgtgtggtggggacaactcttcatgcaagacaataacaggtgtcttcaacagttctcattatggttataatgttgttgtaaagattcccgcaggagcaacaaacgttgacattcgtcagtacagctattctggacaaccagatgacagttaccttgcattatctgacgctgaagggaattttcttttcaatggaaattttcttctaagtacgtcaaaaaaagaaatcaatgtgcaaggaacaagaactgttattgaatacagtggatcaaataacgcagttgaaagaattaatagtactaatcgacaagagaaagaaattcttattgaggtgttgtgtgtgggtaatttatacaaccctgatgtacattattccttcaatatccctttggaagagaggagtgacatgttcacatgggacccctatggaccatgggaaggctgtaccaaaatgtgtcaaggtcttcagcgaagaaacataacttgcatacataagagtgatcatagtgttgtgtctgataaagaatgtgaccacttgccacttccatcatttgttactcaaagttgcaatacagactgtgaactaaggtggcatgttattggcaaaagtgaatgttcatcccaatgtggtcaaggatatagaaccttggacatccattgcatgaagtattccattcatgaaggacagactgttcaagttgatgaccactactgtggtgaccagcttaaacctcctacccaagaactatgccatggtaactgtgtcttcacaagatggcattattcagaatggtctcagtgttccaggagttgtggaggaggggaaaggtctcgagaatcttattgtatgaataactttggccatcgtcttgctgacaatgaatgccaagaactgtcccgagtgacgagagagaattgcaatgaattttcctgtcccagttgggctgctagtgaatggagcgagtgccttgttacatgtggtaaaggaacaaagcagcggcaggtatggtgtcagctgaatgtagatcacttgagtgatggcttctgtaattcaagtaccaaacctgaatctctgagtccatgtgaacttcatacatgtgcttcctggcaagtaggaccatggggtccttgcacaaccacatgtggacatgggtatcagatgcgagatgttaaatgtgtcaatgagctagctagtgcagtgttagaggacacagaatgccatgaagctagtcgccccagtgacagacagagctgtgtacttacaccttgctcatttatttctaaacttgagaccgctttattaccaactgttctcataaaaaagatggcacaatggcgacatggttcttggaccccatgctccgtatcttgtggaagaggtactcaagcccgctatgtaagctgtcgtgatgctcttgatagaatagcagatgaatcatattgtgcccacttaccccgacctgctgaaatatgggactgttttaccccttgtggagagtggcaagcaggggattggtcaccctgttcagcttcctgtggccatggaaaaacaactcgacaagttttatgcatgaactaccatcagccaattgatgagaattactgtgatcctgaagttcgccctttgatggaacaggaatgtagcctggcagcctgccctcctgcacacagccactttcctagttcccctgtgcagccaagctattatctaagcacgaatttgccattaactcaaaaacttgaagataatgaaaatcaggtggtccatccatcagtcagaggaaaccagtggagaaccggaccatggggtcagtgctccagcagttgttctggaggtcttcagcatagggctgtggtctgccaggatgaaaatggacaaagtgctagttactgcgatgcagcctccaagcctccagagttacagcaatgtggtccagggccttgtccacagtggaactacggaaattggggagaatgttcacaaacatgtggaggaggaataaaatcaagacttgtaatatgtcaatttcccaatggccaaatattagaagatcacaactgtgaaattgtaaacaagccacctagcgtaatacagtgtcatatgcatgcttgccctgctgatgtgtcatggcatcaggaaccatggacatcggaggatcttaaagtgaaattgctgcctcaaaggaccatcatcttgtgggaactaatgaaaaacatattttgccatggaaagcactcacatatgtatttaataaatgtcgttactgaccatctactatatcctaggcactgtgatccagagacaattgaaacatatttcttatccctatggagtttacagtttacttggggagatttgaaatactataagaactcactataaaaagatatttttattagctatcttagattggaaatccactttctgcttactgtgtctctgttccatcttctttcattttattggttttagtttgcaagcctagttcttaagaagactg

SEQ ID NO: 104750 - DNA, 2780 bp, Homo sapiens
  Payload ID: 568
  Gene Symbol: ADAMTS20
  Gene Name: ADAM metallopeptidase with thrombospondin type 1 motif, 20
  ENST ID: ENST00000549670
  CDS Start-End: 1-1905
tattccttcaatatccctttggaagagaggagtgacatgttcacatgggacccctatggaccatgggaaggctgtaccaaaatgtgtcaaggtcttcagcgaagaaacataacttgcatacataagagtgatcatagtgttgtgtctgataaagaatgtgaccacttgccacttccatcatttgttactcaaagttgcaatacagactgtgaactaaggtggcatgttattggcaaaagtgaatgttcatcccaatgtggtcaaggatatagaaccttggacatccattgcatgaagtattccattcatgaaggacagactgttcaagttgatgaccactactgtggtgaccagcttaaacctcctacccaagaactatgccatggtaactgtgtcttcacaagatggcattattcagaatggtctcagtgttccaggagttgtggaggaggggaaaggtctcgagaatcttattgtatgaataactttggccatcgtcttgctgacaatgaatgccaagaactgtcccgagtgacgagagagaattgcaatgaattttcctgtcccagttgggctgctagtgaatggagcgagtgccttgttacatgtggtaaaggaacaaagcagcggcaggtatggtgtcagctgaatgtagatcacttgagtgatggcttctgtaattcaagtaccaaacctgaatctctgagtccatgtgaacttcatacatgtgcttcctggcaagtaggaccatggggtccttgcacaaccacatgtggacatgggtatcagatgcgagatgttaaatgtgtcaatgagctagctagtgcagtgttagaggacacagaatgccatgaagctagtcgccccagtgacagacagtgctccgtatcttgtggaagaggtactcaagcccgctatgtaagctgtcgtgatgctcttgatagaatagcagatgaatcatattgtgcccacttaccccgacctgctgaaatatgggactgttttaccccttgtggagagtggcaagcaggggattggtcaccctgttcagcttcctgtggccatggaaaaacaactcgacaagttttatgcatgaactaccatcagccaattgatgagaattactgtgatcctgaagttcgccctttgatggaacaggaatgtagcctggcagcctgccctcctgcacacagccactttcctagttcccctgtgcagccaagctattatctaagcacgaatttgccattaactcaaaaacttgaagataatgaaaatcaggtggtccatccatcagtcagaggaaaccagtggagaaccggaccatggggatcatgctccagcagttgttctggaggtcttcagcatagggctgtggtctgccaggatgaaaatggacaaagtgctagttactgcgatgcagcctccaagcctccagagttacagcaatgtggtccagggccttgtccacagtggaactacggaaattggggagaatgttcacaaacatgtggaggaggaataaaatcaagacttgtaatatgtcaatttcccaatggccaaatattagaagatcacaactgtgaaattgtaaacaagccacctagcgtaatacagtgtcatatgcatgcttgccctgctgatgtgtcatggcatcaggaaccatggacatcggaggatcttaaagtgaaattgctgcctcaaaggaccatcatcttgtgggaactaatgaaaaacatattttgccatggaaagcactcacatatgtatttaataaatgtcgttactgaccatctactatatcctaggcactgtgatccagagacaattgaaacatatttcttatccctatggagtttacagtttacttggggagatttgaaatactataagaactcactataaaaagatatttttattagctatcttagattggaaatccactttctgcttactgtgtctctgttccatcttctttcattttattggttttagtttgcaagcctagttcttaagaagactgtggattactttcttggaattttttcccaattaggagagcagaatcctaactgctaatgagattgaattgtaatggcatttgtttctgagcatagacgttttattttccctacccattcatgacttcaattcaccaagcattaaacatttacttaggtctcatgctttatattagatattgaagcaattaaaattaagtgtttgtgagtcagattctctgttttagaggtcagcaaactatggtccaggtaccaaatctggcctgttgcctatttttaaaataagttctattggaacacagtcatgctcatttgtttacgtgttatctatggctggttttgcactacagcagtagcattgattagttgcaatagaaactctgtaactcacaaagcctgaaatatttactatctaactttttctgggaaaagtttgctgacccctgttctatttaataaacattataatgcttttaagtttaacataaaaaggtacttagatttatagaatattaaaattacaaataattcattccaggtcagttttagatgtttttgatcctttgatattttacattttaaggtttatcaaccttctctacatatccactgtgatattcatgcaatgtttatgtaaatgtatctatactatattccaatatatttttgttatgctattttttgtatgtaaattatatcacaagtgaaaaatctgaatgctcattaaagtcctctgtatagatgacttttcaacctcac

SEQ ID NO: 104751 - DNA, 4633 bp, Homo sapiens
  Payload ID: 568
  Gene Symbol: ADAMTS20
  Gene Name: ADAM metallopeptidase with thrombospondin type 1 motif, 20
  ENST ID: ENST00000553158
  CDS Start-End: 1-4515
atgtgggtggccaagtggctgactgggctgctctaccatctctcgctcttcatcaccaggtcttgggaagttgacttccaccccaggcaagaagccctggtgaggacactgacctcctacgaagtagtgatccccgagcgggtcaatgagtttggagaagtgttccctcagagccaccacttcagccggcagaaacgcagctccgaggcgctggaacccatgccgttccgaacccactatcgcttcactgcctacgggcagctcttccagctgaacctgaccgccgatgcatcctttctggccgccggctacaccgaggtgcacttgggaaccccggagcgcggggcctgggagagcgacgcagggccctcggacctgcgccactgcttctaccgcggccaggtcaactcacaggaggattacaaggccgtcgtcagcttatgcggaggcctgacgggaacatttaaaggacagaacggtgaatatttcttagaacctataatgaaggcagatgggaatgaatatgaagatggtcacaacaagccacatcttatatacagacaagacttaaataactcttttctgcagactctgaagtattgcagtgtgtcagaaagtcaaataaaggaaaccagtttaccctttcatacctacagcaacatgaatgaagatcttaatgtaatgaaagaaagagttttaggacacacatcaaaaaatgtaccattgaaagatgaaagaagacattccaggaaaaaacgtcttatatcatatccaagatacattgaaattatggttacagctgatgctaaagtggtttctgctcatggatcgaatttgcaaaactatatactgactctaatgtcaattgttgcaacaatctacaaagatccaagtattggaaatttgatacacatagtagtggtaaaattagttatgattcaccgtgaggaggaaggaccagtcattaattttgatggtgctaccacattaaagaacttttgttcatggcaacaaactcagaatgaccttgatgatgttcacccttcccaccatgacactgctgttcttatcactagggaagacatttgttcatctaaagagaaatgtaacatgttaggtttatcatatttaggtaccatatgtgatcctttacaaagctgctttattaatgaagaaaaaggactcatttctgcttttactatagcccatgagcttgggcacacacttggtgttcaacatgatgataatcctagatgtaaagaaatgaaagttacaaagtatcatgtaatggcccctgctttaagttttcacatgagtccttggagctggtcaaactgtagtcggaaatatgttactgaattcctagatactggttacggggaatgtcttcttgacaaaccagatgaagaaatatataatctgccttcagaacttcctggatcacgatatgatggaaacaagcagtgtgagcttgcgtttggtcctgggtcacaaatgtgtccccatataaatatatgcatgcatctgtggtgcacaagcacagaaaagcttcacaaaggctgtttcactcaacacgtgccaccagcagatggaacagactgcggtcctggaatgcattgccgtcatgggctatgtgtaaacaaagaaacggaaacacgtcctgtaaatggtgaatggggaccatgggaaccttacagttcttgttcaagaacatgtggaggcggaatcgaaagtgcaaccaggcgctgtaatcgtcctgagccaagaaacggaggaaattactgtgtgggccgcaggatgaaatttcgatcatgtaatactgattcatgtccaaaaggcacacaagactttcgagagaagcagtgctctgattttaatggtaaacatttggacatcagtggcattccctctaatgtgaggtggcttccaagatacagtggcattggcacaaaggatcgttgtaaactctattgtcaggttgctggaaccaattatttctacctattgaaggatatggttgaagatggtactccttgtggaactgaaactcatgacatctgtgttcaaggccagtgtatggcagctggttgtgatcacgtgttaaactccagtgccaagatagacaaatgtggagtgtgtggtggggacaactcttcatgcaagacaataacaggtgtcttcaacagttctcattatggttataatgttgttgtaaagattcccgcaggagcaacaaacgttgacattcgtcagtacagctattctggacaaccagatgacagttaccttgcattatctgacgctgaagggaattttcttttcaatggaaattttcttctaagtacgtcaaaaaaagaaatcaatgtgcaaggaacaagaactgttattgaatacagtggatcaaataacgcagttgaaagaattaatagtactaatcgacaagagaaagaacttattttgcaggtgttgtgtgtgggtaatttatacaaccctgatgtacattattccttcaatatccctttggaagagaggagtgacatgttcacatgggacccctatggaccatgggaaggctgtaccaaaatgtgtcaaggtcttcagcgaagaaacataacttgcatacataagagtgatcatagtgttgtgtctgataaagaatgtgaccacttgccacttccatcatttgttactcaaagttgcaatacagactgtgaactaaggtggcatgttattggcaaaagtgaatgttcatcccaatgtggtcaaggatatagaaccttggacatccattgcatgaagtattccattcatgaaggacagactgttcaagttgatgaccactactgtggtgaccagcttaaacctcctacccaagaactatgccatggtaactgtgtcttcacaagatggcattattcagaatggtctcagtgttccaggagttgtggaggaggggaaaggtctcgagaatcttattgtatgaataactttggccatcgtcttgctgacaatgaatgccaagaactgtcccgagtgacgagagagaattgcaatgaattttcctgtcccagttgggctgctagtgaatggagcgagtgccttgttacatgtggtaaaggaacaaagcagcggcaggtatggtgtcagctgaatgtagatcacttgagtgatggcttctgtaattcaagtaccaaacctgaatctctgagtccatgtgaacttcatacatgtgcttcctggcaagtaggaccatggggtccttgcacaaccacatgtggacatgggtatcagatgcgagatgttaaatgtgtcaatgagctagctagtgcagtgttagaggacacagaatgccatgaagctagtcgccccagtgacagacagagctgtgtacttacaccttgctcatttatttctaaacttgagaccgctttattaccaactgttctcataaaaaagatggcacaatggcgacatggttcttggaccccatgctccgtatcttgtggaagaggtactcaagcccgctatgtaagctgtcgtgatgctcttgatagaatagcagatgaatcatattgtgcccacttaccccgacctgctgaaatatgggactgttttaccccttgtggagagtggcaagcaggggattggtcaccctgttcagcttcctgtggccatggaaaaacaactcgacaagttttatgcatgaactaccatcagccaattgatgagaattactgtgatcctgaagttcgccctttgatggaacaggaatgtagcctggcagcctgccctcctgcacacagccactttcctagttcccctgtgcagccaagctattatctaagcacgaatttgccattaactcaaaaacttgaagataatgaaaatcaggtggtccatccatcagtcagaggaaaccagtggagaaccggaccatggggatcatgctccagcagttgttctggaggtcttcagcatagggctgtggtctgccaggatgaaaatggacaaagtgctagttactgcgatgcagcctccaagcctccagagttacagcaatgtggtccagggccttgtccacagtggaactacggaaattggggagaatgttcacaaacatgtggaggaggaataaaatcaagacttgtaatatgtcaatttcccaatggccaaatattagaagatcacaactgtgaaattgtaaacaagccacctagcgtaatacagtgtcatatgcatgcttgccctgctgatgtgtcatggcatcaggaaccatggacatcggaggatcttaaagtgaaattgctgcctcaaaggaccatcatcttgtgggaactaatgaaaaacatattttgccatggaaagcactcacatatgtatttaataaatgtcgttactgaccatctactatatcctaggcactgtgatccagagacaattgaaacatatttcttatccctatggagtttacagtttacttggggagatttgaaatactataagaactcactataaaaagatatttttattagctatcttagattggaaatccactttctgcttactgtgtctctgttccatcttctttcattttattggttttagtttgcaagcctagttcttaagaagactg

SEQ ID NO: 104752 - DNA, 5822 bp, Homo sapiens
  Payload ID: 569
  Gene Symbol: ADAMTS3
  Gene Name: ADAM metallopeptidase with thrombospondin type 1 motif, 3
  Uniprot ID: O15072
  ENST ID: ENST00000286657
  CDS Start-End: 38-3655
gctttgcccagtagttggaaagtgaactcgactcgtgatggttctcctgtcactttggttgatagcagccgctctggtagaggttaggacttcagctgatggacaagctggtaatgaagaaatggtgcaaatagatttaccaataaagagatatagagagtatgagctggtgactccagtcagcacaaatctagaaggacgctatctctcccatactctttctgcgagtcacaaaaagaggtcagcgagggacgtgtcttccaaccctgagcagttgttctttaacatcacggcatttggaaaagattttcatctgcgactaaagcccaacactcaactagtagctcctggggctgttgtggagtggcatgagacatctctggtgcctgggaatataaccgatcccattaacaaccatcaaccaggaagtgctacgtatagaatccggagaacagagcctttgcagactaactgtgcttatgttggtgacatcgtggacattccaggaacctctgttgccatcagcaactgtgatggtctggctggaatgataaaaagtgataatgaagagtatttcattgaacccttggaaagaggtaaacagatggaggaagaaaaaggaaggattcatgttgtctacaagagatcagctgtagaacaggctcccatagacatgtccaaagacttccactacagagagtcggacctggaaggccttgatgatctaggtactgtttatggcaacatccaccagcagctgaatgaaacaatgagacgccgcagacacgcgggagaaaacgattacaatatcgaggtactgctgggagtggatgactctgtggtccgtttccatggcaaagagcacgtccaaaactacctcctgaccctaatgaacattgtgaatgaaatttaccatgatgagtccctcggagtgcatataaatgtggtcctggtgcgcatgataatgctgggatatgcaaagtccatcagcctcatagaaaggggaaacccatccagaagcttggagaatgtgtgtcgctgggcgtcccaacagcaaagatctgatctcaaccactctgaacaccatgaccatgcaatttttttaaccaggcaagactttggacctgctggaatgcaaggatatgctccagtcaccggcatgtgtcatccagtgagaagttgtaccctgaatcatgaggatggtttttcatctgcttttgtagtagcccatgaaacgggccatgtgttgggaatggagcatgatggacaaggcaacaggtgtggtgatgagactgctatgggaagtgtcatggctcccttggtacaagcagcattccatcgttaccactggtcccgatgcagtggtcaagaactgaaaagatatatccattcctatgactgtctccttgatgacccttttgatcatgattggcctaaactcccagaacttcctggaatcaattattctatggatgagcaatgtcgttttgattttggtgttggctataaaatgtgcaccgcgttccgaacctttgacccatgtaaacagctgtggtgtagccatcctgataatccctacttttgtaagactaaaaagggacctccacttgatgggactgaatgtgctgctggaaaatggtgctataagggtcattgcatgtggaagaatgctaatcagcaaaaacaagatggcaattgggggtcatggactaaatttggctcctgttctcggacatgtggaactggtgttcgtttcagaacacgccagtgcaataatcccatgcccatcaatggtggtcaggattgtcctggtgttaattttgagtaccagctttgtaacacagaagaatgccaaaaacactttgaggacttcagagcacagcagtgtcagcagcgaaactcccactttgaataccagaataccaaacaccactggttgccatatgaacatcctgaccccaagaaaagatgccacctttactgtcagtccaaggagactggagatgttgcttacatgaaacaactggtgcatgatggaacgcactgttcttacaaagatccatatagcatatgtgtgcgaggagagtgtgtgaaagtgggctgtgataaagaaattggttctaataaggttgaggataagtgtggtgtctgtggaggagataattcccactgccgaaccgtgaaggggacatttaccagaactcccaggaagcttgggtaccttaagatgtttgatataccccctggggctagacatgtgttaatccaagaagacgaggcttctcctcatattcttgctattaagaaccaggctacaggccattatattttaaatggcaaaggggaggaagccaagtcgcggaccttcatagatcttggtgtggagtgggattataacattgaagatgacattgaaagtcttcacaccgatggacctttacatgatcctgttattgttttgattatacctcaagaaaatgatacccgctctagcctgacatataagtacatcatccatgaagactctgtacctacaatcaacagcaacaatgtcatccaggaagaattagatacttttgagtgggctttgaagagctggtctcagtgttccaaaccctgtggtggaggtttccagtacactaaatatggatgccgtaggaaaagtgataataaaatggtccatcgcagcttctgtgaggccaacaaaaagccgaaacctattagacgaatgtgcaatattcaagagtgtacacatccactctgggtagcagaagaatgggaacactgcaccaaaacctgtggaagttctggctatcagcttcgcactgtacgctgccttcagccactccttgatggcaccaaccgctctgtgcacagcaaatactgcatgggtgaccgtcccgagagccgccggccctgtaacagagtgccctgccctgcacagtggaaaacaggaccctggagtgagtgttcagtgacctgcggtgaaggaacggaggtgaggcaggtcctctgcagggctggggaccactgtgatggtgaaaagcctgagtcggtcagagcctgtcaactgcctccttgtaatgatgaaccatgtttgggagacaagtccatattctgtcaaatggaagtgttggcacgatactgctccataccaggttataacaagttatgttgtgagtcctgcagcaagcgcagtagcaccctgccaccaccataccttctagaagctgctgaaactcatgatgatgtcatctctaaccctagtgacctccctagatctctagtgatgcctacatctttggttccttatcattcagagacccctgcaaagaagatgtctttgagtagcatctcttcagtgggaggtccaaatgcatatgctgctttcaggccaaacagtaaacctgatggtgctaatttacgccagaggagtgctcagcaagcaggaagtaagactgtgagactggtcaccgtaccatcctccccacccaccaagagggtccacctcagttcagcttcacaaatggctgctgcttccttctttgcagccagtgattcaataggtgcttcttctcaggcaagaacctcaaagaaagatggaaagatcattgacaacagacgtccgacaagatcatccaccttagaaagatgagaaagtgaaccaaaaaggctagaaaccagaggaaaacctggacaacctctctcttcccatggtgcatatgcttgtttaaagtggaaatctctatagatcgtcagctcattttatctgtaattggaagaacagaaagtgctggctcactttctagttgctttcatcctccttttgttctgcattgactcatttaccagaattcattggaagaaatcaccaaagattattacaaaagaaaaatatgttgctaagattgtgttggtcgctctctgaagcagaaaagggactggaaccaattgtgcatatcagctgactttttgtttgttttagaaaagttacagtaaaaattaaaaagagataccaatggtttacactttaacaagaaattttggatatggaacaaagaattcttagacttgtattcctatttatctatattagaaatattgtatgagcaaatttgcagctgttgtgtaaatactgtatattgcaaaaatcagtattattttaagagatgtgttctcaaatgattgtttactatattacatttctggatgttctaggtgcctgtcgttgagtattgccttgtttgacattctataggttaattttcaaagcagagtattacaaaagagaagttagaattacagctactgacaatataaagggttttgttgaatcaacaatgtgatacgtaaattatagaaaaagaaaagaaacacaaaagctatagatatacagatatcagcttacctattgccttctatacttataatttaaaggattggtgtcttagtacacttgtggtcacagggatcaacgaatagtaaataatgaactcgtgcaagacaaaactgaaaccctctttccaggacctcagtaggcaccgttgaggtgtcctttgtttttgtgtgtgtgtgttcttttttaattttcgcattgttgacagatacaaacagttatactcaatgtactgtaataatcgcaaaggaaaaagttttgggataacttatttgtatgttggtagctgagaaaaatatcatcagtctagaattgatatttgagtatagtagagctttggggctttgaaggcaggttcaagaaagcatatgtcgatggttgagatatttattttccatatggttcatgttcaaatgttcacaaccacaatgcatctgactgcaataatgtgctaataatttatgtcagtagtcaccttgctcacagcaaagccagaaatgctctctccagggagtagatgtaaagtacttgtacatagaattcagaactgaagatatttattaaaagttgattttttttcttgatagtatttttatgtactaaatatttacactaatatcaattacatattttggtaaactagagagacataattagagatgcatgctttgttctgtgcatagagacctttaagcaaactactacagccaactcaaaagctaaaactgaacaaatttgatgttatgcaaacatcttgcatttttagtagttgatattaagttgatgacttgtttcccttcaaggaaacattaaattgtatggactcagctagctgttcaatgaaattgtgaattagaaacatttttaaaagtttttgaaagagataagtgcatcatgaattacatgtacatgagaggagatagtgatatcagcataatgattttgaggtcagtacctgagctgtctaaaaatatattatacaaactaaaatgtagatgaattaacctctcaaagcacagaatgtgcaagaacttttgcattttaatcgttgtaaactaacagcttaaactattgactctatacctctaaagaattgctgctactttgtgcaagaactttgaaggtcaaattaggcaaattccagatagtaaaacaatccctaagccttaagtcttttttttttcctaaaaattcccatagaataaaattctctctagtttacttgtgtgtgcatacatctcatccacaggggaagataaagatggtcacacaaacagtttccataaagatgtacatattcattatacttctgacctttgggctttcttttctactaagctaaaaattcctttttatcaaagtgtacactactgatgctgtttgttgtactgagagcacgtaccaataaaaatgttaacaaaatata

SEQ ID NO: 104753 - DNA, 4479 bp, Homo sapiens
  Payload ID: 569
  Gene Symbol: ADAMTS3
  Gene Name: ADAM metallopeptidase with thrombospondin type 1 motif, 3
  Uniprot ID: O15072
  ENST ID: ENST00000622135
  CDS Start-End: 35-3652
ttgcccagtagttggaaagtgaactcgactcgtgatggttctcctgtcactttggttgatagcagccgctctggtagaggttaggacttcagctgatggacaagctggtaatgaagaaatggtgcaaatagatttaccaataaagagatatagagagtatgagctggtgactccagtcagcacaaatctagaaggacgctatctctcccatactctttctgcgagtcacaaaaagaggtcagcgagggacgtgtcttccaaccctgagcagttgttctttaacatcacggcatttggaaaagattttcatctgcgactaaagcccaacactcaactagtagctcctggggctgttgtggagtggcatgagacatctctggtgcctgggaatataaccgatcccattaacaaccatcaaccaggaagtgctacgtatagaatccggagaacagagcctttgcagactaactgtgcttatgttggtgacatcgtggacattccaggaacctctgttgccatcagcaactgtgatggtctggctggaatgataaaaagtgataatgaagagtatttcattgaacccttggaaagaggtaaacagatggaggaagaaaaaggaaggattcatgttgtctacaagagatcagctgtagaacaggctcccatagacatgtccaaagacttccactacagagagtcggacctggaaggccttgatgatctaggtactgtttatggcaacatccaccagcagctgaatgaaacaatgagacgccgcagacacgcgggagaaaacgattacaatatcgaggtactgctgggagtggatgactctgtggtccgtttccatggcaaagagcacgtccaaaactacctcctgaccctaatgaacattgtgaatgaaatttaccatgatgagtccctcggagtgcatataaatgtggtcctggtgcgcatgataatgctgggatatgcaaagtccatcagcctcatagaaaggggaaacccatccagaagcttggagaatgtgtgtcgctgggcgtcccaacagcaaagatctgatctcaaccactctgaacaccatgaccatgcaatttttttaaccaggcaagactttggacctgctggaatgcaaggatatgctccagtcaccggcatgtgtcatccagtgagaagttgtaccctgaatcatgaggatggtttttcatctgcttttgtagtagcccatgaaacgggccatgtgttgggaatggagcatgatggacaaggcaacaggtgtggtgatgagactgctatgggaagtgtcatggctcccttggtacaagcagcattccatcgttaccactggtcccgatgcagtggtcaagaactgaaaagatatatccattcctatgactgtctccttgatgacccttttgatcatgattggcctaaactcccagaacttcctggaatcaattattctatggatgagcaatgtcgttttgattttggtgttggctataaaatgtgcaccgcgttccgaacctttgacccatgtaaacagctgtggtgtagccatcctgataatccctacttttgtaagactaaaaagggacctccacttgatgggactgaatgtgctgctggaaaatggtgctataagggtcattgcatgtggaagaatgctaatcagcaaaaacaagatggcaattgggggtcatggactaaatttggctcctgttctcggacatgtggaactggtgttcgtttcagaacacgccagtgcaataatcccatgcccatcaatggtggtcaggattgtcctggtgttaattttgagtaccagctttgtaacacagaagaatgccaaaaacactttgaggacttcagagcacagcagtgtcagcagcgaaactcccactttgaataccagaataccaaacaccactggttgccatatgaacatcctgaccccaagaaaagatgccacctttactgtcagtccaaggagactggagatgttgcttacatgaaacaactggtgcatgatggaacgcactgttcttacaaagatccatatagcatatgtgtgcgaggagagtgtgtgaaagtgggctgtgataaagaaattggttctaataaggttgaggataagtgtggtgtctgtggaggagataattcccactgccgaaccgtgaaggggacatttaccagaactcccaggaagcttgggtaccttaagatgtttgatataccccctggggctagacatgtgttaatccaagaagacgaggcttctcctcatattcttgctattaagaaccaggctacaggccattatattttaaatggcaaaggggaggaagccaagtcgcggaccttcatagatcttggtgtggagtgggattataacattgaagatgacattgaaagtcttcacaccgatggacctttacatgatcctgttattgttttgattatacctcaagaaaatgatacccgctctagcctgacatataagtacatcatccatgaagactctgtacctacaatcaacagcaacaatgtcatccaggaagaattagatacttttgagtgggctttgaagagctggtctcagtgttccaaaccctgtggtggaggtttccagtacactaaatatggatgccgtaggaaaagtgataataaaatggtccatcgcagcttctgtgaggccaacaaaaagccgaaacctattagacgaatgtgcaatattcaagagtgtacacatccactctgggtagcagaagaatgggaacactgcaccaaaacctgtggaagttctggctatcagcttcgcactgtacgctgccttcagccactccttgatggcaccaaccgctctgtgcacagcaaatactgcatgggtgaccgtcccgagagccgccggccctgtaacagagtgccctgccctgcacagtggaaaacaggaccctggagtgagtgttcagtgacctgcggtgaaggaacggaggtgaggcaggtcctctgcagggctggggaccactgtgatggtgaaaagcctgagtcggtcagagcctgtcaactgcctccttgtaatgatgaaccatgtttgggagacaagtccatattctgtcaaatggaagtgttggcacgatactgctccataccaggttataacaagttatgttgtgagtcctgcagcaagcgcagtagcaccctgccaccaccataccttctagaagctgctgaaactcatgatgatgtcatctctaaccctagtgacctccctagatctctagtgatgcctacatctttggttccttatcattcagagacccctgcaaagaagatgtctttgagtagcatctcttcagtgggaggtccaaatgcatatgctgctttcaggccaaacagtaaacctgatggtgctaatttacgccagaggagtgctcagcaagcaggaagtaagactgtgagactggtcaccgtaccatcctccccacccaccaagagggtccacctcagttcagcttcacaaatggctgctgcttccttctttgcagccagtgattcaataggtgcttcttctcaggcaagaacctcaaagaaagatggaaagatcattgacaacagacgtccgacaagatcatccaccttagaaagatgagaaagtgaaccaaaaaggctagaaaccagaggaaaacctggacaacctctctcttcccatggtgcatatgcttgtttaaagtggaaatctctatagatcgtcagctcattttatctgtaattggaagaacagaaagtgctggctcactttctagttgctttcatcctccttttgttctgcattgactcatttaccagaattcattggaagaaatcaccaaagattattacaaaagaaaaatatgttgctaagattgtgttggtcgctctctgaagcagaaaagggactggaaccaattgtgcatatcagctgactttttgtttgttttagaaaagttacagtaaaaattaaaaagagataccaatggtttacactttaacaagaaattttggatatggaacaaagaattcttagacttgtattcctatttatctatattagaaatattgtatgagcaaatttgcagctgttgtgtaaatactgtatattgcaaaaatcagtattattttaagagatgtgttctcaaatgattgtttactatattacatttctggatgttctaggtgcctgtcgttgagtattgccttgtttgacattctataggttaattttcaaagcagagtattacaaaagagaagttagaattacagctactgacaatataaagggttttgttgacagatacaaacagttatactcaatgtactgtaataatcgcaaaggaaaaagttttgggataacttatttgtatgttggtagctgagaaaaatatcatcagtctagaattgatatttgagtatagtagagctttggggctttgaaggcag

SEQ ID NO: 104754 - DNA, 1961 bp, Homo sapiens
  Payload ID: 570
  Gene Symbol: ADAMTS4
  Gene Name: ADAM metallopeptidase with thrombospondin type 1 motif, 4
  ENST ID: ENST00000367995
  CDS Start-End: 427-1446
ggagaacccacagggagacccacagacacatatgcacgagagagacagaggaggaaagagacagagacaaaggcacagcggaagaaggcagagacagggcaggcacagaagcggcccagacagagtcctacagagggagaggccagagaagctgcagaagacacaggcagggagagacaaagatccaggaaaggagggctcaggaggagagtttggagaagccagacccctgggcacctctcccaagcccaaggactaagttttctccatttcctttaacggtcctcagcccttctgaaaactttgcctctgaccttggcaggagtccaagcccccaggctacagagaggagctttccaaagctagggtgtggaggacttggtgccctagacggcctcagtccctcccagctgcagtaccagtgccatgtcccagacaggctcgcatcccgggaggggcttggcagggcgctggctgtggggagcccaaccctgcctcctgctccccattgtgccgctctcctggctggtgtggctgcttctgctactgctggcctctctcctgccctcagcccggctggccagccccctcccccgggaggaggagatcgtgtttccagagaagctcaacggcagcgtcctgcctggctcgggcgcccctgccaggctgttgtgccgcttgcaggcctttggggagacgctgctactagagctggagcaggactccggtgtgcaggtcgaggggctgacagtgcagtacctgggccaggcgcctgagctgctgggtggagcagagcctggcacctacctgactggcaccatcaatggagatccggagtcggtggcatctctgcactgggatgggggagccctgttaggcgtgttacaatatcggggggctgaactccacctccagcccctggagggaggcacccctaactctgctgggggacctggggctcacatcctacgccggaagagtcctgccagcggtcaaggtcccatgtgcaacgtcaaggctcctcttggaagccccagccccagaccccgaagagccaagcgctttgcttcactgagtagatttgtggagacactggtggtggcagatgacaagatggccgcattccacggtgcggggctaaagcgctacctgctaacagtgatggcagcagcagccaaggccttcaagcacccaagcatccgcaatcctgtcagcttggtggtgactcggctagtgatcctggggtcaggcgaggaggggccccaagtggggcccagtgctgcccagaccctgcgcagcttctgtgcctggcagcggggcctcaacacccctgaggactcggaccctgaccactttgacacagccattctgtttacccgtcaggtgaggccccagtcagcaccgcaggccatgcactgcacaattctaagaagcgccactacatagactatgatgcaaatgatgttcctggagttgtgtgacatggtgccttgccccagccacactgccatgtgtggctacctaggccctgacagtgctgggtcctcagtgcccaggtccccgggaatctggatctcaacccaatggacccaggtgtcttggctgtctatgcaccttctatgatccctctccacaggacctgtgtggagtctccacttgcgacacgctgggtatggctgatgtgggcaccgtctgtgacccggctcggagctgtgccattgtggaggatgatgggctccagtcagccttcactgctgctcatgaactgggtaaagtaggggtggatgagaaaggtattagggaggagaaggtgggggagggggtagcaagttcaccacagtgttaatgggggtcccaaggtattcttcccccaggcctaggtatagggctattactcctctctgctccaggtgtagacatacatttacatttttctattaaataaattagttggtcgaaac

SEQ ID NO: 104755 - DNA, 9773 bp, Homo sapiens
  Payload ID: 570
  Gene Symbol: ADAMTS4
  Gene Name: ADAM metallopeptidase with thrombospondin type 1 motif, 4
  Uniprot ID: O75173
  ENST ID: ENST00000367996
  CDS Start-End: 430-2943
tggggagaacccacagggagacccacagacacatatgcacgagagagacagaggaggaaagagacagagacaaaggcacagcggaagaaggcagagacagggcaggcacagaagcggcccagacagagtcctacagagggagaggccagagaagctgcagaagacacaggcagggagagacaaagatccaggaaaggagggctcaggaggagagtttggagaagccagacccctgggcacctctcccaagcccaaggactaagttttctccatttcctttaacggtcctcagcccttctgaaaactttgcctctgaccttggcaggagtccaagcccccaggctacagagaggagctttccaaagctagggtgtggaggacttggtgccctagacggcctcagtccctcccagctgcagtaccagtgccatgtcccagacaggctcgcatcccgggaggggcttggcagggcgctggctgtggggagcccaaccctgcctcctgctccccattgtgccgctctcctggctggtgtggctgcttctgctactgctggcctctctcctgccctcagcccggctggccagccccctcccccgggaggaggagatcgtgtttccagagaagctcaacggcagcgtcctgcctggctcgggcgcccctgccaggctgttgtgccgcttgcaggcctttggggagacgctgctactagagctggagcaggactccggtgtgcaggtcgaggggctgacagtgcagtacctgggccaggcgcctgagctgctgggtggagcagagcctggcacctacctgactggcaccatcaatggagatccggagtcggtggcatctctgcactgggatgggggagccctgttaggcgtgttacaatatcggggggctgaactccacctccagcccctggagggaggcacccctaactctgctgggggacctggggctcacatcctacgccggaagagtcctgccagcggtcaaggtcccatgtgcaacgtcaaggctcctcttggaagccccagccccagaccccgaagagccaagcgctttgcttcactgagtagatttgtggagacactggtggtggcagatgacaagatggccgcattccacggtgcggggctaaagcgctacctgctaacagtgatggcagcagcagccaaggccttcaagcacccaagcatccgcaatcctgtcagcttggtggtgactcggctagtgatcctggggtcaggcgaggaggggccccaagtggggcccagtgctgcccagaccctgcgcagcttctgtgcctggcagcggggcctcaacacccctgaggactcggaccctgaccactttgacacagccattctgtttacccgtcaggacctgtgtggagtctccacttgcgacacgctgggtatggctgatgtgggcaccgtctgtgacccggctcggagctgtgccattgtggaggatgatgggctccagtcagccttcactgctgctcatgaactgggtcatgtcttcaacatgctccatgacaactccaagccatgcatcagtttgaatgggcctttgagcacctctcgccatgtcatggcccctgtgatggctcatgtggatcctgaggagccctggtccccctgcagtgcccgcttcatcactgacttcctggacaatggctatgggcactgtctcttagacaaaccagaggctccattgcatctgcctgtgactttccctggcaaggactatgatgctgaccgccagtgccagctgaccttcgggcccgactcacgccattgtccacagctgccgccgccctgtgctgccctctggtgctctggccacctcaatggccatgccatgtgccagaccaaacactcgccctgggccgatggcacaccctgcgggcccgcacaggcctgcatgggtggtcgctgcctccacatggaccagctccaggacttcaatattccacaggctggtggctggggtccttggggaccatggggtgactgctctcggacctgtgggggtggtgtccagttctcctcccgagactgcacgaggcctgtcccccggaatggtggcaagtactgtgagggccgccgtacccgcttccgctcctgcaacactgaggactgcccaactggctcagccctgaccttccgcgaggagcagtgtgctgcctacaaccaccgcaccgacctcttcaagagcttcccagggcccatggactgggttcctcgctacacaggcgtggccccccaggaccagtgcaaactcacctgccaggcccaggcactgggctactactatgtgctggagccacgggtggtagatgggaccccctgttccccggacagctcctcggtctgtgtccagggccgatgcatccatgctggctgtgatcgcatcattggctccaagaagaagtttgacaagtgcatggtgtgcggaggggacggttctggttgcagcaagcagtcaggctccttcaggaaattcaggtacggatacaacaatgtggtcactatccccgcgggggccacccacattcttgtccggcagcagggaaaccctggccaccggagcatctacttggccctgaagctgccagatggctcctatgccctcaatggtgaatacacgctgatgccctcccccacagatgtggtactgcctggggcagtcagcttgcgctacagcggggccactgcagcctcagagacactgtcaggccatgggccactggcccagcctttgacactgcaagtcctagtggctggcaacccccaggacacacgcctccgatacagcttcttcgtgccccggccgaccccttcaacgccacgccccactccccaggactggctgcaccgaagagcacagattctggagatccttcggcggcgcccctgggcgggcaggaaataacctcactatcccggctgccctttctgggcaccggggcctcggacttagctgggagaaagagagagcttctgttgctgcctcatgctaagactcagtggggaggggctgtgggcgtgagacctgcccctcctctctgccctaatgcgcaggctggccctgccctggtttcctgccctgggaggcagtgatgggttagtggatggaaggggctgacagacagccctccatctaaactgccccctctgccctgcgggtcacaggagggagggggaaggcagggagggcctgggccccagttgtatttatttagtatttattcacttttatttagcaccagggaaggggacaaggactagggtcctggggaacctgacccctgacccctcatagccctcaccctggggctaggaaatccagggtggtggtgataggtataagtggtgtgtgtatgcgtgtgtgtgtgtgtgaaaatgtgtgtgtgcttatgtatgaggtacaacctgttctgctttcctcttcctgaattttattttttgggaaaagaaaagtcaagggtagggtgggccttcagggagtgagggattatctttttttttttttctttctttctttcttttttttttttgagacagaatctcgctctgtcgcccaggctggagtgcaatggcacaatctcggctcactgcatcctccgcctcccgggttcaagtgattctcatgcctcagcctcctgagtagctgggattacaggctcctgccaccacgcccggctaatttttgttttgttttgtttggagacagagtctcgctattgtcaccagggctggaatgatttcagctcactgcaaccttcgccacctgggttccagcaattctcctgcctcagcctcccgagtagctgagattataggcacctaccaccacgcccggctaatttttgtatttttagtagagacggggtttcaccatgttggccaggctggtctcgaactcctgaccttaggtgatccactcgccttcatctcccaaagtgctgggattacaggcgtgagccaccgtgcctggccacgcccaactaatttttgtatttttagtagagacagggtttcaccatgttggccaggctgctcttgaactcctgacctcaggtaatcgacctgcctcggcctcccaaagtgctgggattacaggtgtgagccaccacgcccggtacatattttttaaattgaattctactatttatgtgatccttttggagtcagacagatgtggttgcatcctaactccatgtctctgagcattagatttctcatttgccaataataatacctcccttagaagtttgttgtgaggattaaataatgtaaataaagaactagcataacactcagcatctagtaagtgctcaacaaatagcagctgctgttacttactgttatcaaatttctgtccacatccactctccatatgcacttgaaggtggcaaagatccacaaccatggtgcctgcctttatcctcagggtccgttcctttggttggcagacccctatcctgggttctgagggaccaacagagaaaggaaaattccatccctcacctctggaagttcccaatcacaggaaggaaacatagtaagcacgtggctacaaatacaattgacaagaacatgaaggtgcaggataacaagaacaaataacaagaacaactgcatcaacacaaatgagtgcttagtaataagggtgatagttgaggggtctgggtttcacaacagtagaaagagcactggagtgggagccagcgggtctggattcaatttggggctcggcgtcttattagctgggtggtgttgggtaagtcactgatgctgagccttagattgctcatatgggactaacagtatctactcccacagagttgttctgggaacaaatgctagaatattttcaaaatagtaaaggttatagtcatggccatgtgagaggttacccctatgactacctgaagatggaacggagtctccagaatctgccagtgtaaacccagcagaatgcctagaagatgtgagattagaataaaatttcataaaacaaaaacaatcgggcacggtggctcatgcctgtaatcccagcactttgggaggccgaaatgggcggatcacgaggtcaggagattgagaccgaccatcctggctaccacagtgaaaccccgtgtctactaaaaatacaaaatatatatatatatatatatatatattagccgggcatggtgacaggtgcctatagtcccagctacttgggagactgaggcaggagaatgacttgcacccgggaggcagagcttacagtgagtcgagattgcgccactgcactccagcctgggagacagagtgagactcgtctcgatacaaaaacaaaaacaaaaacaggatatggtttggcaggaaataggcaagaaggcaaaaagaataacctggaaaaggatctgaggtaagggagccaggtgcctcaaaatggcagaatacctgatgcctgaggagagggagggaataaaacatctgcattttcccctctgggcaaggcgcctttgcttgagaaagaattttgggctggatgagatggttcacacctgtaatcccagtactttggcaggaggattgcttgaggccaggaggttgggaccaacctgggcaacatagaaagattccatctctaccaaaaaaaaaaaagattgaaaaattagccgggcgtggtggcacctgtagtcccagctacttgggaggctaaaataggaggactgcttgagcccacgatttcgaggctatggtgagctacaatcatgccactatactccagcctgggtgagagaccaaaacaccaactcaaaaaaaaaaaaaaaaaaaaaaaaagggccaggcatggtggctcacacctgtaatctcagcactttgggaggctgaggttcaaaaccagccaggccaacatggtgaaaccccatctctactaaaaaaaaaatacaaaaaattagccaggtgtggtggcaagcgcctatagtcccagctactcatgaggctgaggcaggaggatcgcttgaacctgggaggtggaggttgcagtgagccgaaattgcgccattgcactccagtctgggcgatagagtgagactccatctcaaaaaaaaaaaaaaaaaaaaaaagaacttgggcagtcctctatgtgtcatggatggaacagggatgggcaagggtggtaggtagaccctgcaagaatttggagttttgagaggcagacgcaggactgctagggattggggaaggtactggatgtggggttgtgggagaaactataggtaaagaagaccctgaggttgaggtggaagagtgaagaatgggggaaccaaaggcacttcactctgccatagcagcccctagctgggatgccaaatactgcttggaatgtgaagctgggactatggggttgaggcaggccatggaggttgtagtggttatatgtgctatgcttactggatctgggctttgctaatcaagttctgtaccaggcagtgccttatacagcaccctgtactctacaccagccagcacagcgcctgcttcctctgcagcaatgagaaaagactgcccacactctcttctctccagtaaacacggttctccctgctaggcttggccccctggcccttcctgtggtcctcctactaaccaggctgaagaagatggagacaagacaatagtgatctttactcgtttcatctagtttgcaaaatgagaccacagatagtatgtttatggaccttgatactatgagttgatggtacaatgagcagagttctgtgataagtagatgtaaggtacaaatacaaacaatatatacgactgtcctaaaggggttcacactgcattctgggcaggggaggttgtatactgctcccactccaccttccccgcaaacagaagcaatgggacagtaaaagggactagaagataagagcctaatgagccctgaactgaatggactatgagggttatggagggctaccttgggctgggccctggagaacaggtcatcatgatagcccttctcactttcctttaatgttcatggagatacacttttttttttgagatagggtctccctttgttgaccaggcaggagtacagtggtgtgatcttggctcactgcagccttgaactctcaggctcaagcaaccctcccacctcaacctcctgagtacctaggactacaggcacgagctaccacacccagctaatttacttttttttttggttgagacgaggtcttatcatattgcccaggctggtcttgaactcctggcctcaagggatcttcccacctcgatctcccaaagtgttgggatgaccagtgtgaaccaccatgcctggccttttcttttgagacagtctcgctctgtggctcaggttggagtgcagtggcaccatcataacttactacagccttgaactcctgggctcgagtaatcctcccacctcagcctcctaagtagcttggactacaggtgtagattcacttttaaatcacttttctgcctgttattttaagagaaagcccttcgctcaccaagtagggttctcactggcataagtaagtttttctgaaaatgagactgagcttaggggccacctctgtgattgggtaagtaagcaggagctagagtgaaagaggggcagagagagctagctcatcgaagagaagtgatgggcatctcagccctcaatcccaggcaaggcctgacccttttctggaatggtctctgccttaccacacctccaagacccagattgtaggtaggctttacctaataggagtccaacaagttcttgctagggatgggattgtgggggggcacatatctccctgtaagagccacagtgagctctgtttcccatctgcctacttattgccctcgtgggcctgagctggggtgtagatatataaggaggaacagaaacagtaataacaggaagtaaggaggcactgaaacaattcaagtatctggtcctggagatgaaaagaggaaatggaaaaagaaaaggcattgaatgacaagggattagaaccctgtccctagagaagttcaagaagagtttggacaaccattttatgagatggcaagtgttgtgcatgagtatgtgtttgaggtgggggaggaagttgaagcaataagttgggccaatttcctaaagtcccttctgcccctgagattctctgcttctgtggttcaaacagaggaaatctggacatttgtccagccactatttttgtaatggaggtgggacagccagggttcctggagtgtgctgtggaatcggcatttacacttctcttccatctctagtctcatttctgtaatcttcatacagtattacagtattttgttttctaaaataccagattggcagtaagtgacaaaactagcatctcattggtcagggcttgtgggggaggaagggagaagaaagtggatttcaatgtattaacattttattggctgagaggatgtttctgaaccaattgagtaccttccccattgactgttgctggggccaagccaaaatcattggcaccacgagaaaccagatgacagctggaggaaaccacgagtgctaaaaatgctcagaaagaggggggtcagggaaggcgggggagcaacaacactgaacaacttccccaggcaggatcttacatggggacagacccagggtacttaagtagcattaggaaggaaagggaggggaggaagtagattaagtatccctcacagtcttggcacaacaaacaggcaccatacacccacaccaacagtgacacattgacataacacacatccaacttcacagagacacactagcacattctctcttttttttaaaatttattttattattattatactttaagttttagggtacatgtgcacaatgtgcaggttagttacatatgtatacatgtgccatgctggtgtgctgcacccattaactcatcatttagcattaggtatatctcctaatgctatccctcccccctccccccctgcctttctttttcttcttttttttcttaagacagattctcattctgtcacccaggctagagtgcaatggcgtgatctcggctcactgcaacctccacctcccaggttcaagtgattctcctgcctcagcctgccaagtagctgggattacaggtatgcaccaccatgcccagctaattttttgtatttttagtatagagacggggttttccatgttgcccaggctggtcttgaactcccgggctcaagtgatctgcctgcctcggcctcccaaagtgctgggattacaggtgtgagccagggtgcctggccaacacattctgttgataatatagatgcaaataagtagtagggagcggaaaatgtaagaattttcacctgaaaatggatctgaagagtaaaagatattaattgacctaatcgtgcattgagaattgactgtttatcccatttatttgttcaataaataagccaatgggttgtaaacattgtaaacattccacagcatgtggaaaggacatggatttttggagtcaaattgaatctaagccttgctacttacttacctgtaatgatgcaaccttaattacttgatctctgtaaacctcagtttccttacctacaaaacgtttgtactattacctgccttatagagaggtccagacttaagaatatgatgatgtaaatgtttggcactgtgtctggcttttagtaagtggtcaataaaggccagttctcctt

SEQ ID NO: 104756 - DNA, 9056 bp, Homo sapiens
  Payload ID: 571
  Gene Symbol: ADAMTS5
  Gene Name: ADAM metallopeptidase with thrombospondin type 1 motif, 5
  Uniprot ID: Q9UNA0
  ENST ID: ENST00000284987
  CDS Start-End: 123-2915
cttgactcaatcctgcaagcaagtgtgtgtgtgtccccatcccccgccccgttaacttcatagcaaataacaaatacccataaagtcccagtcgcgcagcccctccccgcgggcagcgcactatgctgctcgggtgggcgtccctgctgctgtgcgcgttccgcctgcccctggccgcggtcggccccgccgcgacacctgcccaggataaagccgggcagcctccgactgctgcagcagccgcccagccccgccggcggcagggggaggaggtgcaggagcgagccgagcctcccggccacccgcaccccctggcgcagcggcgcaggagcaaggggctggtgcagaacatcgaccaactctactccggcggcggcaaggtgggctacctcgtctacgcgggcggccggaggttcctcttggacctggagcgagatggttcggtgggcattgctggcttcgtgcccgcaggaggcgggacgagtgcgccctggcgccaccggagccactgcttctatcggggcacagtggacggtagtccccgctctctggctgtctttgacctctgtgggggtctcgacggcttcttcgcggtcaagcacgcgcgctacaccctaaagccactgctgcgcggaccctgggcggaggaagaaaaggggcgcgtgtacggggatgggtccgcacggatcctgcacgtctacacccgcgagggcttcagcttcgaggccctgccgccgcgcgccagctgcgaaacccccgcgtccacaccggaggcccacgagcatgctccggcgcacagcaacccgagcggacgcgcagcactggcctcgcagctcttggaccagtccgctctctcgcccgctgggggctcaggaccgcagacgtggtggcggcggcggcgccgctccatctcccgggcccgccaggtggagctgcttctggtggctgacgcgtccatggcgcggttgtatggccggggcctgcagcattacctgctgaccctggcctccatcgccaataggctgtacagccatgctagcatcgagaaccacatccgcctggccgtggtgaaggtggtggtgctaggcgacaaggacaagagcctggaagtgagcaagaacgctgccaccacactcaagaacttttgcaagtggcagcaccaacacaaccagctgggagatgaccatgaggagcactacgatgcagctatcctgtttactcgggaggatttatgtgggcatcattcatgtgacaccctgggaatggcagacgttgggaccatatgttctccagagcgcagctgtgctgtgattgaagacgatggcctccacgcagccttcactgtggctcacgaaatcggacatttacttggcctctcccatgacgattccaaattctgtgaagagacctttggttccacagaagataagcgcttaatgtcttccatccttaccagcattgatgcatctaagccctggtccaaatgcacttcagccaccatcacagaattcctggatgatggccatggtaactgtttgctggacctaccacgaaagcagatcctgggccccgaagaactcccaggacagacctacgatgccacccagcagtgcaacctgacattcgggcctgagtactccgtgtgtcccggcatggatgtctgtgctcgcctgtggtgtgctgtggtacgccagggccagatggtctgtctgaccaagaagctgcctgcggtggaagggacgccttgtggaaaggggagaatctgcctgcagggcaaatgtgtggacaaaaccaagaaaaaatattattcaacgtcaagccatggcaactggggatcttggggatcctggggccagtgttctcgctcatgtggaggaggagtgcagtttgcctatcgtcactgtaataaccctgctcccagaaacaacggacgctactgcacagggaagagggccatctaccgctcctgcagtctcatgccctgcccacccaatggtaaatcatttcgtcatgaacagtgtgaggccaaaaatggctatcagtctgatgcaaaaggagtcaaaacttttgtggaatgggttcccaaatatgcaggtgtcctgccagcggatgtgtgcaagctgacctgcagagccaagggcactggctactatgtggtattttctccaaaggtgaccgatggcactgaatgtaggctgtacagtaattccgtctgcgtccgggggaagtgtgtgagaactggctgtgacggcatcattggctcaaagctgcagtatgacaagtgcggagtatgtggaggagacaactccagctgtacaaagattgttggaacctttaataagaaaagtaagggttacactgacgtggtgaggattcctgaaggggcaacccacataaaagttcgacagttcaaagccaaagaccagactagattcactgcctatttagccctgaaaaagaaaaacggtgagtaccttatcaatggaaagtacatgatctccacttcagagactatcattgacatcaatggaacagtcatgaactatagcggttggagccacagggatgacttcctgcatggcatgggctactctgccacgaaggaaattctaatagtgcagattcttgcaacagaccccactaaaccattagatgtccgttatagcttttttgttcccaagaagtccactccaaaagtaaactctgtcactagtcatggcagcaataaagtgggatcacacacttcgcagccgcagtgggtcacgggcccatggctcgcctgctctaggacctgtgacacaggttggcacaccagaacggtgcagtgccaggatggaaaccggaagttagcaaaaggatgtcctctctcccaaaggccttctgcgtttaagcaatgcttgttgaagaaatgttagcctgtggttatgatcttatgcacaaagataactggaggattcagcactgatgcagtcgtggtgaacaggaggtctacctaacgcacagaaagtcatgcttcagtgacattgtcaacaggagtccaattatgggcagaatctgctctctgtgaccaaaagaggatgtgcactgcttcacgtgacagtggtgaccttgcaatatagaaaaacttgggagttattgaacatcccctgggcttacaagaaacactgatgaatgtaaaatcaggggacatttgaagatggcagaactgtctcccccttgtcacctacctctgatagaatgtctttaatggtatcataatcattttcacccataatacacagtagcttcttcttactgtttgtaaatacattctcccttggtatgtcactttatatcccctggttctattaaaatatccatatatatttctataaaaaaagtgtttgaccaaagtaggtctgcagctatttcaacttccttccgtttccagaaagagctgtggatattttactggaaattaagaacttgctgctgttttaataagatgtagtatattttctgactacaggagataaaatttcagtcaaaaaaccattttgacagcaagtatcttctgagaaattttgaaaagtaaatagatctcagtgtatctagtcacttaaatacatacacgggttcatttacttaaacctttgactgcctgtatttttttcaggtagctagccaaattaatgcataatttcagatgtagaagtagggtttgcgtgtgtgtgtgtgatcatactcaagagtctaaaaactagtttccttgtgttggaaatttaaaaggaaaaaaatcgtatttcactgtgttttcaatttatattttcacaactactttctctctccagagctttcatctgatatctcacaatgtatgatatacgtacaaaacacacagcaagttttctatcatgtccaacacattcaacactggtatacctcctaccagcaagcctttaaaatgcatttgtgtttgcttatttgttttgttcaagggttcagtaagacctacaatgttttgtatttcttgacttattttattagaaacattaaagatcacttggtagttagccacattgagaagtggttatcattgttaatgtggttaatgccaaaaagtggttaatattaataagactgtttccacaccataggcaataatttcttaatttaaaaaatctaagtatattcctattgtactaaatatttttcccaactggaaagcacttgattgtacccgtaagtgtttgagtgatgacatgtgatgattttcagaaagttgttgtttttgtttccatagcctgtttaagtaggttgtaagtttgaatagttagacatggaaattattttataagcacacacctaaagatatctttttagatgataaaatgtacacccccccatcaccaacctcacaacttagaaaatctaagttgtttgatttctttgggatttcttttgttgtgaaacactgcaaagccaatttttctttataaaaattcatagtaatcctgccaaatgtgcctattgttaaagatttgcatgtgaagatcttagggaaccactgtttgagttctacaagctcatgagagtttatttttattataagatgtttttaatataaaagaattatgtaactgatcactatattacatcatttcagtgggccaggaaaatagatgtcttgctgttttcagtattttcttaagaaattgcttttaaaacaaataattgttttacaaaaccaataattatcctttgaattttcatagactgactttgcttttgacgtagaaattttttttctcaataaattatcactttgagaaatgaggcctgtacaaggctgataacctatatgtgatggagatcacccaatgccaagggcagaaagcaaacctagttaaataggtgagaaaaaaaataataatcccagtgccatttgtctgtgcaaagagaattaggagagaggttaatgttacttttttccattttggaaataattttaatcaagtaactcaaatgtgacaaaatttatttttattttttgtggttatattcccaacaacattaaaaaatactcgaggcataaatgtagttgtctcctactctgcttctcttactatactcatacatttttaatatggtttatcaatgattcatgtttccctcaaatagtgatggtttacacctgtcatggaaacaatcctagagagctcagagcaattaaaccactattccatgcttttaagtagttttctccacctttttcttatgagtctcactagattgactgaggaatgtatgtctaaattcctggagaagatgatatggattggaaactgaaattcagagaaatggagtgttcaatagataccacgaattgtgaacaaagggaaaattctatacaactcaatctaagtcagtccactttgacttcgtactgtctttcacctttccattgttgcatcttgaattttttaaaatgtctagaattcaggatgctaggggctacttctttaaaaaaaaaaaaaaaaaagaattcgtctgaaaatgctcaggtttgtaagaatctaatctcacttacataactaagcactccataataagttttattaagtacaaagggagccagaaaaaatgacatttatttcttctagatcagaaaaatttaaattaagccctgccttgctgtttagaaatatgtgggcattgttataatttattcaataaatttatgttcctttgccttcctgtggaaacagttttatcccactaaactaggaattaggggataaatcacaaacaaaaaaaaagttgcagcactgaaaaaaagtaatttattgtttttgcaactggtatgtgaatttgtgtgataaaattatttattcttatttaacaaaaatatgttcaaatttttctatatttaaaatgttttgctgttgtcctactttttaatttatgcttcatgtttgtgtataaagtacacttttacactttgtgagtttacataatatacagcactggttgcttttgtatttttttacagaaagctttctgtgtgaagcaggtgtatatgtatatattcctcatgtattcttattctgatactatcatttttctttccaaggaaattttaatctgtcatgaccaatagtgttcattacttgtgcctatgataataggttttttacatcacattaacactattttttccaagtcacaaataagaaaaacacttattcaatgaaacaaggtgcaagttttaaatttgggtacacaaatagcctagaagcttcctacagacgctaagacacagccaataatcagatcctttcacttcatcgagaaacttggacaagtcgatattgatgtattagatgaaagttgtctacacacaacttctgagggatacaaacgataataaaaccaaatgttgtctgtttctcctttagaaacacctcctaaaattaatatcatttagtctctagtgtctgtaggattctacagatgagcacaaatagattgggtttgtataacaaatgctaatagtcataactgtttctacaaatatggggtgtccattaagagaatgtgatgttttcctactgctgttgaatcccatggggtgattataggacttgaaataggcagagtcacctctgatgacatcagcttgcctctgtgatttcacagtctgatcctggcaacaagacaaagcacccttggacacacagccaatctctggttgtgatatttccccattgattccttccttgttaacaaggtcattttaatggttcaggtgaggacagcagccagattcaaagtccagaatttgtgctgttacatagagttcacactgtcaaataacattgaatttaataatgatcaaatttttctagtagtctttggcagagtgtataatctcattggcatgattggtgaatattactaatctctttataatgaaagatgctttacaaataccttatatttgctaacatttcaaaactactaaataaatgaaatagccatgtgtacagaaatggtcatttaaagctttaatagaaccaaattcaagacaatgtatcatttagacacacagaaaaggaacttgtatgttttccctattatttttctcatttgccaacaatctatagttttaggttatcaaacagatagatcaacttaactggctagtacattgaaaaatcttcctaagaatcctttgttagcataatctatagagataatttctcaaattatatcatcatgatgcatataaactctataatgtataattgtgtttcatttatttaatgtatgagaacatattgaaatacaaaaccatgcattagccaaaaaattggaatacaggtagtgttcagatcagcaaaacattcagtctggtaaatgcctgcctggggctatgatatcattctcaatgcaggttttatggaaaaactaaaagaatatgttgttagatgatgttggttttgaaaaaaaaaagacattaacatacacattagttagcccagttaattgcattctactaatatagttgcacattagcaataattttgctgtctctggtctttattttgtggcttcaactaactggaccatgtggactgtaaaggtcaaatggaaaaaacgagcagtggcccctcatcctgtaaggtactgctacatcagagtgacctaaaagtctaacactgtgaggaaaactgtgatttgtaggaaaaaaaaaaaaaacaaataaaaaacagggcatgctttttaatttttttccactttcctttggcacacccaatgaacaattctaatttttattgaggtgctaacatctttcgtgaccgactgtcaaatgtggtatttttgagttactatttttctacatgattttacagtttgcaagaaagacctctaagctttgtgtcacggtagggcacaacttgatactcaaaatttgaaaaataagcacatccaatgattgttttgaccaacagtggtcagtgacgtaaactgcatgtgcatctgaggacatttaaggggtcattaaaatttgaggagcatcaggccggagtagcagacttttagatgagtcatatttcagcattcactaagtcctcagcattccattcaaactgtcgtgtatatttggcctgattttttttcaagctttgcaataatttatgttattggtaaacacttggtgactatatctcagccttttctttaacaactcacaatatattagaaacacgtctacctatactgagagtatatttacaatagaagaacatactgtatgtgactttgtaaagctagacttttgattaagaaatatataatctctggatgctatttttgcattatacactcaggcacaacgtaaaccttgatggctcatcttgctacaattacgagttgaaaaacactacttacgtatttgtatgacctattagtcagaggaaatcatacatatgctttgtaaatagactttgcagataactaaatagactgaagaaatatgttgcatttgatagaagcaattgcataaatatttggtttctatattagagtctgtgagtaaagtcaagtaataaacctaagtaggtataacagatttttaaaccttgaaacttgctttgatggtagagaaaatcattgaagatttacatactgtatataagatgtaaaatgtacgctgcttattaccctcaattttccagaagcaatggtatataatgcagttgaaaaaccaaaaatcttggaaaactaagacgggtcttgtttaaaatgtctctcagctttggcaaccttcaaatcttaatcaactatttaaagcattactgtgtcttgtagcctgcattccacaacagctctgttattcaggtaaaagacttgaactgagccgtttgggacctatactgtaatattttcattgaggaacaatatcctattttgtaaagcatttccctatgtgtgactttaaactgtaaaattaaacactgcttttgtgggttcagtgggcataataaatataaattgtaaactaggttaaagta

SEQ ID NO: 104757 - DNA, 7311 bp, Homo sapiens
  Payload ID: 572
  Gene Symbol: ADAMTS6
  Gene Name: ADAM metallopeptidase with thrombospondin type 1 motif, 6
  Uniprot ID: Q9UKP5
  ENST ID: ENST00000381055
  CDS Start-End: 858-4211
agtgtgctctgcctccgaggaaaagctgccaaaattttctcctgctgcaattcaagttggctgggggccggtagtgagatctagggctacttcaacaaaactttgctgcccttcctgctcctcttgtcttcttttctcctgataccttttgatgctctgcacatgttatttgcatagcaaaggcactaagctttccaggaagagagggcaccacttccacccccaataagtcttttttcccgtcttttctttcttttcctttccttttttggggggtggggagggagagaaagggggtttgcaaaggcagcatctcagagtgatagcctagatgtattgaaggcatctcttattctgccaaatcggaaagtcagttctctaaagcccgggttagccagaccatagggttttattctggctgcagaataactggctggtgtggctttgcaaaggggggcaaaaaataaaaaaataaaaaaaattaaaaaaagttagagaggagagggagtacgtgagtcgtccagtgcaatctctattgtctgaaacttactttttatcagaatttgaagatgaaaacggttaaaaaatggccatactttagtaactaatcagcctaatgctttgcttatgaaaacttttaccatcattatttttttcattttggattgagaaaatgaatccagatatagaagaaagtgcaggatgttggataaaagtggctcttaaacagtggaacatccaataactaatttgcaagaagttttaaagaaataaaattgttatgcttcgattttggtatggtattgactctttagcacataggtagccctcaaaaaaatcatccagttttctaaattatggaaattttgtggaagacgttgacctggattttgagcctcatcatggcttcatcggaatttcatagtgaccacaggctttcatacagttctcaagaggaattcctgacttatcttgaacactaccagctaactattccaataagggttgatcaaaatggagcatttctcagctttactgtgaaaaatgataaacactcaaggagaagacggagtatggaccctattgatccacagcaggcagtatctaagttattttttaaactttcagcctatggcaagcactttcatctaaacttgactctcaacacagattttgtgtccaaacattttacagtagaatattgggggaaagatggaccccagtggaaacatgattttttagacaactgtcattacacaggatatttgcaagatcaacgtagtacaactaaagtggctttaagcaactgtgttgggttgcatggtgttattgctacagaagatgaagagtattttatcgaacctttaaagaataccacagaggattccaagcattttagttatgaaaatggccaccctcatgttatttacaaaaagtctgcccttcaacaacgacatctgtatgatcactctcattgtggggtttcggatttcacaagaagtggcaaaccttggtggctgaatgacacatccactgtttcttattcactaccaattaacaacacacatatccaccacagacagaagagatcagtgagcattgaacggtttgtggagacattggtagtggcagacaaaatgatggtgggctaccatggccgcaaagacattgaacattacattttgagtgtgatgaatattgttgccaaactttaccgtgattccagcctaggaaacgttgtgaatattatagtggcccgcttaattgttctcacagaagatcagccaaacttggagataaaccaccatgcagacaagtccctcgatagcttctgtaaatggcagaaatccattctctcccaccaaagtgatggaaacaccattccagaaaatgggattgcccaccacgataatgcagttcttattactagatatgatatctgcacttataaaaataagccctgtggaacactgggcttggcctctgtggctggaatgtgtgagcctgaaaggagctgcagcattaatgaagacattggcctgggttcagcttttaccattgcacatgagattggtcacaattttggtatgaaccatgatggaattggaaattcttgtgggacgaaaggtcatgaagcagcaaaacttatggcagctcacattactgcgaataccaatcctttttcctggtctgcttgcagtcgagactacatcaccagctttctagattcaggccgtggtacttgccttgataatgagcctcccaagcgtgactttctttatccagctgtggccccaggtcaggtgtatgatgctgatgagcaatgtcgtttccagtatggagcaacctcccgccaatgtaaatatggggaagtgtgtagagagctctggtgtctcagcaaaagcaaccgctgtgtcaccaacagtattccagcagctgaggggacactgtgtcaaactgggaatattgaaaaagggtggtgttatcagggagattgtgttccttttggcacttggccccagagcatagatgggggctggggtccctggtcactatggggagagtgcagcaggacctgcgggggaggcgtctcctcatccctaagacactgtgacagtccagcaccttcaggaggtggaaaatattgccttggggaaaggaaacggtatcgctcctgtaacacagatccatgccctttgggttcccgagattttcgagagaaacagtgtgcagactttgacaatatgcctttccgaggaaagtattataactggaaaccctatactggaggtggggtaaaaccttgtgcattaaactgcttggctgaaggttataatttctacactgaacgtgctcctgcggtgatcgatgggacccagtgcaatgcggattcactggatatctgcatcaatggagaatgcaagcacgtaggctgtgataatattttgggatctgatgctagggaagatagatgtcgagtctgtggaggggacggaagcacatgtgatgccattgaagggttcttcaatgattcactgcccaggggaggctacatggaagtggtgcagataccaagaggctctgttcacattgaagttagagaagttgccatgtcaaagaactatattgctttaaaatctgaaggagatgattactatattaatggtgcctggactattgactggcctaggaaatttgatgttgctgggacagcttttcattacaagagaccaactgatgaaccagaatccttggaagctctaggtcctacctcagaaaatctcatcgtcatggttctgcttcaagaacagaatttgggaattaggtataagttcaatgttcccatcactcgaactggcagtggagataatgaagttggctttacatggaatcatcagccttggtcagaatgctcagctacttgtgctggaggtgtccaaagacaggaggtggtctgtaaaaggttggatgacaactccattgtccagaacaattactgtgatcctgacagtaagccacctgaaaatcaaagagcctgcaacactgagccctgcccacctgagtggttcattggggattggttggaatgcagcaagacttgtgatggtgggatgcgcacaagggcagtgctctgcatcaggaagatcggaccttctgaggaggagacgctggactacagtggttgtttaacacaccggcctgtcgaaaaagagccctgcaacaaccagtcatgtccaccacagtgggtggctttggactggtctgagtgtactccaaaatgtggtccaggattcaagcatcggattgttctgtgcaagagcagtgacctttctaagacattcccagctgcacaatgtccagaggaaagcaaacctcctgtccgcatccgctgcagtttgggccgctgccctcctcctcgctgggtcacaggagactggggccagtgttctgctcagtgtggccttggacagcagatgagaactgtgcagtgtctctcctacaccggacaggcatctagtgactgtctagaaactgttcggcctccatcaatgcagcagtgtgaaagcaaatgtgacagtacccccatttctaatactgaagagtgcaaagatgtgaataaagtggcttattgcccactggtgctgaagttcaagttctgcagtcgagcatacttcagacagatgtgttgtaagacctgccaaggacactgacccacagaaagccagagagagtgccttgtcatttcatcatggaaatgcatccatcaaagagagccacccagaggaagaggattgatgtccttgcaaatgcattaccctgtggaaaacgtaaccactggtcagccctagctgacaaaatttcaatattattttagcttctgtgaagtgggatttattgatccaaagtgctggacacggtattaggagggaatgccagattggagagatccaaacaacacagggagacttgcttactgtggagcgtttgtgttctttcgagtaaatccaatagcctgtttacctccttggaccattaagataatttttattatggacttagcaatgacactgaatccatttgtatttaaaactgtttaaaatgtagctgttatgacttggtcaactatggaagtgaagaaggttcagaattcttaagtcatagcttaaaaatatttactgtactttatctcactacaacagcaccacaatttaaattataaaacgggctttgaactataatttaaggagcaattataaatcaaaagtaatgaaagtttgtattatttttcttcattccacttaatttccttaggaataatcccctggttctgaacactgctgtgagccatatataaaactatattaaactgaacaataatgaggggcatagtttaaagcagtgcatcagttactgcagctgtgcaagtctataaactcagtgctgaaagactgtggccaacttgccattgtgcaagtaaagctgagatttccattaaaactttaagagaaaaacatttcaatttcatgcagaaaccagacctggggtatggtacagaccaaaggaccaggccctttgctgccaccacacaggatgccttagttcttatttgagtccctccaactcacttgtgtttacatcctccccagccacagcacggcttctgccctttggattgctgcacgtgtgttgagcttactgagatgataccatgcaaaagatagactggctcggtaaccaggcagacccttttgcagtttgttgacaattacgatgagttccagatgtcccttctttgatatggtagaagggcatttatttatatgagagcaaatgtgtgtgtgtgtttgcgggcgcttttaagtgtgtggatagatgagtgtgcttgcacataatgtgctatttctgtgagttttaaagtaggcaagggataataaccaaagaagaaaatttcatgaagactagacatcataaagcataattttaatagtcactcaaccaagtattttttattttttatggatactctgaatggcaattaaatgtgaaacccagtttcttgggcaagtcaaattctggaatcacatccacctaaattaaaatgactagctcgtattttccccatcttcaagtttcacatcctggtcatcaaaagactcgacagcaagacttagaatgaaaaagggtacttgtttatattaatattttttacttgaacacgtgtagcttgcagcaggttcttgatgaatgtgctttgtgtccaaaatgcctccccattgtacacaggtgtacaccatgcatgcaccaacacctaaaactcaaaactaaatggctattttgtaaggttaatactttcagttaaacagcatgtttgacttgattccatcatggtgctcttaaattacatgtcagtgcatcacatatatcatgatctaatgcagatgactaggctttttccaaaaggaagacagaccctcagacaccaaaagccaatctaaacaactcccaggtttgctgtggacaatcagcatggaatgttttctgcactctcagtcatgaccatctgtatcttgttacctgctttctctctcaacaccacagttctcaaccctgagccttccagagagagctattgatgatacaagaggaatcaccagggcccggatctaagatgcccttagaagaccagcccaagtgccgtcttagccattcagtgaagggcaaacagcccatgggtagtatggcccgagcactgaattcccttgcgccttttcaaagaacagttaacttggtgctaatgtgccctggtgaaataaataaaagatgggcagtttctgtggcattttaggcataggtttgcaatccagatctgattttctccaacataaatatcagctcatgttcttatttcaaaaagatttcttattaccgactaaaagctattttttacctcacctggaaactaccattgtgagggccatcccccaggcactgcacagcaccttggctgatgctggaagaggagggcagtcagtgtcacttctgggatgtgccccagcactgagaacaaaatgcaggcatcccccggggcagcatcagagtgcctttctagagggagccacgcacagaatgtaacaggatgaaacagtttcaagtaagccttgaattgaaacctgagtaggttaaaacaattctatttcatagcacatcacaatactgctgctactctgtagccacccccatggctacatgatgccctattcctaaataataacaatagcattgtcagtggaggctgggccaccatggcagaccttccaaaagtagtgagctacatagactacttagggaaccccagggaaactggtaccctacacctgggagcagtatctgccactgggataaagtcctactaaaaaaggaacggtaaatgtaccctaatgattaaaccccgtgagatacatatgatttccaaatagtccatttcattaggaacttttttgtttgaatgaatgtcacataggtatcctcagtaacacagaacgaaattacctttgtattattgtgattagttgttgcttattattttatactcagtaataatgtggtacactgttaatttttttgcttttgtaaattatattctaatttattgccatgtttcctaacacttgtcctacattcattctcctgcttgtaatgaaaatgaaaaaatcattgtaacacttgatggagtgaaattccacgccaggcacagaatttttttgacatagataatttagtaaaataaaaattcagcttataataatgata

SEQ ID NO: 104758 - DNA, 6956 bp, Homo sapiens
  Payload ID: 572
  Gene Symbol: ADAMTS6
  Gene Name: ADAM metallopeptidase with thrombospondin type 1 motif, 6
  Uniprot ID: Q9UKP5
  ENST ID: ENST00000381052
  CDS Start-End: 355-1233
gggagtacgtgagtcgtccagtgcaatctctattgtctgaaacttactttttatcagaatttgaagatgaaaacggttaaaaaatggccatactttagtaactaatcagcctaatgctttgcttatgaaaacttttaccatcattatttttttcattttggattgagaaaatgaatccagatatagaagaaagtgcaggatgttggataaaagtggctcttaaacagtggaacatccaataactaatttgcaagaagttttaaagaaataaaattgttatgcttcgattttggtatggtattgactctttagcacataggtagccctcaaaaaaatcatccagttttctaaattatggaaattttgtggaagacgttgacctggattttgagcctcatcatggcttcatcggaatttcatagtgaccacaggctttcatacagttctcaagaggaattcctgacttatcttgaacactaccagctaactattccaataagggttgatcaaaatggagcatttctcagctttactgtgaaaaatgataaacactcaaggagaagacggagtatggaccctattgatccacagcaggcagtatctaagttattttttaaactttcagcctatggcaagcactttcatctaaacttgactctcaacacagattttgtgtccaaacattttacagtagaatattgggggaaagatggaccccagtggaaacatgattttttagacaactgtcattacacaggatatttgcaagatcaacgtagtacaactaaagtggctttaagcaactgtgttgggttgcatggtgttattgctacagaagatgaagagtattttatcgaacctttaaagaataccacagaggattccaagcattttagttatgaaaatggccaccctcatgttatttacaaaaagtctgcccttcaacaacgacatctgtatgatcactctcattgtggggtttcggatttcacaagaagtggcaaaccttggtggctgaatgacacatccactgtttcttattcactaccaattaacaacacacatatccaccacagacagaagagatcagtgagcattgaacggtttgtggagacattggtagtggcagacaaaatgatggtgggctaccatggccgcaaagacattgaacattacattttgagtgtgatgaatattgtcaggttgccaaactttaccgtgattccagcctaggaaacgttgtgaatattatagtggcccgcttaattgttctcacagaagatcagccaaacttggagataaaccaccatgcagacaagtccctcgatagcttctgtaaatggcagaaatccattctctcccaccaaagtgatggaaacaccattccagaaaatgggattgcccaccacgataatgcagttcttattactagatatgatatctgcacttataaaaataagccctgtggaacactgggcttggcctctgtggctggaatgtgtgagcctgaaaggagctgcagcattaatgaagacattggcctgggttcagcttttaccattgcacatgagattggtcacaattttggtatgaaccatgatggaattggaaattcttgtgggacgaaaggtcatgaagcagcaaaacttatggcagctcacattactgcgaataccaatcctttttcctggtctgcttgcagtcgagactacatcaccagctttctagaatttcttaaactcggtgattcaataagtggttcatgaatcgcccagaagccgtcctgattaaataataaagaacccatttccgttaaaatggacgtgttatgccagcttctgatgttttccggcgacggctttgcagttcaggccgtggtacttgccttgataatgagcctcccaagcgtgactttctttatccagctgtggccccaggtcaggtgtatgatgctgatgagcaatgtcgtttccagtatggagcaacctcccgccaatgtaaatatgggtgtgtagagagctctggtgtctcagcaaaagcaaccgctgtgtcaccaacagtattccagcagctgaggggacactgtgtcaaactgggaatattgaaaaagggtggtgttatcagggagattgtgttccttttggcacttggccccagagcatagatgggggctggggtccctggtcactatggggagagtgcagcaggacctgcgggggaggcgtctcctcatccctaagacactgtgacagtccagcgtaagtagctaaaaccttcaggaggtggaaaatattgccttggggaaaggaaacggtatcgctcctgtaacacagatccatgccctttgggttcccgagattttcgagagaaacagtgtgcagactttgacaatatgcctttccgaggaaagtattataactggaaaccctatactggaggtggggtaaaaccttgtgcattaaactgcttggctgaaggttataatttctacactgaacgtgctcctgcggtgatcgatgggacccagtgcaatgcggattcactggatatctgcatcaatggagaatgcaagcacgtaggctgtgataatattttgggatctgatgctagggaagatagatgtcgagtctgtggaggggacggaagcacatgtgatgccattgaagggttcttcaatgattcactgcccaggggaggctacatggaagtggtgcagataccaagaggctctgttcacattgaagttagagaagttgccatgtcaaagaactatattgctttaaaatctgaaggagatgattactatattaatggtgcctggactattgactggcctaggaaatttgatgttgctgggacagcttttcattacaagagaccaactgatgaaccagaatccttggaagctctaggtcctacctcagaaaatctcatcgtcatggttctgcttcaagaacagaatttgggaattaggtataagttcaatgttcccatcactcgaactggcagtggagataatgaagttggctttacatggaatcatcagccttggtcagaatgctcagctacttgtgctggaggtgtccaaagacaggaggtggtctgtaaaaggttggatgacaactccattgtccagaacaattactgtgatcctgacagtaagccacctgaaaatcaaagagcctgcaacactgagccctgcccacctgagtggttcattggggattggttggaatgcagcaagacttgtgatggtgggatgcgcacaagggcagtgctctgcatcaggaagatcggaccttctgaggaggagacgctggactacagtggttgtttaacacaccggcctgtcgaaaaagagccctgcaacaaccagtcatgtccaccacagtgggtggctttggactggtctgagtgtactccaaaatgtggtccaggattcaagcatcggattgttctgtgcaagagcagtgacctttctaagacattcccagctgcacaatgtccagaggaaagcaaacctcctgtccgcatccgctgcagtttgggccgctgccctcctcctcgctgggtcacaggagactggggccagtgttctgctcagtgtggccttggacagcagatgagaactgtgcagtgtctctcctacaccggacaggcatctagtgactgtctagaaactgttcggcctccatcaatgcagcagtgtgaaagcaaatgtgacagtacccccatttctaatactgaagagtgcaaagatgtgaataaagtggcttattgcccactggtgctgaagttcaagttctgcagtcgagcatacttcagacagatgtgttgtaagacctgccaaggacactgacccacagaaagccagagagagtgccttgtcatttcatcatggaaatgcatccatcaaagagagccacccagaggaagaggattgatgtccttgcaaatgcattaccctgtggaaaacgtaaccactggtcagccctagctgacaaaatttcaatattattttagcttctgtgaagtgggatttattgatccaaagtgctggacacggtattaggagggaatgccagattggagagatccaaacaacacagggagacttgcttactgtggagcgtttgtgttctttcgagtaaatccaatagcctgtttacctccttggaccattaagataatttttattatggacttagcaatgacactgaatccatttgtatttaaaactgtttaaaatgtagctgttatgacttggtcaactatggaagtgaagaaggttcagaattcttaagtcatagcttaaaaatatttactgtactttatctcactacaacagcaccacaatttaaattataaaacgggctttgaactataatttaaggagcaattataaatcaaaagtaatgaaagtttgtattatttttcttcattccacttaatttccttaggaataatcccctggttctgaacactgctgtgagccatatataaaactatattaaactgaacaataatgaggggcatagtttaaagcagtgcatcagttactgcagctgtgcaagtctataaactcagtgctgaaagactgtggccaacttgccattgtgcaagtaaagctgagatttccattaaaactttaagagaaaaacatttcaatttcatgcagaaaccagacctggggtatggtacagaccaaaggaccaggccctttgctgccaccacacaggatgccttagttcttatttgagtccctccaactcacttgtgtttacatcctccccagccacagcacggcttctgccctttggattgctgcacgtgtgttgagcttactgagatgataccatgcaaaagatagactggctcggtaaccaggcagacccttttgcagtttgttgacaattacgatgagttccagatgtcccttctttgatatggtagaagggcatttatttatatgagagcaaatgtgtgtgtgtgtttgcgggcgcttttaagtgtgtggatagatgagtgtgcttgcacataatgtgctatttctgtgagttttaaagtaggcaagggataataaccaaagaagaaaatttcatgaagactagacatcataaagcataattttaatagtcactcaaccaagtattttttattttttatggatactctgaatggcaattaaatgtgaaacccagtttcttgggcaagtcaaattctggaatcacatccacctaaattaaaatgactagctcgtattttccccatcttcaagtttcacatcctggtcatcaaaagactcgacagcaagacttagaatgaaaaagggtacttgtttatattaatattttttacttgaacacgtgtagcttgcagcaggttcttgatgaatgtgctttgtgtccaaaatgcctccccattgtacacaggtgtacaccatgcatgcaccaacacctaaaactcaaaactaaatggctattttgtaaggttaatactttcagttaaacagcatgtttgacttgattccatcatggtgctcttaaattacatgtcagtgcatcacatatatcatgatctaatgcagatgactaggctttttccaaaaggaagacagaccctcagacaccaaaagccaatctaaacaactcccaggtttgctgtggacaatcagcatggaatgttttctgcactctcagtcatgaccatctgtatcttgttacctgctttctctctcaacaccacagttctcaaccctgagccttccagagagagctattgatgatacaagaggaatcaccagggcccggatctaagatgcccttagaagaccagcccaagtgccgtcttagccattcagtgaagggcaaacagcccatgggtagtatggcccgagcactgaattcccttgcgccttttcaaagaacagttaacttggtgctaatgtgccctggtgaaataaataaaagatgggcagtttctgtggcattttaggcataggtttgcaatccagatctgattttctccaacataaatatcagctcatgttcttatttcaaaaagatttcttattaccgactaaaagctattttttacctcacctggaaactaccattgtgagggccatcccccaggcactgcacagcaccttggctgatgctggaagaggagggcagtcagtgtcacttctgggatgtgccccagcactgagaacaaaatgcaggcatcccccggggcagcatcagagtgcctttctagagggagccacgcacagaatgtaacaggatgaaacagtttcaagtaagccttgaattgaaacctgagtaggttaaaacaattctatttcatagcacatcacaatactgctgctactctgtagccacccccatggctacatgatgccctattcctaaataataacaatagcattgtcagtggaggctgggccaccatggcagaccttccaaaagtagtgagctacatagactacttagggaaccccagggaaactggtaccctacacctgggagcagtatctgccactgggataaagtcctactaaaaaaggaacggtaaatgtaccctaatgattaaaccccgtgagatacatatgatttccaaatagtccatttcattaggaacttttttgtttgaatgaatgtcacataggtatcctcagtaacacagaacgaaattacctttgtattattgtgattagttgttgcttattattttatactcagtaataatgtggtacactgttaatttttttgcttttgtaaattatattctaatttattgccatgtttcctaacacttgtcctacattcattctcctgcttgtaatgaaaatgaaaaaatcattgtaacacttgatggagtgaaattccacgccaggcacagaatttttttgacatagataatttagtaaaataaaaattcagcttataataatg

SEQ ID NO: 104759 - DNA, 5490 bp, Homo sapiens
  Payload ID: 573
  Gene Symbol: ADAMTS7
  Gene Name: ADAM metallopeptidase with thrombospondin type 1 motif, 7
  Uniprot ID: Q9UKP4
  ENST ID: ENST00000388820
  CDS Start-End: 212-5272
cttttctttgcctctgcagcggccaagggggcgggccctgcagcctttgttgcccgcggaccgagcgcagccgaacggagtcggggccgggtcgccgggagctgcacgccggccgggcatgtcctgagccggacctgggaccaggcagcgaccggacgggacggacgagagcgtgcgcgcggggtcacccggcggccgcccggttcctgccatgcccggcggccccagtccccgcagccccgcgcctttgctgcgccccctcctcctgctcctctgcgctctggctcccggcgcccccggacccgcaccaggacgtgcaaccgagggccgggcggcactggacatcgtgcacccggttcgagtcgacgcggggggctccttcctgtcctacgagctgtggccccgcgcactgcgcaagcgggatgtatctgtgcgccgagacgcgcccgccttctacgagctacaataccgcgggcgcgagctgcgcttcaacctgaccgccaatcagcacctgctggcgcccggctttgtgagcgagacgcggcggcgcggcggcctgggccgcgcgcacatccgggcccacaccccggcctgccacctgcttggcgaggtgcaggaccctgagctcgagggtggcctggcggccatcagcgcctgcgacggcctgaaaggtgtgttccagctctccaacgaggactacttcattgagcccctggacagtgccccggcccggcctggccacgcccagccccatgtggtgtacaagcgtcaggccccggagaggctggcacagcggggtgattccagtgctccaagcacctgtggagtgcaagtgtacccagagctggagtctcgacgggagcgttgggagcagcggcagcagtggcggcggccacggctgaggcgtctacaccagcggtcggtcagcaaagagaagtgggtggagaccctggtagtagctgatgccaaaatggtggagtaccacggacagccgcaggttgagagctatgtgctgaccatcatgaacatggtggctggcctgtttcatgaccccagcattgggaaccccatccacatcaccattgtgcgcctggtcctgctggaagatgaggaggaggacctaaagatcacgcaccatgcagacaacaccctgaagagcttctgcaagtggcagaaaagcatcaacatgaagggggatgcccatcccctgcaccatgacactgccatcctgctcaccagaaaggacctgtgtgcagccatgaaccggccctgtgagaccctgggactgtcccatgtggcgggcatgtgccagccgcaccgcagctgcagcatcaacgaggacacgggcctgccgctggccttcactgtagcccacgagctcgggcacagttttggcattcagcatgacggaagcggcaatgactgtgagcccgttgggaaacgacctttcatcatgtctccacagctcctgtacgacgccgctcccctcacctggtcccgctgcagccgccagtatatcaccaggttccttgaccgtgggtggggcctgtgcctggacgaccctcctgccaaggacattatcgacttcccctcggtgccacctggcgtcctctatgatgtaagccaccagtgccgcctccagtacggggcctactctgccttctgcgaggacatggataatgtctgccacacactctggtgctctgtggggaccacctgtcactccaagctggatgcagctgtggacggcacccggtgtggggagaataagtggtgtctcagtggggagtgcgtacccgtgggcttccggcccgaggccgtggatggtggctggtctggctggagcgcctggtccatctgctcacggagctgtggcatgggcgtacagagcgccgagcggcagtgcacgcagcctacgcccaaatacaaaggcagatactgtgtgggtgagcgcaagcgcttccgcctctgcaacctgcaggcctgccctgctggccgcccctccttccgccacgtccagtgcagccactttgacgctatgctctacaagggccagctgcacacatgggtgcccgtggtcaatgacgtgaacccctgcgagctgcactgccggcccgcgaatgagtactttgccgagaagctgcgggacgccgtggtcgatggcaccccctgctaccaggtccgagccagccgggacctctgcatcaacggcatctgtaagaacgtgggctgtgacttcgagattgactccggtgctatggaggaccgctgtggtgtgtgccacggcaacggctccacctgccacaccgtgagcgggaccttcgaggaggccgagggcctggggtatgtggatgtggggctgatcccagcgggcgcacgcgagatccgcatccaagaggttgccgaggctgccaacttcctggcactgcggagcgaggacccggagaagtacttcctcaatggtggctggaccatccagtggaacggggactaccaggtggcagggaccaccttcacatacgcacgcaggggcaactgggagaacctcacgtccccgggtcccaccaaggagcctgtctggatccagctgctgttccaggagagcaaccctggggtgcactacgagtacaccatccacagggaggcaggtggccacgacgaggtcccgccgcccgtgttctcctggcattatgggccctggaccaagtgcacagtcacctgcggcagaggtgtgcagaggcagaatgtgtactgcttggagcggcaggcagggcccgtggacgaggagcactgtgaccccctgggccggcctgatgaccaacagaggaagtgcagcgagcagccctgccctgccaggtggtgggcaggtgagtggcagctgtgctccagctcctgcgggcctgggggcctctcccgccgggccgtgctctgcatccgcagcgtggggctggatgagcagagcgccctggagccacccgcctgtgaacaccttccccggccccctactgaaaccccttgcaaccgccatgtaccctgtccggccacctgggctgtggggaactggtctcagtgctcagtgacatgtggggagggcactcagcgccgaaatgtcctctgcaccaatgacaccggtgtcccctgtgacgaggcccagcagccagccagcgaagtcacctgctctctgccactctgtcggtggcccctgggcacactgggccctgaaggctcaggcagcggctcctccagccacgagctcttcaacgaggctgacttcatcccgcaccacctggccccacgcccttcacccgcctcatcacccaagccaggcaccatgggcaacgccattgaggaggaggctccagagctggacctgccggggcccgtgtttgtggacgacttctactacgactacaatttcatcaatttccacgaggatctgtcctacgggccctctgaggagcccgatctagacctggcggggacaggggaccggacacccccaccacacagccatcctgctgcgccctccacgggtagccccgtgcctgccacagagcctcctgcagccaaggaggagggggtactgggaccttggtccccgagcccttggcctagccaggccggccgctccccacccccaccctcagagcagacccctgggaaccctttgatcaatttcctgcctgaggaagacacccccataggggccccagatcttgggctccccagcctgtcctggcccagggtttccactgatggcctgcagacacctgccacccctgagagccaaaatgatttcccagttggcaaggacagccagagccagctgccccctccatggcgggacaggaccaatgaggttttcaaggatgatgaggaacccaagggccgaggagcaccccacctgcccccgagacccagctccacgctgccccctttgtcccctgttggcagcacccactcctctcctagtcctgacgtggcggagctgtggacaggaggcacagtggcctgggagccagctctggagggtggcctggggcctgtggacagtgaactgtggcccactgttggggtggcttctctccttcctcctcccatagcccctctgccagagatgaaggtcagggacagttccctggagccggggactccctccttcccaaccccaggaccaggctcatgggacctgcagactgtggcagtgtgggggaccttcctccccacaaccctgactggcctcgggcacatgcctgagcctgccctgaacccaggacccaagggtcagcctgagtccctcagccctgaggtgcccctgagctctaggctgctgtccacaccagcttgggacagccccgccaacagccacagagtccctgagacccagccgctggctcccagcctggctgaagcggggccccccgcggacccgttggttgtcaggaacgccggctggcaagcgggaaactggagcgagtgctctaccacctgtggcctgggtgcggtctggaggccggtgcgctgtagctccggccgggatgaggactgcgcccccgctggccggccccagcctgcccgccgctgccacctgcggccctgtgccacctggcactcaggcaactggagtaagtgctcccgcagctgcggcggaggttcctcagtgcgggacgtgcagtgtgtggacacacgggacctccggccactgcggcccttccattgtcagcccgggcctgccaagccgcctgcgcaccggccctgcggggcccagccctgcctcagctggtacacatcttcctggagggagtgctccgaggcctgtggcggtggtgagcagcagcgtctagtgacctgcccggagccaggcctctgcgaggaggcgctgagacccaacaccacccggccctgcaacacccacccctgcacgcagtgggtggtggggccctggggccagtgctcaggcccctgtggtggtggtgtccagcggcgcctggtcaagtgtgtcaacacccagacagggctgcccgaggaagacagtgaccagtgtggccacgaggcctggcctgagagctcccggccgtgtggcaccgaggattgtgagcccgtcgagcctccccgctgtgagcgggaccgcctgtccttcgggttctgcgagacgctgcgcctactgggccgctgccagctgcccaccatccgcacccagtgctgccgctcgtgctctccgcccagccacggcgccccctcccgaggccatcagcgggttgcccgccgctgactgcgccaggatgcacagaccgaccgacagacctcagtgcccaccacgggctgtggcggagctcccgccccctgcgccctaatggtgctaaccccctctcactacccagcagcaggctggggacctcctccccctcaaaaaaggtatttttttattctaacagtttgtgtaacatttattatgattttacataaatgagcatctaccattccaaagca

SEQ ID NO: 104760 - DNA, 4010 bp, Homo sapiens
  Payload ID: 574
  Gene Symbol: ADAMTS8
  Gene Name: ADAM metallopeptidase with thrombospondin type 1 motif, 8
  Uniprot ID: Q9UP79
  ENST ID: ENST00000257359
  CDS Start-End: 708-3377
acagggtcgctgagaccagtgcacgagcctcttcggaagatgcatcctggactcttggccgcagaggagaaagcggttggggtctcccagggactctttctaaagggtcagtccagcatggtaggggttaacgtgggtccacgcgtagagggaaaggaaagaagttgtagttgacacttcaggggggcgggtggcggacgggtctcgctgcctgattggttttgcatttcatcccaatttttttttctccactctctctccctcttttcagtttctctctctgatcccaggggaggggaaacgggaatagtgagagatcaaaaataaacctcttatgtcaagccgggaaggaagtataaataagaagggctcggcagcccactcggtgcttcccggggtggggaggaggcaggaggcggctgcgcggggctggcgcgggcaggggcggaggacgggcgcacgcgggccggggccagctgctcgcgctcggctcgggggcggcggcgcgggaggagcgggctgcgccagccagaggggccgccgggggagcgctcccgccgccgggccccgcgggccgagtcggccttgcacccgattgattccgcttttcctggagagagcggccgggccgcgctcgggccgccagcacctgcccgcgcctggcgggcttcttccctctcctgcgcgcagccaccgccgcagcccccatgctccccgcccccgccgccccccggtggcctccgctcctgctgctgctgctgctgctgctgccgctggcccgcggcgccccggcccggcccgcagccggggggcaggcctcggagctggtggtgcccacgcggttgcccggcagcgcgggcgagctcgcgctccacctgtccgccttcggcaagggcttcgtgctgcgcctggcgcccgacgacagcttcctagcgcccgagttcaagatcgagcgcctcgggggctccggccgggcgaccgggggcgagcgggggctgcgcggctgcttcttctccggcaccgtgaatggggagcccgagtcgctggcggcggtcagcctgtgccgcgggctgagcggctccttcctgctggacggcgaggagttcaccatccagccgcagggcgcggggggctccctggctcagccgcaccgcctgcagcgctggggtcccgccggagcccgccccctcccgcgaggacccgagtgggaggtggagacgggagagggtcagaggcaggagagaggagaccaccaggaggacagcgaggaggagagccaagaagaggaggcagaaggcgctagcgagccgccaccgcccctgggggccacgagtaggaccaagcggtttgtgtctgaggcgcgcttcgtggagacgctgctggtggccgatgcgtccatggctgccttctacggggccgacctgcagaaccacatcctgacgttaatgtctgtggcagcccgaatctacaagcaccccagcatcaagaattccatcaacctgatggtggtaaaagtgctgatcgtagaagatgaaaaatggggcccagaggtgtccgacaatggggggcttacactgcgtaacttctgcaactggcagcggcgtttcaaccagcccagcgaccgccacccagagcactacgacacggccatcctgctcaccagacagaacttctgtgggcaggaggggctgtgtgacaccctgggtgtggcagacatcgggaccatttgtgaccccaacaaaagctgctccgtgatcgaggatgaggggctccaggcggcccacaccctggcccatgaactagggcacgtcctcagcatgccccacgacgactccaagccctgcacacggctcttcgggcccatgggcaagcaccacgtgatggcaccgctgttcgtccacctgaaccagacgctgccctggtccccctgcagcgccatgtatctcacagagcttctggacggcgggcacggagactgtctcctggatgcccctgctgcggccctgcccctccccacaggcctcccgggccgcatggccctgtaccagctggaccagcagtgcaggcagatctttgggccggatttccgccactgccccaacacctctgctcaggacgtctgcgcccagctttggtgccacactgatggggctgagcccctgtgccacacgaagaatggcagcctgccctgggctgacggcacgccgtgcgggcctgggcacctctgctcagaaggcagctgtctacctgaggaggaagtggagaggcccaagcccgtggcagatggaggctgggcaccgtggggaccctggggagaatgttctcggacctgtggaggaggagtacagttttcacaccgtgagtgcaaggaccccgagcctcagaatggaggaagatactgcctgggtcggagagccaagtaccagtcatgccacacggaggaatgcccccctgacgggaaaagcttcagggagcagcagtgtgagaagtataatgcctacaattacactgacatggacgggaatctcctgcagtgggtccccaagtatgctggggtgtccccccgggaccgctgcaagttgttctgccgagcccgggggaggagcgagttcaaagtgttcgaggccaaggtgattgatggcaccctgtgtgggccagaaacactggccatctgtgtccgtggccagtgtgtcaaggccggctgtgaccatgtggtggactcgcctcggaagctggacaaatgcggggtgtgtgggggcaaaggcaactcctgcaggaaggtctccgggtccctcacccccaccaattatggctacaatgacattgtcaccatcccagctggtgccactaatattgacgtgaagcagcggagccacccgggtgtgcagaacgatgggaactacctggcgctgaagacggctgatgggcagtacctgctcaacggcaacctggccatctctgccatagagcaggacatcttggtgaaggggaccatcctgaagtacagcggctccatcgccaccctggagcgcctgcagagcttccggcccttgccagagcctctgacagtgcagctcctgacagtccctggcgaggtcttccccccaaaagtcaaatacaccttctttgttcctaatgacgtggactttagcatgcagagcagcaaagagagagcaaccaccaacatcatccagccgctgctccacgcacagtgggtgctgggggactggtctgagtgctctagcacctgcggggccggctggcagaggcgaactgtagagtgcagggacccctccggccaggcctctgccacctgcaacaaggctctgaaacccgaggatgccaagccctgcgaaagccagctgtgccccctgtgattcaggggggcaggggccagtcttgtgctcctggacatgcggtactgaggtgcagacaagggtctccactgtggtgactgggtcccttggccatatcaaggcagcacggcccacccaggcctcccattgccgcaacccctccagtactgcacaaattcctaagggggaagaggagagggtatggggcggcagaccctatcatcaactgtccagtggactggaccttgctcgggttcaagtagagggcataggttaaaaggtaaaagtgcacttattgactcagacaggacactcagcgtcagtctgtttgcaaaggactagcaaacttaaatgaaaaaaaaaattctatctggtttccccgataaataatctacctcacaggggaaaaaattagtacaagagaggcgtggggcagggagtcaatggtgaatgtcaaagcaggctccaaagctggaccccaagctgtcttcaagaatgaccacgactgtcttcagtgttaaaatccatcacctaaagggccgcagcgtcgcagggtttggagagccacatgttctcaggctgccacctgcaggggtggatccatttcaagtatttatgcaaatgtgtctctgaactaaagtgtgatcttatgcc

SEQ ID NO: 104761 - DNA, 7060 bp, Homo sapiens
  Payload ID: 575
  Gene Symbol: ADAMTS9
  Gene Name: ADAM metallopeptidase with thrombospondin type 1 motif, 9
  Uniprot ID: Q9P2N4
  ENST ID: ENST00000295903
  CDS Start-End: 23-5746
ggagggaggggtgggaagcaccatgcagtttgtatcctgggccacactgctaacgctcctggtgcgggacctggccgagatggggagcccagacgccgcggcggccgtgcgcaaggacaggctgcacccgaggcaagtgaaattattagagaccctgagcgaatacgaaatcgtgtctcccatccgagtgaacgctctcggagaaccctttcccacgaacgtccacttcaaaagaacgcgacggagcattaactctgccactgacccctggcctgccttcgcctcctcctcttcctcctctacctcctcccaggcgcattaccgcctctctgccttcggccagcagtttctatttaatctcaccgccaatgccggatttatcgctccactgttcactgtcaccctcctcgggacgcccggggtgaatcagaccaagttttattccgaagaggaagcggaactcaagcactgtttctacaaaggctatgtcaataccaactccgagcacacggccgtcatcagcctctgctcaggaatgctgggcacattccggtctcatgatggggattattttattgaaccactacagtctatggatgaacaagaagatgaagaggaacaaaacaaaccccacatcatttataggcgcagcgccccccagagagagccctcaacaggaaggcatgcatgtgacacctcagaacacaaaaataggcacagtaaagacaagaagaaaaccagagcaagaaaatggggagaaaggattaacctggctggtgacgtagcagcattaaacagcggcttagcaacagaggcattttctgcttatggtaataagacggacaacacaagagaaaagaggacccacagaaggacaaaacgttttttatcctatccacggtttgtagaagtcttggtggtggcagacaacagaatggtttcataccatggagaaaaccttcaacactatattttaactttaatgtcaattgatgggccttccatatcttttaatgctcagacaacattaaaaaacttttgccagtggcagcattcgaagaacagtccaggtggaatccatcatgatactgctgttctcttaacaagacaggatatctgcagagctcacgacaaatgtgataccttaggcctggctgaactgggaaccatttgtgatccctatagaagctgttctattagtgaagatagtggattgagtacagcttttacgatcgcccatgagctgggccatgtgtttaacatgcctcatgatgacaacaacaaatgtaaagaagaaggagttaagagtccccagcatgtcatggctccaacactgaacttctacaccaacccctggatgtggtcaaagtgtagtcgaaaatatatcactgagtttttagacactggttatggcgagtgtttgcttaacgaacctgaatccagaccctaccctttgcctgtccaactgccaggcatcctttacaacgtgaataaacaatgtgaattgatttttggaccaggttctcaggtgtgcccatatatgatgcagtgcagacggctctggtgcaataacgtcaatggagtacacaaaggctgccggactcagcacacaccctgggccgatgggacggagtgcgagcctggaaagcactgcaagtatggattttgtgttcccaaagaaatggatgtccccgtgacagatggatcctggggaagttggagtccctttggaacctgctccagaacatgtggagggggcatcaaaacagccattcgagagtgcaacagaccagaaccaaaaaatggtggaaaatactgtgtaggacgtagaatgaaatttaagtcctgcaacacggagccatgtctcaagcagaagcgagacttccgagatgaacagtgtgctcactttgacgggaagcattttaacatcaacggtctgcttcccaatgtgcgctgggtccctaaatacagtggaattctgatgaaggaccggtgcaagttgttctgcagagtggcagggaacacagcctactatcagcttcgagacagagtgatagatggaactccttgtggccaggacacaaatgatatctgtgtccagggcctttgccggcaagctggatgcgatcatgttttaaactcaaaagcccggagagataaatgtggggtttgtggtggcgataattcttcatgcaaaacagtggcaggaacatttaatacagtacattatggttacaatactgtggtccgaattccagctggtgctaccaatattgatgtgcggcagcacagtttctcaggggaaacagacgatgacaactacttagctttatcaagcagtaaaggtgaattcttgctaaatggaaactttgttgtcacaatggccaaaagggaaattcgcattgggaatgctgtggtagagtacagtgggtccgagactgccgtagaaagaattaactcaacagatcgcattgagcaagaacttttgcttcaggttttgtcggtgggaaagttgtacaaccccgatgtacgctattctttcaatattccaattgaagataaacctcagcagttttactggaacagtcatgggccatggcaagcatgcagtaaaccctgccaaggggaacggaaacgaaaacttgtttgcaccagggaatctgatcagcttactgtttctgatcaaagatgcgatcggctgccccagcctggacacattactgaaccctgtggtacagactgtgacctgaggtggcatgttgccagcaggagtgaatgtagtgcccagtgtggcttgggttaccgcacattggacatctactgtgccaaatatagcaggctggatgggaagactgagaaggttgatgatggtttttgcagcagccatcccaaaccaagcaaccgtgaaaaatgctcaggggaatgtaacacgggtggctggcgctattctgcctggactgaatgttcaaaaagctgtgacggtgggacccagaggagaagggctatttgtgtcaatacccgaaatgatgtactggatgacagcaaatgcacacatcaagagaaagttaccattcagaggtgcagtgagttcccttgtccacagtggaaatctggagactggtcagagtgcttggtcacctgtggaaaagggcataagcaccgccaggtctggtgtcagtttggtgaagatcgattaaatgatagaatgtgtgaccctgagaccaagccaacatctatgcagacttgtcagcagccggaatgtgcatcctggcaggcgggtccctggggacagtgcagtgtcacttgtggacagggataccagctaagagcagtgaaatgcatcattgggacttatatgtcagtggtagatgacaatgactgtaatgcagcaactagaccaactgatacccaggactgtgaattaccatcatgtcatcctcccccagctgccccggaaacgaggagaagcacatacagtgcaccaagaacccagtggcgatttgggtcttggaccccatgctcagccacttgtgggaaaggtacccggatgagatacgtcagctgccgagatgagaatggctctgtggctgacgagagtgcctgtgctaccctgcctagaccagtggcaaaggaagaatgttctgtgacaccctgtgggcaatggaaggccttggactggagctcttgctctgtgacctgtgggcaaggtagggcaacccggcaagtgatgtgtgtcaactacagtgaccacgtgatcgatcggagtgagtgtgaccaggattatatcccagaaactgaccaggactgttccatgtcaccatgccctcaaaggaccccagacagtggcttagctcagcaccccttccaaaatgaggactatcgtccccggagcgccagccccagccgcacccatgtgctcggtggaaaccagtggagaactggcccctggggagcatgttccagtacctgtgctggcggatcccagcggcgtgttgttgtatgtcaggatgaaaatggatacaccgcaaacgactgtgtggagagaataaaacctgatgagcaaagagcctgtgaatccggcccttgtcctcagtgggcttatggcaactggggagagtgcactaagctgtgtggtggaggcataagaacaagactggtggtctgtcagcggtccaacggtgaacggtttccagatttgagctgtgaaattcttgataaacctcccgatcgtgagcagtgtaacacacatgcttgtccacacgacgctgcatggagtactggcccttggagctcgtgttctgtctcttgtggtcgagggcataaacaacgaaatgtttactgcatggcaaaagatggaagccatttagaaagtgattactgtaagcacctggctaagccacatgggcacagaaagtgccgaggaggaagatgccccaaatggaaagctggcgcttggagtcagtgctctgtgtcctgtggccgaggcgtacagcagaggcatgtgggctgtcagatcggaacacacaaaatagccagagagaccgagtgcaacccatacaccagaccggagtcggaacgcgactgccaaggcccacggtgtcccctctacacttggagggcagaggaatggcaagaatgcaccaagacctgcggcgaaggctccaggtaccgcaaggtggtgtgtgtggatgacaacaaaaacgaggtgcatggggcacgctgtgacgtgagcaagcggccggtggaccgtgaaagctgtagtttgcaaccctgcgagtatgtctggatcacaggagaatggtcagagtgctcagtgacctgtggaaaaggctacaaacaaaggcttgtctcgtgcagcgagatttacaccgggaaggagaattatgaatacagctaccaaaccaccatcaactgcccaggcacgcagccccccagtgttcacccctgttacctgagggactgccctgtctcggccacctggagagttggcaactgggggagctgctcagtgtcttgtggtgttggagtgatgcagagatctgtgcaatgtttaaccaatgaggaccaacccagccacttatgccacactgatctgaagccagaagaacgaaaaacctgccgtaatgtctataactgtgagttaccccagaattgcaaggaggtaaaaagacttaaaggtgccagtgaagatggtgaatatttcctgatgattagaggaaagcttctgaagatattctgtgcggggatgcactctgaccaccccaaagagtacgtgacactggtgcatggagactctgagaatttctccgaggtttatgggcacaggttacacaacccaacagaatgtccctataacgggagccggcgcgatgactgccaatgtcggaaggattacacggccgctgggttttccagttttcagaaaatcagaatagacctgaccagcatgcagataatcaccactgacttacagtttgcaaggacaagcgaaggacatcccgtcccttttgccacagccggggattgctacagcgctgccaagtgcccacagggtcgttttagcatcaacctttatggaaccggcttgtctttaactgaatctgccagatggatatcacaagggaattatgctgtctctgacatcaagaagtcgccggatggtacccgagtcgtagggaaatgcggtggttactgtggaaaatgcactccatcctctggtactggcctggaggtgcgagttttatagctaaggtgctttgaagaggaagccattatggatggatgaaggatagtaatgcaatacctccaccttaatttgggtgcatgtgtatgtgtgtgtgtgtttgtgtgtgacttgtatgcttgtgtgtgtaaatgtgtgtacatatacatatatacatatctacacatacatatatacacatatatgtgtgtatgtagatatgtagactatcctaatgatgtaaagtttaatatttatgtttgaaattatttattgtgatgtaatatttttgtacgtaaaatgattctattatgactgcctttgcatgtagtaatatgacaaagtgatccttcattatcacggtacactattgtttacttttcatctgtaaatgttttattgttacttttttaaaatgaatttttttaaaacaatctagccatcatcaaggtgctataagagttgtataaaagatatttttggcatttctaggcaagtatcagccaataagtatgttagtgatatcacagattgtaccaactattaactatgttaaataagtattcagtttcatgtgatctctgggaaaaaaatatgctgccttggtgctaatattgtatgtatttaaatgatcatccgactcagaaatataaacacttttaatgaaagggaggaacggaaggacaatttccagtgcacagaatcacttggatgaaataagaccagctctttacccttatttttggatatgccttttttggaagagacttagactttatccttattgttgttagtgttgttaatattcgttgcttcagcccacggtgccttggtctctccacaatcaaatggaggatcccccaagcagcttcattacagagtgatattgggaaagtgagatcctctcaccattttgccaagatactctaaaatgacatccaagtttaccagtagaaagacacaggatgcacagaatgggcatgaccttcagctcacgagcacacctggagaaattcagaaccaggttctgaatcatcacgattgccttttgcatgaaaacatcggctggtgatgtgacttctcttcaggccatgagcctaacaccctgccggttttcatgcccgctgcagtaatggacgtttgtgtgaagaaatgaactgtggagtacaaaatgctttgagtctttccgattgctcattaattcacttttttgttacttctttccaaaatggaagtgctgaagccatggtctttctgcccctccaagctgatgaagggaagcctttgccaatggcccatggaagacacttggtttgagaaaccctgcccacttccaaa

SEQ ID NO: 104762 - DNA, 3168 bp, Homo sapiens
  Payload ID: 575
  Gene Symbol: ADAMTS9
  Gene Name: ADAM metallopeptidase with thrombospondin type 1 motif, 9
  ENST ID: ENST00000481060
  CDS Start-End: 1-2975
gtgaatgtagtgcccagtgtggcttgggttaccgcacattggacatctactgtgccaaatatagcaggctggatgggaagactgagaaggttgatgatggtttttgcagcagccatcccaaaccaagcaaccgtgaaaaatgctcaggggaatgtaacacgggtggctggcgctattctgcctggactgaatgttcaaaaagctgtgacggtgggacccagaggagaagggctatttgtgtcaatacccgaaatgatgtactggatgacagcaaatgcacacatcaagagaaagttaccattcagaggtgcagtgagttcccttgtccacagtggaaatctggagactggtcagagtgcttggtcacctgtggaaaagggcataagcaccgccaggtctggtgtcagtttggtgaagatcgattaaatgatagaatgtgtgaccctgagaccaagccaacatctatgcagacttgtcagcagccggaatgtgcatcctggcaggcgggtccctggggacagtgcagtgtcacttgtggacagggataccagctaagagcagtgaaatgcatcattgggacttatatgtcagtggtagatgacaatgactgtaatgcagcaactagaccaactgatacccaggactgtgaattaccatcatgtcatcctcccccagctgccccggaaacgaggagaagcacatacagtgcaccaagaacccagtggcgatttgggtcttggaccccatgctcagccacttgtgggaaaggtacccggatgagatacgtcagctgccgagatgagaatggctctgtggctgacgagagtgcctgtgctaccctgcctagaccagtggcaaaggaagaatgttctgtgacaccctgtgggcaatggaaggccttggactggagctcttgctctgtgacctgtgggcaaggtagggcaacccggcaagtgatgtgtgtcaactacagtgaccacgtgatcgatcggagtgagtgtgaccaggattatatcccagaaactgaccaggactgttccatgtcaccatgccctcaaaggaccccagacagtggcttagctcagcaccccttccaaaatgaggactatcgtccccggagcgccagccccagccgcacccatgtgctcggtggaaaccagtggagaactggcccctggggagcatgttccagtacctgtgctggcggatcccagcggcgtgttgttgtatgtcaggatgaaaatggatacaccgcaaacgactgtgtggagagaataaaacctgatgagcaaagagcctgtgaatccggcccttgtcctcagtgggcttatggcaactggggagagtgcactaagctgtgtggtggaggcataagaacaagactggtggtctgtcagcggtccaacggtgaacggtttccagatttgagctgtgaaattcttgataaacctcccgatcgtgagcagtgtaacacacatgcttgtccacacgacgctgcatggagtactggcccttggagctcgtgttctgtctcttgtggtcgagggcataaacaacgaaatgtttactgcatggcaaaagatggaagccatttagaaagtgattactgtaagcacctggctaagccacatgggcacagaaagtgccgaggaggaagatgccccaaatggaaagctggcgcttggagtcagtgctctgtgtcctgtggccgaggcgtacagcagaggcatgtgggctgtcagatcggaacacacaaaatagccagagagaccgagtgcaacccatacaccagaccggagtcggaacgcgactgccaaggcccacggtgtcccctctacacttggagggcagaggaatggcaagaatgcaccaagacctgcggcgaaggctccaggtaccgcaaggtggtgtgtgtggatgacaacaaaaacgaggtgcatggggcacgctgtgacgtgagcaagcggccggtggaccgtgaaagctgtagtttgcaaccctgcgagtatgtctggatcacaggagaatggtcagagtgctcagtgacctgtggaaaaggctacaaacaaaggcttgtctcgtgcagcgagatttacaccgggaaggagaattatgaatacagctaccaaaccaccatcaactgcccaggcacgcagccccccagtgttcacccctgttacctgagggactgccctgtctcggccacctggagagttggcaactgggggagctgctcagtgtcttgtggtgttggagtgatgcagagatctgtgcaatgtttaaccaatgaggaccaacccagccacttatgccacactgatctgaagccagaagaacgaaaaacctgccgtaatgtctataactgtgagttaccccagaattgcaaggaggtaaaaagacttaaaggtgccagtgaagatggtgaatatttcctgatgattagaggaaagcttctgaagatattctgtgcggggatgcactctgaccaccccaaagagtacgtgacactggtgcatggagactctgagaatttctccgaggtttatgggcacaggttacacaacccaacagaatgtccctataacgggagccggcgcgatgactgccaatgtcggaaggattacacggccgctgggttttccagttttcagaaaatcagaatagacctgaccagcatgcagataatcaccactgacttacagtttgcaaggacaagcgaaggacatcccgtcccttttgccacagccggggattgctacagcgctgccaagtgcccacagggtcgttttagcatcaacctttatggaaccggcttgtctttaactgaatctgccagatggatatcacaagggaattatgctgtctctgacatcaagaagtcgccggatggtacccgagtcgtagggaaatgcggtggttactgtggaaaatgcactccatcctctggtactggcctggaggtgcgagttttatagctaaggaaaattgcctccagctgcatccatattgctgcaaaggacatgatttcattattttttatggctgcatagtatttcatcatgtatacagaccacatttttaaaatccagtccaccattaatcggtacctaggttgattccacgtttgctattgtgaatagtgctgcaataaacatgtgagtgcaggtg

SEQ ID NO: 104763 - DNA, 7624 bp, Homo sapiens
  Payload ID: 575
  Gene Symbol: ADAMTS9
  Gene Name: ADAM metallopeptidase with thrombospondin type 1 motif, 9
  Uniprot ID: Q9P2N4
  ENST ID: ENST00000498707
  CDS Start-End: 344-6151
acagggcgcccggcgcgcctcggagcgcaagttcctcgccttctcctgcccgctcgctgggcattatgcggccaagcagccgagccccagtcctcctcctcctcctgctcctccggctcctcctgcggcccgagcggctcagctctcggcaggcggcggcgttgctcagccgagcgcagacgggaccctcgcagcgagacctcagcgactcctaaagtcaaaagttggcggcgggcgccgggctccgcgcgctctccacggccgctgcctcgcgtcgccgccgcagccaaggagggcaggagggaggggggtgggggcagcggagggaggggtgggaagcaccatgcagtttgtatcctgggccacactgctaacgctcctggtgcgggacctggccgagatggggagcccagacgccgcggcggccgtgcgcaaggacaggctgcacccgaggcaagtgaaattattagagaccctgagcgaatacgaaatcgtgtctcccatccgagtgaacgctctcggagaaccctttcccacgaacgtccacttcaaaagaacgcgacggagcattaactctgccactgacccctggcctgccttcgcctcctcctcttcctcctctacctcctcccaggcgcattaccgcctctctgccttcggccagcagtttctatttaatctcaccgccaatgccggatttatcgctccactgttcactgtcaccctcctcgggacgcccggggtgaatcagaccaagttttattccgaagaggaagcggaactcaagcactgtttctacaaaggctatgtcaataccaactccgagcacacggccgtcatcagcctctgctcaggaatgctgggcacattccggtctcatgatggggattattttattgaaccactacagtctatggatgaacaagaagatgaagaggaacaaaacaaaccccacatcatttataggcgcagcgccccccagagagagccctcaacaggaaggcatgcatgtgacacctcagaacacaaaaataggcacagtaaagacaagaagaaaaccagagcaagaaaatggggagaaaggattaacctggctggtgacgtagcagcattaaacagcggcttagcaacagaggcattttctgcttatggtaataagacggacaacacaagagaaaagaggacccacagaaggacaaaacgttttttatcctatccacggtttgtagaagtcttggtggtggcagacaacagaatggtttcataccatggagaaaaccttcaacactatattttaactttaatgtcaattgtagcctctatctataaagacccaagtattggaaatttaattaatattgttattgtgaacttaattgtgattcataatgaacaggatgggccttccatatcttttaatgctcagacaacattaaaaaacttttgccagtggcagcattcgaagaacagtccaggtggaatccatcatgatactgctgttctcttaacaagacaggatatctgcagagctcacgacaaatgtgataccttaggcctggctgaactgggaaccatttgtgatccctatagaagctgttctattagtgaagatagtggattgagtacagcttttacgatcgcccatgagctgggccatgtgtttaacatgcctcatgatgacaacaacaaatgtaaagaagaaggagttaagagtccccagcatgtcatggctccaacactgaacttctacaccaacccctggatgtggtcaaagtgtagtcgaaaatatatcactgagtttttagacactggttatggcgagtgtttgcttaacgaacctgaatccagaccctaccctttgcctgtccaactgccaggcatcctttacaacgtgaataaacaatgtgaattgatttttggaccaggttctcaggtgtgcccatatatgatgcagtgcagacggctctggtgcaataacgtcaatggagtacacaaaggctgccggactcagcacacaccctgggccgatgggacggagtgcgagcctggaaagcactgcaagtatggattttgtgttcccaaagaaatggatgtccccgtgacagatggatcctggggaagttggagtccctttggaacctgctccagaacatgtggagggggcatcaaaacagccattcgagagtgcaacagaccagaaccaaaaaatggtggaaaatactgtgtaggacgtagaatgaaatttaagtcctgcaacacggagccatgtctcaagcagaagcgagacttccgagatgaacagtgtgctcactttgacgggaagcattttaacatcaacggtctgcttcccaatgtgcgctgggtccctaaatacagtggaattctgatgaaggaccggtgcaagttgttctgcagagtggcagggaacacagcctactatcagcttcgagacagagtgatagatggaactccttgtggccaggacacaaatgatatctgtgtccagggcctttgccggcaagctggatgcgatcatgttttaaactcaaaagcccggagagataaatgtggggtttgtggtggcgataattcttcatgcaaaacagtggcaggaacatttaatacagtacattatggttacaatactgtggtccgaattccagctggtgctaccaatattgatgtgcggcagcacagtttctcaggggaaacagacgatgacaactacttagctttatcaagcagtaaaggtgaattcttgctaaatggaaactttgttgtcacaatggccaaaagggaaattcgcattgggaatgctgtggtagagtacagtgggtccgagactgccgtagaaagaattaactcaacagatcgcattgagcaagaacttttgcttcaggttttgtcggtgggaaagttgtacaaccccgatgtacgctattctttcaatattccaattgaagataaacctcagcagttttactggaacagtcatgggccatggcaagcatgcagtaaaccctgccaaggggaacggaaacgaaaacttgtttgcaccagggaatctgatcagcttactgtttctgatcaaagatgcgatcggctgccccagcctggacacattactgaaccctgtggtacagactgtgacctgaggtggcatgttgccagcaggagtgaatgtagtgcccagtgtggcttgggttaccgcacattggacatctactgtgccaaatatagcaggctggatgggaagactgagaaggttgatgatggtttttgcagcagccatcccaaaccaagcaaccgtgaaaaatgctcaggggaatgtaacacgggtggctggcgctattctgcctggactgaatgttcaaaaagctgtgacggtgggacccagaggagaagggctatttgtgtcaatacccgaaatgatgtactggatgacagcaaatgcacacatcaagagaaagttaccattcagaggtgcagtgagttcccttgtccacagtggaaatctggagactggtcagagtgcttggtcacctgtggaaaagggcataagcaccgccaggtctggtgtcagtttggtgaagatcgattaaatgatagaatgtgtgaccctgagaccaagccaacatctatgcagacttgtcagcagccggaatgtgcatcctggcaggcgggtccctggggacagtgcagtgtcacttgtggacagggataccagctaagagcagtgaaatgcatcattgggacttatatgtcagtggtagatgacaatgactgtaatgcagcaactagaccaactgatacccaggactgtgaattaccatcatgtcatcctcccccagctgccccggaaacgaggagaagcacatacagtgcaccaagaacccagtggcgatttgggtcttggaccccatgctcagccacttgtgggaaaggtacccggatgagatacgtcagctgccgagatgagaatggctctgtggctgacgagagtgcctgtgctaccctgcctagaccagtggcaaaggaagaatgttctgtgacaccctgtgggcaatggaaggccttggactggagctcttgctctgtgacctgtgggcaaggtagggcaacccggcaagtgatgtgtgtcaactacagtgaccacgtgatcgatcggagtgagtgtgaccaggattatatcccagaaactgaccaggactgttccatgtcaccatgccctcaaaggaccccagacagtggcttagctcagcaccccttccaaaatgaggactatcgtccccggagcgccagccccagccgcacccatgtgctcggtggaaaccagtggagaactggcccctggggagcatgttccagtacctgtgctggcggatcccagcggcgtgttgttgtatgtcaggatgaaaatggatacaccgcaaacgactgtgtggagagaataaaacctgatgagcaaagagcctgtgaatccggcccttgtcctcagtgggcttatggcaactggggagagtgcactaagctgtgtggtggaggcataagaacaagactggtggtctgtcagcggtccaacggtgaacggtttccagatttgagctgtgaaattcttgataaacctcccgatcgtgagcagtgtaacacacatgcttgtccacacgacgctgcatggagtactggcccttggagctcgtgttctgtctcttgtggtcgagggcataaacaacgaaatgtttactgcatggcaaaagatggaagccatttagaaagtgattactgtaagcacctggctaagccacatgggcacagaaagtgccgaggaggaagatgccccaaatggaaagctggcgcttggagtcagtgctctgtgtcctgtggccgaggcgtacagcagaggcatgtgggctgtcagatcggaacacacaaaatagccagagagaccgagtgcaacccatacaccagaccggagtcggaacgcgactgccaaggcccacggtgtcccctctacacttggagggcagaggaatggcaagaatgcaccaagacctgcggcgaaggctccaggtaccgcaaggtggtgtgtgtggatgacaacaaaaacgaggtgcatggggcacgctgtgacgtgagcaagcggccggtggaccgtgaaagctgtagtttgcaaccctgcgagtatgtctggatcacaggagaatggtcagagtgctcagtgacctgtggaaaaggctacaaacaaaggcttgtctcgtgcagcgagatttacaccgggaaggagaattatgaatacagctaccaaaccaccatcaactgcccaggcacgcagccccccagtgttcacccctgttacctgagggactgccctgtctcggccacctggagagttggcaactgggggagctgctcagtgtcttgtggtgttggagtgatgcagagatctgtgcaatgtttaaccaatgaggaccaacccagccacttatgccacactgatctgaagccagaagaacgaaaaacctgccgtaatgtctataactgtgagttaccccagaattgcaaggaggtaaaaagacttaaaggtgccagtgaagatggtgaatatttcctgatgattagaggaaagcttctgaagatattctgtgcggggatgcactctgaccaccccaaagagtacgtgacactggtgcatggagactctgagaatttctccgaggtttatgggcacaggttacacaacccaacagaatgtccctataacgggagccggcgcgatgactgccaatgtcggaaggattacacggccgctgggttttccagttttcagaaaatcagaatagacctgaccagcatgcagataatcaccactgacttacagtttgcaaggacaagcgaaggacatcccgtcccttttgccacagccggggattgctacagcgctgccaagtgcccacagggtcgttttagcatcaacctttatggaaccggcttgtctttaactgaatctgccagatggatatcacaagggaattatgctgtctctgacatcaagaagtcgccggatggtacccgagtcgtagggaaatgcggtggttactgtggaaaatgcactccatcctctggtactggcctggaggtgcgagttttatagctaaggtgctttgaagaggaagccattatggatggatgaaggatagtaatgcaatacctccaccttaatttgggtgcatgtgtatgtgtgtgtgtgtttgtgtgtgacttgtatgcttgtgtgtgtaaatgtgtgtacatatacatatatacatatctacacatacatatatacacatatatgtgtgtatgtagatatgtagactatcctaatgatgtaaagtttaatatttatgtttgaaattatttattgtgatgtaatatttttgtacgtaaaatgattctattatgactgcctttgcatgtagtaatatgacaaagtgatccttcattatcacggtacactattgtttacttttcatctgtaaatgttttattgttacttttttaaaatgaatttttttaaaacaatctagccatcatcaaggtgctataagagttgtataaaagatatttttggcatttctaggcaagtatcagccaataagtatgttagtgatatcacagattgtaccaactattaactatgttaaataagtattcagtttcatgtgatctctgggaaaaaaatatgctgccttggtgctaatattgtatgtatttaaatgatcatccgactcagaaatataaacacttttaatgaaagggaggaacggaaggacaatttccagtgcacagaatcacttggatgaaataagaccagctctttacccttatttttggatatgccttttttggaagagacttagactttatccttattgttgttagtgttgttaatattcgttgcttcagcccacggtgccttggtctctccacaatcaaatggaggatcccccaagcagcttcattacagagtgatattgggaaagtgagatcctctcaccattttgccaagatactctaaaatgacatccaagtttaccagtagaaagacacaggatgcacagaatgggcatgaccttcagctcacgagcacacctggagaaattcagaaccaggttctgaatcatcacgattgccttttgcatgaaaacatcggctggtgatgtgacttctcttcaggccatgagcctaacaccctgccggttttcatgcccgctgcagtaatggacgtttgtgtgaagaaatgaactgtggagtacaaaatgctttgagtctttccgattgctcattaattcacttttttgttacttctttccaaaatggaagtgctgaagccatggtctttctgcccctccaagctgatgaagggaagcctttgccaatggcccatggaagacacttggtttgagaaaccctgcccacttccaaagaccaaagagattaggaaaagcctggcagtattctccaactccaaacaagctctagagtgctccaggaaaagttatattcagtatatgaataagtgttattctccattattaatgtgttctgaaaatatattatgaataaatacatcaccacacccaaa

SEQ ID NO: 104764 - DNA, 2871 bp, Homo sapiens
  Payload ID: 575
  Gene Symbol: ADAMTS9
  Gene Name: ADAM metallopeptidase with thrombospondin type 1 motif, 9
  ENST ID: ENST00000459780
  CDS Start-End: 334-1800
cggcgcgcctcggagcgcaagttcctcgccttctcctgcccgctcgctgggcattatgcggccaagcagccgagccccagtcctcctcctcctcctgctcctccggctcctcctgcggcccgagcggctcagctctcggcaggcggcggcgttgctcagccgagcgcagacgggaccctcgcagcgagacctcagcgactcctaaagtcaaaagttggcggcgggcgccgggctccgcgcgctctccacggccgctgcctcgcgtcgccgccgcagccaaggagggcaggagggaggggggtgggggcagcggagggaggggtgggaagcaccatgcagtttgtatcctgggccacactgctaacgctcctggtgcgggacctggccgagatggggagcccagacgccgcggcggccgtgcgcaaggacaggctgcacccgaggcaagtgaaattattagagaccctgagcgaatacgaaatcgtgtctcccatccgagtgaacgctctcggagaaccctttcccacgaacgtccacttcaaaagaacgcgacggagcattaactctgccactgacccctggcctgccttcgcctcctcctcttcctcctctacctcctcccaggcgcattaccgcctctctgccttcggccagcagtttctatttaatctcaccgccaatgccggatttatcgctccactgttcactgtcaccctcctcgggacgcccggggtgaatcagaccaagttttattccgaagaggaagcggaactcaagcactgtttctacaaaggctatgtcaataccaactccgagcacacggccgtcatcagcctctgctcaggaatgctgggcacattccggtctcatgatggggattattttattgaaccactacagtctatggatgaacaagaagatgaagaggaacaaaacaaaccccacatcatttataggcgcagcgccccccagagagagccctcaacaggaaggcatgcatgtgacacctcagaacacaaaaataggcacagtaaagacaagaagaaaaccagagcaagaaaatggggagaaaggattaacctggctggtgacgtagcagcattaaacagcggcttagcaacagaggcattttctgcttatggtaataagacggacaacacaagagaaaagaggacccacagaaggacaaaacgttttttatcctatccacggtttgtagaagtcttggtggtggcagacaacagaatggtttcataccatggagaaaaccttcaacactatattttaactttaatgtcaattgtagcctctatctataaagacccaagtattggaaatttaattaatattgttattgtgaacttaattgtgattcataatgaacaggatgggccttccatatcttttaatgctcagacaacattaaaaaacttttgccagtggcagcattcgaagaacagtccaggtggaatccatcatgatactgctgttctcttaacaagacaggatatctgcagagctcacgacaaatgtgataccttaggcctggctgaactgggaaccatttgtgatccctatagaagctgttctattagtgaagatagtggattgagtacagcttttacgatcgcccatgagctgggccatgtgtttaacatgcctcatgatgacaacaacaaatgtaaagaagaaggagttaagagtccccagcatgtcatggctccaacactgaacttctacaccaacccctggatgtggtcaaagtgtagtcgaaaatatatcactgagtttttagagtaagacttgaacattcttttagcacaaacttctagtgcctggcctacatgtagtgaactaattgtgggaaagacaatatgaagtcaaacattccttttgagttatttttgttgacattccttggagaaggcaaaaaaaaaaaaaaaaagctctctgacatctgtgtagttcatatccttgacagagtttagaagattacagactgagctaaagaaaaggttggagtcttaaagaggatgtggaaatgttgcttcattttgggtaaagttttgagatttgttcagacattgggagagggactatgaatgtgatttcttaatgaaggccacaggtatttatgcacttctaatttagtaatttgggcctgaaaaggggtggggtagtgagatgatcccaaagcagattccgtggatgagtggaaattacagcagctcccacattgttgagttgaggacattctctctctgcgtcactcttcctctccccctcttccctctcccttttctcttttttcccatttcctttcttttcttgttttgttttttaagcttcctgctaggctgctcaaagatccaattacattatacaatgcccctgtgtcacagatttattgctcttctcgctcagaagtatgaaaggttaagtgattgtcccagagtcactgggtgtatatttctgcaaccacggggaagaggaggctttatcaatcagaactcaacgggtgtgaattttccgggagaggtgtttgctgaaaacggaaagaaccagagggttgctgttgttctttttaaccagatggtgtaaggtgttttctttctatgagtcattgattcgctcacgcatcccttcagcaaacatttactaatcacctgttgtcatggacagggccctgtgctttgatgaaaaagacactatctttgcccttagaaagcttacagtctattgggaaagatagtcaaacataaacagataattgctgtgaagtgtgatcaacgttgtaacaggtgtatatttcctactggctatgttgtattcattgcatgtggttctacaaagtaaacagcaaaaatgtaa

SEQ ID NO: 104765 - DNA, 597 bp, Homo sapiens
  Payload ID: 575
  Gene Symbol: ADAMTS9
  Gene Name: ADAM metallopeptidase with thrombospondin type 1 motif, 9
  ENST ID: ENST00000467257
  CDS Start-End: 1-210
gccaagtgcccacagggtcgttttagcatcaacctttatggaaccggcttgtctttaactgaatctgccagatggatatcacaagggaattatgctgtctctgacatcaagaagtcgccggatggtacccgagtcgtagggaaatgcggtggttactgtggaaaatgcactccatcctctggtactggcctggaggtgcgagttttatagctaaggaaaattgcctccagctgcatccatattgctgcaaaggacatgatttcattattttttatggctgcatagtatttcatcatgtatacagaccacatttttaaaatccagtccaccattaatcggtacctaggttgattccacgtttgctattgtgaatagtgctgcaataaacatgtgctttgaagaggaagccattatggatggatgaaggatagtaatgcaatacctccaccttaatttgggtgcatgtgtatgtgtgtgtgtgtttgtgtgtgacttgtatgcttgtgtgtgtaaatgtgtgtacatatacatatatacatatctacacatacatatatacacatatatgtgtgtatgtagatatgtagactatcctaa

SEQ ID NO: 104766 - DNA, 2348 bp, Homo sapiens
  Payload ID: 576
  Gene Symbol: ADAMDEC1
  Gene Name: ADAM-like, decysin 1
  Uniprot ID: O15204
  ENST ID: ENST00000256412
  CDS Start-End: 221-1633
agatgtgagtcctcaatgagctataaccacagccataaatatctctcaaagatgaggaacattctcatgatgttgacactgcaattttttgacaatttcccaacactcttaagaaacattccccaatctcacacgaaaagtgggggttttaattttcttgttcaacttctaaagagaaattggagaagataaaactggacactggggagaccacaacttcatgctgcgtgggatctcccagctacctgcagtggccaccatgtcttgggtcctgctgcctgtactttggctcattgttcaaactcaagcaatagccataaagcaaacacctgaattaacgctccatgaaatagtttgtcctaaaaaacttcacattttacacaaaagagagatcaagaacaaccagacagaaaagcatggcaaagaggaaaggtatgaacctgaagttcaatatcagatgatcttaaatggagaagaaatcattctctccctacaaaaaaccaagcacctcctggggccagactacactgaaacattgtactcacccagaggagaggaaattaccacgaaacctgagaacatggaacactgttactataaaggaaacatcctaaatgaaaagaattctgttgccagcatcagtacttgtgacgggttgagaggatacttcacacatcatcaccaaagataccagataaaacctctgaaaagcacagacgagaaagaacatgccgtctttacatctaaccaggaggaacaagacccagctaaccacacatgtggtgtgaagagcactgacgggaaacaaggcccaattcgaatctctagatcactcaaaagcccagagaaagaagactttcttcgggcacagaaatacattgatctctatttggtgctggataatgccttttataagaactataatgagaatctaactctgataagaagctttgtgtttgatgtgatgaacctactcaatgtgatatataacaccatagatgttcaagtggccttggtaggtatggaaatctggtctgatggggataagataaaggtggtgcccagcgcaagcaccacgtttgacaacttcctgagatggcacagttctaacctggggaaaaagatccacgaccatgctcagcttctcagcgggattagcttcaacaatcgacgtgtgggactggcagcttcaaattccttgtgttccccatcttcggttgctgttattgaggctaaaaaaaagaataatgtggctcttgtaggagtgatgtcacatgagctgggccatgtccttggtatgcctgatgttccattcaacaccaagtgtccctctggcagttgtgtgatgaatcagtatctgagttcaaaattcccaaaggatttcagtacatcttgccgtgcacattttgaaagataccttttatctcagaaaccaaagtgcctgctgcaagcacctattcctacaaatataatgacaacaccagtgtgtgggaaccaccttctagaagtgggagaagactgtgattgtggctctcctaaggagtgtaccaatctctgctgtgaagccctaacgtgtaaactgaagcctggaactgattgcggaggagatgctccaaaccataccacagagtgaatccaaaagtctgcttcactgagatgctaccttgccaggacaagaaccaagaactctaactgtcccaggaatcttgtgaattttcacccataatggtctttcacttgtcattctactttctatattgttatcagtccaggaaacaggtaaacagatgtaattagagacattggctctttgtttaggcctaatctttctttttacttttttttttcttttttctttttttttaaagatcatgaatttgtgacttagttctgccctttggagaacaaaagaaagcagtcttccatcaaatcaccttaaaatgcacggctaaactattcagagttaacactccagaattgttaaattacaagtactatgctttaatgcttctttcatcttactagtatggcctataaaaaaaataataccacttgatgggtgaaggctttggcaatagaaagaagaatagaattcaggttttatgttattcctctgtgttcacttcgccttgctcttgaaagtgcagtatttttctacatcatgtcaagaatgattcaatgtaaatatttttcattttatcatgtatatcctatacacacatctccttcatcatcatatatgaagtttattttgagaagtctacattgcttacattttaattgagccagcaaagaaggcttaatgatttattgaaccataatgtcaataaaaacacaacttttgaggc

SEQ ID NO: 104767 - DNA, 2044 bp, Homo sapiens
  Payload ID: 576
  Gene Symbol: ADAMDEC1
  Gene Name: ADAM-like, decysin 1
  Uniprot ID: O15204
  ENST ID: ENST00000522298
  CDS Start-End: 154-1329
aagataaaactggacactggggagaccacaacttcatgctgcgtgggatctcccagctacctgcagtggccaccatgtcttgggtcctgctgcctgtactttggctcattgttcaaactcaaggaaaggtatgaacctgaagttcaatatcagatgatcttaaatggagaagaaatcattctctccctacaaaaaaccaagcacctcctggggccagactacactgaaacattgtactcacccagaggagaggaaattaccacgaaacctgagaacatggaacactgttactataaaggaaacatcctaaatgaaaagaattctgttgccagcatcagtacttgtgacgggttgagaggatacttcacacatcatcaccaaagataccagataaaacctctgaaaagcacagacgagaaagaacatgccgtctttacatctaaccaggaggaacaagacccagctaaccacacatgtggtgtgaagagcactgacgggaaacaaggcccaattcgaatctctagatcactcaaaagcccagagaaagaagactttcttcgggcacagaaatacattgatctctatttggtgctggataatgccttttataagaactataatgagaatctaactctgataagaagctttgtgtttgatgtgatgaacctactcaatgtgatatataacaccatagatgttcaagtggccttggtaggtatggaaatctggtctgatggggataagataaaggtggtgcccagcgcaagcaccacgtttgacaacttcctgagatggcacagttctaacctggggaaaaagatccacgaccatgctcagcttctcagcgggattagcttcaacaatcgacgtgtgggactggcagcttcaaattccttgtgttccccatcttcggttgctgttattgaggctaaaaaaaagaataatgtggctcttgtaggagtgatgtcacatgagctgggccatgtccttggtatgcctgatgttccattcaacaccaagtgtccctctggcagttgtgtgatgaatcagtatctgagttcaaaattcccaaaggatttcagtacatcttgccgtgcacattttgaaagataccttttatctcagaaaccaaagtgcctgctgcaagcacctattcctacaaatataatgacaacaccagtgtgtgggaaccaccttctagaagtgggagaagactgtgattgtggctctcctaaggagtgtaccaatctctgctgtgaagccctaacgtgtaaactgaagcctggaactgattgcggaggagatgctccaaaccataccacagagtgaatccaaaagtctgcttcactgagatgctaccttgccaggacaagaaccaagaactctaactgtcccaggaatcttgtgaattttcacccataatggtctttcacttgtcattctactttctatattgttatcagtccaggaaacaggtaaacagatgtaattagagacattggctctttgtttaggcctaatctttctttttacttttttttttcttttttctttttttttaaagatcatgaatttgtgacttagttctgccctttggagaacaaaagaaagcagtcttccatcaaatcaccttaaaatgcacggctaaactattcagagttaacactccagaattgttaaattacaagtactatgctttaatgcttctttcatcttactagtatggcctataaaaaaaataataccacttgatgggtgaaggctttggcaatagaaagaagaatagaattcaggttttatgttattcctctgtgttcacttcgccttgctcttgaaagtgcagtatttttctacatcatgtcaagaatgattcaatgtaaatatttttcattttatcatgtatatcctatacacacatctccttcatcatcatatatgaagtttattttgagaagtctacattgcttacattttaattgagccagcaaagaaggcttaatgatttattgaaccataatgtcaataaaaacacaacttttgaggc

SEQ ID NO: 104768 - DNA, 1922 bp, Homo sapiens
  Payload ID: 576
  Gene Symbol: ADAMDEC1
  Gene Name: ADAM-like, decysin 1
  ENST ID: ENST00000520193
  CDS Start-End: 1-126
atgctgcgtgggatctcccagctacctgcagtggccaccatgtcttgggtcctgctgcctgtactttggctcattgttcaaactcaagcctcaaactgtgcgtggcctaaagtcagcattcaataaatatttgtgaaatgaatatttcagttttcacataaaagaaatatcagagaagcaatagccataaagcaaacacctgaattaacgctccatgaaatagtttgtcctaaaaaacttcacattttacacaaaagagagatcaagaacaaccagacagaaaagcatggcaaagaggaaaggtatgaacctgaagttcaatatcagatgatcttaaatggagaagaaatcattctctccctacaaaaaaccaagcacctcctggggccagactacactgaaacattgtactcacccagaggagaggaaattaccacgaaacctgagaacatggaacactgttactataaaggaaacatcctaaatgaaaagaattctgttgccagcatcagtacttgtgacgggttgagaggatacttcacacatcatcaccaaagataccagataaaacctctgaaaagcacagacgagaaagaacatgccgtctttacatctaaccaggaggaacaagacccagctaaccacacatgtggtgtgaagagcactgacgggaaacaaggcccaattcgaatctctagatcactcaaaagcccagagaaagaagactttcttcgggcacagaaatacattgatctctatttggtgctggataatgccttttataagaactataatgagaatctaactctgataagaagctttgtgtttgatgtgatgaacctactcaatgtgatatataacaccatagatgttcaagtggccttggtaggtatggaaatctggtctgatggggataagataaaggtggtgcccagcgcaagcaccacgtttgacaacttcctgagatggcacagttctaacctggggaaaaagatccacgaccatgctcagcttctcagcgggattagcttcaacaatcgacgtgtgggactggcagcttcaaattccttgtgttccccatcttcggttgctgttattgaggctaaaaaaaagaataatgtggctcttgtaggagtgatgtcacatgagctgggccatgtccttggtatgcctgatgttccattcaacaccaagtgtccctctggcagttgtgtgatgaatcagtatctgagttcaaaattcccaaaggatttcagtacatcttgccgtgcacattttgaaagataccttttatctcagaaaccaaagtgcctgctgcaagcacctattcctacaaatataatgacaacaccagtgtgtgggaaccaccttctagaagtgggagaagactgtgattgtggctctcctaaggagtgtaccaatctctgctgtgaagccctaacgtgtaaactgaagcctggaactgattgcggaggagatgctccaaaccataccacagagtgaatccaaaagtctgcttcactgagatgctaccttgccaggacaagaaccaagaactctaactgtcccaggaatcttgtgaattttcacccataatggtctttcacttgtcattctactttctatattgttatcagtccaggaaacaggtaaacagatgtaattagagacattggctctttgtttaggcctaatctttctttttacttttttttttcttttttctttttttttaaagatcatgaatttgtgacttagttctgccctttggagaacaaaagaaagcagtcttccatcaaatcaccttaaaatgcacggctaaactattcagagttaacactccagaattgttaaattacaagtactatgctttaatgcttctttcatcttactagtatggcctataaaaaaaataataccac

SEQ ID NO: 104769 - DNA, 2906 bp, Homo sapiens
  Payload ID: 577
  Gene Symbol: ADAMTSL1
  Gene Name: ADAMTS-like 1
  Uniprot ID: Q8N6G6
  ENST ID: ENST00000276935
  CDS Start-End: 1-2052
atggaatgctgccgtcgggcaactcctggcacactgctcctctttctggctttcctgctcctgagttccaggaccgcacgctccgaggaggaccgggacggcctatgggatgcctggggcccatggagtgaatgctcacgcacctgcgggggtggggcctcctactctctgaggcgctgcctgagcagcaagagctgtgaaggaagaaatatccgatacagaacatgcagtaatgtggactgcccaccagaagcaggtgatttccgagctcagcaatgctcagctcataatgatgtcaagcaccatggccagttttatgaatggcttcctgtgtctaatgaccctgacaacccatgttcactcaagtgccaagccaaaggaacaaccctggttgttgaactagcacctaaggtcttagatggtacgcgttgctatacagaatctttggatatgtgcatcagtggtttatgccaaattgttggctgcgatcaccagctgggaagcaccgtcaaggaagataactgtggggtctgcaacggagatgggtccacctgccggctggtccgagggcagtataaatcccagctctccgcaaccaaatcggatgatactgtggttgcaattccctatggaagtagacatattcgccttgtcttaaaaggtcctgatcacttatatctggaaaccaaaaccctccaggggactaaaggtgaaaacagtctcagctccacaggaactttccttgtggacaattctagtgtggacttccagaaatttccagacaaagagatactgagaatggctggaccactcacagcagatttcattgtcaagattcgtaactcgggctccgctgacagtacagtccagttcatcttctatcaacccatcatccaccgatggagggagacggatttctttccttgctcagcaacctgtggaggaggttatcagctgacatcggctgagtgctacgatctgaggagcaaccgtgtggttgctgaccaatactgtcactattacccagagaacatcaaacccaaacccaagcttcaggagtgcaacttggatccttgtccagccagtgacggatacaagcagatcatgccttatgacctctaccatccccttcctcggtgggaggccaccccatggaccgcgtgctcctcctcgtgtggggggggcatccagagccgggcagtttcctgtgtggaggaggacatccaggggcatgtcacttcagtggaagagtggaaatgcatgtacacccctaagatgcccatcgcgcagccctgcaacatttttgactgccctaaatggctggcacaggagtggtctccgtgcacagtgacatgtggccagggcctcagataccgtgtggtcctctgcatcgaccatcgaggaatgcacacaggaggctgtagcccaaaaacaaagccccacataaaagaggaatgcatcgtacccactccctgctataaacccaaagagaaacttccagtcgaggccaagttgccatggttcaaacaagctcaagagctagaagaaggagctgctgtgtcagaggagccctcgttcatcccagaggcctggtcggcctgcacagtcacctgtggtgtggggacccaggtgcgaatagtcaggtgccaggtgctcctgtctttctctcagtccgtggctgacctgcctattgacgagtgtgaagggcccaagccagcatcccagcgtgcctgttatgcaggcccatgcagcggggaaattcctgagttcaacccagacgagacagatgggctctttggtggcctgcaggatttcgacgagctgtatgactgggagtatgaggggttcaccaagtgctccgagtcctgtggaggaggtgtccaggaggctgtggtgagctgcttgaacaaacagactcgggagcctgctgaggagaacctgtgcgtgaccagccgccggcccccacagctcctgaagtcctgcaatttggatccctgcccagcaagaagcagtatcgactcagcatggaacgcctgcaacgttctttgttaggcaaccaagaggcctggcttctcatcctgctgtcaccaactagctctgtggcctagggcgaggtgtctgccctttatgtttccacatctgcaaagtgaactggttgtacctgatgatctgagatcccatgacttgctcacatgtcccatgattctttattttgtaggcagaagcattaaacagctactcctgctgctgtgtgctaatcattcctgtaatttctgttctgcttatttgccattatttgaaaaacatgcaaaagggtctttctaaccacattcctgtgttgtaacaacacccaaatgctgaggcagtgccgaggagtcagtgcctgggacttgcttaaaactgctgggactcgtggtccctaaacccttctttgagcaccaaaacgaataggacatgagatgttacttctcattctcaaagtactaactatgtttaagttacaaaaggttaggttatcctgtgacccttttgttgactcacagacaagaacagttgttgagcttaatgttgtcgcatttgctccagataaactcaattctctgatttcccaccagccagctgtcaagccaacaggcaagacctctcactgggcacagccaggagtttcttgggtcgaccatacacatttaaacatttgtagaaggttgctaattgcaacaataaaggggaccaaagtataatggcctaatctcatccaagagtcaaaacagattttccccctaaaaatgataattgtatagaggtgcctttcctgtggaatatctcactctgatgtcagagaaaaatctctccttcccttctcctggtgttcaatgtatacagaaaataaaatgtgtttggtagga

SEQ ID NO: 104770 - DNA, 1864 bp, Homo sapiens
  Payload ID: 577
  Gene Symbol: ADAMTSL1
  Gene Name: ADAMTS-like 1
  Uniprot ID: Q8N6G6
  ENST ID: ENST00000327883
  CDS Start-End: 134-1711
aaatgtgagaggggctgatggaagctgataggcaggactggagtgttagcaccagtactggatgtgacagcaggcagaggagcacttagcagcttattcagtgtccgattctgattccggcaaggatccaagcatggaatgctgccgtcgggcaactcctggcacactgctcctctttctggctttcctgctcctgagttccaggaccgcacgctccgaggaggaccgggacggcctatgggatgcctggggcccatggagtgaatgctcacgcacctgcgggggtggggcctcctactctctgaggcgctgcctgagcagcaagagctgtgaaggaagaaatatccgatacagaacatgcagtaatgtggactgcccaccagaagcaggtgatttccgagctcagcaatgctcagctcataatgatgtcaagcaccatggccagttttatgaatggcttcctgtgtctaatgaccctgacaacccatgttcactcaagtgccaagccaaaggaacaaccctggttgttgaactagcacctaaggtcttagatggtacgcgttgctatacagaatctttggatatgtgcatcagtggtttatgccaaattgttggctgcgatcaccagctgggaagcaccgtcaaggaagataactgtggggtctgcaacggagatgggtccacctgccggctggtccgagggcagtataaatcccagctctccgcaaccaaatcggatgatactgtggttgcaattccctatggaagtagacatattcgccttgtcttaaaaggtcctgatcacttatatctggaaaccaaaaccctccaggggactaaaggtgaaaacagtctcagctccacaggaactttccttgtggacaattctagtgtggacttccagaaatttccagacaaagagatactgagaatggctggaccactcacagcagatttcattgtcaagattcgtaactcgggctccgctgacagtacagtccagttcatcttctatcaacccatcatccaccgatggagggagacggatttctttccttgctcagcaacctgtggaggaggttatcagctgacatcggctgagtgctacgatctgaggagcaaccgtgtggttgctgaccaatactgtcactattacccagagaacatcaaacccaaacccaagcttcaggagtgcaacttggatccttgtccagccagtgacggatacaagcagatcatgccttatgacctctaccatccccttcctcggtgggaggccaccccatggaccgcgtgctcctcctcgtgtggggggggcatccagagccgggcagtttcctgtgtggaggaggacatccaggggcatgtcacttcagtggaagagtggaaatgcatgtacacccctaagatgcccatcgcgcagccctgcaacatttttgactgccctaaatggctggcacaggagtggtctccgtgcacagtgacatgtggccagggcctcagataccgtgtggtcctctgcatcgaccatcgaggaatgcacacaggaggctgtagcccaaaaacaaagccccacataaaagaggaatgcatcgtacccactccctgctataaacccaaagagaaacttccagtcgaggccaagttgccatggttcaaacaagctcaagagctagaagaaggagctgctgtgtcagaggagccctcgtaagttgtaaaagcacagactgttctatatttgaaactgttttgtttaaagaaagcagtgtctcactggttgtagctttcatgggttctgaactaagtgtaatcatctcaccaaagctttttggctctcaaattaaagattgattagtttcaaaaa

SEQ ID NO: 104771 - DNA, 686 bp, Homo sapiens
  Payload ID: 577
  Gene Symbol: ADAMTSL1
  Gene Name: ADAMTS-like 1
  ENST ID: ENST00000380538
  CDS Start-End: 1-453
acgtctcctctgggaacacagctggtcctggatcctgggaattctgctctccttggctgccccatcaaaggtcaccctgtccctaatatcacctggtttcatggtggtcagccaattgtcactgccacaggactgacgcatcacatcttggcagctggacagatccttcaagttgcaaaccttagcggtgggtctcaaggggaattcagctgccttgctcagaatgaggcaggggtgctcatgcagaaggcatctttagtgatccaagattactggtggtctgtggacagactggcaacctgctcagcctcctgtggtaaccggggggttcagcagccccgcttgaggtgcctgctgaacagcacggaggtcaaccctgcccactgcgcagggaaggttcgccctgcggtgcagcccatcgcgtgcaaccggagagactgcccttctcgctgagtcataaggagcagctgaaaccaggagagattcgatgaaatatgaaacatgctcattaatatcagcagtttgacttgctgacgggaaggtttccacaggaatgattaatgtccttttatacccttcctgaactgtaacatagcctggcccgctcctttctcaaaccccccccaccccagctcctgaaaaattgctgaaacgtatatttggaaataaaagttgatggaaatgca

SEQ ID NO: 104772 - DNA, 1562 bp, Homo sapiens
  Payload ID: 577
  Gene Symbol: ADAMTSL1
  Gene Name: ADAMTS-like 1
  Uniprot ID: Q8N6G6
  ENST ID: ENST00000380545
  CDS Start-End: 110-1501
atttaatctggccaaagcctggtagaagatgtccctgtagagcagccccagggaagggggattcaagaagctataaatgcctctgggctcacctgaatgtgtttgactgatgagtggggttttttgttttttttttttcttcctaggagtgcctgaagctgaagtcacttggttcaggaataaaagcaaactgggctccccgcaccatctgcacgaaggctccttgctgctcacaaacgtgtcctcctcggatcagggcctgtactcctgcagggcggccaatcttcatggagagctgactgagagcacccagctgctgatcctagatcccccccaagtccccacacagttggaagacatcagggccttgctcgctgccactggaccgaaccttccttcagtgctgacgtctcctctgggaacacagctggtcctggatcctgggaattctgctctccttggctgccccatcaaaggtcaccctgtccctaatatcacctggtttcatggtggtcagccaattgtcactgccacaggactgacgcatcacatcttggcagctggacagatccttcaagttgcaaaccttagcggtgggtctcaaggggaattcagctgccttgctcagaatgaggcaggggtgctcatgcagaaggcatctttagtgatccaagattactggtggtctgtggacagactggcaacctgctcagcctcctgtggtaaccggggggttcagcagccccgcttgaggtgcctgctgaacagcacggaggtcaaccctgcccactgcgcagggaaggttcgccctgcggtgcagcccatcgcgtgcaaccggagagactgcccttctcggtggatggtgacctcctggtctgcctgtacccggagctgtgggggaggtgtccagacccgcagggtgacctgtcaaaagctgaaagcctctgggatctccacccctgtgtccaatgacatgtgcacccaggtcgccaagcggcctgtggacacccaggcctgtaaccagcagctgtgtgtggagtgggccttctccagctggggccagtgcaatgggccttgcatcgggcctcacctagctgtgcaacacagacaagtcttctgccagacacgggatggcatcaccttaccatcagagcagtgcagtgctcttccgaggcctgtgagcacccagaactgctggtcagaggcctgcagtgtacactggagagtcagcctgtggaccctgtgcacagctacctgtggcaactacggcttccagtcccggcgtgtggagtgtgtgcatgcccgcaccaacaaggcagtgcctgagcacctgtgctcctgggggccccggcctgccaactggcagcgctgcaacatcaccccatgtgaaaacatggagtgcagagacaccaccaggtactgcgagaaggtgaaacagctgaaactctgccaactcagccagtttaaatctcgctgctgtggaacttgtggcaaagcgtgaagatagggtgtggggaaaaactctaccctggccacacgaaggactcacgcaaccacctcgg

SEQ ID NO: 104773 - DNA, 8030 bp, Homo sapiens
  Payload ID: 577
  Gene Symbol: ADAMTSL1
  Gene Name: ADAMTS-like 1
  Uniprot ID: Q8N6G6
  ENST ID: ENST00000380548
  CDS Start-End: 340-5628
tttcccttctcgctctgctgctcgctcgcctttctttttcgtccttttcccccttttttgctcgcaccgttacactttctctgtcctcctggctttgttattcagcatgtctgattagcaggagcctgattggctggctgcctgctccgagagagattccattcagcttaccccccacccatccacccacccacccctcggtcaggaaatgtgagaggggctgatggaagctgataggcaggactggagtgttagcaccagtactggatgtgacagcaggcagaggagcacttagcagcttattcagtgtccgattctgattccggcaaggatccaagcatggaatgctgccgtcgggcaactcctggcacactgctcctctttctggctttcctgctcctgagttccaggaccgcacgctccgaggaggaccgggacggcctatgggatgcctggggcccatggagtgaatgctcacgcacctgcgggggtggggcctcctactctctgaggcgctgcctgagcagcaagagctgtgaaggaagaaatatccgatacagaacatgcagtaatgtggactgcccaccagaagcaggtgatttccgagctcagcaatgctcagctcataatgatgtcaagcaccatggccagttttatgaatggcttcctgtgtctaatgaccctgacaacccatgttcactcaagtgccaagccaaaggaacaaccctggttgttgaactagcacctaaggtcttagatggtacgcgttgctatacagaatctttggatatgtgcatcagtggtttatgccaaattgttggctgcgatcaccagctgggaagcaccgtcaaggaagataactgtggggtctgcaacggagatgggtccacctgccggctggtccgagggcagtataaatcccagctctccgcaaccaaatcggatgatactgtggttgcaattccctatggaagtagacatattcgccttgtcttaaaaggtcctgatcacttatatctggaaaccaaaaccctccaggggactaaaggtgaaaacagtctcagctccacaggaactttccttgtggacaattctagtgtggacttccagaaatttccagacaaagagatactgagaatggctggaccactcacagcagatttcattgtcaagattcgtaactcgggctccgctgacagtacagtccagttcatcttctatcaacccatcatccaccgatggagggagacggatttctttccttgctcagcaacctgtggaggaggttatcagctgacatcggctgagtgctacgatctgaggagcaaccgtgtggttgctgaccaatactgtcactattacccagagaacatcaaacccaaacccaagcttcaggagtgcaacttggatccttgtccagccagtgacggatacaagcagatcatgccttatgacctctaccatccccttcctcggtgggaggccaccccatggaccgcgtgctcctcctcgtgtggggggggcatccagagccgggcagtttcctgtgtggaggaggacatccaggggcatgtcacttcagtggaagagtggaaatgcatgtacacccctaagatgcccatcgcgcagccctgcaacatttttgactgccctaaatggctggcacaggagtggtctccgtgcacagtgacatgtggccagggcctcagataccgtgtggtcctctgcatcgaccatcgaggaatgcacacaggaggctgtagcccaaaaacaaagccccacataaaagaggaatgcatcgtacccactccctgctataaacccaaagagaaacttccagtcgaggccaagttgccatggttcaaacaagctcaagagctagaagaaggagctgctgtgtcagaggagccctcgttcatcccagaggcctggtcggcctgcacagtcacctgtggtgtggggacccaggtgcgaatagtcaggtgccaggtgctcctgtctttctctcagtccgtggctgacctgcctattgacgagtgtgaagggcccaagccagcatcccagcgtgcctgttatgcaggcccatgcagcggggaaattcctgagttcaacccagacgagacagatgggctctttggtggcctgcaggatttcgacgagctgtatgactgggagtatgaggggttcaccaagtgctccgagtcctgtggaggaggtgtccaggaggctgtggtgagctgcttgaacaaacagactcgggagcctgctgaggagaacctgtgcgtgaccagccgccggcccccacagctcctgaagtcctgcaatttggatccctgcccagcaaggtgggaaattggcaagtggagtccatgtagtctcacatgtggggtcggcctacagaccagagacgtcttctgcagccacctgctttccagagagatgaatgaaacagtcatcctggctgatgagctgtgtcgccagcccaagcccagcacggtgcaagcttgtaaccgctttaattgccccccagcctggtaccctgcacagtggcagccgtgttccagaacgtgtggcgggggtgttcagaaacgtgaggttctttgcaagcagcgcatggctgatggcagcttcctggagcttcctgagaccttctgttcagcttcaaaacctgcctgccagcaagcatgcaagaaagatgactgtcccagcgagtggcttctctcagactggacagagtgttccacaagctgcggggaaggcacccagactcgaagcgccatttgccgaaagatgctgaaaaccggcctctcaacggttgtcaattccaccctgtgcccgcccctgcctttctcttcctccatcaggccctgtatgctggcaacctgtgcaaggcccgggcggccatccacgaagcacagcccgcacatcgcggccgccaggaaggtctacatacagactcgcaggcagaggaagctgcacttcgtggtggggggcttcgcctacctgctccccaagacggcggtggtgctgcgctgcccggcgcgcagggtccgcaagcccctcatcacctgggagaaggacggccagcacctcatcagctcgacgcacgtcacggtggcccccttcggctatctcaagatccaccgcctcaagccctcggatgcaggcgtctacacctgctcagcgggcccggcccgggagcactttgtgattaagctcatcggaggcaaccgcaagctcgtggcccggcccttgagcccgagaagtgaggaagaggtgcttgcggggaggaagggcggcccgaaggaggccctgcagacccacaaacaccagaacgggatcttctccaacggcagcaaggcggagaagcggggcctggccgccaacccggggagccgctacgacgacctcgtctcccggctgctggagcagggcggctggcccggagagctgctggcctcgtgggaggcgcaggactctgcggaaaggaacacgacctcggaggaggacccgggtgcagagcaagtgctcctgcacctgcccttcaccatggtgaccgagcagcggcgcctggacgacatcctggggaacctctcccagcagcccgaggagctgcgcgacctctacagcaagcacctggtggcccagctggcccaggagatcttccgcagccacctggagcaccaggacacgctcctgaagccctcggagcgcaggacttccccagtgactctctcgcctcataaacacgtgtctggcttcagcagctccctgcggacctcctccaccggggacgccgggggaggctctcgaaggccacaccgcaagcccaccatcctgcgcaagatctcagcggcccagcagctctcagcctcggaggtggtcacccacctggggcagacggtggccctggccagcgggacactgagtgttcttctgcactgtgaggccatcggccacccaaggcctaccatcagctgggccaggaatggagaagaagttcagttcagtgacaggattcttctacagccagatgattccttacagatcttggcaccagtggaagcagatgtgggtttctacacttgcaatgccaccaatgccttgggatacgactctgtctccattgccgtcacattagcaggaaagccactagtgaaaacgtcacgaatgacagtgatcaacacggagaagcctgcagtcacagtcgatataggaagcaccatcaaaacagtgcagggagtgaatgtgacaatcaactgccaggttgcaggagtgcctgaagctgaagtcacttggttcaggaataaaagcaaactgggctccccgcaccatctgcacgaaggctccttgctgctcacaaacgtgtcctcctcggatcagggcctgtactcctgcagggcggccaatcttcatggagagctgactgagagcacccagctgctgatcctagatcccccccaagtccccacacagttggaagacatcagggccttgctcgctgccactggaccgaaccttccttcagtgctgacgtctcctctgggaacacagctggtcctggatcctgggaattctgctctccttggctgccccatcaaaggtcaccctgtccctaatatcacctggtttcatggtggtcagccaattgtcactgccacaggactgacgcatcacatcttggcagctggacagatccttcaagttgcaaaccttagcggtgggtctcaaggggaattcagctgccttgctcagaatgaggcaggggtgctcatgcagaaggcatctttagtgatccaagattactggtggtctgtggacagactggcaacctgctcagcctcctgtggtaaccggggggttcagcagccccgcttgaggtgcctgctgaacagcacggaggtcaaccctgcccactgcgcagggaaggttcgccctgcggtgcagcccatcgcgtgcaaccggagagactgcccttctcggtggatggtgacctcctggtctgcctgtacccggagctgtgggggaggtgtccagacccgcagggtgacctgtcaaaagctgaaagcctctgggatctccacccctgtgtccaatgacatgtgcacccaggtcgccaagcggcctgtggacacccaggcctgtaaccagcagctgtgtgtggagtgggccttctccagctggggccagtgcaatgggccttgcatcgggcctcacctagctgtgcaacacagacaagtcttctgccagacacgggatggcatcaccttaccatcagagcagtgcagtgctcttccgaggcctgtgagcacccagaactgctggtcagaggcctgcagtgtacactggagagtcagcctgtggaccctgtgcacagctacctgtggcaactacggcttccagtcccggcgtgtggagtgtgtgcatgcccgcaccaacaaggcagtgcctgagcacctgtgctcctgggggccccggcctgccaactggcagcgctgcaacatcaccccatgtgaaaacatggagtgcagagacaccaccaggtactgcgagaaggtgaaacagctgaaactctgccaactcagccagtttaaatctcgctgctgtggaacttgtggcaaagcgtgaagatagggtgtggggaaaaactctaccctggccacacgaaggactcacgcaaccacctcggacagaacctaagctttcttcattttatttatttatttccccctccccactccacacacacccttccaacctcctccacctccaccttcaagcataaggacgtccgcgtgttttctctttcagttagctggaggacaggatgttgggaaaggaaaggacagatgtctaaaggaggttgcagagcaggccaggcagacagtgggggctcccttgaagagcttcctccctcccaaacctgggtctcaaagacctagaaagaggcaggcacagcccctgcggacagcagggagccagaaggtttgtagcctattggtgcaaacattggacaaattcctgtgtctttcctagaagcgcactatcacaaacacaggagtgttttgctcctttgtctcctcttccccatctatgtccctttagtcacagttaggacaaatggggaggggacaccatgctgaggcagaaactagcccagaactcactcagttcttctagtgggtgagtgcagagagagaagaactcagatcaccagtagggagaggtaaaaaagcaaacaaagcaggctctaaggcacacaacattgcagaaaatgaggaagggaggggagggaagggacagaagcaaaaaggagcctgtggtgttccccagtggggcagggtgagcaggggcttccaggctgcatgaggctcatggaccagctctgatcccatgcatgtgcgcatgctcagagccctgctgcccacaacagagcactgcgctgcgtgggagtccccacttcccaagctatcagagtcaacgtcctgcctgtgcagctgcagcaaagccagtgagaggtgggtctcgccatgcagtaaggccaccctggcacctctttatctaaatccgaagtcccctagccccgcactaactaactgctgctgtgggccagggccattttgagcatgaatggcccaggttttttgccttctaggacctttgctgctccaccgaagggccagggactatggttaacttatcaacatcaacccattaactagtcactgtgccagagagtatctgtcaggctgtcaggttgtagcaacctcttcattccagagctggcccagggaccggggtgggacaatgggtttatgcgtgtccacagtacaccctccctctcccagcctccaccccagggtctgcaggtcctccggcatgtagtatttatctagcaaggcggggtggtggaggcagcaccctggcaaagcagctcacacactgcagccacactcatcagctgtggtgaggcggctggagcaaagtcaaagtcatgcagcaaaatgaaaactctgggactcttcggcaaaatcctcattaagccgagcagctttggccaagtaatttttgcctccttccctcgcgtggcctgagtttaggagcaagggtggccagagtcccttacccacagataagcctcccctcatgaaatgccactcaccccgggctaccattgacatcagggctgcatttccagccagcctggaagtaaaatttgagaggaagacaatattaatctgtgtccccacctagtgagctgtggacaggtttaagttgggtctccttcttcttcaccacaaaaacaggctctaagaaatcatgttactaaaaaatcagtgtaaagtctgtttaaaataaaaaagaatgttttctatgtctgtatatcttttgtgaatatttattaggatttcttattaaaaaagtgcaatattaataattgtacattgtcatccagaaacaaaactattggggggactttattaactaacttcctgcagttgtgttcctgtaaactcagtagtgattattatatttttcctatttttaatagaacctggtgtttaactctggatccattcactgtacaggatgtgttgtaaaaactaacatgggatgctgaggcagtaagagggaattcatttgtggcataatagttatgcatggaatgataaagacagacaaattccatactactactaatgtggttaattatttctagttcgatagtgattgaaaatcagtggtcactatttacatttcctaaagagcaagcatcctccagctccatgttgggttggagcagttggcagtgggtctcagtgagctggcagaacctaggtttgggtgggaagcagaatgctcgttgcatgaaatgaatgtacatttaatgtttgttctgtgaattgcaactcagcagcaccacaagacaatgaaggctgctggctaatgtggaaggaggcactttctcctctaaaacacaaaactgtatttgtattttttgtacagataatacagcttatttatttaaa

SEQ ID NO: 104774 - DNA, 2321 bp, Homo sapiens
  Payload ID: 577
  Gene Symbol: ADAMTSL1
  Gene Name: ADAMTS-like 1
  Uniprot ID: Q8N6G6
  ENST ID: ENST00000380566
  CDS Start-End: 65-1384
gcaggcagaggagcacttagcagcttattcagtgtccgattctgattccggcaaggatccaagcatggaatgctgccgtcgggcaactcctggcacactgctcctctttctggctttcctgctcctgagttccaggaccgcacgctccgaggaggaccgggacggcctatgggatgcctggggcccatggagtgaatgctcacgcacctgcgggggtggggcctcctactctctgaggcgctgcctgagcagcaagagctgtgaaggaagaaatatccgatacagaacatgcagtaatgtggactgcccaccagaagcaggtgatttccgagctcagcaatgctcagctcataatgatgtcaagcaccatggccagttttatgaatggcttcctgtgtctaatgaccctgacaacccatgttcactcaagtgccaagccaaaggaacaaccctggttgttgaactagcacctaaggtcttagatggtacgcgttgctatacagaatctttggatatgtgcatcagtggtttatgccaaattgttggctgcgatcaccagctgggaagcaccgtcaaggaagataactgtggggtctgcaacggagatgggtccacctgccggctggtccgagggcagtataaatcccagctctccgcaaccaaatcggatgatactgtggttgcaattccctatggaagtagacatattcgccttgtcttaaaaggtcctgatcacttatatctggaaaccaaaaccctccaggggactaaaggtgaaaacagtctcagctccacaggaactttccttgtggacaattctagtgtggacttccagaaatttccagacaaagagatactgagaatggctggaccactcacagcagatttcattgtcaagattcgtaactcgggctccgctgacagtacagtccagttcatcttctatcaacccatcatccaccgatggagggagacggatttctttccttgctcagcaacctgtggaggaggttatcagctgacatcggctgagtgctacgatctgaggagcaaccgtgtggttgctgaccaatactgtcactattacccagagaacatcaaacccaaacccaagcttcaggagtgcaacttggatccttgtccagccaggtgggaggccaccccatggaccgcgtgctcctcctcgtgtggggggggcatccagagccgggcagtttcctgtgtggaggaggacatccaggggcatgtcacttcagtggaagagtggaaatgcatgtacacccctaagatgcccatcgcgcagccctgcaacatttttgactgccctaaatggctggcacaggagtggtctccggtaactgtgccttctttctttgttcattaggagagtaagtccactcttccctctcatcatcatggccccaccgggtaccctgagcagctccacactcttcttgaggtgtctagaagcctaccagcttagctcctggagtaggaatgccccaaatccagcatgaccaaaagtaaatgatgtttttttaaagtgtctttcttcaagtttcttcaagaagcctctattgttccccagataatgttccctcaaatagcacggggaagcaactgcctttcaagggtaattgaggctgaatgaatgatcccgaatctgtaaaagctgctttgatgatagagctcagtagaccagaagtttgatttcattttgtatgtattatgctttgtatccgaaagggtctaagtggattaatattaaaactatgtatattaatcattggagaagggggaagaggaaatgaaaatagcacaaaaattaaaattggaacgaagtaagataattaaaacaaaaaacttatagatgttaggaaacctgctgtaattaaacataaaatgtcattcagggtttcctgactgctaatgcagaaaggaaaatcgtaaaggaaacagaaagatgaaataagccattgtgccctccgcctcagaaatgacaaaagactcttcactgagccctgtggcttcatggcagcagatcagagctgtgacattttctacatctagacatgctaccagacatggggaaccattagaggtgcaatctacattgggcatctggtcattcaatctgtttttttaaatgttatttttgcctttcaatgtaatcaattggattaacaatgctgcaatataatttagctataatcgtagtttaaattttttgatatccatgtaggggtatttcccatatttttggaagtagcggtcattagcaaagtaactaaataaaatacagtgctggtagtcaaaattaa

SEQ ID NO: 104775 - DNA, 931 bp, Homo sapiens
  Payload ID: 577
  Gene Symbol: ADAMTSL1
  Gene Name: ADAMTS-like 1
  ENST ID: ENST00000380570
  CDS Start-End: 81-740
agtactggatgtgacagcaggcagaggagcacttagcagcttattcagtgtccgattctgattccggcaaggatccaagcatggaatgctgccgtcgggcaactcctggcacactgctcctctttctggctttcctgctcctgagttccaggaccgcacgctccgaggaggaccgggacggcctatgggatgcctggggcccatggagtgaatgctcacgcacctgcgggggtggggcctcctactctctgaggcgctgcctgagcagcaagagctgtgaaggaagaaatatccgatacagaacatgcagtaatgtggactgcccaccagaagcaggtgatttccgagctcagcaatgctcagctcataatgatgtcaagcaccatggccagttttatgaatggcttcctgtgtctaatgaccctgacaacccatgttcactcaagtgccaagccaaaggaacaaccctggttgttgaactagcacctaaggtcttagatggtacgcgttgctatacagaatctttggatatgtgcatcagtggtttatgccaaattgttggctgcgatcaccagctgggaagcaccgtcaaggaagataactgtggggtctgcaacggagatgggtccacctgccggctggtccgagggcagtataaatcccagctctccgcaaccaaatgtaagacacacagagatgggcgacctttggacttgttgacttatcctctcctggcttaggtctggccccactaaacagccagggaacaacacctccaccaaaacgataatgaacctgaaaatgtagaaggcttcatgctctggcatgtgaattagcttaggtgggacaagtcaggttaccagctgcagtcccaaagaggaagcctgtccttctgaggcacatcaggagtgaaccagacatggggctacaa

SEQ ID NO: 104776 - DNA, 1163 bp, Homo sapiens
  Payload ID: 577
  Gene Symbol: ADAMTSL1
  Gene Name: ADAMTS-like 1
  ENST ID: ENST00000388710
  CDS Start-End: 100-927
gccaaagcctggtagaagatgtccctgtagagcagccccagggaagggggattcaagaagctataaatgcctctgggctcacctgaatgtgtttgactgatgagtggggttttttgttttttttttttcttcctaggagtgcctgaagctgaagtcacttggttcaggaataaaagcaaactgggctccccgcaccatctgcacgaaggctccttgctgctcacaaacgtgtcctcctcggatcagggcctgtactcctgcagggcggccaatcttcatggagagctgactgagagcacccagctgctgatcctagatcccccccaagtccccacacagttggaagacatcagggccttgctcgctgccactggaccgaaccttccttcagtgctgacgtctcctctgggaacacagctggtcctggatcctgggaattctgctctccttggctgccccatcaaaggtcaccctgtccctaatatcacctggtttcatggtggtcagccaattgtcactgccacaggactgacgcatcacatcttggcagctggacagatccttcaagttgcaaaccttagcggtgggtctcaaggggaattcagctgccttgctcagaatgaggcaggggtgctcatgcagaaggcatctttagtgatccaagtgcaatgggccttgcatcgggcctcacctagctgtgcaacacagacaagtcttctgccagacacgggatggcatcaccttaccatcagagcagtgcagtgctcttccgaggcctgtgagcacccagaactgctggtcagaggcctgcagtgtacactggagagtcagcctgtggaccctgtgcacagctacctgtggcaactacggcttccagtcccggcgtgtggagtgtgtgcatgcccgcaccaacaaggcagtgcctgagcacctgtgctcctgggggccccggcctgccaactggcagcgctgcaacatcaccccatgtgaaaacatggagtgcagagacaccaccaggtactgcgagaaggtgaaacagctgaaactctgccaactcagccagtttaaatctcgctgctgtggaacttgtggcaaagcgtgaagatagggtgtggggaaaaactctaccctggccacacgaaggactcacgcaaccacctcgg

SEQ ID NO: 104777 - DNA, 824 bp, Homo sapiens
  Payload ID: 577
  Gene Symbol: ADAMTSL1
  Gene Name: ADAMTS-like 1
  ENST ID: ENST00000431052
  CDS Start-End: 90-647
gttagcaccagtactggatgtgacagcaggcagaggagcacttagcagcttattcagtgtccgattctgattccggcaaggatccaagcatggaatgctgccgtcgggcaactcctggcacactgctcctctttctggctttcctgctcctgagttccaggaccgcacgctccgaggaggaccgggacggcctatgggatgcctggggcccatggagtgaatgctcacgcacctgcgggggtggggcctcctactctctgaggcgctgcctgagcagcaagagctgtgaaggaagaaatatccgatacagaacatgcagtaatgtggactgcccaccagaagcaggtgatttccgagctcagcaatgctcagctcataatgatgtcaagcaccatggccagttttatgaatggcttcctgtgtctaatgaccctgacaacccatgttcactcaagtgccaagccaaaggaacaaccctggttgttgaactagcacctaaggtcttagatggtacgcgttgctatacagaatctttggatatgtgcatcagtggtttatgccaagtaagtgctgatttgttctcattcaacttgtccagagggtttcaatgtctttgtgtaaatggtttacatagtctcactctctgaatcactcatctttacactttttagagtttgtaaatggtgaaagatttgaaaattaaggtatgatttcagtgaaaagtaccaagtgttgtattgtgcgaaggaaaagtagactagagttatttttctttccttgagtgtcacttgaatataaaagaataaaaatttttgaatagtgtt

SEQ ID NO: 104778 - DNA, 3039 bp, Homo sapiens
  Payload ID: 577
  Gene Symbol: ADAMTSL1
  Gene Name: ADAMTS-like 1
  Uniprot ID: Q8N6G6
  ENST ID: ENST00000542621
  CDS Start-End: 110-886
atttaatctggccaaagcctggtagaagatgtccctgtagagcagccccagggaagggggattcaagaagctataaatgcctctgggctcacctgaatgtgtttgactgatgagtggggttttttgttttttttttttcttcctaggagtgcctgaagctgaagtcacttggttcaggaataaaagcaaactgggctccccgcaccatctgcacgaaggctccttgctgctcacaaacgtgtcctcctcggatcagggcctgtactcctgcagggcggccaatcttcatggagagctgactgagagcacccagctgctgatcctagatcccccccaagtccccacacagttggaagacatcagggccttgctcgctgccactggaccgaaccttccttcagtgctgacgtctcctctgggaacacagctggtcctggatcctgggaattctgctctccttggctgccccatcaaaggtcaccctgtccctaatatcacctggtttcatggtggtcagccaattgtcactgccacaggactgacgcatcacatcttggcagctggacagatccttcaagttgcaaaccttagcggtgggtctcaaggggaattcagctgccttgctcagaatgaggcaggggtgctcatgcagaaggcatctttagtgatccaagattactggtggtctgtggacagactggcaacctgctcagcctcctgtggtaaccggggggttcagcagccccgcttgaggtgcctgctgaacagcacggaggtcaaccctgcccactgcgcagggaaggttcgccctgcggtgcagcccatcgcgtgcaaccggagagactgcccttctcgtgcaatgggccttgcatcgggcctcacctagctgtgcaacacagacaagtcttctgccagacacgggatggcatcaccttaccatcagagcagtgcagtgctcttccgaggcctgtgagcacccagaactgctggtcagaggcctgcagtgtacactggagagtcagcctgtggaccctgtgcacagctacctgtggcaactacggcttccagtcccggcgtgtggagtgtgtgcatgcccgcaccaacaaggcagtgcctgagcacctgtgctcctgggggccccggcctgccaactggcagcgctgcaacatcaccccatgtgaaaacatggagtgcagagacaccaccaggtactgcgagaaggtgaaacagctgaaactctgccaactcagccagtttaaatctcgctgctgtggaacttgtggcaaagcgtgaagatagggtgtggggaaaaactctaccctggccacacgaaggactcacgcaaccacctcggacagaacctaagctttcttcattttatttatttatttccccctccccactccacacacacccttccaacctcctccacctccaccttcaagcataaggacgtccgcgtgttttctctttcagttagctggaggacaggatgttgggaaaggaaaggacagatgtctaaaggaggttgcagagcaggccaggcagacagtgggggctcccttgaagagcttcctccctcccaaacctgggtctcaaagacctagaaagaggcaggcacagcccctgcggacagcagggagccagaaggtttgtagcctattggtgcaaacattggacaaattcctgtgtctttcctagaagcgcactatcacaaacacaggagtgttttgctcctttgtctcctcttccccatctatgtccctttagtcacagttaggacaaatggggaggggacaccatgctgaggcagaaactagcccagaactcactcagttcttctagtgggtgagtgcagagagagaagaactcagatcaccagtagggagaggtaaaaaagcaaacaaagcaggctctaaggcacacaacattgcagaaaatgaggaagggaggggagggaagggacagaagcaaaaaggagcctgtggtgttccccagtggggcagggtgagcaggggcttccaggctgcatgaggctcatggaccagctctgatcccatgcatgtgcgcatgctcagagccctgctgcccacaacagagcactgcgctgcgtgggagtccccacttcccaagctatcagagtcaacgtcctgcctgtgcagctgcagcaaagccagtgagaggtgggtctcgccatgcagtaaggccaccctggcacctctttatctaaatccgaagtcccctagccccgcactaactaactgctgctgtgggccagggccattttgagcatgaatggcccaggttttttgccttctaggacctttgctgctccaccgaagggccagggactatggttaacttatcaacatcaacccattaactagtcactgtgccagagagtatctgtcaggctgtcaggttgtagcaacctcttcattccagagctggcccagggaccggggtgggacaatgggtttatgcgtgtccacagtacaccctccctctcccagcctccaccccagggtctgcaggtcctccggcatgtagtatttatctagcaaggcggggtggtggaggcagcaccctggcaaagcagctcacacactgcagccacactcatcagctgtggtgaggcggctggagcaaagtcaaagtcatgcagcaaaatgaaaactctgggactcttcggcaaaatcctcattaagccgagcagctttggccaagtaatttttgcctccttccctcgcgtggcctgagtttaggagcaagggtggccagagtcccttacccacagataagcctcccctcatgaaatgccactcaccccgggctaccattgacatcagggctgcatttccagccagcctggaagtaaaatttgagaggaagacaatattaatctgtgtccccacctagtgagctgtggacaggtttaagttgggtctccttcttcttcaccacaaaaacaggctctaagaaatcatgttactaaaaaatcagtgtaaagtctgtttaaaataaaaaagaatgttttct

SEQ ID NO: 104779 - DNA, 4068 bp, Homo sapiens
  Payload ID: 578
  Gene Symbol: ADAMTSL2
  Gene Name: ADAMTS-like 2
  Uniprot ID: Q86TH1
  ENST ID: ENST00000354484
  CDS Start-End: 558-3413
cactggcggagaaaatccccttcttttttttctctctctttttttctttttgagacggaatctcactctttcacccagactggagggcagcggcgagatctcggctcactgcaacctccacctcccaggttcaagcaattctcctgcctcagccttccgagtagctgggattacaggtgcccgccaccacgcccagctaatttttgtatttttagtagagacaggattttaccatgttggccatgctggtctcaaactcctgacctcgtgtgatccccctgcttcagcctctcaaactgctgggattataggcatgagccactgcgcctggccaacaatccccttctaaaggcaggtggtgtctccagcaccagggccatacggctgcaacacccctacaagtgccgggtctgccagacaaccacgaccaactagtcccagataaccttgaggcctgggcactggctgggccccgagggctcttcccaaagcgtaccctggtcatctggaagaggatcggagctggcctggtggtgacagtggccttgcttcctaggatggatggcagatggcaatgttcctgctgggcctggttcctgctggttctggcagttgtagctggggacacagtgtcaaccgggtccacggacaacagcccaacatccaatagcctggaggggggcaccgacgccacggccttctggtggggggagtggaccaagtggacggcgtgttcccgcagttgcgggggtggggtgacatcccaggagcggcactgcctgcagcagaggaggaagtccgtcccgggccccgggaacaggacctgcacgggcacgtccaagcggtaccagctctgcagagtgcaggagtgtccgccggacgggaggagcttccgcgaggagcagtgcgtctccttcaactcccacgtgtacaacgggcggacgcaccagtggaagcctctgtacccggatgactatgtccacatctccagcaaaccgtgtgacctgcactgtaccaccgtggacggccagcggcagctcatggtccccgcccgcgacggcacatcctgcaagctcactgacctgcgaggggtttgcgtgtctggaaaatgtgagcccatcggctgtgacggggtgcttttctccacccacacactggacaagtgtggcatctgccagggggacggtagcagctgcacccacgtgacgggcaactatcgcaaggggaatgcccaccttggttactctctggtgacccacatcccggctggtgcccgagacatccagattgtagagaggaagaagtccgctgacgtgctagctcttgcagacgaagctggctactacttcttcaacggcaactacaaggtggacagccccaagaacttcaacatcgcaggcacggtggtcaagtacaggcggcccatggatgtctatgagaccggaatcgagtacatcgtggcacaggggcccaccaaccagggcctgaatgtcatggtgtggaaccagaacggcaaaagcccctccatcaccttcgagtacacgctgctgcagccgccacacgagagccgcccccagcccatctactatggcttctccgagagcgctgagagccagggcctggacggggccgggctgatgggcttcgtcccgcacaacggctccctctacggccaggcctcctcagagcggctgggcctggacaaccggctgttcggccacccgggcctggacatggagctgggccccagccagggccaggagaccaacgaggtgtgcgagcaggccggcggcggggcctgcgaggggccccccaggggcaagggcttccgagaccgcaacgtcacggggactcctctcaccggggacaaggatgacgaagaggttgacacccacttcgcctcccaggagttcttctcggctaacgccatctctgaccagctgctgggcgcaggctctgacttgaaggacttcaccctcaatgagactgtgaacagcatctttgcacagggcgccccaaggagctccctggccgagagcttcttcgtggattatgaggagaacgagggggctggcccttacctgctcaacgggtcctacctggagctgagcagcgacagggttgccaacagctcctccgaggccccattccccaacgttagcaccagcctgctcacctcggccgggaacaggactcacaaggccaggaccaggcccaaggcgcgcaagcaaggcgtgagtcccgcggacatgtaccggtggaagctctcgtcccacgagccctgcagtgccacctgcaccacaggggtcatgtctgcgtacgccatgtgtgtccgctatgatggcgtcgaggtggatgacagctactgtgacgccctgacccgtcccgagcctgtccacgagttctgcgctgggagggagtgccagcccaggtgggagacgagcagctggagcgagtgttcgcgcacctgcggagagggctaccagttccgcgtcgtgcgctgctggaagatgctctcgcccggcttcgacagctccgtgtacagcgacctgtgcgaggcagccgaggccgtgcggcccgaggaacgcaagacctgccggaaccccgcctgcgggccccagtgggagatgtcggagtggtccgagtgcactgccaagtgtggggagcgcagtgtggtgaccagggacatccgctgctcggaggatgagaagctgtgtgaccccaacaccaggcctgtaggggagaagaactgcacgggcccgccctgtgaccggcagtggaccgtctccgactggggaccgtgcagtggaagctgcgggcaaggccgcaccatcaggcacgtgtactgcaagaccagcgacggacgggtagtacctgagtcccagtgccagatggagaccaagcctctggccatccacccctgtggggacaaaaactgtcccgcccactggctggcccaggactgggagcggtgcaacaccacctgcgggcgcggggtcaagaagcggctggtgctctgcatggagctggccaacgggaagccgcagacgcgcagtggccccgagtgcgggctcgccaagaagcctcccgaggagagcacgtgtttcgagaggccctgcttcaagtggtacaccagcccctggtcagagtgcaccaagacctgcggggtgggcgtgaggatgcgagacgtcaagtgctaccaggggaccgacatcgtccgtggttgcgatccgttggtgaagcccgttggcagacaggcctgtgatctgcagccctgccccacggagcccccagatgacagctgccaggaccagccaggcaccaactgtgccctggccatcaaagtgaacctctgcgggcactggtactacagcaaggcgtgctgccgctcctgcaggcccccccactcctaggcccggcagctgcagccccttccagatgaagaccaagcgcccctcctggggctgctgcagcttctggggcctccacagacccccctcctgcggggcacgctggcctaagagacgtggcactgagcctcggctgtcgagaggggacttcccacggcccgtggacctttgtgctcctggggcagagcctccggcacccagtggcctcccccagacagagccacccctgccgtgggaacctgtccgtgttcctgcgtggatcctgtgtttgtggctcccactccccagccccccagcagcccccagccgaggggcccagggcccacagccagcggtggaggtgtcttgctccgggcccgtagcccacgccctctctgggtggcagggccttctgaaggaaacttgcaggcgagcccaacgtggtggggggccttcctccctcagaggccatggggtgagaggggctcaggcagccaaggaggcccaggcgtgctccctcttatggagcccctcccatggagctctcttcccgccgcactttctaccccgggcagaggcgcttgcccacgggacgtttggggatggacctcggcccccgcccctgcagtcagcgtcagtgctcatctacgttaataaagtggtcctatttatggcggca

SEQ ID NO: 104780 - DNA, 3725 bp, Homo sapiens
  Payload ID: 578
  Gene Symbol: ADAMTSL2
  Gene Name: ADAMTS-like 2
  Uniprot ID: Q86TH1
  ENST ID: ENST00000393060
  CDS Start-End: 216-3071
cgccgtctgccctccgcagcgctcgcccctttctctgggaggacaacctgctgacccgaagccagggtctgccagacaaccacgaccaactagtcccagataaccttgaggcctgggcactggctgggccccgagggctcttcccaaagcgtaccctggtcatctggaagaggatcggagctggcctggtggtgacagtggccttgcttcctaggatggatggcagatggcaatgttcctgctgggcctggttcctgctggttctggcagttgtagctggggacacagtgtcaaccgggtccacggacaacagcccaacatccaatagcctggaggggggcaccgacgccacggccttctggtggggggagtggaccaagtggacggcgtgttcccgcagttgcgggggtggggtgacatcccaggagcggcactgcctgcagcagaggaggaagtccgtcccgggccccgggaacaggacctgcacgggcacgtccaagcggtaccagctctgcagagtgcaggagtgtccgccggacgggaggagcttccgcgaggagcagtgcgtctccttcaactcccacgtgtacaacgggcggacgcaccagtggaagcctctgtacccggatgactatgtccacatctccagcaaaccgtgtgacctgcactgtaccaccgtggacggccagcggcagctcatggtccccgcccgcgacggcacatcctgcaagctcactgacctgcgaggggtttgcgtgtctggaaaatgtgagcccatcggctgtgacggggtgcttttctccacccacacactggacaagtgtggcatctgccagggggacggtagcagctgcacccacgtgacgggcaactatcgcaaggggaatgcccaccttggttactctctggtgacccacatcccggctggtgcccgagacatccagattgtagagaggaagaagtccgctgacgtgctagctcttgcagacgaagctggctactacttcttcaacggcaactacaaggtggacagccccaagaacttcaacatcgcaggcacggtggtcaagtacaggcggcccatggatgtctatgagaccggaatcgagtacatcgtggcacaggggcccaccaaccagggcctgaatgtcatggtgtggaaccagaacggcaaaagcccctccatcaccttcgagtacacgctgctgcagccgccacacgagagccgcccccagcccatctactatggcttctccgagagcgctgagagccagggcctggacggggccgggctgatgggcttcgtcccgcacaacggctccctctacggccaggcctcctcagagcggctgggcctggacaaccggctgttcggccacccgggcctggacatggagctgggccccagccagggccaggagaccaacgaggtgtgcgagcaggccggcggcggggcctgcgaggggccccccaggggcaagggcttccgagaccgcaacgtcacggggactcctctcaccggggacaaggatgacgaagaggttgacacccacttcgcctcccaggagttcttctcggctaacgccatctctgaccagctgctgggcgcaggctctgacttgaaggacttcaccctcaatgagactgtgaacagcatctttgcacagggcgccccaaggagctccctggccgagagcttcttcgtggattatgaggagaacgagggggctggcccttacctgctcaacgggtcctacctggagctgagcagcgacagggttgccaacagctcctccgaggccccattccccaacgttagcaccagcctgctcacctcggccgggaacaggactcacaaggccaggaccaggcccaaggcgcgcaagcaaggcgtgagtcccgcggacatgtaccggtggaagctctcgtcccacgagccctgcagtgccacctgcaccacaggggtcatgtctgcgtacgccatgtgtgtccgctatgatggcgtcgaggtggatgacagctactgtgacgccctgacccgtcccgagcctgtccacgagttctgcgctgggagggagtgccagcccaggtgggagacgagcagctggagcgagtgttcgcgcacctgcggagagggctaccagttccgcgtcgtgcgctgctggaagatgctctcgcccggcttcgacagctccgtgtacagcgacctgtgcgaggcagccgaggccgtgcggcccgaggaacgcaagacctgccggaaccccgcctgcgggccccagtgggagatgtcggagtggtccgagtgcactgccaagtgtggggagcgcagtgtggtgaccagggacatccgctgctcggaggatgagaagctgtgtgaccccaacaccaggcctgtaggggagaagaactgcacgggcccgccctgtgaccggcagtggaccgtctccgactggggaccgtgcagtggaagctgcgggcaaggccgcaccatcaggcacgtgtactgcaagaccagcgacggacgggtagtacctgagtcccagtgccagatggagaccaagcctctggccatccacccctgtggggacaaaaactgtcccgcccactggctggcccaggactgggagcggtgcaacaccacctgcgggcgcggggtcaagaagcggctggtgctctgcatggagctggccaacgggaagccgcagacgcgcagtggccccgagtgcgggctcgccaagaagcctcccgaggagagcacgtgtttcgagaggccctgcttcaagtggtacaccagcccctggtcagagtgcaccaagacctgcggggtgggcgtgaggatgcgagacgtcaagtgctaccaggggaccgacatcgtccgtggttgcgatccgttggtgaagcccgttggcagacaggcctgtgatctgcagccctgccccacggagcccccagatgacagctgccaggaccagccaggcaccaactgtgccctggccatcaaagtgaacctctgcgggcactggtactacagcaaggcgtgctgccgctcctgcaggcccccccactcctaggcccggcagctgcagccccttccagatgaagaccaagcgcccctcctggggctgctgcagcttctggggcctccacagacccccctcctgcggggcacgctggcctaagagacgtggcactgagcctcggctgtcgagaggggacttcccacggcccgtggacctttgtgctcctggggcagagcctccggcacccagtggcctcccccagacagagccacccctgccgtgggaacctgtccgtgttcctgcgtggatcctgtgtttgtggctcccactccccagccccccagcagcccccagccgaggggcccagggcccacagccagcggtggaggtgtcttgctccgggcccgtagcccacgccctctctgggtggcagggccttctgaaggaaacttgcaggcgagcccaacgtggtggggggccttcctccctcagaggccatggggtgagaggggctcaggcagccaaggaggcccaggcgtgctccctcttatggagcccctcccatggagctctcttcccgccgcactttctaccccgggcagaggcgcttgcccacgggacgtttggggatggacctcggcccccgcccctgcagtcagcgtcagtgctcatctacgttaataaagtggtcctatttatggcggc

SEQ ID NO: 104781 - DNA, 4270 bp, Homo sapiens
  Payload ID: 578
  Gene Symbol: ADAMTSL2
  Gene Name: ADAMTS-like 2
  ENST ID: ENST00000393061
  CDS Start-End: 433-3615
acgggacacctcatacatcccagaccccattctcaggagccccagggacagggcccgctctggaggcagaagccggacaggcggggctggggctttgccaccgccagcctccccggtaacctcaggccagcggctgctccgtctggacacccgacatgtggcccccagttctggacccgggaagaaggcctccctgctcgccgctcctgggccgccgccgccggcagcagccaacaggcagctgggccggcctggccgggctccagaggcgcagagcgggttaaagtgtgcgccaggccggccggcgcgggcgggggagcggcctggtgggaagtgtgagtgttcctccccgtctgcctgacagctataaaggcggccgccggcgcagagccgccactgggctgcgcccctcccgggaaccccctctcttggatgctctttgaagtgggagagggaggcggcgcgggggaggaggggaaggggagagggaggccgggccgcagcctctgcactcacgccgcccccgcacgcacagcgcacctggcgccgtctgccctccgcagcgctcgcccctttctctgggaggacaacctgctgacccgaagccagggtctgccagacaaccacgaccaactagtcccagataaccttgaggcctgggcactggctgggccccgagggctcttcccaaagcgtaccctggtcatctggaagaggatcggagctggcctggtggtgacagtggccttgcttcctaggatggatggcagatggcaatgttcctgctgggcctggttcctgctggttctggcagttgtagctggggacacagtgtcaaccgggtccacggacaacagcccaacatccaatagcctggaggggggcaccgacgccacggccttctggtggggggagtggaccaagtggacggcgtgttcccgcagttgcgggggtggggtgacatcccaggagcggcactgcctgcagcagaggaggaagtccgtcccgggccccgggaacaggacctgcacgggcacgtccaagcggtaccagctctgcagagtgcaggagtgtccgccggacgggaggagcttccgcgaggagcagtgcgtctccttcaactcccacgtgtacaacgggcggacgcaccagtggaagcctctgtacccggatgactatgtccacatctccagcaaaccgtgtgacctgcactgtaccaccgtggacggccagcggcagctcatggtccccgcccgcgacggcacatcctgcaagctcactgacctgcgaggggtttgcgtgtctggaaaatgtgagcccatcggctgtgacggggtgcttttctccacccacacactggacaagtgtggcatctgccagggggacggtagcagctgcacccacgtgacgggcaactatcgcaaggggaatgcccaccttggttactctctggtgacccacatcccggctggtgcccgagacatccagattgtagagaggaagaagtccgctgacgtgctagctcttgcagacgaagctggctactacttcttcaacggcaactacaaggtggacagccccaagaacttcaacatcgcaggcacggtggtcaagtacaggcggcccatggatgtctatgagaccggaatcgagtacatcgtggcacaggggcccaccaaccagggcctgaatgtcatggtgtggaaccagaacggcaaaagcccctccatcaccttcgagtacacgctgctgcagccgccacacgagagccgcccccagcccatctactatggcttctccgagagcgctgagagccagggcctggacggggccgggctgatgggcttcgtcccgcacaacggctccctctacggccaggcctcctcagagcggctgggcctggacaaccggctgttcggccacccgggcctggacatggagctgggccccagccagggccaggagaccaacgaggtgtgcgagcaggccggcggcggggcctgcgaggggccccccaggggcaagggcttccgagaccgcaacgtcacggggactcctctcaccggggacaaggatgacgaagaggttgacacccacttcgcctcccaggagttcttctcggctaacgccatctctgaccagctgctgggcgcaggctctgacttgaaggacttcaccctcaatgagactgtgaacagcatctttgcacagggcgccccaaggagctccctggccgagagcttcttcgtggattatgaggagaacgagggggctggcccttacctgctcaacgggtcctacctggagctgagcagcgacagggttgccaacagctcctccgaggccccattccccaacgttagcaccagcctgctcacctcggccgggaacaggactcacaaggccaggaccaggcccaaggcgcgcaagcaaggcgtgagtcccgcggacatgtaccggtggaagctctcgtcccacgagccctgcagtgccacctgcaccacaggggtcatgtctgcgtacgccatgtgtgtccgctatgatggcgtcgaggtggatgacagctactgtgacgccctgacccgtcccgagcctgtccacgagttctgcgctgggagggagtgccagcccaggtgggagacgagcagctggagcgagtgttcgcgcacctgcggagagggctaccagttccgcgtcgtgcgctgctggaagatgctctcgcccggcttcgacagctccgtgtacagcgacctgtgcgaggcagccgaggccgtgcggcccgaggaacgcaagacctgccggaaccccgcctgcgggccccagtgggagatgtcggagtggtccgagtgcactgccaagtgtggggagcgcagtgtggtgaccagggacatccgctgctcggaggatgagaagctgtgtgaccccaacaccaggcctgtaggggagaagaactgcacgggcccgccctgtgaccggcagtggaccgtctccgactggggaccgtgcagtggaagctgcgggcaaggccgcaccatcaggcacgtgtactgcaagaccagcgacggacgggtagtacctgagtcccagtgccagatggagaccaagcctctggccatccacccctgtggggacaaaaactgtcccgcccactggctggcccaggactgggagcggtgcaacaccacctgcgggcgcggggtcaagaagcggctggtgctctgcatggagctggccaacgggaagccgcagacgcgcagtggccccgagtgcgggctcgccaagaagcctcccgaggagagcacgtgtttcgagaggccctgcttcaagtggtacaccagcccctggtcagagtgcaccaagacctgcggggtgggcgtgaggatgcgagacgtcaagtgctaccaggggaccgacatcgtccgtggttgcgatccgttggtgaagcccgttggcagacaggcctgtgatctgcagccctgccccacggagcccccagatgacagctgccaggaccagccaggcaccaactgtgccctggccatcaaagtgaacctctgcgggcactggtactacagcaaggcgtgctgccgctcctgcaggcccccccactcctaggcccggcagctgcagccccttccagatgaagaccaagcgcccctcctggggctgctgcagcttctggggcctccacagacccccctcctgcggggcacgctggcctaagagacgtggcactgagcctcggctgtcgagaggggacttcccacggcccgtggacctttgtgctcctggggcagagcctccggcacccagtggcctcccccagacagagccacccctgccgtgggaacctgtccgtgttcctgcgtggatcctgtgtttgtggctcccactccccagccccccagcagcccccagccgaggggcccagggcccacagccagcggtggaggtgtcttgctccgggcccgtagcccacgccctctctgggtggcagggccttctgaaggaaacttgcaggcgagcccaacgtggtggggggccttcctccctcagaggccatggggtgagaggggctcaggcagccaaggaggcccaggcgtgctccctcttatggagcccctcccatggagctctcttcccgccgcactttctaccccgggcagaggcgcttgcccacgggacgtttggggatggacctcggcccccgcccctgcagtcagcgtcagtgctcatctacgttaataaagtggtcctatttatggcggca

SEQ ID NO: 104782 - DNA, 7336 bp, Homo sapiens
  Payload ID: 579
  Gene Symbol: ADAMTSL3
  Gene Name: ADAMTS-like 3
  Uniprot ID: P82987
  ENST ID: ENST00000286744
  CDS Start-End: 225-5300
cccagccccatttaacttcgcggcggcggcggcgactgcggcgccgcgggctggaggccggcgtcggggaaggtcctggtgccggattccgcacgaggtgttgacgggcggcttctgccaacttctccccagcgcgcgccgagcccgcgcggccccggggctgcacgtcccagatacttctgcggcgcaaggctacaactgagacccggaggagactagaccccatggcttcctggacgagcccctggtgggtgctgatagggatggtcttcatgcactctcccctcccgcagaccacagctgagaaatctcctggagcctatttccttcccgagtttgcactttctcctcagggaagttttctggaagacacaacaggggagcagttcctcacttatcgctatgatgaccagacctcaagaaacactcgttcagatgaagacaaagatggcaactgggatgcttggggcgactggagtgactgctcccggacctgtgggggaggagcatcatattctctgcggagatgtttgactggaaggaattgtgaagggcagaacattcggtacaagacatgcagcaatcatgactgccctccagatgcagaagatttcagagcccagcagtgctcagcctacaatgatgtccagtatcaggggcattactatgaatggcttccacgatataatgatcctgctgccccgtgtgcactcaagtgtcatgcacaaggacaaaacttggtggtggagctggcacctaaggtactggatggaactcgttgcaacacggactccttggacatgtgtatcagtggcatctgtcaggcagtgggctgcgatcggcaactgggaagcaatgccaaggaggacaactgtggagtctgtgccggcgatggctccacctgcaggcttgtacggggacaatcaaagtcacacgtttctcctgaaaaaagagaagaaaatgtaattgctgttcctttgggaagtcgaagtgtgagaattacagtgaaaggacctgcccacctctttattgaatcaaaaacacttcaaggaagcaaaggagaacacagctttaacagccccggcgtctttctcgtagaaaacacaacagtggaatttcagaggggctccgagaggcaaacttttaagattccaggacctctgatggctgatttcatcttcaagaccaggtacactgcagccaaagacagcgtggttcagttcttcttttaccagcccatcagtcatcagtggagacaaactgacttctttccctgcactgtgacgtgtggaggaggttatcagctcaattctgctgaatgtgtggatatccgcttgaagagggtagttcctgaccattattgtcactactaccctgaaaatgtaaaaccaaaaccaaaactgaaggaatgcagcatggatccctgcccatcaagtgatggatttaaagagataatgccctatgaccacttccaacctcttcctcgctgggaacataatccttggactgcatgttccgtgtcctgtggaggagggattcagagacggagctttgtgtgtgtagaggaatccatgcatggagagatattgcaggtggaagaatggaagtgcatgtacgcacccaaacccaaggttatgcaaacttgtaatctgtttgattgccccaagtggattgccatggagtggtctcagtgcacagtgacttgtggccgagggttacggtaccgggttgttctgtgtattaaccaccgcggagagcatgttgggggctgcaatccacaactgaagttacacatcaaagaagaatgtgtcattcccatcccgtgttataaaccaaaagaaaaaagtccagtggaagcaaaattgccttggctgaaacaagcacaagaactagaagagaccagaatagcaacagaagaaccaacgttcattccagaaccctggtcagcctgcagtaccacgtgtgggccgggtgtgcaggtccgtgaggtgaagtgccgtgtgctcctcacattcacgcagactgagactgagctgcccgaggaagagtgtgaaggccccaagctgcccaccgaacggccctgcctcctggaagcatgtgatgagagcccggcctcccgagagctagacatccctctccctgaggacagtgagacgacttacgactgggagtacgctgggttcaccccttgcacagcaacatgcgtgggaggccatcaagaagccatagcagtgtgcttacatatccagacccagcagacagtcaatgacagcttgtgtgatatggtccaccgtcctccagccatgagccaggcctgtaacacagagccctgtccccccaggtggcatgtgggctcttgggggccctgctcagctacctgtggagttggaattcagacccgagatgtgtactgcctgcacccaggggagacccctgcccctcctgaggagtgccgagatgaaaagccccatgctttacaagcatgcaatcagtttgactgccctcctggctggcacattgaagaatggcagcagtgttccaggacttgtggcgggggaactcagaacagaagagtcacctgtcggcagctgctaacggatggcagctttttgaatctctcagatgaattgtgccaaggacccaaggcatcgtctcacaagtcctgtgccaggacagactgtcctccacatttagctgtgggagactggtcgaagtgttctgtcagttgtggtgttggaatccagagaagaaagcaggtgtgtcaaaggctggcagccaaaggtcggcgcatccccctcagtgagatgatgtgcagggatctaccagggctccctcttgtaagatcttgccagatgcctgagtgcagtaaaatcaaatcagagatgaagacaaaacttggtgagcagggtccgcagatcctcagtgtccagagagtctacattcagacaagggaagagaagcgtattaacctgaccattggtagcagagcctatttgctgcccaacacatccgtgattattaagtgccccgtgcgacgattccagaaatctctgatccagtgggagaaggatggccgttgcctgcagaactccaaacggcttggcatcaccaagtcaggctcactaaaaatccatggtcttgctgcccccgacatcggcgtgtaccggtgcattgcaggctctgcacaggaaacagttgtgctcaagctcattggtactgacaaccggctcatcgcacgcccagccctcagggagcctatgagggaatatcctgggatggaccacagcgaagccaatagtttgggagtcacatggcacaaaatgaggcaaatgtggaataacaaaaatgacctttatctggatgatgaccacattagtaaccagcctttcttgagagctctgttaggccactgcagcaattctgcaggaagcaccaactcctgggagttgaagaataagcagtttgaagcagcagttaaacaaggagcatatagcatggatacagcccagtttgatgagctgataagaaacatgagtcagctcatggaaaccggagaggtcagcgatgatcttgcgtcccagctgatatatcagctggtggccgaattagccaaggcacagccaacacacatgcagtggcggggcatccaggaagagacacctcctgctgctcagctcagaggggaaacagggagtgtgtcccaaagctcgcatgcaaaaaactcaggcaagctgacattcaagccgaaaggacctgttctcatgaggcaaagccaacctccctcaatttcatttaataaaacaataaattccaggattggaaatacagtatacattacaaaaaggacagaggtcatcaatatactgtgtgaccttattacccccagtgaggccacatatacatggaccaaggatggaaccttgttacagccctcagtaaaaataattttggatggaactgggaagatacagatacagaatcctacaaggaaagaacaaggcatatatgaatgttctgtagctaatcatcttggttcagatgtggaaagttcttctgtgctgtatgcagaggcacctgtcatcttgtctgttgaaagaaatatcaccaaaccagagcacaaccatctgtctgttgtggttggaggcatcgtggaggcagcccttggagcaaacgtgacaatccgatgtcctgtaaaaggtgtccctcagcctaatataacttggttgaagagaggaggatctctgagtggcaatgtttccttgcttttcaatggatccctgttgttgcagaatgtttcccttgaaaatgaaggaacctacgtctgcatagccaccaatgctcttggaaaggcagtggcaacatctgtactccacttgctggaacgaagatggccagagagtagaatcgtatttctgcaaggacataaaaagtacattctccaggcaaccaacactagaaccaacagcaatgacccaacaggagaacccccgcctcaagagcctttttgggagcctggtaactggtcacattgttctgccacctgtggtcatttgggagcccgcattcagagaccccagtgtgtgatggccaatgggcaggaagtgagtgaggccctgtgtgatcacctccagaagccactggctgggtttgagccctgtaacatccgggactgcccagcgaggtggttcacaagtgtgtggtcacagtgctctgtgtcttgcggtgaaggataccacagtcggcaggtgacgtgcaagcggacaaaagccaatggaactgtgcaggtggtgtctccaagagcatgtgcccctaaagaccggcctctgggaagaaaaccatgttttggtcatccatgtgttcagtgggaaccagggaaccggtgtcctggacgttgcatgggccgtgctgtgaggatgcagcagcgtcacacagcttgtcaacacaacagctctgactccaactgtgatgacagaaagagacccaccttaagaaggaactgcacatcaggggcctgtgatgtgtgttggcacacaggcccttggaagccctgtacagcagcctgtggcaggggtttccagtctcggaaagtcgactgtatccacacaaggagttgcaaacctgtggccaagagacactgtgtacagaaaaagaaaccaatttcctggcggcactgtcttgggccctcctgtgatagagactgcacagacacaactcactactgtatgtttgtaaaacatcttaatttgtgttctctagaccgctacaaacaaaggtgctgccagtcatgtcaagagggataaacctttggaggggtcatgatgctgctgtgaagataaaagtagaatataaaagctcttttccccatgtcgctgattcaaaaacatgtatttcttaaaagactagattctatggatcaaacagaggttgatgcaaaaacaccactgttaaggtgtaaagtgaaattttccaatggtagttttatattccaattttttaaaatgatgtattcaaggatgaacaaaatactatagcatgcatgccactgcacttgggacctcatcatgtcagttgaatcgagaaatcaccaagattatgagtgcatcctcacgtgctgcctctttcctgtgatatgtagactagcacagagtggtacatcctaaaaacttgggaaacacagcaacccatgacttcctcttctctcaagttgcaggttttcaacagttttataaggtatttgcattttagaagctctggccagtagttgttaagatgttggcattaatggcattttcatagatccttggtttagtctgtgaaaaagaaaccatctctctggataggctgtcacactgactgacctaagggttcatggaagcatggcatcttgtccttgcttttagaacacccatggaagaaaacacagagtagatattgctgtcatttatacaactacagaaatttatctatgacctaatgaggcatctcggaagtcaaagaagagggaaagttaaccttttctactgatttcgtagtatattcagagctttcttttaagagctgtgaatgaaactttttctaagcactattctattgcacacaaacagaaaaccaaagccttattagacctaatttatgcataaagtagtattcctgagaactttattttggaaaatttataagaaagtaatccaaataagaaacacgatagttgaaaataatttttatagtaaataattgttttgggctgatttttcagtaaatccaaagtgacttaggttagaagttacactaaggaccaggggttggaatcagaatttagtttaagatttgaggaaaagggtaagggttagtttcagttttaggattagagctagaattgggttaggtgagaaagaaagttaaggttaaggctagagttgtctttaagggttagggttaggaccaggttaggtcagggttggattgggtttagattggggccagtgctggtgttagtgatagtgtcaggatggaggttaggtttggagtaagcgttgttgctgaagtgagttcaggctagcattaaattgtaagttctgaagctgatttggttatggggtctttcccctgtatactaccagttgtgtctttagatggcacacaagtccaaataagtggtcatacttctttattcagggtctcagctgcctgtacacctgctgcctacatcttcttggcaacaaagttacctgccacaggctctgctgagcctagttcctggtcagtaataactgaacagtgcattttggctttggatgtgtctgtggacaagcttgctgagtttctctaccatattctgagcacacggtctcttttgttctaacttcagcttcactgacactgggttgagcactactgtatgtggagggtttggtgattgggaatggatgggggacagtgaggaggacacaccagcccattagttgttaatcatcaatcacatctgattgttgaaggttattaaattaaaagaaagatcatttgtaacatactctttgtatatatttattatatgaaaggtgcaatattttattttgtacagtatgtaataaagacatgggacatatatttttcttattaacaaaatttcatattaaattgcttcactttgtatttaaagttaaaagttactatttttcatttgctattgtactttcattgttgtcattcaattgacattcctgtgtactgtattttactactgtttttataacatgagagttaatgtttctgtttcatgatccttatgtaattcagaaataaatttactttgattattcagtggcatccttataaa

SEQ ID NO: 104783 - DNA, 6873 bp, Homo sapiens
  Payload ID: 579
  Gene Symbol: ADAMTSL3
  Gene Name: ADAMTS-like 3
  Uniprot ID: P82987
  ENST ID: ENST00000567476
  CDS Start-End: 223-5271
cagccccatttaacttcgcggcggcggcggcgactgcggcgccgcgggctggaggccggcgtcggggaaggtcctggtgccggattccgcacgaggtgttgacgggcggcttctgccaacttctccccagcgcgcgccgagcccgcgcggccccggggctgcacgtcccagatacttctgcggcgcaaggctacaactgagacccggaggagactagaccccatggcttcctggacgagcccctggtgggtgctgatagggatggtcttcatgcactctcccctcccgcagaccacagctgagaaatctcctggagcctatttccttcccgagtttgcactttctcctcagggaagttttctggaagacacaacaggggagcagttcctcacttatcgctatgatgaccagacctcaagaaacactcgttcagatgaagacaaagatggcaactgggatgcttggggcgactggagtgactgctcccggacctgtgggggaggagcatcatattctctgcggagatgtttgactggaaggaattgtgaagggcagaacattcggtacaagacatgcagcaatcatgactgccctccagatgcagaagatttcagagcccagcagtgctcagcctacaatgatgtccagtatcaggggcattactatgaatggcttccacgatataatgatcctgctgccccgtgtgcactcaagtgtcatgcacaaggacaaaacttggtggtggagctggcacctaaggtactggatggaactcgttgcaacacggactccttggacatgtgtatcagtggcatctgtcaggcagtgggctgcgatcggcaactgggaagcaatgccaaggaggacaactgtggagtctgtgccggcgatggctccacctgcaggcttgtacggggacaatcaaagtcacacgtttctcctgaaaaaagagaagaaaatgtaattgctgttcctttgggaagtcgaagtgtgagaattacagtgaaaggacctgcccacctctttattgaatcaaaaacacttcaaggaagcaaaggagaacacagctttaacagccccggcgtctttctcgtagaaaacacaacagtggaatttcagaggggctccgagaggcaaacttttaagattccaggacctctgatggctgatttcatcttcaagaccaggtacactgcagccaaagacagcgtggttcagttcttcttttaccagcccatcagtcatcagtggagacaaactgacttctttccctgcactgtgacgtgtggaggaggttatcagctcaattctgctgaatgtgtggatatccgcttgaagagggtagttcctgaccattattgtcactactaccctgaaaatgtaaaaccaaaaccaaaactgaaggaatgcagcatggatccctgcccatcaagtgatggatttaaagagataatgccctatgaccacttccaacctcttcctcgctgggaacataatccttggactgcatgttccgtgtcctgtggaggagggattcagagacggagctttgtgtgtgtagaggaatccatgcatggagagatattgcaggtggaagaatggaagtgcatgtacgcacccaaacccaaggttatgcaaacttgtaatctgtttgattgccccaagtggattgccatggagtggtctcagtgcacagtgacttgtggccgagggttacggtaccgggttgttctgtgtattaaccaccgcggagagcatgttgggggctgcaatccacaactgaagttacacatcaaagaagaatgtgtcattcccatcccgtgttataaaccaaaagaaaaaagtccagtggaagcaaaattgccttggctgaaacaagcacaagaactagaagagaccagaatagcaacagaagaaccaacgttcattccagaaccctggtcagcctgcagtaccacgtgtgggccgggtgtgcaggtccgtgaggtgaagtgccgtgtgctcctcacattcacgcagactgagactgagctgcccgaggaagagtgtgaaggccccaagctgcccaccgaacggccctgcctcctggaagcatgtgatgagagcccggcctcccgagagctagacatccctctccctgaggacagtgagacgacttacgactgggagtacgctgggttcaccccttgcacagcaacatgcgtgggaggccatcaagaagccatagcagtgtgcttacatatccagacccagcagacagtcaatgacagcttgtgtgatatggtccaccgtcctccagccatgagccaggcctgtaacacagagccctgtccccccaggtggcatgtgggctcttgggggccctgctcagctacctgtggagttggaattcagacccgagatgtgtactgcctgcacccaggggagacccctgcccctcctgaggagtgccgagatgaaaagccccatgctttacaagcatgcaatcagtttgactgccctcctggctggcacattgaagaatggcagcagtgttccaggacttgtggcgggggaactcagaacagaagagtcacctgtcggcagctgctaacggatggcagctttttgaatctctcagatgaattgtgccaaggacccaaggcatcgtctcacaagtcctgtgccaggacagactgtcctccacatttagctgtgggagactggtcgaagtgttctgtcagttgtggtgttggaatccagagaagaaagcaggtgtgtcaaaggctggcagccaaaggtcggcgcatccccctcagtgagatgatgtgcagggatctaccagggctccctcttgtaagatcttgccagatgcctgagtgcagtaaaatcaaatcagagatgaagacaaaacttggtgagcagggtccgcagatcctcagtgtccagagagtctacattcagacaagggaagagaagcgtattaacctgaccattggtagcagagcctatttgctgcccaacacatccgtgattattaagtgccccgtgcgacgattccagaaatctctgatccagtgggagaaggatggccgttgcctgcagaactccaaacggcttggcatcaccaagtcaggctcactaaaaatccatggtcttgctgcccccgacatcggcgtgtaccggtgcattgcaggctctgcacaggaaacagttgtgctcaagctcattggtactgacaaccggctcatcgcacgcccagccctcagggagcctatgagggaatatcctgggatggaccacagcgaagccaatagtttgggagtcacatggcacaaaatgaggcaaatgtggaataacaaaaatgacctttatctggatgatgaccacattagtaaccagcctttcttgagagctctgttaggccactgcagcaattctgcaggaagcaccaactcctgggagttgaagaataagcagtttgaagcagcagttaaacaaggagcatatagcatggatacagcccagtttgatgagctgataagaaacatgagtcagctcatggaaaccggagaggtcagcgatgatcttgcgtcccagctgatatatcagctggtggccgaattagccaaggcacagccaacacacatgcagtggcggggcatccaggaagagacacctcctgctgctcagctcagaggggaaacagggagtgtgtcccaaagctcgcatgcaaaaaactcaggcaagctgacattcaagccgaaaggacctgttctcatgaggcaaagccaacctccctcaatttcatttaataaaacaataaattccaggattggaaatacagtatacattacaaaaaggacagaggtcatcaatatactgtgtgaccttattacccccagtgaggccacatatacatggaccaaggatggaaccttgttacagccctcagtaaaaataattttggatggaactgggaagatacagatacagaatcctacaaggaaagaacaaggcatatatgaatgttctgtagctaatcatcttggttcagatgtggaaagttcttctgtgctgtatgcagaggcacctgtcatcttgtctgttgaaagaaatatcaccaaaccagagcacaaccatctgtctgttgtggttggaggcatcgtggaggcagcccttggagcaaacgtgacaatccgatgtcctgtaaaaggtgtccctcagcctaatataacttggttgaagagaggaggatctctgagtggcaatgtttccttgcttttcaatggatccctgttgttgcagaatgtttcccttgaaaatgaaggaacctacgtctgcatagccaccaatgctcttggaaaggcagtggcaacatctgtactccacttgctggaacgaagatggccagagagtagaatcgtatttctgcaaggacataaaaagtacattctccaggcaaccaacactagaaccaacagcaatgacccaacaggagaacccccgcctcaagagcctttttgggagcctggtaactggtcacattgttctgccacctgtggtcatttgggagcccgcattcagagaccccagtgtgtgatggccaatgggcaggaagtgagtgaggccctgtgtgatcacctccagaagccactggctgggtttgagccctgtaacatccgggactgcccagcgaggtggttcacaagtgtgtggtcacagtgctctgtgtcttgcggtgaaggataccacagtcggcaggtgacgtgcaagcggacaaaagccaatggaactgtgcaggtggtgtctccaagagcatgtgcccctaaagaccggcctctgggaagaaaaccatgttttggtcatccatgtgttcagtgggaaccagggaaccggtgtcctggacgttgcatgggccgtgctgtgaggatgcagcagcgtcacacagcttgtcaacacaacagctctgactccaactgtgatgacagaaagagacccaccttaagaaggaactgcacatcaggggcctgtgatgtgtgttggcacacaggcccttggaagccctgtacagcagcctgtggcaggggtttccagtctcggaaagtcgactgtatccacacaaggagttgcaaacctgtggccaagagacactgtgtacagaaaaagaaaccaatttcctggcggcactgtcttgggccctcctgtgatagtacgtacacctcccagaccgctacaaacaaaggtgctgccagtcatgtcaagagggataaacctttggaggggtcatgatgctgctgtgaagataaaagtagaatataaaagctcttttccccatgtcgctgattcaaaaacatgtatttcttaaaagactagattctatggatcaaacagaggttgatgcaaaaacaccactgttaaggtgtaaagtgaaattttccaatggtagttttatattccaattttttaaaatgatgtattcaaggatgaacaaaatactatagcatgcatgccactgcacttgggacctcatcatgtcagttgaatcgagaaatcaccaagattatgagtgcatcctcacgtgctgcctctttcctgtgatatgtagactagcacagagtggtacatcctaaaaacttgggaaacacagcaacccatgacttcctcttctctcaagttgcaggttttcaacagttttataaggtatttgcattttagaagctctggccagtagttgttaagatgttggcattaatggcattttcatagatccttggtttagtctgtgaaaaagaaaccatctctctggataggctgtcacactgactgacctaagggttcatggaagcatggcatcttgtccttgcttttagaacacccatggaagaaaacacagagtagatattgctgtcatttatacaactacagaaatttatctatgacctaatgaggcatctcggaagtcaaagaagagggaaagttaaccttttctactgatttcgtagtatattcagagctttcttttaagagctgtgaatgaaactttttctaagcactattctattgcacacaaacagaaaaccaaagccttattagacctaatttatgcataaagtagtattcctgagaactttattttggaaaatttataagaaagtaatccaaataagaaacacgatagttgaaaataatttttatagtaaataattgttttgggctgatttttcagtaaatccaaagtgacttaggttagaagttacactaaggaccaggggttggaatcagaatttagtttaagatttgaggaaaagggtaagggttagtttcagttttaggattagagctagaattgggttaggtgagaaagaaagttaaggttaaggctagagttgtctttaagggttagggttaggaccaggttaggtcagggttggattgggtttagattggggccagtgctggtgttagtgatagtgtcaggatggaggttaggtttggagtaagcgttgttgctgaagtgagttcaggctagcattaaattgtaagttctgaagctgatttggttatggggtctttcccctgtatactaccagttgtgtctttagatggcacacaagtccaaataagtggtcatacttctttattcagggtctcagctgcctgtacacctgctgcctacatcttcttggcaacaaagttacctgccacaggctctgctgagcctagttcctggtcagtaataactgaacagtgcattttggctttggatgtgtctgtggacaagcttgctgagtttctctaccatattctgagcacacggtctcttttgttctaacttcagcttcactgacactgggttgagcactactgtatgtggagggtttggtgattggg

SEQ ID NO: 104784 - DNA, 4250 bp, Homo sapiens
  Payload ID: 580
  Gene Symbol: ADAMTSL4
  Gene Name: ADAMTS-like 4
  Uniprot ID: Q6UY14
  ENST ID: ENST00000271643
  CDS Start-End: 290-3514
ggagttgcggccgaggcggccgtgaccggagcgcggctcaggggccccagtggccgccgcggagcgaggttgcctggagagagcgcctgggcgcagaagggttaacgggccaccgggggctcgcagagcaggagggtgctctcggacggtgtgtcccccactgcactcctgaacttggaggacagggtcgccgcgagggacgcagagagcaccctccacgcccagatgcctgcgtagtttttgtgaccagtccgctcctgcctccccctggggcagtagagggggagcgatggagaactggactggcaggccctggctgtatctgctgctgcttctgtccctccctcagctctgcttggatcaggaggtgttgtccggacactctcttcagacacctacagaggagggccagggccccgaaggtgtctggggaccttgggtccagtgggcctcttgctcccagccctgcggggtgggggtgcagcgcaggagccggacatgtcagctccctacagtgcagctccacccgagtctgcccctccctccccggcccccaagacatccagaagccctcctcccccggggccagggtcccagaccccagacttctccagaaaccctccccttgtacaggacacagtctcggggaaggggtggcccacttcgaggtcccgcttcccacctagggagagaggagacccaggagattcgagcggccaggaggtcccggcttcgagaccccatcaagccaggaatgttcggttatgggagagtgccctttgcattgccactgcaccggaaccgcaggcaccctcggagcccacccagatctgagctgtccctgatctcttctagaggggaagaggctattccgtcccctactccaagagcagagccattctccgcaaacggcagcccccaaactgagctccctcccacagaactgtctgtccacaccccatccccccaagcagaacctctaagccctgaaactgctcagacagaggtggcccccagaaccaggcctgcccccctacggcatcaccccagagcccaggcctctggcacagagcccccctcacccacgcactccttaggagaaggtggcttcttccgtgcatcccctcagccacgaaggccaagttcccagggttgggccagtccccaggtagcagggagacgccctgatccttttccttcggtccctcggggccgaggccagcagggccaagggccttggggaacgggggggactcctcacgggccccgcctggagcctgaccctcagcacccgggcgcctggctgcccctgctgagcaacggcccccatgccagctccctctggagcctctttgctcccagtagccctattccaagatgttctggggagagtgaacagctaagagcctgcagccaagcgccctgcccccctgagcagccagacccccgggccctgcagtgcgcagcctttaactcccaggaattcatgggccagctgtatcagtgggagcccttcactgaagtccagggctcccagcgctgtgaactgaactgccggccccgtggcttccgcttctatgtccgtcacactgaaaaggtccaggatgggaccctgtgtcagcctggagcccctgacatctgtgtggctggacgctgtctgagccccggctgtgatgggatccttggctctggcaggcgtcctgatggctgtggagtctgtgggggtgatgattctacctgtcgccttgtttcggggaacctcactgaccgagggggccccctgggctatcagaagatcttgtggattccagcgggagccttgcggctccagattgcccagctccggcctagctccaactacctggcacttcgtggccctgggggccggtccatcatcaatgggaactgggctgtggatccccctgggtcctacagggccggcgggaccgtctttcgatataaccgtcctcccagggaggagggcaaaggggagagtctgtcggctgaaggccccaccacccagcctgtggatgtctatatgatctttcaggaggaaaacccaggcgttttttatcagtatgtcatctcttcacctcctccaatccttgagaaccccaccccagagccccctgtcccccagcttcagccggagattctgagggtggagcccccacttgctccggcaccccgcccagcccggaccccaggcaccctccagcgtcaggtgcggatcccccagatgcccgccccgccccatcccaggacacccctggggtctccagctgcgtactggaaacgagtgggacactctgcatgctcagcgtcctgcgggaaaggtgtctggcgccccattttcctctgcatctcccgtgagtcgggagaggaactggatgaacgcagctgtgccgcgggtgccaggcccccagcctcccctgaaccctgccacggcaccccatgccccccatactgggaggctggcgagtggacatcctgcagccgctcctgtggccccggcacccagcaccgccagctgcagtgccggcaggaatttggggggggtggctcctcggtgcccccggagcgctgtggacatctcccccggcccaacatcacccagtcttgccagctgcgcctctgtggccattgggaagttggctctccttggagccagtgctccgtgcggtgcggccggggccagagaagccggcaggttcgctgtgttgggaacaatggtgatgaagtgagcgagcaggagtgtgcgtcaggccccccgcagccccccagcagagaggcctgtgacatggggccctgtactactgcctggttccacagcgactggagctccaagtgctcagccgagtgtgggacgggaatccagcggcgctctgtggtctgccttgggagtggggcagccctcgggccaggccagggggaagcaggagcaggaactgggcagagctgtccaacaggaagccggccccctgacatgcgcgcctgcagcctggggccctgtgagagaacttggcgctggtacacagggccctggggtgagtgctcctccgaatgtggctctggcacacagcgtagagacatcatctgtgtatccaaactggggacggagttcaacgtgacttctccgagcaactgttctcacctccccaggccccctgccctgcagccctgtcaagggcaggcctgccaggaccgatggttttccacgccctggagcccatgttctcgctcctgccaagggggaacgcagacacgggaggtccagtgcctgagcaccaaccagaccctcagcacccgatgccctcctcaactgcggccctccaggaagcgcccctgtaacagccaaccctgcagccagcgccctgatgatcaatgcaaggacagctctccacattgccccctggtggtacaggcccggctctgcgtctacccctactacacagccacctgttgccgctcttgcgcacatgtcctggagcggtctccccaggatccctcctgaaaggggtccggggcaccttcacggttttctgtgccaccatcggtcacccattgatcggcccactctgaaccccctggctctccagcctgtcccagtctcagcagggatgtcctccaggtgacagagggtggcaaggtgactgacacaaagtgactttcagggctgtggtcaggcccatgtggtggtgtgatgggtgtgtgcacatatgcctcaggtgtgcttttgggactgcatggatatgtgtgtgctcaaacgtgtatcacttttcaaaaagaggttacacagactgagaaggacaagacctgtttccttgagactttcctaggtggaaaggaaagcaagtctgcagttccttgctaatctgagctacttagagtgtggtctccccaccaactccagttttgtgccctaagcctcatttctcatgttcagacctcacatcttctaagccgccctgtgtctctgaccccttctcatttgcctagtatctctgcccctgcctccctaattagctagggctggggtcagccactgccaatcctgccttactcaggaaggcaggaggaaagagactgcctctccagagcaaggcccagctgggcagagggtgaaaaagagaaatgtgagcatccgctcccccaccaccccgcccagcccctagccccactccctgcctcctgaaatggttcccacccagaactaatttattttttattaaagatggtcatgacaaatg

SEQ ID NO: 104785 - DNA, 4167 bp, Homo sapiens
  Payload ID: 580
  Gene Symbol: ADAMTSL4
  Gene Name: ADAMTS-like 4
  Uniprot ID: Q6UY14
  ENST ID: ENST00000369038
  CDS Start-End: 202-3426
gaggatcctaaagggatggaccagtttcaccccctcctccatattctctgagctgtcctcccagccccaagctctctggacactggagaggtaaccaccaggcttctgtccctgcagagagcaccctccacgcccagatgcctgcgtagtttttgtgaccagtccgctcctgcctccccctggggcagtagagggggagcgatggagaactggactggcaggccctggctgtatctgctgctgcttctgtccctccctcagctctgcttggatcaggaggtgttgtccggacactctcttcagacacctacagaggagggccagggccccgaaggtgtctggggaccttgggtccagtgggcctcttgctcccagccctgcggggtgggggtgcagcgcaggagccggacatgtcagctccctacagtgcagctccacccgagtctgcccctccctccccggcccccaagacatccagaagccctcctcccccggggccagggtcccagaccccagacttctccagaaaccctccccttgtacaggacacagtctcggggaaggggtggcccacttcgaggtcccgcttcccacctagggagagaggagacccaggagattcgagcggccaggaggtcccggcttcgagaccccatcaagccaggaatgttcggttatgggagagtgccctttgcattgccactgcaccggaaccgcaggcaccctcggagcccacccagatctgagctgtccctgatctcttctagaggggaagaggctattccgtcccctactccaagagcagagccattctccgcaaacggcagcccccaaactgagctccctcccacagaactgtctgtccacaccccatccccccaagcagaacctctaagccctgaaactgctcagacagaggtggcccccagaaccaggcctgcccccctacggcatcaccccagagcccaggcctctggcacagagcccccctcacccacgcactccttaggagaaggtggcttcttccgtgcatcccctcagccacgaaggccaagttcccagggttgggccagtccccaggtagcagggagacgccctgatccttttccttcggtccctcggggccgaggccagcagggccaagggccttggggaacgggggggactcctcacgggccccgcctggagcctgaccctcagcacccgggcgcctggctgcccctgctgagcaacggcccccatgccagctccctctggagcctctttgctcccagtagccctattccaagatgttctggggagagtgaacagctaagagcctgcagccaagcgccctgcccccctgagcagccagacccccgggccctgcagtgcgcagcctttaactcccaggaattcatgggccagctgtatcagtgggagcccttcactgaagtccagggctcccagcgctgtgaactgaactgccggccccgtggcttccgcttctatgtccgtcacactgaaaaggtccaggatgggaccctgtgtcagcctggagcccctgacatctgtgtggctggacgctgtctgagccccggctgtgatgggatccttggctctggcaggcgtcctgatggctgtggagtctgtgggggtgatgattctacctgtcgccttgtttcggggaacctcactgaccgagggggccccctgggctatcagaagatcttgtggattccagcgggagccttgcggctccagattgcccagctccggcctagctccaactacctggcacttcgtggccctgggggccggtccatcatcaatgggaactgggctgtggatccccctgggtcctacagggccggcgggaccgtctttcgatataaccgtcctcccagggaggagggcaaaggggagagtctgtcggctgaaggccccaccacccagcctgtggatgtctatatgatctttcaggaggaaaacccaggcgttttttatcagtatgtcatctcttcacctcctccaatccttgagaaccccaccccagagccccctgtcccccagcttcagccggagattctgagggtggagcccccacttgctccggcaccccgcccagcccggaccccaggcaccctccagcgtcaggtgcggatcccccagatgcccgccccgccccatcccaggacacccctggggtctccagctgcgtactggaaacgagtgggacactctgcatgctcagcgtcctgcgggaaaggtgtctggcgccccattttcctctgcatctcccgtgagtcgggagaggaactggatgaacgcagctgtgccgcgggtgccaggcccccagcctcccctgaaccctgccacggcaccccatgccccccatactgggaggctggcgagtggacatcctgcagccgctcctgtggccccggcacccagcaccgccagctgcagtgccggcaggaatttggggggggtggctcctcggtgcccccggagcgctgtggacatctcccccggcccaacatcacccagtcttgccagctgcgcctctgtggccattgggaagttggctctccttggagccagtgctccgtgcggtgcggccggggccagagaagccggcaggttcgctgtgttgggaacaatggtgatgaagtgagcgagcaggagtgtgcgtcaggccccccgcagccccccagcagagaggcctgtgacatggggccctgtactactgcctggttccacagcgactggagctccaagtgctcagccgagtgtgggacgggaatccagcggcgctctgtggtctgccttgggagtggggcagccctcgggccaggccagggggaagcaggagcaggaactgggcagagctgtccaacaggaagccggccccctgacatgcgcgcctgcagcctggggccctgtgagagaacttggcgctggtacacagggccctggggtgagtgctcctccgaatgtggctctggcacacagcgtagagacatcatctgtgtatccaaactggggacggagttcaacgtgacttctccgagcaactgttctcacctccccaggccccctgccctgcagccctgtcaagggcaggcctgccaggaccgatggttttccacgccctggagcccatgttctcgctcctgccaagggggaacgcagacacgggaggtccagtgcctgagcaccaaccagaccctcagcacccgatgccctcctcaactgcggccctccaggaagcgcccctgtaacagccaaccctgcagccagcgccctgatgatcaatgcaaggacagctctccacattgccccctggtggtacaggcccggctctgcgtctacccctactacacagccacctgttgccgctcttgcgcacatgtcctggagcggtctccccaggatccctcctgaaaggggtccggggcaccttcacggttttctgtgccaccatcggtcacccattgatcggcccactctgaaccccctggctctccagcctgtcccagtctcagcagggatgtcctccaggtgacagagggtggcaaggtgactgacacaaagtgactttcagggctgtggtcaggcccatgtggtggtgtgatgggtgtgtgcacatatgcctcaggtgtgcttttgggactgcatggatatgtgtgtgctcaaacgtgtatcacttttcaaaaagaggttacacagactgagaaggacaagacctgtttccttgagactttcctaggtggaaaggaaagcaagtctgcagttccttgctaatctgagctacttagagtgtggtctccccaccaactccagttttgtgccctaagcctcatttctcatgttcagacctcacatcttctaagccgccctgtgtctctgaccccttctcatttgcctagtatctctgcccctgcctccctaattagctagggctggggtcagccactgccaatcctgccttactcaggaaggcaggaggaaagagactgcctctccagagcaaggcccagctgggcagagggtgaaaaagagaaatgtgagcatccgctcccccaccaccccgcccagcccctagccccactccctgcctcctgaaatggttcccacccagaactaatttattttttattaaagatggtcatgacaaatgagaaa

SEQ ID NO: 104786 - DNA, 4319 bp, Homo sapiens
  Payload ID: 580
  Gene Symbol: ADAMTSL4
  Gene Name: ADAMTS-like 4
  Uniprot ID: Q6UY14
  ENST ID: ENST00000369039
  CDS Start-End: 290-3583
ggagttgcggccgaggcggccgtgaccggagcgcggctcaggggccccagtggccgccgcggagcgaggttgcctggagagagcgcctgggcgcagaagggttaacgggccaccgggggctcgcagagcaggagggtgctctcggacggtgtgtcccccactgcactcctgaacttggaggacagggtcgccgcgagggacgcagagagcaccctccacgcccagatgcctgcgtagtttttgtgaccagtccgctcctgcctccccctggggcagtagagggggagcgatggagaactggactggcaggccctggctgtatctgctgctgcttctgtccctccctcagctctgcttggatcaggaggtgttgtccggacactctcttcagacacctacagaggagggccagggccccgaaggtgtctggggaccttgggtccagtgggcctcttgctcccagccctgcggggtgggggtgcagcgcaggagccggacatgtcagctccctacagtgcagctccacccgagtctgcccctccctccccggcccccaagacatccagaagccctcctcccccggggccagggtcccagaccccagacttctccagaaaccctccccttgtacaggacacagtctcggggaaggggtggcccacttcgaggtcccgcttcccacctagggagagaggagacccaggagattcgagcggccaggaggtcccggcttcgagaccccatcaagccaggaatgttcggttatgggagagtgccctttgcattgccactgcaccggaaccgcaggcaccctcggagcccacccagatctgagctgtccctgatctcttctagaggggaagaggctattccgtcccctactccaagagcagagccattctccgcaaacggcagcccccaaactgagctccctcccacagaactgtctgtccacaccccatccccccaagcagaacctctaagccctgaaactgctcagacagaggtggcccccagaaccaggcctgcccccctacggcatcaccccagagcccaggcctctggcacagagcccccctcacccacgcactccttaggagaaggtggcttcttccgtgcatcccctcagccacgaaggccaagttcccagggttgggccagtccccaggtagcagggagacgccctgatccttttccttcggtccctcggggccgaggccagcagggccaagggccttggggaacgggggggactcctcacgggccccgcctggagcctgaccctcagcacccgggcgcctggctgcccctgctgagcaacggcccccatgccagctccctctggagcctctttgctcccagtagccctattccaagatgttctggggagagtgaacagctaagagcctgcagccaagcgccctgcccccctgagcagccagacccccgggccctgcagtgcgcagcctttaactcccaggaattcatgggccagctgtatcagtgggagcccttcactgaagcccctctgcttcccctgcgccatgccttctttcttctccctggggctgggtcaggagacagcacaggtgtccagggctcccagcgctgtgaactgaactgccggccccgtggcttccgcttctatgtccgtcacactgaaaaggtccaggatgggaccctgtgtcagcctggagcccctgacatctgtgtggctggacgctgtctgagccccggctgtgatgggatccttggctctggcaggcgtcctgatggctgtggagtctgtgggggtgatgattctacctgtcgccttgtttcggggaacctcactgaccgagggggccccctgggctatcagaagatcttgtggattccagcgggagccttgcggctccagattgcccagctccggcctagctccaactacctggcacttcgtggccctgggggccggtccatcatcaatgggaactgggctgtggatccccctgggtcctacagggccggcgggaccgtctttcgatataaccgtcctcccagggaggagggcaaaggggagagtctgtcggctgaaggccccaccacccagcctgtggatgtctatatgatctttcaggaggaaaacccaggcgttttttatcagtatgtcatctcttcacctcctccaatccttgagaaccccaccccagagccccctgtcccccagcttcagccggagattctgagggtggagcccccacttgctccggcaccccgcccagcccggaccccaggcaccctccagcgtcaggtgcggatcccccagatgcccgccccgccccatcccaggacacccctggggtctccagctgcgtactggaaacgagtgggacactctgcatgctcagcgtcctgcgggaaaggtgtctggcgccccattttcctctgcatctcccgtgagtcgggagaggaactggatgaacgcagctgtgccgcgggtgccaggcccccagcctcccctgaaccctgccacggcaccccatgccccccatactgggaggctggcgagtggacatcctgcagccgctcctgtggccccggcacccagcaccgccagctgcagtgccggcaggaatttggggggggtggctcctcggtgcccccggagcgctgtggacatctcccccggcccaacatcacccagtcttgccagctgcgcctctgtggccattgggaagttggctctccttggagccagtgctccgtgcggtgcggccggggccagagaagccggcaggttcgctgtgttgggaacaatggtgatgaagtgagcgagcaggagtgtgcgtcaggccccccgcagccccccagcagagaggcctgtgacatggggccctgtactactgcctggttccacagcgactggagctccaagtgctcagccgagtgtgggacgggaatccagcggcgctctgtggtctgccttgggagtggggcagccctcgggccaggccagggggaagcaggagcaggaactgggcagagctgtccaacaggaagccggccccctgacatgcgcgcctgcagcctggggccctgtgagagaacttggcgctggtacacagggccctggggtgagtgctcctccgaatgtggctctggcacacagcgtagagacatcatctgtgtatccaaactggggacggagttcaacgtgacttctccgagcaactgttctcacctccccaggccccctgccctgcagccctgtcaagggcaggcctgccaggaccgatggttttccacgccctggagcccatgttctcgctcctgccaagggggaacgcagacacgggaggtccagtgcctgagcaccaaccagaccctcagcacccgatgccctcctcaactgcggccctccaggaagcgcccctgtaacagccaaccctgcagccagcgccctgatgatcaatgcaaggacagctctccacattgccccctggtggtacaggcccggctctgcgtctacccctactacacagccacctgttgccgctcttgcgcacatgtcctggagcggtctccccaggatccctcctgaaaggggtccggggcaccttcacggttttctgtgccaccatcggtcacccattgatcggcccactctgaaccccctggctctccagcctgtcccagtctcagcagggatgtcctccaggtgacagagggtggcaaggtgactgacacaaagtgactttcagggctgtggtcaggcccatgtggtggtgtgatgggtgtgtgcacatatgcctcaggtgtgcttttgggactgcatggatatgtgtgtgctcaaacgtgtatcacttttcaaaaagaggttacacagactgagaaggacaagacctgtttccttgagactttcctaggtggaaaggaaagcaagtctgcagttccttgctaatctgagctacttagagtgtggtctccccaccaactccagttttgtgccctaagcctcatttctcatgttcagacctcacatcttctaagccgccctgtgtctctgaccccttctcatttgcctagtatctctgcccctgcctccctaattagctagggctggggtcagccactgccaatcctgccttactcaggaaggcaggaggaaagagactgcctctccagagcaaggcccagctgggcagagggtgaaaaagagaaatgtgagcatccgctcccccaccaccccgcccagcccctagccccactccctgcctcctgaaatggttcccacccagaactaatttattttttattaaagatggtcatgacaaatg

SEQ ID NO: 104787 - DNA, 2908 bp, Homo sapiens
  Payload ID: 580
  Gene Symbol: ADAMTSL4
  Gene Name: ADAMTS-like 4
  Uniprot ID: Q6UY14
  ENST ID: ENST00000369041
  CDS Start-End: 251-2884
aggggccccagtggccgccgcggagcgaggttgcctggagagagcgcctgggcgcagaagggttaacgggccaccgggggctcgcagagcaggagggtgctctcggacggtgtgtcccccactgcactcctgaacttggaggacagggtcgccgcgagggacgcagagagcaccctccacgcccagatgcctgcgtagtttttgtgaccagtccgctcctgcctccccctggggcagtagagggggagcgatggagaactggactggcaggccctggctgtatctgctgctgcttctgtccctccctcagctctgcttggatcaggaggtgttgtccggacactctcttcagacacctacagaggagggccagggccccgaaggtgtctggggaccttgggtccagtgggcctcttgctcccagccctgcggggtgggggtgcagcgcaggagccggacatgtcagctccctacagtgcagctccacccgagtctgcccctccctccccggcccccaagacatccagaagccctcctcccccggggccagggtcccagaccccagacttctccagaaaccctccccttgtacaggacacagtctcggggaaggggtggcccacttcgaggtcccgcttcccacctagggagagaggagacccaggagattcgagcggccaggaggtcccggcttcgagaccccatcaagccaggaatgttcggttatgggagagtgccctttgcattgccactgcaccggaaccgcaggcaccctcggagcccacccagatctgagctgtccctgatctcttctagaggggaagaggctattccgtcccctactccaagagcagagccattctccgcaaacggcagcccccaaactgagctccctcccacagaactgtctgtccacaccccatccccccaagcagaacctctaagccctgaaactgctcagacagaggtggcccccagaaccaggcctgcccccctacggcatcaccccagagcccaggcctctggcacagagcccccctcacccacgcactccttaggagaaggtggcttcttccgtgcatcccctcagccacgaaggccaagttcccagggttgggccagtccccaggtagcagggagacgccctgatccttttccttcggtccctcggggccgaggccagcagggccaagggccttggggaacgggggggactcctcacgggccccgcctggagcctgaccctcagcacccgggcgcctggctgcccctgctgagcaacggcccccatgccagctccctctggagcctctttgctcccagtagccctattccaagatgttctggggagagtgaacagctaagagcctgcagccaagcgccctgcccccctgagcagccagacccccgggccctgcagtgcgcagcctttaactcccaggaattcatgggccagctgtatcagtgggagcccttcactgaagtccagggctcccagcgctgtgaactgaactgccggccccgtggcttccgcttctatgtccgtcacactgaaaaggtccaggatgggaccctgtgtcagcctggagcccctgacatctgtgtggctggacgctgtctgagccccggctgtgatgggatccttggctctggcaggcgtcctgatggctgtggagtctgtgggggtgatgattctacctgtcgccttgtttcggggaacctcactgaccgagggggccccctgggctatcagaagatcttgtggattccagcgggagccttgcggctccagattgcccagctccggcctagctccaactacctggcacttcgtggccctgggggccggtccatcatcaatgggaactgggctgtggatccccctgggtcctacagggccggcgggaccgtctttcgatataaccgtcctcccagggaggagggcaaaggggagagtctgtcggctgaaggccccaccacccagcctgtggatgtctatatgatctttcaggaggaaaacccaggcgttttttatcagtatgtcatctcttcacctcctccaatccttgagaaccccaccccagagccccctgtcccccagcttcagccggagattctgagggtggagcccccacttgctccggcaccccgcccagcccggaccccaggcaccctccagcgtcaggtgcggatcccccagatgcccgccccgccccatcccaggacacccctggggtctccagctgcgtactggaaacgagtgggacactctgcatgctcagcgtcctgcgggaaaggtgtctggcgccccattttcctctgcatctcccgtgagtcgggagaggaactggatgaacgcagctgtgccgcgggtgccaggcccccagcctcccctgaaccctgccacggcaccccatgccccccatactgggaggctggcgagtggacatcctgcagccgctcctgtggccccggcacccagcaccgccagctgcagtgccggcaggaatttggggggggtggctcctcggtgcccccggagcgctgtggacatctcccccggcccaacatcacccagtcttgccagctgcgcctctgtggccattgggaagttggctctccttggagccagtgctccgtgcggtgcggccggggccagagaagccggcaggttcgctgtgttgggaacaatggtgatgaagtgagcgagcaggagtgtgcgtcaggccccccgcagccccccagcagagaggcctgtgacatggggccctgtactactgcctggttccacagcgactggagctccaaggtgagcccggaacccccagccatatcctgcatcctgggtaaccacgcccaggacacctcagcctttccagcatagctcaataaacttgtattgatcaag

SEQ ID NO: 104788 - DNA, 2783 bp, Homo sapiens
  Payload ID: 580
  Gene Symbol: ADAMTSL4
  Gene Name: ADAMTS-like 4
  ENST ID: ENST00000622417
  CDS Start-End: 209-1516
gcctttaactcccaggaattcatgggccagctgtatcagtgggagcccttcactgaagtccagggctcccagcgctgtgaactgaactgccggccccgtggcttccgcttctatgtccgtcacactgaaaaggtccaggatgggaccctgtgtcagcctggagcccctgacatctgtgtggctggacgctgtctgagccccggctgtgatgggatccttggctctggcaggcgtcctgatggctgtggagtctgtgggggtgatgattctacctgtcgccttgtttcggggaacctcactgaccgagggggccccctgggctatcagaagatcttgtggattccagcgggagccttgcggctccagattgcccagctccggcctagctccaactacctggcacttcgtggccctgggggccggtccaatcaatgggaactgggctgtggatccccctgggtcctacagggccggcgggaccgtctttcgatataaccgtcctcccagggaggagggcaaaggggagagtctgtcggctgaaggccccaccacccagcctgtggatgtctatatgatctttcaggaggaaaacccaggcgttttttatcagtatgtcatctcttcacctcctccaatccttgagaaccccaccccagagccccctgtcccccagcttcagccggagattctgagggtggagcccccacttgctccggcaccccgcccagcccggaccccaggcaccctccagcgtcaggtgcggatcccccagatgcccgccccgccccatcccaggacacccctggggtctccagctgcgtactggaaacgagtgggacactctgcatgctcagcgtcctgcgggaaaggtgtctggcgccccattttcctctgcatctcccgtgagtcgggagaggaactggatgaacgcagctgtgccgcgggtgccaggcccccagcctcccctgaaccctgccacggcaccccatgccccccatactgggaggctggcgagtggacatcctgcagccgctcctgtggccccggcacccagcaccgccagctgcagtgccggcaggaatttggggggggtggctcctcggtgcccccggagcgctgtggacatctcccccggcccaacatcacccagtcttgccagctgcgcctctgtggccattgggaagttggctctccttggagccagtgctccgtgcggtgcggccggggccagagaagccggcaggttcgctgtgttgggaacaatggtgatgaagtgagcgagcaggagtgtgcgtcaggccccccgcagccccccagcagagaggcctgtgacatggggccctgtactactgcctggttccacagcgactggagctccaagtgctcagccgagtgtgggacgggaatccagcggcgctctgtggtctgccttgggagtggggcagccctcgggccaggccagggggaagcaggagcaggaactgggcagagctgtccaacaggaagccggccctgacatgcgcgcctgcagcctggggccctgtgagagaacttggcgctggtacacagggccctggggtgagtgctcctccgaatgtggctctggcacacagcgtagagacatcatctgtgtatccaaactggggacggagttcaacgtgacttctccgagcaactgttctcacctccccaggccccctgccctgcagccctgtcaagggcaggcctgccaggaccgatggttttccacgccctggagcccatgttctcgctcctgccaagggggaacgcagacacgggaggtccagtgcctgagcaccaaccagaccctcagcacccgatgccctcctcaactgcggccctccaggaagcgcccctgtaacagccaaccctgcagccagcgccctgatgatcaatgcaaggacagctctccacattgccccctggtggtacaggcccggctctgcgtctacccctactacacagccacctgttgccgctcttgcgcacatgtcctggagcggtctccccaggatccctcctgaaaggggtccggggcaccttcacggttttctgtgccaccatcggtcacccattgatcggcccactctgaaccccctggctctccagcctgtcccagtctcagcagggatgtcctccaggtgacagagggtggcaaggtgactgacacaaagtgactttcagggctgtggtcaggcccatgtggtggtgtgatgggtgtgtgcacatatgcctcaggtgtgcttttgggactgcatggatatgtgtgtgctcaaacgtgtatcacttttcaaaaagaggttacacagactgagaaggacaagacctgtttccttgagactttcctaggtggaaaggaaagcaagtctgcagttccttgctaatctgagctacttagagtgtggtctccccaccaactccagttttgtgccctaagcctcatttctcatgttcagacctcacatcttctaagccgccctgtgtctctgaccccttctcatttgcctagtatctctgcccctgcctccctaattagctagggctggggtcagccactgccaatcctgccttactcaggaaggcaggaggaaagagactgcctctccagagcaaggcccagctgggcagagggtgaaaaagagaaatgtgagcatccgctcccccaccaccccgcccagcccctagccccactccctgcctcctgaaatggttcccacccagaactaatttattttttattaaagatggtcatgacaaatgag

SEQ ID NO: 104789 - DNA, 2857 bp, Homo sapiens
  Payload ID: 581
  Gene Symbol: ADAMTSL5
  Gene Name: ADAMTS-like 5
  ENST ID: ENST00000330475
  CDS Start-End: 445-1860
cgctcgcgtccgccgggcagtcccctgccgcagatccgcgcccgccgcgcgagggcgcccggggccgccgcccctcctgacccgggcctgggcgcgcctgcggaggccgcggtgggagggaccgtcccaggctccccaccccgcccagcaccttgggccccgccgcttccgctcgccctggggccgctcagggagccgggacgcgctgcctgggctccgcgcagccgatgacattctgagttcttcctctccataccgggctccacgtctcctgtcttctttacctgatccacaggacccctcaactttcctgtaagggaggctctattaccccgtttttcagagacgagaggtagggctcagagaggtttagttactttccaagatcacacagccagtcagggcagagccgggacacaaccctgtgtctctggcggtggctctatggactcggcccctctgttccccaggccccacctcttccagaacctcctgctcttcctgtgggccctgctgaactgtggtttgggggtcagtgctcagggtccgggcgagtggaccccgtgggtgtcctggacccgctgctccagctcctgcgggcgtggcgtctctgtgcgcagccggcgctgcctccggcttcctggggaagaaccgtgctggggagactcccatgagtaccgcctctgccagttgccagactgccccccaggggctgtgcccttccgagacctacagtgtgccctgtacaatggccgccctgtcctgggcacccagaagacctaccagtgggtgcccttccatggggcgcccaaccagtgcgacctcaactgcctggctgaggggcacgccttctaccacagcttcggccgcgtcctggacggcaccgcctgcagcccgggtgcccagggggtctgcgtggctggccgctgccttagcgccggctgtgatgggttgttgggctcgggtgccctcgaggaccgctgtggccgctgcggaggcgccaacgactcgtgccttttcgtgcagcgcgtgtttcgtgacgccggtgccttcgctgggtactggaacgtgaccctgatccccgagggcgccagacacatccgcgtggaacacaggagccgcaaccacctggcactgatggggggcgatgggcgctacgtgcttaatgggcactgggtggtcagcccaccagggacctacgaggcggccggcacgcatgtggtctacacccgagacacagggccccaggagacattgcaagcagccgggcccacctcccatgacctgctcctacaggtcctcctgcaggagcccaaccctggcatcgagtttgagttctggctccctcgggagcgctacagccccttccaggctcgtgtgcaggccctgggctggcccctgaggcagcctcagccccggggggtggagcctcagccccccgcagcccctgctgtcacccctgcacagaccccaacgctggccccagacccctgcccaccctgccctgacacccgcggccgcgcccaccgactactccactattgcggcagtgactttgtgttccaggcccgagtgctgggccaccaccaccaggcccaggagacccgctatgaggtgcgcatccagctcgtctacaagaaccgctcgccactgcgggcacgcgagtacgtgtgggcgccaggccactgcccctgcccgatgctggcaccccaccgggactacctgatggctgtccagcgtcttgtcagccccgacggcacacaggaccagctgctgctgccccacgccggctacgcccggccctggagccctgcggaggacagccgcatacgcctgactgcccggcgctgtcctggctgagcccctgcaggagccccggccacacacagcaagaaagatacatctgaccagcctcaacgtcaacgtatttcccctctcaccctggcttccaggcagctctgaaatacgtcccacctgtgcagctatgtgactccctcccacacacgcttaagacacctctgcatgcagtcaaagccactgtcacaagccggcaggcactggtgaggaggcactaaggagactctgacttttatttcgcctctctccttggctgccaggaagctcatagctatttatactcagaaagtttaacgctgctttctttctctttgcgcgcgtcacacttgcttggagacactgtcatgaacgagcatgacaccctgctgccctgggtacccagaagatcatctgtttacttcccagacactgtgctgtctctgctctctgctactcacacacaccctcatgtgtgaagggcagagacactgtcacaaacaggcatgccccttagaagacatgcctaaccaggcactgtaacgtaccaacgtaccaatttccccttttcccctggctaccaggaaactcggagacaatcttttcagcctcagcatttctggctggatttccacccatcaacacgtgcttgctcctcctttttttttttttctgaggtagacccttgctctgtcacctaggctgaagtgcggtggtgcaatcatggctcactgcagcctcaaattcctgggctcaagcgatcctcccacctcagcctccacagcagctggaactccaggtgtgaatcaccatgcccggctaacttttaaattttttgtagagatggggtcttgctacgttgcccacactgctctccaactactggcctcaaacgatcctcctgcctcggcctcccaaagcactggaatttcaggcatgcactatcgtactggctgttcaccccccttttattcctctttaatttttacaagcactttttaaaaaaaaattttactttaagttc

SEQ ID NO: 104790 - DNA, 1533 bp, Homo sapiens
  Payload ID: 581
  Gene Symbol: ADAMTSL5
  Gene Name: ADAMTS-like 5
  ENST ID: ENST00000395467
  CDS Start-End: 1138-1533
cgctcgcgtccgccgggcagtcccctgccgcagatccgcgcccgccgcgcgagggcgcccggggccgccgcccctcctgacccgggcctgggcgcgcctgcggaggccgcggtgggagggaccgtcccaggctccccaccccgcccagcaccttgggccccgccgcttccgctcgccctggggccgctcagggagccgggacgcgctgcctgggctccgcgcagccgatgacattctgagttcttcctctccataccgggctccacgtctcctgtcttctttacctgatccacaggacccctcaactttcctgtaagggaggctctattaccccgtttttcagagacgagaggtagggctcagagaggtttagttactttccaagatcacacagccagtcagggcagagccgggacacaaccctgtgtctctggcggtggctctatggactcggcccctctgttccccaggccccacctcttccagaacctcctgctcttcctgtgggccctgctgaactgtggtttgggggtcagtgctcagggtccgggcgagtggaccccgtgggtgtcctggacccgctgctccagctcctgcgggcgtggcgtctctgtgcgcagccggcgctgcctccggcttcctggggaagaaccgtgctggggagactcccatgagtaccgcctctgccagttgccagactgccccccaggggctgtgcccttccgagacctacagtgtgccctgtacaatggccgccctgtcctgggcacccagaagacctaccagtgggtgcccttccatggggcgcccaaccagtgcgacctcaactgcctggctgaggggcacgccttctaccacagcttcggccgcgtcctggacggcaccgcctgcagcccgggtgcccagggggtctgcgtggctggccgctgccttagcgccggctgtgatgggttgttgggctcgggtgccctcgaggaccgctgtggccgctgcggaggcgccaacgactcgtgccttttcgtgcagcgcgtgtttcgtgacgccggtgccttcgctgggtactggaacgtgaccctgatccccgagggcgccagacacatccgcgtggaacacaggagccgcaaccacctggcactgatggggggcgatgggcgctacgtgcttaatgggcactgggtggtcagcccaccagggacctacgaggcggccggcacgcatgtggtctacacccgagacacagggccccaggagacattgcaagcagccgggcccacctcccatgacctgctcctacaggtcctcctgcaggagcccaaccctggcatcgagtttgagttctggctccctcgggagcgctacagccccttccaggctcgtgtgcaggccctgggctggcccctgaggcagcctcagccccggggggtggagcctcagccccccgcagcccctgctgtcacccctgcacagaccccaacgctggccccaggcccgagtgctgggccaccaccaccaggcccaggagacccgctatga

SEQ ID NO: 104791 - DNA, 406 bp, Homo sapiens
  Payload ID: 581
  Gene Symbol: ADAMTSL5
  Gene Name: ADAMTS-like 5
  ENST ID: ENST00000590090
  CDS Start-End: 1-406
agacacatccgcgtggaacacaggagccgcaaccacctgggtatcctaggatcactgatggggggcgatgggcgctacgtgcttaatgggcactgggtggtcagcccaccagggacctacgaggcggccggcacgcatgtggtctacacccgagacacagggccccaggagacattgcaagcagccgggcccacctcccatgacctgctcctacaggtcctcctgcaggagcccaaccctggcatcgagtttgagttctggctccctcgggagcgctacagccccttccaggctcgtgtgcaggccctgggctggcccctgaggcagcctcagccccggggggtggagcctcagccccccgcagcccctgctgtcacccctgcacagaccccaacgctggccccag

SEQ ID NO: 104792 - DNA, 573 bp, Homo sapiens
  Payload ID: 581
  Gene Symbol: ADAMTSL5
  Gene Name: ADAMTS-like 5
  ENST ID: ENST00000590562
  CDS Start-End: 150-573
gctcgccctggggccgctcagggagccgggacgcgctgcctgggctccgcgcagccgggacccaactcctgatccagcccctgccggccgcaccttccgcagggtgtcacagaatcatggactgagtccacttggcccccactgcacagatggggaaactgaggcctgggagagtggagtggctggcctcaggccacacggaaaggccccacctcttccagaacctcctgctcttcctgtgggccctgctgaactgtggtttgggggtcagtgctcagggtccgggcgagtggaccccgtgggtgtcctggacccgctgctccagctcctgcgggcgtggcgtctctgtgcgcagccggcgctgcctccggcttcctggggaagaaccgtgctggggagactcccatgagtaccgcctctgccagttgccagactgccccccaggggctgtgcccttccgagacctacagtgtgccctgtacaatggccgccctgtcctgggcacccagaagacctaccagtgggtgcccttccatggggcgcccaaccagtgcgacctcaactgcctggctg

SEQ ID NO: 104793 - DNA, 735 bp, Homo sapiens
  Payload ID: 581
  Gene Symbol: ADAMTSL5
  Gene Name: ADAMTS-like 5
  ENST ID: ENST00000586272
  CDS Start-End: 105-735
gctcgccctggggccgctcagggagccgggacgcgctgcctgggctccgcgcagccgggtgtcacagaatcatggactgagtccacttggcccccactgcacagatggggaaactgaggcctgggagagtggagtggctggcctcaggccacacggaaaggccccacctcttccagaacctcctgctcttcctgtgggccctgctgaactgtggtttgggggtcagtgctcagggtccgggcgagtggaccccgtgggtgtcctggacccgctgctccagctcctgcgggcgtggcgtctctgtgcgcagccggcgctgcctccggcttcctggggaagaaccgtgctggggagactcccatgagtaccgcctctgccagttgccagactgccccccaggggctgtgcccttccgagacctacagtgtgccctgtacaatggccgccctgtcctgggcacccagaagacctaccagtgggtgcccttccatggggcgcccaaccagtgcgacctcaactgcctggctgaggggcacgccttctaccacagcttcggccgcgtcctggacggcaccgcctgcagcccgggtgcccagggggtctgcgtggctggccgctgccttagcgccggctgtgatgggttgttgggctcgggtgccctcgaggaccgctgtggccgctgcggaggcgccaacgactcgtgccttttcgtgcagcgcgtgtttcgtgacgccg

SEQ ID NO: 104794 - DNA, 574 bp, Homo sapiens
  Payload ID: 581
  Gene Symbol: ADAMTSL5
  Gene Name: ADAMTS-like 5
  ENST ID: ENST00000585804
  CDS Start-End: 184-574
acggggccgagcctctccccagtgcgctggggccctgcgctgggggtgaccgggacctgggtcggggaacccccggatgggagcccaggcgcgccagggtccccatccacgagcaggtcgaccccccgcgagagggggtgtcacagaatcatggactgagtccacttggcccccactgcacagatggggaaactgaggcctgggagagtggagtggctggcctcaggccacacggaaaggccccacctcttccagaacctcctgctcttcctgtgggccctgctgaactgtggtttgggggtcagtgctcagggtccgggcgagtggaccccgtgggtgtcctggacccgctgctccagctcctgcgggcgtggcgtctctgtgcgcagccggcgctgcctccggcttcctggggaagaaccgtgctggggagactcccatgagtaccgcctctgccagttgccagactgccccccaggggctgtgcccttccgagacctacagtgtgccctgtacaatggccgccctgtcctgggcacccagaagacctaccagtgggtgcccttccatgggg

SEQ ID NO: 104795 - DNA, 6058 bp, Homo sapiens
  Payload ID: 582
  Gene Symbol: APPL1
  Gene Name: adaptor protein, phosphotyrosine interaction, PH domain and leucine zipper containing 1
  Uniprot ID: Q9UKG1
  ENST ID: ENST00000288266
  CDS Start-End: 148-2277
gctcggcgcctggagaaggctgtgcgggcggggacggctgcagcccttgccggagagggcgggccggggtcagctgcggcgggcgggccggcgcggggagctgtgggcggcagctgcgtctcctgccaccgccctccctccgccacgatgccggggatcgacaagctgcccatcgaggagacgctggaggacagcccgcagacaaggtctttactaggtgtatttgaagaagatgccacagctatttccaactatatgaaccagttgtatcaagctatgcatcggatttatgatgcacagaatgaattaagtgcagcaacacacctgacctcaaaacttttaaaagaatatgaaaaacagcgttttccattgggaggtgatgatgaagttatgagctctacattgcaacagttttcaaaagttatagatgagcttagctcttgtcatgcagtgctttcaactcaacttgctgatgccatgatgttccccattacccagtttaaagaaagagatctgaaagaaatactaacattaaaggaagtatttcagattgcaagtaatgatcatgatgctgcgattaatagatatagccgtttatcaaaaaaaagagaaaatgacaaggtgaagtatgaagtaacagaagatgtgtacacatccagaaagaaacaacaccagaccatgatgcattatttttgtgcattaaatactcttcagtacaagaagaaaatagcattgttagaacctctacttgggtacatgcaagctcagataagtttctttaagatgggttctgaaaatcttaatgaacaactggaagaatttttagctaatattggaacaagcgttcagaatgttcgcagggaaatggacagtgatatagagaccatgcaacagacaatagaggatttggaagtagccagtgatcccttatatgtgcctgacccagaccccaccaaatttcctgttaatcgaaatttaacccgaaaggctggataccttaatgctaggaataaaacaggcttggtgtcatctacctgggacagacagttttacttcacgcagggtggaaatttaatgagtcaggcccgtggggatgtagcaggaggcctggccatggacatagacaactgttcagtgatggctgtggactgtgaagacagacgatattgttttcagatcacctctttcgatggaaaaaaatcttcaattttgcaagcagagagtaaaaaagatcatgaagagtggatctgtacaataaacaacatatctaaacaaatatacttaagtgaaaatccagaggaaactgctgcacgagtaaatcaatcagctctggaagctgtcactccttccccatctttccagcagaggcacgagagcctgcggccagcagcaggacaatctcggccaccgacagctcgaaccagcagttcaggatccttaggatctgagtctacaaatttggctgccctctctctagattctcttgttgccccagacaccccaatacagtttgacataatttctcctgtgtgtgaagatcagcctggccaggcaaaagcctttggccagggaggcaggcgtacaaatccatttggagaatctggaggaagtacaaaatctgaaactgaagattctattcttcatcagttatttattgtccgattccttggttcaatggaggtgaaatcagatgaccatccagatgttgtttatgaaactatgcgccaaatcttagctgcccgggccatccataacatctttcgtatgacagaatcgcatttattagtcacttgtgactgtttaaagttaattgatccacagacacaagttacaaggctcacgtttccattaccttgtgtagttttgtatgctacacaccaggaaaataagcgcctttttggatttgttcttcggacatcaagcgggagaagtgaaagtaatctgtcatcagtctgctatatatttgagtcaaacaatgagggggaaaagatatgtgattctgttggactggcaaaacagatagctttgcatgctgaactggatcgtagggcatcagaaaaacaaaaagaaatagagagagtaaaagagaagcaacagaaagaactcaataaacaaaaacagattgaaaaggacttggaagaacaaagtcggttgatagctgcttccagtagaccaaaccaagccagtagtgaggggcagtttgttgtccttagcagtagccagtcagaagagagtgatttgggagaaggaggaaagaagagagaatcagaagcataagcttatacttttggtagatattcccccttggaatttgacagtttctatggtgaaatggcagaaggtaacaactatgttgaaatatcaaggaggagattaagctttatatttgcttatttgttgtagctacattttaaaaaaaagattgaacttgatgacttaggtttgcattgatcttttttcccccttaaacataatgtactatgtattaacatctaaaggaaacctgctcatctccctgaagcagactgctgaggaattacatttgctcaagaattttttccgtcaaattgtgaacttttaattcttgcattgtaattggctgtgtccataagaaatcatttattcttcaggcttagacattcatggatatgcttttctttcattaggaacattttgctggtgatgaggaagcatttagctgaataagtttaaagccctttatacagagaattctacaagtttgcaaatattttaacaatattaaatgtgcaatagaacttttataaaataattagaacagagattttacagttaaggtttcaaattgtggcaggtggtactgttgatctcagggtactttctgggattgctcacatttctctaatgtactgcacttgatgccagtaggaaagaagcttaagtgtcttcagttcaagattgatagagcccttggcattttattatcacattcttagttctcaggttgggacttcaattactgctgcagagcagtagtggttaaaaataagatattggaatttattaaaagatttttgttcaatacattttagattaggattgacaagtaaagatactgctatggaatgatacattgtattttctgcattgtgtgaaatagtttttattgaaagtcaagtgacatttcaaaagaagttctataacaattatgtttcatgcttaaagtaaaaattcccagagtttagtttagaaaatgtaatcttttaaatttcagactgatatattcccagtattttcataatgccatgttttgataaagtactgaatcaccactttatatccacaaaggcaaataactaatgtatgataatagaataatttgcactaattattgtaaatatgtctactcttcaaatgagtaaaaggtccaattttgtgaaagattgaaaatgaattgaatgcctagtagagtataggagaagttgaccaaggaaggatttaacctggtgccaaggttaaaataacatttctctactgcctattgtttatgttaaaccttaattttttttctgtaatcacttttaacactgctaatagaaattatgttttcatgtgtttcacatgaaaaagtatatatatacaaagttaatatagtgggtaaaatactttacatagtcacacatttacaaatttttcaagaggttagccactaagactttaataattttacaagggaaaaagcctttttttttctttgatatacagttttttcttcttagttctgcattagaaatggcatctgttttaggtctcaaaatataactcagctgtttcacactgtatatgtacattgttttctgtaggaataggataatgatatataggatcatgatattccttctatccatgtgccaaatgggtgtaatgtttatttactgatgctttatgttaccaaaacatacagtaaaaaagtagaaatttatgaaatacttttgataaaaagtttattttgtgcttaccaaaaggaatgctttcacaatagtgtatcagttcttttgttttgttaaagttggaatttattctgttgccagcatttaagtagtcatggcaagtcctgtttttaagaccttttggagactggagctttctgttccattaagtcttttgtttatactacaaattgtcacctcacttagttcagatgaaatctgttactctacaaggaaggtgttcatcattaggaggcagctttactaagctggtgctttgcatggtagcaagtgctgccctttatcagcaccctgggtcatagtgtaggctagagttaaggcactggcagacttagggatgctggacagacctgtagttcgttttaagtcatgttcacaggaatttctacaataataaacccatcatctccataggtcagatcgaagtgcattccaatgctaaatagaagttatgagtgggtttaacaattttagatgattcagcttttgttccattactgttgaactatatgaactattccattactgcagagatttaagtatctgttttaataagctctttttgttatttaaaggctgcccatgggtttctgcctagtggtaaagctgattgttaccctcctttgaaatcccttctagttctgagatgctttgagggtaactggattcgattttgggatatcttttctcacattcagacttacacttaatggtgttagaaatcaacaaaactcctttttaaaaagaaaagatattaagcctgcctacttctacaatgcattctgttacctatttgaacagtatgtttgtaactatggcaatgaagtcagtagataggaaaccagttattccttctacctttaaaaattttgagaacttgccaaccagggattaaagctattatcttgaacagagtccctaaagctagtctagtttttgccacatctgcaatgattattgtttaatttcaaaagaatcctcaggctctacaatctaggggtggtaaatgtgtttccactatacttgggaaaaggtcagtaggatgtgcatcctagggaagataaaatcgtatatggtaaaggcatttgagttaattttgcattatatctaggaaccatattatttaaaatttgaatcctattaatgctgagagatcctaagagctagtatgttgtaaaacctgccacctgaataaaatgaaaaaaaaagtgtttttttgagacagagtcttgctctgttgcccaggctggagtgcagtggtgtgatcttgggtcactgcaaactccgcctcccaggttcacgccattctcctgcctcagcctcccgagtagctgggaccacaggggcccaccaccgcgcccggctaattttttgtatttttagtagagacggggtttcaccgtgttagccaggatgttctcgatctcctgacctcatgatccgcccgcctcggcctcccaaagtgctgggattacaggcgtgagccaccgtgcccggccctaaaatgaaattattaatgttggttctgaaacagcctcttagcattcagattgtattttaaatacttaaacacaccaattgtagaaagcaaccctttatttttagcaagtttggtttactcttctcccatgagattttgtctttctacattaactagtaagacataaagatttgaaactggaactatattatactttttaaccaatctctgtggcttcactcatgaaatttacttcagttaatatgagactgggggttaagttgtaactaatatgcaaaattgctttgtatatttggtgattttgtaatgtaagtgaattgattcttatttcactgatactattaatcatgcagtgtacaattcaaaatcatgcaatgtttcactttagaattggatttgaagaactcgactttatgtgatcatggtattggtatacatgtggggtggagaacttattttttcattttgtcacaataggtatatactgacaaggcttcaggaaaaaagttgttagaagattttttaatgtataataaagtccatgatttttgtacagtgttttttaatg

SEQ ID NO: 104796 - DNA, 516 bp, Homo sapiens
  Payload ID: 582
  Gene Symbol: APPL1
  Gene Name: adaptor protein, phosphotyrosine interaction, PH domain and leucine zipper containing 1
  ENST ID: ENST00000444459
  CDS Start-End: 116-516
ctccgccacgatgccggggatcgacaagctgcccatcgaggagacgctggaggacagcccgcagaatagagtccaagaagcagagcagcaaagaatatgaagacttttaaagctcatgacaaggtctttactaggtgtatttgaagaagatgccacagctatttccaactatatgaaccagttgtatcaagctatgcatcggatttatgatgcacagaatgaattaagtgcagcaacacacctgacctcaaaacttttaaaagaatatgaaaaacagcgttttccattgggaggtgatgatgaagttatgagctctacattgcaacagttttcaaaagttatagatgagcttagctcttgtcatgcagtgctttcaactcaacttgctgatgccatgatgttccccattacccagtttaaagaaagagatctgaaagaaatactaacattaaaggaagtatttcagattgcaagtaatgatcatgatgctgcgattaatagatatagccgtttatc

SEQ ID NO: 104797 - DNA, 396 bp, Homo sapiens
  Payload ID: 582
  Gene Symbol: APPL1
  Gene Name: adaptor protein, phosphotyrosine interaction, PH domain and leucine zipper containing 1
  ENST ID: ENST00000495803
  CDS Start-End: 54-396
ggggagctgtgggcggcagctgcgtctcctgccaccgccctccctccgccacgatgccggggatcgacaagctgcccatcgaggagacgctggaggacagcccgcagacaaggtctttactaggtgtatttgaagaagatgccacagctatttccaactatatgaaccagttgtatcaagctatgcatcggatttatgatgcacagaatgaattaagtgcagcaacacacctgacctcaaaacttttaaaagaatatgaaaaacagcttagctcttgtcatgcagtgctttcaactcaacttgctgatgccatgatgttccccattacccagtttaaagaaagagatctgaaagaaatactaacattaaaggaagtatttcagattgcaagtaatg

SEQ ID NO: 104798 - DNA, 3239 bp, Homo sapiens
  Payload ID: 583
  Gene Symbol: APPL2
  Gene Name: adaptor protein, phosphotyrosine interaction, PH domain and leucine zipper containing 2
  Uniprot ID: Q8NEU8
  ENST ID: ENST00000258530
  CDS Start-End: 227-2221
tttccctgccgggcgcgccacacttcctgttgatccggctcggccgggggctgggccggcgggcaggcggcggcggccactggccaggcgtggacgcgcgcggggccgccgcgggcacggagtggccgccgcgtcgcctgagcccagagccggggagtgctctcggccgccgcgtctcctgccctctgtccttccaacccagccctcggctgagccgcgccgcaccatgcccgccgtggacaagctcctgctagaggaggcgttgcaggacagcccccagactcgctctttactgagcgtgtttgaagaagatgctggcaccctcacagactataccaaccagctgctccaggcaatgcagcgcgtctatggagcccagaatgagatgtgcctggccacacaacagctttctaagcaactgctggcatatgaaaaacagaactttgctcttggcaaaggtgatgaagaagtaatttcaacactccactatttttccaaagtggtggatgagcttaatcttctccatacagagctggctaaacagttggcagacacaatggttctacctatcatacaattccgagaaaaggatctcacagaagtaagcactttaaaggatctatttggactcgctagcaatgagcatgacctctcaatggcaaaatacagcaggctgcctaagaaaaaggagaatgagaaggtgaagaccgaagtcggaaaagaggtggccgcggcccggcggaagcagcacctctcctcccttcagtactactgtgccctcaacgcgctgcagtacagaaagcaaatggccatgatggagcccatgataggctttgcccatggacagattaacttttttaagaagggagcagagatgttttccaaacgtatggacagctttttatcctccgttgcagacatggttcaaagcattcaggtagaactggaagccgaggcggaaaagatgcgggtgtcccagcaagaattactttctgttgatgaatctgtttacactccagactctgatgtggccgcaccacagatcaacaggaacctcatccagaaggctggttaccttaatcttagaaacaaaacagggctggtcaccaccacctgggagaggctttatttcttcacccaaggcgggaatctcatgtgtcagcccaggggagccgtggctggaggtttgatccaggacctggacaactgctcagtgatggccgtggattgcgaagaccggcgctactgcttccagatcaccacgcccaatggaaaatcgggaataatcctccaggctgagagcagaaaggaaaatgaagagtggatatgtgcaataaacaacatctccagacagatctacctgaccgacaaccctgaggcagtcgcgatcaagttgaatcagaccgctctgcaagcagtgactcccattacaagttttggaaaaaaacaagaaagctcatgccccagccagaacctgaaaaattcagagatggaaaatgaaaatgacaagattgttcccaaagcaacagccagtctacctgaagcagaggagctgatcgcgcctggaacgccgattcaattcgatattgtgcttcctgctacagaattccttgatcagaacagagggagcaggcgtaccaacccttttggtgaaactgaggatgaatcatttccagaagcagaagattctcttttgcagcagatgtttatagttcggtttttgggatcaatggcagttaaaacagacagcactactgaagtgatttatgaagcgatgagacaagtattggctgctcgggctattcataacatcttccgcatgacagaatcccatctgatggtcaccagtcaatctttgaggttgatagatccacagactcaagtatcaagggccaattttgaacttaccagtgtcacacaatttgctgctcatcaagaaaacaagagactggttggttttgtcatccgtgttcctgaatccactggagaagaatctctgagtacatacatttttgaaagcaactcagaaggcgaaaagatatgttatgctattaatttgggaaaagaaattattgaggttcagaaggatccagaagcactggctcaattaatgctgtccataccactaaccaatgacggaaaatatgtactgttaaacgatcaaccagatgacgatgatggaaatccaaacgaacatagaggcgcagaatccgaagcataactcacttgcgcctgtgggggaagagcaaacaggaaggagagctacctcctaagggttttaacgtctctgacatacaggcacactgacctgatttccgaaggctgacaatcgtttgtggaatgtaatcttgatgccttgatactgagacttgggagggaaactaagaaatggttgacagcgttcccacccatctacaatgttattttaggtgctttgtggtaagtcttttttcttagattgcgctaaaatttcttagattgttcagcgctcagaacaaaagtttgaaaaatgcattgttcatatgaatgtcatctcttttcagtttccagtatcctttttaaaaaatggcaaaagcctagatttacaatttgatgaacactaaatatttcttattaatataatctatttttgtattttacttaatgagctttaagtgcctgtcgttctgaaaattgtgtatttataattcagcttatctcataattggacctaatagcatttctttgtgcagttaggtgatgagcactgctttgaggcccaagcactagtagagatgcgcgatacaggtctagtttcggtaactgttccagacatcaagcaataaaaaaatgaataccacaaaagatgtttgattttacagtggagccttactgaaccagcattcagaagtttaaggtcctcctaggtatgagtatttttagtagtggatcactgtggacagggtgcagctctaccagttcctgtttcttctgagccagaccctcttcagggaagggaccaattaattttaaaactcacttgaagcacagctggtcatggggcttggtataaagttcctatttccaccctgatacttccaattcctggaaccccagcccactcccccatccctcctccctatcaaactagtataatgattttgaatcggtacagtgtgtttaactgtaactaagttcaacagactattattatctttgtaataaattaacctagcaataaaaaatattctgtttctttc

SEQ ID NO: 104799 - DNA, 2680 bp, Homo sapiens
  Payload ID: 583
  Gene Symbol: APPL2
  Gene Name: adaptor protein, phosphotyrosine interaction, PH domain and leucine zipper containing 2
  Uniprot ID: Q8NEU8
  ENST ID: ENST00000539978
  CDS Start-End: 436-2301
tctattcatggactcctttttagtttgcagtgctgcacgatgcattgtaaaactagtctgtgtgcatacacatgcgttatttctgcttacctctcatatgtgggaagctgaacattttagggattaagaaatctgcctccattgttgtttagaagcctctgctccttgcctggcactactggctgttgggaatgtgaagataaataagagtgactacccttgactggttcacagtttgttccagagacagataatgaggcaacagttccagtacagtgtgaatcctgctgcgataggaacacaaatgcagctttgagctcctgcagcttgtacttcttcaggggcttattctcttgtcctactcgctctttactgagcgtgtttgaagaagatgctggcaccctcacagactataccaaccagctgctccaggcaatgcagcgcgtctatggagcccagaatgagatgtgcctggccacacaacagctttctaagcaactgctggcatatgaaaaacagaactttgctcttggcaaaggtgatgaagaagtaatttcaacactccactatttttccaaagtggtggatgagcttaatcttctccatacagagctggctaaacagttggcagacacaatggttctacctatcatacaattccgagaaaaggatctcacagaagtaagcactttaaaggatctatttggactcgctagcaatgagcatgacctctcaatggcaaaatacagcaggctgcctaagaaaaaggagaatgagaaggtgaagaccgaagtcggaaaagaggtggccgcggcccggcggaagcagcacctctcctcccttcagtactactgtgccctcaacgcgctgcagtacagaaagcaaatggccatgatggagcccatgataggctttgcccatggacagattaacttttttaagaagggagcagagatgttttccaaacgtatggacagctttttatcctccgttgcagacatggttcaaagcattcaggtagaactggaagccgaggcggaaaagatgcgggtgtcccagcaagaattactttctgttgatgaatctgtttacactccagactctgatgtggccgcaccacagatcaacaggaacctcatccagaaggctggttaccttaatcttagaaacaaaacagggctggtcaccaccacctgggagaggctttatttcttcacccaaggcgggaatctcatgtgtcagcccaggggagccgtggctggaggtttgatccaggacctggacaactgctcagtgatggccgtggattgcgaagaccggcgctactgcttccagatcaccacgcccaatggaaaatcgggaataatcctccaggctgagagcagaaaggaaaatgaagagtggatatgtgcaataaacaacatctccagacagatctacctgaccgacaaccctgaggcagtcgcgatcaagttgaatcagaccgctctgcaagcagtgactcccattacaagttttggaaaaaaacaagaaagctcatgccccagccagaacctgaaaaattcagagatggaaaatgaaaatgacaagattgttcccaaagcaacagccagtctacctgaagcagaggagctgatcgcgcctggaacgccgattcaattcgatattgtgcttcctgctacagaattccttgatcagaacagagggagcaggcgtaccaacccttttggtgaaactgaggatgaatcatttccagaagcagaagattctcttttgcagcagatgtttatagttcggtttttgggatcaatggcagttaaaacagacagcactactgaagtgatttatgaagcgatgagacaagtattggctgctcgggctattcataacatcttccgcatgacagaatcccatctgatggtcaccagtcaatctttgaggttgatagatccacagactcaagtatcaagggccaattttgaacttaccagtgtcacacaatttgctgctcatcaagaaaacaagagactggttggttttgtcatccgtgttcctgaatccactggagaagaatctctgagtacatacatttttgaaagcaactcagaaggcgaaaagatatgttatgctattaatttgggaaaagaaattattgaggttcagaaggatccagaagcactggctcaattaatgctgtccataccactaaccaatgacggaaaatatgtactgttaaacgatcaaccagatgacgatgatggaaatccaaacgaacatagaggcgcagaatccgaagcataactcacttgcgcctgtgggggaagagcaaacaggaaggagagctacctcctaagggttttaacgtctctgacatacaggcacactgacctgatttccgaaggctgacaatcgtttgtggaatgtaatcttgatgccttgatactgagacttgggagggaaactaagaaatggttgacagcgttcccacccatctacaatgttattttaggtgctttgtggtaagtcttttttcttagattgcgctaaaatttcttagattgttcagcgctcagaacaaaagtttgaaaaatgcattgttcatatgaatgtcatctcttttcagtttccagtatcctttttaaaaaatggcaaaagcctagatttacaatttgatgaacac

SEQ ID NO: 104800 - DNA, 564 bp, Homo sapiens
  Payload ID: 583
  Gene Symbol: APPL2
  Gene Name: adaptor protein, phosphotyrosine interaction, PH domain and leucine zipper containing 2
  ENST ID: ENST00000553109
  CDS Start-End: 1-564
gatattgtgcttcctgctacagaattccttgatcagaacagagggagcaggcgtaccaacccttttggtgaaactgaggatgaatcatttccagaagcagaagttaaaacagacagcactactgaagtgatttatgaagcgatgagacaagtattggctgctcgggctattcataacatcttccgcatgacagaatcccatctgatggtcaccagtcaatctttgaggttgatagatccacagactcaagtatcaagggccaattttgaacttaccagtgtcacacaatttgctgctcatcaagaaaacaagagactggttggttttgtcatccgtgttcctgaatccactggagaagaatctctgagtacatacatttttgaaagcaactcagaaggcgaaaagatatgttatgctattaatttgggaaaagaaattattgaggttcagaaggatccagaagcactggctcaattaatgctgtccataccactaaccaatgacggaaaatatgtactgttaaacgatcaaccagatgacgatgatggaaatccaaacgaacat

SEQ ID NO: 104801 - DNA, 2190 bp, Homo sapiens
  Payload ID: 583
  Gene Symbol: APPL2
  Gene Name: adaptor protein, phosphotyrosine interaction, PH domain and leucine zipper containing 2
  Uniprot ID: Q8NEU8
  ENST ID: ENST00000551662
  CDS Start-End: 72-2084
agtgctctcggccgccgcgtctcctgccctctgtccttccaacccagccctcggctgagccgcgccgcaccatgcccgccgtggacaagctcctgctagaggaggcgttgcaggacagcccccagactcgctctttactgagcgtgtttgaagaagatgctggcaccctcacagactataccaaccagctgctccaggcaatgcagcgcgtctatggagcccagaatgagatgtgcctggccacacaacagctttctaagcaactgctggcatatgaaaaacagaactttgctcttggcaaaggtgatgaagaagtaatttcaacactccactatttttccaaagtggtggatgagcttaatcttctccatacagagctggctaaacagttggcagacacaatggttctacctatcatacaattccgagaaaaggatctcacagaagtaagcactttaaaggatctatttggactcgctagcaatgatgtctgtttatttttagagcatgacctctcaatggcaaaatacagcaggctgcctaagaaaaaggagaatgagaaggtgaagaccgaagtcggaaaagaggtggccgcggcccggcggaagcagcacctctcctcccttcagtactactgtgccctcaacgcgctgcagtacagaaagcaaatggccatgatggagcccatgataggctttgcccatggacagattaacttttttaagaagggagcagagatgttttccaaacgtatggacagctttttatcctccgttgcagacatggttcaaagcattcaggtagaactggaagccgaggcggaaaagatgcgggtgtcccagcaagaattactttctgttgatgaatctgtttacactccagactctgatgtggccgcaccacagatcaacaggaacctcatccagaaggctggttaccttaatcttagaaacaaaacagggctggtcaccaccacctgggagaggctttatttcttcacccaaggcgggaatctcatgtgtcagcccaggggagccgtggctggaggtttgatccaggacctggacaactgctcagtgatggccgtggattgcgaagaccggcgctactgcttccagatcaccacgcccaatggaaaatcgggaataatcctccaggctgagagcagaaaggaaaatgaagagtggatatgtgcaataaacaacatctccagacagatctacctgaccgacaaccctgaggcagtcgcgatcaagttgaatcagaccgctctgcaagcagtgactcccattacaagttttggaaaaaaacaagaaagctcatgccccagccagaacctgaaaaattcagagatggaaaatgaaaatgacaagattgttcccaaagcaacagccagtctacctgaagcagaggagctgatcgcgcctggaacgccgattcaattcgatattgtgcttcctgctacagaattccttgatcagaacagagggagcaggcgtaccaacccttttggtgaaactgaggatgaatcatttccagaagcagaagattctcttttgcagcagatgtttatagttcggtttttgggatcaatggcagttaaaacagacagcactactgaagtgatttatgaagcgatgagacaagtattggctgctcgggctattcataacatcttccgcatgacagaatcccatctgatggtcaccagtcaatctttgaggttgatagatccacagactcaagtatcaagggccaattttgaacttaccagtgtcacacaatttgctgctcatcaagaaaacaagagactggttggttttgtcatccgtgttcctgaatccactggagaagaatctctgagtacatacatttttgaaagcaactcagaaggcgaaaagatatgttatgctattaatttgggaaaagaaattattgaggttcagaaggatccagaagcactggctcaattaatgctgtccataccactaaccaatgacggaaaatatgtactgttaaacgatcaaccagatgacgatgatggaaatccaaacgaacatagaggcgcagaatccgaagcataactcacttgcgcctgtgggggaagagcaaacaggaaggagagctacctcctaagggttttaacgtctctgacatacaggcacactgacctgatttccgaaggctgac

SEQ ID NO: 104802 - DNA, 493 bp, Homo sapiens
  Payload ID: 583
  Gene Symbol: APPL2
  Gene Name: adaptor protein, phosphotyrosine interaction, PH domain and leucine zipper containing 2
  ENST ID: ENST00000549056
  CDS Start-End: 309-493
gttgcagtgagccgagatcgcaccattgcactccagcctgggcaacaagagcgaaactccatctcaaaaaaagaaagaaagaaagaaaaagaaacaaggaaatcgtagtaccataagaggaaagaatgacacactcctacactcctgcaagacatccaagattacaaaaaaccagactgctggttcctgctgggatgatcacactacagctgtgctagatgaccacaccccagactcgctctttactgagcgtgtttgaagaagatgctggcaccctcacagactataccaaccagctgctccaggcaatgcagcgcgtctatggagcccagaatgagatgtgcctggccacacaacagctttctaagcaactgctggcatatgaaaaacagaactttgctcttggcaaaggtgatgaagaagtaatttcaacactccactatttttccaaagtggtggatgagcttaatcttctccatacagagctggctaa

SEQ ID NO: 104803 - DNA, 684 bp, Homo sapiens
  Payload ID: 583
  Gene Symbol: APPL2
  Gene Name: adaptor protein, phosphotyrosine interaction, PH domain and leucine zipper containing 2
  ENST ID: ENST00000546731
  CDS Start-End: 152-475
aaatacatttaagagagagaagaaaaattcctattaagaacttttaacactggaattacctgagtttcacttacctggaatattttttgtgtggcataaattggcaacagaggtcaggacagttggacgcaaatgccccgggccctatgtgatgagtctcctgcagccaggtcctgtgttcccaagtgggaacagtgagaacagtgacctcactgtactcccaaatcacatttgttctaaaattttatccttctctacttttgccaatcactacttttcttgtcttttgcagatatgttatgctattaatttgggaaaagaaattattgaggttcagaaggatccagaagcactggctcaattaatgctgtccataccactaaccaatgacggaaaatatgtactgttaaacgatcaaccagatgacgatgatggaaatccaaacgaacatagaggcgcagaatccgaagcataactcacttgcgcctgtgggggaagagcaaacaggaaggagagctacctcctaagggttttaacgtctctgacatacaggcacactgacctgatttccgaaggctgacaatcgtttgtggaatgtaatcttgatgccttgatactgagacttgggagggaaactaagaaatggttgacagcgttcccacccatctacaatgttattttagg

SEQ ID NO: 104804 - DNA, 547 bp, Homo sapiens
  Payload ID: 583
  Gene Symbol: APPL2
  Gene Name: adaptor protein, phosphotyrosine interaction, PH domain and leucine zipper containing 2
  ENST ID: ENST00000549974
  CDS Start-End: 2-121
aatggttctacctatcatacaattccgagaaaaggatctcacagaagtaagcactttaaaggatctatttggactcgctagcaatgcaggctgcctaagaaaaaggagaatgagaaggtgaagaccgaagtcggaaaagaggtggccgcggcccggcggaagcagcacctctcctcccttcagtactactgtgccctcaacgcgctgcagtacagaaagcaaatggccatgatggagcccatgataggctttgcccatggacagattaacttttttaagaagggagcagagatgttttccaaacgtatggacagctttttatcctccgttgcagacatggttcaaagcattcaggtagaactggaagccgaggcggaaaagatgcgggtgtcccagcaagaattactttctgttgatgaatctgtttacactccagactctgatgtggccgcaccacagatcaacaggaacctcatccagaaggctggttaccttaatcttagaaagtgagaacgccaccgtctgcctctttttctgaaatccgttt

SEQ ID NO: 104805 - DNA, 3196 bp, Homo sapiens
  Payload ID: 583
  Gene Symbol: APPL2
  Gene Name: adaptor protein, phosphotyrosine interaction, PH domain and leucine zipper containing 2
  ENST ID: ENST00000547439
  CDS Start-End: 192-899
cggctcggccgggggctgggccggcgggcaggcggcggcggccactggccaggcgtggacgcgcgcggggccgccgcgggcacggagtggccgccgcgtcgcctgagcccagagccggggagtgctctcggccgccgcgtctcctgccctctgtccttccaacccagccctcggctgagccgcgccgcaccatgcccgccgtggacaagctcctgctagaggaggcgttgcaggacagcccccagactcgctctttactgagcgtgtttgaagaagatgctggcaccctcacagactataccaaccagctgctccaggcaatgcagcgcgtctatggagcccagaatgagatgtgcctggccacacaacagctttctaagcaactgctggcatatgaaaaacagaactttgctcttggcaaaggtgatgaagaagtaatttcaacactccactatttttccaaagtggtggatgagcttaatcttctccatacagagctggctaaacagttggcagacacaatggttctacctatcatacaattccgagaaaaggatctcacagaagtaagcactttaaaggatctatttggactcgctagcaatgagcatgacctctcaatggcaaaatacagcaggctgcctaagaaaaaggagaatgagaaggtgaagaccgaagtcggaaaagaggtggccgcggcccggcggaagcagcacctctcctcccttcagtactactgtgccctcaacgcgctgcagtacagaaagcaaatggccatgatggagcccatgataggctttgcccatggacagattaacttttttaagaagggagcagagatgttttccaaacgtatggacagctttttatcctccgttgcagacatggttcaaaggtagaactggaagccgaggcggaaaagatgcgggtgtcccagcaagaattactttctgttgatgaatctgtttacactccagactctgatgtggccgcaccacagatcaacaggaacctcatccagaaggctggttaccttaatcttagaaacaaaacagggctggtcaccaccacctgggagaggctttatttcttcacccaaggcgggaatctcatgtgtcagcccaggggagccgtggctggaggtttgatccaggacctggacaactgctcagtgatggccgtggattgcgaagaccggcgctactgcttccagatcaccacgcccaatggaaaatcgggaataatcctccaggctgagagcagaaaggaaaatgaagagtggatatgtgcaataaacaacatctccagacagatctacctgaccgacaaccctgaggcagtcgcgatcaagttgaatcagaccgctctgcaagcagtgactcccattacaagttttggaaaaaaacaagaaagctcatgccccagccagaacctgaaaaattcagagatggaaaatgaaaatgacaagattgttcccaaagcaacagccagtctacctgaagcagaggagctgatcgcgcctggaacgccgattcaattcgatattgtgcttcctgctacagaattccttgatcagaacagagggagcaggcgtaccaacccttttggtgaaactgaggatgaatcatttccagaagcagaagattctcttttgcagcagatgtttatagttcggtttttgggatcaatggcagttaaaacagacagcactactgaagtgatttatgaagcgatgagacaagtattggctgctcgggctattcataacatcttccgcatgacagaatcccatctgatggtcaccagtcaatctttgaggttgatagatccacagactcaagtatcaagggccaattttgaacttaccagtgtcacacaatttgctgctcatcaagaaaacaagagactggttggttttgtcatccgtgttcctgaatccactggagaagaatctctgagtacatacatttttgaaagcaactcagaaggcgaaaagatatgttatgctattaatttgggaaaagaaattattgaggttcagaaggatccagaagcactggctcaattaatgctgtccataccactaaccaatgacggaaaatatgtactgttaaacgatcaaccagatgacgatgatggaaatccaaacgaacatagaggcgcagaatccgaagcataactcacttgcgcctgtgggggaagagcaaacaggaaggagagctacctcctaagggttttaacgtctctgacatacaggcacactgacctgatttccgaaggctgacaatcgtttgtggaatgtaatcttgatgccttgatactgagacttgggagggaaactaagaaatggttgacagcgttcccacccatctacaatgttattttaggtgctttgtggtaagtcttttttcttagattgcgctaaaatttcttagattgttcagcgctcagaacaaaagtttgaaaaatgcattgttcatatgaatgtcatctcttttcagtttccagtatcctttttaaaaaatggcaaaagcctagatttacaatttgatgaacactaaatatttcttattaatataatctatttttgtattttacttaatgagctttaagtgcctgtcgttctgaaaattgtgtatttataattcagcttatctcataattggacctaatagcatttctttgtgcagttaggtgatgagcactgctttgaggcccaagcactagtagagatgcgcgatacaggtctagtttcggtaactgttccagacatcaagcaataaaaaaatgaataccacaaaagatgtttgattttacagtggagccttactgaaccagcattcagaagtttaaggtcctcctaggtatgagtatttttagtagtggatcactgtggacagggtgcagctctaccagttcctgtttcttctgagccagaccctcttcagggaagggaccaattaattttaaaactcacttgaagcacagctggtcatggggcttggtataaagttcctatttccaccctgatacttccaattcctggaaccccagcccactcccccatccctcctccctatcaaactagtataatgattttgaatcggtacagtgtgtttaactgtaactaagttcaacagactattattatctttgtaataaattaacctagcaataaaaaatattctgtttcttt

SEQ ID NO: 104806 - DNA, 514 bp, Homo sapiens
  Payload ID: 583
  Gene Symbol: APPL2
  Gene Name: adaptor protein, phosphotyrosine interaction, PH domain and leucine zipper containing 2
  ENST ID: ENST00000553097
  CDS Start-End: 82-514
agagccggggagtgctctcggccgccgcgtctcctgccctctgtccttccaacccagccctcggctgagccgcgccgcaccatgcccgccgtggacaagctcctgctagaggaggcgttgcaggacagcccccagaatgagatgtgcctggccacacaacagctttctaagcaactgctggcatatgaaaaacagaactttgctcttggcaaaggtgatgaagaagtaatttcaacactccactatttttccaaagtggtggatgagcttaatcttctccatacagagctggctaaacagttggcagacacaatggttctacctatcatacaattccgagaaaaggatctcacagaagtaagcactttaaaggatctatttggactcgctagcaatgagcatgacctctcaatggcaaaatacagcaggctgcctaagaaaaaggagaatgagaaggtgaagaccgaagtcggaaaagaggtggccgcggcccggcggaagcagcacctctcct

SEQ ID NO: 104807 - DNA, 2902 bp, Homo sapiens
  Payload ID: 584
  Gene Symbol: AP1AR
  Gene Name: adaptor-related protein complex 1 associated regulatory protein
  Uniprot ID: Q63HQ0
  ENST ID: ENST00000274000
  CDS Start-End: 356-1264
agggtgctcggctcgcggggactggcctccttcggcagctggaggcggtcactcacgctgggctaggagctgaggcgagaagggccatgcggacggcgagggagtccagagccttgagcccggtgctcctccctcgcgcagcggtggctctgcggccgctggagtaaacactgcctttgttccctagcgcctcgtctttcgtcgccccgtgccctcacgccgccgggctctggccggcccgccctcggtccttgaaccccatttcggctcgtgccgtgcggatgcagctgccgggcctgggtttgggcattgagcgggaggaggaggaggagcggcggcgcctgggcggcatgcgatggggaactgctgctggacgcagtgcttcggactgcttcgcaaggaagcggggcggctgcagcgagtaggcggcggcggaggatccaagtattttagaacatgctcaagaggtgagcacttaacaatagagtttgagaatctagtagaaagtgatgaaggggagagcccaggaagcagtcataggcctcttactgaggaagaaattgttgacctaagagaaaggcattatgattccattgccgaaaaacaaaaagatcttgataagaaaattcaaaaagagttagccttacaagaagagaagttaagactagaagaagaagctttatacgctgcacagcgtgaagcagccagggcagcaaagcagcgaaagctcttggagcaagaaaggcagagaattgtgcagcaatatcatccttccaacaatggagaatatcaaagttcaggaccagaagatgacttcgaatcttgtttgagaaatatgaagtcacagtatgaagtttttcgaagtagtagactctcatcagatgctacagttttgacaccaaatacagaaagcagttgtgatttaatgaccaaaactaaatcaactagtggaaatgacgacagcacatccttagatctagagtgggaagatgaagaaggaatgaatagaatgcttccaatgagagaacgttccaaaacagaggaagacattctacgggcagcacttaagtatagcaacaagaagactggaagtaatcctacatcagcctctgatgattccaatgggctggagtgggaaaatgattttgttagtgccgaaatggatgataatggaaattccgagtattctggatttgtaaatcctgtattagaactgtctgattctggcataaggcattctgacacagatcaacagactcgatagggtaaaattgtgtgaccttgtttatcagttatgaccaaatgttaaaaaccaactagaatgtataagtgattgtgcttagcctttttgtaagggagatgtgtaagaaaccatgttgtaaatgcttattttattacaaaggagtagggatgataggatctgaattgatacagaattaagtgcaatttcatcatctgccttctgcttttcaagaccaatttaatggtcctgtcatgttactgattaaatttactttgtcttgtctttatagcatttctgtttactatggtagatttccactttcaatttttaaaattaattttactttgaatgatttatgaagcctatttcattgtctaactatgaaaatattaagacttttttgttaattctcagccgatgtgaaggaagcatgaggagggatcgtcagattcagatttagaatagtgttcccgtttccagcattatttatttctatgacttctttggattttattatctaatagtaagtacagttgatgtgggtagatgactctaagaaatgctgaagtatcggcattacatgtgtttatttacatgtcctagtatgataatgttgattcaatctgaacaaaagataatataaaaataacccttcagagtttggacatttcaagttggtaataataaaaaataatatttaagaagatatatatatatatatatttagttttttccacttcattttacatgccactatattgactttaattgatatacagtattaagtttttaggtgccattatttttaaaaaattctatatttccaatgaacgatgttagattttacacagaacatattctctgcatgatttcagaaaagaaaatctaaaaaggtaatacgggtatttcaaataaaatcctttctggtatgaaaggctccattgattttattaagccttcctttaccttgtagtacaaggtgctttaatgggatagaactaagcatatcaatatctataactgcattttgtgctagacaattactgttcttttctctaaaatgtatatgtcaatttacaaggccagggatagaaaacactccataattgctttccttgattttgctgaggatttggtatgattttagtaagcaaactgttttttggtttttccttaatgtttttaattttttttcctcttgcaacaatgacggtgcatgttcttataaatataggaaggtccagatataaatagtaacctaaagttcttgctgtgcttaaaaaaaaaaatcatgtggccctttcaatatttgaactgctaagcaatgacatctgtagttttatctccttttttatgtcatagaaattaatatgatactttaaatatgtaaatataatacattaggtaatgctattatttatatctgtcttaacataatttaagttgtagctgtgtcttggaaatatttttaaggtaatctatattcacattgcctgtgttaatgctttttaaagtttgtatacatcagatgtatatttttggtttggcataagctacgattgtaatttttcttggctttttgttcataaagaattttttgaaggaatggtaacaaatggtaatttacaaatggttgtgaataaacacatttttacactt

SEQ ID NO: 104808 - DNA, 2337 bp, Homo sapiens
  Payload ID: 584
  Gene Symbol: AP1AR
  Gene Name: adaptor-related protein complex 1 associated regulatory protein
  Uniprot ID: Q63HQ0
  ENST ID: ENST00000309703
  CDS Start-End: 260-1069
cgagggagtccagagccttgagcccggtgctcctccctcgcgcagcggtggctctgcggccgctggagtaaacactgcctttgttccctagcgcctcgtctttcgtcgccccgtgccctcacgccgccgggctctggccggcccgccctcggtccttgaaccccatttcggctcgtgccgtgcggatgcagctgccgggcctgggtttgggcattgagcgggaggaggaggaggagcggcggcgcctgggcggcatgcgatggggaactgctgctggacgcagtgcttcggactgcttcgcaaggaagcggggcggctgcagcgagtaggcggcggcggaggatccaagtattttagaacatgctcaagaggtgagcacttaacaatagagtttgagaatctagtagaaagtgatgaaggggagagcccaggaagcagtcataggcctcttactgaggaagaaattgttgacctaagagaaaggcattatgattccattgccgaaaaacaaaaagatcttgataagaaaattcaaaaagagcaagaaaggcagagaattgtgcagcaatatcatccttccaacaatggagaatatcaaagttcaggaccagaagatgacttcgaatcttgtttgagaaatatgaagtcacagtatgaagtttttcgaagtagtagactctcatcagatgctacagttttgacaccaaatacagaaagcagttgtgatttaatgaccaaaactaaatcaactagtggaaatgacgacagcacatccttagatctagagtgggaagatgaagaaggaatgaatagaatgcttccaatgagagaacgttccaaaacagaggaagacattctacgggcagcacttaagtatagcaacaagaagactggaagtaatcctacatcagcctctgatgattccaatgggctggagtgggaaaatgattttgttagtgccgaaatggatgataatggaaattccgagtattctggatttgtaaatcctgtattagaactgtctgattctggcataaggcattctgacacagatcaacagactcgatagggtaaaattgtgtgaccttgtttatcagttatgaccaaatgttaaaaaccaactagaatgtataagtgattgtgcttagcctttttgtaagggagatgtgtaagaaaccatgttgtaaatgcttattttattacaaaggagtagggatgataggatctgaattgatacagaattaagtgcaatttcatcatctgccttctgcttttcaagaccaatttaatggtcctgtcatgttactgattaaatttactttgtcttgtctttatagcatttctgtttactatggtagatttccactttcaatttttaaaattaattttactttgaatgatttatgaagcctatttcattgtctaactatgaaaatattaagacttttttgttaattctcagccgatgtgaaggaagcatgaggagggatcgtcagattcagatttagaatagtgttcccgtttccagcattatttatttctatgacttctttggattttattatctaatagtaagtacagttgatgtgggtagatgactctaagaaatgctgaagtatcggcattacatgtgtttatttacatgtcctagtatgataatgttgattcaatctgaacaaaagataatataaaaataacccttcagagtttggacatttcaagttggtaataataaaaaataatatttaagaagatatatatatatatatatttagttttttccacttcattttacatgccactatattgactttaattgatatacagtattaagtttttaggtgccattatttttaaaaaattctatatttccaatgaacgatgttagattttacacagaacatattctctgcatgatttcagaaaagaaaatctaaaaaggtaatacgggtatttcaaataaaatcctttctggtatgaaaggctccattgattttattaagccttcctttaccttgtagtacaaggtgctttaatgggatagaactaagcatatcaatatctataactgcattttgtgctagacaattactgttcttttctctaaaatgtatatgtcaatttacaaggccagggatagaaaacactccataattgctttccttgattttgctgaggatttggtatgattttagtaagcaaactgttttttggtttttccttaatgtttttaattttttttcctcttgcaacaatgacggtgcatgttcttataaatataggaaggtccagatataaatagtaacctaaagttcttgctgtgcttaaaaaaaaaaa

SEQ ID NO: 104809 - DNA, 333 bp, Homo sapiens
  Payload ID: 584
  Gene Symbol: AP1AR
  Gene Name: adaptor-related protein complex 1 associated regulatory protein
  ENST ID: ENST00000512741
  CDS Start-End: 1-230
atggagaatatcaaagttcaggaccagaagatgacttcgaatcttgtttgagaaatatgaagtcacagtatgaagtttttcgaagtagtagactctcatcagatgctacagttttgacaccaaatacagaaagcagttgtgatttaatgaccaaaactaaatcaactagtggaaatgacgacagcacatccttagatctagagtgggaagatgaagaaggtattttataattcacaattttacctgaaaaatttaacgtaatctgtgttgatttatgtaaatctaccttggtctttatttaaatggaaataaattcaaggccttgaaaaatca

SEQ ID NO: 104810 - DNA, 3903 bp, Homo sapiens
  Payload ID: 585
  Gene Symbol: AP1B1
  Gene Name: adaptor-related protein complex 1, beta 1 subunit
  Uniprot ID: Q10567
  ENST ID: ENST00000317368
  CDS Start-End: 188-2947
cccgcgcgcgggcagctcacttccgcccggcaggtgacagccgcggggctccgagccgccggcagcccggacgcaccgggagagcgagaggtggaggccgcggacattttggtgccaagccgaaccgagccggggcgccgggagctattgggacctgcggaagcctggctacagataagggaccaaaatgactgactcaaaatatttcaccacgaccaagaaaggggagatcttcgagctgaaggcagagctcaacagtgacaagaaggagaagaagaaggaggcagtgaagaaagtgattgcatcgatgaccgtgggcaaagatgtcagtgccctcttccccgatgtggtcaactgcatgcagacggacaacctggagctgaagaagctagtatacctctacttgatgaattacgccaagagtcagcctgacatggccattatggccgtcaacacctttgtgaaggactgtgaggaccccaaccccctcatccgagccctggcagtgcggaccatgggctgcatccgcgttgacaagatcacagagtacctgtgcgagccactccggaagtgcctgaaggacgaggatccatatgtgcgcaagacagcagctgtgtgcgtggccaagctccacgacatcaacgcccagctggtggaggaccagggcttcctggacacccttaaagacctcatctccgactctaaccccatggtggtggccaatgcagtggcagcgctctcagaaattgccgagtctcaccccagcagcaacctgctcgatctgaacccacagtccatcaacaagctgctgacagccctcaatgagtgcaccgagtggggccagatcttcatcctggactgcctcgccaactatatgcccaaggacgaccgcgaggcccagagcatctgtgagcgggtcacccccaggctctcccatgccaactccgctgtggtgctctctgctgtgaaggtgctgatgaagttcatggagatgttgtctaaggacttggactactacggcacactgctcaagaagctggccccacccctggtcacactgctgtcagccgagccagagctgcagtatgtggccctgcgcaacatcaatctcatcgtgcagaaaaggcctgagatcctgaagcatgagatgaaggtgttcttcgtgaagtacaacgaccctatctacgtgaagctggagaagctggacatcatgatccgcctggcctctcaggccaacatcgcccaggtgttggcagagctgaaagagtacgcaacagaagtggatgtggactttgtacggaaggctgtgcgtgctattggccgctgcgccatcaaggtggagcaatctgcggagcgctgtgtgagcacgctgctcgacctcatccagaccaaggtcaactatgtggtccaggaggccatcgtggtcatcaaggacatcttccgcaagtaccccaacaagtatgagagtgtgattgccacactgtgtgagaatctggactccctggatgagcctgaggcccgggctgccatgatctggattgtgggcgagtacgcggaacggatcgacaacgcagatgagctgctggagagcttcctcgagggcttccatgacgagagcacacaggtccagctgcagctgctgacagccattgtgaaactctttctaaagaagccaacagagacccaggagctggtgcagcaggtcctcagtttggccactcaggactcagataacccagacctgcgggaccgtggctacatctactggcgcctgctgtccacggacccggtggcagccaaggaggtggtgttggctgagaagccactcatctctgaagagacggacctcatcgagcccacactgttagacgagcttatctgctacatcggcacgctggcttccgtctaccataagcctcccagtgcctttgtggaggggggccggggcgtcgtgcacaagagcctgccacctcgcacggcctcgagtgagagcgcagagagccctgagacagcccctactggagcacctcctggggagcagccagatgtcatccccgcccagggcgacctgctgggtgacctcctcaacctggacctcggccccccagtgagcggcccacccctggccacctcctcggtgcagatgggagctgtggaccttcttggcggtggccttgacagcctgattgggggcaccaacttcgtggcacctccaacagcagcagtaccagccaatcttggagcacccatcggcagtggcctgagtgacctctttgacctgaccagtggcgtgggcaccctgtcaggatcatatgtggcccccaaagcagtgggctccatctccatggacctgcagctgaccaacaaggccttgcaggtcatgaccgactttgccatccagttcaaccgcaacagctttggcctggcccccgccgcccccctccaggtccacgcgccactcagccccaaccagacagtggagatctccctgcctctcagcacggtgggctcggtcatgaagatggagcctctgaacaacctccaggtggccgtgaagaacaacatcgatgtcttctacttcagcaccttgtacccactgcacatcctctttgtggaggacgggaagatggaccggcagatgttcctggccacatggaaggatattcccaatgagaatgaggcccagttccagatcagagactgccccctcaatgcagaggctgcgagcagcaagctgcagagcagcaacatcttcactgtcgccaagaggaacgtggagggccaggacatgctctaccagtccctgaagctgaccaacggcatctgggtgctggcggagctgcggatccagccgggcaaccccagctgcacgctgtccctgaagtgtcgagcaccagaggtgtcccagcacgtgtaccaggcctacgagaccatcctcaagaactgagaccccggccagcgcccaccccagccttctgcccgccccatcgaggaggcccctcgggggcagcacatcttcctcctcgcaggagggaccaggcggggctccaggccactcagtgggctccctggtcctgatggcagaacccacccgatccctggggtagggcaccaccccctcctggggtgagagcgcagtgcactcccgtgctctgggacacccctgctcctgtggctgtgatgtggggttaagtgaggtggggaccaaaggaaacagagccagagcagccacagaagctgtgcctgaagggtgagtgtggagcttgcccctccggctcacagccccggcagcccctggctccttggtctctccggttggtgttaaagggccctccactgccacctctcatgggatggaccctgccaacctggcctgggtgtgcagggaggggttccccttggtaccaggagagctgctcacttagggcctggggctcaaggagctgtaggtgccggcagaggggcagagctaggctgggaggagcccagggcctgcaccacccacttgcaaccaccaggctggtgccctgcagctgtgccagttgggccacagcctcccgagtgctgacccacatggtcaagaccaggcagaagctcccagagcccctgtctcgggctccccaccgactggcagctgcactatccccaactccccacttctgccccaagggtggtcactgcctgtgatacattcctcagtgtcgcctctgagcccaggcctcctgccacaaagactgggccgagagatggggctgggtaagcgggtgcgcctcctgtttgggtttcttcggggtttctctgtagtgtctgctgccctcctcctggcctcccaggtttcagttgtgtctgacagagcattaggttttcctgttactgctgtgtaataataaagaaagattcggc

SEQ ID NO: 104811 - DNA, 4176 bp, Homo sapiens
  Payload ID: 585
  Gene Symbol: AP1B1
  Gene Name: adaptor-related protein complex 1, beta 1 subunit
  Uniprot ID: Q10567
  ENST ID: ENST00000357586
  CDS Start-End: 188-3037
cccgcgcgcgggcagctcacttccgcccggcaggtgacagccgcggggctccgagccgccggcagcccggacgcaccgggagagcgagaggtggaggccgcggacattttggtgccaagccgaaccgagccggggcgccgggagctattgggacctgcggaagcctggctacagataagggaccaaaatgactgactcaaaatatttcaccacgaccaagaaaggggagatcttcgagctgaaggcagagctcaacagtgacaagaaggagaagaagaaggaggcagtgaagaaagtgattgcatcgatgaccgtgggcaaagatgtcagtgccctcttccccgatgtggtcaactgcatgcagacggacaacctggagctgaagaagctagtatacctctacttgatgaattacgccaagagtcagcctgacatggccattatggccgtcaacacctttgtgaaggactgtgaggaccccaaccccctcatccgagccctggcagtgcggaccatgggctgcatccgcgttgacaagatcacagagtacctgtgcgagccactccggaagtgcctgaaggacgaggatccatatgtgcgcaagacagcagctgtgtgcgtggccaagctccacgacatcaacgcccagctggtggaggaccagggcttcctggacacccttaaagacctcatctccgactctaaccccatggtggtggccaatgcagtggcagcgctctcagaaattgccgagtctcaccccagcagcaacctgctcgatctgaacccacagtccatcaacaagctgctgacagccctcaatgagtgcaccgagtggggccagatcttcatcctggactgcctcgccaactatatgcccaaggacgaccgcgaggcccagagcatctgtgagcgggtcacccccaggctctcccatgccaactccgctgtggtgctctctgctgtgaaggtgctgatgaagttcatggagatgttgtctaaggacttggactactacggcacactgctcaagaagctggccccacccctggtcacactgctgtcagccgagccagagctgcagtatgtggccctgcgcaacatcaatctcatcgtgcagaaaaggcctgagatcctgaagcatgagatgaaggtgttcttcgtgaagtacaacgaccctatctacgtgaagctggagaagctggacatcatgatccgcctggcctctcaggccaacatcgcccaggtgttggcagagctgaaagagtacgcaacagaagtggatgtggactttgtacggaaggctgtgcgtgctattggccgctgcgccatcaaggtggagcaatctgcggagcgctgtgtgagcacgctgctcgacctcatccagaccaaggtcaactatgtggtccaggaggccatcgtggtcatcaaggacatcttccgcaagtaccccaacaagtatgagagtgtgattgccacactgtgtgagaatctggactccctggatgagcctgaggcccgggctgccatgatctggattgtgggcgagtacgcggaacggatcgacaacgcagatgagctgctggagagcttcctcgagggcttccatgacgagagcacacaggtccagctgcagctgctgacagccattgtgaaactctttctaaagaagccaacagagacccaggagctggtgcagcaggtcctcagtttggccactcaggactcagataacccagacctgcgggaccgtggctacatctactggcgcctgctgtccacggacccggtggcagccaaggaggtggtgttggctgagaagccactcatctctgaagagacggacctcatcgagcccacactgttagacgagcttatctgctacatcggcacgctggcttccgtctaccataagcctcccagtgcctttgtggaggggggccggggcgtcgtgcacaagagcctgccacctcgcacggcctcgagtgagagcgcagagagccctgagacagcccctactggagcacctcctggggagcagccagatgtcatccccgcccagggcgacctgctgggtgacctcctcaacctggacctcggccccccagtgagcggcccacccctggccacctcctcggtgcagatgggagctgtggaccttcttggcggtggccttgacagcctgatgggggatgagcctgaagggattgggggcaccaacttcgtggcacctccaacagcagcagtaccagccaatcttggagcacccatcggcagtggcctgagtgacctctttgacctgaccagtggcgtgggcaccctgtcaggatcatatgtggcccccaaagcagtctggctcccagccatgaaggctaaggggctggagatctcaggcaccttcacccgccaggtgggctccatctccatggacctgcagctgaccaacaaggccttgcaggtcatgaccgactttgccatccagttcaaccgcaacagctttggcctggcccccgccgcccccctccaggtccacgcgccactcagccccaaccagacagtggagatctccctgcctctcagcacggtgggctcggtcatgaagatggagcctctgaacaacctccaggtggccgtgaagaacaacatcgatgtcttctacttcagcaccttgtacccactgcacatcctctttgtggaggacgggaagatggaccggcagatgttcctggccacatggaaggatattcccaatgagaatgaggcccagttccagatcagagactgccccctcaatgcagaggctgcgagcagcaagctgcagagcagcaacatcttcactgtcgccaagaggaacgtggagggccaggacatgctctaccagtccctgaagctgaccaacggcatctgggtgctggcggagctgcggatccagccgggcaaccccagctgcacggacttagagctgtccctgaagtgtcgagcaccagaggtgtcccagcacgtgtaccaggcctacgagaccatcctcaagaactgagaccccggccagcgcccaccccagccttctgcccgccccatcgaggaggcccctcgggggcagcacatcttcctcctcgcaggagggaccaggcggggctccaggccactcagtgggctccctggtcctgatggcagaacccacccgatccctggggtagggcaccaccccctcctggggtgagagcgcagtgcactcccgtgctctgggacacccctgctcctgtggctgtgatgtggggttaagtgaggtggggaccaaaggaaacagagccagagcagccacagaagctgtgcctgaagggtgagtgtggagcttgcccctccggctcacagccccggcagcccctggctccttggtctctccggttggtgttaaagggccctccactgccacctctcatgggatggaccctgccaacctggcctgggtgtgcagggaggggttccccttggtaccaggagagctgctcacttagggcctggggctcaaggagctgtaggtgccggcagaggggcagagctaggctgggaggagcccagggcctgcaccacccacttgcaaccaccaggctggtgccctgcagctgtgccagttgggccacagcctcccgagtgctgacccacatggtcaagaccaggcagaagctcccagagcccctgtctcgggctccccaccgactggcagctgcactatccccaactccccacttctgccccaagggtggtcactgcctgtgatacattcctcagtgtcgcctctgagcccaggcctcctgccacaaagactgggccgagagatggggctgggtaagcgggtgcgcctcctgtttgggtttcttcggggtttctctgtagtgtctgctgccctcctcctggcctcccaggtttcagttgtgtctgacagagcattaggttttcctgttactgctgtgtaataataaagaaagattcggcttttggcaatcacggacacttttttcccctccaccgaatgtcaggattgaaagctgcctccgagtggttggggatggttttctgaccctacggtaactagatctaatatatatcatcagaaaatatatattgtatgtttactcttattttcagaaagagaaaatgaataaaaatgatgacatc

SEQ ID NO: 104812 - DNA, 3838 bp, Homo sapiens
  Payload ID: 585
  Gene Symbol: AP1B1
  Gene Name: adaptor-related protein complex 1, beta 1 subunit
  Uniprot ID: Q10567
  ENST ID: ENST00000405198
  CDS Start-End: 33-2882
tgcagaagcctggctacagataagggaccaaaatgactgactcaaaatatttcaccacgaccaagaaaggggagatcttcgagctgaaggcagagctcaacagtgacaagaaggagaagaagaaggaggcagtgaagaaagtgattgcatcgatgaccgtgggcaaagatgtcagtgccctcttccccgatgtggtcaactgcatgcagacggacaacctggagctgaagaagctagtatacctctacttgatgaattacgccaagagtcagcctgacatggccattatggccgtcaacacctttgtgaaggactgtgaggaccccaaccccctcatccgagccctggcagtgcggaccatgggctgcatccgcgttgacaagatcacagagtacctgtgcgagccactccggaagtgcctgaaggacgaggatccatatgtgcgcaagacagcagctgtgtgcgtggccaagctccacgacatcaacgcccagctggtggaggaccagggcttcctggacacccttaaagacctcatctccgactctaaccccatggtggtggccaatgcagtggcagcgctctcagaaattgccgagtctcaccccagcagcaacctgctcgatctgaacccacagtccatcaacaagctgctgacagccctcaatgagtgcaccgagtggggccagatcttcatcctggactgcctcgccaactatatgcccaaggacgaccgcgaggcccagagcatctgtgagcgggtcacccccaggctctcccatgccaactccgctgtggtgctctctgctgtgaaggtgctgatgaagttcatggagatgttgtctaaggacttggactactacggcacactgctcaagaagctggccccacccctggtcacactgctgtcagccgagccagagctgcagtatgtggccctgcgcaacatcaatctcatcgtgcagaaaaggcctgagatcctgaagcatgagatgaaggtgttcttcgtgaagtacaacgaccctatctacgtgaagctggagaagctggacatcatgatccgcctggcctctcaggccaacatcgcccaggtgttggcagagctgaaagagtacgcaacagaagtggatgtggactttgtacggaaggctgtgcgtgctattggccgctgcgccatcaaggtggagcaatctgcggagcgctgtgtgagcacgctgctcgacctcatccagaccaaggtcaactatgtggtccaggaggccatcgtggtcatcaaggacatcttccgcaagtaccccaacaagtatgagagtgtgattgccacactgtgtgagaatctggactccctggatgagcctgaggcccgggctgccatgatctggattgtgggcgagtacgcggaacggatcgacaacgcagatgagctgctggagagcttcctcgagggcttccatgacgagagcacacaggtccagctgcagctgctgacagccattgtgaaactctttctaaagaagccaacagagacccaggagctggtgcagcaggtcctcagtttggccactcaggactcagataacccagacctgcgggaccgtggctacatctactggcgcctgctgtccacggacccggtggcagccaaggaggtggtgttggctgagaagccactcatctctgaagagacggacctcatcgagcccacactgttagacgagcttatctgctacatcggcacgctggcttccgtctaccataagcctcccagtgcctttgtggaggggggccggggcgtcgtgcacaagagcctgccacctcgcacggcctcgagtgagagcgcagagagccctgagacagcccctactggagcacctcctggggagcagccagatgtcatccccgcccagggcgacctgctgggtgacctcctcaacctggacctcggccccccagtgagcggcccacccctggccacctcctcggtgcagatgggagctgtggaccttcttggcggtggccttgacagcctgatgggggatgagcctgaagggattgggggcaccaacttcgtggcacctccaacagcagcagtaccagccaatcttggagcacccatcggcagtggcctgagtgacctctttgacctgaccagtggcgtgggcaccctgtcaggatcatatgtggcccccaaagcagtctggctcccagccatgaaggctaaggggctggagatctcaggcaccttcacccgccaggtgggctccatctccatggacctgcagctgaccaacaaggccttgcaggtcatgaccgactttgccatccagttcaaccgcaacagctttggcctggcccccgccgcccccctccaggtccacgcgccactcagccccaaccagacagtggagatctccctgcctctcagcacggtgggctcggtcatgaagatggagcctctgaacaacctccaggtggccgtgaagaacaacatcgatgtcttctacttcagcaccttgtacccactgcacatcctctttgtggaggacgggaagatggaccggcagatgttcctggccacatggaaggatattcccaatgagaatgaggcccagttccagatcagagactgccccctcaatgcagaggctgcgagcagcaagctgcagagcagcaacatcttcactgtcgccaagaggaacgtggagggccaggacatgctctaccagtccctgaagctgaccaacggcatctgggtgctggcggagctgcggatccagccgggcaaccccagctgcacggacttagagctgtccctgaagtgtcgagcaccagaggtgtcccagcacgtgtaccaggcctacgagaccatcctcaagaactgagaccccggccagcgcccaccccagccttctgcccgccccatcgaggaggcccctcgggggcagcacatcttcctcctcgcaggagggaccaggcggggctccaggccactcagtgggctccctggtcctgatggcagaacccacccgatccctggggtagggcaccaccccctcctggggtgagagcgcagtgcactcccgtgctctgggacacccctgctcctgtggctgtgatgtggggttaagtgaggtggggaccaaaggaaacagagccagagcagccacagaagctgtgcctgaagggtgagtgtggagcttgcccctccggctcacagccccggcagcccctggctccttggtctctccggttggtgttaaagggccctccactgccacctctcatgggatggaccctgccaacctggcctgggtgtgcagggaggggttccccttggtaccaggagagctgctcacttagggcctggggctcaaggagctgtaggtgccggcagaggggcagagctaggctgggaggagcccagggcctgcaccacccacttgcaaccaccaggctggtgccctgcagctgtgccagttgggccacagcctcccgagtgctgacccacatggtcaagaccaggcagaagctcccagagcccctgtctcgggctccccaccgactggcagctgcactatccccaactccccacttctgccccaagggtggtcactgcctgtgatacattcctcagtgtcgcctctgagcccaggcctcctgccacaaagactgggccgagagatggggctgggtaagcgggtgcgcctcctgtttgggtttcttcggggtttctctgtagtgtctgctgccctcctcctggcctcccaggtttcagttgtgtctgacagagcattaggttttcctgttactgctgtgtaataataaagaaagattcggc

SEQ ID NO: 104813 - DNA, 2935 bp, Homo sapiens
  Payload ID: 585
  Gene Symbol: AP1B1
  Gene Name: adaptor-related protein complex 1, beta 1 subunit
  Uniprot ID: Q10567
  ENST ID: ENST00000402502
  CDS Start-End: 33-2852
tgcagaagcctggctacagataagggaccaaaatgactgactcaaaatatttcaccacgaccaagaaaggggagatcttcgagctgaaggcagagctcaacagtgacaagaaggagaagaagaaggaggcagtgaagaaagtgattgcatcgatgaccgtgggcaaagatgtcagtgccctcttccccgatgtggtcaactgcatgcagacggacaacctggagctgaagaagctagtatacctctacttgatgaattacgccaagagtcagcctgacatggccattatggccgtcaacacctttgtgaaggactgtgaggaccccaaccccctcatccgagccctggcagtgcggaccatgggctgcatccgcgttgacaagatcacagagtacctgtgcgagccactccggaagtgcctgaaggacgaggatccatatgtgcgcaagacagcagctgtgtgcgtggccaagctccacgacatcaacgcccagctggtggaggaccagggcttcctggacacccttaaagacctcatctccgactctaaccccatggtggtggccaatgcagtggcagcgctctcagaaattgccgagtctcaccccagcagcaacctgctcgatctgaacccacagtccatcaacaagctgctgacagccctcaatgagtgcaccgagtggggccagatcttcatcctggactgcctcgccaactatatgcccaaggacgaccgcgaggcccagagcatctgtgagcgggtcacccccaggctctcccatgccaactccgctgtggtgctctctgctgtgaaggtgctgatgaagttcatggagatgttgtctaaggacttggactactacggcacactgctcaagaagctggccccacccctggtcacactgctgtcagccgagccagagctgcagtatgtggccctgcgcaacatcaatctcatcgtgcagaaaaggcctgagatcctgaagcatgagatgaaggtgttcttcgtgaagtacaacgaccctatctacgtgaagctggagaagctggacatcatgatccgcctggcctctcaggccaacatcgcccaggtgttggcagagctgaaagagtacgcaacagaagtggatgtggactttgtacggaaggctgtgcgtgctattggccgctgcgccatcaaggtggagcaatctgcggagcgctgtgtgagcacgctgctcgacctcatccagaccaaggtcaactatgtggtccaggaggccatcgtggtcatcaaggacatcttccgcaagtaccccaacaagtatgagagtgtgattgccacactgtgtgagaatctggactccctggatgagcctgaggcccgggctgccatgatctggattgtgggcgagtacgcggaacggatcgacaacgcagatgagctgctggagagcttcctcgagggcttccatgacgagagcacacaggtccagctgcagctgctgacagccattgtgaaactctttctaaagaagccaacagagacccaggagctggtgcagcaggtcctcagtttggccactcaggactcagataacccagacctgcgggaccgtggctacatctactggcgcctgctgtccacggacccggtggcagccaaggaggtggtgttggctgagaagccactcatctctgaagagacggacctcatcgagcccacactgttagacgagcttatctgctacatcggcacgctggcttccgtctaccataagcctcccagtgcctttgtggaggggggccggggcgtcgtgcacaagagcctgccacctcgcacggcctcgagtgagagcgcagagagccctgagacagcccctactggagcacctcctggggagcagccagatgtcatccccgcccagggcgacctgctgggtgacctcctcaacctggacctcggccccccagtgagcggcccacccctggccacctcctcggtgcagatgggagctgtggaccttcttggcggtggccttgacagcctgattgggggcaccaacttcgtggcacctccaacagcagcagtaccagccaatcttggagcacccatcggcagtggcctgagtgacctctttgacctgaccagtggcgtgggcaccctgtcaggatcatatgtggcccccaaagcagtctggctcccagccatgaaggctaaggggctggagatctcaggcaccttcacccgccaggtgggctccatctccatggacctgcagctgaccaacaaggccttgcaggtcatgaccgactttgccatccagttcaaccgcaacagctttggcctggcccccgccgcccccctccaggtccacgcgccactcagccccaaccagacagtggagatctccctgcctctcagcacggtgggctcggtcatgaagatggagcctctgaacaacctccaggtggccgtgaagaacaacatcgatgtcttctacttcagcaccttgtacccactgcacatcctctttgtggaggacgggaagatggaccggcagatgttcctggccacatggaaggatattcccaatgagaatgaggcccagttccagatcagagactgccccctcaatgcagaggctgcgagcagcaagctgcagagcagcaacatcttcactgtcgccaagaggaacgtggagggccaggacatgctctaccagtccctgaagctgaccaacggcatctgggtgctggcggagctgcggatccagccgggcaaccccagctgcacgctgtccctgaagtgtcgagcaccagaggtgtcccagcacgtgtaccaggcctacgagaccatcctcaagaactgagaccccggccagcgcccaccccagccttctgcccgccccatcgaggaggcccctcgggggcagcacatcttcctcctcgcagg

SEQ ID NO: 104814 - DNA, 2838 bp, Homo sapiens
  Payload ID: 585
  Gene Symbol: AP1B1
  Gene Name: adaptor-related protein complex 1, beta 1 subunit
  Uniprot ID: Q10567
  ENST ID: ENST00000415447
  CDS Start-End: 19-2838
tacagataagggaccaaaatgactgactcaaaatatttcaccacgaccaagaaaggggagatcttcgagctgaaggcagagctcaacagtgacaagaaggagaagaagaaggaggcagtgaagaaagtgattgcatcgatgaccgtgggcaaagatgtcagtgccctcttccccgatgtggtcaactgcatgcagacggacaacctggagctgaagaagctagtatacctctacttgatgaattacgccaagagtcagcctgacatggccattatggccgtcaacacctttgtgaaggactgtgaggaccccaaccccctcatccgagccctggcagtgcggaccatgggctgcatccgcgttgacaagatcacagagtacctgtgcgagccactccggaagtgcctgaaggacgaggatccatatgtgcgcaagacagcagctgtgtgcgtggccaagctccacgacatcaacgcccagctggtggaggaccagggcttcctggacacccttaaagacctcatctccgactctaaccccatggtggtggccaatgcagtggcagcgctctcagaaattgccgagtctcaccccagcagcaacctgctcgatctgaacccacagtccatcaacaagctgctgacagccctcaatgagtgcaccgagtggggccagatcttcatcctggactgcctcgccaactatatgcccaaggacgaccgcgaggcccagagcatctgtgagcgggtcacccccaggctctcccatgccaactccgctgtggtgctctctgctgtgaaggtgctgatgaagttcatggagatgttgtctaaggacttggactactacggcacactgctcaagaagctggccccacccctggtcacactgctgtcagccgagccagagctgcagtatgtggccctgcgcaacatcaatctcatcgtgcagaaaaggcctgagatcctgaagcatgagatgaaggtgttcttcgtgaagtacaacgaccctatctacgtgaagctggagaagctggacatcatgatccgcctggcctctcaggccaacatcgcccaggtgttggcagagctgaaagagtacgcaacagaagtggatgtggactttgtacggaaggctgtgcgtgctattggccgctgcgccatcaaggtggagcaatctgcggagcgctgtgtgagcacgctgctcgacctcatccagaccaaggtcaactatgtggtccaggaggccatcgtggtcatcaaggacatcttccgcaagtaccccaacaagtatgagagtgtgattgccacactgtgtgagaatctggactccctggatgagcctgaggcccgggctgccatgatctggattgtgggcgagtacgcggaacggatcgacaacgcagatgagctgctggagagcttcctcgagggcttccatgacgagagcacacaggtccagctgcagctgctgacagccattgtgaaactctttctaaagaagccaacagagacccaggagctggtgcagcaggtcctcagtttggccactcaggactcagataacccagacctgcgggaccgtggctacatctactggcgcctgctgtccacggacccggtggcagccaaggaggtggtgttggctgagaagccactcatctctgaagagacggacctcatcgagcccacactgttagacgagcttatctgctacatcggcacgctggcttccgtctaccataagcctcccagtgcctttgtggaggggggccggggcgtcgtgcacaagagcctgccacctcgcacggcctcgagtgagagcgcagagagccctgagacagcccctactggagcacctcctggggagcagccagatgtcatccccgcccagggcgacctgctgggtgacctcctcaacctggacctcggccccccagtgagcggcccacccctggccacctcctcggtgcagatgggagctgtggaccttcttggcggtggccttgacagcctgattgggggcaccaacttcgtggcacctccaacagcagcagtaccagccaatcttggagcacccatcggcagtggcctgagtgacctctttgacctgaccagtggcgtgggcaccctgtcaggatcatatgtggcccccaaagcagtctggctcccagccatgaaggctaaggggctggagatctcaggcaccttcacccgccaggtgggctccatctccatggacctgcagctgaccaacaaggccttgcaggtcatgaccgactttgccatccagttcaaccgcaacagctttggcctggcccccgccgcccccctccaggtccacgcgccactcagccccaaccagacagtggagatctccctgcctctcagcacggtgggctcggtcatgaagatggagcctctgaacaacctccaggtggccgtgaagaacaacatcgatgtcttctacttcagcaccttgtacccactgcacatcctctttgtggaggacgggaagatggaccggcagatgttcctggccacatggaaggatattcccaatgagaatgaggcccagttccagatcagagactgccccctcaatgcagaggctgcgagcagcaagctgcagagcagcaacatcttcactgtcgccaagaggaacgtggagggccaggacatgctctaccagtccctgaagctgaccaacggcatctgggtgctggcggagctgcggatccagccgggcaaccccagctgcacgctgtccctgaagtgtcgagcaccagaggtgtcccagcacgtgtaccaggcctacgagaccatcctcaagaactga

SEQ ID NO: 104815 - DNA, 519 bp, Homo sapiens
  Payload ID: 585
  Gene Symbol: AP1B1
  Gene Name: adaptor-related protein complex 1, beta 1 subunit
  ENST ID: ENST00000415756
  CDS Start-End: 1-519
ggacatcatgatccgcctggcctctcaggccaacatcgcccaggcacctgccagctctctcccttgggccttctacctggagcaggaggcagaatcccattctcctagggagtctgtgtatattcactgcccaggagtgttccagcagattgccccatcaggtgccccagccccatcttttctgtttgggccacaggtgttggcagagctgaaagagtacgcaacagaagtggatgtggactttgtacggaaggctgtgcgtgctattggccgctgcgccatcaaggtggagcaatctgcggagcgctgtgtgagcacgctgctcgacctcatccagaccaaggtcaactatgtggtccaggaggccatcgtggtcatcaaggacatcttccgcaagtaccccaacaagtatgagagtgtgattgccacactgtgtgagaatctggactccctggatgagcctgaggcccgggctgccatgatctggattgtgggcgagtacgcggaacggatcgacaa

SEQ ID NO: 104816 - DNA, 1908 bp, Homo sapiens
  Payload ID: 585
  Gene Symbol: AP1B1
  Gene Name: adaptor-related protein complex 1, beta 1 subunit
  ENST ID: ENST00000421126
  CDS Start-End: 175-1908
cacccatctgtcaccagcaggttgcgtcctgggaatttagggccctctgatgttgtattgggcctgcaggggaggggacaggctctgacggctttttcttctggagaggcaagaaattccgagcagctctcacattagttatctaagaagcctggctacagataagggaccaaaatgactgactcaaaatatttcaccacgaccaagaaaggggagatcttcgagctgaaggcagagctcaacagtgacaagaaggagaagaagaaggaggcagtgaagaaagtgattgcatcgatgaccgtgggcaaagatgtcagtgccctcttccccgatgtggtcaactgcatgcagacggacaacctggagctgaagaagctagtatacctctacttgatgaattacgccaagagtcagcctgacatggccattatggccgtcaacacctttgtgaaggactgtgaggaccccaaccccctcatccgagccctggcagtgcggaccatgggctgcatccgcgttgacaagatcacagagtacctgtgcgagccactccggaagtgcctgaaggacgaggatccatatgtgcgcaagacagcagctgtgtgcgtggccaagctccacgacatcaacgcccagctggtggaggaccagggcttcctggacacccttaaagacctcatctccgactctaaccccatggtggtggccaatgcagtggcagcgctctcagaaattgccgagtctcaccccagcagcaacctgctcgatctgaacccacagtccatcaacaagctgctgacagccctcaatgagtgcaccgagtggggccagatcttcatcctggactgcctcgccaactatatgcccaaggacgaccgcgaggcccagagcatctgtgagcgggtcacccccaggctctcccatgccaactccgctgtggtgctctctgctgtgaaggtgctgatgaagttcatggagatgttgtctaaggacttggactactacggcacactgctcaagaagctggccccacccctggtcacactgctgtcagccgagccagagctgcagtatgtggccctgcgcaacatcaatctcatcgtgcagaaaaggcctgagatcctgaagcatgagatgaaggtgttcttcgtgaagtacaacgaccctatctacgtgaagctggagaagctggacatcatgatccgcctggcctctcaggccaacatcgcccaggtgttggcagagctgaaagagtacgcaacagaagtggatgtggactttgtacggaaggctgtgcgtgctattggccgctgcgccatcaaggtggagcaatctgcggagcgctgtgtgagcacgctgctcgacctcatccagaccaaggtcaactatgtggtccaggaggccatcgtggtcatcaaggacatcttccgcaagtaccccaacaagtatgagagtgtgattgccacactgtgtgagaatctggactccctggatgagcctgaggcccgggctgccatgatctggattgtgggcgagtacgcggaacggatcgacaacgcagatgagctgctggagagcttcctcgagggcttccatgacgagagcacacaggtccagctgcagctgctgacagccattgtgaaactctttctaaagaagccaacagagacccaggagctggtgcagcaggtcctcagtttggccactcaggactcagataacccagacctgcgggaccgtggctacatctactggcgcctgctgtccacggacccggtggcagccaaggaggtggtgttggctgagaagccactcatctctgaagagacggacctcatcgagcccacactgttagacgagcttatctgctacatcggcacgctggcttccgtctaccataagcctccc

SEQ ID NO: 104817 - DNA, 4146 bp, Homo sapiens
  Payload ID: 585
  Gene Symbol: AP1B1
  Gene Name: adaptor-related protein complex 1, beta 1 subunit
  Uniprot ID: Q10567
  ENST ID: ENST00000432560
  CDS Start-End: 188-3007
cccgcgcgcgggcagctcacttccgcccggcaggtgacagccgcggggctccgagccgccggcagcccggacgcaccgggagagcgagaggtggaggccgcggacattttggtgccaagccgaaccgagccggggcgccgggagctattgggacctgcggaagcctggctacagataagggaccaaaatgactgactcaaaatatttcaccacgaccaagaaaggggagatcttcgagctgaaggcagagctcaacagtgacaagaaggagaagaagaaggaggcagtgaagaaagtgattgcatcgatgaccgtgggcaaagatgtcagtgccctcttccccgatgtggtcaactgcatgcagacggacaacctggagctgaagaagctagtatacctctacttgatgaattacgccaagagtcagcctgacatggccattatggccgtcaacacctttgtgaaggactgtgaggaccccaaccccctcatccgagccctggcagtgcggaccatgggctgcatccgcgttgacaagatcacagagtacctgtgcgagccactccggaagtgcctgaaggacgaggatccatatgtgcgcaagacagcagctgtgtgcgtggccaagctccacgacatcaacgcccagctggtggaggaccagggcttcctggacacccttaaagacctcatctccgactctaaccccatggtggtggccaatgcagtggcagcgctctcagaaattgccgagtctcaccccagcagcaacctgctcgatctgaacccacagtccatcaacaagctgctgacagccctcaatgagtgcaccgagtggggccagatcttcatcctggactgcctcgccaactatatgcccaaggacgaccgcgaggcccagagcatctgtgagcgggtcacccccaggctctcccatgccaactccgctgtggtgctctctgctgtgaaggtgctgatgaagttcatggagatgttgtctaaggacttggactactacggcacactgctcaagaagctggccccacccctggtcacactgctgtcagccgagccagagctgcagtatgtggccctgcgcaacatcaatctcatcgtgcagaaaaggcctgagatcctgaagcatgagatgaaggtgttcttcgtgaagtacaacgaccctatctacgtgaagctggagaagctggacatcatgatccgcctggcctctcaggccaacatcgcccaggtgttggcagagctgaaagagtacgcaacagaagtggatgtggactttgtacggaaggctgtgcgtgctattggccgctgcgccatcaaggtggagcaatctgcggagcgctgtgtgagcacgctgctcgacctcatccagaccaaggtcaactatgtggtccaggaggccatcgtggtcatcaaggacatcttccgcaagtaccccaacaagtatgagagtgtgattgccacactgtgtgagaatctggactccctggatgagcctgaggcccgggctgccatgatctggattgtgggcgagtacgcggaacggatcgacaacgcagatgagctgctggagagcttcctcgagggcttccatgacgagagcacacaggtccagctgcagctgctgacagccattgtgaaactctttctaaagaagccaacagagacccaggagctggtgcagcaggtcctcagtttggccactcaggactcagataacccagacctgcgggaccgtggctacatctactggcgcctgctgtccacggacccggtggcagccaaggaggtggtgttggctgagaagccactcatctctgaagagacggacctcatcgagcccacactgttagacgagcttatctgctacatcggcacgctggcttccgtctaccataagcctcccagtgcctttgtggaggggggccggggcgtcgtgcacaagagcctgccacctcgcacggcctcgagtgagagcgcagagagccctgagacagcccctactggagcacctcctggggagcagccagatgtcatccccgcccagggcgacctgctgggtgacctcctcaacctggacctcggccccccagtgagcggcccacccctggccacctcctcggtgcagatgggagctgtggaccttcttggcggtggccttgacagcctgattgggggcaccaacttcgtggcacctccaacagcagcagtaccagccaatcttggagcacccatcggcagtggcctgagtgacctctttgacctgaccagtggcgtgggcaccctgtcaggatcatatgtggcccccaaagcagtctggctcccagccatgaaggctaaggggctggagatctcaggcaccttcacccgccaggtgggctccatctccatggacctgcagctgaccaacaaggccttgcaggtcatgaccgactttgccatccagttcaaccgcaacagctttggcctggcccccgccgcccccctccaggtccacgcgccactcagccccaaccagacagtggagatctccctgcctctcagcacggtgggctcggtcatgaagatggagcctctgaacaacctccaggtggccgtgaagaacaacatcgatgtcttctacttcagcaccttgtacccactgcacatcctctttgtggaggacgggaagatggaccggcagatgttcctggccacatggaaggatattcccaatgagaatgaggcccagttccagatcagagactgccccctcaatgcagaggctgcgagcagcaagctgcagagcagcaacatcttcactgtcgccaagaggaacgtggagggccaggacatgctctaccagtccctgaagctgaccaacggcatctgggtgctggcggagctgcggatccagccgggcaaccccagctgcacgctgtccctgaagtgtcgagcaccagaggtgtcccagcacgtgtaccaggcctacgagaccatcctcaagaactgagaccccggccagcgcccaccccagccttctgcccgccccatcgaggaggcccctcgggggcagcacatcttcctcctcgcaggagggaccaggcggggctccaggccactcagtgggctccctggtcctgatggcagaacccacccgatccctggggtagggcaccaccccctcctggggtgagagcgcagtgcactcccgtgctctgggacacccctgctcctgtggctgtgatgtggggttaagtgaggtggggaccaaaggaaacagagccagagcagccacagaagctgtgcctgaagggtgagtgtggagcttgcccctccggctcacagccccggcagcccctggctccttggtctctccggttggtgttaaagggccctccactgccacctctcatgggatggaccctgccaacctggcctgggtgtgcagggaggggttccccttggtaccaggagagctgctcacttagggcctggggctcaaggagctgtaggtgccggcagaggggcagagctaggctgggaggagcccagggcctgcaccacccacttgcaaccaccaggctggtgccctgcagctgtgccagttgggccacagcctcccgagtgctgacccacatggtcaagaccaggcagaagctcccagagcccctgtctcgggctccccaccgactggcagctgcactatccccaactccccacttctgccccaagggtggtcactgcctgtgatacattcctcagtgtcgcctctgagcccaggcctcctgccacaaagactgggccgagagatggggctgggtaagcgggtgcgcctcctgtttgggtttcttcggggtttctctgtagtgtctgctgccctcctcctggcctcccaggtttcagttgtgtctgacagagcattaggttttcctgttactgctgtgtaataataaagaaagattcggcttttggcaatcacggacacttttttcccctccaccgaatgtcaggattgaaagctgcctccgagtggttggggatggttttctgaccctacggtaactagatctaatatatatcatcagaaaatatatattgtatgtttactcttattttcagaaagagaaaatgaataaaaatgatgacatc

SEQ ID NO: 104818 - DNA, 6969 bp, Homo sapiens
  Payload ID: 586
  Gene Symbol: AP1G1
  Gene Name: adaptor-related protein complex 1, gamma 1 subunit
  Uniprot ID: O43747
  ENST ID: ENST00000299980
  CDS Start-End: 443-2911
aagcggaaccaatgtccgtccgctacggggtaggccggatctttctcgctcagactcatcgcagcggtgactcggcagcagcgtctcgcgtcatcagtgacagccccgatccttgctacgtttgcgtcgctctgccaggagcagtcgcctcctccttggcaaatagtcctcggcagggtccgagttcttggataattcgagagaaaaggcacgataagttgcagtacgaggacacggaaacgaccaggagaggaggacagggagcgaagtttcctcaatagtgtgtgaagttagttaaaaactccctccttcctcaggatccctccgcctgcggtagcggtggtgaggccgagggagccgccattttggatgttcggttcctgctgccactgctgccgccgcccccggagctgctggtttcattcgaggtttcgggccgaggatgccagcccccatcagattgcgggagctgatccggaccatccggacagcccgaacccaagctgaagaacgagaaatgatccagaaagaatgtgctgcaatccggtcatcttttagagaagaagacaatacataccgatgtcggaatgtggcaaaattactgtatatgcacatgctgggctaccctgctcactttggacagttggagtgcctcaagcttattgcctctcaaaaatttacagacaaacgcattggctatttaggggcaatgctgctgttagatgaaagacaagatgtccatcttctcatgaccaactgtatcaagaatgatcttaatcatagcacgcaattcgtacaggggttagcactttgtaccctcggctgcatgggctcctcagagatgtgcagagatcttgcaggagaggtagagaagctcctgaaaacctccaactcttacttaagaaaaaaggcagcactgtgtgctgttcatgtcatcaggaaagttcctgaacttatggagatgtttttaccagcaacaaaaaatttattgaatgagaagaaccatggtgtcctccacacatctgtagtcctcctcacagaaatgtgtgagcgaagcccagacatgcttgcgcatttcagaaagcttgtgccccaattagttcgtattttaaagaacctcatcatgtccggatattcaccagaacatgatgtttctggtatcagtgacccctttttgcaggtacgaattttgcggttattaagaattttaggacgaaatgatgatgattcaagtgaagctatgaatgatatattagcacaggttgccactaatactgagactagtaaaaatgtaggaaatgctattctttatgaaacggttttgactatcatggatattaagtcagagagtggattgcgagtcctagccataaatatcctgggtcgtttcttattgaacaatgacaagaatattagatatgtggctctgacatctttgttgaagactgtacagacagatcataatgcagtacagaggcacagaagcacaattgtggactgtcttaaagatttggatgtctcaataaaacggcgtgcaatggaattgagttttgccctggtaaatgggaataatatccgaggcatgatgaaagaattactttattttctggattcgtgtgagccagaatttaaagcagactgtgcatctggaatctttcttgctgcagaaaagtatgcaccttccaaacgatggcatatagacacaattatgcgtgttttgacaacggcaggaagttatgttcgtgatgatgcagtccccaatttaatccagttaataactaatagtgtggagatgcatgcctatactgtccagcgcctgtacaaagcaattcttggtgattattctcaacaacctttggtacaagtggctgcatggtgtataggtgaatatggtgatcttcttgtatctggccagtgtgaagaggaagagcctattcaggtaacagaggatgaagtgttggatattttagaaagtgtcctaatctctaatatgtccacctctgtgacacgaggttatgccctcactgccattatgaagctttccactcgattcacttgtactgtaaaccgaattaagaaagtggtttccatctacggaagcagcattgatgtggaactccagcagagggcagtagaatataatgcacttttcaagaaatatgaccacatgaggtctgccctacttgagagaatgcctgtcatggaaaaagtgaccacaaatggccctactgagattgtgcagacaaatggagagacagaaccagctccactagagaccaaaccgccaccctctgggccacagcccaccagccaggccaatgatttattggatttgttgggaggaaatgacataacacctgttattccaactgcgcctacaagcaaaccatcttctgctggtggagaacttcttgatttgctgggagacatcaaccttacaggtgctccagctgctgctcctgcccctgcctcagtcccacagatatcccagccccccttcttgttggatgggctttcatcacagcctctcttcaatgatattgctgcaggcatcccctccatcacagcatacagtaagaatggcttgaagatagaattcacctttgaacggtcaaataccaaccccagtgtaacagtgataacgatacaggcctccaacagcacagagctagatatgacggactttgttttccaagctgcagtaccaaagacattccagctgcagctcttgtctcctagcagcagcattgtcccagcatttaacacggggaccatcacacaagtcattaaagttctgaaccctcagaagcaacagctgcgaatgcggatcaagcttacatataatcacaagggctcagcaatgcaagatctagcagaggtgaacaactttccccctcagtcctggcaatgagggtttggcaccattctcattctttatcccactcaatcaaaggaactctgggaaggaggttgtgattgctggcaagtcccccccaactgtaccacgggcatgaggagctgaagagaactgctgaggaggattttcctaaagttactgctgaccttgaagcattgttaaagactaatgtcctctcctccactgttgaggctggctgcttctggaggctactttgcactcttcctcttctcctttttccgcacttctccacccctcccacatttacagccagaatcaacattccctgggcccctgaggaaataagcagctggtctggaggagaggactgcaatccatggcgaaaaaacactcactttgtctctgcagcaaagagttgccccttctttctactgttgtttctctgtggactgggcaaggtggggtatttattcctcactagctgggttaccatcttcaggcacttttaacatctggcattcggaatggaaatgtaataatggacattagggagccctgcctttttctactggttcccccaatgtttgaaagaggcattaggctcctggtagccttttctgtgcattgctgtatacacacagacacacacatgtatgtttgttaccaagaactggtcagaccttgcgagtttatttgtaaacactggacagatggagttaaaaagagcttttgttgagatttggcatgaaggatatggtgctctatttgtaatagaaacttccaaggctcttccagctcccctttctcgccattctttagctgtagtcatgaatagtctccatgattttcaaaattgattccctttaaagtgcaaaatggtcaccttctaaaagatatattcatagttattaatgaccctattcccaccacaaattttaaagtgctcctaagcccataacttgcctgtttgaactatggtaatgggtggaagaggagttcaccagtttcaaagatcagactctgtatcaaaagtacctttgcccttaggaagagtgagtattggagtcatcttatctattactccaaacctccctttttatttcttgagcctggcttggaccttggcattccgtttgaattccttctaactggaacatttgtgttgtatctgtaacactggcactgaaataaagaccacacggttaaagaaatctttccatattgtactttatggtgttggagtgaagccttgtagcttccatacccctatgtcagaggaggtcttacggacaccatagggtaggaatagcctttcctcagtctgagaaattggtctcttttaaaagacgaatctcatgaatattcacatcaaagacttgagctttttaaactagtgagagtgccaagtgctttttagaaaggacccatatgttatcaaactttgaaattgagttgctggaatgaagtagaggtgactctctctgtggtacacattgaatgtactatgtatgttcaagtattcaggcgccatgtcttatatactgaagaaagaaaaagtgaggcccaccttgctcttacaatgtttgcaattgttactgtattgaatacagtataatgactactatggcttcaatcttaaacctggaaacaaatatccctttttttccccttcatttcaccaagcctttacttaaaatcttcagtgtcttgtcaaatctagctctgtatcagatgctggaatattcctaacatttgacaaactggagttgaactaaaggctccacgggaaagtttctggtcttactagtgtgtatgagcaagatctgctaaaacttactccactgggtaaatggttgactgagtcaagaacaggataatatctcctgcatagttttcagtaatgtaagtgtggactagtgcatatttcagacaactgctctgcctgtgcaatgaaaaatagcctttaagggtttctttgcagactgatttcattggatggatacttaatgctgtgaaacatgataggattaacataatgttggtggatttcttgaatagaatttgtcttaacattcctctttgtgtagaggctttattttctctcttatatttgtagctaaccagctcaggtttttttatttgaactgggttgaatctctgaagaaatctgttcaagaccatgctataagacactgtcagctaatggagctgggaagggtctactctgctgacagagcatttccttgggtgatcatagtttcgaggtagagtttatgatcattcatagctttgtctagaaggagtaaaatatcatggccttaacacaaagggtgctgcgtagaatatgaattgattttggaatcagaacacaagcaccatactgaaggactagcagccaaataactgcctaggatactgatggttgtgaagactgtttcaaatgattggatctttgaaagcttcagcgtgccttagtttctaggatcagaattagttttcctctcacttggccttgcagctaaatggagaaatgtttcaatttctttgaatacttgcacatttcaataattcctttcccgagtataaccactcaagggggagcaaatttggatggatttacgacttcacaggcattgtgaggaaagagcattttccaaggctgttttgataaccctggggtgataagcagtgagccctcacacacttactttgacaatttcacatgcacttgtacttcattatttccctcttcaagagtcgtttctattctagtttctgccccatcccggggaatcctaaaggagaattaattcatctaagtaatctcaaaaaactgtaggaagggtgctctccctgagaagcttctcccacagtgctttggtgctgttaccttgaggtggtttggacagtcacggaagttttaggctgtgcatagtgatcatctgttaattttaaggtctttatcatttaaagaaacattcctcagtgtaacatttgggaggggattctttcctcttgctagtttaaaggtgtgatttgtactccttgtttgtcccattcatatatgaaaatagacttttaaaactgtccaacactaatggtttatataacatgcttcccattttttttatgtcgtagaaattggaagttagggagtactgctttcaaggttcaacttcattatcttctgcattggaaaatatttgggccatgagaactaggggaaaggagtttgaatgtgtctatttttttctagtgaatgtattttaaccacagtgtcctaaactgagaaaactagagaggaaaaagtgggtgttcatgaactttgtagttgggagagtggttttacatgtctgtgtattcatgactttgggagtgggtaggatcattggagagagaattgcacagaaagtcctgaagtttaaaacacttttgaccagctttggctcgggagagtggggctgcttgtagaactggaagtgaataactttttcaagcaatatcagtgagtgggtcccatcgacagggttccaggacctggaacactttaacagaaggaaatgccgaagcagcttgcacagttgctttacagacttccaagaggctgattctggcttcaagatggagccttggagttggtttttttttttttttttttcttccctcaaagaacctgcggttgcgctttgtgtgttttgtttttgttttccatttgggggccccatgggaaagagcttctgaactctttcctttatgaactcccactgtgttcctataaaggcccttttctttcttagtgttgtaagttacattttcattatgccccatcacatcttctttactgtaaaaatattaaaaagctgtttccaagtgggacagctaatgaagctctaattattgcagacatatttttgagatgtaaaaaaaaaaatttaaagttaaatgataagtcttagaggcgagtgaggaataaaatggatgtaaacatttacatgggatgcattagaattctgctgtgtgtactgtcttttggttgaaacaaattatgaacagtgactaataataaaaagtcaatacccaatgatttaaaa

SEQ ID NO: 104819 - DNA, 3593 bp, Homo sapiens
  Payload ID: 586
  Gene Symbol: AP1G1
  Gene Name: adaptor-related protein complex 1, gamma 1 subunit
  Uniprot ID: O43747
  ENST ID: ENST00000393512
  CDS Start-End: 443-2920
aagcggaaccaatgtccgtccgctacggggtaggccggatctttctcgctcagactcatcgcagcggtgactcggcagcagcgtctcgcgtcatcagtgacagccccgatccttgctacgtttgcgtcgctctgccaggagcagtcgcctcctccttggcaaatagtcctcggcagggtccgagttcttggataattcgagagaaaaggcacgataagttgcagtacgaggacacggaaacgaccaggagaggaggacagggagcgaagtttcctcaatagtgtgtgaagttagttaaaaactccctccttcctcaggatccctccgcctgcggtagcggtggtgaggccgagggagccgccattttggatgttcggttcctgctgccactgctgccgccgcccccggagctgctggtttcattcgaggtttcgggccgaggatgccagcccccatcagattgcgggagctgatccggaccatccggacagcccgaacccaagctgaagaacgagaaatgatccagaaagaatgtgctgcaatccggtcatcttttagagaagaagacaatacataccgatgtcggaatgtggcaaaattactgtatatgcacatgctgggctaccctgctcactttggacagttggagtgcctcaagcttattgcctctcaaaaatttacagacaaacgcattggctatttaggggcaatgctgctgttagatgaaagacaagatgtccatcttctcatgaccaactgtatcaagaatgatcttaatcatagcacgcaattcgtacaggggttagcactttgtaccctcggctgcatgggctcctcagagatgtgcagagatcttgcaggagaggtagagaagctcctgaaaacctccaactcttacttaagaaaaaaggcagcactgtgtgctgttcatgtcatcaggaaagttcctgaacttatggagatgtttttaccagcaacaaaaaatttattgaatgagaagaaccatggtgtcctccacacatctgtagtcctcctcacagaaatgtgtgagcgaagcccagacatgcttgcgcatttcagaaagaatgaaaagcttgtgccccaattagttcgtattttaaagaacctcatcatgtccggatattcaccagaacatgatgtttctggtatcagtgacccctttttgcaggtacgaattttgcggttattaagaattttaggacgaaatgatgatgattcaagtgaagctatgaatgatatattagcacaggttgccactaatactgagactagtaaaaatgtaggaaatgctattctttatgaaacggttttgactatcatggatattaagtcagagagtggattgcgagtcctagccataaatatcctgggtcgtttcttattgaacaatgacaagaatattagatatgtggctctgacatctttgttgaagactgtacagacagatcataatgcagtacagaggcacagaagcacaattgtggactgtcttaaagatttggatgtctcaataaaacggcgtgcaatggaattgagttttgccctggtaaatgggaataatatccgaggcatgatgaaagaattactttattttctggattcgtgtgagccagaatttaaagcagactgtgcatctggaatctttcttgctgcagaaaagtatgcaccttccaaacgatggcatatagacacaattatgcgtgttttgacaacggcaggaagttatgttcgtgatgatgcagtccccaatttaatccagttaataactaatagtgtggagatgcatgcctatactgtccagcgcctgtacaaagcaattcttggtgattattctcaacaacctttggtacaagtggctgcatggtgtataggtgaatatggtgatcttcttgtatctggccagtgtgaagaggaagagcctattcaggtaacagaggatgaagtgttggatattttagaaagtgtcctaatctctaatatgtccacctctgtgacacgaggttatgccctcactgccattatgaagctttccactcgattcacttgtactgtaaaccgaattaagaaagtggtttccatctacggaagcagcattgatgtggaactccagcagagggcagtagaatataatgcacttttcaagaaatatgaccacatgaggtctgccctacttgagagaatgcctgtcatggaaaaagtgaccacaaatggccctactgagattgtgcagacaaatggagagacagaaccagctccactagagaccaaaccgccaccctctgggccacagcccaccagccaggccaatgatttattggatttgttgggaggaaatgacataacacctgttattccaactgcgcctacaagcaaaccatcttctgctggtggagaacttcttgatttgctgggagacatcaaccttacaggtgctccagctgctgctcctgcccctgcctcagtcccacagatatcccagccccccttcttgttggatgggctttcatcacagcctctcttcaatgatattgctgcaggcatcccctccatcacagcatacagtaagaatggcttgaagatagaattcacctttgaacggtcaaataccaaccccagtgtaacagtgataacgatacaggcctccaacagcacagagctagatatgacggactttgttttccaagctgcagtaccaaagacattccagctgcagctcttgtctcctagcagcagcattgtcccagcatttaacacggggaccatcacacaagtcattaaagttctgaaccctcagaagcaacagctgcgaatgcggatcaagcttacatataatcacaagggctcagcaatgcaagatctagcagaggtgaacaactttccccctcagtcctggcaatgagggtttggcaccattctcattctttatcccactcaatcaaaggaactctgggaaggaggttgtgattgctggcaagtcccccccaactgtaccacgggcatgaggagctgaagagaactgctgaggaggattttcctaaagttactgctgaccttgaagcattgttaaagactaatgtcctctcctccactgttgaggctggctgcttctggaggctactttgcactcttcctcttctcctttttccgcacttctccacccctcccacatttacagccagaatcaacattccctgggcccctgaggaaataagcagctggtctggaggagaggactgcaatccatggcgaaaaaacactcactttgtctctgcagcaaagagttgccccttctttctactgttgtttctctgtggactgggcaaggtggggtatttattcctcactagctgggttaccatcttcaggcacttttaacatctggcattcggaatggaaatgtaataatggacattagggagccctgcctttttctactggttcccccaatgtttgaaagaggcattaggctcctggtagccttttctgtgcattgctgtatacacacagacacacacatgtatgtttgttaccaagaactggtcagaccttgcgagtttatttgtaaacactgg

SEQ ID NO: 104820 - DNA, 1166 bp, Homo sapiens
  Payload ID: 586
  Gene Symbol: AP1G1
  Gene Name: adaptor-related protein complex 1, gamma 1 subunit
  ENST ID: ENST00000450149
  CDS Start-End: 74-604
atgttcggttcctgctgccactgctgccgccgcccccggagctgctggtttcattcgaggtttcgggccgaggatgccagcccccatcagattgcgggagctgatccggaccatccggacagcccgaacccaagctgaagaacgagaaatgatccagaaagaatgtgctgcaatccggtcatcttttagagaagaagacaatacataccgatgtcggaatgtggcaaaattactgtatatgcacatgctgggctaccctgctcactttggacagttggagtgcctcaagcttattgcctctcaaaaatttacagacaaacgcattggctatttaggggcaatgctgctgttagatgaaagacaagatgtccatcttctcatgaccaactgtatcaagaatgatcttaatcatagcacgcaattcgtacaggggttagcactttgtaccctcggctgcatgggctcctcagagatgtgcagagatcttgcaggagaggtagagaagctcctgaaaacctccaactcttacttaagaaaaaaggaaatgatttataaacaaacaaatgttactggatatatcctaggtggcataccaaattcctaagttatctgattctaaacagtattacagcaaggcagcactgtgtgctgttcatgtcatcaggaaagttcctgaacttatggagatgtttttaccagcaacaaaaaatttattgaatgagaagaaccatggtgtcctccacacatctgtagtcctcctcacagaaatgtgtgagcgaagcccagacatgcttgcgcatttcagaaagcttgtgccccaattagttcgtattttaaagaacctcatcatgtccggatattcaccagaacatgatgtttctggtatcagtgacccctttttgcaggtacgaattttgcggttattaagaattttaggacgaaatgatgatgattcaagtgaagctatgaatgatatattagcacaggttgccactaatactgagactagtaaaaatgtaggaaatgctattctttatgaaacggttttgactatcatggatattaagtcagagagtggattgcgagtcctagccataaatatcctgggtcgtttcttattgaacaatgacaagaatattagatatgtggctctgacatctttgttg

SEQ ID NO: 104821 - DNA, 2723 bp, Homo sapiens
  Payload ID: 586
  Gene Symbol: AP1G1
  Gene Name: adaptor-related protein complex 1, gamma 1 subunit
  ENST ID: ENST00000564155
  CDS Start-End: 805-1548
attttggccagactggtctcgaactcctgaccttgtaatctggccaaggttttggtttattatattttgacaagtcttaataggaataaaatcatgaatgttttggtgattaaatcttttaattctcctctttgcttttttgaataaagtagattctcaggtcactttcccacccaagcatatttaaggccaacgtagttcttgtagtctttctgcttcacttttaaatgtgaagtcttataaaaaatggtattgaattacttttaaaattctgaactggaagaatttggggtcaacattttgaggctctgacccttttatagattaaaaattatttaaaaattatcaaagaagagaatgaacagtacaaatttcttttgtggcaaagtaatagttggtacttttgtctagcaaagtttagggagtggcatatatatatgtgttttttccacaccatcattgttgctgaatggggatggcatatttaacagacaaaaatctagtgttacaatgagaatagtataatgcgaatgtcagataaatggatgaaagtaaagtgttttgtttttgaaaaactatataaattaagaaaaaatgagtatttcagtattttaaccagaaaattctggcttattaaacattatctctgcttatttgtgaattttcttttgggtattttatttcgtttgtcattttatctatagccgaattaagaaagtggtttccatctacggaagcagcattgatgtggaactccagcagagggcagtagaatataatgcacttttcaagaaatatgaccacatgaggtctgccctacttgagagaatgcctgtcatggaaaaagtgaccacaaatggccctactgagattgtgcagacaaatggagagacagaaccagctccactagagaccaaaccgccaccctctgggccacagcccaccagccaggccaatgatttattggatttgttgggaggaaatgacataacacctgttattccaactgcgcctacaagcaaaccatcttctgctggtggagaacttcttgatttgctgggagacatcaaccttacaggtgctccagctgctgctcctgcccctgcctcagtcccacagatatcccagccccccttcttgttggatgggctttcatcacagcctctcttcaatgatattgctgcaggcatcccctccatcacagcatacagtaagaatggcttgaagatagaattcacctttgaacggtcaaataccaaccccagtgtaacagtgataacgatacaggcctccaacagcacagagctagatatgacggactttgttttccaagctgcagtaccaaagacattccagctgcagctcttgtctcctagcagcagcattgtcccagcatttaacacggggaccatcacacaagtcattaaagttctgaaccctcagaagcaacagctgcgaatgcggatcaagcttacatataatcacaagggctcagcaatgcaagatctagcagaggtgaacaactttccccctcagtcctggcaatgagggtttggcaccattctcattctttatcccactcaatcaaaggaactctgggaaggaggttgtgattgctggcaagtcccccccaactgtaccacgggcatgaggagctgaagagaactgctgaggaggattttcctaaagttactgctgaccttgaagcattgttaaagactaatgtcctctcctccactgttgaggctggctgcttctggaggctactttgcactcttcctcttctcctttttccgcacttctccacccctcccacatttacagccagaatcaacattccctgggcccctgaggaaataagcagctggtctggaggagaggactgcaatccatggcgaaaaaacactcactttgtctctgcagcaaagagttgccccttctttctactgttgtttctctgtggactgggcaaggtggggtatttattcctcactagctgggttaccatcttcaggcacttttaacatctggcattcggaatggaaatgtaataatggacattagggagccctgcctttttctactggttcccccaatgtttgaaagaggcattaggctcctggtagccttttctgtgcattgctgtatacacacagacacacacatgtatgtttgttaccaagaactggtcagaccttgcgagtttatttgtaaacactggacagatggagttaaaaagagcttttgttgagatttggcatgaaggatatggtgctctatttgtaatagaaacttccaaggctcttccagctcccctttctcgccattctttagctgtagtcatgaatagtctccatgattttcaaaattgattccctttaaagtgcaaaatggtcaccttctaaaagatatattcatagttattaatgaccctattcccaccacaaattttaaagtgctcctaagcccataacttgcctgtttgaactatggtaatgggtggaagaggagttcaccagtttcaaagatcagactctgtatcaaaagtacctttgcccttaggaagagtgagtattggagtcatcttatctattactccaaacctccctttttatttcttgagcctggcttggaccttggcattccgtttgaattccttctaactggaacatttgtgttgtatctgtaacactggcactgaaataaagaccacacggttaaag

SEQ ID NO: 104822 - DNA, 4554 bp, Homo sapiens
  Payload ID: 586
  Gene Symbol: AP1G1
  Gene Name: adaptor-related protein complex 1, gamma 1 subunit
  Uniprot ID: O43747
  ENST ID: ENST00000569748
  CDS Start-End: 911-3379
gacagccccgatccttgctacgtttgcgtcgctctgccaggagcagtcgcctcctccttggcaaatagtcctcggcagggtccgagttcttggataattcgagagaaaaggcacgataagttgcagtacgaggacacggaaacgaccaggagaggaggacagggagcgaagtttcctcaatagtgtgtgaagttagttaaaaactccctccttcctcaggatccctccgcctgcggtagcggtggtgaggccgagggagccgccattttggatgttcggttcctgctgccactgctgccgccgcccccggagctgctggtttcattcgaggtttcgggccgtttcaggggtccagtcccaggctgtgggtgttgagaagagaagacagagaagctgggccaggagaggccgggagccccaggggctgctccgacttctggagggccgaccccgaggcctcggaccgggaggttccgcgcgccgcggcgttccgtgttgtggcgttgccccgccgctcctggccctgcggacgtcagcgtctaataattctcccggtcttcctgattgcctgaaagagtcgggacggttcggttgattgtgtttcccggttaggactcggtgtaggagatccatcgaaccactcgctcagggtaatgtttatgaagcagattatgtttatgaagcagattaaatggcttttgggaggcaagagctgtcaaatgttttctcatatgtggattccctccctgtgctgaatacttagctttttggtgcttactgacacttgtgtggtatttttttttctcccctattatatatccctgagcacggaaatctgtccatggagaaaaatattaatctgaggaactgtcaaacactgaacacctatgtaatgctcactcatttaaggatgccagcccccatcagattgcgggagctgatccggaccatccggacagcccgaacccaagctgaagaacgagaaatgatccagaaagaatgtgctgcaatccggtcatcttttagagaagaagacaatacataccgatgtcggaatgtggcaaaattactgtatatgcacatgctgggctaccctgctcactttggacagttggagtgcctcaagcttattgcctctcaaaaatttacagacaaacgcattggctatttaggggcaatgctgctgttagatgaaagacaagatgtccatcttctcatgaccaactgtatcaagaatgatcttaatcatagcacgcaattcgtacaggggttagcactttgtaccctcggctgcatgggctcctcagagatgtgcagagatcttgcaggagaggtagagaagctcctgaaaacctccaactcttacttaagaaaaaaggcagcactgtgtgctgttcatgtcatcaggaaagttcctgaacttatggagatgtttttaccagcaacaaaaaatttattgaatgagaagaaccatggtgtcctccacacatctgtagtcctcctcacagaaatgtgtgagcgaagcccagacatgcttgcgcatttcagaaagcttgtgccccaattagttcgtattttaaagaacctcatcatgtccggatattcaccagaacatgatgtttctggtatcagtgacccctttttgcaggtacgaattttgcggttattaagaattttaggacgaaatgatgatgattcaagtgaagctatgaatgatatattagcacaggttgccactaatactgagactagtaaaaatgtaggaaatgctattctttatgaaacggttttgactatcatggatattaagtcagagagtggattgcgagtcctagccataaatatcctgggtcgtttcttattgaacaatgacaagaatattagatatgtggctctgacatctttgttgaagactgtacagacagatcataatgcagtacagaggcacagaagcacaattgtggactgtcttaaagatttggatgtctcaataaaacggcgtgcaatggaattgagttttgccctggtaaatgggaataatatccgaggcatgatgaaagaattactttattttctggattcgtgtgagccagaatttaaagcagactgtgcatctggaatctttcttgctgcagaaaagtatgcaccttccaaacgatggcatatagacacaattatgcgtgttttgacaacggcaggaagttatgttcgtgatgatgcagtccccaatttaatccagttaataactaatagtgtggagatgcatgcctatactgtccagcgcctgtacaaagcaattcttggtgattattctcaacaacctttggtacaagtggctgcatggtgtataggtgaatatggtgatcttcttgtatctggccagtgtgaagaggaagagcctattcaggtaacagaggatgaagtgttggatattttagaaagtgtcctaatctctaatatgtccacctctgtgacacgaggttatgccctcactgccattatgaagctttccactcgattcacttgtactgtaaaccgaattaagaaagtggtttccatctacggaagcagcattgatgtggaactccagcagagggcagtagaatataatgcacttttcaagaaatatgaccacatgaggtctgccctacttgagagaatgcctgtcatggaaaaagtgaccacaaatggccctactgagattgtgcagacaaatggagagacagaaccagctccactagagaccaaaccgccaccctctgggccacagcccaccagccaggccaatgatttattggatttgttgggaggaaatgacataacacctgttattccaactgcgcctacaagcaaaccatcttctgctggtggagaacttcttgatttgctgggagacatcaaccttacaggtgctccagctgctgctcctgcccctgcctcagtcccacagatatcccagccccccttcttgttggatgggctttcatcacagcctctcttcaatgatattgctgcaggcatcccctccatcacagcatacagtaagaatggcttgaagatagaattcacctttgaacggtcaaataccaaccccagtgtaacagtgataacgatacaggcctccaacagcacagagctagatatgacggactttgttttccaagctgcagtaccaaagacattccagctgcagctcttgtctcctagcagcagcattgtcccagcatttaacacggggaccatcacacaagtcattaaagttctgaaccctcagaagcaacagctgcgaatgcggatcaagcttacatataatcacaagggctcagcaatgcaagatctagcagaggtgaacaactttccccctcagtcctggcaatgagggtttggcaccattctcattctttatcccactcaatcaaaggaactctgggaaggaggttgtgattgctggcaagtcccccccaactgtaccacgggcatgaggagctgaagagaactgctgaggaggattttcctaaagttactgctgaccttgaagcattgttaaagactaatgtcctctcctccactgttgaggctggctgcttctggaggctactttgcactcttcctcttctcctttttccgcacttctccacccctcccacatttacagccagaatcaacattccctgggcccctgaggaaataagcagctggtctggaggagaggactgcaatccatggcgaaaaaacactcactttgtctctgcagcaaagagttgccccttctttctactgttgtttctctgtggactgggcaaggtggggtatttattcctcactagctgggttaccatcttcaggcacttttaacatctggcattcggaatggaaatgtaataatggacattagggagccctgcctttttctactggttcccccaatgtttgaaagaggcattaggctcctggtagccttttctgtgcattgctgtatacacacagacacacacatgtatgtttgttaccaagaactggtcagaccttgcgagtttatttgtaaacactggacagatggagttaaaaagagcttttgttgagatttggcatgaaggatatggtgctctatttgtaatagaaacttccaaggctcttccagctcccctttctcgccattctttagctgtagtcatgaatagtctccatgattttcaaaattgattccctttaaagtgcaaaatggtcaccttctaaaagatatattcatagttattaatgaccctattcccaccacaaattttaaagtgctcctaagcccataacttgcctgtttgaactatggtaatgggtggaagaggagttcaccagtttcaaagatcagactctgtatcaaaagtacctttgcccttaggaagagtgagtattggagtcatcttatctattactccaaacctccctttttatttcttgagcctggcttggaccttggcattccgtttgaattccttctaactggaacatttgtgttgtatctgtaacactggcactgaaataaagaccacacggttaaag

SEQ ID NO: 104823 - DNA, 882 bp, Homo sapiens
  Payload ID: 586
  Gene Symbol: AP1G1
  Gene Name: adaptor-related protein complex 1, gamma 1 subunit
  ENST ID: ENST00000563104
  CDS Start-End: 449-882
actgctgccgccgcccccggagctgctggtttcattcgaggtttcgggccggtgagtgtcactcccggcgctgagagcatattgctgcttttgccccgccgctgccgcgggcgctcgaccggaagcttcctttcagtttcaggggtccagtcccaggctgtgggtgttgagaagagaagacagagaagctgggccaggagaggccgggagccccaggggctgctccgacttctggagggccgaccccgaggcctcggaccgggaggttccgcgcgccgcggcgttccgtgttgtggcgttgccccgccgctcctggccctgcggacgtcagcgtctaataattctcccggtcttcctgattgcctgaaagagtcgggacggttcggttgattgtgtttcccggttaggactcggtgtaggagatccatcgaaccactcgctcaggaggatgccagcccccatcagattgcgggagctgatccggaccatccggacagcccgaacccaagctgaagaacgagaaatgatccagaaagaatgtgctgcaatccggtcatcttttagagaagaagacaatacataccgatgtcggaatgtggcaaaattactgtatatgcacatgctgggctaccctgctcactttggacagttggagtgcctcaagcttattgcctctcaaaaatttacagacaaacgcattggctatttaggggcaatgctgctgttagatgaaagacaagatgtccatcttctcatgaccaactgtatcaagaatgatcttaatcatagcacgcaattcgtacaggggttagcactttgtaccctcggctgcatgggctcctcagagatgtgcagagatcttgcaggagaggtagagaagct

SEQ ID NO: 104824 - DNA, 561 bp, Homo sapiens
  Payload ID: 586
  Gene Symbol: AP1G1
  Gene Name: adaptor-related protein complex 1, gamma 1 subunit
  ENST ID: ENST00000569975
  CDS Start-End: 402-561
actgctgccgccgcccccggagctgctggtttcattcgaggtttcgggccgtttcaggggtccagtcccaggctgtgggtgttgagaagagaagacagagaagctgggccaggagaggccgggagccccaggggctgctccgacttctggagggccgaccccgaggcctcggaccgggaggttccgcgcgccgcggcgttccgtgttgtggcgttgccccgccgctcctggccctgcggacgtcagcgtctaataattctcccggtcttcctgattgcctgaaagagtcgggacggttcggttgattgtgtttcccggttaggactcggtgtaggagatccatcgaaccactcgctcaggcacggaaatctgtccatggagaaaaatattaatctgagaggatgccagcccccatcagattgcgggagctgatccggaccatccggacagcccgaacccaagctgaagaacgagaaatgatccagaaagaatgtgctgcaatccggtcatcttttagagaagaagacaatacataccgatgtcggaatgtggcaaaattac

SEQ ID NO: 104825 - DNA, 562 bp, Homo sapiens
  Payload ID: 586
  Gene Symbol: AP1G1
  Gene Name: adaptor-related protein complex 1, gamma 1 subunit
  ENST ID: ENST00000566179
  CDS Start-End: 1-177
agtgaagctatgaatgatatattagcacaggttgccactaatactgagactagtaaaaatgtaggaaatgctattctttatgaaacggttttgactatcatggatattaagtcagagagtggattgcgaatatgtggctctgacatctttgttgaagactgtacagacagatcataatgcagtacagaggcacagaagcacaattgtggactgtcttaaagatttggatgtctcaataaaacggcgtgcaatggaattgagttttgccctggtaaatgggaataatatccgaggcatgatgaaagaattactttattttctggattcgtgtgagccagaatttaaagcagactgtgcatctggaatctttcttgctgcagaaaagtatgcaccttccaaacgatggcatatagacacaattatgcgtgttttgacaacggcaggaagttatgttcgtgatgatgcagtccccaatttaatccagttaataactaatagtgtggagatgcatgcctatactgtccagcgcctgtacaaagcaattcttggtgattattctcaa

SEQ ID NO: 104826 - DNA, 1724 bp, Homo sapiens
  Payload ID: 586
  Gene Symbol: AP1G1
  Gene Name: adaptor-related protein complex 1, gamma 1 subunit
  ENST ID: ENST00000568327
  CDS Start-End: 249-959
ggatgttcggttcctgctgccactgctgccgccgcccccggagctgctggtttcattcgaggtttcgggccgtttcaggggtccagtcccaggctgtgggtgttgagaagagaagacagagaagctgggccaggagaggccgggagccccaggggctgctccgacttctggagggccgaccccgaggcctcggaccgggaggttccgcgcgccgcggcgttccgtgttgtggcgttgccccgccgaggatgccagcccccatcagattgcgggagctgatccggaccatccggacagcccgaacccaagctgaagaacgagaaatgatccagaaagaatgtgctgcaatccggtcatcttttagagaagaagacaatacataccgatgtcggaatgtggcaaaattactgtatatgcacatgctgggctaccctgctcactttggacagttggagtgcctcaagcttattgcctctcaaaaatttacagacaaacgcattggctatttaggggcaatgctgctgttagatgaaagacaagatgtccatcttctcatgaccaactgtatcaagaatgatcttaatcatagcacgcaattcgtacaggggttagcactttgtaccctcggctgcatgggctcctcagagatgtgcagagatcttgcaggagaggtagagaagctcctgaaaacctccaactcttacttaagaaaaaaggcagcactgtgtgctgttcatgtcatcaggaaagttcctgaacttatggagatgtttttaccagcaacaaaaaatttattgaatgagaagaaccatggtgtcctccacacatctgtagtcctcctcacagaaatgtgtgagcgaagcccagacatgcttgcgcatttcagaaaggtagcttgtgccccaattagttcgtattttaaagaacctcatcatgtccggatattcaccagaacatgatgtttctggtatcagtgacccctttttgcaggtacgaattttgcggttattaagaattttaggacgaaatgatgatgattcaagtgaagctatgaatgatatattagcacaggttgccactaatactgagactagtaaaaatgtaggaaatgctattctttatgaaacggttttgactatcatggatattaagtcagagagtggattgcgagtcctagccataaatatcctgggtcgtttcttattgaacaatgacaagaatattagatatgtggctctgacatctttgttgaagactgtacagacagatcataatgcagtacagaggcacagaagcacaattgtggactgtcttaaagatttggatgtctcaataaaacggcgtgcaatggaattgagttttgccctggtaaatgggaataatatccgaggcatgatgaaagaattactttattttctggattcgtgtgagccagaatttaaagcagactgtgcatctggaatctttcttgctgcagaaaagtatgcaccttccaaacgatggcatatagacacaattatgcgtgttttgacaacggcaggaagttatgttcgtgatgatgcagtccccaatttaatccagttaataactaatagtgtggagatgcatgcctatactgtccagcgcctgtacaaagcaattcttggtgattattctcaacaacctttggtacaagtggctgcatggtgtataggtgaatatggtgatcttcttgtatctggcca

SEQ ID NO: 104827 - DNA, 814 bp, Homo sapiens
  Payload ID: 586
  Gene Symbol: AP1G1
  Gene Name: adaptor-related protein complex 1, gamma 1 subunit
  ENST ID: ENST00000570017
  CDS Start-End: 735-814
gacagccccgatccttgctacgtttgcgtcgctctgccaggagcagtcgcctcctccttggcaaatagtcctcggcagggtccgagttcttggataattcgagagaaaaggcacgataagttgcagtacgaggacacggaaacgaccaggagaggaggacagggagcgaagtttcctcaatagtgtgtgaagttagttaaaaactccctccttcctcaggatccctccgcctgcggtagcggtggtgaggccgagggagccgccattttggatgttcggttcctgctgccactgctgccgccgcccccggagctgctggtttcattcgaggtttcgggccgtttcaggggtccagtcccaggctgtgggtgttgagaagagaagacagagaagctgggccaggagaggccgggagccccaggggctgctccgacttctggagggccgaccccgaggcctcggaccgggaggttccgcgcgccgcggcgttccgtgttgtggcgttgccccgccgctcctggccctgcggacgtcagcgtctaataattctcccggtcttcctgattgcctgaaagagtcgggacggttcggttgattgtgtttcccggttaggactcggtgtaggagatccatcgaaccactcgctcaggcacggaaatctgtccatggagaaaaatattaatctgaggaactgtcaaacactgaacacctatgtaatgctcactcatttaaggatgccagcccccatcagattgcgggagctgatccggaccatccggacagcccgaacccaagctgaagaacgagaaatgat

SEQ ID NO: 104828 - DNA, 844 bp, Homo sapiens
  Payload ID: 586
  Gene Symbol: AP1G1
  Gene Name: adaptor-related protein complex 1, gamma 1 subunit
  ENST ID: ENST00000563259
  CDS Start-End: 284-844
ccgtcctctcggaaccggacatcggcctcgcctctctctaaccttccgaccaacttctttcccaatttttcgtgtgtgtgtgtatatgttgttgttttgtttttttcaacctacctgcgagtatactgtttacccttttctcagctcctggccctgcggacgtcagcgtctaataattctcccggtcttcctgattgcctgaaagagtcgggacggttcggttgattgtgtttcccggttaggactcggtgtaggagatccatcgaaccactcgctcaggaggatgccagcccccatcagattgcgggagctgatccggaccatccggacagcccgaacccaagctgaagaacgagaaatgatccagaaagaatgtgctgcaatccggtcatcttttagagaagaagacaatacataccgatgtcggaatgtggcaaaattactgtatatgcacatgctgggctaccctgctcactttggacagttggagtgcctcaagcttattgcctctcaaaaatttacagacaaacgcattggctatttaggggcaatgctgctgttagatgaaagacaagatgtccatcttctcatgaccaactgtatcaagaatgatcttaatcatagcacgcaattcgtacaggggttagcactttgtaccctcggctgcatgggctcctcagagatgtgcagagatcttgcaggagaggtagagaagctcctgaaaacctccaactcttacttaagaaaaaaggcagcactgtgtgctgttcatgtcatcaggaaagttcctgaacttatggagatgtttttaccagcaacaaaaaatttattgaatgagaagaac

SEQ ID NO: 104829 - DNA, 559 bp, Homo sapiens
  Payload ID: 586
  Gene Symbol: AP1G1
  Gene Name: adaptor-related protein complex 1, gamma 1 subunit
  ENST ID: ENST00000569185
  CDS Start-End: 141-559
cttgaacccttgactttctcaggctgcgatctttgagggctcattcagggagcctggggtttagcggggcgggccccacccccgcgtgtcttctctgagccacgtatcagcgttcttgtgtcttgtacccgtgtcagaggatgccagcccccatcagattgcgggagctgatccggaccatccggacagcccgaacccaagctgaagaacgagaaatgatccagaaagaatgtgctgcaatccggtcatcttttagagaagaagacaatacataccgatgtcggaatgtggcaaaattactgtatatgcacatgctgggctaccctgctcactttggacagttggagtgcctcaagcttattgcctctcaaaaatttacagacaaacgcattggctatttaggggcaatgctgctgttagatgaaagacaagatgtccatcttctcatgaccaactgtatcaagaatgatcttaatcatagcacgcaattcgtacaggggttagcactttgtaccctcggctgcatgggctcctcagagatgtgcagagatcttgcagg

SEQ ID NO: 104830 - DNA, 619 bp, Homo sapiens
  Payload ID: 586
  Gene Symbol: AP1G1
  Gene Name: adaptor-related protein complex 1, gamma 1 subunit
  ENST ID: ENST00000565412
  CDS Start-End: 363-619
cactgctgccgccgcccccggagctgctggtttcattcgaggtttcgggccgtttcaggggtccagtcccaggctgtgggtgttgagaagagaagacagagaagctgggccaggagaggccgggagccccaggggctgctccgacttctggagggccgaccccgaggcctcggaccgggaggttccgcgcgccgcggcgttccgtgttgtggcgttgccccgccgctcctggccctgcggacgtcagcgtctaataattctcccggtcttcctgattgcctgaaagagtcgggacggttcggttgattgtgtttcccggttaggactcggtgtaggagatccatcgaaccactcgctcagggatgccagcccccatcagattgcgggagctgatccggaccatccggacagcccgaacccaagctgaagaacgagaaatgatccagaaagaatgtgctgcaatccggtcatcttttagagaagaagacaatacataccgatgtcggaatgtggcaaaattactgtatatgcacatgctgggctaccctgctcactttggacagttggagtgcctcaagcttattgcctctcaaaaatttacagacaaacgcattggcta

SEQ ID NO: 104831 - DNA, 2494 bp, Homo sapiens
  Payload ID: 586
  Gene Symbol: AP1G1
  Gene Name: adaptor-related protein complex 1, gamma 1 subunit
  ENST ID: ENST00000565009
  CDS Start-End: 224-850
tgcagtacgaggacacggaaacgaccaggagaggaggacagggagcgaagtttcctcaatagtgtgtgaagttagttaaaaactccctccttcctcaggatccctccgcctgcggtagcggtggtgaggccgagggagccgccattttggatgttcggttcctgctgccactgctgccgccgcccccggagctgctggtttcattcgaggtttcgggccgaggatgccagcccccatcagattgcgggagctgatccggaccatccggacagcccgaacccaagctgaagaacgagaaatgatccagaaagaatgtgctgcaatccggtcatcttttagagaagaagacaatacataccgatgtcggaatgtggcaaaattactgtatatgcacatgctgggctaccctgctcactttggacagttggagtgcctcaagcttattgcctctcaaaaatttacagacaaacgcattggctatttaggggcaatgctgctgttagatgaaagacaagatgtccatcttctcatgaccaactgtatcaagaatgatcttaatcatagcacgcaattcgtacaggggttagcactttgtaccctcggctgcatgggctcctcagagatgtgcagagatcttgcaggagaggtagagaagctcctgaaaacctccaactcttacttaagaaaaaaggcagcactgtgtgctgttcatgtcatcaggaaagttcctgaacttatggagatgtttttaccagcaacaaaaaatttattgaatgagaagaaccatggtaatgtaatttggatgacctgcttattcatgagacattcttcaatattcactgttttttgatgcatctttcttctctgcagcttgtgccccaattagttcgtattttaaagaacctcatcatgtccggatattcaccagaacatgatgtttctggtatcagtgacccctttttgcaggtacgaattttgcggttattaagaattttaggacgaaatgatgatgattcaagtgaagctatgaatgatatattagcacaggttgccactaatactgagactagtaaaaatgtaggaaatgctattctttatgaaacggttttgactatcatggatattaagtcagagagtggattgcgagtaaaatacatctccttggttatttcgtgtgcaaagattgggatcacaagatcgtgcaaggacgtcagcacatctggcagtacttggtgttcacagagtgcatacctgggtctttgtttcatttccactataaatttcttaactgtttttaatttttcccttctgcaaggcgtgcaatggaattgagttttgccctggtaaatgggaataatatccgaggcatgatgaaagaattactttattttctggattcgtgtgagccagaatttaaagcagactgtgcatctggaatctttcttgctgcagaaaagtaagatttaatttttacctttattggtaaagtctgcttggaacttttggaagtgcaggaagttatgttcgtgatgatgcagtccccaatttaatccagttaataactaatagtgtggagatgcatgcctatactgtccagcgcctgtacaaagcaattcttggtgattattctcaacaacctttggtacaagtggctgcatggtgtataggtgaatatggtgatcttcttgtatctggccagtgtgaagaggaagagcctattcaggtaacagaggatgaagtgttggatattttagaaagtgtcctaatctctaatatgtccacctctgtgacacgaggttatgccctcactgccattatgaagctttccactcgattcacttgtactgtaaaccgaattaagaaagtggtttccatctacggaagcagcattgatgtggaactccagcagagggcagtagaatataatgcacttttcaagaaatatgaccacatgaggtctgccctacttgagagaatgcctgtcatggaaaaagtgaccacaaatggccctactgagattgtgcagacaaatggagagacagaaccagctccactagagaccaaaccgccaccctctgggccacagcccaccagccaggccaatgatttattggatttgttgggaggaaatgacataacacctgttattccaactgcgcctacaagcaaaccatcttctgctggtggagaacttcttgatttgctgggagacatcaaccttacaggtgctccagctgctgctcctgcccctgcctcagtcccacagatatcccagccccccttcttgttggatgggctttcatcacagcctctcttcaatgatattgctgcaggcatcccctccatcacagcatacagtaagaatggcttgaagatagaattcacctttgaacggtcaaataccaaccccagtgtaacagtgataacgatacaggcctccaacagcacagagctagatatgacggactttgttttccaagctgcagtaccaaag

SEQ ID NO: 104832 - DNA, 606 bp, Homo sapiens
  Payload ID: 586
  Gene Symbol: AP1G1
  Gene Name: adaptor-related protein complex 1, gamma 1 subunit
  ENST ID: ENST00000567583
  CDS Start-End: 332-606
atgttcggttcctgctgccactgctgccgccgcccccggagctgctggtttcattcgaggtttcgggccggtgagtgtcactcccggcgctgagagcatattgctgcttttgccccgccgctgccgcgggcgctcgaccggaagcttcctttcagtttcaggggtccagtcccaggctgtgggtgttgagaagagaagacagagaagctgggccaggagaggccgggagccccaggggctgctccgacttctggagggccgaccccgaggcctcggaccgggaggttccgcgcgccgcggcgttccgtgttgtggcgttgccccgccgaggatgccagcccccatcagattgcgggagctgatccggaccatccggacagcccgaacccaagctgaagaacgagaaatgatccagaaagaatgtgctgcaatccggtcatcttttagagaagaagacaatacataccgatgtcggaatgtggcaaaattactgtatatgcacatgctgggctaccctgctcactttggacagttggagtgcctcaagcttattgcctctcaaaaatttacagacaaacgcattggctatttaggggcaatgctgct

SEQ ID NO: 104833 - DNA, 3298 bp, Homo sapiens
  Payload ID: 587
  Gene Symbol: AP1G2
  Gene Name: adaptor-related protein complex 1, gamma 2 subunit
  Uniprot ID: O75843
  ENST ID: ENST00000308724
  CDS Start-End: 757-3114
aaaaaaaatatattaataaaaaagttcaaaaaaggggggggattgtcatctcctttggggtgcgatggcttcaaatccaaactgaggctctccgggtggtaaggatgtgcgaggaggcctcttgaagaactccaggcctatcatgctgtctctccgctaaagcctgaggcccgaggtcagaggattcaggaaggctctgcagtcggcccaggagggcggggtcccgtggtggaggcggggagagggaaggaccgcacggagcaccaacccctgctcggccccgtaccaggaagcgctggggggcagaggagcggagttgaggcagaagccaggtgaggctggagtcctggggtaggcaggctgtcgctgccgctgccgctgcctgagatggaaatcgggggaggaagctcgcggaagaaacagcggagggtcgtggaaaaaaaagcaatggctgagctagggatggggtaccaggtagggggaggaaacggtagagagaaataggtggggctcccgcgcatgctcaataggaaggggcgccggtggggtgcggacgcatgcgtagtgggcttctcgggcggtggggtgggcgcggaatttggagacccacttcgggaaaggtaaaatgcgggcgcaattttagggtacctgtgggacccgggctcttagggtcttgacacaggacgggcctgggccgaaagcccaggcacgcccgaccagagagtgtttctccactcccggactctgccagtcaggatggtggtgccttcgctgaagcttcaggacctcatcgaagagattcgcggggccaagactcaggcccaggagcgggaggtgatccaaaaggagtgtgcccacatccgggcctccttccgcgacggggacccagtgcacaggcaccggcagctggccaaactgctctacgtccacatgttgggctaccccgcccactttggacagatggagtgcctgaaactgatcgcctcctccagattcacagacaagagggtgggctacctgggggccatgcttctattggatgagaggcacgatgcccacctgctcattaccaacagcatcaagaatgacctgagccaggggattcagccagtacaaggcctggccttgtgcactttgagcaccatgggctctgctgagatgtgccgagacctggccccagaggtggagaaactgctcctgcagcccagtccctacgtgcgcaagaaggctattctgactgcagtgcacatgatccggaaggtccctgaactctccagtgtcttcctcccaccctgtgcccaactgcttcatgagcgtcaccatggcatcctgctgggcaccatcacgctgatcacggagctctgcgaacgaagccctgcagccctcaggcacttccgaaaggtggtaccccagctggtacacatcctccggactctggtgacaatgggatactccacagaacacagcatatctggagtcagcgaccccttcctgcaggtccagatacttcgtctgcttcggatcctgggccggaaccacgaggagagcagtgagaccatgaatgacttgctggcccaggtggccactaacacggacaccagccgaaatgccggaaatgcggtcctgtttgagacagtactcaccatcatggatatccgctctgcagctggcctacgggttctagctgtcaacattcttggtcgcttcctactcaacagtgacaggaacattaggtatgtagccctgacatcactgcttcgactggtgcagtctgatcacagtgctgtgcagcggcatcggcccactgtggtggaatgtctacgggaaactgatgcctccctcagccggagagccctggaactaagcctggctctggtaaatagctccaatgtgcgagccatgatgcaagagctgcaggcctttctggagtcctgccctcctgacctacgggctgactgtgcctcaggcatcctgctggctgcagagaggtttgctccaaccaaacgctggcacatagacaccatcctgcatgtgctgacaacggcgggcacccatgtgcgggatgatgcagtggccaacctgacccagctgattgggggggcccaggagctacatgcctactctgtgcgccgcctctacaatgccctggcagaagacatttcccagcaaccactggtgcaggtggcagcctggtgcattggggagtatggggacctcctgctggcagggaactgcgaggagattgagccccttcaggtggacgaagaggaagtgctggcattgctggaaaaggtgctgcagtcccacatgtccctgccagccactcgaggatatgccctcacagccctcatgaagctcagcactcgcctctgtggggacaacaaccgcatccgccaggtggtgtccatctacgggagctgcttggacgtggagctgcagcagcgggctgtggagtatgacacactcttccggaaatacgaccacatgagggctgccatcctggaaaaaatgcctcttgtggagcgagatggccctcaggctgatgaggaagcaaaggaaagcaaagaagcagcccagctttcagaagcagccccagtgcccacagagccccaggcctcacagctcctggatctgctagatctcctggatggggcttctggggatgtccagcatcctccccatctggacccctccccaggaggtgccctggtacacctgcttgaccttccctgtgtacctccacccccagctcccatcccagatctcaaagtgtttgagcgtgagggagtacagctgaatctgtctttcattcgaccccctgaaaaccctgctttgctgttaatcaccatcactgccaccaacttctcagagggtgatgtcacccatttcatctgccaggctgctgtgcccaagagtctccagctgcagctgcaggcccccagtgggaacacagttccagctcggggtggccttcctatcacccagctcttcagaatcctcaatcctaacaaggcccccctgcggctaaagctgcgcctcacctacgaccactttcaccagtcggtgcaggagatctttgaggtgaacaacttgcctgtggaatcgtggcagtaactgtctccactcacagcctgaaattctcctgtgtcccaaaccccagggggccccagcagcttcgaacctacacctgagggctaccagcaggtggcgctctggctttgcactgcaaaaactggggaccagcccccttctcccacaaataaagcccaataaagcctgagaagtgaggaaagccata

SEQ ID NO: 104834 - DNA, 2609 bp, Homo sapiens
  Payload ID: 587
  Gene Symbol: AP1G2
  Gene Name: adaptor-related protein complex 1, gamma 2 subunit
  Uniprot ID: O75843
  ENST ID: ENST00000397120
  CDS Start-End: 71-2428
cccctgctcggccccgtaccaggaagcgctggggggcagaggagcggagttgaggcagaagccagtcaggatggtggtgccttcgctgaagcttcaggacctcatcgaagagattcgcggggccaagactcaggcccaggagcgggaggtgatccaaaaggagtgtgcccacatccgggcctccttccgcgacggggacccagtgcacaggcaccggcagctggccaaactgctctacgtccacatgttgggctaccccgcccactttggacagatggagtgcctgaaactgatcgcctcctccagattcacagacaagagggtgggctacctgggggccatgcttctattggatgagaggcacgatgcccacctgctcattaccaacagcatcaagaatgacctgagccaggggattcagccagtacaaggcctggccttgtgcactttgagcaccatgggctctgctgagatgtgccgagacctggccccagaggtggagaaactgctcctgcagcccagtccctacgtgcgcaagaaggctattctgactgcagtgcacatgatccggaaggtccctgaactctccagtgtcttcctcccaccctgtgcccaactgcttcatgagcgtcaccatggcatcctgctgggcaccatcacgctgatcacggagctctgcgaacgaagccctgcagccctcaggcacttccgaaaggtggtaccccagctggtacacatcctccggactctggtgacaatgggatactccacagaacacagcatatctggagtcagcgaccccttcctgcaggtccagatacttcgtctgcttcggatcctgggccggaaccacgaggagagcagtgagaccatgaatgacttgctggcccaggtggccactaacacggacaccagccgaaatgccggaaatgcggtcctgtttgagacagtactcaccatcatggatatccgctctgcagctggcctacgggttctagctgtcaacattcttggtcgcttcctactcaacagtgacaggaacattaggtatgtagccctgacatcactgcttcgactggtgcagtctgatcacagtgctgtgcagcggcatcggcccactgtggtggaatgtctacgggaaactgatgcctccctcagccggagagccctggaactaagcctggctctggtaaatagctccaatgtgcgagccatgatgcaagagctgcaggcctttctggagtcctgccctcctgacctacgggctgactgtgcctcaggcatcctgctggctgcagagaggtttgctccaaccaaacgctggcacatagacaccatcctgcatgtgctgacaacggcgggcacccatgtgcgggatgatgcagtggccaacctgacccagctgattgggggggcccaggagctacatgcctactctgtgcgccgcctctacaatgccctggcagaagacatttcccagcaaccactggtgcaggtggcagcctggtgcattggggagtatggggacctcctgctggcagggaactgcgaggagattgagccccttcaggtggacgaagaggaagtgctggcattgctggaaaaggtgctgcagtcccacatgtccctgccagccactcgaggatatgccctcacagccctcatgaagctcagcactcgcctctgtggggacaacaaccgcatccgccaggtggtgtccatctacgggagctgcttggacgtggagctgcagcagcgggctgtggagtatgacacactcttccggaaatacgaccacatgagggctgccatcctggaaaaaatgcctcttgtggagcgagatggccctcaggctgatgaggaagcaaaggaaagcaaagaagcagcccagctttcagaagcagccccagtgcccacagagccccaggcctcacagctcctggatctgctagatctcctggatggggcttctggggatgtccagcatcctccccatctggacccctccccaggaggtgccctggtacacctgcttgaccttccctgtgtacctccacccccagctcccatcccagatctcaaagtgtttgagcgtgagggagtacagctgaatctgtctttcattcgaccccctgaaaaccctgctttgctgttaatcaccatcactgccaccaacttctcagagggtgatgtcacccatttcatctgccaggctgctgtgcccaagagtctccagctgcagctgcaggcccccagtgggaacacagttccagctcggggtggccttcctatcacccagctcttcagaatcctcaatcctaacaaggcccccctgcggctaaagctgcgcctcacctacgaccactttcaccagtcggtgcaggagatctttgaggtgaacaacttgcctgtggaatcgtggcagtaactgtctccactcacagcctgaaattctcctgtgtcccaaaccccagggggccccagcagcttcgaacctacacctgagggctaccagcaggtggcgctctggctttgcactgcaaaaactggggaccagcccccttctcccacaaataaagcccaataaagcctgagaagtgaggaaagcc

SEQ ID NO: 104835 - DNA, 561 bp, Homo sapiens
  Payload ID: 587
  Gene Symbol: AP1G2
  Gene Name: adaptor-related protein complex 1, gamma 2 subunit
  ENST ID: ENST00000557162
  CDS Start-End: 1-430
tgccggaaatgcggtcctgtttgagacagtactcaccatcatggatatccgctctgcagctggcctacgggttctagctgtcaacattcttggtcgcttcctactcaacagtgacaggaacattaggtatgtagccctgacatcactgcttcgactggtgcagtctgatcacagtgctgtgcagcggcatcggcccactgtggtggaatgtctacgggaaactgatgcctccctcagccggagagccctggaactaagcctggctctggtaaatagctccaatgtgcgagccatgatgcaagagctgcaggcctttctggagtcctgccctcctgacctacgggctgactgtgcctcaggcatcctgctggctgcagagagacaccatcctgcatgtgctgacaacggcgggcacccatgtgcgggatgatgcagtggccaacctgacccagctgattgggggggcccaggagctacatgcctactctgtgcgccgcctctacaatgccctggcagaagacatttcccaggtcacagctgcttacacagtgcagaagacat

SEQ ID NO: 104836 - DNA, 592 bp, Homo sapiens
  Payload ID: 587
  Gene Symbol: AP1G2
  Gene Name: adaptor-related protein complex 1, gamma 2 subunit
  ENST ID: ENST00000554477
  CDS Start-End: 1-592
gaggaagtgctggcattgctggaaaaggtgctgcagtcccacatgtccctgccagccactcgaggatatgccctcacagccctcatgaagctcagcactcgcctctgtggggacaacaaggctgccatcctggaaaaaatgcctcttgtggagcgagatggccctcaggctgatgaggaagcaaaggaaagcaaagaagcagcccagctttcagaagcagccccagtgcccacagagccccaggcctcacagctcctggatctgctagatctcctggatggggcttctggggatgtccagcatcctccccatctggacccctccccaggaggtgccctggtacacctgcttgaccttccctgtgtacctccacccccagctcccatcccagatctcaaagtgtttgagcgtgagggagtacagctgaatctgtctttcattcgaccccctgaaaaccctgctttgctgttaatcaccatcactgccaccaacttctcagagggtgatgtcacccatttcatctgccaggctgctgtgcccaagagtctccagctgcagctgcaggcccccagtgggaacacagttccagctc

SEQ ID NO: 104837 - DNA, 747 bp, Homo sapiens
  Payload ID: 587
  Gene Symbol: AP1G2
  Gene Name: adaptor-related protein complex 1, gamma 2 subunit
  ENST ID: ENST00000556943
  CDS Start-End: 53-259
ccaggaagcgctggggggcagaggagcggagttgaggcagaagccagtcaggatggtggtgccttcgctgaagcttcaggacctcatcgaagagattcgcggggccaagactcaggcccaggagcgggaggtgatccaaaaggagtgtgcccacatccgggcctccttccgcgacggggacccagtgcacaggcaccggcagctggccaaactgctctacgtccacatgttgggctaccccgcccactttggacagtgacctgagccaggggattcagccagtacaaggcctggccttgtgcactttgagcaccatgggctctgctgagatgtgccgagacctggccccagaggtggagaaactgctcctgcagcccagtccctacgtgcgcaagaaggctattctgactgcagtgcacatgatccggaaggtccctgaactctccagtgtcttcctcccaccctgtgcccaactgcttcatgagcgtcaccatggcatcctgctgggcaccatcacgctgatcacggagctctgcgaacgaagccctgcagccctcaggcacttccgaaaggtggtaccccagctggtacacatcctccggactctggtgacaatgggatactccacagaacacagcatatctggagtcagcgaccccttcctgcaggtccagatacttcgtctgcttcggatcctgggccggaaccacgaggagagcagtgagaccatgaatgacttgctggccc

SEQ ID NO: 104838 - DNA, 656 bp, Homo sapiens
  Payload ID: 587
  Gene Symbol: AP1G2
  Gene Name: adaptor-related protein complex 1, gamma 2 subunit
  ENST ID: ENST00000553756
  CDS Start-End: 193-399
aggaagcgctggggggcagaggagcggagttgaggcagaagccaggtgaggctggagtcctggggtaggcaggctgtcgctgccgctgccgctgcctgagatggaaatcgggggaggaagctcgcggaagaaacagcggagggtcgtggaaaaaaaagcaatggctgagctagggatggggtaccagtcaggatggtggtgccttcgctgaagcttcaggacctcatcgaagagattcgcggggccaagactcaggcccaggagcgggaggtgatccaaaaggagtgtgcccacatccgggcctccttccgcgacggggacccagtgcacaggcaccggcagctggccaaactgctctacgtccacatgttgggctaccccgcccactttggacagtgacctgagccaggggattcagccagtacaaggcctggccttgtgcactttgagcaccatgggctctgctgagatgtgccgagacctggccccagaggtggagaaactgctcctgcagcccagtccctacgtgcgcaagaaggctattctgactgcagtgcacatgatccggaaggtccctgaactctccagtgtcttcctcccaccctgtgcccaactgcttcatgagcgtcaccatggcatcctgctgggcaccatca

SEQ ID NO: 104839 - DNA, 562 bp, Homo sapiens
  Payload ID: 587
  Gene Symbol: AP1G2
  Gene Name: adaptor-related protein complex 1, gamma 2 subunit
  ENST ID: ENST00000556843
  CDS Start-End: 153-562
agaagccaggtgaggctggagtcctggggtaggcaggctgtcgctgccgctgccgctgcctgagatggaaatcgggggaggaagctcgcggaagaaacagcggagggtcgtggaaaaaaaagcaatggctgagctagggatggggtaccaggatggtggtgccttcgctgaagcttcaggacctcatcgaagagattcgcggggccaagactcaggcccaggagcgggaggtgatccaaaaggagtgtgcccacatccgggcctccttccgcgacggggacccagtgcacaggcaccggcagctggccaaactgctctacgtccacatgttgggctaccccgcccactttggacagatggagtgcctgaaactgatcgcctcctccagattcacagacaagagggtgggctacctgggggccatgcttctattggatgagaggcacgatgcccacctgctcattaccaacagcatcaagaatgacctgagccaggggattcagccagtacaaggcctggccttgtgcactttgagcaccatgggctctgctgagatgtgccg

SEQ ID NO: 104840 - DNA, 678 bp, Homo sapiens
  Payload ID: 587
  Gene Symbol: AP1G2
  Gene Name: adaptor-related protein complex 1, gamma 2 subunit
  ENST ID: ENST00000557189
  CDS Start-End: 78-678
cggagcaccaacccctgctcggccccgtaccaggaagcgctggggggcagaggagcggagttgaggcagaagccaggatggtggtgccttcgctgaagcttcaggacctcatcgaagagattcgcggggccaagactcaggcccaggagcgggaggtgatccaaaaggagtgtgcccacatccgggcctccttccgcgacggggacccagtgcacaggcaccggcagctggccaaactgctctacgtccacatgttgggctaccccgcccactttggacagatggagtgcctgaaactgatcgcctcctccagattcacagacaagagggtgggctacctgggggccatgcttctattggatgagaggcacgatgcccacctgctcattaccaacagcatcaagaatgacctgagccaggggattcagccagtacaaggcctggccttgtgcactttgagcaccatgggctctgctgagatgtgccgagacctggccccagaggtggagaaactgctcctgcagcccagtccctacgtgcgcaagaaggctattctgactgcagtgcacatgatccggaaggtccctgaactctccagtgtcttcctcccaccctgtgcccaactgcttcatgagcgtcaccatggcatcctgctgggcaccatcacgctgatcacgg

SEQ ID NO: 104841 - DNA, 13193 bp, Homo sapiens
  Payload ID: 588
  Gene Symbol: AP1M1
  Gene Name: adaptor-related protein complex 1, mu 1 subunit
  Uniprot ID: Q9BXS5
  ENST ID: ENST00000291439
  CDS Start-End: 450-1721
acacttgtttcatagacttccccaccagactgtgagctccatagggctgggccccaggtcggtttcaccaccaggctctctcgcctaactcggcccacgggaggccgtttccagctgctctggctccatagctcagcctggcagcggccactgggtgccctgatttggtcggccccgccccaccgggccttacttccgggatgcttctggcgggagcaagaaacatggttacatacgacgtaatgcgcctgcgcacagtccgtcctgcgcctgcgcattcctgacagcacctcccggaccggacataacggtccccgcgcggctccccgaaccggaagtggaggtgagctgtcgcgggcggcgcccggccttgctcaacgcccagcagtccccaccgtcgctgccgccgccaccgccctcggccgctgccgaggcctcctgcagccatcatgtccgccagcgccgtctacgtgctggacctgaagggcaaggtgctcatctgccggaactaccgtggcgacgtggacatgtcagaggtggagcacttcatgcccatcctgatggagaaggaggaggaggggatgctgtcgcccatcctggcccacgggggggtccgtttcatgtggatcaaacacaacaacctgtatctggttgccacatccaagaagaacgcgtgcgtgtcgctggtcttttctttcctctataaggtggtgcaggtgttttccgagtacttcaaggagctggaggaggagagcatccgggacaactttgttatcatctacgagctgctggacgagctcatggacttcggctacccccagaccaccgacagcaagatcctgcaggagtacatcactcaggaaggccacaagctggaaacaggggccccgcggccaccagccaccgtcaccaacgcggtgtcctggcggtccgaaggcatcaagtatcggaagaatgaggtgttcttggacgtcatcgagtctgtcaacctcttggtcagcgccaacggcaatgtcctgcgcagcgagatcgtgggctccatcaagatgcgagtcttcctctcgggcatgcccgagctgcgcctgggcctcaacgacaaggtcctctttgacaacacgggccgcggcaaaagcaaatccgtggagctggaggatgtgaagttccaccagtgtgtgcggctatcacgcttcgagaatgaccgcaccatctccttcatcccacccgacggcgagttcgagctcatgtcctaccgtctcaacacccacgtcaagcctttgatatggatcgagtcggtgatcgagaagcactcccacagccgcatcgagtacatgatcaaggccaaaagccagttcaagcggcggtcaacagccaacaacgtggagatccacattcccgtgcccaatgatgccgactcacccaagttcaagacgacggtggggagcgttaagtgggtccccgagaacagcgagatcgtgtggtccatcaagtccttcccgggcggcaaggagtacctgatgcgggcccacttcggcctgcctagtgtggaggccgaagacaaggagggcaagcccccgatcagtgtcaagttcgagatcccttacttcactacctccggcatccaggtgcgctacctgaagatcattgagaagagtgggtaccaggccctgccctgggtgcgttatatcacgcagaatggagattaccagctccggacccagtgaggggctgtcgcagccaacaccccggcctcggggctcctggtggcagcaccaggggacacacctgccaaacccaccagatggaggggccctccctggtctctggccaccctcccagcctctgcccagggacccctgccttccccaggccatctgctctgccgtcgacactcgtctcagaagcccctttcccagaagaggctggtcttcaagaagtctcgtttctttgcccctgaagtcagtttcaggggaaggatgtgaaatttttccgtgtagaggttacagccttttatgctgttgagctcccaggtaccaaaaagcttggccaacgcttgccagccagccagctgcaggtggcatctgccacgaaggaagcgccagcctcgccaggccagcaggggcgtcgttttgttgccattttgttgaacgttatgggtttatgggtgttcctggaacttgtctttgtgcattcgttgctgtttgtgttaccctcactgtccccatgtcccacccacgtcctacggcactcaggaagcacttggtgaggacgagccctcacccttcttgtcttccttcccggcagcgcccgcagcgggccatttacacgtcgaggctggcacctggcgcgctcgggggccactgtagcgtctgcctgctccctggactcgcaggcctcgcctgtggcgccttcccagggccagcctgggtcacgagatgctgtcactcagccagatcagtattgacccaccaggggaggtggggtttggtgagagacgccagcctcagactttttcccactgagggtccagagagcggggccacgtgtcacccacgtctgcgcttggtcacccgtcctccccaccctgtgtgtgtttatgtcatagttacattaaattccattcattgaatactccacagccttcctctgatgcagcgtggtcccaactcctcctgcgtgaccacagggcttgcctggttttgtcgccgaccttccctgtggccccacgaggtgtcaccagctccctctgcttccccagctgaaacacaggaaaagcagctgcgggaagaggcagctgcagtgctggaccatgggccaccactcctgggccacacagaggaggccacagaggcagagtcttctctcatccaatctgctgcaccctcagatggccaacagcttgtccccacctctccccaaactgatggcccactcagagcatggtccttgtgtccacagcagcatcccctgtgtcctagctagaaatgcaggttcgtgggccagccctgacctgccaaagtggaggctctggggccagggtcccggaaaacattaacaaggcccccagatgcttcttctgtgaactgctacttggtccatgggggaaatagcacatatgcaggaagtgctgcctgctcttggccccctccccgaccagtgctgatggccctgcctggccagcaccctcttgccttcattctccccctccctctcctgtcttgccgagctcgtcctcaggtgtctagtgggcatccgacctaacagcctgagtagaaccttccgcccacgtaggtcttccccatctcagtcaatgacgctgccccagcccaggcctcagaccaaagccctgaaggcatccctggggcccctcccctcactgtccacacccatatcagcagccagccctcatggcccctccagaaaaccctggggctgaccccatttgccatcctcgctgccacccccggggcctagctccagtgtgggctgtcactgtccccaccctgtggagcccccatgctgggacaccgcagggacaggagagggctggtccacaggacagaagagagacttcagtttccagcaacttatcagataagacctgcaaaccctccactacagactgtagaaatgcaggaaatgaagcagacgcacctagccgtgcccataaaaaagcaaggagacccacaggagcccaagacgaaggaagtagacgcggaagacaccgtgggggctcacaccggagttgctcttggaaaccaccgggtttaggtttgggggccaggtggcagataggactttgggcatcgggaagatggtgaaatgcagtggagatgactcctgcgtgaagctgggatcctcgagggtcatgatacttaacagtaaaaagatggactagaaaaaacatttgccctccacccctgagaataagcactgtgtcctctctctgcctgagatccacaggagaaaaagtcaccactcatttagaccccacgcttgtaatatcaatctggtttgcagacaaccaggccaagatgtttatgacagaaaacctccctggagggacctaacttcatgccttgttacctaagatcctcgcacacaatagaccctcaacatgagggcacatcctgaaaattacaaaacacgtgcatgaaagcaaacttgaaacagcaggatcagatcctcacgaacttcaaagattatcggcatgtaaacaaatacactatgcagtcaatctgttgcaagtgcctaaaggcacagagactctgaatagaaaagagcaaaatgctgttaagacagagctgttacaacatccaacaaggcaaataatttgcatgcgggttataacgtctacaaatcagaaaaagagaacctaacaaaatgggctgtgtgtgaacagacagtatgaagaagatgaaatacaaatggcgaccgttcggccaggcgtggtggctcacgcccgtgagcccaatactttgggaagccgaggcagaccgatcactggaggtcaggagttcgagaccagcatggccagcatggtgaagccccatctatactaaaaatacaagaattagccgggtgtggtggtgcgtgcctgtaatcccagctactcagtatgctgaggcaggagaatggcttgaacccaggaggtggaggttgcagtgagccaagatagtgttactgcactccagcctgggcaacagagcgagactccgtctcaaaacacaacaaaaaccggcctagcgcagtggcttatgcctgtaatcccagcactttgggaggctgagacgggtggatcacctgaggtcaggagtccgagaccaacctggccaacatggcgagaccccatctctactaaaaataccaaaattagccaggcatggtggcgggcgcctgtaatcccagctacttgggaggctgaggcatcagaatcatttgaaccccaggaggcagaggttgcagtgagccgagatcataccacctgcactccagcctgggcaacagagcaagacttcatctcaaaagaaaaaaaaaaggcaaacgttcaaccatgtagctattcaggaaatatgtacacataaaccaagaccacagttagatgctatttgcatcatgtcggccccccccaaaaaaatttttttttttgagacagggtcttgctatgttacccaggctggagtgcagtggcgtgatcacggctcactgcagcctcgagctgccaggctcagccaatcctgcctcagcctcttgaggagctgggactacaagcacatgccaccatgctgggccaatttttcatattttttatagagatggggtctcgtcattttgtccacactggtctccaactcctgggcttgagccatcatcctgccttggcctcccaaagtgctgggattacaggcgtgagccacctcgccacgcctcctgaacatctagaacgtgctagctatgtactgactgtgggaaagttgagaacatcctccctgaagtcatctttatgccagaattctcttgcagaactctagttgagaaaagccctgagaagtccatgcaccaatatatagagaaatatcaggtgtacagttacacttacagcagcatagttcatgatagcaggaaattggaaagcaaccaaaagtccttcaataggaaaagggaccactgtagtccattcatgcaagagattacagcagtgaaaatgaattcaactagagcagtgatatggctcagaatacaacttaaacaacattgagcgggaaaaatgtttacaaaagaaaatgcagtaatctagtataaaatacggaaataatattttgcgtgcttagggatctatatatatccagcaaaagtctaacgagatgcttgagaatttgaaaaaattcacatccctggttatctctgaaaggcaaaaacaggaagggggtatgactggggcctctgctgtgttggcaatttccttaagcttggtattgcttagtggcttgttctgtattctttctttatgctttttttttttttttttgacagggtgtcactctgttgcccaggccaaagtgcagtggcatggtcacggctcactgcagcttcaaactcctgggctcaagtgatcctcccaccttggcctcccaaagtgctgggattacaggcatgagccacagtgcccagccctttttgtagttcttaatatactttttgtagtttttttgttttttgtttttgtttttgttttttttgagacagagttttgctcttgttgcccaggctggagtgcaatggtgtgatctcggctcactgcaacctccgccttctgggttcaagcaattctcctgcctcatcctcctgagtagctgagattacaggcatgcgccaccatgcctggctaattttgtatttttggtagagacgggatttctccatgttggtcaggctggtctcgaactcccggcttcaggtgatccgcccccctcaccttcccaaagtgctgggattacaggcatgagccaccgcgcccggccagttctcttttttttttttttttttttttttttttttttttttttttaagactgcaaagctgggcatggtagtatgcacctgtagtcccaactacttgggaggctgaggctagaggattacttgagcccaggagtttaaggacagcctgggcaacatagtgagaccctgtctctaaaacaaaccaacaaaacaccccccaaaaatgacaatgcagatttggaagaaaaaaatagattaaaaatgtagtcataggaattaacaacttggggccgggcatggtggctcacgcctataatcccagcactttgggaggctgaggcggccagatcattttaggtcaggagtttgagaccagcctggccaacatggtaaaacctgattgctactaaaaatacaaaagaattagctgggcgtagtggctcatacctgtaatcccagctactcaggtggctggggcaggagattcgcttgaacccgggagatggcgctcgcagtgagtcaagatggcaccgttgtactcttgcctgagcgacacagtgagacactgtctcaaaaaaaaaaattaacaacttggttggagggtgttaaaatacaagtgagacatagatgaagagaattagtgcactagaagagagctgtctgaggcagttacccgggacatagcacagctaatgagacatatatatatttacagtcaaccctccacatccatgggttctgcatccatggattcaaccaagagtgagttgaaaatatttgaaaaacaattgtgtctgtgctggacatgtacaggttttcttttttattgtcattattccttaaataatacagtataatgattatgtagcatctacattgtattaggtaatctagagatgatttaaagatgatgtgcataggatatatgcaaatattgtgccattttatataaaagacttgagcatcctcagattttggtatccaaggggagtcctggaagcaatcccttgaggatatggagggacgactctgtgtgtgtgtgtgtgtgtgtgtgtgtgtgtatgtgtgtgtgtgtgtgtgtgtgtgtgtgatgtgcgtgtgtggttagcacaagacaataagaaggcccaacatgccagcaagtatctaacacaaaccaaaaaatgagaactggggagcagccacatgcaaagagatcgtggccagaattttccaaaattaatgaaaatcttgaagtgttttttgtttttcattttgacggagtttcgcgtttgttgcccaggctggagtgcaatggcgaaatctcggctcattacaacctctgcctcccaggttcaagcaattctcatatctcagcctcccaagcagctgggattacaggtgcacaccaccacgcccggctaatttttgtattttttgtagagatggggtttcactatgttggtcaagatggtctcgaactcctgacctcaggtgatctgcctgcttcggcctcccaaagtgctgggattacaggcatgagccactgcgcccagcctgaaaatcttgaaattttaagatccaggaaaccgttgagtccaaagcatgatacacaaacctaaattcgtaactaaaataatcatagtcgaaccacagaacatatcagactcagggaagatcctaacagcaacactaagagattaaaatgtctctccaaagagcaattggacagagaactggtttcacaactggaacaacaaaagtccgaagatagagcatggcttcaaattactgagagaagtgcagtctagaattctgagcccacctcatctgtaaaaggtaggacaagccgggcatggtggctcccgcctgtaatcccagcactctgggaggccgaggcgggcagaggtcaggagtttgagaccagccggaccaacaaggagaaaccccatctctactagaaatacaaaattagccaggtgtggtggcgggcacctgtgttcccagctacttgggagactgaggcagacagaattgcttgaaccagggagacagaggttgcagtgagccgagatcgcgccactgtactccagcttgggcaaagtgagattctgtctcaaaaaaaaaaaaagacaagataaaaacaatttatcaataacagattccccgaaaaaaggaacttgtgtacataaggaaaggaagaaagatgtgagaaggaatgccggaaaaccttagaaaccattggatctgtctaaactgtcattgactgtgtaaagcaataataacagtgactaacgtatagagtagcgacaaaaggcgcaactgaagtactagacaacatcctggtgttcatgcctttcaaggtcactatgctatttgggaggagattcggctaaagtccacgagggccacgtatttatatataatttctagaccagtggttggaaaagggttgaaagaaaacttttaacagattaataggaagaaggaaaagagaaggaggcgtagaaaaatcaggaggcactgggcgcggtggctcacgcctgtaatcccagcactttgggaggctgaggcaggcggatcacctgaggttgggagttcgagatcagcctgactaacatgagaaaccccgtctctactaaaaatataaaattagccgggtgtggtggtgcatgcctataatcccagctactcgggagggtgaggcaggagaatcgcttgaacctgggaggcagaggttgtggtgagctgagatcgcgccattgcactccagcctgggcaatgagcgaaactccatctcaaaaaaaaaaagaaagaaaaagaaaaagaacaatcaggaggccaggttcagtggctcatgcctgtaatcccagtgctttgggaggctgaggctgagacaggtgaattgcttgagcctaggagtttgagaccagcctgggcaacatggagaaactctgtctctacaaaaattagccaggcatggtggcgcacacctgtagtccaaactactcaggaggctgagttgggaggatcacctgagttcaggaagctgaggctgcagtgagctgtgattgcaccactgcactccaggttgggtgacagagtgacaccctgcctcaaaaaaaaaaaataaaataaaggaaaaatcaggataaatgcagggatgttctaaactttttaaaataataaataatagtacttaaaactgcactgggacttttgggacacccctagcatctctggctgcagaaagcataaaataagattgtagaaataaatccagatattaggaaccacaacaggtgtaaatgaagcaaagctgctagttgaagatgttgtcggattgaactgaaatacaaaatcctgtgatatcctgtttatacgcgatacatctaaaatgtaagtacacaacacaattgaaagtaaaaaaacattaaaagatgtgacacttaaaatataagcacacaacacagttaaaagtaaaaagacattaaaagatgccaaaagaaatctcatatggttatattaattccagacagaatagatgtatttatttatttattcattcatttaattttttgagatggagtctcgctctgtcgcccaggctggagtgcagtggcgcgatctttgcttactgcaacctccgcctcccgggttcaagtgattctcctgcctcagtctcctcagtagctgggattacaggcatgcaccaccatgcttggctaaatttttttatttttgtattttttttatttttagtagagacagggttttgccatgttggccaggctggtcttgaaccctgacctcaggtgatccacccccactggcctcccaaagtgctagtggcaggtgtgagccaccacacacggccagaatagactttaaagcaagaaagcaaaagaaaaaatgtattagatccccgagaagtttccacacaactccaagaattattattagagttcccactctctgaggaattttcaagagaaattagttagaattcaacaagaaataaattactttaaaatatttccaaatatgagaggttttttttgtttttgtttttgtttttgtttttgtttttgttttgagaaagggtctctgttgcccaggctggagtgcagtcagtggcacgatgtcagctcactgcaaccttggcctcctaggctgaaatagtcctcccatctcagtctcacaagtagctgggattacaggtgagcaccaccaagctcagctattttttttttttttttgtatttttagtagagatggagttttgccatgttgcccaggctggtcttgcacttgggctcaagtgatccacctgcctcagcctccacagtgctggaattacaggtgtgagtcaccatgcccagccaatatgagagattttaaagcacatttttcaatcaccatgtgtcaaagaagaaaatataatggaagttagaaaatattagagaatggccaggtgcagtggctcatgtctataatcccagcactttaggaggctgaagcaggtgaatcacttgagctcaggagttcgagaccagcctggccaacatggcgaaaatccatctctactaaaaatacaaaaattaaccaggtgtagtggcacacgcctgtaaatcccagctactcaggaggctgaggcccaagaatggcttgaaccctggaggcagaggttgcagtgagctgagattgtgccactgcactccagcctgggcaacgaaacgagagtctgtctccaaataaataattagagaatatttttcaatctggatgcaggtgacatgggtgtgctctcgagaatccatcaagcattgatgatttgcacactcttttgtgtatatgttacacttcagcaaaaacattcacaaaggggaaaaaggcaaaagatacttaaagcagccagaggtaaagacacatcaccttcagacatgacaaccagacagacagacagctggcttttcaaaggaacccagaaaacagttgggtgacattttcaacatgctaaaagaaaaccactaacccaaatcagagacccagcaaaagtatttcaagaatgaggttacagtaaaaacattttgcagacaaataacgaaagagtttgccagcagcaggctaacactaaagaaaattgtaaacagtgtactcacatcaggcacaaggaaagtgatctcagacggaagggcatgatgcaagaagaaataaaagcaaagaagtagaaaatacatgagaaaatctagacaaagattgcataaacagtttctggagtttttttaagtgatagaattatacaacaggaaaaaaagtctgcagggagtaaactgagttaaaatgttccaagttaatgactgtctgggaggagaataaataacatggatacactttgggaggccgaggcgggcggatcacgaggtcaggagatcgagaccatcctggctaacacggtgaaaccccgtctctactaaaaatacaaaaaattagccgggcgcggtggcgggcgcctgtagtcccagctactccggaggctgaggcaggagaatggcgtgaacccgggaagcggagcttgcagtgagccgagattgcgccactgcagtccgcagtccggcctgggcgacagagcgagactccgtctcaaaataaataaataaataaataaataacatggataaaatttgttgtttgttgttgttgttgttgttgttgttgttgttgagacggagtttcgctcttgttgcccaggctggagtgcaatggcgcggtctttgctcactgcaacctctgcatcccgggttcaagctattctcctgcctcagcctcctgagtagctgggattacacgatgcgccaccaggcctgcctaactttgtatttttggtagaggcggggtttctccatgttggtcaggctggtctcaaactcccgacctcaggtgatccgcccgcctcggcctcccaaagtgctgggattacaggcatgagccactgcgcccagccaaatctgcattttgataagtatgcattttactatctaagggagctaaaacatttttattattttagcactgtaactttgcttttcttctttgttttgtttttttgagacagagtctcactctgtcgcccaggctggagtgcagtggcgtgatctcagctcactgcaacctccacctcctgggttcaagcaattctcctgcctcagcctcctgagtagccaggattacaggtgcacgccaccacacccagctaatttatgtaattttatagagttgtggtttcaccatattggccaagctggtctagaactcctggcctcaagtgatccacctgcctcggcctcccaaagtgcggggagaccagaattccacccagaatgacctctctgttcctaggagtgtgacagcatttgggggggaaaatagcgtagagttggaatttttaaaattcagtttgacaaaatgacttttagctggagcattaagtccctttacatttaatgtaataactgatattacatttaagtataaatttaaatctaccgtcttactttgttttctatttttgtcctttctatgttctcttttatgtcctctctggatttattacagattgtttgtggcttttaaaaaaagtcattgcttgaatgatgagagcttatatttaaaaaggcagggggctaaaataaataaataatttaaaaaataaaaat

SEQ ID NO: 104842 - DNA, 2311 bp, Homo sapiens
  Payload ID: 588
  Gene Symbol: AP1M1
  Gene Name: adaptor-related protein complex 1, mu 1 subunit
  Uniprot ID: Q9BXS5
  ENST ID: ENST00000444449
  CDS Start-End: 94-1401
ggcggcgcccggccttgctcaacgcccagcagtccccaccgtcgctgccgccgccaccgccctcggccgctgccgaggcctcctgcagccatcatgtccgccagcgccgtctacgtgctggacctgaagggcaaggtgctcatctgccggaactaccgtggcgacgtggacatgtcagaggtggagcacttcatgcccatcctgatggagaaggaggaggaggggatgctgtcgcccatcctggcccacgggggggtccgtttcatgtggatcaaacacaacaacctgtatctggttgccacatccaagaagaacgcgtgcgtgtcgctggtcttttctttcctctataaggtggtgcaggtgttttccgagtacttcaaggagctggaggaggagagcatccgggacaactttgttatcatctacgagctgctggacgagctcatggacttcggctacccccagaccaccgacagcaagatcctgcaggagtacatcactcaggaaggccacaagctggaaacaggggccccgcggccaccagccaccgtcaccaacgcggtgtcctggcggtccgaaggcatcaagtatcggaagaatgaggtgttcttggacgtcatcgagtctgtcaacctcttgggtaaatacccaggagtgggatggctgggtcacacggtcagcgccaacggcaatgtcctgcgcagcgagatcgtgggctccatcaagatgcgagtcttcctctcgggcatgcccgagctgcgcctgggcctcaacgacaaggtcctctttgacaacacgggccgcggcaaaagcaaatccgtggagctggaggatgtgaagttccaccagtgtgtgcggctatcacgcttcgagaatgaccgcaccatctccttcatcccacccgacggcgagttcgagctcatgtcctaccgtctcaacacccacgtcaagcctttgatatggatcgagtcggtgatcgagaagcactcccacagccgcatcgagtacatgatcaaggccaaaagccagttcaagcggcggtcaacagccaacaacgtggagatccacattcccgtgcccaatgatgccgactcacccaagttcaagacgacggtggggagcgttaagtgggtccccgagaacagcgagatcgtgtggtccatcaagtccttcccgggcggcaaggagtacctgatgcgggcccacttcggcctgcctagtgtggaggccgaagacaaggagggcaagcccccgatcagtgtcaagttcgagatcccttacttcactacctccggcatccaggtgcgctacctgaagatcattgagaagagtgggtaccaggccctgccctgggtgcgttatatcacgcagaatggagattaccagctccggacccagtgaggggctgtcgcagccaacaccccggcctcggggctcctggtggcagcaccaggggacacacctgccaaacccaccagatggaggggccctccctggtctctggccaccctcccagcctctgcccagggacccctgccttccccaggccatctgctctgccgtcgacactcgtctcagaagcccctttcccagaagaggctggtcttcaagaagtctcgtttctttgcccctgaagtcagtttcaggggaaggatgtgaaatttttccgtgtagaggttacagccttttatgctgttgagctcccaggtaccaaaaagcttggccaacgcttgccagccagccagctgcaggtggcatctgccacgaaggaagcgccagcctcgccaggccagcaggggcgtcgttttgttgccattttgttgaacgttatgggtttatgggtgttcctggaacttgtctttgtgcattcgttgctgtttgtgttaccctcactgtccccatgtcccacccacgtcctacggcactcaggaagcacttggtgaggacgagccctcacccttcttgtcttccttcccggcagcgcccgcagcgggccatttacacgtcgaggctggcacctggcgcgctcgggggccactgtagcgtctgcctgctccctggactcgcaggcctcgcctgtggcgccttcccagggccagcctgggtcacgagatgctgtcactcagccagatcagtattgacccaccaggggaggtggggtttggtgagagacgccagcctcagactttttcccactgagggtccagagagcggggccacgtgtcacccacgtctgcgcttggtcacccgtcctccccaccctgtgtgtgtttatgtcatagttacattaaattccattcattgaatactc

SEQ ID NO: 104843 - DNA, 1578 bp, Homo sapiens
  Payload ID: 588
  Gene Symbol: AP1M1
  Gene Name: adaptor-related protein complex 1, mu 1 subunit
  ENST ID: ENST00000429941
  CDS Start-End: 117-1229
ggaagtggaggtgagctgtcgcgggcggcgcccggccttgctcaacgcccagcagtccccaccgtcgctgccgccgccaccgccctcggccgctgccgaggcctcctgcagccatcatgtccgccagcgccgtctacgtgctggacctgaagggcaaggtgctcatctgccggaactaccgtggcgacgtggacatgtcagaggtggagcacttcatgcccatcctgatggagaaggaggaggaggggatgctgtcgcccatcctggcccacgggggggtccgtttcatgtggatcaaacacaacaacctgtatctggttgccacatccaagaagaacgcgtgcgtgtcgctggtcttttctttcctctataaggtggtgcaggtgttttccgagtacttcaaggagctggaggaggagagcatccgggacaactttgttatcatctacgagctgctggacgagctcatggacttcggctacccccagaccaccgacagcaagatcctgcaggagtacatcactcaggaaggccacaagctggaaacaggggccccgcggccaccagccaccgtcaccaacgcggtgtcctggcggtccgaaggcatcaagtatcggaagaatgaggtgttcttggacgtcatcgagtctgtcaacctcttggtcagcgccaacggcaatgtcctgcgcagcgagatcgtgggctccatcaagatgcgagtcttcctctcgggcatgcccgagctgcgcctgggcctcaacgacaaggtcctctttgacaacacgggccgcggcaaaagcaaatccgtggagctggaggatgtgaagttccaccagtgtgtgcggctatcacgcttcgagaatgaccgcaccatctccttcatcccacccgacggcgagttcgagctcatgtcctaccgtctcaacacccacgtcaagcctttgatatggatcgagtcggtgatcgagaagcactcccacagccgcatcgagtacatgatcaagggcggcaaggagtacctgatgcgggcccacttcggcctgcctagtgtggaggccgaagacaaggagggcaagcccccgatcagtgtcaagttcgagatcccttacttcactacctccggcatccaggtgcgctacctgaagatcattgagaagagtgggtaccaggccctgccctgggtgcgttatatcacgcagaatggagattaccagctccggacccagtgaggggctgtcgcagccaacaccccggcctcggggctcctggtggcagcaccaggggacacacctgccaaacccaccagatggaggggccctccctggtctctggccaccctcccagcctctgcccagggacccctgccttccccaggccatctgctctgccgtcgacactcgtctcagaagcccctttcccagaagaggctggtcttcaagaagtctcgtttctttgcccctgaagtcagtttcaggggaaggatgtgaaatttttccgtgtagaggttacagccttttatgctgttgagctcccaggtaccaaaaagcttggccaacgcttgccagccagccagctgca

SEQ ID NO: 104844 - DNA, 1705 bp, Homo sapiens
  Payload ID: 588
  Gene Symbol: AP1M1
  Gene Name: adaptor-related protein complex 1, mu 1 subunit
  ENST ID: ENST00000590756
  CDS Start-End: 174-1229
attcctgacagcacctcccggaccggacataacggtccccgcgcggctccccgaaccggaagtggaggtgagctgtcgcgggcggcgcccggccttgctcaacgcccagcagtccccaccgtcgctgccgccgccaccgccctcggccgctgccgaggcctcctgcagccatcatgtccgccagcgccgtctacgtgctggacctgaagggcaaggtactgagggtgttttccgagtacttcaaggagctggaggaggagagcatccgggacaactttgttatcatctacgagctgctggacgagctcatggacttcggctacccccagaccaccgacagcaagatcctgcaggagtacatcactcaggaaggccacaagctggaaacaggggccccgcggccaccagccaccgtcaccaacgcggtgtcctggcggtccgaaggcatcaagtatcggaagaatgaggtgttcttggacgtcatcgagtctgtcaacctcttggtcagcgccaacggcaatgtcctgcgcagcgagatcgtgggctccatcaagatgcgagtcttcctctcgggcatgcccgagctgcgcctgggcctcaacgacaaggtcctctttgacaacacgggccgcggcaaaagcaaatccgtggagctggaggatgtgaagttccaccagtgtgtgcggctatcacgcttcgagaatgaccgcaccatctccttcatcccacccgacggcgagttcgagctcatgtcctaccgtctcaacacccacgtcaagcctttgatatggatcgagtcggtgatcgagaagcactcccacagccgcatcgagtacatgatcaaggccaaaagccagttcaagcggcggtcaacagccaacaacgtggagatccacattcccgtgcccaatgatgccgactcacccaagttcaagacgacggtggggagcgttaagtgggtccccgagaacagcgagatcgtgtggtccatcaagtccttcccgggcggcaaggagtacctgatgcgggcccacttcggcctgcctagtgtggaggccgaagacaaggagggcaagcccccgatcagtgtcaagttcgagatcccttacttcactacctccggcatccaggtgcgctacctgaagatcattgagaagagtgggtaccaggccctgccctgggtgcgttatatcacgcagaatggagattaccagctccggacccagtgaggggctgtcgcagccaacaccccggcctcggggctcctggtggcagcaccaggggacacacctgccaaacccaccagatggaggggccctccctggtctctggccaccctcccagcctctgcccagggacccctgccttccccaggccatctgctctgccgtcgacactcgtctcagaagcccctttcccagaagaggctggtcttcaagaagtctcgtttctttgcccctgaagtcagtttcaggggaaggatgtgaaatttttccgtgtagaggttacagccttttatgctgttgagctcccaggtaccaaaaagcttggccaacgcttgccagccagccagctgcaggtggcatctgccacgaaggaagcgccagcctcgccaggccagcaggggcgtcgttttgttgccattttgttgaacgttatgggtttatgggtgttcctggaacttgtctttgtgcattcgttgctg

SEQ ID NO: 104845 - DNA, 546 bp, Homo sapiens
  Payload ID: 588
  Gene Symbol: AP1M1
  Gene Name: adaptor-related protein complex 1, mu 1 subunit
  ENST ID: ENST00000590263
  CDS Start-End: 137-546
attcctgacagcacctcccggaccggacataacggtccccgcgcggctccccgaaccggaagtggaggtgagctgtcgcgggcggcgcccggccttgctcaacgcccagcagtccccaccgcctcctgcagccatcatgtccgccagcgccgtctacgtgctggacctgaagggcaaggtgctcatctgccggaactaccgtggcgacgtggacatgtcagaggtggagcacttcatgcccatcctgatggagaaggaggaggaggggatgctgtcgcccatcctggcccacgggggggtccgtttcatgtggatcaaacacaacaacctgtatctggttgccacatccaagaagaacgcgtgcgtgtcgctggtcttttctttcctctataaggtggtgcaggtgttttccgagtacttcaaggagctggaggaggagagcatccgggacaactttgttatcatctacgagctgctggacgagctcatggacttcggctacccccagaccaccgacagcaagatcctgcaggagtacatcactca

SEQ ID NO: 104846 - DNA, 564 bp, Homo sapiens
  Payload ID: 588
  Gene Symbol: AP1M1
  Gene Name: adaptor-related protein complex 1, mu 1 subunit
  ENST ID: ENST00000591775
  CDS Start-End: 189-564
ttatgagccccatcctggtgtgaggcagagaggccggtagacctcacctgagagccccatcctgtttctgggtaaccgggcgggggtcttaagtgggtaatccccgccctgttgctacgtaacgcggtgggctgcagccaccgcgttgccaggtgctcatctgccggaactaccgtggcgacgtggacatgtcagaggtggagcacttcatgcccatcctgatggagaaggaggaggaggggatgctgtcgcccatcctggcccacgggggggtccgtttcatgtggatcaaacacaacaacctgtatctggttgccacatccaagaagaacgcgtgcgtgtcgctggtcttttctttcctctataaggtggtgcaggtgttttccgagtacttcaaggagctggaggaggagagcatccgggacaactttgttatcatctacgagctgctggacgagctcatggacttcggctacccccagaccaccgacagcaagatcctgcaggagtacatcactcaggaaggccacaagctggaaacaggggccccgcggccaccagcca

SEQ ID NO: 104847 - DNA, 549 bp, Homo sapiens
  Payload ID: 588
  Gene Symbol: AP1M1
  Gene Name: adaptor-related protein complex 1, mu 1 subunit
  ENST ID: ENST00000590945
  CDS Start-End: 358-549
gctaggtaaccggcttatgagccccatcctggtgtgaggcagagaggccggtagacctcacctgagagccccatcctgtttctgggtaaccgggcgggggtcttaagtgggtaatccccgccctgttgctacgtaacgcggtgggctgcagccaccgcgttgccagcagtggacaggggttctggatgctgtatatcctgacccacaggctatgaaagagagagaccaggaagagggcttctcccttcaggccacctgtggacttcagtaaatacgaaccttcagcgggagtgggcgccctgacacaggcgggagagcaaggtgctcatctgccggaactaccgtggcgacgtggacatgtcagaggtggagcacttcatgcccatcctgatggagaaggaggaggaggggatgctgtcgcccatcctggcccacgggggggtccgtttcatgtggatcaaacacaacaacctgtatctggttgccacatccaagaagaacgcgtgcgtgtcgctggtcttttctttcctctataaggtggtgcaggtg

SEQ ID NO: 104848 - DNA, 642 bp, Homo sapiens
  Payload ID: 588
  Gene Symbol: AP1M1
  Gene Name: adaptor-related protein complex 1, mu 1 subunit
  ENST ID: ENST00000586543
  CDS Start-End: 1-530
tatcacgcttcgagaatgaccgcaccatctccttcatcccacccgacggcgagttcgagctcatgtcctaccgtctcaacacccacgtcaagcctttgatatggatcgagtcggtgatcgagaagcactcccacagccgcatcgagtacatgatcaaggccaaaagccagttcaagcggcggtcaacagccaacaacgtggagatccacattcccgtgcccaatgatgccgactcacccaagttcaagacgacggtggggagcgttaagtgggtccccgagaacagcgagatcgtgtggtccatcaagtccttcccgggcggcaaggagtacctgatgcgggcccacttcggcctgcctagtgtggaggccgaagacaaggagggcaagcccccgatcagtgtcaagttcgagatcccttacttcactacctccggcatccagatgctgtcactcagccagatcagtattgacccaccaggggaggtggggtttggtgagagacgccagcctcagactttttcccactgagggtccagagagcggggccacgtgtcacccacgtctgcgcttggtcacccgtcctccccaccctgtgtgtgtttatgtcatagttacattaaattccattcattgaatactc

SEQ ID NO: 104849 - DNA, 562 bp, Homo sapiens
  Payload ID: 588
  Gene Symbol: AP1M1
  Gene Name: adaptor-related protein complex 1, mu 1 subunit
  ENST ID: ENST00000589822
  CDS Start-End: 248-562
accgtcgctgccgccgccaccgccctcggccgctgccgaggcctcctgcagccatcatgtccgccagcgccgtctacgtgctggacctgaagggcaaggctatgaaagagagagaccaggaagagggcttctcccttcaggccacctgtggacttcagtaaatacgaaccttcagcgggagtgggcgccctgacacaggcgggagagcaaggtgctcatctgccggaactaccgtggcgacgtggacatgtcagaggtggagcacttcatgcccatcctgatggagaaggaggaggaggggatgctgtcgcccatcctggcccacgggggggtccgtttcatgtggatcaaacacaacaacctgtatctggttgccacatccaagaagaacgcgtgcgtgtcgctggtcttttctttcctctataaggtggtgcaggtgttttccgagtacttcaaggagctggaggaggagagcatccgggacaactttgttatcatctacgagctgctggacgagctcatggacttcggctacccccagaccaccgacagcaagatcctg

SEQ ID NO: 104850 - DNA, 436 bp, Homo sapiens
  Payload ID: 588
  Gene Symbol: AP1M1
  Gene Name: adaptor-related protein complex 1, mu 1 subunit
  ENST ID: ENST00000589782
  CDS Start-End: 1-387
aacctgtatctggttgccacatccaagaagaacgcgtgcgtgtcgctggtcttttctttcctctataaggtggtgcaggtgttttccgagtacttcaaggagctggaggaggagagcatccgggacaactttgttatcatctacgagctgctggacgagctcatggacttcggctacccccagaccaccgacagcaagatcctgcaggagtacatcactcaggaaggccacaagctggaaacaggggccccgcggccaccagccaccgtcaccaacgcggtgtcctggcggtccgaaggcatcaagtatcggaagaatgaggtgttcttggacgtcatcgagtctgtcaacctcttggtaggcctcttttctttccttcttctgtagggttttatctcttccacgatagaaataaacacagcattttaaaactggc

SEQ ID NO: 104851 - DNA, 1749 bp, Homo sapiens
  Payload ID: 589
  Gene Symbol: AP1M2
  Gene Name: adaptor-related protein complex 1, mu 2 subunit
  Uniprot ID: Q9Y6Q5
  ENST ID: ENST00000250244
  CDS Start-End: 84-1355
gcgcttccgcaggaagaaggaagcggcgccgccatcgcctcccggcgctccctccccgactcctaagtccttcggccgccaccatgtccgcctcggctgtcttcattctggacgttaagggcaagccattgatcagccgcaactacaagggcgatgtggccatgagcaagattgagcacttcatgcctttgctggtacagcgggaggaggaaggcgccctggccccgctgctgagccacggccaggtccacttcctatggatcaaacacagcaacctctacttggtggccaccacatcgaagaatgccaatgcctccctggtgtactccttcctgtataagacaatagaggtattctgcgaatacttcaaggagctggaggaggagagcatccgggacaactttgtcatcgtctacgagttgctggacgagctcatggactttggcttcccgcagaccaccgacagcaagatcctgcaggagtacatcactcagcagagcaacaagctggagacgggcaagtcacgggtgccacccactgtcaccaacgctgtgtcctggcgctccgagggtatcaagtataagaagaacgaggtcttcattgatgtcatagagtctgtcaacctgctggtcaatgccaacggcagcgtccttctgagcgaaatcgtcggtaccatcaagctcaaggtgtttctgtcaggaatgccagagctgcggctgggcctcaatgaccgcgtgctcttcgagctcactggccgcagcaagaacaaatcagtagagctggaggatgtaaaattccaccagtgcgtgcggctctctcgctttgacaacgaccgcaccatctccttcatcccgcctgatggtgactttgagctcatgtcataccgcctcagcacccaggtcaagccactgatctggattgagtctgtcattgagaagttctcccacagccgcgtggagatcatggtcaaggccaaggggcagtttaagaaacagtcagtggccaacggtgtggagatatctgtgcctgtacccagcgatgccgactcccccagattcaagaccagtgtgggcagcgccaagtatgtgccggagagaaacgtcgtgatttggagtattaagtctttcccggggggcaaggagtacttgatgcgagcccactttggcctccccagtgtggaaaaggaagaggtggagggccggccccccatcggggtcaagtttgagatcccctacttcaccgtctctgggatccaggtccgatacatgaagatcattgagaaaagtggttaccaggccctgccctgggttcgctacatcacccagagtggcgattaccaacttcgtaccagctagaagggagaagagatgggggcttgaacacggggcttccttacagccccggatgcagattttagagggagggcaggtgcgggctgtgtgtgtctgtgtgagggcaggtcctggacttggcagtttcttgctcccagcacccgccccttcctcacctcttccttattccataggctgggagagaaactctctctgcttccctcgcccttggagctttccccatccccctgattttatatgaagaaatagaagaggggcttgaagtcctcctcgcgagtgccttcttgcaattacctgccttagcgggtgttgcgggtccctccttcacagccgctgagcccagaggtcccgctggcccctcctctgaattttaggatgtcattaaaaagatgaatct

SEQ ID NO: 104852 - DNA, 736 bp, Homo sapiens
  Payload ID: 589
  Gene Symbol: AP1M2
  Gene Name: adaptor-related protein complex 1, mu 2 subunit
  ENST ID: ENST00000591240
  CDS Start-End: 1-736
gctgtcttcattctggacgttaagggcaaggtattctgcgaatacttcaaggagctggaggaggagagcatccgggacaactttgtcatcgtctacgagttgctggacgagctcatggactttggcttcccgcagaccaccgacagcaagatcctgcaggagtacatcactcagcagagcaacaagctggagacgggcaagtcacgggtgccacccactgtcaccaacgctgtgtcctggcgctccgagggtatcaagtataagaagaacgaggtcttcattgatgtcatagagtctgtcaacctgctggtcaatgccaacggcagcgtccttctgagcgaaatcgtcggtaccatcaagctcaaggtgtttctgtcaggaatgccagagctgcggctgggcctcaatgaccgcgtgctcttcgagctcactggccgcagcaagaacaaatcagtagagctggaggatgtaaaattccaccagtgcgtgcggctctctcgctttgacaacgaccgcaccatctccttcatcccgcctgatggtgactttgagctcatgtcataccgcctcagcacccaggtcaagccactgatctggattgagtctgtcattgagaagttctcccacagccgcgtggagatcatggtcaaggccaaggggcagtttaagaaacagtcagtggccaacggtgtggagatatctgtgcctgtacccagcgatgccgactcccccagat

SEQ ID NO: 104853 - DNA, 510 bp, Homo sapiens
  Payload ID: 589
  Gene Symbol: AP1M2
  Gene Name: adaptor-related protein complex 1, mu 2 subunit
  ENST ID: ENST00000589348
  CDS Start-End: 1-133
aaacgtcgtgatttggagtattaagtctttcccggtccgatacatgaagatcattgagaaaagtggttaccaggccctgccctgggttcgctacatcacccagagtggcgattaccaacttcgtaccagctagaagggagaagagatgggggcttgaacacggggcttccttacagccccggatgcagattttagagggagggcaggtgcgggctgtgtgtgtctgtgtgagggcaggtcctggacttggcagtttcttgctcccagcacccgccccttcctcacctcttccttattccataggctgggagagaaactctctctgcttccctcgcccttggagctttccccatccccctgattttatatgaagaaatagaagaggggcttgaagtcctcctcgcgagtgccttcttgcaattacctgccttagcgggtgttgcgggtccctccttcacagccgctgagcccagaggtcccgctggcccctcctctgaattttaggatgtc

SEQ ID NO: 104854 - DNA, 1757 bp, Homo sapiens
  Payload ID: 589
  Gene Symbol: AP1M2
  Gene Name: adaptor-related protein complex 1, mu 2 subunit
  Uniprot ID: Q9Y6Q5
  ENST ID: ENST00000590923
  CDS Start-End: 85-1362
ggcgcttccgcaggaagaaggaagcggcgccgccatcgcctcccggcgctccctccccgactcctaagtccttcggccgccaccatgtccgcctcggctgtcttcattctggacgttaagggcaagccattgatcagccgcaactacaagggcgatgtggccatgagcaagattgagcacttcatgcctttgctggtacagcgggaggaggaaggcgccctggccccgctgctgagccacggccaggtccacttcctatggatcaaacacagcaacctctacttggtggccaccacatcgaagaatgccaatgcctccctggtgtactccttcctgtataagacaatagaggtattctgcgaatacttcaaggagctggaggaggagagcatccgggacaactttgtcatcgtctacgagttgctggacgagctcatggactttggcttcccgcagaccaccgacagcaagatcctgcaggagtacatcactcagcagagcaacaagctggagacgggcaagtcacgggtgccacccactgtcaccaacgctgtgtcctggcgctccgagggtatcaagtataagaagaacgaggtcttcattgatgtcatagagtctgtcaacctgctggtcaatgccaacggcagcgtccttctgagcgaaatcgtcggtaccatcaagctcaaggtgtttctgtcaggaatgccagagctgcggctgggcctcaatgaccgcgtgctcttcgagctcactggcctttcaggcagcaagaacaaatcagtagagctggaggatgtaaaattccaccagtgcgtgcggctctctcgctttgacaacgaccgcaccatctccttcatcccgcctgatggtgactttgagctcatgtcataccgcctcagcacccaggtcaagccactgatctggattgagtctgtcattgagaagttctcccacagccgcgtggagatcatggtcaaggccaaggggcagtttaagaaacagtcagtggccaacggtgtggagatatctgtgcctgtacccagcgatgccgactcccccagattcaagaccagtgtgggcagcgccaagtatgtgccggagagaaacgtcgtgatttggagtattaagtctttcccggggggcaaggagtacttgatgcgagcccactttggcctccccagtgtggaaaaggaagaggtggagggccggccccccatcggggtcaagtttgagatcccctacttcaccgtctctgggatccaggtccgatacatgaagatcattgagaaaagtggttaccaggccctgccctgggttcgctacatcacccagagtggcgattaccaacttcgtaccagctagaagggagaagagatgggggcttgaacacggggcttccttacagccccggatgcagattttagagggagggcaggtgcgggctgtgtgtgtctgtgtgagggcaggtcctggacttggcagtttcttgctcccagcacccgccccttcctcacctcttccttattccataggctgggagagaaactctctctgcttccctcgcccttggagctttccccatccccctgattttatatgaagaaatagaagaggggcttgaagtcctcctcgcgagtgccttcttgcaattacctgccttagcgggtgttgcgggtccctccttcacagccgctgagcccagaggtcccgctggcccctcctctgaattttaggatgtcattaaaaagatgaatcta

SEQ ID NO: 104855 - DNA, 544 bp, Homo sapiens
  Payload ID: 589
  Gene Symbol: AP1M2
  Gene Name: adaptor-related protein complex 1, mu 2 subunit
  ENST ID: ENST00000587069
  CDS Start-End: 1-387
gagatatctgtgcctgtacccagcgatgccgactcccccagattcaagaccagtgtgggcagcgccaagtatgtgccggagagaaacgtcgtgatttggagtattaagtctttcccggggggcaaggagtacttgatgcgagcccactttggcctccccagtgtggaaaaggaagaggtggagggccggccccccatcggggtcaagtttgagatcccctacttcaccgtctctgggatccaggtccgatacatgaagatcattgagaaaagtggttaccaggccctgccctgggttcgctacatcacccagagtggcggctgggagagaaactctctctgcttccctcgcccttggagctttccccatccccctgattttatatgaagaaatagaagaggggcttgaagtcctcctcgcgagtgccttcttgcaattacctgccttagcgggtgttgcgggtccctccttcacagccgctgagcccagaggtcccgctggcccctcctctgaattttaggatgtcattaaaaagatgaatcta

SEQ ID NO: 104856 - DNA, 961 bp, Homo sapiens
  Payload ID: 589
  Gene Symbol: AP1M2
  Gene Name: adaptor-related protein complex 1, mu 2 subunit
  ENST ID: ENST00000591676
  CDS Start-End: 65-961
gaagcggcgccgccatcgcctcccggcgctccctccccgactcctaagtccttcggccgccaccatgtccgcctcggctgtcttcattctggacgttaagggcaagccattgatcagccgcaactacaagggcgatgtggccatgagcaagattgagcacttcatgcctttgctggtacagcgggaggaggaaggcgccctggccccgctgctgagccacggccaggtccacttcctatggatcaaacacagcaacctctactgtatccaccccacgtggtgtccctggaggtgggtgtgggggctgtcggcgatggtggcagctcaggccaagagagggtgggctgaggacaggagttgcaccgcacatctctgtggcttaggctggggggcaggggcaggtagagatgagggtggtggcaagggacagggtggaggttcggggtctgtattccatttacttctccataaatggcaccttttccttaaccttgctgccccagtggtggccaccacatcgaagaatgccaatgcctccctggtgtactccttcctgtataagacaatagaggtattctgcgaatacttcaaggagctggaggaggagagcatccgggacaactttgtcatcgtctacgagttgctggacgagctcatggactttggcttcccgcagaccaccgacagcaagatcctgcaggagtacatcactcagcagagcaacaagctggagacgggcaagtcacgggtgccacccactgtcaccaacgctgtgtcctggcgctccgagggtatcaagtataagaagaacgaggtcttcattgatgtcatagagtctgtcaacctgctggtcaatgccaacggcagcgtccttctgagcgaaatcgtcggtaccatcaagctcaaggtgtttctgtcaggaatgccagagctgcggctgggcctcaatgaccgcgtgctc

SEQ ID NO: 104857 - DNA, 543 bp, Homo sapiens
  Payload ID: 589
  Gene Symbol: AP1M2
  Gene Name: adaptor-related protein complex 1, mu 2 subunit
  ENST ID: ENST00000589571
  CDS Start-End: 69-185
gaaggaagcggcgccgccatcgcctcccggcgctccctccccgactcctaagtccttcggccgccaccatgtccgcctcggctgtcttcattctggacgttaagggcaagagggatcccgctatgttgccaaagctggtctcaaactcctggcctcaagggatcctcctgccttggtcttcatgaccattgatcagccgcaactacaagggcgatgtggccatgagcaagattgagcacttcatgcctttgctggtacagcgggaggaggaaggcgccctggccccgctgctgagccacggccaggtccacttcctatggatcaaacacagcaacctctacttggtggccaccacatcgaagaatgccaatgcctccctggtgtactccttcctgtataagacaatagaggtattctgcgaatacttcaaggagctggaggaggagagcatccgggacaactttgtcatcgtctacgagttgctggacgagctcatggactttggcttcccgcagaccaccgacagcaagatcctgcaggagt

SEQ ID NO: 104858 - DNA, 850 bp, Homo sapiens
  Payload ID: 589
  Gene Symbol: AP1M2
  Gene Name: adaptor-related protein complex 1, mu 2 subunit
  ENST ID: ENST00000589684
  CDS Start-End: 133-850
aagtccttcggccgccaccatgtccgcctcggctgtcttcattctggacgttaagggcaaggtgaggctgggcatgaggagttgggagacggacagccattgatcagccgcaactacaagggcgatgtggccatgagcaagattgagcacttcatgcctttgctggtacagcgggaggaggaaggcgccctggccccgctgctgagccacggccaggtccacttcctatggatcaaacacagcaacctctacttggtggccaccacatcgaagaatgccaatgcctccctggtgtactccttcctgtataagacaatagaggtattctgcgaatacttcaaggagctggaggaggagagcatccgggacaactttgtcatcgtctacgagttgctggacgagctcatggactttggcttcccgcagaccaccgacagcaagatcctgcaggagtacatcactcagcagagcaacaagctggagacgggcaagtcacgggtgccacccactgtcaccaacgctgtgtcctggcgctccgagggtatcaagtataagaagaacgaggtcttcattgatgtcatagagtctgtcaacctgctggtcaatgccaacggcagcgtccttctgagcgaaatcgtcggtaccatcaagctcaaggtgtttctgtcaggaatgccagagctgcggctgggcctcaatgaccgcgtgctcttcgagctcactggccgcagcaagaacaaatcagtagagctggaggatgtaaaattccaccagtgcgtgcggctctctcgctttgacaacgaccgcaccatctccttcatcccgcctgatggtgactttgagctcatgt

SEQ ID NO: 104859 - DNA, 336 bp, Homo sapiens
  Payload ID: 589
  Gene Symbol: AP1M2
  Gene Name: adaptor-related protein complex 1, mu 2 subunit
  ENST ID: ENST00000592285
  CDS Start-End: 1-312
ttcaagaccagtgtgggcagcgccaagtatgtgccggagagaaacgtcgtgatttggagtattaagtctttcccggggggcaaggagtacttgatgcgagcccactttggcctccccagtgtggaaaaggaagaggtggagggccggccccccatcggggtcaagtttgagatcccctacttcaccgtctctgggatccaggtccgatacatgaagatcattgagaaaagtggttaccaggccctgccctgggttcgctacatcacccagagtggcggtaaggcagcccagctcctggggacaatggggtgagggaaaggcagtgggtagggactc

SEQ ID NO: 104860 - DNA, 1306 bp, Homo sapiens
  Payload ID: 590
  Gene Symbol: AP1S1
  Gene Name: adaptor-related protein complex 1, sigma 1 subunit
  Uniprot ID: P61966
  ENST ID: ENST00000337619
  CDS Start-End: 119-595
ggcgggacggggcggggcttcgggcgagagggagggcagcaggagaaaggataagaaagggagtgggactggcgcctacggtggccgaagtgggacgcgccgagccggaggctgcaggatgatgcggttcatgctattattcagccggcagggaaaactgcggctgcaaaaatggtacctggccacttcggacaaggaacggaagaagatggtgcgcgagctcatgcaggttgtcctggctcgaaagcccaagatgtgcagcttcctggagtggagggacctcaaagttgtctataagagatatgccagcctctacttctgctgcgccatcgagggccaagacaatgagctcatcacactggagctgatccaccgatacgtggagctcttagacaaatactttggcagtgtgtgcgagctggacatcatcttcaactttgagaaggcctacttcatcctggatgagtttttgatggggggggatgtccaggacacctccaagaagagtgtgctgaaagccatcgagcaggctgacctactgcaagaggaggatgagtcgccacggagtgtgctggaggagatgggtttggcatagcccctgctgggccggggtgtggcgatggggtcctggcagcgtggcgggaacggctgcttctcctctgcccagggccctgttcttggtgggactcggctgcccctcctctgctgcctcacctttcggagtgagctgtgggctcaggcccttcaaacattccctccctccaccccctacctccactttccccttttcccactgaaggttttagaagctaggaggcaggaaaatgtgacccagatgggggtgctatttggcttttattccctgcctttgcagaactgatgtcaccccagatgtccttccctccctaataactgtaaatatataaatatgtcaggttaaagggaaaaggtgttcagggcacttcttgtcctctctgtcccataacctacctccaccctccccctagccagccaggcagcttctctgcctgggaggggagcctggacccccctctttctccttggctgcagtggggcctttatccagtgccagggaggaacaacatagttaatttttttctaaccttgccactttgagggaaggaagggttgggggaagggcaagctttatgggaccctggtcctggccctggcctttcactccagttctgggtgaggcaggagctgggaggggtggggagggggagggggaagtgtctgcctttatgtcctttcttctgaaataaaagtaaaagcatttctggac

SEQ ID NO: 104861 - DNA, 573 bp, Homo sapiens
  Payload ID: 590
  Gene Symbol: AP1S1
  Gene Name: adaptor-related protein complex 1, sigma 1 subunit
  ENST ID: ENST00000429457
  CDS Start-End: 1-573
gtgcgaagagggaggggagggggaagcgaggggcgtgggctgcacctgcgggggtcctcgggggccgccctcggggtgaaccgccctgtcttccctctggtcctcagaggcctcccttgcctcggcggatgcggttcatgctattattcagccggcagggaaaactgcggctgcaaaaatggtacctggccacttcggacaaggaacggaagaagatggtgcgcgagctcatgcaggttgtcctggctcgaaagcccaagatgtgcagcttcctggagtggagggacctcaaagttgtctataagagatatgccagcctctacttctgctgcgccatcgagggccaagacaatgagctcatcacactggagctgatccaccgatacgtggagctcttagacaaatactttggcagtgtgtgcgagctggacatcatcttcaactttgagaaggcctacttcatcctggatgagtttttgatggggggggatgtccaggacacctccaagaagagtgtgctgaaagccatcgagcaggctgacctactgcaagaggaggatgagtcgccacgga

SEQ ID NO: 104862 - DNA, 741 bp, Homo sapiens
  Payload ID: 590
  Gene Symbol: AP1S1
  Gene Name: adaptor-related protein complex 1, sigma 1 subunit
  Uniprot ID: P61966
  ENST ID: ENST00000443943
  CDS Start-End: 33-509
gaagtgggacgcgccgagccggaggctgcaggatgatgcggttcatgctattattcagccggcagggaaaactgcggctgcaaaaatggtacctggccacttcggacaaggaacggaagaagatggtgcgcgagctcatgcaggttgtcctggctcgaaagcccaagatgtgcagcttcctggagtggagggacctcaaagttgtctataagagatatgccagcctctacttctgctgcgccatcgagggccaagacaatgagctcatcacactggagctgatccaccgatacgtggagctcttagacaaatactttggcagtgtgtgcgagctggacatcatcttcaactttgagaaggcctacttcatcctggatgagtttttgatggggggggatgtccaggacacctccaagaagagtgtgctgaaagccatcgagcaggctgacctactgcaagaggaggatgagtcgccacggagtgtgctggaggagatgggtttggcatagcccctgctgggccggggtgtggcgatggggtcctggcagcgtggcgggaacggctgcttctcctctgcccagggccctgttcttggtgggactcggctgcccctcctctgctgcctcacctttcggaatttcatttcctgtattttatctggccaccctaccttaaacggatttttatgcccaatgcgtctccaaacgggctgcccccaactccctgagctgcctttatgga

SEQ ID NO: 104863 - DNA, 2237 bp, Homo sapiens
  Payload ID: 591
  Gene Symbol: AP1S2
  Gene Name: adaptor-related protein complex 1, sigma 2 subunit
  Uniprot ID: P56377
  ENST ID: ENST00000329235
  CDS Start-End: 245-718
gcttcccgcgcgtcgcctagcccgcccctcagctcgccgcagccccggctcctccctcgtccggcccccggggcggggtctgtcagcttgccctcccctctccgcctaagcctgccctatgccagccgggtgtcctccccacagcaccacggcttctcttcctcagcacggcgacaggggcttccccttcgccgccgccgccgccgccggccaagctccgccgcgcccgcggcccgcggccgccatgcagtttatgttgctttttagtcgtcagggaaagcttcgactgcaaaaatggtatgtcccactatcagacaaagagaagaaaaagatcacaagagaacttgttcagaccgttttagcacggaaacctaaaatgtgcagcttccttgagtggcgagatctgaagattgtttacaaaagatatgctagtctgtatttttgctgtgctattgaggatcaggacaatgaactaattaccctggaaataattcatcgttatgtggaattacttgacaagtatttcggcagtgtctgtgaactagatatcatctttaattttgagaaggcttattttattttggatgagtttcttttgggaggggaagttcaggaaacatccaagaaaaatgtccttaaagcaattgagcaggctgatctactgcaggaggaagctgaaaccccacgtagtgttcttgaagaaattggactgacataactctcctcccttgttgatgacttcttgtggcatttcacacactgtagatggtcactcccttcatgtccatgttagctcatggtgtaagatgatgtcttgtcagtattactgttttgctaagccgcttcattcatgcctacacaatttttttttaaaagggaactttagttaattaagtgataagggacttaaatatgaattagaatggtgcagaaagagataccttttctggatattttaaagtttaaaggtcagtttctcttaatctgattatgtgcacatatgaaaatggcacatcatatacatgtaaaatcaggcagtatacatttattaattactgtatttgacaaaggaaactcttaaattataatgtgaaacctggttttatgaaaccaaagactagtgcagcatttcagcatatgtaaaaaaaaaaaaaaagggaattgacatgtcacatatcaaatgaatggaaactttgttgaaactttaaaaagcaaatttactccaaagacttgtattggaaattacataccttttttttttttttttaaaggactacagattatttttaatgactaaattggagtgatacttcttacactaaaaattatttcttaggcattctgaatctgggatgagaaacaggattgtttcacaatagtaagcacataatttttaaggccaaggcacatttgactcctgagatgaattttttgtggtcataatcaaatacttagttgtttttgatgccccaaaataaagtgagaatggtaatttgccaggaattcttcataacagtatcttacaaaaaacgtgttgctctcttcacagtattatgtgtaaagtcattgtttaaagcacgaatgttccctctggggtacttgttaaagctaaatttattttgcttccctccacttagaagtgctgcacactttacagcagcttcctttctttccatggcactgcctagttaacagaagtcttataaaaatttaaaaagacacatttcttacaaaaaagagttgaatgaggtaaaatggcattagatggctctatattttttaaagctatgtaattgttcagcgtcacttttctaagtacttatacatatctaaacatgtcttcatggtttatattttcacttatatatgctgggctggattaagctttgttgtgattgtgaccaacattcaggccacgtgagcactgtcttatcacatcgccaattagttgtaataaacgttcaacgtacaaacactggagtgtgtttttatctctttccaaaagtttgtcaaactatgcagagctgctgaaggaagaatttctcatttttttttcagtaaaatgttgaaaattcccctccatttgaatatggtggttgttataagcacacacaagatacatggtggaagatctaaggagtcttcatgtacttcattaaaaaataacatggattccatactgagagcctatctacacatttattttcaatcaataaatgctgcttttaaaaccttga

SEQ ID NO: 104864 - DNA, 3492 bp, Homo sapiens
  Payload ID: 591
  Gene Symbol: AP1S2
  Gene Name: adaptor-related protein complex 1, sigma 2 subunit
  ENST ID: ENST00000380291
  CDS Start-End: 118-600
gggtgtcctccccacagcaccacggcttctcttcctcagcacggcgacaggggcttccccttcgccgccgccgccgccgccggccaagctccgccgcgcccgcggcccgcggccgccatgcagtttatgttgctttttagtcgtcagggaaagcttcgactgcaaaaatggtatgtcccactatcagacaaagagaagaaaaagatcacaagagaacttgttcagaccgttttagcacggaaacctaaaatgtgcagcttccttgagtggcgagatctgaagattgtttacaaaagatatgctagtctgtatttttgctgtgctattgaggatcaggacaatgaactaattaccctggaaataattcatcgttatgtggaattacttgacaagtatttcggcagtgtctgtgaactagatatcatctttaattttgagaaggcttattttattttggatgagtttcttttgggaggggaagttcaggaaacatccaagaaaaatgtccttaaagcaattgagcaggctgatctactgcaggagaaaacagagactatgtatcacagcaagagtttcattgggtttaagaaagcgtactagaatacgtgctggagtactgacatgcatcaaaatgtagtaggatatataaattcagtttgtaatgacaattttgtcaagtttgttatttatattttagcattacctgaaaagtctaattacattaaatcccaagggatagtcccaattacttcattaaactggtattttcatagggaattttgcttggataatgatccattattggggcttataatttattttttacacagaatatggaaatagcttcagaggttcattgacaataaagcattcattaaatactgtgaatcactaatgccattgatacagaagaatttccctatgaaaatgagagcttctgtgagaaaatgaagtagttgggagtttaatttcttattaatatgattttaacttgctgcttcattccactatattctgagttgggggaaaagggcagctatctctttaaaatatttaggaattctttgaggattaaaatgtaactggcttttgtcctcagatacgtttgtaattaatggttgtgtaagtttagggatttgttagatatttttcttggaacagtttacatgattttgtagttcaacatttcaaagtttcaacttgaataaatattaaaatgaggatactttaaagacactcaaataagcaattttaaacttgctttctggtggggatataatccctttgagagtctgaaggatgatgggctgtcaccccaggaaaatttgcacatcattttgtttctaatttcagggaactctcagagcccctagaagtccttctgtagacactcaaatctggagagttcgttaaaatctgtcttgaggatttttaaaaaagtaatatcctcagtctcagtcaaattctttggattttttgcttttgtaggtataagtaaacggttaaaaaccttcattgctacttaaaataccagatgagtgactacttttccagtttttattgggaaagatttttctctaggttctttagtttatgtaatacaaatgaactaatgaatttaaatactggtggaaggggaatattctaattgaatttttggtcaactcagtattgaccagatgacttacactgaaaatcttttcataatattagtagtaaatatagtgttttaggattttgtaaaatttctggaggatgtctgtcatcattttgaacactgtatgtagtaaagttagaaaaaaatgaatctaaagtcttgggcattgtttagaagttaaatattcagccttaaaccaaagaatgaaagcaaacagaaacttaagttttagttatctttactgtgagctaaatgttctagaaatctgattgtgtctgtgtcagtttgtatactgtgtgtaagaatatatgcatttcttttgtagccacgtcatgaatattttaatgtccctgtgtactaaatgactactcatcgagtatgcagaatttcacagaggaaatagaatgctgatatacatatgaaagaaaatatcctcagcatggtgatttattgtcttgtataataatagtagaacattttagaactagtacttttatgattgtatttttttcctgttcacattccaaacttttctgttttattttcattctatatgtgatcttgatacagctcattcctttctgcaactgatttaatctcatcttgacaaaatatgacctagaagtgttttgagtaatattaaatcttaaacacatacatattattaatgaaccatctgtgatttatcttataagaggaaaacatgacaatcattaaaatgtttaccaaagaaaatatagctgaagtgctaggtcaaaataagcagtgccataatatatagtgtagtttggtcttcaaatatggaggttaaaaaaagaaactattttgtgtgattatcttacaatctgtatgagctaatgtgttctaatgtatcacataaaagtatatgtgaaaatattacaagaaactaaaattaatttgtaccattatataatatttaaggttaaaacattcagtattaagaaattttgtagtgccacatttattgaatcacatttgtgctatataataatatcaaacaatccctttaagaacttattagagagctatgtctgaagtctgttctgcaatatctgttgctgaataataactctttcaaagcattaatgctgagtttatatagttcaaaaattctaatattcattcagttttaatacctaaatacttatattttactagtgatggcattctaatatattaagtcctcatttaaatacttgatactttgttaactgtggcattatatttctgaattttaaaacctttaatattggtaactattgcatattcttttaataaaacatgcagcatatttttttataaaaggaaaagaattcattgtttatatctagagagcataaagcctaagttaagtaagttattaaacaataacttcacaagatgttcaaatcgatttatcactgaaagaagatctatgaaaatgtgttttgaccaaacttagtattaggcaggtacacagataagattttccattcttaacattctcactgtaatgcacgacatttgaagcacctggatgtgctatcaatcaggtgggaaatttagcattatatattggaagcattgagaaacattggtctttcatttctatttttttttcccctcctttcctcctcctgccccacaatatattattcatctggttttaatgctacataaatatgcattgtctcatgcctgtttgtgttggatgccttgtgctaagctgtaacaaaatgttgcttcttttgctgtctgtatacagctgcttgctttaaattagtagattctgaaatagctttccttgcatgtctaaaataaaagtattgcatgta

SEQ ID NO: 104865 - DNA, 530 bp, Homo sapiens
  Payload ID: 591
  Gene Symbol: AP1S2
  Gene Name: adaptor-related protein complex 1, sigma 2 subunit
  ENST ID: ENST00000450644
  CDS Start-End: 1-440
gtcgtcagggaaagcttcgactgcaaaaatggtatgtcccactatcagacaaagagaagaaaaagatcacaagagaacttgttcagaccgttttagcacggaaacctaaaatgtgcagcttccttgagtggcgagatctgaagattgtttacaaaagatatgctagtctgtatttttgctgtgctattgaggatcaggacaatgaactaattaccctggaaataattcatcgttatgtggaattacttgacaagtatttcggcagtgtctgtgaactagatatcatctttaattttgagaaggcttattttattttggatgagtttcttttgggaggggaagttcaggaaacatccaagaaaaatgtccttaaagcaattgagcaggctgatctactgcaggagccacgtcatgaatattttaatgtccctgtgtactaaatgactactcatcgagtatgcagaatttcacagaggaaatagaatgctgatatacatatgaaagaaaatatcctcagcatggtgatttat

SEQ ID NO: 104866 - DNA, 991 bp, Homo sapiens
  Payload ID: 591
  Gene Symbol: AP1S2
  Gene Name: adaptor-related protein complex 1, sigma 2 subunit
  ENST ID: ENST00000452376
  CDS Start-End: 1-460
gttgctttttagtcgtcagggaaagcttcgactgcaaaaatggtatgtcccactatcagacaaagagaagaaaaagatcacaagagaacttgttcagaccgttttagcacggaaacctaaaatgtgcagcttccttgagtggcgagatctgaagattgtttacaaaagatatgctagtctgtatttttgctgtgctattgaggatcaggacaatgaactaattaccctggaaataattcatcgttatgtggaattacttgacaagtatttcggcagtgtctgtgaactagatatcatctttaattttgagaaggcttattttattttggatgagtttcttttgggaggggaagttcaggaaacatccaagaaaaatgtccttaaagcaattgagcaggctgatctactgcaggagagccagaatgaagaatggggaggtttgtctgaggatatcttatgataaagagcagtctaaggctttagtccctttgatccccaacttatttattggaagctgaaaccccacgtagtgttcttgaagaaattggactgacataactctcctcccttgttgatgacttcttgtggcatttcacacactgtagatggtcactcccttcatgtccatgttagctcatggtgtaagatgatgtcttgtcagtattactgttttgctaagccgcttcattcatgcctacacaatttttttttaaaagggaactttagttaattaagtgataagggacttaaatatgaattagaatggtgcagaaagagataccttttctggatattttaaagtttaaaggtcagtttctcttaatctgattatgtgcacatatgaaaatggcacatcatatacatgtaaaatcaggcagtatacatttattaattactgtatttgacaaaggaaactcttaaattataatgtgaaacctggttttatgaaaccaaagactagtgcagcatttcagcatatgtaaaaaaaaaa

SEQ ID NO: 104867 - DNA, 810 bp, Homo sapiens
  Payload ID: 591
  Gene Symbol: AP1S2
  Gene Name: adaptor-related protein complex 1, sigma 2 subunit
  ENST ID: ENST00000545766
  CDS Start-End: 328-810
ctcagcgaagaaacctccaatcggctgccttggactcagcggttacccgcgctgcctccggtgccgctggcgaccgctgagccgcttcccgcgcgtcgcctagcccgcccctcagctcgccgcagccccggctcctccctcgtccggcccccggggcggggtctgtcagcttgccctcccctctccgcctaagcctgccctatgccagccgggtgtcctccccacagcaccacggcttctcttcctcagcacggcgacaggggcttccccttcgccgccgccgccgccgccggccaagctccgccgcgcccgcggcccgcggccgccatgcagtttatgttgctttttagtcgtcagggaaagcttcgactgcaaaaatggtatgtcccactatcagacaaagagaagaaaaagatcacaagagaacttgttcagaccgttttagcacggaaacctaaaatgtgcagcttccttgagtggcgagatctgaagattgtttacaaaagatatgctagtctgtatttttgctgtgctattgaggatcaggacaatgaactaattaccctggaaataattcatcgttatgtggaattacttgacaagtatttcggcagtgtctgtgaactagatatcatctttaattttgagaaggcttattttattttggatgagtttcttttgggaggggaagttcaggaaacatccaagaaaaatgtccttaaagcaattgagcaggctgatctactgcaggaggatgcgaaagaagctgaaaccccacgtagtgttcttgaagaaattggactgacataa

SEQ ID NO: 104868 - DNA, 2201 bp, Homo sapiens
  Payload ID: 592
  Gene Symbol: AP1S3
  Gene Name: adaptor-related protein complex 1, sigma 3 subunit
  ENST ID: ENST00000334271
  CDS Start-End: 121-366
agccatggtctaagccgggcgcctcacctgtcagccgcaccggctccagcgctcgcctctcgccctcgcttctccagcgctccttgctcgcaaggcgggggaggcggcggcccagccacgatgatacatttcatattgctcttcagtcgacaagggaaattacggctacagaaatggtacatcactctccctgataaagagaggaagaagatcacccgggaaattgttcagattattctctcccgtggtcacaggacaagcagttttgttgactggaaggagctaaaacttgtttataaaaggtctgtgagctggatattatctttaattttgaaaaggcttatttcatcctggacgagtttataataggtggggaaattcaggaaacatccaagaaaattgctgtcaaagccattgaagactctgatatgttacaggagacaatggaagaatacatgaacaagcctacattttaactggaaatctacttgaagactccagcactacatgttatgaagctgtaaataagcaacgcctcccatccggttttttgatggagcctcaggcaccatgccaaaaataatttaaagggattctttgttaactaacaaagttaaagttgtttaacatatttataattactatgtgtctgtattattaaaaaaaattatgtgtctgtgttatactgtataggtacttgtagctctaaatgtttaaagtaactaccacctaacccaacagacaatatttgtaatgtattaactccatgttatgtttttaagctggtttagatacattagctgcaattttttttgcatttgacacaatattgtaataatccatgattttgaatgtaaagtatatatgatgtcattaatactttttctaaatgtttagttttctaaattgtataataattcaaaattatgttaatagtgcagagtttatatgtaatgctagacatttttcatacacttaatagtactgtaactgcaattcacatacaaaatgtctgattttaatgtgctgaattcatttattttttttagaattgggattatgaaaataaccaaagagtatagaacttaataagtgtttttgatgccttagaagctgctatcttgactgaggttttaatttatcttttaattgaatataagggacattccaataaggttttctatgaactatatatttattaaggtttatagagacctagagatacagcatctatgacttcctttattattctaaaatagtatgataagaattaatagcaataataattattgctactattttttaaaattcacgttccaagcactcttagatgctggaaatttcatttcaaatatgttttaatgtatctctaatgcatttgaagacttattacatggcttacttagagcatttaagattatcacagcctatatggtagattcctttccttcttttttcttttcttaccctttcctccccaaagaaaagatttgctgctgaccattattactgtaagtatatcacatttgtgcttcctggaatgaaaattctgtataaccaggtcctaacagtgatcagacatattacagggaaatagcttgtaggccgggagtggtggcttacacctgtaatcccagcactttgggaggccgaggcaggtggatcacttgaggtcaggagttcgagagcagcctggccaatatgatgaaaccccatctctactaaaaatacaaaaattaggccgggtacagtggctcatgcctataattccagcactttgggaggcagaggtgggcggatcacaaggtcaagagatcaagaccatcctcgccaacaaggtgaaaccccacctctattaaaaatacaaaaattagccgggagtggtggtgcgtgcctgtagtcccagctacttgggaggctgaggcaggagaatcgcttgaacctgggaggcagaagttgcagtgagctgagattgtgccactgcactccagcctgggcgacagagcgagacttcgtctcaaacaaacaaaaaaattagccgggcatggtggcaggtgcctgtaatcccagctactcagggggctgaggcaggggaatggcttgaacccaggaggcagaggttgcagtgagccaaggtcataccagtgcactccaggcgggtgacagagcaagactgcgtctcaagaaaaaaaaaaaaaaaa

SEQ ID NO: 104869 - DNA, 589 bp, Homo sapiens
  Payload ID: 592
  Gene Symbol: AP1S3
  Gene Name: adaptor-related protein complex 1, sigma 3 subunit
  ENST ID: ENST00000396653
  CDS Start-End: 133-324
attgtgggaagcagccatggtctaagccgggcgcctcacctgtcagccgcaccggctccagcgctcgcctctcgccctcgcttctccagcgctccttgctcgcaaggcgggggaggcggcggcccagccacgatgatacatttcatattgctcttcagtcgacaagggaaattacggctacagaaatggtacatcactctccctgataaagagaggaagaagatcacccgggaaattgttcagattattctctcccgtggtcacaggacaagcagttttgttgactggaaggagctaaaacttgtttataaaaggtgtctgtgagctggatattatctttaattttgaaaaggcttatttcatcctggacgagtttataataggtggggaaattcaggaaacatccaagaaaattgctgtcaaagccattgaagactctgatatgttacaggaggtcagtacggtttcccaaaccatgggagaaagatgatgatgatgatgatgatggtgttaataattataatattaaccagacttactgagtacttactctgtgctgggtacagtttctaaactatttatatgtatt

SEQ ID NO: 104870 - DNA, 830 bp, Homo sapiens
  Payload ID: 592
  Gene Symbol: AP1S3
  Gene Name: adaptor-related protein complex 1, sigma 3 subunit
  Uniprot ID: Q96PC3
  ENST ID: ENST00000396654
  CDS Start-End: 133-597
attgtgggaagcagccatggtctaagccgggcgcctcacctgtcagccgcaccggctccagcgctcgcctctcgccctcgcttctccagcgctccttgctcgcaaggcgggggaggcggcggcccagccacgatgatacatttcatattgctcttcagtcgacaagggaaattacggctacagaaatggtacatcactctccctgataaagagaggaagaagatcacccgggaaattgttcagattattctctcccgtggtcacaggacaagcagttttgttgactggaaggagctaaaacttgtttataaaaggtatgctagtttatatttttgctgtgcaatagaaaatcaggacaatgagctcttgacgctagagattgtgcatcgttacgtggagctgctggacaaatattttggaaatgtctgtgagctggatattatctttaattttgaaaaggcttatttcatcctggacgagtttataataggtggggaaattcaggaaacatccaagaaaattgctgtcaaagccattgaagactctgatatgttacaggagacaatggaagaatacatgaacaagcctacattttaactggaaatctacttgaagactccagcactacatgttatgaagctgtaaataagcaacgcctcccatccggttttttgatggagcctcaggcaccatgccaaaaataatttaaagggattctttgttaactaacaaagttaaagttgtttaacatatttataattactatgtgtctgtattattaaaaaaaattatgtgtctgtgttatactgtataggtacttgtagctctaa

SEQ ID NO: 104871 - DNA, 552 bp, Homo sapiens
  Payload ID: 592
  Gene Symbol: AP1S3
  Gene Name: adaptor-related protein complex 1, sigma 3 subunit
  ENST ID: ENST00000409375
  CDS Start-End: 92-505
gtcagccgcaccggctccagcgctcgcctctcgccctcgcttctccagcgctccttgctcgcaaggcgggggaggcggcggcccagccacgatgatacatttcatattgctcttcagtcgacaagggaaattacggctacagaaatggtacatcactctccctgataaagagaggaagaagatcacccgggaaattgttcagattattctctcccgtggtcacaggacaagcagttttgttgactggaaggagctaaaacttgtttataaaaggtatgctagtttatatttttgctgtgcaatagaaaatcaggacaatgagctcttgacgctagagattgtgcatcgttacgtggagctgctggacaaatattttggaaatgagtttaattgctggtttctcctaatgaggctcctgtctgtcttggattcctggtctacgcctgccttgaactccgaggttcctcagcttgctactataactcctgacttctgccttttctgacctctggtctgtgagctggatattatctttaattttgaaaaggctta

SEQ ID NO: 104872 - DNA, 499 bp, Homo sapiens
  Payload ID: 592
  Gene Symbol: AP1S3
  Gene Name: adaptor-related protein complex 1, sigma 3 subunit
  Uniprot ID: Q96PC3
  ENST ID: ENST00000446015
  CDS Start-End: 35-499
ctcgcaaggcgggggaggcggcggcccagccacgatgatacatttcatattgctcttcagtcgacaagggaaattacggctacagaaatggtacatcactctccctgataaagagaggaagaagatcacccgggaaattgttcagattattctctcccgtggtcacaggacaagcagttttgttgactggaaggagctaaaacttgtttataaaaggtatgctagtttatatttttgctgtgcaatagaaaatcaggacaatgagctcttgacgctagagattgtgcatcgttacgtggagctgctggacaaatattttggaaatgtctgtgagctggatattatctttaattttgaaaaggcttatttcatcctggacgagtttataataggtggggaaattcaggaaacatccaagaaaattgctgtcaaagccattgaagactctgatatgttacaggaggtcagtacggtttcccaaaccatgggagaaagatga

SEQ ID NO: 104873 - DNA, 1785 bp, Homo sapiens
  Payload ID: 592
  Gene Symbol: AP1S3
  Gene Name: adaptor-related protein complex 1, sigma 3 subunit
  Uniprot ID: Q96PC3
  ENST ID: ENST00000443700
  CDS Start-End: 153-647
cacactttcagtgccagggcattgtgggaagcagccatggtctaagccgggcgcctcacctgtcagccgcaccggctccagcgctcgcctctcgccctcgcttctccagcgctccttgctcgcaaggcgggggaggcggcggcccagccacgatgatacatttcatattgctcttcagtcgacaagggaaattacggctacagaaatggtacatcactctccctgataaagagaggaagaagatcacccgggaaattgttcagattattctctcccgtggtcacaggacaagcagttttgttgactggaaggagctaaaacttgtttataaaaggtatgctagtttatatttttgctgtgcaatagaaaatcaggacaatgagctcttgacgctagagattgtgcatcgttacgtggagctgctggacaaatattttggaaatgtctgtgagctggatattatctttaattttgaaaaggcttatttcatcctggacgagtttataataggtggggaaattcaggaaacatccaagaaaattgctgtcaaagccattgaagactctgatatgttacaggagaatcgtttgagccccagaggcagagattgcagtgagccgagatcatgccattgcactctagcctaggcaacaagagcaaaactccatctaaaaaaaaaaaaaaagaaaagaaaaaggagaattatgaagaacttggttccacaagtaagatagtcctcatactgcatcagtagtgacttaaacttttttaaaacttttattttttgtggggggatctgttgaatttgggaagcctccagttttaataaaatttttttattatggtggaaacatgtctgtaaaacttaggactatagaaatgcaaagaataaagaactgagggagttacacacatttgtagtcagaaattaagttcaaaaaataatttaggtcatttgcattttttagtatgcaaaataaatggaaaaattaaagtgcaataaaaatataatttgggaaatgaatgcagtaaaattgaaaacattgaaatattataatttaataaaataaacttcaaaaaatgtatgaaaatataagtatctttacttatataggattaaatatatttctgataatctgtcctctataatgaattggtttaattatgtttttctgtttttagaaatgggcatctttttatttctggaaacaactttttaatgagattttatcaaacattagactatgactaattataatattcaaagccaataccaaaacgatggataaataaatgaataaaacaaggcacattaatagaaaaaaatgaatgaaatcaattacgggttctacttgaaacacctaatctcattataatagcaataataaaacaatttgtacatactttattagtcgaacatttattaaaaatataagagcatagagcaaattaatttggaagaaaatttaaatcttttacatacaaataccctcaagaataataaatcatggagtattaataaaattaaaccagctgataattttagaaagtgcttcatgcacagagacttttattcaagtcctctttgctttctgctagtgcttttttttttttcttgaaatgggatgggatctcactctgtcacccaggctggagtgcagtagcacgatagcagcgcactgcaacctggacctcctgggctcaagcaatcctctcaccgcagcctcctgagtagctggggctacaggtgtgtgccaccatacttggctaattaaaaaaaaaaaa

SEQ ID NO: 104874 - DNA, 561 bp, Homo sapiens
  Payload ID: 592
  Gene Symbol: AP1S3
  Gene Name: adaptor-related protein complex 1, sigma 3 subunit
  ENST ID: ENST00000444408
  CDS Start-End: 392-561
aaacgtttgcggaaggaatacaggacacactcgcgcggcagaatcgcgaaaagtccccggtgttctccgcgcagggagttccccgcgcagggagttcctagcgggccacgcgctctcgcctgaccacccgcgccgagctgcgggctgtcggggtacagacgcccgcgcgcgcaggtgcattcgctccagatacatttcatattgctcttcagtcgacaagggaaattacggctacagaaatggtacatcactctccctgataaagagaggaagaagatcacccgggaaattgttcagattattctctcccgtggtcacaggacaagcagttttgttgactggaaggagctaaaacttgtttataaaaggaggctattgggggtgatgaataatgatttcattcttggatgaggagaggctcggcgggggaggaggtgactgcatattcgtgggaaaaactgtctccaggttgcttaatgtctgtgagctggatattatctttaattttgaaaaggcttatttcatcctggacgagtttataataggtggggaaattcagga

SEQ ID NO: 104875 - DNA, 2515 bp, Homo sapiens
  Payload ID: 592
  Gene Symbol: AP1S3
  Gene Name: adaptor-related protein complex 1, sigma 3 subunit
  Uniprot ID: Q96PC3
  ENST ID: ENST00000415298
  CDS Start-End: 286-600
ggaggagaaaggggaaaggaagaaagaaggagagcaggagggcgaggagcggggggagcggggaggagggcgcggggaggaggcagcggggaggagcgtgcagggaggaggcagccgcgctgggaggagtctgcacactttcagtgccagggcattgtgggaagcagccatggtctaagccgggcgcctcacctgtcagccgcaccggctccagcgctcgcctctcgccctcgcttctccagcgctccttgctcgcaaggcgggggaggcggcggcccagccacgatgatacatttcatattgctcttcagtcgacaagggaaattacggctacagaaatggtacatcactctccctgataaagagaggaagaagatcacccgggaaattgttcagattattctctcccgtggtcacaggacaagcagttttgttgactggaaggagctaaaacttgtttataaaaggtatgctagtttatatttttgctgtgcaatagaaaatcaggacaatgagctcttgacgctagagattgtgcatcgttacgtggagctgctggacaaatattttggaaatacttggccttttgcaagagcctgaagaagtttccttgaggtctgtgagctggatattatctttaattttgaaaaggcttatttcatcctggacgagtttataataggtggggaaattcaggaaacatccaagaaaattgctgtcaaagccattgaagactctgatatgttacaggagacaatggaagaatacatgaacaagcctacattttaactggaaatctacttgaagactccagcactacatgttatgaagctgtaaataagcaacgcctcccatccggttttttgatggagcctcaggcaccatgccaaaaataatttaaagggattctttgttaactaacaaagttaaagttgtttaacatatttataattactatgtgtctgtattattaaaaaaaattatgtgtctgtgttatactgtataggtacttgtagctctaaatgtttaaagtaactaccacctaacccaacagacaatatttgtaatgtattaactccatgttatgtttttaagctggtttagatacattagctgcaattttttttgcatttgacacaatattgtaataatccatgattttgaatgtaaagtatatatgatgtcattaatactttttctaaatgtttagttttctaaattgtataataattcaaaattatgttaatagtgcagagtttatatgtaatgctagacatttttcatacacttaatagtactgtaactgcaattcacatacaaaatgtctgattttaatgtgctgaattcatttattttttttagaattgggattatgaaaataaccaaagagtatagaacttaataagtgtttttgatgccttagaagctgctatcttgactgaggttttaatttatcttttaattgaatataagggacattccaataaggttttctatgaactatatatttattaaggtttatagagacctagagatacagcatctatgacttcctttattattctaaaatagtatgataagaattaatagcaataataattattgctactattttttaaaattcacgttccaagcactcttagatgctggaaatttcatttcaaatatgttttaatgtatctctaatgcatttgaagacttattacatggcttacttagagcatttaagattatcacagcctatatggtagattcctttccttcttttttcttttcttaccctttcctccccaaagaaaagatttgctgctgaccattattactgtaagtatatcacatttgtgcttcctggaatgaaaattctgtataaccaggtcctaacagtgatcagacatattacagggaaatagcttgtaggccgggagtggtggcttacacctgtaatcccagcactttgggaggccgaggcaggtggatcacttgaggtcaggagttcgagagcagcctggccaatatgatgaaaccccatctctactaaaaatacaaaaattaggccgggtacagtggctcatgcctataattccagcactttgggaggcagaggtgggcggatcacaaggtcaagagatcaagaccatcctcgccaacaaggtgaaaccccacctctattaaaaatacaaaaattagccgggagtggtggtgcgtgcctgtagtcccagctacttgggaggctgaggcaggagaatcgcttgaacctgggaggcagaagttgcagtgagctgagattgtgccactgcactccagcctgggcgacagagcgagacttcgtctcaaacaaacaaaaaaattagccgggcatggtggcaggtgcctgtaatcccagctactcagggggctgaggcaggggaatggcttgaacccaggaggcagaggttgcagtgagccaaggtcataccagtgcactccaggcgggtgacagagcaagactgcgtctcaagaaaaaaaaaaaaaaaaa

SEQ ID NO: 104876 - DNA, 3388 bp, Homo sapiens
  Payload ID: 593
  Gene Symbol: AP2A1
  Gene Name: adaptor-related protein complex 2, alpha 1 subunit
  Uniprot ID: O95782
  ENST ID: ENST00000354293
  CDS Start-End: 167-3034
ggtgccacggcctgccagcccgcccgcccgcccgccagccagccctccccgcggccggctcggctccttggcgctgcctggggtcctttccgcccggtccccgcttgccagcccccgctgctctgtgccctgtccggccaggcctggagccgacaccaccgccatcatgccggccgtgtccaagggcgatgggatgcgggggctcgcggtgttcatctccgacatccggaactgtaagagcaaagaggcggaaattaagagaatcaacaaggaactggccaacatccgctccaagttcaaaggagacaaagccttggatggctacagtaagaaaaaatatgtgtgtaaactgcttttcatcttcctgcttggccatgacattgactttgggcacatggaggctgtgaatctgttgagttccaataaatacacagagaagcaaataggttacctgttcatttctgtgctggtgaactcgaactcggagctgatccgcctcatcaacaacgccatcaagaatgacctggccagccgcaaccccaccttcatgtgcctggccctgcactgcatcgccaacgtgggcagccgggagatgggcgaggcctttgccgctgacatcccccgcatcctggtggccggggacagcatggacagtgtcaagcagagtgcggccctgtgcctccttcgactgtacaaggcctcgcctgacctggtgcccatgggcgagtggacggcgcgtgtggtacacctgctcaatgaccagcacatgggtgtggtcacggccgccgtcagcctcatcacctgtctctgcaagaagaacccagatgacttcaagacgtgcgtctctctggctgtgtcgcgcctgagccggatcgtctcctctgcctccaccgacctccaggactacacctactacttcgtcccagcaccctggctctcggtgaagctcctgcggctgctgcagtgctacccgcctccagaggatgcggctgtgaaggggcggctggtggaatgtctggagactgtgctcaacaaggcccaggagccccccaaatccaagaaggtgcagcattccaacgccaagaacgccatcctcttcgagaccatcagcctcatcatccactatgacagtgagcccaacctcctggttcgggcctgcaaccagctgggccagttcctgcagcaccgggagaccaacctgcgctacctggccctggagagcatgtgcacgctggccagctccgagttctcccatgaagccgtcaagacgcacattgacaccgtcatcaatgccctcaagacggagcgggacgtcagcgtgcggcagcgggcggctgacctcctctacgccatgtgtgaccggagcaatgccaagcagatcgtgtcggagatgctgcggtacctggagacggcagactacgccatccgcgaggagatcgtcctgaaggtggccatcctggccgagaagtacgccgtggactacagctggtacgtggacaccatcctcaacctcatccgcattgcgggcgactacgtgagtgaggaggtgtggtaccgtgtgctacagatcgtcaccaaccgtgatgacgtccagggctatgccgccaagaccgtctttgaggcgctccaggcccctgcctgtcacgagaacatggtgaaggttggcggctacatccttggggagtttgggaacctgattgctggggacccccgctccagccccccagtgcagttctccctgctccactccaagttccatctgtgcagcgtggccacgcgggcgctgctgctgtccacctacatcaagttcatcaacctcttccccgagaccaaggccaccatccagggcgtcctgcgggccggctcccagctgcgcaatgctgacgtggagctgcagcagcgagccgtggagtacctcaccctcagctcagtggccagcaccgacgtcctggccacggtgctggaggagatgccgcccttccccgagcgcgagtcgtccatcctggccaagctgaaacgcaagaaggggccaggggccggcagcgccctggacgatggccggagggaccccagcagcaacgacatcaacgggggcatggagcccacccccagcactgtgtcgacgccctcgccctccgccgacctcctggggctgcgggcagcccctcccccggcagcacccccggcttctgcaggagcagggaaccttctggtggacgtcttcgatggcccggccgcccagcccagcctggggcccacccccgaggaggccttcctcagcccaggtcctgaggacatcggccctcccattccggaagccgatgagttgctgaataagtttgtgtgtaagaacaacggggtcctgttcgagaaccagctgctgcagatcggagtcaagtcagagttccgacagaacctgggccgcatgtatctcttctatggcaacaagacctcggtgcagttccagaatttctcacccactgtggttcacccgggagacctccagactcagctggctgtgcagaccaagcgcgtggcggcgcaggtggacggcggcgcgcaggtgcagcaggtgctcaatatcgagtgcctgcgggacttcctgacgcccccgctgctgtccgtgcgcttccggtacggtggcgccccccaggccctcaccctgaagctcccagtgaccatcaacaagttcttccagcccaccgagatggcggcccaggatttcttccagcgctggaagcagctgagcctccctcaacaggaggcgcagaaaatcttcaaagccaaccaccccatggacgcagaagttactaaggccaagcttctggggtttggctctgctctcctggacaatgtggaccccaaccctgagaacttcgtgggggcggggatcatccagactaaagccctgcaggtgggctgtctgcttcggctggagcccaatgcccaggcccagatgtaccggctgaccctgcgcaccagcaaggagcccgtctcccgtcacctgtgtgagctgctggcacagcagttctgagccctggactctgccccgggggatgtggccggcactgggcagccccttggactgaggcagttttggtggatgggggacctccactggtgacagagaagacaccagggtttgggggatgcctgggactttcctccggccttttgtatttttatttttgttcatctgctgctgtttacattctggggggttagggggagtccccctccctccctttcccccccaagcacagaggggagaggggccagggaagtggatgtctcctcccctcccaccccaccctgttgtagcccctcctaccccctccccatccaggggctgtgtattattgtgagcgaataaacagagagacgctaa

SEQ ID NO: 104877 - DNA, 3286 bp, Homo sapiens
  Payload ID: 593
  Gene Symbol: AP2A1
  Gene Name: adaptor-related protein complex 2, alpha 1 subunit
  Uniprot ID: O95782
  ENST ID: ENST00000359032
  CDS Start-End: 1-2934
atgccggccgtgtccaagggcgatgggatgcgggggctcgcggtgttcatctccgacatccggaactgtaagagcaaagaggcggaaattaagagaatcaacaaggaactggccaacatccgctccaagttcaaaggagacaaagccttggatggctacagtaagaaaaaatatgtgtgtaaactgcttttcatcttcctgcttggccatgacattgactttgggcacatggaggctgtgaatctgttgagttccaataaatacacagagaagcaaataggttacctgttcatttctgtgctggtgaactcgaactcggagctgatccgcctcatcaacaacgccatcaagaatgacctggccagccgcaaccccaccttcatgtgcctggccctgcactgcatcgccaacgtgggcagccgggagatgggcgaggcctttgccgctgacatcccccgcatcctggtggccggggacagcatggacagtgtcaagcagagtgcggccctgtgcctccttcgactgtacaaggcctcgcctgacctggtgcccatgggcgagtggacggcgcgtgtggtacacctgctcaatgaccagcacatgggtgtggtcacggccgccgtcagcctcatcacctgtctctgcaagaagaacccagatgacttcaagacgtgcgtctctctggctgtgtcgcgcctgagccggatcgtctcctctgcctccaccgacctccaggactacacctactacttcgtcccagcaccctggctctcggtgaagctcctgcggctgctgcagtgctacccgcctccagaggatgcggctgtgaaggggcggctggtggaatgtctggagactgtgctcaacaaggcccaggagccccccaaatccaagaaggtgcagcattccaacgccaagaacgccatcctcttcgagaccatcagcctcatcatccactatgacagtgagcccaacctcctggttcgggcctgcaaccagctgggccagttcctgcagcaccgggagaccaacctgcgctacctggccctggagagcatgtgcacgctggccagctccgagttctcccatgaagccgtcaagacgcacattgacaccgtcatcaatgccctcaagacggagcgggacgtcagcgtgcggcagcgggcggctgacctcctctacgccatgtgtgaccggagcaatgccaagcagatcgtgtcggagatgctgcggtacctggagacggcagactacgccatccgcgaggagatcgtcctgaaggtggccatcctggccgagaagtacgccgtggactacagctggtacgtggacaccatcctcaacctcatccgcattgcgggcgactacgtgagtgaggaggtgtggtaccgtgtgctacagatcgtcaccaaccgtgatgacgtccagggctatgccgccaagaccgtctttgaggcgctccaggcccctgcctgtcacgagaacatggtgaaggttggcggctacatccttggggagtttgggaacctgattgctggggacccccgctccagccccccagtgcagttctccctgctccactccaagttccatctgtgcagcgtggccacgcgggcgctgctgctgtccacctacatcaagttcatcaacctcttccccgagaccaaggccaccatccagggcgtcctgcgggccggctcccagctgcgcaatgctgacgtggagctgcagcagcgagccgtggagtacctcaccctcagctcagtggccagcaccgacgtcctggccacggtgctggaggagatgccgcccttccccgagcgcgagtcgtccatcctggccaagctgaaacgcaagaaggggccaggggccggcagcgccctggacgatggccggagggaccccagcagcaacgacatcaacgggggcatggagcccacccccagcactgtgtcgacgccctcgccctccgccgacctcctggggctgcgggcagcccctcccccggcagcacccccggcttctgcaggagcagggaaccttctggtggacgtcttcgatggcccggccgcccagcccagcctggggcccacccccgaggaggccttcctcagcgagctggagccgcctgcccccgagagccccatggctttgctggctgacccagctccagctgctgacccaggtcctgaggacatcggccctcccattccggaagccgatgagttgctgaataagtttgtgtgtaagaacaacggggtcctgttcgagaaccagctgctgcagatcggagtcaagtcagagttccgacagaacctgggccgcatgtatctcttctatggcaacaagacctcggtgcagttccagaatttctcacccactgtggttcacccgggagacctccagactcagctggctgtgcagaccaagcgcgtggcggcgcaggtggacggcggcgcgcaggtgcagcaggtgctcaatatcgagtgcctgcgggacttcctgacgcccccgctgctgtccgtgcgcttccggtacggtggcgccccccaggccctcaccctgaagctcccagtgaccatcaacaagttcttccagcccaccgagatggcggcccaggatttcttccagcgctggaagcagctgagcctccctcaacaggaggcgcagaaaatcttcaaagccaaccaccccatggacgcagaagttactaaggccaagcttctggggtttggctctgctctcctggacaatgtggaccccaaccctgagaacttcgtgggggcggggatcatccagactaaagccctgcaggtgggctgtctgcttcggctggagcccaatgcccaggcccagatgtaccggctgaccctgcgcaccagcaaggagcccgtctcccgtcacctgtgtgagctgctggcacagcagttctgagccctggactctgccccgggggatgtggccggcactgggcagccccttggactgaggcagttttggtggatgggggacctccactggtgacagagaagacaccagggtttgggggatgcctgggactttcctccggccttttgtatttttatttttgttcatctgctgctgtttacattctggggggttagggggagtccccctccctccctttcccccccaagcacagaggggagaggggccagggaagtggatgtctcctcccctcccaccccaccctgttgtagcccctcctaccccctccccatccaggggctgtgtattattgtgagcgaataaacagagagacgct

SEQ ID NO: 104878 - DNA, 2196 bp, Homo sapiens
  Payload ID: 593
  Gene Symbol: AP2A1
  Gene Name: adaptor-related protein complex 2, alpha 1 subunit
  ENST ID: ENST00000597774
  CDS Start-End: 1-172
gccggccgtgtccaagggcgatgggatgcgggggctcgcggtgttcatctccgacatccggaactgtaagagcaaagaggcggaaattaagagaatcaacaaggaactggccaacatccgctccaagttcaaaggagacaaagccttggatggctacaaagaacccagatgacttcaagacgtgcgtctctctggctgtgtcgcgcctgagccggatcgtctcctctgcctccaccgacctccaggactacacctactacttcgtcccagcaccctggctctcggtgaagctcctgcggctgctgcagtgctacccgcctccagaggatgcggctgtgaaggggcggctggtggaatgtctggagactgtgctcaacaaggcccaggagccccccaaatccaagaaggtgcagcattccaacgccaagaacgccatcctcttcgagaccatcagcctcatcatccactatgacagtgagcccaacctcctggttcgggcctgcaaccagctgggccagttcctgcagcaccgggagaccaacctgcgctacctggccctggagagcatgtgcacgctggccagctccgagttctcccatgaagccgtcaagacgcacattgacaccgtcatcaatgccctcaagacggagcgggacgtcagcgtgcggcagcgggcggctgacctcctctacgccatgtgtgaccggagcaatgccaagcagatcgtgtcggagatgctgcggtacctggagacggcagactacgccatccgcgaggagatcgtcctgaaggtggccatcctggccgagaagtacgccgtggactacagctgatcgtcaccaaccgtgatgacgtccagggctatgccgccaagaccgtctttgaggcgctccaggcccctgcctgtcacgagaacatggtgaagttctccctgctccactccaagttccatctgtgcagcgtggccacgcgggcgctgctgctgtccacctacatcaagttcatcaacctcttccccgagaccaaggccaccatccagggcgtcctgcgggccggctcccagctgcgcaatgctgacgtggagctgcagcagcgagccgtggagtacctcaccctcagctcagtggccagcaccgacgtcctggccacggtgctggaggagatgccgcccttccccgagcgcgagtcgtccatcctggccaagctgaaacgcaagaaggggccaggggccggcagcgccctggacgatggccggagggaccccagcagcaacgacatcaacgggggcatggagcccacccccagcactgtgtcgacgccctcgccctccgccgacctcctggggctgcgggcagcccctcccccggcagcacccccggcttctgcaggagcagggaaccttctggtggacgtcttcgatggcccggccgcccagcccagcctggggcccacccccgaggaggccttcctcagcccaggtcctgaggacatcggccctcccattccggaagccgatgagttgctgaataagtttgtgtgtaagaacaacggggtcctgttcgagaaccagctgctgcagatcggagtcaagtcagagttccgacagaacctgggccgcatgtatctcttctatggcaacaagacctcggtgcagttccagaatttctcacccactgtggttcacccgggagacctccagactcagctggctgtgcagaccaagcgcgtggcggcgcaggtggacggcggcgcgcaggtgcagcaggtgctcaatatcgagtgcctgcgggacttcctgacgcccccgctgctgtccgtgcgcttccgcccaccgagatggcggcccaggatttcttccagcgctggaagcagctgagcctccctcaacaggaggcgcagaaaatcttcaaagccaaccaccccatggacgcagaagttactaaggccaagcttctggggtttggctctgctctcctggacaatgtggaccccaaccctgagaacttcgtgggggcggggatcatccagactaaagccctgcaggtgggctgtctgcttcggctggagcccaatgcccaggcccagatgtaccggctgaccctgcgcaccagcaaggagcccgtctcccgtcacctgtgtgagctgctggcacagcagttctgagccctggactctgccccgggggatgtggccggc

SEQ ID NO: 104879 - DNA, 4656 bp, Homo sapiens
  Payload ID: 594
  Gene Symbol: AP2A2
  Gene Name: adaptor-related protein complex 2, alpha 2 subunit
  Uniprot ID: O94973
  ENST ID: ENST00000332231
  CDS Start-End: 214-3036
gctcgcgtgcgtgcgcgtgcgtgctggtgcgggcgccgtacgtgcgcgcgcgcggcggcccagaaagcggcgctgggaccctgaggcggccgtggttaggcggctccccggcggctcctccgcggcggtgacggcgaccgcactccccgcttcccgctccccgcgctcctccgcccgggtccgccagccgaggccgctcccgagcgtcggaagatgccggccgtgtccaagggggacgggatgcggggcctggcggtcttcatctcggatatccgcaactgtaaaagtaaagaagcagaaataaaaaggataaacaaggaactggcaaatatcagatcaaaatttaaaggtgacaaggctcttgatggctatagtaaaaaaaagtacgtctgcaagttgctcttcatctttctccttggtcatgacattgactttggacacatggaggctgtgaacctgctgagttcaaacagatacacggaaaagcagatcggctaccttttcatctctgtgttggtgaactcaaacagtgagctgatccgcctgatcaacaacgccatcaagaatgacctggccagccgcaaccccaccttcatgggcctggccctgcactgcatcgccagcgtgggcagccgggagatggccgaggccttcgccggggagatccctaaggtcctcgtagccggagacactatggacagcgtgaagcagagcgcggccctgtgcttgctgcgcctgtacaggacgtcccccgatcttgtccccatgggcgactggacatcccgagtggtgcacctgctcaatgaccagcacttgggtgtggtaactgcagccacaagtctgatcaccactttagcacagaagaacccagaagagtttaaaacctccgtgtctctggctgtctctaggctaagcagaatcgtgacgtctgcatccacagatctccaggattacacttactattttgtcccggctccctggctgtctgtcaaactgctgagactgctgcagtgctacccacccccagaagaccctgcagtgcgaggccgcctgactgagtgcctggagaccatcctgaacaaagcccaagaaccgcccaagtcgaagaaggtccagcactccaacgcgaagaatgccgtgctcttcgaggccatcagcttaatcattcaccatgacagtgagccgaacctgctcgtccgtgcctgcaaccagttgggccagtttctgcagcaccgcgagaccaacctgcgctacctggccctggagagcatgtgcacgctggccagctctgagttctcccatgaggctgtcaagacgcacatcgagacggtcatcaacgccctgaagactgagcgggacgtgagcgtgcggcagcgggccgtggacctcctctacgccatgtgcgaccgcagcaacgccccacagatcgtggccgagatgctgagctatctggagacagctgactactccatccgagaagagattgtgctgaaggtcgccatcctggctgagaagtacgcggtggactacacctggtatgtggataccatcttgaacttgatccgaattgctggtgattacgtgagtgaagaggtgtggtaccgagtcattcagatcgtcatcaaccgggacgacgtgcagggctacgcggccaagactgtgttcgaggctcttcaggctcccgcgtgccacgagaacctggtcaaagtgggcggctacatcctgggggagtttggaaacttgatagctggagacccgagatccagcccgctgatccagttccacctgctgcactccaagttccacctgtgcagcgtccccacccgcgcgctgctcctgtccacctacatcaagttcgtgaacctcttcccggaggtgaagcccaccatccaggacgtgctgcgcagcgacagccagctcaggaacgcagacgtggagctgcagcagcgtgctgtggagtacctgcggctcagcaccgtggccagcaccgacattctggcgaccgtgctggaggagatgcccccattcccggagcgggagtcctccatcttggcaaagctcaagaagaagaagggccccagcacggtgacagacctggaggacaccaagcgggacaggagtgtggacgtgaacgggggtcctgagcctgccccagccagtaccagcgccgtgtctacgccttctccgtcggcagacctgctgggtctcggggctgccccccctgcccccgcgggccccccaccctcctccggcggcagcgggctgctcgtggacgtgttctcagactcggcctctgtggtcgcgcctctcgctcctggctccgaagacaactttgccaggtttgtttgtaaaaacaatggtgtgttgtttgaaaaccagctgcttcaaattggacttaagtctgaatttcggcagaatttaggtcggatgtttatcttttatggtaataagacctccacgcagttcctaaactttaccccaacactaatctgttcagacgaccttcagcctaacctgaacctgcagaccaagcccgtggacccgaccgtggaggggggcgcgcaggtgcagcaggtggtcaacatagagtgcgtgtccgacttcacggaggcgccagtcctcaacattcagttcaggtatgggggcaccttccagaacgtgtctgtgcagctgcccatcactctcaacaaattcttccagccgacagaaatggcttctcaggatttctttcaacgttggaagcagttgagcaatccacagcaggaagtgcagaacatcttcaaagcaaagcacccaatggacacagaagtcaccaaagccaagatcattggatttggttctgcacttcttgaagaagttgatcctaatcctgcgaatttcgtgggagctggaatcatccacacgaaaaccacccagattggatgcctgctgcgcttggagccgaacctgcaagcccagatgtaccggctcacgctgcgcacaagtaaggaagccgtttctcagagattatgtgaattgctctcagcgcagttttagtcctgaggatggaagaccaggctcgtgtgtcttgtgttgtcttcgtctgtgccgtttgtcttcgtggccatcctgcagatgagcaccgtgtccagtgccacagcacaaggcgcctccccgccccgccgccccacacctctcccctttgggctggacgggaacacacgtgtgtggctcaggaggaaaagctcagcctggactgtggcagccacggcagaaggtggatcttgggatcaatttttataaaaatcgagacagttctgtggttaaatctacaaattaaagggaaattagaagttggcgtgaacgtggcgtttgtgggagtgtcactgagatggcccgtgctgccgcccaccccgcctcggagcctctgggagcagcagtgccactgtgcatggcgtgggctgagccttggtgtgtggccgtcctggtggctgcacacctggcgtcgtcctgggcccttgggaggagcacagctgaccctggttttgctgcagtcccagctggactgttttcccaggcaggattttaatctagaatttagaaacatttgtatttgtaatgacttctggcaaaagcacgtgtcctggccggatgtaactgttctcctttcccagctcctgtttgtgaagggcgtctgttatgctcctgcagtcgccgaggccttggatgtgcagccaggggaggagcgtcctgccggccccgcagggcccccaggactccagggtaaagtgtgggccggtggcgcaagactcagaggtgtgctcgtctctttcctgtcagagtgggcgtccccaggccacggtgcaggcctgagtccttccaccggccccgtccagtcgtccctggaggggctgtggaggagggacgcctctgtgtggtcaggaagtgaaggggccattggccgcatgccatgtgccacctgcggcttgtgtctcacctgtcatctggactcagcacccaggctgcacgtctgacacctgagaggcgagagagtggggccggcctaggagccaaggctggggccttgcgctctgtccccaggatggtggccttgtttgtcctaaacacacccagcacaggttctggcttcctgacatgctgtggaggcagggagggtgggtggccacatgtgcttgagggttttcaccctggccctcagttgcctgctgtgcgggtccctggggcagctgcaggggctcatggacccatcagggtctccacagctcccctgcagtgtgtgcaccccacaatgtctgcggctcttcttccggcgtgtcgggctttgatcacagcatagccacgtcagtggcgtgcgcctctcgcacaggccattctgggtctggtggtgccaggtgccgtgacacgccgtgctgggcttgtgctgcagctgggtggtgtggccctcattctcatgttccagctgctgggcagtgctctgcctgtgtgctgcgcctgcaggctgcgtgtgctgccgtggatctcctgcatcccttgacccctcccgccatcagaggaaaggctgctccccgaggcaccgcttccctgtgcggcgctgcagaggggccctcagtgtggcactcctcgtcaaagaaaaataaaggctagaactgcaccccg

SEQ ID NO: 104880 - DNA, 4575 bp, Homo sapiens
  Payload ID: 594
  Gene Symbol: AP2A2
  Gene Name: adaptor-related protein complex 2, alpha 2 subunit
  Uniprot ID: O94973
  ENST ID: ENST00000448903
  CDS Start-End: 142-2961
ctgggaccctgaggcggccgtggttaggcggctccccggcggctcctccgcggcggtgacggcgaccgcactccccgcttcccgctccccgcgctcctccgcccgggtccgccagccgaggccgctcccgagcgtcggaagatgccggccgtgtccaagggggacgggatgcggggcctggcggtcttcatctcggatatccgcaactgtaaaagtaaagaagcagaaataaaaaggataaacaaggaactggcaaatatcagatcaaaatttaaaggtgacaaggctcttgatggctatagtaaaaaaaagtacgtctgcaagttgctcttcatctttctccttggtcatgacattgactttggacacatggaggctgtgaacctgctgagttcaaacagatacacggaaaagcagatcggctaccttttcatctctgtgttggtgaactcaaacagtgagctgatccgcctgatcaacaacgccatcaagaatgacctggccagccgcaaccccaccttcatgggcctggccctgcactgcatcgccagcgtgggcagccgggagatggccgaggccttcgccggggagatccctaaggtcctcgtagccggagacactatggacagcgtgaagcagagcgcggccctgtgcttgctgcgcctgtacaggacgtcccccgatcttgtccccatgggcgactggacatcccgagtggtgcacctgctcaatgaccagcacttgggtgtggtaactgcagccacaagtctgatcaccactttagcacagaagaacccagaagagtttaaaacctccgtgtctctggctgtctctaggctaagcagaatcgtgacgtctgcatccacagatctccaggattacacttactattttgtcccggctccctggctgtctgtcaaactgctgagactgctgcagtgctacccacccccagaccctgcagtgcgaggccgcctgactgagtgcctggagaccatcctgaacaaagcccaagaaccgcccaagtcgaagaaggtccagcactccaacgcgaagaatgccgtgctcttcgaggccatcagcttaatcattcaccatgacagtgagccgaacctgctcgtccgtgcctgcaaccagttgggccagtttctgcagcaccgcgagaccaacctgcgctacctggccctggagagcatgtgcacgctggccagctctgagttctcccatgaggctgtcaagacgcacatcgagacggtcatcaacgccctgaagactgagcgggacgtgagcgtgcggcagcgggccgtggacctcctctacgccatgtgcgaccgcagcaacgccccacagatcgtggccgagatgctgagctatctggagacagctgactactccatccgagaagagattgtgctgaaggtcgccatcctggctgagaagtacgcggtggactacacctggtatgtggataccatcttgaacttgatccgaattgctggtgattacgtgagtgaagaggtgtggtaccgagtcattcagatcgtcatcaaccgggacgacgtgcagggctacgcggccaagactgtgttcgaggctcttcaggctcccgcgtgccacgagaacctggtcaaagtgggcggctacatcctgggggagtttggaaacttgatagctggagacccgagatccagcccgctgatccagttccacctgctgcactccaagttccacctgtgcagcgtccccacccgcgcgctgctcctgtccacctacatcaagttcgtgaacctcttcccggaggtgaagcccaccatccaggacgtgctgcgcagcgacagccagctcaggaacgcagacgtggagctgcagcagcgtgctgtggagtacctgcggctcagcaccgtggccagcaccgacattctggcgaccgtgctggaggagatgcccccattcccggagcgggagtcctccatcttggcaaagctcaagaagaagaagggccccagcacggtgacagacctggaggacaccaagcgggacaggagtgtggacgtgaacgggggtcctgagcctgccccagccagtaccagcgccgtgtctacgccttctccgtcggcagacctgctgggtctcggggctgccccccctgcccccgcgggccccccaccctcctccggcggcagcgggctgctcgtggacgtgttctcagactcggcctctgtggtcgcgcctctcgctcctggctccgaagacaactttgccaggtttgtttgtaaaaacaatggtgtgttgtttgaaaaccagctgcttcaaattggacttaagtctgaatttcggcagaatttaggtcggatgtttatcttttatggtaataagacctccacgcagttcctaaactttaccccaacactaatctgttcagacgaccttcagcctaacctgaacctgcagaccaagcccgtggacccgaccgtggaggggggcgcgcaggtgcagcaggtggtcaacatagagtgcgtgtccgacttcacggaggcgccagtcctcaacattcagttcaggtatgggggcaccttccagaacgtgtctgtgcagctgcccatcactctcaacaaattcttccagccgacagaaatggcttctcaggatttctttcaacgttggaagcagttgagcaatccacagcaggaagtgcagaacatcttcaaagcaaagcacccaatggacacagaagtcaccaaagccaagatcattggatttggttctgcacttcttgaagaagttgatcctaatcctgcgaatttcgtgggagctggaatcatccacacgaaaaccacccagattggatgcctgctgcgcttggagccgaacctgcaagcccagatgtaccggctcacgctgcgcacaagtaaggaagccgtttctcagagattatgtgaattgctctcagcgcagttttagtcctgaggatggaagaccaggctcgtgtgtcttgtgttgtcttcgtctgtgccgtttgtcttcgtggccatcctgcagatgagcaccgtgtccagtgccacagcacaaggcgcctccccgccccgccgccccacacctctcccctttgggctggacgggaacacacgtgtgtggctcaggaggaaaagctcagcctggactgtggcagccacggcagaaggtggatcttgggatcaatttttataaaaatcgagacagttctgtggttaaatctacaaattaaagggaaattagaagttggcgtgaacgtggcgtttgtgggagtgtcactgagatggcccgtgctgccgcccaccccgcctcggagcctctgggagcagcagtgccactgtgcatggcgtgggctgagccttggtgtgtggccgtcctggtggctgcacacctggcgtcgtcctgggcccttgggaggagcacagctgaccctggttttgctgcagtcccagctggactgttttcccaggcaggattttaatctagaatttagaaacatttgtatttgtaatgacttctggcaaaagcacgtgtcctggccggatgtaactgttctcctttcccagctcctgtttgtgaagggcgtctgttatgctcctgcagtcgccgaggccttggatgtgcagccaggggaggagcgtcctgccggccccgcagggcccccaggactccagggtaaagtgtgggccggtggcgcaagactcagaggtgtgctcgtctctttcctgtcagagtgggcgtccccaggccacggtgcaggcctgagtccttccaccggccccgtccagtcgtccctggaggggctgtggaggagggacgcctctgtgtggtcaggaagtgaaggggccattggccgcatgccatgtgccacctgcggcttgtgtctcacctgtcatctggactcagcacccaggctgcacgtctgacacctgagaggcgagagagtggggccggcctaggagccaaggctggggccttgcgctctgtccccaggatggtggccttgtttgtcctaaacacacccagcacaggttctggcttcctgacatgctgtggaggcagggagggtgggtggccacatgtgcttgagggttttcaccctggccctcagttgcctgctgtgcgggtccctggggcagctgcaggggctcatggacccatcagggtctccacagctcccctgcagtgtgtgcaccccacaatgtctgcggctcttcttccggcgtgtcgggctttgatcacagcatagccacgtcagtggcgtgcgcctctcgcacaggccattctgggtctggtggtgccaggtgccgtgacacgccgtgctgggcttgtgctgcagctgggtggtgtggccctcattctcatgttccagctgctgggcagtgctctgcctgtgtgctgcgcctgcaggctgcgtgtgctgccgtggatctcctgcatcccttgacccctcccgccatcagaggaaaggctgctccccgaggcaccgcttccctgtgcggcgctgcagaggggccctcagtgtggcactcctcgtcaaagaaaaataaaggctagaactgc

SEQ ID NO: 104881 - DNA, 3072 bp, Homo sapiens
  Payload ID: 594
  Gene Symbol: AP2A2
  Gene Name: adaptor-related protein complex 2, alpha 2 subunit
  Uniprot ID: O94973
  ENST ID: ENST00000528815
  CDS Start-End: 123-2093
gtggttaggcggctccccggcggctcctccgcggcggtgacggcgaccgcactccccgcttcccgctccccgcgctcctccgcccgggtccgccagccgaggccgctcccgagcgtcggaagatgccggccgtgtccaagggggacgggatgcggggcctggcggtcttcatctcggatatccgcaactgtaaaagtaaagaagcagaaataaaaaggataaacaaggaactggcaaatatcagatcaaaatttaaaggtgacaaggctcttgatggctatagtaaaaaaaagtacgtctgcaagttgctcttcatctttctccttggtcatgacattgactttggacacatggaggctgtgaacctgctgagttcaaacagatacacggaaaagcagatcggctaccttttcatctctgtgttggtgaactcaaacagtgagctgatccgcctgatcaacaacgccatcaagaatgacctggccagccgcaaccccaccttcatgggcctggccctgcactgcatcgccagcgtgggcagccgggagatggccgaggccttcgccggggagatccctaaggtcctcgtagccggagacactatggacagcgtgaagcagagcgcggccctgtgcttgctgcgcctgtacaggacgtcccccgatcttgtccccatgggcgactggacatcccgagtggtgcacctgctcaatgaccagcacttgggtgtggtaactgcagccacaagtctgatcaccactttagcacagaagaacccagaagagtttaaaacctccgtgtctctggctgtctctaggctaagcagaatcgtgacgtctgcatccacagatctccaggattacacttactattttgtcccggctccctggctgtctgtcaaactgctgagactgctgcagtgctacccacccccagaagaccctgcagtgcgaggccgcctgactgagtgcctggagaccatcctgaacaaagcccaagaaccgcccaagtcgaagaaggtccagcactccaacgcgaagaatgccgtgctcttcgaggccatcagcttaatcattcaccatgacagtgagccgaacctgctcgtccgtgcctgcaaccagttgggccagtttctgcagcaccgcgagaccaacctgcgctacctggccctggagagcatgtgcacgctggccagctctgagttctcccatgaggctgtcaagacgcacatcgagacggtcatcaacgccctgaagactgagcgggacgtgagcgtgcggcagcgggccgtggacctcctctacgccatgtgcgaccgcagcaacgccccacagatcgtggccgagatgctgagctatctggagacagctgactactccatccgagaagagattgtgctgaaggtcgccatcctggctgagaagtacgcggtggactacacctggtatgtggataccatcttgaacttgatccgaattgctggtgattacgtgagtgaagaggtgtggtaccgagtcattcagatcgtcatcaaccgggacgacgtgcagggctacgcggccaagactgtgttcgaggctcttcaggctcccgcgtgccacgagaacctggtcaaagtgggcggctacatcctgggggagtttggaaacttgatagctggagacccgagatccagcccgctgatccagttccacctgctgcactccaagttccacctgtgcagcgtccccacccgcgcgctgctcctgtccacctacatcaagttcgtgaacctcttcccggaggtgaagcccaccatccaggacgtgctgcgcagcgacagccagctcaggaacgcagacgtggagctgcagcagcgtgctgtggagtacctgcggctcagcaccgtggccagcaccgacattctggcgaccgtgctggaggagatgcccccattcccggagcgggagtcctccatcttggcaaagctcaagaagaagaagggccccagcacggtgacagacctggaggacaccaagcgggacaggagtgtggacgtgaacgggggtcctgagcctgccccagccagtaccagcgccgtggtttgtttgtaaaaacaatggtgtgttgtttgaaaaccagctgcttcaaattggacttaagtctgaatttcggcagaatttaggtcggatgtttatcttttatggtaataagacctccacgcagttcctaaactttaccccaacactaatctgttcagacgaccttcagcctaacctgaacctgcagaccaagcccgtggacccgaccgtggaggggggcgcgcaggtgcagcaggtggtcaacatagagtgcgtgtccgacttcacggaggcgccagtcctcaacattcagttcaggtatgggggcaccttccagaacgtgtctgtgcagctgcccatcactctcaacaaattcttccagccgacagaaatggcttctcaggatttctttcaacgttggaagcagttgagcaatccacagcaggaagtgcagaacatcttcaaagcaaagcacccaatggacacagaagtcaccaaagccaagatcattggatttggttctgcacttcttgaagaagttgatcctaatcctgcgaatttcgtgggagctggaatcatccacacgaaaaccacccagattggatgcctgctgcgcttggagccgaacctgcaagcccagatgtaccggctcacgctgcgcacaagtaaggaagccgtttctcagagattatgtgaattgctctcagcgcagttttagtcctgaggatggaagaccaggctcgtgtgtcttgtgttgtcttcgtctgtgccgtttgtcttcgtggccatcctgcagatgagcaccgtgtccagtgccacagcacaaggcgcctccccgccccgccgccccacacctctcccctttgggctggacgggaacacacgtgtgtggctcaggaggaaaagctcagcctggactgtggcagccacggcagaaggtggatcttgggatcaatttttataaaaatcgagacagttctgtggttaaatctacaaattaaagggaaattag

SEQ ID NO: 104882 - DNA, 554 bp, Homo sapiens
  Payload ID: 594
  Gene Symbol: AP2A2
  Gene Name: adaptor-related protein complex 2, alpha 2 subunit
  ENST ID: ENST00000531548
  CDS Start-End: 1-554
gaatttttcttgccaaggttggtggtcactgcttctgggacaccctggttctcttcacagtgttttccgtctggctcctctgaaggtaaaagtaaagaagcagaaataaaaaggataaacaaggaactggcaaatatcagatcaaaatttaaaggtgacaaggctcttgatggctatagtaaaaaaaagtacgtctgcaagttgctcttcatctttctccttggtcatgacattgactttggacacatggaggctgtgaacctgctgagttcaaacagatacacggaaaagcagatcggctaccttttcatctctgtgttggtgaactcaaacagtgagctgatccgcctgatcaacaacgccatcaagaatgacctggccagccgcaaccccaccttcatgggcctggccctgcactgcatcgccagcgtgggcagccgggagatggccgaggccttcgccggggagatccctaaggtcctcgtagccggagacactatggacagcgtgaagcagagcgcggccctgtgcttgctgcgcctgtacaggacgtc

SEQ ID NO: 104883 - DNA, 935 bp, Homo sapiens
  Payload ID: 594
  Gene Symbol: AP2A2
  Gene Name: adaptor-related protein complex 2, alpha 2 subunit
  ENST ID: ENST00000524559
  CDS Start-End: 665-935
aaaactgtcctttgaaaatagaggaattggctgggtgtggtggctcatgcctgtaatcccagcactttgggaggccaaggtgggtggatcatctgaggtcgggagttcgagaccagtctggccaacatggtgaaaccccgtctctactaaaaatacaaaaattagccaggcgtgttggcgaacgcctgtaatttagctactcaggaggctgagtcacgagaattgcttgaacctgggaggcggaggttgcagtgagccaagattgtgccactgcactccagcctgggtgaacagagcaagatcctgtctcaaaaaaaaagaaattaagatatttccaggtaaacaataaacagaggacatttgttgttttagccaacctcccttataatacatactgaaaggaatgtctcaggctggaatgaaaggacactaggtggtaggatacgtgaagaaataaaagaacaacggtgaagacagctacatatgtcaagttaaaagacaatgtaaaagtaaagaagcagaaataaaaaggataaacaaggaactggcaaatatcagatcaaaatttaaaggtgacaaggctcttgatggctatagtaaaaaaaagtacgtctgcaagttgctcttcatctttctccttggtcatgacattgactttggacacatggaggctgtgaacctgctgagttcaaacagatacacggaaaagcagatcggctaccttttcatctctgtgttggtgaactcaaacagtgagctgatccgcctgatcaacaacgccatcaagaatgacctggccagccgcaaccccaccttcatgggcctggccctgcactgcatcgccagcgtgggcagccgggagatggccgaggccttcgccggggagatccctaaggtcctcgtagccggagacactatggacagcgtgaagcaga

SEQ ID NO: 104884 - DNA, 557 bp, Homo sapiens
  Payload ID: 594
  Gene Symbol: AP2A2
  Gene Name: adaptor-related protein complex 2, alpha 2 subunit
  ENST ID: ENST00000530801
  CDS Start-End: 377-557
aattatatgacaatattacactgtagcaggacaagccacagacaaaacccctcagacaccgagttaaagaagggctttattcggccgggagctttggcaagagtcaaatcttcaacagccgagctccccgaatgagcaattcctgtccctcttcagggctcacaactctaagagggtccacgtgagagggtcgtgatcgattgagcaagcagggggtaaaagtaaagaagcagaaataaaaaggataaacaaggaactggcaaatatcagatcaaaatttaaaggtgacaaggctcttgatggctatagtaaaaaaaagtacgtctgcaagttgctcttcatctttctccttggtcatgacattgactttggacacatggaggctgtgaacctgctgagttcaaacagatacacggaaaagcagatcggctaccttttcatctctgtgttggtgaactcaaacagtgagctgatccgcctgatcaacaacgccatcaagaatgacctggccagccgcaaccccaccttcatgggcctggccctgcactgcatcgcca

SEQ ID NO: 104885 - DNA, 527 bp, Homo sapiens
  Payload ID: 594
  Gene Symbol: AP2A2
  Gene Name: adaptor-related protein complex 2, alpha 2 subunit
  ENST ID: ENST00000527024
  CDS Start-End: 112-527
actttgtgcttggtggctggtggctgtccacccatgtgtaccagtgcctgccaacctgaagggctttggcaggggccttcgctgcagggtgaggtctgaggaggagcctgaatgctggttcagttcttccagaggactctcgactctcttctcttgcttggtaaaagtaaagaagcagaaataaaaaggataaacaaggaactggcaaatatcagatcaaaatttaaaggtgacaaggctcttgatggctatagtaaaaaaaagtacgtctgcaagttgctcttcatctttctccttggtcatgacattgactttggacacatggaggctgtgaacctgctgagttcaaacagatacacggaaaagcagatcggctaccttttcatctctgtgttggtgaactcaaacagtgagctgatccgcctgatcaacaacgccatcaagaatgacctggccagccgcaaccccaccttcatgggcctggccctgcactgcatcgccagcgtgggcagccgggagatggccga

SEQ ID NO: 104886 - DNA, 556 bp, Homo sapiens
  Payload ID: 594
  Gene Symbol: AP2A2
  Gene Name: adaptor-related protein complex 2, alpha 2 subunit
  ENST ID: ENST00000534485
  CDS Start-End: 1-556
gtaagggtctggccaagacgcatagaagaaatagcatgtaaaagtaaagaagcagaaataaaaaggataaacaaggaactggcaaatatcagatcaaaatttaaaggtgacaaggctcttgatggctatagtaaaaaaaagtacgtctgcaagttgctcttcatctttctccttggtcatgacattgactttggacacatggaggctgtgaacctgctgagttcaaacagatacacggaaaagcagatcggctaccttttcatctctgtgttggtgaactcaaacagtgagctgatccgcctgatcaacaacgccatcaagaatgacctggccagccgcaaccccaccttcatgggcctggccctgcactgcatcgccagcgtgggcagccgggagatggccgaggccttcgccggggagatccctaaggtcctcgtagccggagacactatggacagcgtgaagcagagcgcggccctgtgcttgctgcgcctgtacaggacgtcccccgatcttgtccccatgggcgactggacatcccgagtggtgcacctgc

SEQ ID NO: 104887 - DNA, 464 bp, Homo sapiens
  Payload ID: 594
  Gene Symbol: AP2A2
  Gene Name: adaptor-related protein complex 2, alpha 2 subunit
  ENST ID: ENST00000526753
  CDS Start-End: 278-464
gtggcatgtatttctcagtggaattttaaatagaatggtgactcggcatttattccttgtctgaagtaagcaagtaggaaggaccttgttccccattcaagggaatgaacggtgtggtaaaagtaaagaagcagaaataaaaaggataaacaaggaactggcaaatatcagatcaaaatttaaaggtgacaaggctcttgatggctatagtaaaaaaaagtacgtctgcaagttgctcttcatctttctccttggtcatgacattgactttggacacatggaggctgtgaacctgctgagttcaaacagatacacggaaaagcagatcggctaccttttcatctctgtgttggtgaactcaaacagtgagctgatccgcctgatcaacaacgccatcaagaatgacctggccagccgcaaccccaccttcatgggcctggccctgcactgcatcgccagcgtgg

SEQ ID NO: 104888 - DNA, 1491 bp, Homo sapiens
  Payload ID: 594
  Gene Symbol: AP2A2
  Gene Name: adaptor-related protein complex 2, alpha 2 subunit
  ENST ID: ENST00000534328
  CDS Start-End: 143-1279
gctgggaccctgaggcggccgtggttaggcggctccccggcggctcctccgcggcggtgacggcgaccgcactccccgcttcccgctccccgcgctcctccgcccgggtccgccagccgaggccgctcccgagcgtcggaagatgccggccgtgtccaagggggacgggatgcggggcctggcggtcttcatctcggatatccgcaactgtaaaagtaaagaagcagaaataaaaaggataaacaaggaactggcaaatatcagatcaaaatttaaaggtgacaaggctcttgatggctatagtaaaaaaaagtacgtctgcaagttgctcttcatctttctccttggtcatgacattgactttggacacatggaggctgtgaacctgctgagttcaaacagatacacggaaaagcagatcggctaccttttcatctctgtgttggtgaactcaaacagtgagctgatccgcctgatcaacaacgccatcaagaatgacctggccagccgcaaccccaccttcatgggcctggccctgcactgcatcgccagcgtgggcagccgggagatggccgaggccttcgccggggagatccctaaggtcctcgtagccggagacactatggacagcgtgaagcagagcgcggccctgtgcttgctgcgcctgtacaggacgtcccccgatcttgtccccatgggcgactggacatcccgagtggtgcacctgctcaatgaccagcacttgggtgtggtaactgcagccacaagtctgatcaccactttagcacagaagaacccagaagagtttaaaacctccgtgtctctggctgtctctaggctaagcagaatcgtgacgtctgcatccacagatctccaggattacacttactattttgtcccggctccctggctgtctgtcaaactgctgagactgctgcagtgctacccacccccagaccctgcagtgcgaggccgcctgactgagtgcctggagaccatcctgaacaaagcccaagaaccgcccaagtcgaagaaggtccagcactccaacgcgaagaatgccgtgctcttcgaggccatcagcttaatcattcaccatgacaggtgtgtcggctgcctatgtaccggctcacgctgcgcacaagtaaggaagccgtttctcagagattatgtgaattgctctcagcgcagttttagtcctgaggatggaagaccaggctcgtgtgtcttgtgttgtcttcgtctgtgccgtttgtcttcgtggccatcctgcagatgagcaccgtgtccagtgccacagcacaaggcgcctccccgccccgccgccccacacctctcccctttgggctggacgggaacacacgtgtgtggctcaggaggaaaagctcagcctggactgtggcagccacggcagaaggtggatcttgggatcaatttttataaaaatcgagacagttctgtggttaaatctacaaattaaagggaaattag

SEQ ID NO: 104889 - DNA, 551 bp, Homo sapiens
  Payload ID: 594
  Gene Symbol: AP2A2
  Gene Name: adaptor-related protein complex 2, alpha 2 subunit
  ENST ID: ENST00000525796
  CDS Start-End: 175-551
aaagcggcgctgggaccctgaggcggccgtggttaggcggctccccggcggctcctccgcggcggtgacggcgaccgcactccccgcttcccgctccccgcgctcctccgcccgggtccgccagccgaggccttcgccggggagatccctaaggtcctcgtagccggagacactatggacagcgtgaagcagagcgcggccctgtgcttgctgcgcctgtacaggacgtcccccgatcttgtccccatgggcgactggacatcccgagtggtgcacctgctcaatgaccagcacttgggtgtggtaactgcagccacaagtctgatcaccactttagcacagaagaacccagaagagtttaaaacctccgtgtctctggctgtctctaggctaagcagaatcgtgacgtctgcatccacagatctccaggattacacttactattttgtcccggctccctggctgtctgtcaaactgctgagactgctgcagtgctacccacccccagaccctgcagtgcgaggccgcctgactgagtgcctggagaccat

SEQ ID NO: 104890 - DNA, 1282 bp, Homo sapiens
  Payload ID: 594
  Gene Symbol: AP2A2
  Gene Name: adaptor-related protein complex 2, alpha 2 subunit
  ENST ID: ENST00000626889
  CDS Start-End: 1-1070
gtaaaagtaaagaagcagaaataaaaaggataaacaaggaactggcaaatatcagatcaaaatttaaaggtgacaaggctcttgatggctatagtaaaaaaaagtacgtctgcaagttgctcttcatctttctccttggtcatgacattgactttggacacatggaggctgtgaacctgctgagttcaaacagatacacggaaaagcagatcggctaccttttcatctctgtgttggtgaactcaaacagtgagctgatccgcctgatcaacaacgccatcaagaatgacctggccagccgcaaccccaccttcatgggcctggccctgcactgcatcgccagcgtgggcagccgggagatggccgaggccttcgccggggagatccctaaggtcctcgtagccggagacactatggacagcgtgaagcagagcgcggccctgtgcttgctgcgcctgtacaggacgtcccccgatcttgtccccatgggcgactggacatcccgagtggtgcacctgctcaatgaccagcacttgggtgtggtaactgcagccacaagtctgatcaccactttagcacagaagaacccagaagagtttaaaacctccgtgtctctggctgtctctaggctaagcagaatcgtgacgtctgcatccacagatctccaggattacacttactattttgtcccggctccctggctgtctgtcaaactgctgagactgctgcagtgctacccacccccagaccctgcagtgcgaggccgcctgactgagtgcctggagaccatcctgaacaaagcccaagaaccgcccaagtcgaagaaggtccagcactccaacgcgaagaatgccgtgctcttcgaggccatcagcttaatcattcaccatgacaggtgtgtcggctgcctatgtaccggctcacgctgcgcacaagtaaggaagccgtttctcagagattatgtgaattgctctcagcgcagttttagtcctgaggatggaagaccaggctcgtgtgtcttgtgttgtcttcgtctgtgccgtttgtcttcgtggctatcctgcagatgagcaccgtgtccagtgccacagcacaaggcgcctccccgccccaccgccccacacctctcccctttgggctggacgggaacacacgtgtgtggctcaggaggaaaagctcagcctggactgtggcagccacggcagaaggtggatcttgggatcaatttttataaaaatcgagacagttctgtggttaaatctacaaattaaagggaaattag

SEQ ID NO: 104891 - DNA, 935 bp, Homo sapiens; identical to SEQ ID NO: 104883
  Payload ID: 594
  Gene Symbol: AP2A2
  Gene Name: adaptor-related protein complex 2, alpha 2 subunit
  ENST ID: ENST00000627737
  CDS Start-End: 665-935

SEQ ID NO: 104892 - DNA, 935 bp, Homo sapiens; identical to SEQ ID NO: 104883
  Payload ID: 594
  Gene Symbol: AP2A2
  Gene Name: adaptor-related protein complex 2, alpha 2 subunit
  ENST ID: ENST00000629923
  CDS Start-End: 665-935

SEQ ID NO: 104893 - DNA, 2883 bp, Homo sapiens
  Payload ID: 594
  Gene Symbol: AP2A2
  Gene Name: adaptor-related protein complex 2, alpha 2 subunit
  ENST ID: ENST00000625871
  CDS Start-End: 1-1904
gtaaaagtaaagaagcagaaataaaaaggataaacaaggaactggcaaatatcagatcaaaatttaaaggtgacaaggctcttgatggctatagtaaaaaaaagtacgtctgcaagttgctcttcatctttctccttggtcatgacattgactttggacacatggaggctgtgaacctgctgagttcaaacagatacacggaaaagcagatcggctaccttttcatctctgtgttggtgaactcaaacagtgagctgatccgcctgatcaacaacgccatcaagaatgacctggccagccgcaaccccaccttcatgggcctggccctgcactgcatcgccagcgtgggcagccgggagatggccgaggccttcgccggggagatccctaaggtcctcgtagccggagacactatggacagcgtgaagcagagcgcggccctgtgcttgctgcgcctgtacaggacgtcccccgatcttgtccccatgggcgactggacatcccgagtggtgcacctgctcaatgaccagcacttgggtgtggtaactgcagccacaagtctgatcaccactttagcacagaagaacccagaagagtttaaaacctccgtgtctctggctgtctctaggctaagcagaatcgtgacgtctgcatccacagatctccaggattacacttactattttgtcccggctccctggctgtctgtcaaactgctgagactgctgcagtgctacccacccccagaagaccctgcagtgcgaggccgcctgactgagtgcctggagaccatcctgaacaaagcccaagaaccgcccaagtcgaagaaggtccagcactccaacgcgaagaatgccgtgcttttcgaggccatcagcttaatcattcaccatgacagtgagccgaacctgctcgtccgtgcctgcaaccagttgggccagtttctgcagcaccgcgagaccaacctgcgctacctggccctggagagcatgtgcacgctggccagctctgagttctcccatgaggctgtcaagacgcacatcgagacggtcatcaacgccctgaagactgagcgggacgtgagcgtgcggcagcgggccgtggacctcctctacgccatgtgcgaccgcagcaacgccccacagatcgtggccgagatgctgagctatctggagacagctgactactccatccgagaagagattgtgctgaaggtcgccatcctggctgagaagtacgcggtggactacacctggtatgtggataccatcttgaacttgatccgaattgctggtgattacgtgagtgaagaggtgtggtaccgagtcattcagatcgtcatcaaccgggacgacgtgcagggctacgcggccaagactgtgttcgaggctcttcaggctcccgcgtgccacgagaacctggtcaaagtgggcggctacatcctgggggagtttggaaacttgatagctggagacccgagatccagcccgctgatccagttccacctgctgcactccaagttccacctgtgcagcgtccccacccgcgcgctgctcctgtccacctacatcaagttcgtgaacctcttcccggaggtgaagcccaccatccaggacgtgctgcgcagcgacagccagctcaggaacgcagacgtggagctgcagcagcgtgctgtggagtacctgcggctcagcaccgtggccagcaccgacattctggcgaccgtgctggaggagatgcccccattcccggagcgggagtcctccatcttggcaaagctcaagaagaagaagggccccagcacggtgacagacctggaggacaccaagcgggacaggagtgtggacgtgaacgggggtcctgagcctgccccagccagtaccagcgccgtggtttgtttgtaaaaacaatggtgtgttgtttgaaaaccagctgcttcaaattggacttaagtctgaatttcggcagaatttaggtcggatgtttatcttttatggtaataagacctccacgcagttcctaaactttaccccaacactaatctgttcagacgaccttcagcctaacctgaacctgcagaccaagcccgtggacccgaccgtggaggggggcgcgcaggtgcagcaggtggtcaacatagagtgcgtgtccgacttcacggaggcgccagtcctcaacattcagttcaggtatgggggcaccttccagaacgtgtctgtgcagctgcccatcactctcaacaaattcttccagccgacagaaatggcttctcaggatttctttcaacgttggaagcagttgagcaatccacagcaggaagtgcagaacatcttcaaagcaaagcacccaatggacacagaagtcaccaaagccaagatcattggatttggttctgcacttcttgaagaagttgatcctaatcctgcgaatttcgtgggagctggaatcatccacacgaaaaccacccagattggatgcctgctgcgcttggagccgaacctgcaagcccagatgtaccggctcacgctgcgcacaagtaaggaagccgtttctcagagattatgtgaattgctctcagcgcagttttagtcctgaggatggaagaccaggctcgtgtgtcttgtgttgtcttcgtctgtgccgtttgtcttcgtggccatcctgcagatgagcaccgtatccagtgccacagcacaaggcgcctccccgccccgccgccccacacctctcccctttgggctggacgggaacacacgtgtgtggctcaggaggaaaagctcagcctggactgtggcagccacggcagaaggtggatcttgggatcaatttttataaaaatcgagacagttctgtggttaaatctacaaattaaagggaaattag

SEQ ID NO: 104894 - DNA, 557 bp, Homo sapiens; identical to SEQ ID NO: 104884
  Payload ID: 594
  Gene Symbol: AP2A2
  Gene Name: adaptor-related protein complex 2, alpha 2 subunit
  ENST ID: ENST00000630212
  CDS Start-End: 377-557

SEQ ID NO: 104895 - DNA, 469 bp, Homo sapiens
  Payload ID: 594
  Gene Symbol: AP2A2
  Gene Name: adaptor-related protein complex 2, alpha 2 subunit
  ENST ID: ENST00000629940
  CDS Start-End: 1-469
gtaaaagtaaagaagcagaaataaaaaggataaacaaggaactggcaaatatcagatcaaaatttaaaggtgacaaggctcttgatggctatagtaaaaaaaagtacgtctgcaagttgctcttcatctttctccttggtcatgacattgactttggacacatggaggctgtgaacctgctgagttcaaacagatacacggaaaagcagatcggctaccttttcatctctgtgttggtgaactcaaacagtgagctgatccgcctgatcaacaacgccatcaagaatgacctggccagccgcaaccccaccttcatgggcctggccctgcactgcatcgccagcgtgggcagccgggagatggccgaggccttcgccggggagatccctaaggtcctcgtagccggagacactatggacagcgtgaagcagagcgcggccctgtgcttgctgcgcctgtacaggacgtc

SEQ ID NO: 104896 - DNA, 519 bp, Homo sapiens
  Payload ID: 594
  Gene Symbol: AP2A2
  Gene Name: adaptor-related protein complex 2, alpha 2 subunit
  ENST ID: ENST00000626013
  CDS Start-End: 1-519
gtaaaagtaaagaagcagaaataaaaaggataaacaaggaactggcaaatatcagatcaaaatttaaaggtgacaaggctcttgatggctatagtaaaaaaaagtacgtctgcaagttgctcttcatctttctccttggtcatgacattgactttggacacatggaggctgtgaacctgctgagttcaaacagatacacggaaaagcagatcggctaccttttcatctctgtgttggtgaactcaaacagtgagctgatccgcctgatcaacaacgccatcaagaatgacctggccagccgcaaccccaccttcatgggcctggccctgcactgcatcgccagcgtgggcagccgggagatggccgaggccttcgccggggagatccctaaggtcctcgtagccggagacactatggacagcgtgaagcagagcgcggccctgtgcttgctgcgcctgtacaggacgtcccccgatcttgtccccatgggcgactggacatcccgagtggtgcacctgc

SEQ ID NO: 104897 - DNA, 527 bp, Homo sapiens; identical to SEQ ID NO: 104885
  Payload ID: 594
  Gene Symbol: AP2A2
  Gene Name: adaptor-related protein complex 2, alpha 2 subunit
  ENST ID: ENST00000628115
  CDS Start-End: 112-527

SEQ ID NO: 104898 - DNA, 1282 bp, Homo sapiens
  Payload ID: 594
  Gene Symbol: AP2A2
  Gene Name: adaptor-related protein complex 2, alpha 2 subunit
  ENST ID: ENST00000626798
  CDS Start-End: 1-1070
gtaaaagtaaagaagcagaaataaaaaggataaacaaggaactggcaaatatcagatcaaaatttaaaggtgacaaggctcttgatggctatagtaaaaaaaagtacgtctgcaagttgctcttcatctttctccttggtcatgacattgactttggacacatggaggctgtgaacctgctgagttcaaacagatacacggaaaagcagatcggctaccttttcatctctgtgttggtgaactcaaacagtgagctgatccgcctgatcaacaacgccatcaagaatgacctggccagccgcaaccccaccttcatgggcctggccctgcactgcatcgccagcgtgggcagccgggagatggccgaggccttcgccggggagatccctaaggtcctcgtagccggagacactatggacagcgtgaagcagagcgcggccctgtgcttgctgcgcctgtacaggacgtcccccgatcttgtccccatgggcgactggacatcccgagtggtgcacctgctcaatgaccagcacttgggtgtggtaactgcagccacaagtctgatcaccactttagcacagaagaacccagaagagtttaaaacctccgtgtctctggctgtctctaggctaagcagaatcgtgacgtctgcatccacagatctccaggattacacttactattttgtcccggctccctggctgtctgtcaaactgctgagactgctgcagtgctacccacccccagaccctgcagtgcgaggccgcctgactgagtgcctggagaccatcctgaacaaagcccaagaaccgcccaagtcgaagaaggtccagcactccaacgcgaagaatgccgtgcttttcgaggccatcagcttaatcattcaccatgacaggtgtgtcggctgcctatgtaccggctcacgctgcgcacaagtaaggaagccgtttctcagagattatgtgaattgctctcagcgcagttttagtcctgaggatggaagaccaggctcgtgtgtcttgtgttgtcttcgtctgtgccgtttgtcttcgtggccatcctgcagatgagcaccgtatccagtgccacagcacaaggcgcctccccgccccgccgccccacacctctcccctttgggctggacgggaacacacgtgtgtggctcaggaggaaaagctcagcctggactgtggcagccacggcagaaggtggatcttgggatcaatttttataaaaatcgagacagttctgtggttaaatctacaaattaaagggaaattag

SEQ ID NO: 104899 - DNA, 519 bp, Homo sapiens; identical to SEQ ID NO: 104896
  Payload ID: 594
  Gene Symbol: AP2A2
  Gene Name: adaptor-related protein complex 2, alpha 2 subunit
  ENST ID: ENST00000626739
  CDS Start-End: 1-519

SEQ ID NO: 104900 - DNA, 527 bp, Homo sapiens; identical to SEQ ID NO: 104885
  Payload ID: 594
  Gene Symbol: AP2A2
  Gene Name: adaptor-related protein complex 2, alpha 2 subunit
  ENST ID: ENST00000626578
  CDS Start-End: 112-527

SEQ ID NO: 104901 - DNA, 464 bp, Homo sapiens; identical to SEQ ID NO: 104887
  Payload ID: 594
  Gene Symbol: AP2A2
  Gene Name: adaptor-related protein complex 2, alpha 2 subunit
  ENST ID: ENST00000628187
  CDS Start-End: 278-464

SEQ ID NO: 104902 - DNA, 422 bp, Homo sapiens
  Payload ID: 594
  Gene Symbol: AP2A2
  Gene Name: adaptor-related protein complex 2, alpha 2 subunit
  ENST ID: ENST00000629128
  CDS Start-End: 46-422
gccttcgccggggagatccctaaggtcctcgtagccggagacactatggacagcgtgaagcagagcgcggccctgtgcttgctgcgcctgtacaggacgtcccccgatcttgtccccatgggcgactggacatcccgagtggtgcacctgctcaatgaccagcacttgggtgtggtaactgcagccacaagtctgatcaccactttagcacagaagaacccagaagagtttaaaacctccgtgtctctggctgtctctaggctaagcagaatcgtgacgtctgcatccacagatctccaggattacacttactattttgtcccggctccctggctgtctgtcaaactgctgagactgctgcagtgctacccacccccagaccctgcagtgcgaggccgcctgactgagtgcctggagaccat

SEQ ID NO: 104903 - DNA, 422 bp, Homo sapiens; identical to SEQ ID NO: 104902
  Payload ID: 594
  Gene Symbol: AP2A2
  Gene Name: adaptor-related protein complex 2, alpha 2 subunit
  ENST ID: ENST00000630696
  CDS Start-End: 1-422

SEQ ID NO: 104904 - DNA, 4367 bp, Homo sapiens
  Payload ID: 594
  Gene Symbol: AP2A2
  Gene Name: adaptor-related protein complex 2, alpha 2 subunit
  ENST ID: ENST00000626787
  CDS Start-End: 1-2753
gtaaaagtaaagaagcagaaataaaaaggataaacaaggaactggcaaatatcagatcaaaatttaaaggtgacaaggctcttgatggctatagtaaaaaaaagtacgtctgcaagttgctcttcatctttctccttggtcatgacattgactttggacacatggaggctgtgaacctgctgagttcaaacagatacacggaaaagcagatcggctaccttttcatctctgtgttggtgaactcaaacagtgagctgatccgcctgatcaacaacgccatcaagaatgacctggccagccgcaaccccaccttcatgggcctggccctgcactgcatcgccagcgtgggcagccgggagatggccgaggccttcgccggggagatccctaaggtcctcgtagccggagacactatggacagcgtgaagcagagcgcggccctgtgcttgctgcgcctgtacaggacgtcccccgatcttgtccccatgggcgactggacatcccgagtggtgcacctgctcaatgaccagcacttgggtgtggtaactgcagccacaagtctgatcaccactttagcacagaagaacccagaagagtttaaaacctccgtgtctctggctgtctctaggctaagcagaatcgtgacgtctgcatccacagatctccaggattacacttactattttgtcccggctccctggctgtctgtcaaactgctgagactgctgcagtgctacccacccccagaccctgcagtgcgaggccgcctgactgagtgcctggagaccatcctgaacaaagcccaagaaccgcccaagtcgaagaaggtccagcactccaacgcgaagaatgccgtgctcttcgaggccatcagcttaatcattcaccatgacagtgagccgaacctgctcgtccgtgcctgcaaccagttgggccagtttctgcagcaccgcgagaccaacctgcgctacctggccctggagagcatgtgcacgctggccagctctgagttctcccatgaggctgtcaagacgcacatcgagacggtcatcaacgccctgaagactgagcgggacgtgagcgtgcggcagcgggccgtggacctcctctacgccatgtgcgaccgcagcaacgccccacagatcgtggccgagatgctgagctatctggagacagctgactactccatccgagaagagattgtgctgaaggtcgccatcctggctgagaagtacgcggtggactacacctggtatgtggataccatcttgaacttgatccgaattgctggtgattacgtgagtgaagaggtgtggtaccgagtcattcagatcgtcatcaaccgggacgacgtgcagggctacgcggccaagactgtgttcgaggctcttcaggctcccgcgtgccacgagaacctggtcaaagtgggcggctacatcctgggggagtttggaaacttgatagctggagacccgagatccagcccgctgatccagttccacctgctgcactccaagttccacctgtgcagcgtccccacccgcgcgctgctcctgtccacctacatcaagttcgtgaacctcttcccggaggtgaagcccaccatccaggacgtgctgcgcagcgacagccagctcaggaacgcagacgtggagctgcagcagcgtgctgtggagtacctgcggctcagcaccgtggccagcaccgacattctggcgaccgtgctggaggagatgcccccattcccggagcgggagtcctccatcttggcaaagctcaagaagaagaagggccccagcacggtgacagacctggaggacaccaagcgggacaggagtgtggacgtgaacgggggtcctgagcctgccccagccagtaccagcgccgtgtctacgccttctccgtcggcagacctgctgggtctcggggctgccccccctgcccccgcgggccccccaccctcctccggcggcagcgggctgctcgtggacgtgttctcagactcggcctctgtggtcgcgcctctcgctcctggctccgaagacaactttgccaggtttgtttgtaaaaacaatggtgtgttgtttgaaaaccagctgcttcaaattggacttaagtctgaatttcggcagaatttaggtcggatgtttatcttttatggtaataagacctccacgcagttcctaaactttaccccaacactaatctgttcagacgaccttcagcctaacctgaacctgcagaccaagcccgtggacccgaccgtggaggggggcgcgcaggtgcagcaggtggtcaacatagagtgcgtgtccgacttcacggaggcgccagtcctcaacattcagttcaggtatgggggcaccttccagaacgtgtctgtgcagctgcccatcactctcaacaaattcttccagccgacagaaatggcttctcaggatttctttcaacgttggaagcagttgagcaatccacagcaggaagtgcagaacatcttcaaagcaaagcacccaatggacacagaagtcaccaaagccaagatcattggatttggttctgcacttcttgaagaagttgatcctaatcctgcgaatttcgtgggagctggaatcatccacacgaaaaccacccagattggatgcctgctgcgcttggagccgaacctgcaagcccagatgtaccggctcacgctgcgcacaagtaaggaagccgtttctcagagattatgtgaattgctctcagcgcagttttagtcctgaggatggaagaccaggctcgtgtgtcttgtgttgtcttcgtctgtgccgtttgtcttcgtggctatcctgcagatgagcaccgtgtccagtgccacagcacaaggcgcctccccgccccaccgccccacacctctcccctttgggctggacgggaacacacgtgtgtggctcaggaggaaaagctcagcctggactgtggcagccacggcagaaggtggatcttgggatcaatttttataaaaatcgagacagttctgtggttaaatctacaaattaaagggaaattagaagttggcgtgaacgtggcgtttgtgggagtgtcactgagatggcccgtgctgccgcccaccccgcctcggagcctctgggagcagcagtgccactgtgcatggcgtgggctgagccttggtgtgtggccgtcctggtggctgcacacctggcgtcgtcctgggcccttgggaggagcacagctgaccctggttttgctgcagtcccagctggactgttttcccaggcaggattttaatctagaatttagaaacatttgtatttgtaatgacttctggcaaaagcacgtgtcctggccggatgtaactgttctcctttcccagctcctgtttgtgaagggcgtctgttatgctcctgcagtcgccgaggccttggatgtgcagccaggggaggagcgtcctgccggccccgcagggcccccaggactccagggtaaagtgtgggccggtggcgcaagactcagaggtgtgctcgtctctttcctgtcagagtgggcgtccccaggccacggtgcaggcctgagtccttccaccggccccgtccagtcgtccctggaggggctgtggaggaaggacgcctctgtgtggtcaggaagtgaaggggccattggccgcatgccatgtgccacctgcggcttgtgtctcacctgtcatctggactcagcacccaggctgcacgtctgacacctgagaggcgagagagtggggccggcctaggagccaaggctggggccttgcgctctgtccccaggatggtggccttgtttgtcctaaacacacccagcacaggttctggcttcctgacatgctgtggaggcagggagggtgggtggccacatgtgcttgagggttttcaccctggccctcagttgcctgctgtgcgggtccctggggcagctgcaggggctcacggacccatcagggtctccacagctcccctgcagtgtgtgcaccccacaatgtctgcggctcttcttccggcgtgtcgggctttgatcacagcatagccacgtcagtggcgtgcgcctctcgcacaggccattctgggtctggtggtgccaggtgccgtgacacgccgtgctgggcttgtgctgcagctgggtggtgtggccctcattctcatgttccagctgctgggcagtgctctgcctgtgtgctgcgcctgcaggctgcgtgtgctgccgtggatctcctgcatcccttgacccctcccgccatcagaggaaaggctgctccccgaggcaccgcttccctgtgcggcgctgcagaggggccctcagtgtggcactcctcgtcaaagaaaaataaaggctagaactgc

SEQ ID NO: 104905 - DNA, 464 bp, Homo sapiens; identical to SEQ ID NO: 104887
  Payload ID: 594
  Gene Symbol: AP2A2
  Gene Name: adaptor-related protein complex 2, alpha 2 subunit
  ENST ID: ENST00000626063
  CDS Start-End: 278-464

SEQ ID NO: 104906 - DNA, 469 bp, Homo sapiens; identical to SEQ ID NO: 104895
  Payload ID: 594
  Gene Symbol: AP2A2
  Gene Name: adaptor-related protein complex 2, alpha 2 subunit
  ENST ID: ENST00000627987
  CDS Start-End: 1-469

SEQ ID NO: 104907 - DNA, 2883 bp, Homo sapiens
  Payload ID: 594
  Gene Symbol: AP2A2
  Gene Name: adaptor-related protein complex 2, alpha 2 subunit
  ENST ID: ENST00000627250
  CDS Start-End: 1-1904
gtaaaagtaaagaagcagaaataaaaaggataaacaaggaactggcaaatatcagatcaaaatttaaaggtgacaaggctcttgatggctatagtaaaaaaaagtacgtctgcaagttgctcttcatctttctccttggtcatgacattgactttggacacatggaggctgtgaacctgctgagttcaaacagatacacggaaaagcagatcggctaccttttcatctctgtgttggtgaactcaaacagtgagctgatccgcctgatcaacaacgccatcaagaatgacctggccagccgcaaccccaccttcatgggcctggccctgcactgcatcgccagcgtgggcagccgggagatggccgaggccttcgccggggagatccctaaggtcctcgtagccggagacactatggacagcgtgaagcagagcgcggccctgtgcttgctgcgcctgtacaggacgtcccccgatcttgtccccatgggcgactggacatcccgagtggtgcacctgctcaatgaccagcacttgggtgtggtaactgcagccacaagtctgatcaccactttagcacagaagaacccagaagagtttaaaacctccgtgtctctggctgtctctaggctaagcagaatcgtgacgtctgcatccacagatctccaggattacacttactattttgtcccggctccctggctgtctgtcaaactgctgagactgctgcagtgctacccacccccagaagaccctgcagtgcgaggccgcctgactgagtgcctggagaccatcctgaacaaagcccaagaaccgcccaagtcgaagaaggtccagcactccaacgcgaagaatgccgtgctcttcgaggccatcagcttaatcattcaccatgacagtgagccgaacctgctcgtccgtgcctgcaaccagttgggccagtttctgcagcaccgcgagaccaacctgcgctacctggccctggagagcatgtgcacgctggccagctctgagttctcccatgaggctgtcaagacgcacatcgagacggtcatcaacgccctgaagactgagcgggacgtgagcgtgcggcagcgggccgtggacctcctctacgccatgtgcgaccgcagcaacgccccacagatcgtggccgagatgctgagctatctggagacagctgactactccatccgagaagagattgtgctgaaggtcgccatcctggctgagaagtacgcggtggactacacctggtatgtggataccatcttgaacttgatccgaattgctggtgattacgtgagtgaagaggtgtggtaccgagtcattcagatcgtcatcaaccgggacgacgtgcagggctacgcggccaagactgtgttcgaggctcttcaggctcccgcgtgccacgagaacctggtcaaagtgggcggctacatcctgggggagtttggaaacttgatagctggagacccgagatccagcccgctgatccagttccacctgctgcactccaagttccacctgtgcagcgtccccacccgcgcgctgctcctgtccacctacatcaagttcgtgaacctcttcccggaggtgaagcccaccatccaggacgtgctgcgcagcgacagccagctcaggaacgcagacgtggagctgcagcagcgtgctgtggagtacctgcggctcagcaccgtggccagcaccgacattctggcgaccgtgctggaggagatgcccccattcccggagcgggagtcctccatcttggcaaagctcaagaagaagaagggccccagcacggtgacagacctggaggacaccaagcgggacaggagtgtggacgtgaacgggggtcctgagcctgccccagccagtaccagcgccgtggtttgtttgtaaaaacaatggtgtgttgtttgaaaaccagctgcttcaaattggacttaagtctgaatttcggcagaatttaggtcggatgtttatcttttatggtaataagacctccacgcagttcctaaactttaccccaacactaatctgttcagacgaccttcagcctaacctgaacctgcagaccaagcccgtggacccgaccgtggaggggggcgcgcaggtgcagcaggtggtcaacatagagtgcgtgtccgacttcacggaggcgccagtcctcaacattcagttcaggtatgggggcaccttccagaacgtgtctgtgcagctgcccatcactctcaacaaattcttccagccgacagaaatggcttctcaggatttctttcaacgttggaagcagttgagcaatccacagcaggaagtgcagaacatcttcaaagcaaagcacccaatggacacagaagtcaccaaagccaagatcattggatttggttctgcacttcttgaagaagttgatcctaatcctgcgaatttcgtgggagctggaatcatccacacgaaaaccacccagattggatgcctgctgcgcttggagccgaacctgcaagcccagatgtaccggctcacgctgcgcacaagtaaggaagccgtttctcagagattatgtgaattgctctcagcgcagttttagtcctgaggatggaagaccaggctcgtgtgtcttgtgttgtcttcgtctgtgccgtttgtcttcgtggctatcctgcagatgagcaccgtgtccagtgccacagcacaaggcgcctccccgccccaccgccccacacctctcccctttgggctggacgggaacacacgtgtgtggctcaggaggaaaagctcagcctggactgtggcagccacggcagaaggtggatcttgggatcaatttttataaaaatcgagacagttctgtggttaaatctacaaattaaagggaaattag

SEQ ID NO: 104908 - DNA, 557 bp, Homo sapiens; identical to SEQ ID NO: 104884
  Payload ID: 594
  Gene Symbol: AP2A2
  Gene Name: adaptor-related protein complex 2, alpha 2 subunit
  ENST ID: ENST00000627507
  CDS Start-End: 377-557

SEQ ID NO: 104909 - DNA, 4367 bp, Homo sapiens
  Payload ID: 594
  Gene Symbol: AP2A2
  Gene Name: adaptor-related protein complex 2, alpha 2 subunit
  ENST ID: ENST00000629952
  CDS Start-End: 1-2753
gtaaaagtaaagaagcagaaataaaaaggataaacaaggaactggcaaatatcagatcaaaatttaaaggtgacaaggctcttgatggctatagtaaaaaaaagtacgtctgcaagttgctcttcatctttctccttggtcatgacattgactttggacacatggaggctgtgaacctgctgagttcaaacagatacacggaaaagcagatcggctaccttttcatctctgtgttggtgaactcaaacagtgagctgatccgcctgatcaacaacgccatcaagaatgacctggccagccgcaaccccaccttcatgggcctggccctgcactgcatcgccagcgtgggcagccgggagatggccgaggccttcgccggggagatccctaaggtcctcgtagccggagacactatggacagcgtgaagcagagcgcggccctgtgcttgctgcgcctgtacaggacgtcccccgatcttgtccccatgggcgactggacatcccgagtggtgcacctgctcaatgaccagcacttgggtgtggtaactgcagccacaagtctgatcaccactttagcacagaagaacccagaagagtttaaaacctccgtgtctctggctgtctctaggctaagcagaatcgtgacgtctgcatccacagatctccaggattacacttactattttgtcccggctccctggctgtctgtcaaactgctgagactgctgcagtgctacccacccccagaccctgcagtgcgaggccgcctgactgagtgcctggagaccatcctgaacaaagcccaagaaccgcccaagtcgaagaaggtccagcactccaacgcgaagaatgccgtgcttttcgaggccatcagcttaatcattcaccatgacagtgagccgaacctgctcgtccgtgcctgcaaccagttgggccagtttctgcagcaccgcgagaccaacctgcgctacctggccctggagagcatgtgcacgctggccagctctgagttctcccatgaggctgtcaagacgcacatcgagacggtcatcaacgccctgaagactgagcgggacgtgagcgtgcggcagcgggccgtggacctcctctacgccatgtgcgaccgcagcaacgccccacagatcgtggccgagatgctgagctatctggagacagctgactactccatccgagaagagattgtgctgaaggtcgccatcctggctgagaagtacgcggtggactacacctggtatgtggataccatcttgaacttgatccgaattgctggtgattacgtgagtgaagaggtgtggtaccgagtcattcagatcgtcatcaaccgggacgacgtgcagggctacgcggccaagactgtgttcgaggctcttcaggctcccgcgtgccacgagaacctggtcaaagtgggcggctacatcctgggggagtttggaaacttgatagctggagacccgagatccagcccgctgatccagttccacctgctgcactccaagttccacctgtgcagcgtccccacccgcgcgctgctcctgtccacctacatcaagttcgtgaacctcttcccggaggtgaagcccaccatccaggacgtgctgcgcagcgacagccagctcaggaacgcagacgtggagctgcagcagcgtgctgtggagtacctgcggctcagcaccgtggccagcaccgacattctggcgaccgtgctggaggagatgcccccattcccggagcgggagtcctccatcttggcaaagctcaagaagaagaagggccccagcacggtgacagacctggaggacaccaagcgggacaggagtgtggacgtgaacgggggtcctgagcctgccccagccagtaccagcgccgtgtctacgccttctccgtcggcagacctgctgggtctcggggctgccccccctgcccccgcgggccccccaccctcctccggcggcagcgggctgctcgtggacgtgttctcagactcggcctctgtggtcgcgcctctcgctcctggctccgaagacaactttgccaggtttgtttgtaaaaacaatggtgtgttgtttgaaaaccagctgcttcaaattggacttaagtctgaatttcggcagaatttaggtcggatgtttatcttttatggtaataagacctccacgcagttcctaaactttaccccaacactaatctgttcagacgaccttcagcctaacctgaacctgcagaccaagcccgtggacccgaccgtggaggggggcgcgcaggtgcagcaggtggtcaacatagagtgcgtgtccgacttcacggaggcgccagtcctcaacattcagttcaggtatgggggcaccttccagaacgtgtctgtgcagctgcccatcactctcaacaaattcttccagccgacagaaatggcttctcaggatttctttcaacgttggaagcagttgagcaatccacagcaggaagtgcagaacatcttcaaagcaaagcacccaatggacacagaagtcaccaaagccaagatcattggatttggttctgcacttcttgaagaagttgatcctaatcctgcgaatttcgtgggagctggaatcatccacacgaaaaccacccagattggatgcctgctgcgcttggagccgaacctgcaagcccagatgtaccggctcacgctgcgcacaagtaaggaagccgtttctcagagattatgtgaattgctctcagcgcagttttagtcctgaggatggaagaccaggctcgtgtgtcttgtgttgtcttcgtctgtgccgtttgtcttcgtggccatcctgcagatgagcaccgtatccagtgccacagcacaaggcgcctccccgccccgccgccccacacctctcccctttgggctggacgggaacacacgtgtgtggctcaggaggaaaagctcagcctggactgtggcagccacggcagaaggtggatcttgggatcaatttttataaaaatcgagacagttctgtggttaaatctacaaattaaagggaaattagaagttggcgtgaacgtggcgtttgtgggagtgtcactgagatggcccgtgctgccgcccaccccgcctcggagcctctgggagcagcagtgccactgtgcatggcgtgggctgagccttggtgtgtggccgtcctggtggctgcacacctggcgtcgtcctgggcccttgggaggagcacagctgaccctggttttgctgcagtcccagctggactgttttcccaggcaggattttaatctagaatttagaaacatttgtatttgtaatgacttctggcaaaagcacgtgtcctggccggatgtaactgttctcctttcccagctcctgtttgtgaagggcgtctgttatgctcctgcagtcgccgaggccttggatgtgcagccaggggaggagcgtcctgccggccccgcagggcccccaggactccagggtaaagtgtgggccggtggcgcaagactcagaggtgtgctcgtctctttcctgtcagagtgggcgtccccaggccacggtgcaggcctgagtccttccaccggccccgtccagtcgtccctggaggggctgtggaggagggacgcctctgtgtggtcaggaagtgaaggggccattggccgcatgccatgtgccacctgcggcttgtgtctcacctgtcatctggactcagcacccaggctgcacgtctgacacctgagaggcgagagagtggggccggcctaggagccaaggctggggccttgcgctctgtccccaggatggtggccttgtttgtcctaaacacacccagcacaggttctggcttcctgacatgctgtggaggcagggagggtgggtggccacatgtgcttgagggttttcaccctggccctcagttgcctgctgtgcgggtccctggggcagctgcaggggctcatggacccatcagggtctccacagctcccctgcagtgtgtgcaccccacaatgtctgcggctcttcttccggcgtgtcgggctttgatcacagcatagccacgtcagtggcgtgcgcctctcgcacaggccattctgggtctggtggtgccaggtgccgtgacacgccgtgctgggcttgtgctgcagctgggtggtgtggccctcattctcatgttccagctgctgggcagtgctctgcctgtgtgctgcgcctgcaggctgcgtgtgctgccgtggatctcctgcatcccttgacccctcccgccatcagaggaaaggctgctccccgaggcaccgcttccctgtgcggcgctgcagaggggccctcagtgtggcactcctcgtcaaagaaaaataaaggctagaactgc

SEQ ID NO: 104910 - DNA, 779 bp, Homo sapiens
  Payload ID: 595
  Gene Symbol: AP2B1
  Gene Name: adaptor-related protein complex 2, beta 1 subunit
  ENST ID: ENST00000588116
  CDS Start-End: 1-495
tcagaggttctggcagaactgaaagaatatgctacagaggtggatgttgactttgttcgaaaagctgtgcgggccattggacggtgtgccatcaaggtggagcaatctgcagagcgctgtgtaagcacattgcttgatctaatccagaccaaagtgaattatgtggtccaagaagcaattgttgtcatcagggacatcttccgcaaataccccaacaagtatgaaagtatcatcgccactctgtgtgagaacttagactcgctggatgagccagatgctcgagcagctatgatttggattgtgggagaatatgctgaaagaattgacaatgcagatgagttactagaaagcttcctggagggttttcacgatgaaagcacccaggtgcagctcactctgcttactgccatagtgaagctgtttctcaagaaaccatcagaaacacaggagctagtccagcaggtcttgagtttggcaacacagctaaagaagtagtcttgtctgagaagccactgatctctgaggagacggaccttattgagccaactctgctggatgagctaatctgccacattggttctttggcctctgtgtatcataagcctcccaatgcttttgtggaaggaagtcatggaattcatcgtaaacacttgccaattcatcatgggagtctggaaaagaactgctgtacatttttggacacctactactatacaaccccagggagctccatctgaataccagtgaccacacataaaatcgcactgatgcaggtgaca

SEQ ID NO: 104911 - DNA, 554 bp, Homo sapiens
  Payload ID: 595
  Gene Symbol: AP2B1
  Gene Name: adaptor-related protein complex 2, beta 1 subunit
  ENST ID: ENST00000590432
  CDS Start-End: 315-554
gcctccgcctccggtgagttcagggcggttgcctttagggtgtgtccctaattgacggggtcggggacggagagaagggtaacaccaggctgggtcggagaccggcggaggcgaggaaatcctaagagcgtgaccgttgatgatgcagggaaccgtcgggtgtgaccattgagagggaaaagcctcagggtacacttacaaagtagtaatagaaagcagcagatgaaggaggtgcagctctataagaaaacgtgttaagacattccagtgatgactaagcgtgctggtaaggtgcacattaaagatccaaagtcatgactgactccaagtatttcacaaccaataaaaaaggagaaatatttgaactaaaagctgaactcaacaatgaaaagaaagaaaagagaaaggaggctgtgaagaaagtgattgctgctatgaccgtggggaaggatgttagttctctctttccagacgtagtgaactgtatgcagactgacaatctggaactaaagaagcttgtgtatctctacttgatgaactacgccaagagtcag

SEQ ID NO: 104912 - DNA, 559 bp, Homo sapiens
  Payload ID: 595
  Gene Symbol: AP2B1
  Gene Name: adaptor-related protein complex 2, beta 1 subunit
  ENST ID: ENST00000591610
  CDS Start-End: 131-322
agacctagaaaagaatcgtgacgggcaggaaaccattacaccaccacctgggctgtgctctccggctcccgccgccacccccgccctcgccttcgcctccgcctccggtgcacattaaagatccaaagtcatgactgactccaagtatttcacaaccaataaaaaaggagaaatatttgaactaaaagctgaactcaacaatgaaaagaaagaaaagagaaaggaggctgtgaagaaagtgattgctgctatgaccgtggggaaggatgttaggtgctgctcttctgaggtgaatttttgttatttttcttttgtttgttagcacataaagcacatttggtttttaaattgctgtcctgtgaccatctatctaaggagttggcaaacgtttttgtaaaggacaaaatagactgtgaagatcctaatcctttgattcgagccttggcagtcagaaccatggggtgcatccgggtagacaaaattacagaatatctctgtgagccgctccgcaagtgcttgaaggatgaggatccctatgttcggaaaacagcagcagtct

SEQ ID NO: 104913 - DNA, 690 bp, Homo sapiens
  Payload ID: 595
  Gene Symbol: AP2B1
  Gene Name: adaptor-related protein complex 2, beta 1 subunit
  ENST ID: ENST00000587805
  CDS Start-End: 1-546
gaccttattgagccaactctgctggatgagctaatctgccacattggttctttggcctctgtgtatcataagcctcccaatgcttttgtggaaggaagtcatggaattcatcgtaaacacttgccaattcatcatgggagcactgatgcaggtgacagccctgttggcactaccactgcaacgaacctggaacagcctcaggttatcccctctcaaggtgatcttctaggggatcttttaaaccttgacctcggtcccccagtcaatgtgccacaggtgtcctccatgcagatgggagcagtggatctcctaggaggaggactagatagtctgccccagaaattgtttacagtgcagttttcttcagcttattctgagattgaaagatatcccagaaatcaagatgagaagaaattaaagcccttatttttgctttggatccgtatgtggttaaatatatattcactcagagaatcaaggttcctttttcgagaacatcacaaggaagacctaaatttgcctgtgtggaagaagatgagtttctaaggcggcagtggacttttaaaatgcttttattgttcttatgcaaattacctaaagagaagattaatcctcaaagccattttttgaatgcatccttgccttacagagtgcttctcaaaataaattatataccttgaatctcctaaa

SEQ ID NO: 104914 - DNA, 577 bp, Homo sapiens
  Payload ID: 595
  Gene Symbol: AP2B1
  Gene Name: adaptor-related protein complex 2, beta 1 subunit
  ENST ID: ENST00000593014
  CDS Start-End: 180-577
gatagagcctggaggccgtggggggaaccgtctttcttccccgctcggcgtcgttcactgagaggctgagacgtgtccagcaagccaaagggaaaagggattccctcaaaggtttgctcattgatgggcgaacgtcgtctctcgggtaacttgagggtgcacattaaagatccaaagtcatgactgactccaagtatttcacaaccaataaaaaaggagaaatatttgaactaaaagctgaactcaacaatgaaaagaaagaaaagagaaaggaggctgtgaagaaagtgattgctgctatgaccgtggggaaggatgttagttctctctttccagacgtagtgaactgtatgcagactgacaatctggaactaaagaagcttgtgtatctctacttgatgaactacgccaagagtcagccagacatggccatcatggctgtaaacagctttgtgaaggactgtgaagatcctaatcctttgattcgagccttggcagtcagaaccatggggtgcatccgggtagacaaaattacagaatatctctgtgagccgctccgcaagtgcttgaaggatga

SEQ ID NO: 104915 - DNA, 461 bp, Homo sapiens
  Payload ID: 595
  Gene Symbol: AP2B1
  Gene Name: adaptor-related protein complex 2, beta 1 subunit
  ENST ID: ENST00000592167
  CDS Start-End: 122-313
aaccgtcgggtgtgaccattgagagggaaaaggttggagaaagggtctctaccatgatgcctgtggtgcggtgagggaatcctcgggtgtggcagcaggtgcacattaaagatccaaagtcatgactgactccaagtatttcacaaccaataaaaaaggagaaatatttgaactaaaagctgaactcaacaatgaaaagaaagaaaagagaaaggaggctgtgaagaaagtgattgctgctatgaccgtggggaaggatgttaggtgctgctcttctgaggtgaatttttgttatttttcttttgtttgttagcacataaagcacatttggtttttaaattgctgtcctgtgaccatctatctaaggagttggcaaacgtttttgtaaaggacaaaatattctctctttccagacgtagtgaactgtatgcagactgacaatctggaactaaagaagcttg

SEQ ID NO: 104916 - DNA, 552 bp, Homo sapiens
  Payload ID: 595
  Gene Symbol: AP2B1
  Gene Name: adaptor-related protein complex 2, beta 1 subunit
  ENST ID: ENST00000589774
  CDS Start-End: 100-552
acttttcccacaaactctctcgtgagcatgaactttttcgggaggaagagtatcagatgggtgctcagtcttaaaggtgcacattaaagatccaaagtcatgactgactccaagtatttcacaaccaataaaaaaggagaaatatttgaactaaaagctgaactcaacaatgaaaagaaagaaaagagaaaggaggctgtgaagaaagtgattgctgctatgaccgtggggaaggatgttagttctctctttccagacgtagtgaactgtatgcagactgacaatctggaactaaagaagcttgtgtatctctacttgatgaactacgccaagagtcagccagacatggccatcatggctgtaaacagctttgtgaaggactgtgaagatcctaatcctttgattcgagccttggcagtcagaaccatggggtgcatccgggtagacaaaattacagaatatctctgtgagccgctccgcaagtgcttgaaggatgaggatccctatgttcggaaaacagcagcagtctgcgtggcaaaactccatgatatc

SEQ ID NO: 104917 - DNA, 568 bp, Homo sapiens
  Payload ID: 595
  Gene Symbol: AP2B1
  Gene Name: adaptor-related protein complex 2, beta 1 subunit
  ENST ID: ENST00000590538
  CDS Start-End: 131-322
agacctagaaaagaatcgtgacgggcaggaaaccattacaccaccacctgggctgtgctctccggctcccgccgccacccccgccctcgccttcgcctccgcctccggtgcacattaaagatccaaagtcatgactgactccaagtatttcacaaccaataaaaaaggagaaatatttgaactaaaagctgaactcaacaatgaaaagaaagaaaagagaaaggaggctgtgaagaaagtgattgctgctatgaccgtggggaaggatgttaggtgctgctcttctgaggtgaatttttgttatttttcttttgtttgttagcacataaagcacatttggtttttaaattgctgtcctgtgaccatctatctaaggagttggcaaacgtttttgtaaaggacaaaatattctctctttccagacgtagtgaactgtatgcagactgacaatctggaactaaagaagcttgtgtatctctacttgatgaactacgccaagagtcagccagacatggccatcatggctgtaaacagctttgtgaaggactgtgaagatcctaatcctttg

SEQ ID NO: 104918 - DNA, 2266 bp, Homo sapiens
  Payload ID: 595
  Gene Symbol: AP2B1
  Gene Name: adaptor-related protein complex 2, beta 1 subunit
  ENST ID: ENST00000612116
  CDS Start-End: 236-2266
agggtgtgtccctaattgacggggtcggggacggagagaagggtaacaccaggctgggtcggagaccggcggaggcgaggaaatcctaagagcgtgaccgttgatgatgcagggaaccgtcgggtgtgaccattgagagggaaaaggttggagaaagggtctctaccatgatgcctgtggtgcggtgagggaatcctcgggtgtggcagcaggtgcacattaaagatccaaagtcatgactgactccaagtatttcacaaccaataaaaaaggagaaatatttgaactaaaagctgaactcaacaatgaaaagaaagaaaagagaaaggaggctgtgaagaaagtgattgctgctatgaccgtggggaaggatgttagttctctctttccagacgtagtgaactgtatgcagactgacaatctggaactaaagaagcttgtgtatctctacttgatgaactacgccaagagtcagccagacatggccatcatggctgtaaacagctttgtgaaggactgtgaagatcctaatcctttgattcgagccttggcagtcagaaccatggggtgcatccgggtagacaaaattacagaatatctctgtgagccgctccgcaagtgcttgaaggatgaggatccctatgttcggaaaacagcagcagtctgcgtggcaaaactccatgatatcaatgcccaaatggtggaagatcagggatttctggattctctacgggatctcatagcagattcaaatccaatggtggtggctaatgccgtagcggcattatctgaaatcagtgagtctcacccaaacagcaacttacttgatctgaacccacagaacattaataagctgctgacagccctgaatgaatgcactgaatggggccagattttcatcctggactgcctgtctaattacaaccctaaagatgatcgggaggctcagagcatctgtgagcgggtaactccccggctatcccatgccaactcagcagtggtgctttcagcggtaaaagtcctaatgaagtttctagaattgttacctaaggattctgactactacaatatgctgctgaagaagttagcccctccacttgtcactttgctgtctggggagccagaagtgcagtatgtcgccctgaggaacatcaacttaattgtccagaaaaggcctgaaatcttgaagcaggaaatcaaagtcttctttgtgaagtacaatgatcccatctatgttaaactagagaagttggacatcatgattcgtttggcatctcaagccaacattgctcaggttctggcagaactgaaagaatatgctacagaggtggatgttgactttgttcgaaaagctgtgcgggccattggacggtgtgccatcaaggtggagcaatctgcagagcgctgtgtaagcacattgcttgatctaatccagaccaaagtgaattatgtggtccaagaagcaattgttgtcatcagggacatcttccgcaaataccccaacaagtatgaaagtatcatcgccactctgtgtgagaacttagactcgctggatgagccagatgctcgagcagctatgatttggattgtgggagaatatgctgaaagaattgacaatgcagatgagttactagaaagcttcctggagggttttcacgatgaaagcacccaggtgcagctcactctgcttactgccatagtgaagctgtttctcaagaaaccatcagaaacacaggagctagtccagcaggtcttgagtttggcaacacaggattctgataatcctgaccttcgagaccggggctatatttattggcgccttctctcaactgaccctgttacagctaaagaagtagtcttgtctgagaagccactgatctctgaggagacggaccttattgagccaactctgctggatgagctaatctgccacattggttctttggcctctgtgtatcataagcctcccaatgcttttgtggaaggaagtcatggaattcatcgtaaacacttgccaattcatcatgggagcactgatgcaggtgacagccctgttggcactaccactgcaacgaacctggaacagcctcaggttatcccctctcaaggtgatcttctaggggatcttttaaaccttgacctcggtcccccagtcaatgtgccacaggtgtcctccatgcagatgggagcagtggatctcctaggaggaggactagatagtctgcttggcagtgaccttggcgggggcattggaggaagtccggca

SEQ ID NO: 104919 - DNA, 2542 bp, Homo sapiens
  Payload ID: 595
  Gene Symbol: AP2B1
  Gene Name: adaptor-related protein complex 2, beta 1 subunit
  ENST ID: ENST00000616784
  CDS Start-End: 554-2542
ttttacgtgcagcactatcctctagccccactgcccgtatataggcctgggctatatcaccattgtccgcccttgagcctggaaggaaaatgagctgaggggttttgttttttcagaaaggaacaggatatttcatcatctctatgtttacgtttttcagagaatttctgtgcgaggaaacaaatccattgtcagctttttaaaatatatccctttggagtagccacttaacatcctctgaggcccagatgggctagcttgccgggaccaaaggaaatctttgggtctggaaggcgacaagagatcacaggctttctaggtctaccgcgcaccccgatgacgtcacgcggcgacgttctctgacgtcagagtttcctgcccaccatctttgtccctggcaaagtgggttttgcgcagtggcttagacctagaaaagaatcgtgacgggcaggaaaccattacaccaccacctgggctgtgctctccggctcccgccgccacccccgccctcgccttcgcctccgcctccggtgcacattaaagatccaaagtcatgactgactccaagtatttcacaaccaataaaaaaggagaaatatttgaactaaaagctgaactcaacaatgaaaagaaagaaaagagaaaggaggctgtgaagaaagtgattgctgctatgaccgtggggaaggatgttagttctctctttccagacgtagtgaactgtatgcagactgacaatctggaactaaagaagcttgtgtatctctacttgatgaactacgccaagagtcagccagacatggccatcatggctgtaaacagctttgtgaaggactgtgaagatcctaatcctttgattcgagccttggcagtcagaaccatggggtgcatccgggtagacaaaattacagaatatctctgtgagccgctccgcaagtgcttgaaggatgaggatccctatgttcggaaaacagcagcagtctgcgtggcaaaactccatgatatcaatgcccaaatggtggaagatcagggatttctggattctctacgggatctcatagcagattcaaatccaatggtggtggctaatgccgtagcggcattatctgaaatcagtgagtctcacccaaacagcaacttacttgatctgaacccacagaacattaataagctgctgacagccctgaatgaatgcactgaatggggccagattttcatcctggactgcctgtctaattacaaccctaaagatgatcgggaggctcagagcatctgtgagcgggtaactccccggctatcccatgccaactcagcagtggtgctttcagcggtaaaagtcctaatgaagtttctagaattgttacctaaggattctgactactacaatatgctgctgaagaagttagcccctccacttgtcactttgctgtctggggagccagaagtgcagtatgtcgccctgaggaacatcaacttaattgtccagaaaaggcctgaaatcttgaagcaggaaatcaaagtcttctttgtgaagtacaatgatcccatctatgttaaactagagaagttggacatcatgattcgtttggcatctcaagccaacattgctcaggttctggcagaactgaaagaatatgctacagaggtggatgttgactttgttcgaaaagctgtgcgggccattggacggtgtgccatcaaggtggagcaatctgcagagcgctgtgtaagcacattgcttgatctaatccagaccaaagtgaattatgtggtccaagaagcaattgttgtcatcagggacatcttccgcaaataccccaacaagtatgaaagtatcatcgccactctgtgtgagaacttagactcgctggatgagccagatgctcgagcagctatgatttggattgtgggagaatatgctgaaagaattgacaatgcagatgagttactagaaagcttcctggagggttttcacgatgaaagcacccaggtgcagctcactctgcttactgccatagtgaagctgtttctcaagaaaccatcagaaacacaggagctagtccagcaggtcttgagtttggcaacacaggattctgataatcctgaccttcgagaccggggctatatttattggcgccttctctcaactgaccctgttacagctaaagaagtagtcttgtctgagaagccactgatctctgaggagacggaccttattgagccaactctgctggatgagctaatctgccacattggttctttggcctctgtgtatcataagcctcccaatgcttttgtggaaggaagtcatggaattcatcgtaaacacttgccaattcatcatgggagcactgatgcaggtgacagccctgttggcactaccactgcaacgaacctggaacagcctcaggttatcccctctcaaggtgatcttctaggggatcttttaaaccttgacctcggtcccccagtcaatgtgccacaggtgtcctccatgcagatgggagcagtggatctcctaggaggaggactagatagtctg

SEQ ID NO: 104920 - DNA, 2285 bp, Homo sapiens
  Payload ID: 595
  Gene Symbol: AP2B1
  Gene Name: adaptor-related protein complex 2, beta 1 subunit
  ENST ID: ENST00000614600
  CDS Start-End: 255-2285
acctgggctgtgctctccggctcccgccgccacccccgccctcgccttcgcctccgcctccggtgagttcagggcggttgcctttagggtgtgtccctaattgacggggtcggggacggagagaagggtaacaccaggctgggtcggagaccggcggaggcgaggaaatcctaagagcgtgaccgttgatgatgcagggaaccgtcgggtgtgaccattgagagggaaaaggtgcacattaaagatccaaagtcatgactgactccaagtatttcacaaccaataaaaaaggagaaatatttgaactaaaagctgaactcaacaatgaaaagaaagaaaagagaaaggaggctgtgaagaaagtgattgctgctatgaccgtggggaaggatgttagttctctctttccagacgtagtgaactgtatgcagactgacaatctggaactaaagaagcttgtgtatctctacttgatgaactacgccaagagtcagccagacatggccatcatggctgtaaacagctttgtgaaggactgtgaagatcctaatcctttgattcgagccttggcagtcagaaccatggggtgcatccgggtagacaaaattacagaatatctctgtgagccgctccgcaagtgcttgaaggatgaggatccctatgttcggaaaacagcagcagtctgcgtggcaaaactccatgatatcaatgcccaaatggtggaagatcagggatttctggattctctacgggatctcatagcagattcaaatccaatggtggtggctaatgccgtagcggcattatctgaaatcagtgagtctcacccaaacagcaacttacttgatctgaacccacagaacattaataagctgctgacagccctgaatgaatgcactgaatggggccagattttcatcctggactgcctgtctaattacaaccctaaagatgatcgggaggctcagagcatctgtgagcgggtaactccccggctatcccatgccaactcagcagtggtgctttcagcggtaaaagtcctaatgaagtttctagaattgttacctaaggattctgactactacaatatgctgctgaagaagttagcccctccacttgtcactttgctgtctggggagccagaagtgcagtatgtcgccctgaggaacatcaacttaattgtccagaaaaggcctgaaatcttgaagcaggaaatcaaagtcttctttgtgaagtacaatgatcccatctatgttaaactagagaagttggacatcatgattcgtttggcatctcaagccaacattgctcaggttctggcagaactgaaagaatatgctacagaggtggatgttgactttgttcgaaaagctgtgcgggccattggacggtgtgccatcaaggtggagcaatctgcagagcgctgtgtaagcacattgcttgatctaatccagaccaaagtgaattatgtggtccaagaagcaattgttgtcatcagggacatcttccgcaaataccccaacaagtatgaaagtatcatcgccactctgtgtgagaacttagactcgctggatgagccagatgctcgagcagctatgatttggattgtgggagaatatgctgaaagaattgacaatgcagatgagttactagaaagcttcctggagggttttcacgatgaaagcacccaggtgcagctcactctgcttactgccatagtgaagctgtttctcaagaaaccatcagaaacacaggagctagtccagcaggtcttgagtttggcaacacaggattctgataatcctgaccttcgagaccggggctatatttattggcgccttctctcaactgaccctgttacagctaaagaagtagtcttgtctgagaagccactgatctctgaggagacggaccttattgagccaactctgctggatgagctaatctgccacattggttctttggcctctgtgtatcataagcctcccaatgcttttgtggaaggaagtcatggaattcatcgtaaacacttgccaattcatcatgggagcactgatgcaggtgacagccctgttggcactaccactgcaacgaacctggaacagcctcaggttatcccctctcaaggtgatcttctaggggatcttttaaaccttgacctcggtcccccagtcaatgtgccacaggtgtcctccatgcagatgggagcagtggatctcctaggaggaggactagatagtctgcttggcagtgaccttggcgggggcattggaggaagtccggca

SEQ ID NO: 104921 - DNA, 3428 bp, Homo sapiens
  Payload ID: 595
  Gene Symbol: AP2B1
  Gene Name: adaptor-related protein complex 2, beta 1 subunit
  ENST ID: ENST00000620039
  CDS Start-End: 139-288
agtggcttagacctagaaaagaatcgtgacgggcaggaaaccattacaccaccacctgggctgtgctctccggctcccgccgccacccccgccctcgccttcgcctccgcctccggtgcacattaaagatccaaagtcatgactgactccaagtatttcacaaccaataaaaaaggagaaatatttgaactaaaagctgaactcaacaatgaaaagaaagaaaagagaaaggaggctgtgaagaaagtgattgctgctatgaccgtggggaaggatgttagcacataaagcacatttggtttttaaattgctgtcctgtgaccatctatctaaggagttggcaaacgtttttgtaaaggacaaaatattctctctttccagacgtagtgaactgtatgcagactgacaatctggaactaaagaagcttgtgtatctctacttgatgaactacgccaagagtcagccagacatggccatcatggctgtaaacagctttgtgaaggactgtgaagatcctaatcctttgattcgagccttggcagtcagaaccatggggtgcatccgggtagacaaaattacagaatatctctgtgagccgctccgcaagtgcttgaaggatgaggatccctatgttcggaaaacagcagcagtctgcgtggcaaaactccatgatatcaatgcccaaatggtggaagatcagggatttctggattctctacgggatctcatagcagattcaaatccaatggtggtggctaatgccgtagcggcattatctgaaatcagtgagtctcacccaaacagcaacttacttgatctgaacccacagaacattaataagctgctgacagccctgaatgaatgcactgaatggggccagattttcatcctggactgcctgtctaattacaaccctaaagatgatcgggaggctcagagcatctgtgagcgggtaactccccggctatcccatgccaactcagcagtggtgctttcagcggtaaaagtcctaatgaagtttctagaattgttacctaaggattctgactactacaatatgctgctgaagaagttagcccctccacttgtcactttgctgtctggggagccagaagtgcagtatgtcgccctgaggaacatcaacttaattgtccagaaaaggcctgaaatcttgaagcaggaaatcaaagtcttctttgtgaagtacaatgatcccatctatgttaaactagagaagttggacatcatgattcgtttggcatctcaagccaacattgctcaggttctggcagaactgaaagaatatgctacagaggtggatgttgactttgttcgaaaagctgtgcgggccattggacggtgtgccatcaaggtggagcaatctgcagagcgctgtgtaagcacattgcttgatctaatccagaccaaagtgaattatgtggtccaagaagcaattgttgtcatcagggacatcttccgcaaataccccaacaagtatgaaagtatcatcgccactctgtgtgagaacttagactcgctggatgagccagatgctcgagcagctatgatttggattgtgggagaatatgctgaaagaattgacaatgcagatgagttactagaaagcttcctggagggttttcacgatgaaagcacccaggtgcagctcactctgcttactgccatagtgaagctgtttctcaagaaaccatcagaaacacaggagctagtccagcaggtcttgagtttggcaacacaggattctgataatcctgaccttcgagaccggggctatatttattggcgccttctctcaactgaccctgttacagctaaagaagtagtcttgtctgagaagccactgatctctgaggagacggaccttattgagccaactctgctggatgagctaatctgccacattggttctttggcctctgtgtatcataagcctcccaatgcttttgtggaaggaagtcatggaattcatcgtaaacacttgccaattcatcatgggagcactgatgcaggtgacagccctgttggcactaccactgcaacgaacctggaacagcctcaggttatcccctctcaaggtgatcttctaggggatcttttaaaccttgacctcggtcccccagtcaatgtgccacaggtgtcctccatgcagatgggagcagtggatctcctaggaggaggactagatagtctggtgggacaatccttcatcccatcatcggtgcctgcaacctttgctccttcacctacacctgctgtggtcagcagtggactgaatgacctgtttgaactctccacagggataggcatggcacctggtggatatgtggctcctaaggctgtctggctacctgcagtaaaggctaaaggcttggagatttccggaacatttactcaccgccaagggcacatctatatggaaatgaacttcaccaataaagctctgcagcacatgacagattttgcaatccagtttaacaaaaatagctttggtgtcatccccagcactcctctggccatccatacaccactgatgccaaaccagagcattgatgtctccctgcctctcaataccttgggcccagtcatgaagatggaacctctgaataacctccaggtggctgtgaaaaacaatatcgatgtcttctacttcagctgcctcatcccactcaatgtgctttttgtagaagatggcaaaatggagcgccaggtcttccttgcaacatggaaggatattcccaatgaaaatgaacttcagtttcagattaaggaatgtcatttaaatgctgacactgtttccagcaagttgcaaaacaacaatgtttatactattgccaagaggaatgtggaagggcaggacatgctgtaccaatccctgaagctcactaatggcatttggattttggccgaactacgtatccagccaggaaaccccaattacacgctgtcactgaagtgtagagctcctgaagtctctcaatacatctatcaggtctacgacagcattttgaaaaactaacaagactggtccagtacccttcaaccatgctgtgatcggtgcaagtcaagaactcttaactggaagaaattgtattgctgcgtagaatctgaacacactgaggccacctagcaaggtagtaactagtctaacctgtgctaacattagggcacaacctgttggatagttttagcttcctgtgaacatttgtaaccactgcttcagtcacctcccacctcttgccacctgctgctgctatctgtccttacttgtgggcttctccatgctgtgccaatggctggctttttctacaccctcttttgagtgtagtttggtattttgtaattgagagctcatttcaaaagcagaaaaagacaacaaatattaaagcaaggaaaagtgtaactgaaa

SEQ ID NO: 104922 - DNA, 2055 bp, Homo sapiens
  Payload ID: 595
  Gene Symbol: AP2B1
  Gene Name: adaptor-related protein complex 2, beta 1 subunit
  ENST ID: ENST00000621668
  CDS Start-End: 139-2055
agtggcttagacctagaaaagaatcgtgacgggcaggaaaccattacaccaccacctgggctgtgctctccggctcccgccgccacccccgccctcgccttcgcctccgcctccggtgcacattaaagatccaaagtcatgactgactccaagtatttcacaaccaataaaaaaggagaaatatttgaactaaaagctgaactcaacaatgaaaagaaagaaaagagaaaggaggctgtgaagaaagtgattgctgctatgaccgtggggaaggatgttagttctctctttccagacgtagtgaactgtatgcagactgacaatctggaactaaagaagcttgtgtatctctacttgatgaactacgccaagagtcagccagacatggccatcatggctgtaaacagctttgtgaaggatgaggatccctatgttcggaaaacagcagcagtctgcgtggcaaaactccatgatatcaatgcccaaatggtggaagatcagggatttctggattctctacgggatctcatagcagattcaaatccaatggtggtggctaatgccgtagcggcattatctgaaatcagtgagtctcacccaaacagcaacttacttgatctgaacccacagaacattaataagctgctgacagccctgaatgaatgcactgaatggggccagattttcatcctggactgcctgtctaattacaaccctaaagatgatcgggaggctcagagcatctgtgagcgggtaactccccggctatcccatgccaactcagcagtggtgctttcagcggtaaaagtcctaatgaagtttctagaattgttacctaaggattctgactactacaatatgctgctgaagaagttagcccctccacttgtcactttgctgtctggggagccagaagtgcagtatgtcgccctgaggaacatcaacttaattgtccagaaaaggcctgaaatcttgaagcaggaaatcaaagtcttctttgtgaagtacaatgatcccatctatgttaaactagagaagttggacatcatgattcgtttggcatctcaagccaacattgctcaggttctggcagaactgaaagaatatgctacagaggtggatgttgactttgttcgaaaagctgtgcgggccattggacggtgtgccatcaaggtggagcaatctgcagagcgctgtgtaagcacattgcttgatctaatccagaccaaagtgaattatgtggtccaagaagcaattgttgtcatcagggacatcttccgcaaataccccaacaagtatgaaagtatcatcgccactctgtgtgagaacttagactcgctggatgagccagatgctcgagcagctatgatttggattgtgggagaatatgctgaaagaattgacaatgcagatgagttactagaaagcttcctggagggttttcacgatgaaagcacccaggtgcagctcactctgcttactgccatagtgaagctgtttctcaagaaaccatcagaaacacaggagctagtccagcaggtcttgagtttggcaacacaggattctgataatcctgaccttcgagaccggggctatatttattggcgccttctctcaactgaccctgttacagctaaagaagtagtcttgtctgagaagccactgatctctgaggagacggaccttattgagccaactctgctggatgagctaatctgccacattggttctttggcctctgtgtatcataagcctcccaatgcttttgtggaaggaagtcatggaattcatcgtaaacacttgccaattcatcatgggagcactgatgcaggtgacagccctgttggcactaccactgcaacgaacctggaacagcctcaggttatcccctctcaaggtgatcttctaggggatcttttaaaccttgacctcggtcccccagtcaatgtgccacaggtgtcctccatgcagatgggagcagtggatctcctaggaggaggactagatagtctgcttggcagtgaccttggcgggggcattggaggaagtccggca

SEQ ID NO: 104923 - DNA, 5702 bp, Homo sapiens
  Payload ID: 595
  Gene Symbol: AP2B1
  Gene Name: adaptor-related protein complex 2, beta 1 subunit
  Uniprot ID: P63010
  ENST ID: ENST00000621914
  CDS Start-End: 179-2992
ctgcccaccatctttgtccctggcaaagtgggttttgcgcagtggcttagacctagaaaagaatcgtgacgggcaggaaaccattacaccaccacctgggctgtgctctccggctcccgccgccacccccgccctcgccttcgcctccgcctccggtgcacattaaagatccaaagtcatgactgactccaagtatttcacaaccaataaaaaaggagaaatatttgaactaaaagctgaactcaacaatgaaaagaaagaaaagagaaaggaggctgtgaagaaagtgattgctgctatgaccgtggggaaggatgttagttctctctttccagacgtagtgaactgtatgcagactgacaatctggaactaaagaagcttgtgtatctctacttgatgaactacgccaagagtcagccagacatggccatcatggctgtaaacagctttgtgaaggactgtgaagatcctaatcctttgattcgagccttggcagtcagaaccatggggtgcatccgggtagacaaaattacagaatatctctgtgagccgctccgcaagtgcttgaaggatgaggatccctatgttcggaaaacagcagcagtctgcgtggcaaaactccatgatatcaatgcccaaatggtggaagatcagggatttctggattctctacgggatctcatagcagattcaaatccaatggtggtggctaatgccgtagcggcattatctgaaatcagtgagtctcacccaaacagcaacttacttgatctgaacccacagaacattaataagctgctgacagccctgaatgaatgcactgaatggggccagattttcatcctggactgcctgtctaattacaaccctaaagatgatcgggaggctcagagcatctgtgagcgggtaactccccggctatcccatgccaactcagcagtggtgctttcagcggtaaaagtcctaatgaagtttctagaattgttacctaaggattctgactactacaatatgctgctgaagaagttagcccctccacttgtcactttgctgtctggggagccagaagtgcagtatgtcgccctgaggaacatcaacttaattgtccagaaaaggcctgaaatcttgaagcaggaaatcaaagtcttctttgtgaagtacaatgatcccatctatgttaaactagagaagttggacatcatgattcgtttggcatctcaagccaacattgctcaggttctggcagaactgaaagaatatgctacagaggtggatgttgactttgttcgaaaagctgtgcgggccattggacggtgtgccatcaaggtggagcaatctgcagagcgctgtgtaagcacattgcttgatctaatccagaccaaagtgaattatgtggtccaagaagcaattgttgtcatcagggacatcttccgcaaataccccaacaagtatgaaagtatcatcgccactctgtgtgagaacttagactcgctggatgagccagatgctcgagcagctatgatttggattgtgggagaatatgctgaaagaattgacaatgcagatgagttactagaaagcttcctggagggttttcacgatgaaagcacccaggtgcagctcactctgcttactgccatagtgaagctgtttctcaagaaaccatcagaaacacaggagctagtccagcaggtcttgagtttggcaacacaggattctgataatcctgaccttcgagaccggggctatatttattggcgccttctctcaactgaccctgttacagctaaagaagtagtcttgtctgagaagccactgatctctgaggagacggaccttattgagccaactctgctggatgagctaatctgccacattggttctttggcctctgtgtatcataagcctcccaatgcttttgtggaaggaagtcatggaattcatcgtaaacacttgccaattcatcatgggagcactgatgcaggtgacagccctgttggcactaccactgcaacgaacctggaacagcctcaggttatcccctctcaaggtgatcttctaggggatcttttaaaccttgacctcggtcccccagtcaatgtgccacaggtgtcctccatgcagatgggagcagtggatctcctaggaggaggactagatagtctggtgggacaatccttcatcccatcatcggtgcctgcaacctttgctccttcacctacacctgctgtggtcagcagtggactgaatgacctgtttgaactctccacagggataggcatggcacctggtggatatgtggctcctaaggctgtctggctacctgcagtaaaggctaaaggcttggagatttccggaacatttactcaccgccaagggcacatctatatggaaatgaacttcaccaataaagctctgcagcacatgacagattttgcaatccagtttaacaaaaatagctttggtgtcatccccagcactcctctggccatccatacaccactgatgccaaaccagagcattgatgtctccctgcctctcaataccttgggcccagtcatgaagatggaacctctgaataacctccaggtggctgtgaaaaacaatatcgatgtcttctacttcagctgcctcatcccactcaatgtgctttttgtagaagatggcaaaatggagcgccaggtcttccttgcaacatggaaggatattcccaatgaaaatgaacttcagtttcagattaaggaatgtcatttaaatgctgacactgtttccagcaagttgcaaaacaacaatgtttatactattgccaagaggaatgtggaagggcaggacatgctgtaccaatccctgaagctcactaatggcatttggattttggccgaactacgtatccagccaggaaaccccaattacacgctgtcactgaagtgtagagctcctgaagtctctcaatacatctatcaggtctacgacagcattttgaaaaactaacaagactggtccagtacccttcaaccatgctgtgatcggtgcaagtcaagaactcttaactggaagaaattgtattgctgcgtagaatctgaacacactgaggccacctagcaaggtagtaactagtctaacctgtgctaacattagggcacaacctgttggatagttttagcttcctgtgaacatttgtaaccactgcttcagtcacctcccacctcttgccacctgctgctgctatctgtccttacttgtgggcttctccatgctgtgccaatggctggctttttctacaccctcttttgagtgtagtttggtattttgtaattgagagctcatttcaaaagcagaaaaagacaacaaatattaaagcaaggaaaagtgtaactgaaacactgcactttactgttttatacttttgtacatatgagaaatcaagggattagtgcaaccagtagaaagcattgaaatgactgtcattaaccacacagtcctggaggcagagatgcagttacctaccctagcttttgatgggttctcttacctgtagtagccttatccctggtcatttggattttcagtttgcttttttctttttttcccctccaaactccttttccttggccaagccttcatgcttccccctttccatattataatctcatttgattgctctgcagttgggaacggtgatcttcttgaatgatgtttcagtgtgcaaaaactatagagcctgtcagcaccaaagctgacagaagttataccttactcctttcctttcccctgaacaaacctgctaatcccactaattcaggaatttgagtagagatggggaacaagaacccagatgctgtcccctcaccccctctcctgtatttctcaggtccagttcaaatctaaaattctacttttagagttgaaacagagtaataacttatctaaccctcttttcctacaaaggagaaagataaaaggcacaaaggttaccgccaaggcccgtcagctgtgtagtggcaaagccgagaccgagtctcctaagtccccgtcagtgtggttttcaccacaggactgtctcttgtcgttttcccctaatgccttctcctgccttttctgtgcctagtttttggctcttcacatattccatattgattttgacgctctgtatattggcatcaggtggcagctgaatatcttttgaattactcgaaggtaaagccagatgccagaatgaaggtgtagccagtgtttcccatatgcccctggagccccacttattgaggccagcagaataggtgcagagatgaagtgagcttagagatgttgcaaatgctctttatcccttcagctctctgatctgctctttcttcatgatacttagtctgcagggcatattaagatcatcccagaggttcaggcagttcctgtcatctctgaaaagactgggggatatgaaatcttccccctaccccacttaatgcgttggatatgatttttcaaagaatgcttcatgcccaaaataccagcctgtttagcagtgttacactgtttgatctgcgggcacttgttgcattgcctggcacccaatattcagggtccatgactaagactggtcttctcagatgccctgcttaaatcaggggcacttcaggctccacaggcgtcatgttggactgagacctaactcactggactcagaggaggaatcgtggaaaacaagagcaaaactaccccacacccctatttcatgtctgaaataaccctgtttcataccagttgcaaagcttgtggggagcggtcccacaaagcactttcttaaaccttgagaatctccaagagaaaaatatttggggaaggagggaggaaatatgtcccttgcacaccacccctgaagcacatggcagtaggaaacagcataggattgtatgtgggaggtggataggtcggtgatgtgtggagcggaaaagcaggttggtaaagttcccttcttgggacttattcctggagtcagtggatacaagtagtgcagaaggttcacactgcaaatagtgttctcatctcaaagcaaactatcattccagaaggaaaagtgtgtcagggcaagcagacaacacaatttcctatcagaatatgtccctcaacccccgaaacaaggcttctctcagcctccccaccagtgatggataacagctcctattctcagctgacctgactgagccaacccatgaactcttcactccttggggaagccacctcccatcacacccctgagcagagttagggaggaattctacttcccataaaaggacctctcctgagaggcaaaacctgttgcctccaccacggcttccctcttggctcattccaagcttggccaaattggggaagtgggatggaggttgccctgcatcccccctcctctgcctgagtgtgtctttgtaatgtcagctggcatcatacaaagagcaggagaagcaaacacccagaactcttttgctggtcagagattccctgagtgtctgtcctcacccaagcctgctctgtgtctgtgttgtgaagcttgagactctggaaagaaatggggagggggggcaggggaaatgttgccctaagaatgcttctcattcctctgttcttattgggtcctgtttttcgggagggtgggggttgggggaagcttgaccttgtgtcttcgtcaataaactcacatttacac

SEQ ID NO: 104924 - DNA, 2161 bp, Homo sapiens
  Payload ID: 595
  Gene Symbol: AP2B1
  Gene Name: adaptor-related protein complex 2, beta 1 subunit
  ENST ID: ENST00000612035
  CDS Start-End: 131-2161
agacctagaaaagaatcgtgacgggcaggaaaccattacaccaccacctgggctgtgctctccggctcccgccgccacccccgccctcgccttcgcctccgcctccggtgcacattaaagatccaaagtcatgactgactccaagtatttcacaaccaataaaaaaggagaaatatttgaactaaaagctgaactcaacaatgaaaagaaagaaaagagaaaggaggctgtgaagaaagtgattgctgctatgaccgtggggaaggatgttagttctctctttccagacgtagtgaactgtatgcagactgacaatctggaactaaagaagcttgtgtatctctacttgatgaactacgccaagagtcagccagacatggccatcatggctgtaaacagctttgtgaaggactgtgaagatcctaatcctttgattcgagccttggcagtcagaaccatggggtgcatccgggtagacaaaattacagaatatctctgtgagccgctccgcaagtgcttgaaggatgaggatccctatgttcggaaaacagcagcagtctgcgtggcaaaactccatgatatcaatgcccaaatggtggaagatcagggatttctggattctctacgggatctcatagcagattcaaatccaatggtggtggctaatgccgtagcggcattatctgaaatcagtgagtctcacccaaacagcaacttacttgatctgaacccacagaacattaataagctgctgacagccctgaatgaatgcactgaatggggccagattttcatcctggactgcctgtctaattacaaccctaaagatgatcgggaggctcagagcatctgtgagcgggtaactccccggctatcccatgccaactcagcagtggtgctttcagcggtaaaagtcctaatgaagtttctagaattgttacctaaggattctgactactacaatatgctgctgaagaagttagcccctccacttgtcactttgctgtctggggagccagaagtgcagtatgtcgccctgaggaacatcaacttaattgtccagaaaaggcctgaaatcttgaagcaggaaatcaaagtcttctttgtgaagtacaatgatcccatctatgttaaactagagaagttggacatcatgattcgtttggcatctcaagccaacattgctcaggttctggcagaactgaaagaatatgctacagaggtggatgttgactttgttcgaaaagctgtgcgggccattggacggtgtgccatcaaggtggagcaatctgcagagcgctgtgtaagcacattgcttgatctaatccagaccaaagtgaattatgtggtccaagaagcaattgttgtcatcagggacatcttccgcaaataccccaacaagtatgaaagtatcatcgccactctgtgtgagaacttagactcgctggatgagccagatgctcgagcagctatgatttggattgtgggagaatatgctgaaagaattgacaatgcagatgagttactagaaagcttcctggagggttttcacgatgaaagcacccaggtgcagctcactctgcttactgccatagtgaagctgtttctcaagaaaccatcagaaacacaggagctagtccagcaggtcttgagtttggcaacacaggattctgataatcctgaccttcgagaccggggctatatttattggcgccttctctcaactgaccctgttacagctaaagaagtagtcttgtctgagaagccactgatctctgaggagacggaccttattgagccaactctgctggatgagctaatctgccacattggttctttggcctctgtgtatcataagcctcccaatgcttttgtggaaggaagtcatggaattcatcgtaaacacttgccaattcatcatgggagcactgatgcaggtgacagccctgttggcactaccactgcaacgaacctggaacagcctcaggttatcccctctcaaggtgatcttctaggggatcttttaaaccttgacctcggtcccccagtcaatgtgccacaggtgtcctccatgcagatgggagcagtggatctcctaggaggaggactagatagtctgcttggcagtgaccttggcgggggcattggaggaagtccggca

SEQ ID NO: 104925 - DNA, 3415 bp, Homo sapiens
  Payload ID: 595
  Gene Symbol: AP2B1
  Gene Name: adaptor-related protein complex 2, beta 1 subunit
  Uniprot ID: P63010
  ENST ID: ENST00000618940
  CDS Start-End: 173-3028
gaccggcggaggcgaggaaatcctaagagcgtgaccgttgatgatgcagggaaccgtcgggtgtgaccattgagagggaaaaggttggagaaagggtctctaccatgatgcctgtggtgcggtgagggaatcctcgggtgtggcagcaggtgcacattaaagatccaaagtcatgactgactccaagtatttcacaaccaataaaaaaggagaaatatttgaactaaaagctgaactcaacaatgaaaagaaagaaaagagaaaggaggctgtgaagaaagtgattgctgctatgaccgtggggaaggatgttagttctctctttccagacgtagtgaactgtatgcagactgacaatctggaactaaagaagcttgtgtatctctacttgatgaactacgccaagagtcagccagacatggccatcatggctgtaaacagctttgtgaaggactgtgaagatcctaatcctttgattcgagccttggcagtcagaaccatggggtgcatccgggtagacaaaattacagaatatctctgtgagccgctccgcaagtgcttgaaggatgaggatccctatgttcggaaaacagcagcagtctgcgtggcaaaactccatgatatcaatgcccaaatggtggaagatcagggatttctggattctctacgggatctcatagcagattcaaatccaatggtggtggctaatgccgtagcggcattatctgaaatcagtgagtctcacccaaacagcaacttacttgatctgaacccacagaacattaataagctgctgacagccctgaatgaatgcactgaatggggccagattttcatcctggactgcctgtctaattacaaccctaaagatgatcgggaggctcagagcatctgtgagcgggtaactccccggctatcccatgccaactcagcagtggtgctttcagcggtaaaagtcctaatgaagtttctagaattgttacctaaggattctgactactacaatatgctgctgaagaagttagcccctccacttgtcactttgctgtctggggagccagaagtgcagtatgtcgccctgaggaacatcaacttaattgtccagaaaaggcctgaaatcttgaagcaggaaatcaaagtcttctttgtgaagtacaatgatcccatctatgttaaactagagaagttggacatcatgattcgtttggcatctcaagccaacattgctcaggttctggcagaactgaaagaatatgctacagaggtggatgttgactttgttcgaaaagctgtgcgggccattggacggtgtgccatcaaggtggagcaatctgcagagcgctgtgtaagcacattgcttgatctaatccagaccaaagtgaattatgtggtccaagaagcaattgttgtcatcagggacatcttccgcaaataccccaacaagtatgaaagtatcatcgccactctgtgtgagaacttagactcgctggatgagccagatgctcgagcagctatgatttggattgtgggagaatatgctgaaagaattgacaatgcagatgagttactagaaagcttcctggagggttttcacgatgaaagcacccaggtgcagctcactctgcttactgccatagtgaagctgtttctcaagaaaccatcagaaacacaggagctagtccagcaggtcttgagtttggcaacacaggattctgataatcctgaccttcgagaccggggctatatttattggcgccttctctcaactgaccctgttacagctaaagaagtagtcttgtctgagaagccactgatctctgaggagacggaccttattgagccaactctgctggatgagctaatctgccacattggttctttggcctctgtgtatcataagcctcccaatgcttttgtggaaggaagtcatggaattcatcgtaaacacttgccaattcatcatgggagcactgatgcaggtgacagccctgttggcactaccactgcaacgaacctggaacagcctcaggttatcccctctcaaggtgatcttctaggggatcttttaaaccttgacctcggtcccccagtcaatgtgccacaggtgtcctccatgcagatgggagcagtggatctcctaggaggaggactagatagtctgcttggcagtgaccttggcgggggcattggaggaagtccggcagtgggacaatccttcatcccatcatcggtgcctgcaacctttgctccttcacctacacctgctgtggtcagcagtggactgaatgacctgtttgaactctccacagggataggcatggcacctggtggatatgtggctcctaaggctgtctggctacctgcagtaaaggctaaaggcttggagatttccggaacatttactcaccgccaagggcacatctatatggaaatgaacttcaccaataaagctctgcagcacatgacagattttgcaatccagtttaacaaaaatagctttggtgtcatccccagcactcctctggccatccatacaccactgatgccaaaccagagcattgatgtctccctgcctctcaataccttgggcccagtcatgaagatggaacctctgaataacctccaggtggctgtgaaaaacaatatcgatgtcttctacttcagctgcctcatcccactcaatgtgctttttgtagaagatggcaaaatggagcgccaggtcttccttgcaacatggaaggatattcccaatgaaaatgaacttcagtttcagattaaggaatgtcatttaaatgctgacactgtttccagcaagttgcaaaacaacaatgtttatactattgccaagaggaatgtggaagggcaggacatgctgtaccaatccctgaagctcactaatggcatttggattttggccgaactacgtatccagccaggaaaccccaattacacgctgtcactgaagtgtagagctcctgaagtctctcaatacatctatcaggtctacgacagcattttgaaaaactaacaagactggtccagtacccttcaaccatgctgtgatcggtgcaagtcaagaactcttaactggaagaaattgtattgctgcgtagaatctgaacacactgaggccacctagcaaggtagtaactagtctaacctgtgctaacattagggcacaacctgttggatagttttagcttcctgtgaacatttgtaaccactgcttcagtcacctcccacctcttgccacctgctgctgctatctgtccttacttgtgggcttctccatgctgtgccaatggctggctttttctacaccctcttttgagtgtagtttggtattttgtaattgagagctcatttcaaaagcagaaaaagacaacaaatattaaagcaaggaaaagtgtaactg

SEQ ID NO: 104926 - DNA, 3204 bp, Homo sapiens
  Payload ID: 595
  Gene Symbol: AP2B1
  Gene Name: adaptor-related protein complex 2, beta 1 subunit
  Uniprot ID: P63010
  ENST ID: ENST00000610402
  CDS Start-End: 131-2986
agacctagaaaagaatcgtgacgggcaggaaaccattacaccaccacctgggctgtgctctccggctcccgccgccacccccgccctcgccttcgcctccgcctccggtgcacattaaagatccaaagtcatgactgactccaagtatttcacaaccaataaaaaaggagaaatatttgaactaaaagctgaactcaacaatgaaaagaaagaaaagagaaaggaggctgtgaagaaagtgattgctgctatgaccgtggggaaggatgttagttctctctttccagacgtagtgaactgtatgcagactgacaatctggaactaaagaagcttgtgtatctctacttgatgaactacgccaagagtcagccagacatggccatcatggctgtaaacagctttgtgaaggactgtgaagatcctaatcctttgattcgagccttggcagtcagaaccatggggtgcatccgggtagacaaaattacagaatatctctgtgagccgctccgcaagtgcttgaaggatgaggatccctatgttcggaaaacagcagcagtctgcgtggcaaaactccatgatatcaatgcccaaatggtggaagatcagggatttctggattctctacgggatctcatagcagattcaaatccaatggtggtggctaatgccgtagcggcattatctgaaatcagtgagtctcacccaaacagcaacttacttgatctgaacccacagaacattaataagctgctgacagccctgaatgaatgcactgaatggggccagattttcatcctggactgcctgtctaattacaaccctaaagatgatcgggaggctcagagcatctgtgagcgggtaactccccggctatcccatgccaactcagcagtggtgctttcagcggtaaaagtcctaatgaagtttctagaattgttacctaaggattctgactactacaatatgctgctgaagaagttagcccctccacttgtcactttgctgtctggggagccagaagtgcagtatgtcgccctgaggaacatcaacttaattgtccagaaaaggcctgaaatcttgaagcaggaaatcaaagtcttctttgtgaagtacaatgatcccatctatgttaaactagagaagttggacatcatgattcgtttggcatctcaagccaacattgctcaggttctggcagaactgaaagaatatgctacagaggtggatgttgactttgttcgaaaagctgtgcgggccattggacggtgtgccatcaaggtggagcaatctgcagagcgctgtgtaagcacattgcttgatctaatccagaccaaagtgaattatgtggtccaagaagcaattgttgtcatcagggacatcttccgcaaataccccaacaagtatgaaagtatcatcgccactctgtgtgagaacttagactcgctggatgagccagatgctcgagcagctatgatttggattgtgggagaatatgctgaaagaattgacaatgcagatgagttactagaaagcttcctggagggttttcacgatgaaagcacccaggtgcagctcactctgcttactgccatagtgaagctgtttctcaagaaaccatcagaaacacaggagctagtccagcaggtcttgagtttggcaacacaggattctgataatcctgaccttcgagaccggggctatatttattggcgccttctctcaactgaccctgttacagctaaagaagtagtcttgtctgagaagccactgatctctgaggagacggaccttattgagccaactctgctggatgagctaatctgccacattggttctttggcctctgtgtatcataagcctcccaatgcttttgtggaaggaagtcatggaattcatcgtaaacacttgccaattcatcatgggagcactgatgcaggtgacagccctgttggcactaccactgcaacgaacctggaacagcctcaggttatcccctctcaaggtgatcttctaggggatcttttaaaccttgacctcggtcccccagtcaatgtgccacaggtgtcctccatgcagatgggagcagtggatctcctaggaggaggactagatagtctgcttggcagtgaccttggcgggggcattggaggaagtccggcagtgggacaatccttcatcccatcatcggtgcctgcaacctttgctccttcacctacacctgctgtggtcagcagtggactgaatgacctgtttgaactctccacagggataggcatggcacctggtggatatgtggctcctaaggctgtctggctacctgcagtaaaggctaaaggcttggagatttccggaacatttactcaccgccaagggcacatctatatggaaatgaacttcaccaataaagctctgcagcacatgacagattttgcaatccagtttaacaaaaatagctttggtgtcatccccagcactcctctggccatccatacaccactgatgccaaaccagagcattgatgtctccctgcctctcaataccttgggcccagtcatgaagatggaacctctgaataacctccaggtggctgtgaaaaacaatatcgatgtcttctacttcagctgcctcatcccactcaatgtgctttttgtagaagatggcaaaatggagcgccaggtcttccttgcaacatggaaggatattcccaatgaaaatgaacttcagtttcagattaaggaatgtcatttaaatgctgacactgtttccagcaagttgcaaaacaacaatgtttatactattgccaagaggaatgtggaagggcaggacatgctgtaccaatccctgaagctcactaatggcatttggattttggccgaactacgtatccagccaggaaaccccaattacacgctgtcactgaagtgtagagctcctgaagtctctcaatacatctatcaggtctacgacagcattttgaaaaactaacaagactggtccagtacccttcaaccatgctgtgatcggtgcaagtcaagaactcttaactggaagaaattgtattgctgcgtagaatctgaacacactgaggccacctagcaaggtagtaactagtctaacctgtgctaacattagggcacaacctgttggatagttttagcttcctgtgaacatttgtaaccactgcttcagtcacctcccacctc

SEQ ID NO: 104927 - DNA, 3267 bp, Homo sapiens
  Payload ID: 595
  Gene Symbol: AP2B1
  Gene Name: adaptor-related protein complex 2, beta 1 subunit
  ENST ID: ENST00000616681
  CDS Start-End: 139-2880
agtggcttagacctagaaaagaatcgtgacgggcaggaaaccattacaccaccacctgggctgtgctctccggctcccgccgccacccccgccctcgccttcgcctccgcctccggtgcacattaaagatccaaagtcatgactgactccaagtatttcacaaccaataaaaaaggagaaatatttgaactaaaagctgaactcaacaatgaaaagaaagaaaagagaaaggaggctgtgaagaaagtgattgctgctatgaccgtggggaaggatgttagttctctctttccagacgtagtgaactgtatgcagactgacaatctggaactaaagaagcttgtgtatctctacttgatgaactacgccaagagtcagccagacatggccatcatggctgtaaacagctttgtgaaggatgaggatccctatgttcggaaaacagcagcagtctgcgtggcaaaactccatgatatcaatgcccaaatggtggaagatcagggatttctggattctctacgggatctcatagcagattcaaatccaatggtggtggctaatgccgtagcggcattatctgaaatcagtgagtctcacccaaacagcaacttacttgatctgaacccacagaacattaataagctgctgacagccctgaatgaatgcactgaatggggccagattttcatcctggactgcctgtctaattacaaccctaaagatgatcgggaggctcagagcatctgtgagcgggtaactccccggctatcccatgccaactcagcagtggtgctttcagcggtaaaagtcctaatgaagtttctagaattgttacctaaggattctgactactacaatatgctgctgaagaagttagcccctccacttgtcactttgctgtctggggagccagaagtgcagtatgtcgccctgaggaacatcaacttaattgtccagaaaaggcctgaaatcttgaagcaggaaatcaaagtcttctttgtgaagtacaatgatcccatctatgttaaactagagaagttggacatcatgattcgtttggcatctcaagccaacattgctcaggttctggcagaactgaaagaatatgctacagaggtggatgttgactttgttcgaaaagctgtgcgggccattggacggtgtgccatcaaggtggagcaatctgcagagcgctgtgtaagcacattgcttgatctaatccagaccaaagtgaattatgtggtccaagaagcaattgttgtcatcagggacatcttccgcaaataccccaacaagtatgaaagtatcatcgccactctgtgtgagaacttagactcgctggatgagccagatgctcgagcagctatgatttggattgtgggagaatatgctgaaagaattgacaatgcagatgagttactagaaagcttcctggagggttttcacgatgaaagcacccaggtgcagctcactctgcttactgccatagtgaagctgtttctcaagaaaccatcagaaacacaggagctagtccagcaggtcttgagtttggcaacacaggattctgataatcctgaccttcgagaccggggctatatttattggcgccttctctcaactgaccctgttacagctaaagaagtagtcttgtctgagaagccactgatctctgaggagacggaccttattgagccaactctgctggatgagctaatctgccacattggttctttggcctctgtgtatcataagcctcccaatgcttttgtggaaggaagtcatggaattcatcgtaaacacttgccaattcatcatgggagcactgatgcaggtgacagccctgttggcactaccactgcaacgaacctggaacagcctcaggttatcccctctcaaggtgatcttctaggggatcttttaaaccttgacctcggtcccccagtcaatgtgccacaggtgtcctccatgcagatgggagcagtggatctcctaggaggaggactagatagtctgcttggcagtgaccttggcgggggcattggaggaagtccggcagtgggacaatccttcatcccatcatcggtgcctgcaacctttgctccttcacctacacctgctgtggtcagcagtggactgaatgacctgtttgaactctccacagggataggcatggcacctggtggatatgtggctcctaaggctgtctggctacctgcagtaaaggctaaaggcttggagatttccggaacatttactcaccgccaagggcacatctatatggaaatgaacttcaccaataaagctctgcagcacatgacagattttgcaatccagtttaacaaaaatagctttggtgtcatccccagcactcctctggccatccatacaccactgatgccaaaccagagcattgatgtctccctgcctctcaataccttgggcccagtcatgaagatggaacctctgaataacctccaggtggctgtgaaaaacaatatcgatgtcttctacttcagctgcctcatcccactcaatgtgctttttgtagaagatggcaaaatggagcgccaggtcttccttgcaacatggaaggatattcccaatgaaaatgaacttcagtttcagattaaggaatgtcatttaaatgctgacactgtttccagcaagttgcaaaacaacaatgtttatactattgccaagaggaatgtggaagggcaggacatgctgtaccaatccctgaagctcactaatggcatttggattttggccgaactacgtatccagccaggaaaccccaattacacgctgtcactgaagtgtagagctcctgaagtctctcaatacatctatcaggtctacgacagcattttgaaaaactaacaagactggtccagtacccttcaaccatgctgtgatcggtgcaagtcaagaactcttaactggaagaaattgtattgctgcgtagaatctgaacacactgaggccacctagcaaggtagtaactagtctaacctgtgctaacattagggcacaacctgttggatagttttagcttcctgtgaacatttgtaaccactgcttcagtcacctcccacctcttgccacctgctgctgctatctgtccttacttgtgggcttctccatgctgtgccaatggctggctttttctacaccctcttttgagtgtagtttggtattttgtaattgagagctcatttcaaaagcagaaaaagacaacaaatattaaagcaaggaaaagtgtaactg

SEQ ID NO: 104928 - DNA, 192 bp, Homo sapiens
  Payload ID: 595
  Gene Symbol: AP2B1
  Gene Name: adaptor-related protein complex 2, beta 1 subunit
  ENST ID: ENST00000628168
  CDS Start-End: 1-192
atgactgactccaagtatttcacaaccaataaaaaaggagaaatatttgaactaaaagctgaactcaacaatgaaaagaaagaaaagagaaaggaggctgtgaagaaagtgattgctgctatgaccgtggggaaggatgttaggtgctgctcttctgaggtgaatttttgttatttttcttttgtttgttag

SEQ ID NO: 104929 - DNA, 1931 bp, Homo sapiens
  Payload ID: 596
  Gene Symbol: AP2M1
  Gene Name: adaptor-related protein complex 2, mu 1 subunit
  Uniprot ID: Q96CW1
  ENST ID: ENST00000292807
  CDS Start-End: 149-1456
actgcggtgaaagccgaggcagcgggcagacgagcagggggcgggcggacatcttgggatccggagagtggccgggccggcagagcagggggccgaggacaccaggtctgttctcagagcgatgggccgcggagactgatctgccgccatgattggaggcttattcatctataatcacaagggggaggtgctcatctcccgagtctaccgagatgacatcgggaggaacgcagtggatgcctttcgggtcaatgttatccatgcccggcagcaggtgcgcagccccgtcaccaacattgctcgcaccagcttcttccacgttaagcggtccaacatttggctggcagcagtcaccaagcagaatgtcaacgctgccatggtcttcgaattcctctataagatgtgtgacgtgatggctgcctactttggcaagatcagcgaggaaaacatcaagaacaattttgtgctcatatatgagctgctggatgagattctagactttggctacccacagaattccgagacaggcgcgctgaaaaccttcatcacgcagcagggcatcaagagtcagcatcagacaaaagaagagcagtcacagatcaccagccaggtaactgggcagattggctggcggcgagagggtatcaagtatcgtcggaatgagctcttcctggatgtgctggagagtgtgaacctgctcatgtccccacaagggcaggtgctgagtgcccatgtgtcgggccgggtggtgatgaagagctacctgagtggcatgcctgaatgcaagtttgggatgaatgacaagattgttattgaaaagcagggcaaaggcacagctgatgaaacaagcaagagcgggaagcaatcaattgccattgatgactgcaccttccaccagtgtgtgcgactcagcaagtttgactctgaacgcagcatcagctttatcccgccagatggagagtttgagcttatgaggtatcgcacaaccaaggacatcatccttcccttccgggtgatcccgctagtgcgagaagtgggacgcaccaaactggaggtcaaggtggtcatcaagtccaactttaaaccctcactgctggctcagaagatcgaggtgaggatcccaaccccactgaacacaagcggggtgcaggtgatctgcatgaaggggaaggccaagtacaaggccagcgagaatgccatcgtgtggaagatcaagcgcatggcaggcatgaaggaatcgcagatcagcgcagagattgagcttctgcctaccaacgacaagaagaaatgggctcgaccccccatttccatgaactttgaggtgccattcgcgccctctggcctcaaggtgcgctacttgaaggtgtttgaaccgaagctgaactacagcgaccatgatgtcatcaaatgggtgcgctacattggccgcagtggcatttatgaaactcgctgctagctgccactaggcagctagcccacctccccagccaccctcctccacaggtccaggtgccgctccctcccccaccacacatcagtgtctcctccctcctgctttgctgccttccctttgcaccagcccgagtctaggtctgggccaagcacattacaagtgggaccggtggagcagcccctgggctccctgggcaggggagttctgaggctcctgctctcccatccacctgtctgtcctggcctaatgccaggctctgagttctgtgaccaaagccaggtgggttccctttccttcccacccctgtggccacagctctggagtgggagggttggttgcccctcacctcagagctcccccaaaggccagtaatggatccccggcctcagtccctactctgctttgggatagtgtgagcttcattttgtacacgtgtgacttcgtccagttacaaacccaataaactctgtagagtgga

SEQ ID NO: 104930 - DNA, 2091 bp, Homo sapiens
  Payload ID: 596
  Gene Symbol: AP2M1
  Gene Name: adaptor-related protein complex 2, mu 1 subunit
  Uniprot ID: Q96CW1
  ENST ID: ENST00000382456
  CDS Start-End: 315-1616
cttcctgaggcgggggcggtttctcgaaggcagtcggtagttgtagttttgctaaacctagagcgcttcaaattgcaagcaaggaggccgcgaggcctgacgggatttgtagtcggcgctagacgccggcgcgcacgcgcagccggggccggggcggggcggcggcactgcggtgaaagccgaggcagcgggcagacgagcagggggcgggcggacatcttgggatccggagagtggccgggccggcagagcagggggccgaggacaccaggtctgttctcagagcgatgggccgcggagactgatctgccgccatgattggaggcttattcatctataatcacaagggggaggtgctcatctcccgagtctaccgagatgacatcgggaggaacgcagtggatgcctttcgggtcaatgttatccatgcccggcagcaggtgcgcagccccgtcaccaacattgctcgcaccagcttcttccacgttaagcggtccaacatttggctggcagcagtcaccaagcagaatgtcaacgctgccatggtcttcgaattcctctataagatgtgtgacgtgatggctgcctactttggcaagatcagcgaggaaaacatcaagaacaattttgtgctcatatatgagctgctggatgagattctagactttggctacccacagaattccgagacaggcgcgctgaaaaccttcatcacgcagcagggcatcaagagtcagacaaaagaagagcagtcacagatcaccagccaggtaactgggcagattggctggcggcgagagggtatcaagtatcgtcggaatgagctcttcctggatgtgctggagagtgtgaacctgctcatgtccccacaagggcaggtgctgagtgcccatgtgtcgggccgggtggtgatgaagagctacctgagtggcatgcctgaatgcaagtttgggatgaatgacaagattgttattgaaaagcagggcaaaggcacagctgatgaaacaagcaagagcgggaagcaatcaattgccattgatgactgcaccttccaccagtgtgtgcgactcagcaagtttgactctgaacgcagcatcagctttatcccgccagatggagagtttgagcttatgaggtatcgcacaaccaaggacatcatccttcccttccgggtgatcccgctagtgcgagaagtgggacgcaccaaactggaggtcaaggtggtcatcaagtccaactttaaaccctcactgctggctcagaagatcgaggtgaggatcccaaccccactgaacacaagcggggtgcaggtgatctgcatgaaggggaaggccaagtacaaggccagcgagaatgccatcgtgtggaagatcaagcgcatggcaggcatgaaggaatcgcagatcagcgcagagattgagcttctgcctaccaacgacaagaagaaatgggctcgaccccccatttccatgaactttgaggtgccattcgcgccctctggcctcaaggtgcgctacttgaaggtgtttgaaccgaagctgaactacagcgaccatgatgtcatcaaatgggtgcgctacattggccgcagtggcatttatgaaactcgctgctagctgccactaggcagctagcccacctccccagccaccctcctccacaggtccaggtgccgctccctcccccaccacacatcagtgtctcctccctcctgctttgctgccttccctttgcaccagcccgagtctaggtctgggccaagcacattacaagtgggaccggtggagcagcccctgggctccctgggcaggggagttctgaggctcctgctctcccatccacctgtctgtcctggcctaatgccaggctctgagttctgtgaccaaagccaggtgggttccctttccttcccacccctgtggccacagctctggagtgggagggttggttgcccctcacctcagagctcccccaaaggccagtaatggatccccggcctcagtccctactctgctttgggatagtgtgagcttcattttgtacacgtgtgacttcgtccagttacaaacccaataaactctgtagagtgga

SEQ ID NO: 104931 - DNA, 802 bp, Homo sapiens
  Payload ID: 596
  Gene Symbol: AP2M1
  Gene Name: adaptor-related protein complex 2, mu 1 subunit
  ENST ID: ENST00000432591
  CDS Start-End: 46-802
aggtctgttctcagagcgatgggccgcggagactgatctgccgccatgattggaggcttattcatctataatcacaagggggaggtgctcatctcccgagtctaccgagatgacatcgggaggaacgcagtggatgcctttcgggtcaatgttatccatgcccggcagcaggtgcgcagccccgtcaccaacattgctcgcaccagcttcttccacgttaagcggtccaacatttggctggcagcagtcaccaagcagaatgtcaacgctgccatggtcttcgaattcctctataagatgtgtgacgtgatggctgcctactttggcaagatcagcgaggaaaacatcaagaacaattttgtgctcatatatgagctgctggatgagattctagactttggctacccacagaattccgagacaggcgcgctgaaaaccttcatcacgcagcagggcatcaagagtcagcatcagacaaaagaagagcagtcacagatcaccagccagggcaaaggcacagctgatgaaacaagcaagagcgggaagcaatcaattgccattgatgactgcaccttccaccagtgtgtgcgactcagcaagtttgactctgaacgcagcatcagctttatcccgccagatggagagtttgagcttatgaggtatcgcacaaccaaggacatcatccttcccttccgggtgatcccgctagtgcgagaagtgggacgcaccaaactggaggtcaaggtggtcatcaagtccaactttaaaccctcactgctggctcagaagatcgaggtgagga

SEQ ID NO: 104932 - DNA, 557 bp, Homo sapiens
  Payload ID: 596
  Gene Symbol: AP2M1
  Gene Name: adaptor-related protein complex 2, mu 1 subunit
  ENST ID: ENST00000427072
  CDS Start-End: 149-557
actgcggtgaaagccgaggcagcgggcagacgagcagggggcgggcggacatcttgggatccggagagtggccgggccggcagagcagggggccgaggacaccaggtctgttctcagagcgatgggccgcggagactgatctgccgccatgattggaggcttattcatctataatcacaagggggaggtgctcatctcccgagtctaccgagatgacatcgggagtcgtcaggctgctgactcagctgtcttcagttcctctggcccattccctggggagtggctggaagcgaggaacgcagtggatgcctttcgggtcaatgttatccatgcccggcagcaggtgcgcagccccgtcaccaacattgctcgcaccagcttcttccacgttaagcggtccaacatttggctggcagcagtcaccaagcagaatgtcaacgctgccatggtcttcgaattcctctataagatgtgtgacgtgatggctgcctactttggcaagatcagcgaggaaaacatcaagaacaattttgtgctcatatatgagctgctggatg

SEQ ID NO: 104933 - DNA, 601 bp, Homo sapiens
  Payload ID: 596
  Gene Symbol: AP2M1
  Gene Name: adaptor-related protein complex 2, mu 1 subunit
  ENST ID: ENST00000448139
  CDS Start-End: 122-601
agacgagcagggggcgggcggacatcttgggatccggagagtggccgggccggcagagcagggggccgaggacaccaggtctgttctcagagcgatgggccgcggagactgatctgccgccatgattggaggcttattcatctataatcacaagggggaggtgctcatctcccgagtctaccgagatgacatcggcaataggaggaacgcagtggatgcctttcgggtcaatgttatccatgcccggcagcaggtgcgcagccccgtcaccaacattgctcgcaccagcttcttccacgttaagcggtccaacatttggctggcagcagtcaccaagcagaatgtcaacgctgccatggtcttcgaattcctctataagatgtgtgacgtgatggctgcctactttggcaagatcagcgaggaaaacatcaagaacaattttgtgctcatatatgagctgctggatgagattctagactttggctacccacagaattccgagacaggcgcgctgaaaaccttcatcacgcagcagggcatcaagagtcagcatcagacaaaagaagagcagtcacagatcaccagccaggtaactgggcag

SEQ ID NO: 104934 - DNA, 1577 bp, Homo sapiens
  Payload ID: 596
  Gene Symbol: AP2M1
  Gene Name: adaptor-related protein complex 2, mu 1 subunit
  ENST ID: ENST00000411763
  CDS Start-End: 149-1531
actgcggtgaaagccgaggcagcgggcagacgagcagggggcgggcggacatcttgggatccggagagtggccgggccggcagagcagggggccgaggacaccaggtctgttctcagagcgatgggccgcggagactgatctgccgccatgattggaggcttattcatctataatcacaagggggaggtgctcatctcccgagtctaccgagatgacatcgggagtcgtcaggctgctgactcagctgtcttcagttcctctggcccattccctggggagtggctggaagccaataggaggaacgcagtggatgcctttcgggtcaatgttatccatgcccggcagcaggtgcgcagccccgtcaccaacattgctcgcaccagcttcttccacgttaagcggtccaacatttggctggcagcagtcaccaagcagaatgtcaacgctgccatggtcttcgaattcctctataagatgtgtgacgtgatggctgcctactttggcaagatcagcgaggaaaacatcaagaacaattttgtgctcatatatgagctgctggatgagattctagactttggctacccacagaattccgagacaggcgcgctgaaaaccttcatcacgcagcagggcatcaagagtcagcatcagacaaaagaagagcagtcacagatcaccagccaggtaactgggcagattggctggcggcgagagggtatcaagtatcgtcggaatgagctcttcctggatgtgctggagagtgtgaacctgctcatgtccccacaagggcaggtgctgagtgcccatgtgtcgggccgggtggtgatgaagagctacctgagtggcatgcctgaatgcaagtttgggatgaatgacaagattgttattgaaaagcagggcaaaggcacagctgatgaaacaagcaagagcgggaagcaatcaattgccattgatgactgcaccttccaccagtgtgtgcgactcagcaagtttgactctgaacgcagcatcagctttatcccgccagatggagagtttgagcttatgaggtatcgcacaaccaaggacatcatccttcccttccgggtgatcccgctagtgcgagaagtgggacgcaccaaactggaggtcaaggtggtcatcaagtccaactttaaaccctcactgctggctcagaagatcgaggtgaggatcccaaccccactgaacacaagcggggtgcaggtgatctgcatgaaggggaaggccaagtacaaggccagcgagaatgccatcgtgtggaagatcaagcgcatggcaggcatgaaggaatcgcagatcagcgcagagattgagcttctgcctaccaacgacaagaagaaatgggctcgaccccccatttccatgaactttgaggtgccattcgcgccctctggcctcaaggtgcgctacttgaaggtgtttgaaccgaagctgaactacagcgaccatgatgtcatcaaatgggtgcgctacattggccgcagtggcatttatgaaactcgctgctagctgccactaggcagctagcccacctccccagccaccctcctccaca

SEQ ID NO: 104935 - DNA, 545 bp, Homo sapiens
  Payload ID: 596
  Gene Symbol: AP2M1
  Gene Name: adaptor-related protein complex 2, mu 1 subunit
  ENST ID: ENST00000455925
  CDS Start-End: 206-545
gaggacaccaggtgagccggggatctggccttatggcgtggaggaggacgctgcgggtcgtctgcctcgccgcgcagctttgtcctgccctgcactgagctggcggaaagctgcccacacccgggagtggcttcagccttcggacccgggagctagctgacggtctgttctcagagcgatgggccgcggagactgatctgccgccatgattggaggcttattcatctataatcacaagggggaggtgctcatctcccgagtctaccgagatgacatcgggaggaacgcagtggatgcctttcgggtcaatgttatccatgcccggcagcaggtgcgcagccccgtcaccaacattgctcgcaccagcttcttccacgttaagcggtccaacatttggctggcagcagtcaccaagcagaatgtcaacgctgccatggtcttcgaattcctctataagatgtgtgacgtgatggctgcctactttggcaagatcagcgaggaaaacatcaagaacaattttgtgctcatatatgagctgctggatg

SEQ ID NO: 104936 - DNA, 602 bp, Homo sapiens
  Payload ID: 596
  Gene Symbol: AP2M1
  Gene Name: adaptor-related protein complex 2, mu 1 subunit
  ENST ID: ENST00000431779
  CDS Start-End: 16-602
gactgatctgccgccatgattggaggcttattcatctataatcacaagggggaggtgctcatctcccgagtctaccgagatgacatcgggaggaacgcagtggatgcctttcgggtcaatgttatccatgcccggcagcaggtgcgcagccccgtcaccaacattgctcgcaccagcttcttccacgttaagcggtccaacatttggctggcagcagtcaccaagcagaatgtcaacgctgccatggtcttcgaattcctctataagatgtgtgacgtgatggctgcctactttggcaagatcagcgaggaaaacatcaagaacaattttgtgctcatatatgagctgctggatgagattctagactttggctacccacagaattccgagacaggcgcgctgaaaaccttcatcacgcagcagggcatcaagagtcagcatcaggtaagctcttccctcagcttccacccttgcagctttgctttgtttctccaggccctgccctttggggcttataggggaaaatggattacagacaaaagaagagcagtcacagatcaccagccaggtaactgggcagattggctggcggcgagagggta

SEQ ID NO: 104937 - DNA, 1950 bp, Homo sapiens
  Payload ID: 596
  Gene Symbol: AP2M1
  Gene Name: adaptor-related protein complex 2, mu 1 subunit
  Uniprot ID: Q96CW1
  ENST ID: ENST00000439647
  CDS Start-End: 217-1518
ggaataaacaggaactggagcctggctgaggggaggggcatgtctgggagggctgcagggtcacttactaaagggttgagtcaggaaagaagctccagtgacctgcacagctccacaggggatgttggcagcgattctgaggtcttcttttaccctgcccccgcctgtcctaggtctgttctcagagcgatgggccgcggagactgatctgccgccatgattggaggcttattcatctataatcacaagggggaggtgctcatctcccgagtctaccgagatgacatcgggaggaacgcagtggatgcctttcgggtcaatgttatccatgcccggcagcaggtgcgcagccccgtcaccaacattgctcgcaccagcttcttccacgttaagcggtccaacatttggctggcagcagtcaccaagcagaatgtcaacgctgccatggtcttcgaattcctctataagatgtgtgacgtgatggctgcctactttggcaagatcagcgaggaaaacatcaagaacaattttgtgctcatatatgagctgctggatgagattctagactttggctacccacagaattccgagacaggcgcgctgaaaaccttcatcacgcagcagggcatcaagagtcagacaaaagaagagcagtcacagatcaccagccaggtaactgggcagattggctggcggcgagagggtatcaagtatcgtcggaatgagctcttcctggatgtgctggagagtgtgaacctgctcatgtccccacaagggcaggtgctgagtgcccatgtgtcgggccgggtggtgatgaagagctacctgagtggcatgcctgaatgcaagtttgggatgaatgacaagattgttattgaaaagcagggcaaaggcacagctgatgaaacaagcaagagcgggaagcaatcaattgccattgatgactgcaccttccaccagtgtgtgcgactcagcaagtttgactctgaacgcagcatcagctttatcccgccagatggagagtttgagcttatgaggtatcgcacaaccaaggacatcatccttcccttccgggtgatcccgctagtgcgagaagtgggacgcaccaaactggaggtcaaggtggtcatcaagtccaactttaaaccctcactgctggctcagaagatcgaggtgaggatcccaaccccactgaacacaagcggggtgcaggtgatctgcatgaaggggaaggccaagtacaaggccagcgagaatgccatcgtgtggaagatcaagcgcatggcaggcatgaaggaatcgcagatcagcgcagagattgagcttctgcctaccaacgacaagaagaaatgggctcgaccccccatttccatgaactttgaggtgccattcgcgccctctggcctcaaggtgcgctacttgaaggtgtttgaaccgaagctgaactacagcgaccatgatgtcatcaaatgggtgcgctacattggccgcagtggcatttatgaaactcgctgctagctgccactaggcagctagcccacctccccagccaccctcctccacaggtccaggtgccgctccctcccccaccacacatcagtgtctcctccctcctgctttgctgccttccctttgcaccagcccgagtctaggtctgggccaagcacattacaagtgggaccggtggagcagcccctgggctccctgggcaggggagttctgaggctcctgctctcccatccacctgtctgtcctggcctaatgccaggctctgagttctgtgaccaaagccaggtgggttccctttccttcccacccctgtggccacagctctggagtgggagggttggttgcccctcacctcagagctcccccaaaggccagtaatggatccccggcctcagtccctactctgctttgggatagtgtgagcttcattttgtacacgtg

SEQ ID NO: 104938 - DNA, 673 bp, Homo sapiens
  Payload ID: 596
  Gene Symbol: AP2M1
  Gene Name: adaptor-related protein complex 2, mu 1 subunit
  ENST ID: ENST00000442686
  CDS Start-End: 1-369
tttaaaccctcactgctggctcagaagatcgaggtgaggatcccaaccccactgaacacaagcggggtgcaggtgatctgcatgaaggggaaggccaagtacaaggccagcgagaatgccatcgtgtggaagatcaagcgcatggcaggcatgaaggaatcgcagatcagcgcagagattgagcttctgcctaccaacgacaagaagaaatgggctcgaccccccatttccatgaactttgaggtatggcagaggaggggcctagagtcatgccagggtatgctggaagacctcttagagatcattccgataaactgctgcaccttagaggtgaggaaactgaggcctagaaagaagaactggctttaattcatagatccattcttcccctttcaagcctcttagtagaaattactatttgtgatgaggcaaatcttttacttctctcggcttgtcctaacacagttctttcaaaaaacttagattgtttaaatgccaggtaagacacaaagtttacttacagacaggataatgggctgactttgctttgcgcatgttagacataattttctccaccttatttttaagttcataatattgagcaggataagtatgttctaaagcagttctttggttgctgtctcctgctgattaaaggaactgattcaaggtg

SEQ ID NO: 104939 - DNA, 1305 bp, Homo sapiens
  Payload ID: 596
  Gene Symbol: AP2M1
  Gene Name: adaptor-related protein complex 2, mu 1 subunit
  ENST ID: ENST00000621863
  CDS Start-End: 1-1305
atgattggaggcttattcatctataatcacaagggggaggtgctcatctcccgagtctaccgagatgacatcgggaggaacgcagtggatgcctttcgggtcaatgttatccatgcccggcagcaggtgcgcagccccgtcaccaacattgctcgcaccagcttcttccacgttaagcggtccaacatttggctggcagcagtcaccaagcagaatgtcaacgctgccatggtcttcgaattcctctataagatgtgtgacgtgatggctgcctactttggcaagatcagcgaggaaaacatcaagaacaattttgtgctcatatatgagctgctggatgagattctagactttggctacccacagaattccgagacaggcgcgctgaaaaccttcatcacgcagcagggcatcaagagtcagcatacaaaagaagagcagtcacagatcaccagccaggtaactgggcagattggctggcggcgagagggtatcaagtatcgtcggaatgagctcttcctggatgtgctggagagtgtgaacctgctcatgtccccacaagggcaggtgctgagtgcccatgtgtcgggccgggtggtgatgaagagctacctgagtggcatgcctgaatgcaagtttgggatgaatgacaagattgttattgaaaagcagggcaaaggcacagctgatgaaacaagcaagagcgggaagcaatcaattgccattgatgactgcaccttccaccagtgtgtgcgactcagcaagtttgactctgaacgcagcatcagctttatcccgccagatggagagtttgagcttatgaggtatcgcacaaccaaggacatcatccttcccttccgggtgatcccgctagtgcgagaagtgggacgcaccaaactggaggtcaaggtggtcatcaagtccaactttaaaccctcactgctggctcagaagatcgaggtgaggatcccaaccccactgaacacaagcggggtgcaggtgatctgcatgaaggggaaggccaagtacaaggccagcgagaatgccatcgtgtggaagatcaagcgcatggcaggcatgaaggaatcgcagatcagcgcagagattgagcttctgcctaccaacgacaagaagaaatgggctcgaccccccatttccatgaactttgaggtgccattcgcgccctctggcctcaaggtgcgctacttgaaggtgtttgaaccgaagctgaactacagcgaccatgatgtcatcaaatgggtgcgctacattggccgcagtggcatttatgaaactcgctgctag

SEQ ID NO: 104940 - DNA, 935 bp, Homo sapiens
  Payload ID: 597
  Gene Symbol: AP2S1
  Gene Name: adaptor-related protein complex 2, sigma 1 subunit
  Uniprot ID: P53680
  ENST ID: ENST00000263270
  CDS Start-End: 227-655
atctgactcgtttggtaggaaaaggactggctctgactcttcacccatcttcacccaggctggcccctttggtgaaactacaactcccaggggtctgtgcgcgagaaggcaggcgggtttttctaccggaagtccgctctagctctgggccctacaactgcaccctgagccggagctgcccagtcgccgcgggaccggggccgctggggtctggacgggggtcgccatgatccgctttatcctcatccagaaccgggcaggcaagacgcgcctggccaagtggtacatgcagtttgatgatgatgagaaacagaagctgatcgaggaggtgcatgccgtggtcaccgtccgagacgccaaacacaccaactttgtggagttccggaactttaagatcatttaccgccgctatgctggcctctacttctgcatctgtgtggatgtcaatgacaacaacctggcttacctggaggccattcacaacttcgtggaggtcttaaacgaatatttccacaatgtctgtgaactggacctggtgttcaacttctacaaggtttacacggtcgtggacgagatgttcctggctggcgaaatccgagagaccagccagacgaaggtgctgaaacagctgctgatgctacagtccctggagtgagggcaggcgagccccaccccggccccggcccctcctggactcgcctgctcgcttccccttcccaggcccgtggccaacccagcagtccttccctcagctgcctaggaggaagggacccagctgggtctgggccacaagggaggagactgcaccccactgcctctgggccctggctgtgggcagaggccaccgtgtgtgtcccgagtaaccgtgccgttgtcgtgtgatgccataagcgtctgtgcgtggagtccccaataaacctgtggtcctgcctggc

SEQ ID NO: 104941 - DNA, 793 bp, Homo sapiens
  Payload ID: 597
  Gene Symbol: AP2S1
  Gene Name: adaptor-related protein complex 2, sigma 1 subunit
  ENST ID: ENST00000352203
  CDS Start-End: 12-482
cgggggtcgccatgatccgctttatcctcatccagaaccgggcaggcaagacgcgcctggccaagtggtacatgcagtttgatgatgatgagaaacagaagctgatcgaggaggtgcatgccgtggtcaccgtccgagacgccaaacacaccaactttgtggaggtcctggcaatctccgttgctgacagcctctctgttctgcagttccggaactttaagatcatttaccgccgctatgctggcctctacttctgcatctgtgtggatgtcaatgacaacaacctggcttacctggaggccattcacaacttcgtggaggtcttaaacgaatatttccacaatgtctgtgaactggacctggtgttcaacttctacaaggtttacacggtcgtggacgagatgttcctggctggcgaaatccgagagaccagccagacgaaggtgctgaaacagctgctgatgctacagtccctggagtgagggcaggcgagccccaccccggccccggcccctcctggactcgcctgctcgcttccccttcccaggcccgtggccaacccagcagtccttccctcagctgcctaggaggaagggacccagctgggtctgggccacaagggaggagactgcaccccactgcctctgggccctggctgtgggcagaggccaccgtgtgtgtcccgagtaaccgtgccgttgtcgtgtgatgccataagcgtctgtgcgtggagtccccaataaacctgtggtcctgcctggccttgccgtctttgagcccttgcctgtctccc

SEQ ID NO: 104942 - DNA, 898 bp, Homo sapiens
  Payload ID: 597
  Gene Symbol: AP2S1
  Gene Name: adaptor-related protein complex 2, sigma 1 subunit
  ENST ID: ENST00000601498
  CDS Start-End: 133-609
gtctctagagacaaggatctgattgcaggtggagaggggatgttgagacaggggcaggagactgcctgtgagagagggatgatctcaagaagagacctggcacaggaaaccaaaaggaggcaactgtagggaatgaaacttaagggtctgggaaagcgctgtaaaaggagagaggacctggagatccgctttatcctcatccagaaccgggcaggcaagacgcgcctggccaagtggtacatgcagtttgatgatgatgagaaacagaagctgatcgaggaggtgcatgccgtggtcaccgtccgagacgccaaacacaccaactttgtggagttccggaactttaagatcatttaccgccgctatgctggcctctacttctgcatctgtgtggatgtcaatgacaacaacctggcttacctggaggccattcacaacttcgtggaggtcttaaacgaatatttccacaatgtctgtgaactggacctggtgttcaacttctacaaggtttacacggtcgtggacgagatgttcctggctggcgaaatccgagagaccagccagacgaaggtgctgaaacagctgctgatgctacagtccctggagtgagggcaggcgagccccaccccggccccggcccctcctggactcgcctgctcgcttccccttcccaggcccgtggccaacccagcagtccttccctcagctgcctaggaggaagggacccagctgggtctgggccacaagggaggagactgcaccccactgcctctgggccctggctgtgggcagaggccaccgtgtgtgtcccgagtaaccgtgccgttgtcgtgtgatgccataagcgtctgtgcgtggagtccccaataaacctgtggtcctgcctggccttgccgtc

SEQ ID NO: 104943 - DNA, 707 bp, Homo sapiens
  Payload ID: 597
  Gene Symbol: AP2S1
  Gene Name: adaptor-related protein complex 2, sigma 1 subunit
  ENST ID: ENST00000597020
  CDS Start-End: 64-432
ccccagatccgctttatcctcatccagaaccgggcaggcaagacgcgcctggccaagtggtacatgcagtttgatgatgatgagaaacagaagctgatcgaggaggtgcatgccgtggtcaccgtccgagacgccaaacacaccaactttgtggagttccggaactttaagatcatttaccgccgctatgctggcctctacttctgcatctgtgtggatgtcaatgacaacaacctggcttacctggaggccattcacaacttcgtggaggtcttaaacgaatatttccacaatgtctgtgaactggacctggtgttcaacttctacaaggtttacacggtcgtggacgagatgttcctggctggcgaaatccgagagaccagccagacgaaggtgctgaaacagctgctgatgctacagtccctggagtgagggcaggcgagccccaccccggccccggcccctcctggactcgcctgctcgcttccccttcccaggcccgtggccaacccagcagtccttccctcagctgcctaggaggaagggacccagctgggtctgggccacaagggaggagactgcaccccactgcctctgggccctggctgtgggcagaggccaccgtgtgtgtcccgagtaaccgtgccgttgtcgtgtgatgccataagcgtctgtgcgtggagtccccaataaacctgtggtcctgc

SEQ ID NO: 104944 - DNA, 315 bp, Homo sapiens
  Payload ID: 597
  Gene Symbol: AP2S1
  Gene Name: adaptor-related protein complex 2, sigma 1 subunit
  Uniprot ID: P53680
  ENST ID: ENST00000601649
  CDS Start-End: 1-315
atgatccgctttatcctcatccagaaccgggcaggcaagacgcgcctggccaagtggtacatgcagtttgatgatgatgagaaacagaagctgatcgaggaggtgcatgccgtggtcaccgtccgagacgccaaacacaccaactttgtggaggtcttaaacgaatatttccacaatgtctgtgaactggacctggtgttcaacttctacaaggtttacacggtcgtggacgagatgttcctggctggcgaaatccgagagaccagccagacgaaggtgctgaaacagctgctgatgctacagtccctggagtga

SEQ ID NO: 104945 - DNA, 829 bp, Homo sapiens
  Payload ID: 597
  Gene Symbol: AP2S1
  Gene Name: adaptor-related protein complex 2, sigma 1 subunit
  ENST ID: ENST00000599990
  CDS Start-End: 106-540
gccatggtaacgggggagcgctacgccggggactggcggagggggggcccacgcgtaaatagccgaggctggatcgggcgctgacaagtcccttctctgccgcggatggtctggatccgctttatcctcatccagaaccgggcaggcaagacgcgcctggccaagtggtacatgcagtttgatgatgatgagaaacagaagctgatcgaggaggtgcatgccgtggtcaccgtccgagacgccaaacacaccaactttgtggagttccggaactttaagatcatttaccgccgctatgctggcctctacttctgcatctgtgtggatgtcaatgacaacaacctggcttacctggaggccattcacaacttcgtggaggtcttaaacgaatatttccacaatgtctgtgaactggacctggtgttcaacttctacaaggtttacacggtcgtggacgagatgttcctggctggcgaaatccgagagaccagccagacgaaggtgctgaaacagctgctgatgctacagtccctggagtgagggcaggcgagccccaccccggccccggcccctcctggactcgcctgctcgcttccccttcccaggcccgtggccaacccagcagtccttccctcagctgcctaggaggaagggacccagctgggtctgggccacaagggaggagactgcaccccactgcctctgggccctggctgtgggcagaggccaccgtgtgtgtcccgagtaaccgtgccgttgtcgtgtgatgccataagcgtctgtgcgtggagtccccaataaacctgtggtcctgcctggccttgccgtc

SEQ ID NO: 104946 - DNA, 636 bp, Homo sapiens
  Payload ID: 597
  Gene Symbol: AP2S1
  Gene Name: adaptor-related protein complex 2, sigma 1 subunit
  ENST ID: ENST00000593442
  CDS Start-End: 69-347
tgcaccctgagccggagctgcccagtcgccgcgggaccggggccgctggggtctggacgggggtcgccatgttccggaactttaagatcatttaccgccgctatgctggcctctacttctgcatctgtgtggatgtcaatgacaacaacctggcttacctggaggccattcacaacttcgtggaggtcttaaacgaatatttccacaatgtctgtgaactggacctggtgttcaacttctacaaggtttacacggtcgtggacgagatgttcctggctggcgaaatccgagagaccagccagacgaaggtgctgaaacagctgctgatgctacagtccctggagtgagggcaggcgagccccaccccggccccggcccctcctggactcgcctgctcgcttccccttcccaggcccgtggccaacccagcagtccttccctcagctgcctaggaggaagggacccagctgggtctgggccacaagggaggagactgcaccccactgcctctgggccctggctgtgggcagaggccaccgtgtgtgtcccgagtaaccgtgccgttgtcgtgtgatgccataagcgtctgtgcgtggagtccccaataaacctgtggtcctgcctggccttgccgtc

SEQ ID NO: 104947 - DNA, 5838 bp, Homo sapiens
  Payload ID: 598
  Gene Symbol: AP3B1
  Gene Name: adaptor-related protein complex 3, beta 1 subunit
  Uniprot ID: O00203
  ENST ID: ENST00000255194
  CDS Start-End: 177-3461
actgcgcatgcgcagggggtggactgccaggtcggctcagggagccgtgacgagtccggaagcgcctgcgcgcgctcctccgtacgagaactagttttgttccgtgccctctggactggaaccttttggagagaacccccggcaggaccaaccccgcacccgccagcaccgcggcaatgtccagcaatagttttccttacaatgagcagtccggaggaggggaggcgacggagctgggtcaggaggcgacctcaaccatttccccctcgggggccttcggcctctttagcagcgatttgaagaagaatgaagatctaaagcaaatgttagagagcaacaaagattctgctaaactggatgctatgaagcggattgttgggatgattgcaaaagggaaaaatgcatctgaactgtttcctgctgttgtgaagaatgtggccagtaaaaatattgagatcaagaagttggtatatgtttacctggttcgatatgctgaagaacagcaggatcttgcactcctgtccataagcacttttcagcgagctctgaaggacccaaaccaactaattcgtgcaagcgctttgagagttctgtcaagtattagagtgccaattattgtacctatcatgatgcttgctattaaggaagcttctgctgacttatcaccatatgttaggaagaatgcagcccatgcaatacaaaaattatacagccttgatccagagcagaaggaaatgttaattgaagtaattgaaaaacttctgaaagataaaagcacattggtagctggcagtgttgtgatggcttttgaagaagtatgcccggacagaatagatctgattcataaaaattaccgcaagctatgtaacttactagtggatgttgaagagtgggggcaggttgtcataatccacatgctaactcgatatgctcggacacagtttgtcagcccttggaaagagggtgatgaattagaagacaatggaaagaatttctacgaatctgatgatgatcagaaggaaaagactgacaaaaagaagaagccgtatactatggatccagatcatagactcttaattagaaatacaaagcctttgcttcagagcaggaatgctgcggtggttatggcagttgctcagctgtattggcacatatcaccaaaatctgaagctggcataatttctaaatcactagtgcgtttacttcgtagcaatagggaggtgcagtatattgtcctacaaaatatagcaactatgtcaattcaaagaaaggggatgtttgaaccttatctgaagagtttctatgttaggtcaactgatccaactatgatcaagacactgaagcttgaaattttgacaaacttggcaaatgaagccaacatatcaactcttcttcgagaatttcagacctatgtgaaaagccaggataaacaatttgcagcagccactattcagactataggcagatgtgcaaccaacatcttggaagtcactgacacgtgcctcaatggcttggtctgtctgctgtccaacagggatgaaatagttgttgctgaaagtgtggttgttataaagaaattactgcaaatgcaacctgcacaacatggtgaaattattaaacatatggccaaactcctggacagtatcactgttcctgttgctagagcaagtattctttggctaattggagaaaactgtgaacgagttcctaaaattgcccctgatgttttgaggaagatggctaaaagcttcactagtgaagatgatctggtaaaactgcagatattaaatctgggagcaaaattgtatttaaccaactccaaacagacaaaattgcttacccagtacatattaaatctcggcaagtatgatcaaaactacgacatcagagaccgtacaagatttattaggcagcttattgttccgaatgtaaagagtggagctttaagtaaatatgccaaaaaaatattcctagcacaaaagcctgcaccactgcttgagtctccttttaaagatagagatcatttccagcttggcaccttatctcatactctcaacattaaagctactgggtacctggaattatctaattggccagaggtggcgcccgacccatcagttcgaaatgtagaagtaatagagttggcaaaagaatggaccccagcaggaaaagcaaagcaagagaattctgctaagaagttttattctgaatctgaggaagaggaggactcttctgatagtagcagtgacagtgagagtgaatctggaagtgaaagtggagaacaaggcgaaagtggggaggaaggagacagcaatgaggacagcagtgaggactcctccagtgagcaggacagtgagagtggacgggagtcaggcctagaaaacaaaagaacagccaagaggaactcaaaagccaaaggaaaaagtgattctgaagatggggagaaggaaaatgaaaaatctaaaacttcagattcttcaaatgacgaatctagttcaatagaagacagttcttccgattctgaatcagagtcagaacctgaaagtgaatctgaatccagaagagtcactaaggagaaagaaaagaaaacaaagcaagatagaactcctcttaccaaagatgtttcacttctagatctggatgattttaacccagtatccactccagttgcacttcccacaccagctctttctccaagtttgatggctgatcttgaaggtttacacttgtcaacttcctcttcagtcatcagtgtcagtactcctgcatttgtaccaacgaaaactcacgtgctgcttcatcgaatgagtggaaaaggactagctgcccattatttctttccaagacagccttgcatttttggtgataagatggtctctatacaaataacactgaataacactactgatcgaaagatagaaaatatccacataggggaaaaaaaacttcctataggcatgaaaatgcatgtttttaatccaatagactctcttgagcctgagggatccattacagtttcaatgggtattgacttttgtgattctactcagactgccagtttccagttgtgtaccaaggatgattgcttcaatgttaatattcagccacctgttggagaactgcttttacctgtggccatgtcagagaaagattttaagaaagagcaaggagtgctaacaggaatgaatgaaacttctgctgtaatcattgctgcaccacagaatttcactccctctgtgatctttcagaaggttgtaaatgtagccaatgtaggtgcagtcccttctggccaggataatatacacaggtttgcagctaaaactgtgcacagtgggtcattgatgctagtcacagtggaactgaaggaaggctctacagcccagcttatcataaacactgagaaaactgtgattggctctgttctgctgcgggaactgaagcctgtcctgtctcaggggtaacctgcttacatctggactttagaatctggcacacaacaaaagtgcctggcatccactactgctgcctttcatttataataatagcccttccatctggcagtgggggtagaatacactcttgacattcttgtctcctgctttagaatgctagtgtgtatctatcatgtatgcaatactttccccctttttgctttgctaaccaaagagcatatattttactgtcagttgtctcaactcttgaatccatgtggcgttttctctgtcctgctgcttcttttggcctcctcgttttccttctctttttcgacaatggtagacatgaatgagatatttaaagttcattggaaatcttcttccctacagcagtaagcaaaaattagcaaagagatagtctaaatggcctctcagcttggtatgtgaaaatgagatcacatactttttaaatccaaatacaaaagcatagtctctgcaagattttgttctttgaatttcttgatattgtaattgattattgataactgtcatcatgaaattatctctcaataataagataaataaactagcatatgaatcatatttgtctttgcatttttaatgagaaactattaataatcctgaagttcatatgctaaagttttcttattttaaagcaagtattttgagtgttacattatgcagagaagcaatgtggtttagttagcgaaagaaaaaccacttccaaaccaagtaaattttctacttatagtttactccaaggaaaaaaaattggtgtatttaataacaaaaacaaaaatcttcatattgcaaaataaacatcttctaggtagttttgatctattagtagatatctgattatgtggcctgctgaataaattctttgaatctcatttttccttatgcccaactttggaaactaactagcataaacttatagaaatgtttaaaactagttatatgatcaacctattagcatcttttcctagagtatttgttttatttgctaccttaagttactgttttcaaggttgttctataatcagagaacttttctaatactttcgtacctttttaaaaccagctgaaattttacttcctttttgaagcaaggtaatggactttcaggtagtataagctactcagttctttttgtatagagccacatacataatgatttttaaaaagtaaaaaggaagtgactgtacattgcttgaagcattataggaaggctgaaaagaaaagaatggaattttcttggaacatacatattgaaaagaacaaaacagagtcgaaaaattatttaaattttcaagctggtgggatgacaagagtaaacaaaattgttaaattttcctgctccagaaagaaatatagccctgaatctccgggaagagaatgtacagaagtgcaatgtacagaagccacgtgtacattttgtgccaattccgtaccatgtgtacattctgtaccattctgtaccaatgtatggaagccacgagttccacttccctctggagcctgggcgctgtggtaacacacccaaaagcccctttgtaatcgcaggtcgttggcatttccatattagccttattgctcagagcttcataactttgaattttaagtcaataactttttgaaatgtcagacagaatttgacaggtttaatacctgttttctgaggaagaaaaaaaaattatatccatgctgtcttcaggcagagggaaagtgcatgttgtgattgagaaaggtcttatttttccttaaattaggacactcatctttaaaagatagttcacacatttgtatttttttaaactaaggaaatttaattagggctttacttttgactaagttatttttggctgctaacttttaaaattatggtaaatcaataatataatgtagtatgaatcagtgaacagtatgtatcgattgtaatgtgcgctaccagttgaaaccattttaacactagtagcttaatatcattaaaatgtttttcacgtaaaacagaaaaacgaccaaagccccaagttaaaggtttggttttttttcttttgtggtgtggtgattcagagttccttgcctcatatttcctttaactttgtcataatccatgattatctttaaattgttccattgagtcgagttagtcaatgttgaattcttaattctagctatattttttcattttaatgttcacttaatgggacattttatgtacaccaatcttgaagaatggctctcatagtatatttcagactaagcctcatttttgatatcacaatacatttgctttatttattatgagagtttttttattctaaagagactgtaacaatgcatttctcaaattaaaatactgtatacttgtccttctcga

SEQ ID NO: 104948 - DNA, 1170 bp, Homo sapiens
  Payload ID: 598
  Gene Symbol: AP3B1
  Gene Name: adaptor-related protein complex 3, beta 1 subunit
  ENST ID: ENST00000522901
  CDS Start-End: 1-464
ctatacaaataacactgaataacactactgatcgaaagatagaaaatatccacataggggaaaaaaaacttcctataggcatgaaaatgcatgtttttaatccaatagactctcttgagcctgagggatccattacagtttcaatgggtattgacttttgtgattctactcagactgccagtttccagttgtgtaccaaggatgattgcttcaatgttaatattcagccacctgttggagaactgcttttacctgtggccatgtcagagaaagattttaagaaagagcaaggagtgctaacaggaatgaatgaaacttctgctgtaatcattgctgcaccacagaatttcactccctctgtgatctttcagaaggttgtaaatgtagccaatgtaggtgcagtcccttctggccaggataatatacacaggtctctcttttttctcttccaggtttgcagctaaaactgtgcacagtgggtcattgatgctagtcacagtggaactgaaggaaggctctacagcccagcttatcataaacactgagaaaactgtgattggctctgttctgctgcgggaactgaagcctgtcctgtctcaggggtaacctgcttacatctggactttagaatctggcacacaacaaaagtgcctggcatccactactgctgcctttcatttataataatagcccttccatctggcagtgggggtagaatacactcttgacattcttgtctcctgctttagaatgctagtgtgtatctatcatgtatgcaatactttccccctttttgctttgctaaccaaagagcatatattttactgtcagttgtctcaactcttgaatccatgtggcgttttctctgtcctgctgcttcttttggcctcctcgttttccttctctttttcgacaatggtagacatgaatgagatatttaaagttcattggaaatcttcttccctacagcagtaagcaaaaattagcaaagagatagtctaaatggcctctcagcttggtatgtgaaaatgagatcacatactttttaaatccaaatacaaaagcatagtctctgcaagattttgttctttgaatttcttgatattgtaattgattattgataactgtcatcatgaaattatctctcaataataagataaataaactagc

SEQ ID NO: 104949 - DNA, 3986 bp, Homo sapiens
  Payload ID: 598
  Gene Symbol: AP3B1
  Gene Name: adaptor-related protein complex 3, beta 1 subunit
  Uniprot ID: O00203
  ENST ID: ENST00000519295
  CDS Start-End: 273-3410
gcctgcgcgcgctcctccgtacgagaactagttttgttccgtgccctctggactggaaccttttggagagaacccccggcaggaccaaccccgcacccgccagcaccgcggcaatgtccagcaatagttttccttacaatgagcagtccggaggaggggaggcgacggagctgggtcaggaggcgacctcaaccatttccccctcgggggccttcggcctctttagcagcgatttgaagaagtgaggagaaaggaatgaagatctaaagcaaatgttagagagcaacaaagattctgctaaactggatgctatgaagcggattgttgggatgattgcaaaagggaaaaatgcatctgaactgtttcctgctgttgtgaagaatgtggccagtaaaaatattgagatcaagaagttggtatatgtttacctggttcgatatgctgaagaacagcaggatcttgcactcctgtccataagcacttttcagcgagctctgaaggacccaaaccaactaattcgtgcaagcgctttgagagttctgtcaagtattagagtgccaattattgtacctatcatgatgcttgctattaaggaagcttctgctgacttatcaccatatgttaggaagaatgcagcccatgcaatacaaaaattatacagccttgatccagagcagaaggaaatgttaattgaagtaattgaaaaacttctgaaagataaaagcacattggtagctggcagtgttgtgatggcttttgaagaagtatgcccggacagaatagatctgattcataaaaattaccgcaagctatgtaacttactagtggatgttgaagagtgggggcaggttgtcataatccacatgctaactcgatatgctcggacacagtttgtcagcccttggaaagagggtgatgaattagaagacaatggaaagaatttctacgaatctgatgatgatcagaaggaaaagactgacaaaaagaagaagccgtatactatggatccagatcatagactcttaattagaaatacaaagcctttgcttcagagcaggaatgctgcggtggttatggcagttgctcagctgtattggcacatatcaccaaaatctgaagctggcataatttctaaatcactagtgcgtttacttcgtagcaatagggaggtgcagtatattgtcctacaaaatatagcaactatgtcaattcaaagaaaggggatgtttgaaccttatctgaagagtttctatgttaggtcaactgatccaactatgatcaagacactgaagcttgaaattttgacaaacttggcaaatgaagccaacatatcaactcttcttcgagaatttcagacctatgtgaaaagccaggataaacaatttgcagcagccactattcagactataggcagatgtgcaaccaacatcttggaagtcactgacacgtgcctcaatggcttggtctgtctgctgtccaacagggatgaaatagttgttgctgaaagtgtggttgttataaagaaattactgcaaatgcaacctgcacaacatggtgaaattattaaacatatggccaaactcctggacagtatcactgttcctgttgctagagcaagtattctttggctaattggagaaaactgtgaacgagttcctaaaattgcccctgatgttttgaggaagatggctaaaagcttcactagtgaagatgatctggtaaaactgcagatattaaatctgggagcaaaattgtatttaaccaactccaaacagacaaaattgcttacccagtacatattaaatctcggcaagtatgatcaaaactacgacatcagagaccgtacaagatttattaggcagcttattgttccgaatgtaaagagtggagctttaagtaaatatgccaaaaaaatattcctagcacaaaagcctgcaccactgcttgagtctccttttaaagatagagatcatttccagcttggcaccttatctcatactctcaacattaaagctactgggtacctggaattatctaattggccagaggtggcgcccgacccatcagttcgaaatgtagaagtaatagagttggcaaaagaatggaccccagcaggaaaagcaaagcaagagaattctgctaagaagttttattctgaatctgaggaagaggaggactcttctgatagtagcagtgacagtgagagtgaatctggaagtgaaagtggagaacaaggcgaaagtggggaggaaggagacagcaatgaggacagcagtgaggactcctccagtgagcaggacagtgagagtggacgggagtcaggcctagaaaacaaaagaacagccaagaggaactcaaaagccaaaggaaaaagtgattctgaagatggggagaaggaaaatgaaaaatctaaaacttcagattcttcaaatgacgaatctagttcaatagaagacagttcttccgattctgaatcagagtcagaacctgaaagtgaatctgaatccagaagagtcactaaggagaaagaaaagaaaacaaagcaagatagaactcctcttaccaaagatgtttcacttctagatctggatgattttaacccagtatccactccagttgcacttcccacaccagctctttctccaagtttgatggctgatcttgaaggtttacacttgtcaacttcctcttcagtcatcagtgtcagtactcctgcatttgtaccaacgaaaactcacgtgctgcttcatcgaatgagtggaaaaggactagctgcccattatttctttccaagacagccttgcatttttggtgataagatggtctctatacaaataacactgaataacactactgatcgaaagatagaaaatatccacataggggaaaaaaaacttcctataggcatgaaaatgcatgtttttaatccaatagactctcttgagcctgagggatccattacagtttcaatgggtattgacttttgtgattctactcagactgccagtttccagttgtgtaccaaggatgattgcttcaatgttaatattcagccacctgttggagaactgcttttacctgtggccatgtcagagaaagattttaagaaagagcaaggagtgctaacaggaatgaatgaaacttctgctgtaatcattgctgcaccacagaatttcactccctctgtgatctttcagaaggttgtaaatgtagccaatgtaggtgcagtcccttctggccaggataatatacacaggtttgcagctaaaactgtgcacagtgggtcattgatgctagtcacagtggaactgaaggaaggctctacagcccagcttatcataaacactgagaaaactgtgattggctctgttctgctgcgggaactgaagcctgtcctgtctcaggggtaacctgcttacatctggactttagaatctggcacacaacaaaagtgcctggcatccactactgctgcctttcatttataataatagcccttccatctggcagtgggggtagaatacactcttgacattcttgtctcctgctttagaatgctagtgtgtatctatcatgtatgcaatactttccccctttttgctttgctaaccaaagagcatatattttactgtcagttgtctcaactcttgaatccatgtggcgttttctctgtcctgctgcttcttttggcctcctcgttttccttctctttttcgacaatggtagacatgaatgagatatttaaagttcattggaaatcttcttccctacagcagtaagcaaaaattagcaaagagatagtctaaatggcctctcagcttggtatgtgaaaatgagatcacatactttttaaatccaaatacaaaagcatagtctctgcaagattttgttctttgaatttcttgatattgtaattgattattgataactgtcatcatgaaattatctctcaataataagataaataaactagcatatgaatcata

SEQ ID NO: 104950 - DNA, 3736 bp, Homo sapiens
  Payload ID: 599
  Gene Symbol: AP3B2
  Gene Name: adaptor-related protein complex 3, beta 2 subunit
  Uniprot ID: Q13367
  ENST ID: ENST00000261722
  CDS Start-End: 209-3457
gcgccggtgcctttaagacctcagcgcgcggccctgattgagaaatccgcgcgcagcctccgccgctgcacactgcagcctctgctgaacccctgccgcgccgccgccttcgccagcccggaccggaccggcccgccttcccttcctccgctccagccggcctccggccccgcaacctcctcctcggcgaagtctccctggccgccccatgtcggccgcccccgcctacagcgaagacaagggcggctccgctggccccggggagcccgagtacggccacgaccccgcgagcggcggcatcttctcctccgactacaagcggcatgatgacctgaaggagatgctggacaccaacaaggattctctcaagctggaggccatgaagaggattgtggcgatgattgcccgaggaaagaatgcttcagacctgtttcccgcggtggtgaagaacgtggcctgtaagaacatagaggtgaagaagcttgtctatgtgtacctggtacgctacgctgaggagcagcaagacctggccctgctgtccatctccaccttccaacgtggcctaaaggatcccaaccagctgattcgtgccagtgccctccgtgtcctctctagcatccgtgtgcccatcatagtgcccatcatgatgctagctatcaaggaagccgcctcggacatgtcaccctatgtgcggaaaacagctgcccacgccatccctaaactctacagtttggactctgaccagaaggatcagctgatagaagtcattgagaagcttctggctgacaagaccacgctggtggcgggcagtgtggtgatggcctttgaggaggtctgcccggagcgcatcgacctgattcacaaaaactaccggaaactctgtaacctgctgatcgacgtggaggagtggggccaggtggtcatcatcagcatgctcacccgctacgcccgcacgcagttcctgagccccacccagaacgaatccctactagaggagaacgcggaaaaagccttctacggctcagaggaggacgaggccaagggcgcggggtctgaggagacggccgccgcggccgccccctcccgaaagccctatgtcatggaccccgaccaccggctgctgctgcgcaacaccaaacccctgctgcagagccgcagcgccgcggtggtgatggcggtggcgcagctctacttccacctggcgcccaaggcggaagtgggcgtcatcgccaaggcgctggtgcgcctgctgcgcagccacagtgaggtgcagtacgttgtgctccagaacgtggccaccatgtccatcaagcgccggggtatgtttgagccctacctgaagagcttctacatcaggtccaccgaccccacccagattaagatcctgaagctggaagtgctgaccaacctggccaatgagaccaacattcctactgtcctacgggaattccagacctatattcgcagcatggacaaggactttgtggcagccacaatccaggccattggacgctgtgcaactaacatcggccgagtccgtgacacctgcctcaatggcctggtgcagctgctgtccaaccgtgatgagcttgtggttgcagagtcagtggtcgtcattaagaaattgctacagatgcagccagcacaacatggagagatcatcaaacacttggcaaagcttacagacaacatccaggtgcccatggcccgagccagcatcctgtggctcatcggagagtactgtgagcatgtccccaggattgcacctgatgtcttaagaaaaatggccaagtcattcacagcagaggaggatattgtcaagctgcaggtcatcaacctggcagccaagctctacctgaccaactctaaacagaccaagctgctgacccagtatgtgctgagtctggccaaatatgaccagaactatgatattcgcgaccgggcgcgcttcacccggcagctcatcgtcccttccgagcagggtggggccctcagccgccatgccaagaagctcttcctggcacccaaaccagctccagtcttggagtcatccttcaaagaccgggaccacttccagctgggctcactgtcccacctgcttaatgccaaggccacaggctaccaggagctcccagactggccggaggaagccccagacccatctgtgcgcaacgtggaggtacctgaatggaccaagtgctcaaatcgggagaagagaaaggagaaggaaaaacccttctactcggactctgagggggagtcaggccccacggagtccgcagacagtgaccctgagtctgagagtgaatcggacagtaagagcagcagtgagagcggctctggggagtccagcagtgagtccgacaatgaagaccaggatgaggatgaggagaaagggagaggcagtgagagtgaacagagtgaggaggatggtaagaggaagacaaagaagaaggtgccagagagaaaaggagaagcgtcatcctctgatgagggcagcgattccagcagtagctcatcagagtccgagatgacatcggagtccgaggaggagcagttagaacctgcctcctggagcaggaaaacacctcccagcagcaaaagtgctcctgcaaccaaggagatctccctgcttgatctagaggatttcacccctcccagtgtccagcctgtgtctcccccagcaattgtgtctaccagtctggctgctgacctggagggcctgacactcacagactccaccctggtaccgtcgcttctgagtccagtatcgggtgttgggcggcaggagctgctgcaccgggtagctggcgaggggctggctgtggactacaccttcagccgccaacctttctccggggatccccacatggtgtccgtgcacatccacttctccaacagctctgatacccccatcaagggcctgcatgtgggcactcccaaactgcctgctggcatcagcatccaagaatttcccgaaattgagtccctggcacctggagaatctgccactgctgtaatgggcattaatttctgtgactcaacccaggcagccaacttccagctgtgcacccagacccgacagttctacgtctccattcagccacctgttggggagctgatggcccctgtgttcatgagtgaaaatgagtttaagaaggaacagggaaagctgatgggcatgaatgagatcacagagaaactcatgctgccagacacctgtcggagtgaccacattgtggtgcagaaagtgactgccactgccaacctgggtcgtgttccttgtgggacatctgatgagtacaggtttgcagggaggacactgactggtggaagcctcgttctgctgaccctggatgcccggccagctggagctgcccagctgactgtcaacagcgagaaaatggtgattggcaccatgctggtaaaggatgtgatacaggctctgacccagtgacttccaaatgctgtgacctgtttggctcccatctatacctccccatgacacctaggctgtcagtctctctcatctttctctctctctctcatcatcctcctcatgccagatagcattcagggtgtcctctctccctctggaggaccaagccctcccctaatgccctccccatggattccttagtgatctgtgcagagagagatggcagccactcccttcagtcctcccagatttctgtagctatttatgtagcaggctcaataaaatgtcttctctcta

SEQ ID NO: 104951 - DNA, 3254 bp, Homo sapiens
  Payload ID: 599
  Gene Symbol: AP3B2
  Gene Name: adaptor-related protein complex 3, beta 2 subunit
  Uniprot ID: Q13367
  ENST ID: ENST00000535348
  CDS Start-End: 74-3226
ccttcccttcctccgctccagccggcctccggccccgcaacctcctcctcggcgaagtctccctggccgccccatgtcggccgcccccgcctacagcgaagacaagggcggctccgctggccccggggagcccgagtacggccacgaccccgcgagcggcggcatcttctcctccgactacaagcggcatgatgacctgaaggagatgctggacaccaacaaggattctctcaagctggaggccatgaagaggattgtggcgatgattgcccgaggaaagaatgcttcagacctgtttcccgcggtggtgaagaacgtggcctgtaagaacatagaggatcccaaccagctgattcgtgccagtgccctccgtgtcctctctagcatccgtgtgcccatcatagtgcccatcatgatgctagctatcaaggaagccgcctcggacatgtcaccctatgtgcggaaaacagctgcccacgccatccctaaactctacagtttggactctgaccagaaggatcagctgatagaagtcattgagaagcttctggctgacaagaccacgctggtggcgggcagtgtggtgatggcctttgaggaggtctgcccggagcgcatcgacctgattcacaaaaactaccggaaactctgtaacctgctgatcgacgtggaggagtggggccaggtggtcatcatcagcatgctcacccgctacgcccgcacgcagttcctgagccccacccagaacgaatccctactagaggagaacgcggaaaaagccttctacggctcagaggaggacgaggccaagggcgcggggtctgaggagacggccgccgcggccgccccctcccgaaagccctatgtcatggaccccgaccaccggctgctgctgcgcaacaccaaacccctgctgcagagccgcagcgccgcggtggtgatggcggtggcgcagctctacttccacctggcgcccaaggcggaagtgggcgtcatcgccaaggcgctggtgcgcctgctgcgcagccacagtgaggtgcagtacgttgtgctccagaacgtggccaccatgtccatcaagcgccggggtatgtttgagccctacctgaagagcttctacatcaggtccaccgaccccacccagattaagatcctgaagctggaagtgctgaccaacctggccaatgagaccaacattcctactgtcctacgggaattccagacctatattcgcagcatggacaaggactttgtggcagccacaatccaggccattggacgctgtgcaactaacatcggccgagtccgtgacacctgcctcaatggcctggtgcagctgctgtccaaccgtgatgagcttgtggttgcagagtcagtggtcgtcattaagaaattgctacagatgcagccagcacaacatggagagatcatcaaacacttggcaaagcttacagacaacatccaggtgcccatggcccgagccagcatcctgtggctcatcggagagtactgtgagcatgtccccaggattgcacctgatgtcttaagaaaaatggccaagtcattcacagcagaggaggatattgtcaagctgcaggtcatcaacctggcagccaagctctacctgaccaactctaaacagaccaagctgctgacccagtatgtgctgagtctggccaaatatgaccagaactatgatattcgcgaccgggcgcgcttcacccggcagctcatcgtcccttccgagcagggtggggccctcagccgccatgccaagaagctcttcctggcacccaaaccagctccagtcttggagtcatccttcaaagaccgggaccacttccagctgggctcactgtcccacctgcttaatgccaaggccacaggctaccaggagctcccagactggccggaggaagccccagacccatctgtgcgcaacgtggaggtacctgaatggaccaagtgctcaaatcgggagaagagaaaggagaaggaaaaacccttctactcggactctgagggggagtcaggccccacggagtccgcagacagtgaccctgagtctgagagtgaatcggacagtaagagcagcagtgagagcggctctggggagtccagcagtgagtccgacaatgaagaccaggatgaggatgaggagaaagggagaggcagtgagagtgaacagagtgaggaggatggtaagaggaagacaaagaagaaggtgccagagagaaaaggagaagcgtcatcctctgatgagggcagcgattccagcagtagctcatcagagtccgagatgacatcggagtccgaggaggagcagttagaacctgcctcctggagcaggaaaacacctcccagcagcaaaagtgctcctgcaaccaaggagatctccctgcttgatctagaggatttcacccctcccagtgtccagcctgtgtctcccccagcaattgtgtctaccagtctggctgctgacctggagggcctgacactcacagactccaccctggtaccgtcgcttctgagtccagtatcgggtgttgggcggcaggagctgctgcaccgggtagctggcgaggggctggctgtggactacaccttcagccgccaacctttctccggggatccccacatggtgtccgtgcacatccacttctccaacagctctgatacccccatcaagggcctgcatgtgggcactcccaaactgcctgctggcatcagcatccaagaatttcccgaaattgagtccctggcacctggagaatctgccactgctgtaatgggcattaatttctgtgactcaacccaggcagccaacttccagctgtgcacccagacccgacagttctacgtctccattcagccacctgttggggagctgatggcccctgtgttcatgagtgaaaatgagtttaagaaggaacagggaaagctgatgggcatgaatgagatcacagagaaactcatgctgccagacacctgtcggagtgaccacattgtggtgcagaaagtgactgccactgccaacctgggtcgtgttccttgtgggacatctgatgagtacaggtttgcagggaggacactgactggtggaagcctcgttctgctgaccctggatgcccggccagctggagctgcccagctgactgtcaacagcgagaaaatggtgattggcaccatgctggtaaaggatgtgatacaggctctgacccagtgacttccaaatgctgtgacctgtttggctc

SEQ ID NO: 104952 - DNA, 3921 bp, Homo sapiens
  Payload ID: 599
  Gene Symbol: AP3B2
  Gene Name: adaptor-related protein complex 3, beta 2 subunit
  ENST ID: ENST00000542200
  CDS Start-End: 154-579
gcctccgccgctgcacactgcagcctctgctgaacccctgccgcgccgccgccttcgccagcccggaccggaccggcccgccttcccttcctccgctccagccggcctccggccccgcaacctcctcctcggcgaagtctccctggccgccccatgtcggccgcccccgcctacagcgaagacaagggcggctccgctggccccggggagcccgagtacggccacgaccccgcgagcggcggcatcttctcctccgactacaagcggcatgatgacctgaaggagatgctggacaccaacaaggattctctcaagctggaggccatgaagaggattgtggcgatgattgcccgaggaaagaatgcttcagacctgtttcccgcggtggtgaagaacgtggcctgtaagaacatagaggtgaagaagcttgtctatgtgtacctggtacgctacgctgaggagcagcaagacctggccctgctgtccatctccaccttccaacgtggcctaaaggagcctgtggtaatggctgcttctagtatgaaccacttgagcccccggagagtggagagtctctagcaatggagaacccctcaaccctcacccccctttgtgtaaaggtgtgaattgtggtccacagccaggtagatttcaacctttagcagtggcctgaatcccccacaccattctcaccttttgtttcattttgcccaaggcctctagttggatttacatatgttaggtgcatgtataagtctcccccctaagggcttttctggttagtctaagacatcttgagggtaaagacagccatttcaaggccattctctccatattggatttttcagctctgattacaaccattaactcctctatttttgcatacctttatttatttatttatttatgagacaggttctcactgtgttgcccaggctggagtgcagtggtgcaatcatggctcactggagcctcgacttccctgagctcaggtgattctcccacctctgtctcctgagtagctgcgactactcagcctgcatcaccatgctcggctaatttttttgtagtttttgtagagatggggtttcaccctgttgcctatgctggtcttggactcctgggctcaagtggcctcagcttcccaaagtgctgggattacagggatgagctaatactcctagcctggatacttttagttcaaatttctgtgagagagattgtgaaaggtccagctcatcttttcatatccagaagttctgtaggttgctgggtagacaggattgctgctcaaatccagggcccaccccttgtccaatctgctatggccagcaagaggggttgacagtcggcttctttggggtgagagtagaaagcatggtcacttgaatatacaattcattcatttagtaaatacttgggtgtctctatgccacacattgtgctagatttctttttataagtcaaaaccatggaatccgtcttagattggcaagtaatcttttggtttgagtaagggttaagtataaaaactaatctgaaattgttgtacagattttcacctatagtctctaccaactgaccctgtcccccttttagaaaaccagagctcatttagttcaactcaatgtgataatttctttctgcaaagtgccaaatagtattttaggttttgtaggccttatagtctcaactatgcaactactcaattttgcccttatggtgcaaatgcagccattgacaagtgggcgtggccgtgttccaataaatctatataaaaaacaggcaatagacagattttatccaagggctgtagcatgccagcctttgctctagaacatgtctaacaggtcatcttttctgatagggacctcactccttcataaggcaacttgctccatctcaagacaactaccactatttggggtgttttttaaaccattctcttttgttgaaacctccacaactataatttttaaaaattgatttcaggctgggtgtggtggctcatgcctgtaatcccagcactttgggaggccgaagcaggcaaatcacaaggtcaggagttcaagaccagcctggccaacatggtgaaactccatctctactaaaaatacaaaaaattagcttggcatggtggcgggtgcccataatcccagctactcaggaggctgacgcaggagaatggcttgaacccgggaggcagaggttgcaatgagccgagaacgtgccactgcagtccagcccaggcgacagtgtgagatccatctcaaaaaaaaaaaaaattgatttcaggctgtactgcattatgactgcacctgtgaatagccactgtactccagcctgggcaacatagggagaccctgtatctaaaaaataaaataaaatttactacaggttcacaaaaggcataaagaataatataatgaatatccataagaaatgacacatttctcaaatagccaaagcctcctatatatcttctcttgtttatcattcataggtatgtatttattcctgtgctagtaatttgcatattgttaagcaatataaaatgttttgtaaatggtgtcatcgtactacatatgtattcctttaaaacttgttttcttttttgttgtcactggcttttggtctctcctgcatgttggaaccaatcatttcaatccagccttctcccttctttcaatcctagcccaggctagggccgtgttcactttcttaggagatccctcatggaatcaaacctctgactggcaagcagataatccaggtctccctacatcctgtctttgtacagttggtcccttgaaccccctatgaaaccctactctatttcattttatcagtttagcacagggtccaaaccagggtgattctgaatcttaattatgtccctcctgattttgtgtcttctttcaagatactgataagctatttggaccagggcaaaagactgaggcatagcatgtttccaggttgacactgatctgttaataaaccttctccaagtatatttcaccacgttgtagacccacctgactgtacagacagctggcatttttctatcttgttaggaaggatcttattcaatagcaataaataaataaataaataacacctttcatgtgcaaagggttgtgggtgacacagagataaaacagatgtgaattctgctcttaaaaatgcttggctattaggtgaaacaaaaggcctacctaaaaaatagcaatgcaggaaatgctatgagacttccacaaacatatcactgaaatcaagatactaatatccaccggcctagttaccccatcaaaaaggaaaacacattttttttgataactttctgtgaatctataatcatttcccaaataaaatgctcacacacaaaaaaggaaaacaggtttaagcagatgatgtgactatttgtctctaagaaaacagagactccttccttttcaataaatgtttctaacccatctgtttaaaagtcaattccagaattttgtcaggaattagcatcaattttacctgcaattgtgaggatcttgtcttgtctttttccatttcagaaagtcagggtaatatctacccttctttagtgttctattcccgtcattctctaagagtaatagtacaggcacacctcattgtattgcactttgcagatattgccagatattgcactttttacaaattgagggtttgtggcaaccctacatcaatcaagtctatcagtgccatttttccaacagtatgtgctcacattgtgcctctgtcacattctggtaattctcacaatattccaaactttttaatgattattatatgttatggtgatcagtgatctttgatgttactattgtaattgttttggggtgccacaaaccatgctcagacatgaaagtgaaattaatcaataaa

SEQ ID NO: 104953 - DNA, 3402 bp, Homo sapiens
  Payload ID: 599
  Gene Symbol: AP3B2
  Gene Name: adaptor-related protein complex 3, beta 2 subunit
  Uniprot ID: Q13367
  ENST ID: ENST00000535359
  CDS Start-End: 74-3379
ccttcccttcctccgctccagccggcctccggccccgcaacctcctcctcggcgaagtctccctggccgccccatgtcggccgcccccgcctacagcgaagacaagggcggctccgctggccccggggagcccgagtacggccacgaccccgcgagcggcggcatcttctcctccgactacaagcggcatgatgacctgaaggagatgctggacaccaacaaggattctctcaagctggaggccatgaagaggattgtggcgatgattgcccgaggaaagaatgcttcagacctgtttcccgcggtggtgaagaacgtggcctgtaagaacatagaggtgaagaagcttgtctatgtgtacctggtacgctacgctgaggagcagcaagacctggccctgctgtccatctccaccttccaacgtggcctaaaggatcccaaccagctgattcgtgccagtgccctccgtgtcctctctagcatccgtgtgcccatcatagtgcccatcatgatgctagctatcaaggaagccgcctcggacatgtcaccctatgtgcggaaaacagctgcccacgccatccctaaactctacagtttggactctgaccagaaggatcagctgatagaagtcattgagaagcttctggctgacaagaccacgctggtggcgggcagtgtggtgatggcctttgaggaggtctgcccggagcgcatcgacctgattcacaaaaactaccggaaactctgtaacctgctgatcgacgtggaggagtggggccaggtggtcatcatcagcatgctcacccgctacgcccgcacgcagttcctgagccccacccagaacgaatccctactagaggagaacgcggaaaaagccttctacggctcagaggaggacgaggccaagggcgcggggtctgaggagacggccgccgcggccgccccctcccgaaagccctatgtcatggaccccgaccaccggctgctgctgcgcaacaccaaacccctgctgcagagccgcagcgccgcggtggtgatggcggtggcgcagctctacttccacctggcgcccaaggcggaagtgggcgtcatcgccaaggcgctggtgcgcctgctgcgcagccacagtgaggtgcagtacgttgtgctccagaacgtggccaccatgtccatcaagcgccggggtatgtttgagccctacctgaagagcttctacatcaggtccaccgaccccacccagattaagatcctgaagctggaagtgctgaccaacctggccaatgagaccaacattcctactgtcctacgggaattccagacctatattcgcagcatggacaaggactttgtggcagccacaatccaggccattggacgctgtgcaactaacatcggccgagtccgtgacacctgcctcaatggcctggtgcagctgctgtccaaccgtgatgagcttgtggttgcagagtcagtggtcgtcattaagaaattgctacagatgcagccagcacaacatggagagatcatcaaacacttggcaaagcttacagacaacatccaggtgcccatggcccgagccagcatcctgtggctcatcggagagtactgtgagcatgtccccaggattgcacctgatgtcttaagaaaaatggccaagtcattcacagcagaggaggatattgtcaagctgcaggtcatcaacctggcagccaagctctacctgaccaactctaaacagaccaagctgctgacccagtatgtgctgagtctggccaaatatgaccagaactatgatattcgcgaccgggcgcgcttcacccggcagctcatcgtcccttccgagcagggtggggccctcagccgccatgccaagaagctcttcctggcacccaaaccagctccagtcttggagtcatccttcaaagaccgggaccacttccagctgggctcactgtcccacctgcttaatgccaaggccacaggctaccaggagctcccagactggccggaggaagccccagacccatctgtgcgcaacgtggaggaagaagatctctcccttattgagactcacgtgggcctgttgggcgaatacactgaggtacctgaatggaccaagtgctcaaatcgggagaagagaaaggagaaggaaaaacccttctactcggactctgagggggagtcaggccccacggagtccgcagacagtgaccctgagtctgagagtgaatcggacagtaagagcagcagtgagagcggctctggggagtccagcagtgagtccgacaatgaagaccaggatgaggatgaggagaaagggagaggcagtgagagtgaacagagtgaggaggatggtaagaggaagacaaagaagaaggtgccagagagaaaaggagaagcgtcatcctctgatgagggcagcgattccagcagtagctcatcagagtccgagatgacatcggagtccgaggaggagcagttagaacctgcctcctggagcaggaaaacacctcccagcagcaaaagtgctcctgcaaccaaggagatctccctgcttgatctagaggatttcacccctcccagtgtccagcctgtgtctcccccagcaattgtgtctaccagtctggctgctgacctggagggcctgacactcacagactccaccctggtaccgtcgcttctgagtccagtatcgggtgttgggcggcaggagctgctgcaccgggtagctggcgaggggctggctgtggactacaccttcagccgccaacctttctccggggatccccacatggtgtccgtgcacatccacttctccaacagctctgatacccccatcaagggcctgcatgtgggcactcccaaactgcctgctggcatcagcatccaagaatttcccgaaattgagtccctggcacctggagaatctgccactgctgtaatgggcattaatttctgtgactcaacccaggcagccaacttccagctgtgcacccagacccgacagttctacgtctccattcagccacctgttggggagctgatggcccctgtgttcatgagtgaaaatgagtttaagaaggaacagggaaagctgatgggcatgaatgagatcacagagaaactcatgctgccagacacctgtcggagtgaccacattgtggtgcagaaagtgactgccactgccaacctgggtcgtgttccttgtgggacatctgatgagtacaggtttgcagggaggacactgactggtggaagcctcgttctgctgaccctggatgcccggccagctggagctgcccagctgactgtcaacagcgagaaaatggtgattggcaccatgctggtaaaggatgtgatacaggctctgacccagtgacttccaaatgctgtgacctgttt

SEQ ID NO: 104954 - DNA, 746 bp, Homo sapiens
  Payload ID: 599
  Gene Symbol: AP3B2
  Gene Name: adaptor-related protein complex 3, beta 2 subunit
  ENST ID: ENST00000541693
  CDS Start-End: 168-746
tgacagcgaggtgtatatcaagggaggccctcggtgctgcccacgcctacccagctcaatggtctgtacctatgaccatgcccctggtgtcctgagctcagcctcctacccactaagaaactcaacagtctggtctgtgtttggcagggcatgatgacctgaaggagatgctggacaccaacaaggattctctcaagctggaggccatgaagaggattgtggcgatgattgcccgaggaaagaatgcttcagacctgtttcccgcggtggtgaagaacgtggcctgtaagaacatagaggtgaagaagcttgtctatgtgtacctggtacgctacgctgaggagcagcaagacctggccctgctgtccatctccaccttccaacgtggcctaaaggatcccaaccagctgattcgtgccagtgccctccgtgtcctctctagcatccgtgtgcccatcatagtgcccatcatgatgctagctatcaaggaagccgcctcggacatgtcaccctatgtgcggaaaacagctgcccacgccatccctaaactctacagtttggactctgaccagaaggatcagctgatagaagtcattgagaagcttctggctgacaagaccacgctggtggcgggcagtgtggtgatggcctttgaggaggtctgcccggagcgcatcgacctgattcacaaaaactaccggaaactctgtaacctgctgatcgacgtggaggagtggggccaggtg

SEQ ID NO: 104955 - DNA, 247 bp, Homo sapiens
  Payload ID: 599
  Gene Symbol: AP3B2
  Gene Name: adaptor-related protein complex 3, beta 2 subunit
  ENST ID: ENST00000538592
  CDS Start-End: 1-69
atctccctgcttgatctagaggattgctccctgctcaacccaagccacctccactttgcctcctcatagtcttatctactcccacagtcacccctcccagtgtccagcctgtgtctcccccagcaattgtgtctaccagtctggctgctgacctggagggcctgacactcacagactccaccctggtaccgtcgcttctgagtccagtatcgggtgttgggcggcaggagctgctgcaccgggtagc

SEQ ID NO: 104956 - DNA, 3729 bp, Homo sapiens
  Payload ID: 599
  Gene Symbol: AP3B2
  Gene Name: adaptor-related protein complex 3, beta 2 subunit
  Uniprot ID: Q13367
  ENST ID: ENST00000620652
  CDS Start-End: 203-3451
gtgcctttaagacctcagcgcgcggccctgattgagaaatccgcgcgcagcctccgccgctgcacactgcagcctctgctgaacccctgccgcgccgccgccttcgccagcccggaccggaccggcccgccttcccttcctccgctccagccggcctccggccccgcaacctcctcctcggcgaagtctccctggccgccccatgtcggccgcccccgcctacagcgaagacaagggcggctccgctggccccggggagcccgagtacggccacgaccccgcgagcggcggcatcttctcctccgactacaagcggcatgatgacctgaaggagatgctggacaccaacaaggattctctcaagctggaggccatgaagaggattgtggcgatgattgcccgaggaaagaatgcttcagacctgtttcccgcggtggtgaagaacgtggcctgtaagaacatagaggtgaagaagcttgtctatgtgtacctggtacgctacgctgaggagcagcaagacctggccctgctgtccatctccaccttccaacgtggcctaaaggatcccaaccagctgattcgtgccagtgccctccgtgtcctctctagcatccgtgtgcccatcatagtgcccatcatgatgctagctatcaaggaagccgcctcggacatgtcaccctatgtgcggaaaacagctgcccacgccatccctaaactctacagtttggactctgaccagaaggatcagctgatagaagtcattgagaagcttctggctgacaagaccacgctggtggcgggcagtgtggtgatggcctttgaggaggtctgcccggagcgcatcgacctgattcacaaaaactaccggaaactctgtaacctgctgatcgacgtggaggagtggggccaggtggtcatcatcagcatgctcacccgctacgcccgcacgcagttcctgagccccacccagaacgaatccctactagaggagaacgcggaaaaagccttctacggctcagaggaggacgaggccaagggcgcggggtctgaggagacggccgccgcggccgccccctcccgaaagccctatgtcatggaccccgaccaccggctgctgctgcgcaacaccaaacccctgctgcagagccgcagcgccgcggtggtgatggcggtggcgcagctctacttccacctggcgcccaaggcggaagtgggcgtcatcgccaaggcgctggtgcgcctgctgcgcagccacagtgaggtgcagtacgttgtgctccagaacgtggccaccatgtccatcaagcgccggggtatgtttgagccctacctgaagagcttctacatcaggtccaccgaccccacccagattaagatcctgaagctggaagtgctgaccaacctggccaatgagaccaacattcctactgtcctacgggaattccagacctatattcgcagcatggacaaggactttgtggcagccacaatccaggccattggacgctgtgcaactaacatcggccgagtccgtgacacctgcctcaatggcctggtgcagctgctgtccaaccgtgatgagcttgtggttgcagagtcagtggtcgtcattaagaaattgctacagatgcagccagcacaacatggagagatcatcaaacacttggcaaagcttacagacaacatccaggtgcccatggcccgagccagcatcctgtggctcatcggagagtactgtgagcatgtccccaggattgcacctgatgtcttaagaaaaatggccaagtcattcacagcagaggaggatattgtcaagctgcaggtcatcaacctggcagccaagctctacctgaccaactctaaacagaccaagctgctgacccagtatgtgctgagtctggccaaatatgaccagaactatgatattcgcgaccgggcgcgcttcacccggcagctcatcgtcccttccgagcagggtggggccctcagccgccatgccaagaagctcttcctggcacccaaaccagctccagtcttggagtcatccttcaaagaccgggaccacttccagctgggctcactgtcccacctgcttaatgccaaggccacaggctaccaggagctcccagactggccggaggaagccccagacccatctgtgcgcaacgtggaggtacctgaatggaccaagtgctcaaatcgggagaagagaaaggagaaggaaaaacccttctactcggactctgagggggagtcaggccccacggagtccgcagacagtgaccctgagtctgagagtgaatcggacagtaagagcagcagtgagagcggctctggggagtccagcagtgagtccgacaatgaagaccaggatgaggatgaggagaaagggagaggcagtgagagtgaacagagtgaggaggatggtaagaggaagacaaagaagaaggtgccagagagaaaaggagaagcgtcatcctctgatgagggcagcgattccagcagtagctcatcagagtccgagatgacatcggagtccgaggaggagcagttagaacctgcctcctggagcaggaaaacacctcccagcagcaaaagtgctcctgcaaccaaggagatctccctgcttgatctagaggatttcacccctcccagtgtccagcctgtgtctcccccagcaattgtgtctaccagtctggctgctgacctggagggcctgacactcacagactccaccctggtaccgtcgcttctgagtccagtatcgggtgttgggcggcaggagctgctgcaccgggtagctggcgaggggctggctgtggactacaccttcagccgccaacctttctccggggatccccacatggtgtccgtgcacatccacttctccaacagctctgatacccccatcaagggcctgcatgtgggcactcccaaactgcctgctggcatcagcatccaagaatttcccgaaattgagtccctggcacctggagaatctgccactgctgtaatgggcattaatttctgtgactcaacccaggcagccaacttccagctgtgcacccagacccgacagttctacgtctccattcagccacctgttggggagctgatggcccctgtgttcatgagtgaaaatgagtttaagaaggaacagggaaagctgatgggcatgaatgagatcacagagaaactcatgctgccagacacctgtcggagtgaccacattgtggtgcagaaagtgactgccactgccaacctgggtcgtgttccttgtgggacatctgatgagtacaggtttgcagggaggacactgactggtggaagcctcgttctgctgaccctggatgcccggccagctggagctgcccagctgactgtcaacagcgagaaaatggtgattggcaccatgctggtaaaggatgtgatacaggctctgacccagtgacttccaaatgctgtgacctgtttggctcccatctatacctccccatgacacctaggctgtcagtctctctcatctttctctctctctctcatcatcctcctcatgccagatagcattcagggtgtcctctctccctctggaggaccaagccctcccctaatgccctccccatggattccttagtgatctgtgcagagagagatggcagccactcccttcagtcctcccagatttctgtagctatttatgtagcaggctcaataaaatgtcttctctct

SEQ ID NO: 104957 - DNA, 4870 bp, Homo sapiens
  Payload ID: 600
  Gene Symbol: AP3D1
  Gene Name: adaptor-related protein complex 3, delta 1 subunit
  Uniprot ID: O14617
  ENST ID: ENST00000345016
  CDS Start-End: 224-3685
ttgtccgccatttgcaaggggcccggagcgggatcgcggcacctgccgagcgggtcgccgcctctgccgcggtccttggaccccgccgccgccctggcctgggagcttgccccgccgcagcggccggcagcgcggcgctccgcgggcggcaggcacgggccccgggccccctcacggcgcccagccgcgggcctcccgaggcaaaagcccgtgggccgccgcgatggccctcaagatggtgaagggcagcatcgaccgcatgttcgacaagaatctgcaggacttggtccgcggcatccgtaaccacaaggaggacgaggcaaaatacatatctcagtgcattgatgagatcaagcaggagctgaagcaggacaacatagcggtgaaggcgaacgcggtctgcaagctgacgtatttacagatgttgggatacgacatcagctgggccgccttcaacatcatagaagtgatgagtgcctccaagttcaccttcaagcgaattggctacctcgctgcttcccagagctttcacgaaggcaccgacgtcatcatgctgaccaccaatcagatccgtaaggacttgagcagccccagccagtacgacacaggtgttgcactgacgggtctgtcctgcttcgtcaccccagaccttgccagagacctggcaaatgacatcatgacactgatgtcacacaccaagccctacatcaggaagaaggctgtgctgatcatgtacaaggtgttcctgaagtaccccgagtcgctgcgccctgcctttccccggctgaaggagaagctggaggaccccgaccccggggttcagtcggctgccgtcaatgtcatctgcgagctggccagacgcaaccctaagaactacctgtccctggccccgctctttttcaagctgatgacgtcctccaccaacaactgggtcctcatcaagatcatcaagctgttcggtgctcttactcctttggaaccgcggctgggcaagaagctgatcgagcccctcaccaatctcatccacagcacgtctgccatgtctctcctctatgaatgtgtgaacaccgtgattgcagtgctcatctcgctgtcctccggcatgcccaaccacagcgccagcatccagctttgtgttcagaaattaaggatattgatcgaggactccgatcagaacttgaagtacctggggctgctggcaatgtccaagatcctgaagacccaccccaagtccgtgcagtcccacaaggacctcatcctgcagtgcctggacgacaaggacgagtccatccggctgcgggccctggacctgctctatgggatggtgtccaagaagaacctgatggagatcgtgaagaagctgatgacccacgtagacaaggcagagggtaccacctaccgtgacgagctgctcaccaagatcattgacatctgcagccagtccaactaccagtacatcaccaacttcgagtggtacatcagcatcctggtggagctgacccggctggagggcacacggcacggccacctcatcgccgcccaaatgctggacgtggccatccgcgtgaaggccatccgcaagttcgccgtgtcccagatgtctgcgctgcttgacagtgcacacctgctggccagcagcacccagcggaacgggatctgtgaggtgctgtacgctgccgcctggatctgcggggagttctcagagcatctgcaggaaccacaccacactttggaggccatgctgcggcccagagtcaccacgctgccaggccacatccaggccgtgtatgtgcagaacgtggtcaagctctacgcctccatcctgcagcagaaggagcaggccggggaggcagagggcgctcaggccgtcacccagctcatggtggaccggctgccccagtttgtgcagagcgcagacctggaggtgcaggagcgggcgtcctgcatcctgcagctggtcaagcacatccagaagcttcaggccaaggacgtgcctgtggcagaggaggtcagcgctctctttgctggggagctgaacccagtggcccccaaggcccagaagaaggttccagtccccgaaggcctggacctggacgcctggatcaatgagccactctcggacagcgagtcagaggacgagaggcccagggccgtcttccacgaggaggagcagcggcgtcccaagcaccggccgtcggaggcggacgaggaagagctggctcggcgccgagaggcccggaagcaggagcaggccaacaaccccttctacatcaagagctcgccatcgccacagaagcggtaccaggacaccccgggcgtggagcacattcccgtggtgcagattgacctctccgtccccttgaaggttccagggctgcctatgtcagatcagtatgtgaagctggaggaggagcggcggcaccggcagaagctggagaaggacaagaggaggaaaaagaggaaggagaaggagaagaagggcaagcgccgccacagctcgctgcccacggagagcgacgaggacatcgcccctgcccagcaggtggacatcgtcacagaggagatgcctgagaatgctctgcccagcgacgaggatgacaaagaccccaacgacccctacagggctctggatattgacctggataagcccttagccgacagcgagaaactgcctattcagaaacacagaaacaccgagacctcaaaatcccctgagaaggacgttcccatggtagaaaagaagagcaagaaacccaagaagaaagagaaaaaacacaaagagaaagagagagacaaggagaagaagaaggagaaggagaagaagaaatctcccaagcctaagaagaagaagcacaggaaggagaaggaggagcggaccaaaggcaagaagaagtccaagaagcagcctccaggcagcgaggaggcagcgggggagccggtgcagaatggcgcgccagaggaggagcagctcccgcctgagtccagctactccctcctcgctgaaaattcctatgttaaaatgacctgtgacatccggggcagtctgcaggaggacagccaggtcactgtggccatcgtgctggagaacaggagcagcagcatcctcaagggcatggagctcagcgtgctggactcactcaatgccaggatggcccggccgcagggctcctccgtccacgatggcgtccccgtgcctttccagctgcccccaggcgtctccaacgaagcccagtatgtgttcaccatccagagcatcgtcatggcgcagaagctcaaggggaccctgtccttcattgccaagaatgacgagggtgcgacccacgagaagctggacttcaggctgcacttcagctgcagctcctacttgatcaccactccctgctacagtgacgcctttgctaagttgctggagtctggggacttgagcatgagctcaatcaaagtcgatggcattcggatgtccttccagaatcttctggcgaagatctgttttcaccaccatttttccgttgtggagcgagtggactcctgcgcctccatgtacagccgctccatccagggccaccatgtctgcctcctggtgaaaaagggtgagaactctgtctcagtcgacgggaagtgcagtgactccacgctactgagcaacttgttagaagagatgaaggcgacgctggccaagtgttgagagctgcctgcgagccccgcaccaccccgcggagcacgtacccagggaccgcagccctgacgtgtctcgcctctcctcagtcgtgtgtactgtacccaagcctgagtgttaatttaactctatgttgtccgccgtgtagacatccgaggtcatttgttgcgttgaattatctgaccatccttttttactgtgactcttcccattctctttggcaagaagtccccttctcgcccccaaaccagcaagggactcccccacctgggtctgtgccctgccccgcgctgggggccgagtccttgaatgtggcttcaggggctcctgtcctgggccagggcctgatgggcaccacgtgaggggcacttggtggacagggcggggctgacgtggcctcctctggggtcgcctgcttttgacccaaaggtcctgacggttgcgtccgggggaggggaaggaagggccgctgtcgccaaggttttctctcccagaacccacagtgggaaagcggtcttgccaggcgttgtccattgtcagtgtgctcgtgggctggtgactgggtcttgggatcccaggccacgcgccagccaggctgtgggcagggcggggccagggacgccaaagagaggttgcagtcagaaccgtggacggggtgggttgaggcctctctgccacccgtcttcctggtcagcagaagtgcatctcggcttgggtttggggtggtccgcatcccctgcttgccactatgcgcaccaaggtttccccacatccttcccagcacccttaggaaggcccaggcagggcctggaagcagcggacctgggctgttctgtgttgaaggagtgtgcccagtgcccttgggcaggacctgtgagagccacctcacaggcagagcccccaccaggcagggcaaggagactccgctcactccccacggccagcgtgggcacaggactgacccttcttcagagataatgacattttatcttctccttttgatgaaaactgtcactttagcatgtaatccattacagaatcccatgcagtgattccaggatttgaaattgtatgatgtgttacataagaatttatttgctatcgacattcccgtataaagagagagacatatcacgctgctgtcatgattttgtgtcaagatgatccaataaagttgtaaaacaggcatttcca

SEQ ID NO: 104958 - DNA, 5034 bp, Homo sapiens
  Payload ID: 600
  Gene Symbol: AP3D1
  Gene Name: adaptor-related protein complex 3, delta 1 subunit
  Uniprot ID: O14617
  ENST ID: ENST00000355272
  CDS Start-End: 208-3855
aggggcccggagcgggatcgcggcacctgccgagcgggtcgccgcctctgccgcggtccttggaccccgccgccgccctggcctgggagcttgccccgccgcagcggccggcagcgcggcgctccgcgggcggcaggcacgggccccgggccccctcacggcgcccagccgcgggcctcccgaggcaaaagcccgtgggccgccgcgatggccctcaagatggtgaagggcagcatcgaccgcatgttcgacaagaatctgcaggacttggtccgcggcatccgtaaccacaaggaggacgaggcaaaatacatatctcagtgcattgatgagatcaagcaggagctgaagcaggacaacatagcggtgaaggcgaacgcggtctgcaagctgacgtatttacagatgttgggatacgacatcagctgggccgccttcaacatcatagaagtgatgagtgcctccaagttcaccttcaagcgaattggctacctcgctgcttcccagagctttcacgaaggcaccgacgtcatcatgctgaccaccaatcagatccgtaaggacttgagcagccccagccagtacgacacaggtgttgcactgacgggtctgtcctgcttcgtcaccccagaccttgccagagacctggcaaatgacatcatgacactgatgtcacacaccaagccctacatcaggaagaaggctgtgctgatcatgtacaaggtgttcctgaagtaccccgagtcgctgcgccctgcctttccccggctgaaggagaagctggaggaccccgaccccggggttcagtcggctgccgtcaatgtcatctgcgagctggccagacgcaaccctaagaactacctgtccctggccccgctctttttcaagctgatgacgtcctccaccaacaactgggtcctcatcaagatcatcaagctgttcggtgctcttactcctttggaaccgcggctgggcaagaagctgatcgagcccctcaccaatctcatccacagcacgtctgccatgtctctcctctatgaatgtgtgaacaccgtgattgcagtgctcatctcgctgtcctccggcatgcccaaccacagcgccagcatccagctttgtgttcagaaattaaggatattgatcgaggactccgatcagaacttgaagtacctggggctgctggcaatgtccaagatcctgaagacccaccccaagtccgtgcagtcccacaaggacctcatcctgcagtgcctggacgacaaggacgagtccatccggctgcgggccctggacctgctctatgggatggtgtccaagaagaacctgatggagatcgtgaagaagctgatgacccacgtagacaaggcagagggtaccacctaccgtgacgagctgctcaccaagatcattgacatctgcagccagtccaactaccagtacatcaccaacttcgagtggtacatcagcatcctggtggagctgacccggctggagggcacacggcacggccacctcatcgccgcccaaatgctggacgtggccatccgcgtgaaggccatccgcaagttcgccgtgtcccagatgtctgcgctgcttgacagtgcacacctgctggccagcagcacccagcggaacgggatctgtgaggtgctgtacgctgccgcctggatctgcggggagttctcagagcatctgcaggaaccacaccacactttggaggccatgctgcggcccagagtcaccacgctgccaggccacatccaggccgtgtatgtgcagaacgtggtcaagctctacgcctccatcctgcagcagaaggagcaggccggggaggcagagggcgctcaggccgtcacccagctcatggtggaccggctgccccagtttgtgcagagcgcagacctggaggtgcaggagcgggcgtcctgcatcctgcagctggtcaagcacatccagaagcttcaggccaaggacgtgcctgtggcagaggaggtcagcgctctctttgctggggagctgaacccagtggcccccaaggcccagaagaaggttccagtccccgaaggcctggacctggacgcctggatcaatgagccactctcggacagcgagtcagaggacgagaggcccagggccgtcttccacgaggaggagcagcggcgtcccaagcaccggccgtcggaggcggacgaggaagagctggctcggcgccgagaggcccggaagcaggagcaggccaacaaccccttctacatcaagagctcgccatcgccacagaagcggtaccaggacaccccgggcgtggagcacattcccgtggtgcagattgacctctccgtccccttgaaggttccagggctgcctatgtcagatcagtatgtgaagctggaggaggagcggcggcaccggcagaagctggagaaggacaagaggaggaaaaagaggaaggagaaggagaagaagggcaagcgccgccacagctcgctgcccacggagagcgacgaggacatcgcccctgcccagcaggtggacatcgtcacagaggagatgcctgagaatgctctgcccagcgacgaggatgacaaagaccccaacgacccctacagggctctggatattgacctggataagcccttagccgacagcgagaaactgcctattcagaaacacagaaacaccgagacctcaaaatcccctgagaaggacgttcccatggtagaaaagaagagcaagaaacccaagaagaaagagaaaaaacacaaagagaaagagagagacaaggagaagaagaaggagaaggagaagaaggctgaggacctggacttctggctgtctaccaccccaccgcctgcccccgcccccgcccccgcccccgttccatccacgggggagctcagtgtgaacactgtcactaccccgaaggacgagtgtgaggacgccaagacggaggcgcagggcgaggaggacgatgccgaggggcaagaccaggacaagaaatctcccaagcctaagaagaagaagcacaggaaggagaaggaggagcggaccaaaggcaagaagaagtccaagaagcagcctccaggcagcgaggaggcagcgggggagccggtgcagaatggcgcgccagaggaggagcagctcccgcctgagtccagctactccctcctcgctgaaaattcctatgttaaaatgacctgtgacatccggggcagtctgcaggaggacagccaggtcactgtggccatcgtgctggagaacaggagcagcagcatcctcaagggcatggagctcagcgtgctggactcactcaatgccaggatggcccggccgcagggctcctccgtccacgatggcgtccccgtgcctttccagctgcccccaggcgtctccaacgaagcccagtatgtgttcaccatccagagcatcgtcatggcgcagaagctcaaggggaccctgtccttcattgccaagaatgacgagggtgcgacccacgagaagctggacttcaggctgcacttcagctgcagctcctacttgatcaccactccctgctacagtgacgcctttgctaagttgctggagtctggggacttgagcatgagctcaatcaaagtcgatggcattcggatgtccttccagaatcttctggcgaagatctgttttcaccaccatttttccgttgtggagcgagtggactcctgcgcctccatgtacagccgctccatccagggccaccatgtctgcctcctggtgaaaaagggtgagaactctgtctcagtcgacgggaagtgcagtgactccacgctactgagcaacttgttagaagagatgaaggcgacgctggccaagtgttgagagctgcctgcgagccccgcaccaccccgcggagcacgtacccagggaccgcagccctgacgtgtctcgcctctcctcagtcgtgtgtactgtacccaagcctgagtgttaatttaactctatgttgtccgccgtgtagacatccgaggtcatttgttgcgttgaattatctgaccatccttttttactgtgactcttcccattctctttggcaagaagtccccttctcgcccccaaaccagcaagggactcccccacctgggtctgtgccctgccccgcgctgggggccgagtccttgaatgtggcttcaggggctcctgtcctgggccagggcctgatgggcaccacgtgaggggcacttggtggacagggcggggctgacgtggcctcctctggggtcgcctgcttttgacccaaaggtcctgacggttgcgtccgggggaggggaaggaagggccgctgtcgccaaggttttctctcccagaacccacagtgggaaagcggtcttgccaggcgttgtccattgtcagtgtgctcgtgggctggtgactgggtcttgggatcccaggccacgcgccagccaggctgtgggcagggcggggccagggacgccaaagagaggttgcagtcagaaccgtggacggggtgggttgaggcctctctgccacccgtcttcctggtcagcagaagtgcatctcggcttgggtttggggtggtccgcatcccctgcttgccactatgcgcaccaaggtttccccacatccttcccagcacccttaggaaggcccaggcagggcctggaagcagcggacctgggctgttctgtgttgaaggagtgtgcccagtgcccttgggcaggacctgtgagagccacctcacaggcagagcccccaccaggcagggcaaggagactccgctcactccccacggccagcgtgggcacaggactgacccttcttcagagataatgacattttatcttctccttttgatgaaaactgtcactttagcatgtaatccattacagaatcccatgcagtgattccaggatttgaaattgtatgatgtgttacataagaatttatttgctatcgacattcccgtataaagagagagacatatcacgctgctgtcatgattttgtgtcaagatgatccaataaagttgtaaaacaggca

SEQ ID NO: 104959 - DNA, 618 bp, Homo sapiens
  Payload ID: 600
  Gene Symbol: AP3D1
  Gene Name: adaptor-related protein complex 3, delta 1 subunit
  ENST ID: ENST00000589369
  CDS Start-End: 1-581
tggagctcagcgtgctggactcactcaatgccaggatggcccggccgcagggctcctccgtccacgatggcgtccccgtgcctttccagctgcccccaggcgtctccaacgaagcccagtatgtgttcaccatccagagcatcgtcatggcgcagaagctcaaggggaccctgtccttcattgccaagaatgacgagggtgcgacccacgagaagctggacttcaggctgcacttcagctgcagctcctacttgatcaccactccctgctacagtgacgcctttgctaagttgctggagtctggggacttgagcatgagctcaatcaaagtcgatggcattcggatgtccttccagaatcttctggcgaagatctgttttcaccaccatttttccggcctcctgaagctgtggccaagggcagcccaagaaggtggcccctgctctgggggtggggctgcagccatgcaatgtccgggaagcctaacactgcccgctctgttgcagttgtggagcgagtggactcctgcgcctccatgtacagccgctccatccagggccaccatgtctgcctcctggtgaaaaagggtgagaactctgtctcagtcgacgggaagtg

SEQ ID NO: 104960 - DNA, 911 bp, Homo sapiens
  Payload ID: 600
  Gene Symbol: AP3D1
  Gene Name: adaptor-related protein complex 3, delta 1 subunit
  ENST ID: ENST00000586370
  CDS Start-End: 1-466
gggcagtctgcaggaggacagccaggtcactgtggccatcgtgctggagaacaggagcagcagcatcctcaagggcatggagctcagcgtgctggactcactcaatgccaggatggcccggccgcagggctcctccgtccacgatggcgtccccgtgcctttccagctgcccccaggcgtctccaacgaagcccagtatgtgttcaccatccagagcatcgtcatggcgcagaagctcaaggggaccctgtccttcattgccaagaatgacgagggtgcgacccacgagaagctggacttcaggctgcacttcagctgcagctcctacttgatcaccactccctgctacagaatcttctggcgaagatctgttttcaccaccatttttccgttgtggagcgagtggactcctgcgcctccatgtacagccgctccatccagggccaccatgtctgcctcctggtgaaaaagggtgagaactctgtctcagtcgacgggaagtgcagtgactccacgctactgagcaacttgttagaagagatgaaggcgacgctggccaagtgttgagagctgcctgcgagccccgcaccaccccgcggagcacgtacccagggaccgcagccctgacgtgtctcgcctctcctcagtcgtgtgtactgtacccaagcctgagtgttaatttaactctatgttgtccgccgtgtagacatccgaggtcatttgttgcgttgaattatctgaccatccttttttactgtgactcttcccattctctttggcaagaagtccccttctcgcccccaaaccagcaagggactcccccacctgggtctgtgccctgccccgcgctgggggccgagtccttgaatgtggcttcaggggctcctgtcctgggccagggcctgatgggc

SEQ ID NO: 104961 - DNA, 723 bp, Homo sapiens
  Payload ID: 600
  Gene Symbol: AP3D1
  Gene Name: adaptor-related protein complex 3, delta 1 subunit
  ENST ID: ENST00000590683
  CDS Start-End: 1-610
cctgaagtaccccgagtcgctgcgccctgcctttccccggctgaaggagaagctggaggaccccgaccccggggttcagtcggctgccgtcaatgtcatctgcgagctggccagacgcaaccctaagaactacctgtccctggccccgctctttttcaagctgatgacgtcctccaccaacaactgggtcctcatcaagatcatcaagctgttcggtgctcttactcctttggaaccgcggctgggcaagaagctgatcgagcccctcaccaatctcatccacagtgctcatctcgctgtcctccggcatgcccaaccacagcgccagcatccagctttgtgttcagaaattaaggatattgatcgaggactccgatcagaacttgaagtacctggggctgctggcaatgtccaagatcctgaagacccaccccaagtccgtgcagtcccacaaggacctcatcctgcagtgcctggacgacaaggacgagtccatccggctgcgggccctggacctgctctatgggatggtgtccaagaagaacctgatggagatcgtgaagaagctgatgacccacgtagacaaggcagagggtaccacctaccgtgacgagctgctcaccaagatcattgacatctgcagccagtccaactaccagtacatcaccaacttcgagtggtacatcagcatcctggtggagctgacccggctggagggcacac

SEQ ID NO: 104962 - DNA, 5124 bp, Homo sapiens
  Payload ID: 601
  Gene Symbol: AP3M1
  Gene Name: adaptor-related protein complex 3, mu 1 subunit
  Uniprot ID: Q9Y2T2
  ENST ID: ENST00000355264
  CDS Start-End: 313-1569
gggaccccagactgcgttaggcagcagatgaccgcctgaatctagatggagagaaacccaccatttttctaggccctggattatgtagaagatttagatactaagcctcaagagacgtctttcctctcatttacggtcttcctgcatatttaaaatttctaatacggtagacagagtcggtgtctttgaagctgttaatcaggcaatttcctgggcactccagctgcgggtcctcgcggccttctcggcttctccagcttcggtaggagaggatccggcgccgaatcactgactggcacaggtgttgggaaaatgatccacagtctatttctcataaactgttccggtgacatatttctagagaagcactggaagagcgttgtgagccagtctgtctgtgattatttctttgaagctcaagagaaagctgctgatgttgaaaatgtaccacctgtcatttcaacacctcaccactacctcatcagtatctaccgggataagctcttctttgtatctgtcatacagaccgaagtgccacctctctttgtaattgagttcctacatcgagttgctgacacttttcaggactactttggtgagtgttcagaggctgcaattaaggataatgtggtcatagtatatgaactcttagaagaaatgttagacaatggatttccactggctaccgaatctaacattttgaaagaattgattaaaccaccaacaattctacgctctgttgtcaactctattacaggcagtagtaatgttggggacacactccccaccgggcagctgtccaacataccatggcgtcgggcaggggtaaagtacacaaacaatgaagcctattttgatgttgttgaagaaatagacgcaattatagataaatcaggatctacagtctttgcagaaattcagggggtcattgatgcttgcattaaactatctggaatgcctgatctctccctttctttcatgaaccctaggcttctggatgatgtcagctttcacccctgcatccggttcaagcgttgggaatctgaaagagttttgtcatttattcctccagatggaaatttccgactcatatcataccgtgtcagctcacaaaatctagtggcaataccagtgtatgtgaaacatagtatcagctttaaggagaacagttcttgcggcagatttgatataacaattggaccaaagcagaatatggggaaaactattgaaggaattacagtgacagttcacatgccaaaagttgtgctgaacatgaacctgacacccacacaaggcagctatacatttgatccagtcaccaaggtactaacatgggatgtgggaaaaattactccacaaaagctcccaagtcttaaaggactggtaaatttacagtctggagcccccaaaccagaagagaatccgagcctcaacatacagtttaagatccagcagcttgctatttcaggcttaaaagtaaaccgtttggacatgtatggggagaaatataagccatttaaaggagtcaaatacgtcacgaaagctggaaagttccaagtgaggacatgagaagaggccaaaattcctcaggaccagtttgttttccaagtgtcattacgatgtatcactattaggtaccaagtgagtgggaatacatattctagttaaagcatttgtgtctagctacacaccgctaacaaagttacttagttatcaatgtaggattcttaaggagctttaagctaaggaaaccttttagtgacttagcttattttgtatcttttcacttaggaagattttggaggtgatttttttccataggaggataccatctggcggctgcacattgtaacagtaaaggcagaaagctgtagtgataacctctctcctaaaagagttaactggtctcatccagcagaagctatcttaaatctgtgatgtgtcaggtgcagccaaatatcacaccttctgatcttagccatcccaaaccagtatctgtcccgagaggaaattccccccacccccagaagtttacagaaaactgcctcttcaagtgtttgccttattcagcttttcacttgtgccattaagcaagcactgtagcaaaagccacttccacatggccctggcagggagcactgctgctccatgctccattctcactgtacttggtattgtattttttataaataagatttttatgtaaagcttagaatttgatttacagggaccttgctgcagtaaataccatctcaattttgtgccactggttcagctgttagcacagtaaaaaaatcatttgtatcaaaggggcaaatgctttattaaggtagtaaaagggaacattacttctgcttttaggaagttactgcaagcacaagcatttgtgcttttaagcaaattaaagtagtaaaagaaaaacttaagtgaaacctttgccatcttcatgttttataatataaagcttacccaacaccagttaagccatggttaacctaaatgcctcatgccccagttcagcaaaaggaggaaaatgtgcctgcctcacagtcatcagtctttttaaatcttttttgttgttgttcttaagggtttgaatttgtctgcattccttgtctttaggggaaattcccttttcatattgtgtgcttcccaaagctatagtcatagatttcttccagaaactattgtcataattgtcactggagtgcttaaatatacgtactatactgacaaaatacatggaagtgagttataatgaggcagaaacaaaatcctcggtaacattgatgatactctaccgatcaccgtggttttggaaagtcagtcaacagttgtattattgcactcaatttcattgtgacattttatttaacttcttcatcttggtggtccttgcccagttattttgcctcattagacatcaagaaatggagaaagactgaaagttaatatcttaagtgcttgttcttcatgtttccttcttgttatttatgctattctctttgtggctccattcttctttcaatcttctcagcttataaccgtctttcccttatgctaaggatagcccttacactcatcccatctatgctgtcaagggctgctggttggtgctggtacaaggagcccactcagcagttttcttacctttgcctgccctgcctttcatggaataagaaaggcaacgttttgcagcttccaaatttctgaagaaactaatctcagattggcagttaaagtcaaaatgttgccaaatatttattccttttgcctaagtttggctacccggttcaattgctttttatttttaatgtcttgactcttcagagttcgtacctcaaaagaacaatgagaacatttgctttgctttctgctgaatccctaatctcaacaatctatacctggactgtccagttctcctcctgtgctatcttctcttctatccaagtagaatgtacgccaggagctccttccctctagcaatttctactaaaatgtccaagtagaatgtttccttttacaatcaaattactgtatttattaatttgctagaatccagtaaatcattttggtagctctggctgtgctatcaataaaaagatgaaagcaacaagttgattttttttaggtctactattgattgaacattctccaatgggcaaggctcattgtcaaagcagggtgaacatgatcagattttcttctgcatcatcacacaagctgcgagtgttgctgcaaagcacttctcagtactccttccctaacctcagtatgttaatagccattcatacttggcttaagcatcaccattctggccacagtctgagagattagtgatcaaagctcccttccctatcactaccaccacctactgataacaaagatttctgaatacttagtagtagtaaaatatttttcaagcacagagttacagctaatcctggatcacttgttctaaattcataagggagtatatcaagagcaaatgaagtaaatgattctttcctgcgtgtgggagtcaccatcattttattcaaagggagttcctgtgataggttcattccttaagtggtgctacagaaggaccctaggaaaatgctgatcttgtcctgagaggcaactgatttgagaaaatgattatactacagcaggaaggcagcaccagtgaacatatggtaaatggcaaaaacaagacagttttagaaactgctaattcagtagcagccttggcctttcccttaactcaagcaggctggaatctgtctttatagtcggcaactttccaagataaagcagtgataatagcagttggcaacactaaatatcaatatcatcaccctttaatgacatgttacccctttcagatctagaaaatcagggaaaaagtgatgtcccaactctactctaaaaacctgctcctactattttagtcagtgtttctttaaggaagaagaggactatgtccccaaaagctaactctgttttatagccctggtggatccctgaaaaccctatttattctatactgggctttggaatatgaaaaatggacctgtgtggccgggcgtggtggatcacacctgtaatcccagcactttgggaggtcaaggtgggcggatcacttgaggtcaggagttcgagaccagcctggccaacatggtgaaactccatctctactaaaaatacaaaaattagccaggcatggtggcgcacacctgtaatcccagctacatgggaggctgaggcaggagaattgcttgaacccgggaggcagaggttgcagtgagctgagattgcaccactgcactgcagcctgggcaacagagcaagtctctgtcttgcagcagggggaaggacctgtggtactcctacaaacttaacaactttagcttttcggggaacagtggtggtctccacagatagctagaatcttctaagatgaaaataaactgtttcatccagctgctttctgcctgttaacctttgccacttccattccttcaagtgtgtaatccccagggttgtcttgtattacacacatccttgttaagtaaatataccactgttgatttcttcttccagtgcaacatttggattaaataaaaatctttagtttccaga

SEQ ID NO: 104963 - DNA, 2320 bp, Homo sapiens
  Payload ID: 601
  Gene Symbol: AP3M1
  Gene Name: adaptor-related protein complex 3, mu 1 subunit
  Uniprot ID: Q9Y2T2
  ENST ID: ENST00000372745
  CDS Start-End: 218-1474
agctgcgggtcctcgcggccttctcggcttctccagcttcggtaggagaggatccggcgccgaatcactgactggcacaggtgttgggatagtgtctcacttggtcacccaggctggagtgcagtggcgcaatcttagctctctacagcgtcgatcttcctcctgggctcaagcaattctcctgcttcatcctcctgagtacctaggactacagaaaatgatccacagtctatttctcataaactgttccggtgacatatttctagagaagcactggaagagcgttgtgagccagtctgtctgtgattatttctttgaagctcaagagaaagctgctgatgttgaaaatgtaccacctgtcatttcaacacctcaccactacctcatcagtatctaccgggataagctcttctttgtatctgtcatacagaccgaagtgccacctctctttgtaattgagttcctacatcgagttgctgacacttttcaggactactttggtgagtgttcagaggctgcaattaaggataatgtggtcatagtatatgaactcttagaagaaatgttagacaatggatttccactggctaccgaatctaacattttgaaagaattgattaaaccaccaacaattctacgctctgttgtcaactctattacaggcagtagtaatgttggggacacactccccaccgggcagctgtccaacataccatggcgtcgggcaggggtaaagtacacaaacaatgaagcctattttgatgttgttgaagaaatagacgcaattatagataaatcaggatctacagtctttgcagaaattcagggggtcattgatgcttgcattaaactatctggaatgcctgatctctccctttctttcatgaaccctaggcttctggatgatgtcagctttcacccctgcatccggttcaagcgttgggaatctgaaagagttttgtcatttattcctccagatggaaatttccgactcatatcataccgtgtcagctcacaaaatctagtggcaataccagtgtatgtgaaacatagtatcagctttaaggagaacagttcttgcggcagatttgatataacaattggaccaaagcagaatatggggaaaactattgaaggaattacagtgacagttcacatgccaaaagttgtgctgaacatgaacctgacacccacacaaggcagctatacatttgatccagtcaccaaggtactaacatgggatgtgggaaaaattactccacaaaagctcccaagtcttaaaggactggtaaatttacagtctggagcccccaaaccagaagagaatccgagcctcaacatacagtttaagatccagcagcttgctatttcaggcttaaaagtaaaccgtttggacatgtatggggagaaatataagccatttaaaggagtcaaatacgtcacgaaagctggaaagttccaagtgaggacatgagaagaggccaaaattcctcaggaccagtttgttttccaagtgtcattacgatgtatcactattaggtaccaagtgagtgggaatacatattctagttaaagcatttgtgtctagctacacaccgctaacaaagttacttagttatcaatgtaggattcttaaggagctttaagctaaggaaaccttttagtgacttagcttattttgtatcttttcacttaggaagattttggaggtgatttttttccataggaggataccatctggcggctgcacattgtaacagtaaaggcagaaagctgtagtgataacctctctcctaaaagagttaactggtctcatccagcagaagctatcttaaatctgtgatgtgtcaggtgcagccaaatatcacaccttctgatcttagccatcccaaaccagtatctgtcccgagaggaaattccccccacccccagaagtttacagaaaactgcctcttcaagtgtttgccttattcagcttttcacttgtgccattaagcaagcactgtagcaaaagccacttccacatggccctggcagggagcactgctgctccatgctccattctcactgtacttggtattgtattttttataaataagatttttatgtaaagcttagaatttgatttacagggaccttgctgcagtaaataccatctcaattttgtgccactggttcagctgttagcacagtaaaaaaatcatttgtatcaaaggggcaaatgctttattaaggtagtaaaagggaacattacttctgcttttaggaagttactgcaagcacaagcatttgtgcttttaagcaaattaaagtagtaaaa

SEQ ID NO: 104964 - DNA, 3661 bp, Homo sapiens
  Payload ID: 602
  Gene Symbol: AP3M2
  Gene Name: adaptor-related protein complex 3, mu 2 subunit
  Uniprot ID: P53677
  ENST ID: ENST00000174653
  CDS Start-End: 283-1539
atacccaatcagcggccttcaggcgcagatcgtgggcggagcggtagccaggccgcgggccggccaatcagcgggcgagcggctgcctcagcgcgcgcggcgggcggggcggggcctgtccgcgcctaggagcagtgggcgctgagagcagcaaggccagggagggccttttggttgaatggaactgaatatcgctgcttttgtttttagagttgaaaacttacagagtcctgaggctttcagactgaaaaaggctttcttctgtcactgacaatcgccaccatgatccatagtcttttcttgatcaactcctctggagacattttcctggagaaacattggaaaagtgtggtcagccgttctgtttgtgattacttttttgaggcgcaagagagagctactgaggcagaaaatgtgcctccggttatccctacccctcaccactatctcttaagtgtttaccgccacaagatcttttttgtggccgtgatccagacggaggtcccccctctgtttgtcattgagtttcttcaccgagtggtggacacatttcaggattattttggagtctgttcagagccagtgatcaaagacaatgtagttgtggtttatgaggtattggaagagatgcttgacaatggttttccattggctaccgagtcgaacattcttaaagaactcataaagcctcctaccatccttcgaacggttgtcaacaccatcacaggaagcacgaatgtgggtgaccagcttcccactgggcagctgtcagtggtgccttggcgacggactggggtgaaatataccaacaatgaggcctattttgatgtgattgaagagattgatgcaattattgataaatcaggctccacaattactgctgagatccagggggtgattgatgcctgtgtcaagctgactggcatgccagaccttacactttccttcatgaaccctaggttgttggatgatgtcagcttccatccttgtgttcgtttcaaacgctgggaatctgagcgcatcctctccttcatccctcctgatggaaacttccgcctgctgtcttaccatgtcagtgcacagaatctggttgcaatcccagtgtatgtcaaacataacatcagtttccgggacagtagttcccttggacgctttgaaataacggtgggacccaagcagacgatggggaagaccattgagggagtgactgtcaccagccagatgcccaagggggtcctgaacatgagccttactccatcacaggggacacacacattcgacccagtcacaaagatgctgtcttgggatgtaggaaaaataaatccacaaaagctaccaagtttgaaggggaccatgagtcttcaggctggagcttccaaaccagatgaaaaccccacaattaacctgcagtttaagatccagcagctggccatttctggactcaaggtgaatcgtctggatatgtatggagaaaagtacaaaccctttaagggcataaaatacatgaccaaagctgggaagttccaagttcgaacctgaagggagcatttgctgagggaatagtcttgcacattttttcatttcttacttgtctaaaagtaaaaaaaaatatcagcctgtctcctaggtcagtcccctcctggacccacccgctcccttttttccttagccttcagtgccatggaactaatcaagggaggaaaaggtcaccagggagaactggacagaactgaaacacagcaacaccagttctcaaggacaaggtgtgtgatgggggtaggaagcttggtgcttatgtaaccattttaaacgtggtttctataggaaagaccaacatttgtttagcttgcttggctttaattatctaaagccaatgaaagacttctttgttgattttttaagatagaaagattaaaaagaaagaaagatgggaagaaaatgaatgtcagtcaaggaaaggccacttaaggatctgctctatgaaggagaagaaagaggaaaaagaagtaaaggagttaggaggagacacttaaatgaaagattggcaagaaaagcagtcggactctaccttaaggagggatgggaaggaaagagttgagttggtttctttctgattcctctactcatgtagaaaacacttgtacttctggaaatggactggagactttttaaatttgagtccactattgacatggaaaccccagtggaatcagattttccctcaaagaccatgatggtatcggactagttttcagacactgcctgttgctgtccatcagcacttggtctcttatcttcagtgagaaggtgacccgccttcttcccatggtggctgcctaaagtgcttcttttctaacccaaaacagttctactcacttccttttacagaattcaccggccattttcctgttacctgatccttctacaggatttttaaaaagtaagagagtttcagagaagccgatcccataatccccagtgcagccagggtttgtgtgtcatcgtactggagtagagggccgactcttcccatgaaggtgagcacagctgtgagtgagtgagctcatatctccatttgtcagtgctggactggtaccagatcgtaaccttcccgttggtcggaaacttttccatctgtcgccctagaaaaagagaaagcttaccatcgagggtgtggttgatccttgaagctgcttggtaaagttatcatttcctcagtcttttcttttgtactcctatcatgtattcattaatatctaccagtcccttttcattctaagacaaaacatttctcctaaatctctgaataaaatcagtgctgtaggaagatggactgtgttgatcatgggtgtaagcaacccagtttaagaaacatggcaactaaagggatacctcaggctttctttcccagtgggtcatttttgtcctagttcagtgtgtctgttactatttaaatatttatacaaaagggtttttgtttatagcttaaggaatgatactgtgctctgcttggtgcatggagaaaaaggaagacccgtactctccacaccctagagcttttctctaaatattgtgcaaagtttttgctagttttatcttctgactttgggactagtttttgctgcagagttgtgttgctttgtgattttcctctgggatagtgtactgtacacaaccagatgtgttccacactccgtgactccgcagtttgtcctggagtgacatacacatccaccatggaaagggaagcatctctgcctgtggattctcaagtacttggaagcacctctcctgaggaacctacaggattctaaggtttcctaggtcactgaacaactaatcttggtccctgaatatttctaggtttgtaagtgcagcagttttatttcctctagaactcatcctgtttcaagggaagtacctaagaagatatagagtgtttctagggtaagggacctgcaggtgtaagcatagatgaaataactgtcctgtcacatgtgcagcaggccatggagtgtagcgggcatcgctgccgccattcctgcagcatcaccataagcagtgcagggtgtctccatcgagctgtttggttccatgtgtgtttaacatgtgcagaagtagcttctctgtttaagtttaataaagttgagtttcaccagtc

SEQ ID NO: 104965 - DNA, 3545 bp, Homo sapiens
  Payload ID: 602
  Gene Symbol: AP3M2
  Gene Name: adaptor-related protein complex 3, mu 2 subunit
  Uniprot ID: P53677
  ENST ID: ENST00000396926
  CDS Start-End: 168-1424
aatcagcgggcgagcggctgcctcagcgcgcgcggcgggcggggcggggcctgtccgcgcctaggagcagtgggcgctgagagcagcaaggccagagttgaaaacttacagagtcctgaggctttcagactgaaaaaggctttcttctgtcactgacaatcgccaccatgatccatagtcttttcttgatcaactcctctggagacattttcctggagaaacattggaaaagtgtggtcagccgttctgtttgtgattacttttttgaggcgcaagagagagctactgaggcagaaaatgtgcctccggttatccctacccctcaccactatctcttaagtgtttaccgccacaagatcttttttgtggccgtgatccagacggaggtcccccctctgtttgtcattgagtttcttcaccgagtggtggacacatttcaggattattttggagtctgttcagagccagtgatcaaagacaatgtagttgtggtttatgaggtattggaagagatgcttgacaatggttttccattggctaccgagtcgaacattcttaaagaactcataaagcctcctaccatccttcgaacggttgtcaacaccatcacaggaagcacgaatgtgggtgaccagcttcccactgggcagctgtcagtggtgccttggcgacggactggggtgaaatataccaacaatgaggcctattttgatgtgattgaagagattgatgcaattattgataaatcaggctccacaattactgctgagatccagggggtgattgatgcctgtgtcaagctgactggcatgccagaccttacactttccttcatgaaccctaggttgttggatgatgtcagcttccatccttgtgttcgtttcaaacgctgggaatctgagcgcatcctctccttcatccctcctgatggaaacttccgcctgctgtcttaccatgtcagtgcacagaatctggttgcaatcccagtgtatgtcaaacataacatcagtttccgggacagtagttcccttggacgctttgaaataacggtgggacccaagcagacgatggggaagaccattgagggagtgactgtcaccagccagatgcccaagggggtcctgaacatgagccttactccatcacaggggacacacacattcgacccagtcacaaagatgctgtcttgggatgtaggaaaaataaatccacaaaagctaccaagtttgaaggggaccatgagtcttcaggctggagcttccaaaccagatgaaaaccccacaattaacctgcagtttaagatccagcagctggccatttctggactcaaggtgaatcgtctggatatgtatggagaaaagtacaaaccctttaagggcataaaatacatgaccaaagctgggaagttccaagttcgaacctgaagggagcatttgctgagggaatagtcttgcacattttttcatttcttacttgtctaaaagtaaaaaaaaatatcagcctgtctcctaggtcagtcccctcctggacccacccgctcccttttttccttagccttcagtgccatggaactaatcaagggaggaaaaggtcaccagggagaactggacagaactgaaacacagcaacaccagttctcaaggacaaggtgtgtgatgggggtaggaagcttggtgcttatgtaaccattttaaacgtggtttctataggaaagaccaacatttgtttagcttgcttggctttaattatctaaagccaatgaaagacttctttgttgattttttaagatagaaagattaaaaagaaagaaagatgggaagaaaatgaatgtcagtcaaggaaaggccacttaaggatctgctctatgaaggagaagaaagaggaaaaagaagtaaaggagttaggaggagacacttaaatgaaagattggcaagaaaagcagtcggactctaccttaaggagggatgggaaggaaagagttgagttggtttctttctgattcctctactcatgtagaaaacacttgtacttctggaaatggactggagactttttaaatttgagtccactattgacatggaaaccccagtggaatcagattttccctcaaagaccatgatggtatcggactagttttcagacactgcctgttgctgtccatcagcacttggtctcttatcttcagtgagaaggtgacccgccttcttcccatggtggctgcctaaagtgcttcttttctaacccaaaacagttctactcacttccttttacagaattcaccggccattttcctgttacctgatccttctacaggatttttaaaaagtaagagagtttcagagaagccgatcccataatccccagtgcagccagggtttgtgtgtcatcgtactggagtagagggccgactcttcccatgaaggtgagcacagctgtgagtgagtgagctcatatctccatttgtcagtgctggactggtaccagatcgtaaccttcccgttggtcggaaacttttccatctgtcgccctagaaaaagagaaagcttaccatcgagggtgtggttgatccttgaagctgcttggtaaagttatcatttcctcagtcttttcttttgtactcctatcatgtattcattaatatctaccagtcccttttcattctaagacaaaacatttctcctaaatctctgaataaaatcagtgctgtaggaagatggactgtgttgatcatgggtgtaagcaacccagtttaagaaacatggcaactaaagggatacctcaggctttctttcccagtgggtcatttttgtcctagttcagtgtgtctgttactatttaaatatttatacaaaagggtttttgtttatagcttaaggaatgatactgtgctctgcttggtgcatggagaaaaaggaagacccgtactctccacaccctagagcttttctctaaatattgtgcaaagtttttgctagttttatcttctgactttgggactagtttttgctgcagagttgtgttgctttgtgattttcctctgggatagtgtactgtacacaaccagatgtgttccacactccgtgactccgcagtttgtcctggagtgacatacacatccaccatggaaagggaagcatctctgcctgtggattctcaagtacttggaagcacctctcctgaggaacctacaggattctaaggtttcctaggtcactgaacaactaatcttggtccctgaatatttctaggtttgtaagtgcagcagttttatttcctctagaactcatcctgtttcaagggaagtacctaagaagatatagagtgtttctagggtaagggacctgcaggtgtaagcatagatgaaataactgtcctgtcacatgtgcagcaggccatggagtgtagcgggcatcgctgccgccattcctgcagcatcaccataagcagtgcagggtgtctccatcgagctgtttggttccatgtgtgtttaacatgtgcagaagtagcttctctgtttaagtttaataaagttgagtttcaccagt

SEQ ID NO: 104966 - DNA, 462 bp, Homo sapiens
  Payload ID: 602
  Gene Symbol: AP3M2
  Gene Name: adaptor-related protein complex 3, mu 2 subunit
  ENST ID: ENST00000522606
  CDS Start-End: 1-293
tcaccagccagatgcccaagggggtcctgaacatgagccttactccatcacaggggacacacacattcgacccagtcacaaagatgctgtcttgggatgtaggaaaaataaatccacaaaagctaccaagtttgaaggggaccatgagtcttcaggctggagcttccaaaccagatgaaaaccccacaattaacctgcagtttaagatccagcagctggccatttctgaagactttcatgtttgctcttatttctattttggaaccactgggcctttccaggactcaaggtgaatcgtctggatatgtatggagaaaagtacaaaccctttaagggcataaaatacatgaccaaagctgggaagttccaagttcgaacctgaagggagcatttgctgagggaatagtcttgcacattttttcatttcttacttgtctaaaagtaaaaaaaaatatcagcctg

SEQ ID NO: 104967 - DNA, 3669 bp, Homo sapiens
  Payload ID: 602
  Gene Symbol: AP3M2
  Gene Name: adaptor-related protein complex 3, mu 2 subunit
  Uniprot ID: P53677
  ENST ID: ENST00000518421
  CDS Start-End: 292-1548
atacccaatcagcggccttcaggcgcagatcgtgggcggagcggtagccaggccgcgggccggccaatcagcgggcgagcggctgcctcagcgcgcgcggcgggcggggcggggcctgtccgcgcctaggagcagtgggcgctgagagcagcaaggccagggagggctatcttcaggctcatgcaggaggggaagattgggcctggtcttgaaagatggagttgaaaacttacagagtcctgaggctttcagactgaaaaaggctttcttctgtcactgacaatcgccaccatgatccatagtcttttcttgatcaactcctctggagacattttcctggagaaacattggaaaagtgtggtcagccgttctgtttgtgattacttttttgaggcgcaagagagagctactgaggcagaaaatgtgcctccggttatccctacccctcaccactatctcttaagtgtttaccgccacaagatcttttttgtggccgtgatccagacggaggtcccccctctgtttgtcattgagtttcttcaccgagtggtggacacatttcaggattattttggagtctgttcagagccagtgatcaaagacaatgtagttgtggtttatgaggtattggaagagatgcttgacaatggttttccattggctaccgagtcgaacattcttaaagaactcataaagcctcctaccatccttcgaacggttgtcaacaccatcacaggaagcacgaatgtgggtgaccagcttcccactgggcagctgtcagtggtgccttggcgacggactggggtgaaatataccaacaatgaggcctattttgatgtgattgaagagattgatgcaattattgataaatcaggctccacaattactgctgagatccagggggtgattgatgcctgtgtcaagctgactggcatgccagaccttacactttccttcatgaaccctaggttgttggatgatgtcagcttccatccttgtgttcgtttcaaacgctgggaatctgagcgcatcctctccttcatccctcctgatggaaacttccgcctgctgtcttaccatgtcagtgcacagaatctggttgcaatcccagtgtatgtcaaacataacatcagtttccgggacagtagttcccttggacgctttgaaataacggtgggacccaagcagacgatggggaagaccattgagggagtgactgtcaccagccagatgcccaagggggtcctgaacatgagccttactccatcacaggggacacacacattcgacccagtcacaaagatgctgtcttgggatgtaggaaaaataaatccacaaaagctaccaagtttgaaggggaccatgagtcttcaggctggagcttccaaaccagatgaaaaccccacaattaacctgcagtttaagatccagcagctggccatttctggactcaaggtgaatcgtctggatatgtatggagaaaagtacaaaccctttaagggcataaaatacatgaccaaagctgggaagttccaagttcgaacctgaagggagcatttgctgagggaatagtcttgcacattttttcatttcttacttgtctaaaagtaaaaaaaaatatcagcctgtctcctaggtcagtcccctcctggacccacccgctcccttttttccttagccttcagtgccatggaactaatcaagggaggaaaaggtcaccagggagaactggacagaactgaaacacagcaacaccagttctcaaggacaaggtgtgtgatgggggtaggaagcttggtgcttatgtaaccattttaaacgtggtttctataggaaagaccaacatttgtttagcttgcttggctttaattatctaaagccaatgaaagacttctttgttgattttttaagatagaaagattaaaaagaaagaaagatgggaagaaaatgaatgtcagtcaaggaaaggccacttaaggatctgctctatgaaggagaagaaagaggaaaaagaagtaaaggagttaggaggagacacttaaatgaaagattggcaagaaaagcagtcggactctaccttaaggagggatgggaaggaaagagttgagttggtttctttctgattcctctactcatgtagaaaacacttgtacttctggaaatggactggagactttttaaatttgagtccactattgacatggaaaccccagtggaatcagattttccctcaaagaccatgatggtatcggactagttttcagacactgcctgttgctgtccatcagcacttggtctcttatcttcagtgagaaggtgacccgccttcttcccatggtggctgcctaaagtgcttcttttctaacccaaaacagttctactcacttccttttacagaattcaccggccattttcctgttacctgatccttctacaggatttttaaaaagtaagagagtttcagagaagccgatcccataatccccagtgcagccagggtttgtgtgtcatcgtactggagtagagggccgactcttcccatgaaggtgagcacagctgtgagtgagtgagctcatatctccatttgtcagtgctggactggtaccagatcgtaaccttcccgttggtcggaaacttttccatctgtcgccctagaaaaagagaaagcttaccatcgagggtgtggttgatccttgaagctgcttggtaaagttatcatttcctcagtcttttcttttgtactcctatcatgtattcattaatatctaccagtcccttttcattctaagacaaaacatttctcctaaatctctgaataaaatcagtgctgtaggaagatggactgtgttgatcatgggtgtaagcaacccagtttaagaaacatggcaactaaagggatacctcaggctttctttcccagtgggtcatttttgtcctagttcagtgtgtctgttactatttaaatatttatacaaaagggtttttgtttatagcttaaggaatgatactgtgctctgcttggtgcatggagaaaaaggaagacccgtactctccacaccctagagcttttctctaaatattgtgcaaagtttttgctagttttatcttctgactttgggactagtttttgctgcagagttgtgttgctttgtgattttcctctgggatagtgtactgtacacaaccagatgtgttccacactccgtgactccgcagtttgtcctggagtgacatacacatccaccatggaaagggaagcatctctgcctgtggattctcaagtacttggaagcacctctcctgaggaacctacaggattctaaggtttcctaggtcactgaacaactaatcttggtccctgaatatttctaggtttgtaagtgcagcagttttatttcctctagaactcatcctgtttcaagggaagtacctaagaagatatagagtgtttctagggtaagggacctgcaggtgtaagcatagatgaaataactgtcctgtcacatgtgcagcaggccatggagtgtagcgggcatcgctgccgccattcctgcagcatcaccataagcagtgcagggtgtctccatcgagctgtttggttccatgtgtgtttaacatgtgcagaagtagcttctctgtttaagtttaataaagttgagtttcaccagt

SEQ ID NO: 104968 - DNA, 602 bp, Homo sapiens
  Payload ID: 602
  Gene Symbol: AP3M2
  Gene Name: adaptor-related protein complex 3, mu 2 subunit
  ENST ID: ENST00000517499
  CDS Start-End: 1-396
gattattttggagtctgttcagagccagtgatcaaagacaatgtagttgtggtttatgaggtattggaagagatgcttgacaatggttttccattggctaccgagtcgaacattcttaaagaactcataaagcctcctaccatccttcgaacggttgtcaacaccatcacaggctccacaattactgctgagatccagggggtgattgatgcctgtgtcaagctgactggcatgccagaccttacactttccttcatgaaccctaggttgttggatgatgtcagcttccatccttgtgttcgtttcaaacgctgggaatctgagcgcatcctctccttcatccctcctgatggaaacttccgcctgctgtcttaccatgtcagtgcacagaagtaagcagctcttataattaagaatggaatccgtgtatgtacatgtatgtggaaaccgtatctgtggtgattaagaactcaggctctagagttacctgggttcacattccagcttctgtggttactaattgggtaacctcaggtgagttgcttaacccctatgtatctcttttctcatctgtaaattgaaaataataaaagtgccttgtt

SEQ ID NO: 104969 - DNA, 1094 bp, Homo sapiens
  Payload ID: 602
  Gene Symbol: AP3M2
  Gene Name: adaptor-related protein complex 3, mu 2 subunit
  ENST ID: ENST00000517922
  CDS Start-End: 73-879
agttgaaaacttacagagtcctgaggctttcagactgaaaaaggctttcttctgtcactgacaatcgccaccatgatccatagtcttttcttgatcaactcctctggagacattttcctggagaaacattggaaaagtgtggtcagccgttctgtttgtgattacttttttgaggcgcaagagagagctactgaggcagaaaatgtgcctccggttatccctacccctcaccactatctcttaagtgtttaccgccacaagatcttttttgtggccgtgatccagacggaggtcccccctctgtttgtcattgagtttcttcaccgagtggtggacacatttcaggattattttggagtctgttcagagccagtgatcaaagacaatgtagttgtggtttatgaggtattggaagagatgcttgacaatggttttccattggctaccgagtcgaacattcttaaagaactcataaagcctcctaccatccttcgaacggttgtcaacaccatcacaggaagcacgaatgtgggtgaccagcttcccactgggcagctgtcagtggtgccttggcgacggactggggtgaaatataccaacaatgaggcctattttgatgtgattgaagagattgatgcaattattgataaatcaggctccacaattactgctgagatccagggggtgattgatgcctgtgtcaagctgactggcatgccagaccttacactttccttcatgaaccctaggttgttggatgatgtcagcttccatccttgtgttcgtttcaaacgctgggaatctgagcgcatcctctccttcatccctcctgatggaaacttccgcctgctgtcttaccatgtcagtgcacagaagtaagcagctcttataattaagaatggaatccgtgtatgtacatgtatgtggaaaccgtatctgtggtgattaagaactcaggctctagagttacctgggttcacattccagcttctgtggttactaattgggtaacctcaggtgagttgcttaacccctatgtatctcttttctcatctgtaaattgaaaataataaaagtgccttgttctgaagatt

SEQ ID NO: 104970 - DNA, 574 bp, Homo sapiens
  Payload ID: 602
  Gene Symbol: AP3M2
  Gene Name: adaptor-related protein complex 3, mu 2 subunit
  ENST ID: ENST00000522288
  CDS Start-End: 157-574
aggagtgggggcgcgcgagggtcggggcggggtctcaggatgcagccgggcggcctctcagggctgcggacgcggcggggagagagttgaaaacttacagagtcctgaggctttcagactgaaaaaggctttcttctgtcactgacaatcgccaccatgatccatagtcttttcttgatcaactcctctggagacattttcctggagaaacattggaaaagtgtggtcagccgttctgtttgtgattacttttttgaggcgcaagagagagctactgaggcagaaaatgtgcctccggttatccctacccctcaccactatctcttaagtgtttaccgccacaagatcttttttgtggccgtgatccagacggaggtcccccctctgtttgtcattgagtttcttcaccgagtggtggacacatttcaggattattttggagtctgttcagagccagtgatcaaagacaatgtagttgtggtttatgaggtattggaagagatgcttgacaatggttttccattggctaccgagtcgaacattcttaaagaactcataaagcctcctaccatcc

SEQ ID NO: 104971 - DNA, 687 bp, Homo sapiens
  Payload ID: 602
  Gene Symbol: AP3M2
  Gene Name: adaptor-related protein complex 3, mu 2 subunit
  ENST ID: ENST00000520689
  CDS Start-End: 1-147
cccacaattaacctgcagtttaagatccagcagctggccatttctggactcaaggtgaatcgtctggatatgtatggagaaaagtacaaaccctttaagggcataaaatacatgaccaaagctgggaagttccaagttcgaacctgaagggagcatttgctgagggaatagtcttgcacattttttcatttcttacttgtctaaaagtaaaaaaaaatatcagcctgtctcctaggtcagtcccctcctggacccacccgctcccttttttccttagccttcagtgccatggaactaatcaagggaggaaaaggtcaccagggagaactggacagaactgaaacacagcaacaccagttctcaaggacaagttctactcacttccttttacagaattcaccggccattttcctgttacctgatccttctacaggatttttaaaaagtaagagagtttcagagaagccgatcccataatccccagtgcagccagggtttgtgtgtcatcgtactggagtagagggccgactcttcccatgaaggcatgaaacggtgtcgcagtactctggcgtctttattccaggagaggcttcttacaagataaggcactgcgagtcgattgttacgccacacctgtaacaattttctataaacatctcatggccatcaaaaaaccttaaaactcaa

SEQ ID NO: 104972 - DNA, 2778 bp, Homo sapiens
  Payload ID: 602
  Gene Symbol: AP3M2
  Gene Name: adaptor-related protein complex 3, mu 2 subunit
  ENST ID: ENST00000517865
  CDS Start-End: 1696-2025
ccaggccgcgggccggccaatcagcgggcgagcggctgcctcagcgcgcgcggcgggcggggcggggcctgtccgcgcctaggagcagtgggcgctgagagcagcaaggccaggtgaggagtagggacgaccccgagcctggagagggggcaggagtgggggcgcgcgagggtcggggcggggtctcaggatgcagccgggcggcctctcagggctgcggacgcggcggggagaggtgaggggccgggttcagagttcggggagggcgtccttcccggcgccgcggctgcgggcggaggggacactgttgccatggcagcgcacgtgcgctcgctggcgcggcccggcacccctgcgctcttcaccccggaacgcgcgtgccccttcagccaggcccctgcccgcctgcgccccgcggcctccgtcgccgccggctctgggccggggcctgcgcagggaccgcctgcctaggccgctgcctctccctcgcaccccgggctgcctggctgtctctccctcctgctgtctcctccaggcggcgctgggcaccgcaggcctctgcgttttgaccacccgcgccggttcgcggaatggccacatcctggcgactggcaccagagagatgcaaccgtctgagggccttggggtgtctgtcccccagggaaatttttttttttttttggaggtggagggggcggggttctccctctgttgcccgggctgatctcgaactcgtgagctccagcggtctgcccgcggaggcctccctaagtactgggatcacaggcgggagccccaagggatctttttaaatgtcttactgcattaacaagtgcctaaggagtgctcagagaatagctctgattggatgaataaagacccccaagggcagctttccattcctcccaccaattctggtgggcagaaatagaaagcaaaccacatatgtaattgtacatgttctggtaaccactttaaaataataaaacaggttaaattaattttaatatatttgatttaacccaggatatccaaaatgttattacaacatataatcaatattaaattattggtaagatatttgaaattttttttttcatgcaaagcctttcagatttgtcgtgtgtcttacacttaacagcacacctcagtccgcaccagccacctttcaagtgctcgctggtcccatagtggctatcgtattaagctgcgcatttcttgtgtatgtgtgagctgttgccaaaacatgacatcaaattcagtgttcttggaagccctcttcaaagaacactgattgtgttgcagtcaggcaacgcaaaacatgaggcacggcccttttcttcaaggagtttgcggttcggttgagaaaatagacacccacagataagtagtattttaaatggatgcaatttgggcgatagtaaagataactgggagtatatgattgacagtcagatgactgatcattatcgtttcgaattcaagggagggctatcttcaggctcatgcaggaggggaagattgggcctggtcttgaaagatgggtaagtcttggactgttgggaaaagatggggagggccttttggttgaatggaactgaatatcgctgcttttgtttttagagttgaaaacttacagagtcctgaggctttcagactgaaaaaggctttcttctgtcactgacaatcgccaccatgatccatagtcttttcttgatcaactcctctggagacattttcctggagaaacattggaaaagtgtggtcagccgttctgtttgtgattacttttttgaggcgcaagagagagctactgaggcagaaaatgtgcctccggttatccctacccctcaccactatctcttaagtgtttaccgccacaagatcttttttgtggccgtgatccagacggaggtcccccctctgtttgtcattgagtttcttcaccgagtggtggacacatttcagtactactgttctggaatttcagttctcatgcaacataccggcccctttgcacagtgaaaacgattattttggagtctgttcagagccagtgatcaaagacaatgtagttgtggtttatgaggtattggaagagatgcttgacaatggttttccattggctaccgagtcgaacattcttaaagaactcataaagcctcctaccatccttcgaacggttgtcaacaccatcacaggaagcacgaatgtgggtgaccagcttcccactgggcagctgtcagtggtgccttggcgacggactggggtgaaatataccaacaatgaggcctattttgatgtgattgaagagattgatgcaattattgataaatcaggctccacaattactgctgagatccagggggtgattgatgcctgtgtcaagctgactggcatgccagaccttacactttccttcatgaaccctaggttgttggatgatgtcagcttccatccttgtgttcgtttcaaacgctgggaatctgagcgcatcctctccttcatccctcctgatggaaacttccgcctgctgtcttaccatgtcagtgcacagaagtaagcagctcttataattaagaatggaatccgtgtatgtacatgtatgtggaaaccgtatctgtggtgattaagaactcaggctctagagttacctgggttcacattccagcttctgtggttactaattgggtaacctcaggtgagttgcttaacccctatgtatctcttttctcatctgtaaattgaaaataataaaagtgccttgttctgaagatt

SEQ ID NO: 104973 - DNA, 509 bp, Homo sapiens
  Payload ID: 602
  Gene Symbol: AP3M2
  Gene Name: adaptor-related protein complex 3, mu 2 subunit
  ENST ID: ENST00000517969
  CDS Start-End: 479-509
cagcacacctcagtccgcaccagccacctttcaagtgctcgctggtcccatagtggctatcgtattaagctgcgcatttcttgtgtatgtgtgagctgttgccaaaacatgacatcaaattcagtgttcttggaagccctcttcaaagaacactgattgtgttgcagtcaggcaacgcaaaacatgaggcacggcccttttcttcaaggagtttgcggttcggttgagaaaatagacacccacagataagtagtattttaaatggatgcaatttgggcgatagtaaagataactgggagtatatgattgacagtcagatgactgatcattatcgtttcgaattcaagggagggctatcttcaggctcatgcaggaggggaagattgggcctggtcttgaaagatggagttgaaaacttacagagtcctgaggctttcagactgaaaaaggctttcttctgtcactgacaatcgccaccatgatccatagtcttttcttgatcaactcct

SEQ ID NO: 104974 - DNA, 966 bp, Homo sapiens
  Payload ID: 602
  Gene Symbol: AP3M2
  Gene Name: adaptor-related protein complex 3, mu 2 subunit
  ENST ID: ENST00000521280
  CDS Start-End: 105-966
ggagcagtgggcgctgagagcagcaaggccaggattattttggagtctgttcagagccagtgatcaaagacaatgtagttgtggtttatgaggtattggaagagatgcttgacaatggttttccattggctaccgagtcgaacattcttaaagaactcataaagcctcctaccatccttcgaacggttgtcaacaccatcacaggaagcacgaatgtgggtgaccagcttcccactgggcagctgtcagtggtgccttggcgacggactggggtgaaatataccaacaatgaggcctattttgatgtgattgaagagattgatgcaattattgataaatcaggctccacaattactgctgagatccagggggtgattgatgcctgtgtcaagctgactggcatgccagaccttacactttccttcatgaaccctaggttgttggatgatgtcagcttccatccttgtgttcgtttcaaacgctgggaatctgagcgcatcctctccttcatccctcctgatggaaacttccgcctgctgtcttaccatgtcagtgcacagaatctggttgcaatcccagtgtatgtcaaacataacatcagtttccgggacagtagttcccttggacgctttgaaataacggtgggacccaagcagacgatggggaagaccattgagggagtgactgtcaccagccagatgcccaagggggtcctgaacatgagccttactccatcacaggggacacacacattcgacccagtcacaaagatgctgtcttgggatgtaggaaaaataaatccacaaaagctaccaagtttgaaggggaccatgagtcttcaggctggagcttccaaaccagatgaaaaccccacaattaacctgcagtttaagatccagcagctggccatttctggactcaaggtgaatcgtctggatatgtatggagaaaagtacaaacccttta

SEQ ID NO: 104975 - DNA, 1212 bp, Homo sapiens
  Payload ID: 602
  Gene Symbol: AP3M2
  Gene Name: adaptor-related protein complex 3, mu 2 subunit
  Uniprot ID: P53677
  ENST ID: ENST00000530375
  CDS Start-End: 94-915
cgctgagagcagcaaggccagagttgaaaacttacagagtcctgaggctttcagactgaaaaaggctttcttctgtcactgacaatcgccaccatgatccatagtcttttcttgatcaactcctctggagacattttcctggagaaacattggaaaagtgtggtcagccgttctgtttgtgattacttttttgaggcgcaagagagagctactgaggcagaaaatgtgcctccggttatccctacccctcaccactatctcttaagtgtttaccgccacaagatcttttttgtggccgtgatccagacggaggtcccccctctgtttgtcattgagtttcttcaccgagtggtggacacatttcaggattattttggagtctgttcagagccagtgatcaaagacaatgtagttgtggtttatgaggtattggaagagatgcttgacaatggttttccattggctaccgagtcgaacattcttaaagaactcataaagcctcctaccatccttcgaacggttgtcaacaccatcacaggaagcacgaatgtgggtgaccagcttcccactgggcagctgtcagtggtgccttggcgacggactggggtgaaatataccaacaatgaggcctattttgatgtgattgaagagattgatgcaattattgataaatcaggctccacaattactgctgagatccagggggtgattgatgcctgtgtcaagctgactggcatgccagaccttacactttccttcatgaaccctaggttgttggatgatgtcagcttccatccttgtgttcgtttcaaacgctgggaatctgagcgcatcctctccttcatccctcctgatggaaacttccgcctgctgtcttaccatgtcagtgcacagaaatgctgtcttgggatgtaggaaaaataaatccacaaaagctaccaagtttgaaggggaccatgagtcttcaggctggagcttccaaaccagatgaaaaccccacaattaacctgcagtttaagatccagcagctggccatttctggactcaaggtgaatcgtctggatatgtatggagaaaagtacaaaccctttaagggcataaaatacatgaccaaagctgggaagttccaagttcgaacctgaagggagcatttgctgagggaatagtcttgcacattttttcatttcttacttgtctaaaagtaaaaaaaaa

SEQ ID NO: 104976 - DNA, 1730 bp, Homo sapiens
  Payload ID: 603
  Gene Symbol: AP3S1
  Gene Name: adaptor-related protein complex 3, sigma 1 subunit
  Uniprot ID: Q92572
  ENST ID: ENST00000316788
  CDS Start-End: 558-1139
atccgtaagtccttcccctccagcagcaattgaagtaggaagctgcaacacagactgcggctcctccgccatcttgcttggagacactcgagagcggaagtagcgactgagcgcgtgcagtgggcgtgcttttctccagggagcgtcgcaaaggaggcgccggagtagggggacgcaattacacagtgaaacttggtgttcccggctagtcattcaaatcgaagctgtcgcagacctctgaacgttagtaacgcaacatgtgtttctccgcgactacagacctcgggagaggagcggtgggcaacgtgtctgtgctcggtcgaatgcgcacactccagttaggccgctggctcggacctagaaatgtttccgctttccttagtgcctgccccgcccaggccccgccccttgggccccgcccgacggctcgggagcgcgcgcggtcgcgtgcgggagggggcgggtggggaaggatcgcaggcgagattacgaggcgaggctcgcgcgcccgcccccgccctggcccccagtgcccacccggtcggcccggcacagccatgatcaaggcgatcctaatcttcaacaaccacgggaagccgcggctctccaagttctaccagccctacagtgaagatacacaacagcaaatcatcagggagactttccatttggtatctaagagagatgaaaatgtttgtaatttcctagaaggaggattattaattggaggatctgacaacaaactgatttatagacattatgcaacgttatattttgtcttctgtgtggattcttcagaaagtgaacttggcattttagatctaattcaagtatttgtggaaacattagacaaatgttttgaaaatgtctgtgagctggatttgattttccatgtagacaaggttcacaatattcttgcagaaatggtgatggggggaatggtattggagacaaatatgaatgagattgttacacaaattgatgcacaaaataagctggaaaaatctgaggctggcttagcaggagctccagcccgtgctgtatcagctgtaaagaatatgaatcttcctgagatcccaagaaatattaacattggtgacatcagtataaaagtgccaaacctgccctcttttaaataaaaatgtaaaaaggccactcccaggtaaaatccagggggaagagtcatctaagtttaccatgcagttgtttaccaaaaatagaggaggagagtcttaacttttgctcttggatttaagtcaaggtactgtatagaagttgtgtaaaatcagtatgaaagttcaatgttgctgttcttgctcagtgattttaaagaaattgagtagttcctatgtgatttttttttttcttttctaaactgcattcctgtgcccacctacggcatgcctctatgtattggctactacagtgttttaaaaagtgtttcagatatttctctaattatgtacaacctaaaatgttggtgttttgtatggatcacaagtgcagcattccttaattccttctgctatatgtcacacagttgttatttggagaaccaagtatgtattgcatgaaaacattatgacttttttctcttagtttaaataaactccaaggtaactggacttctaaagcacctttctgtttgcctgatatctactttagcaataattttttttacaaccctctgactcaacaaagtaaataaaagtatattttatcactattaa

SEQ ID NO: 104977 - DNA, 718 bp, Homo sapiens
  Payload ID: 603
  Gene Symbol: AP3S1
  Gene Name: adaptor-related protein complex 3, sigma 1 subunit
  ENST ID: ENST00000506430
  CDS Start-End: 81-569
caggcgagattacgaggcgaggctcgcgcgcccgcccccgccctggcccccagtgcccacccggtcggcccggcacagccatgatcaaggcgatcctaatcttcaacaaccacgggaagccgcggctctccaagttctaccagccctacagtgaagatacacaacagcaaatcatcagggagactttccatttggtatctaagagagatgaaaatgtttgtaatttcctagaaggaggattattaattggaggatctgacaacaaactgatttatagacattatgcaacgttatattttgtcttctgtgtggattcttcagaaagtgaacttggcattttagatctaattcaagtatttgtggaaacattagacaaatgttttgaaaatgtctgtgagctggatttgattttccatgtagacaaggttcacaatattcttgcagaaatggtgatggggggaatggtattggagacaaatatgaatgagattgttacacaaattgatgcacaaaataagctggaaaaatctgagacctttatctttcagtctcccagacaggacaggtagacaagcaaatagtttacactggcctattttgtatcagtcaagatttttctcaggctggcttagcaggagctccagcccgtgctgtatcagctgtaaagaatatgaatcttcctgagatcccaagaaatattaacattggtgacatcagt

SEQ ID NO: 104978 - DNA, 5891 bp, Homo sapiens
  Payload ID: 604
  Gene Symbol: AP3S2
  Gene Name: adaptor-related protein complex 3, sigma 2 subunit
  Uniprot ID: P59780
  ENST ID: ENST00000336418
  CDS Start-End: 394-975
acgttctgcgagcgctaaggggatggcgggagtgcatgatttggagcgggcggtgagaaaagcaagctcccgccgcctctccgttttggcaacccggctgacggtcgtttcggcttctggggccagccgtcggtctgggcgagggacatagatccggattcgcatcctgactggccaaccaacgctggccgaggtgaccactctcctcggcatccgcacctgccctccaaggcgtcagagaggccggacccttgggtgctagggctcgtgagcgccggggccaagtttccgagtgccgctctcagcagcgcaccaaccggaagtgatcgtgttgtggcggaaggaggagctttctgggagtagccggtgctgagagaaccgtggctggcaaagatgattcaggcgattctggttttcaacaaccatgggaagccacggctagtccgcttctaccagcgtttcccagaagaaattcaacagcagattgttcgagagactttccatctagtcctcaagcgggatgacaacatctgtaacttcttggagggtggaagtttgattggtggctctgactacaaactgatctaccggcactatgctaccctctactttgtattttgtgtggattcctcagagagtgaacttggaatcttggacctcatccaggtttttgtggaaactctggataagtgtttcgaaaatgtgtgtgaattggatttgatcttccatatggataaggtgcactacatcctccaggaggtggtgatgggtgggatggtgttggaaacaaacatgaatgaaatcgtggctcagattgaggctcaaaacaggctggagaaatccgagggtggcctttcagcagcccctgcgcgggctgtgtctgctgtgaaaaacatcaacctgccagagattcctcggaacatcaacattggcgatctcaacatcaaagttcccaacctgtcccagtttgtctgaggatcaagtattggcctgaaatagagtccttaagacaagcaaagacaagcaaggcaagcacgtctggaaacagaacccattttgagccttagaagagtcaagcctcaggacctggaaactttgtgtctggggaagactgtttggcatggaatagggaagggattcctattgacactgctcgggtgcacccagttctcacatgtgcagtcatgccgttctctgatgcatacggccactgcagatgtgaggggccctgccttcctcagtagggagtcaacatgcccaagtcatttgcacctttacctctcacatggatgctcccaagggttagggactgcattgagcaggcccacctgcttcccagaacctcctcactagggctgagcaccttctctgagtagagtcttcatccttagcaccacagacttctgaggtcctgtgccctttacttgctggtgaggtgtcataggtagaaaagggctggcccttcagatctgggggtgtggtgagtggcaagtaagggcagaattttaggagaaccagagtcacccgctggctctactgagattgttacacccagaatccttttgtgtttttttgtggttttttttttttgaggtggagtcttgctctgtcacccaggctggagtgctgtggtgcaatctcggctcactgcaacctctgcttcccgggttcaagcatttctcctgtctcagcctccccagtagctgggattacaggcacccaccaccatgcccagctaattgttgtatgtttagtagagacagggtttcaccatgttggccaggctgggctcgaactcctggacctcaagtgatctacccgccttggcctcccaaagtgctggcattacaggtgtgagccaccgtgcccggccaccagaatcctttggtatagccaagccttttggttaccgcctcatgaagaatatgcttcccgcattgtcctagtcccagttgtattctcacaggtgttatgtgcaggacacaatccaaatcataaacctggctcatgcccaacacatttctgctaatagggagagggacccaccacacacccacacatgccagaggtccctcctcacagaggagagggcctgtgtctgtagaaggttaaagctgacaacatgtgaaacatcccagaattatgactcttcccaagtttaaaatacattctcctcatgagagcagaaggtttgttgctgtgttgtgaatgatgagctgcctccatagggaacccactgccacctgggccagcttctggagcatgagaacctgagccagggtcacccttgtggggcctggacatgacgcacgctggctgcgactaggagcagggctgcctcttctccctccccaaggtctgcttgtgggcacgctctgttccctcaggtgccattctcccagggcttaggcgcccataaatgttctttctgtggtggagtagggcctcctgcttccatactgtcgcatgggctagatctcaggtgtggtgttgagccaccttaagatgagggctgcttcgcagtaaagtttccagcctgggcccctcttgggccttctggctggggaccctcagcctcctgatgctgttgcagggcaggtctgagagggtgcccagcagcacccggtgtcagggccaccttgttttccatttttgaacagcgctccctgtggtttgtgcccactgctcaatacagcctccgatcctcactcttgaaagctccatgataagcacagagatgggcagtgtgggtcagaaggtgggccgcttcctgtggaagagggaagtgtaggtgaatagatatcaaaacccctgatgtcattcttttgaggggttggattttcttttttctggcagacatttcagtacattcacatttctctcacatttgctgaatgtgagatcagaataaaggagatcggcgtttatttcgtaccttctgtaagttggcatgagcaagatcattcaactgtccttacaacaggcattcttatccccattttgcagatgacgaaagtagacccagctccagtaaccttcccttagattacacggggctgagatctgagactgttcacttgactccactgtccttttctttcctcgctgcttaagatggcttctcccaatgttatcatcttcttttttatagataaggaaactgagcctcagagagtctgacttctcacaaaccgtggtctaaataggcttgattttctaaggtggccagtgatcatgtcatagagtataagagccaaagagtcgtctgtgtccctccatttaactgatgttgaagccgaagcccaaggtggtaaatgttatgttgagggtcacaaatccagagccacatccctcttcttgagttcgtttgttacgtggtttaatgcattactgcaggacagcccttatgctagatttcctgggatagcctagattttgaatgttttgcctgccagaaaccaatggttttaaaaaatcattgagtggtcctacagattcaaagcgagcatccaaacatccctcacatggcctcttacaatgacataaaactgaagcccacttttttatttggaaaactcaatccctttggacaagccacaataatttttcattaactacttgaggttgcctgcaaattcagctagctttccagcctgctatcagcaaagccataaacatcttttttaaaaataggttaaggttggccaggtgcggtggctcacgcctgtaatcccagcactttgggaggccgaggcgggcagatcacgaggtcaggagatcgagaccatcctagctaacacagtgaaaacccatctctactaaaaatacaaaaaattggccagccgtggtagtggacacctgtagtcccagctactcaggaggctgcggcaggagaatggcatgaacccgggaggcagagcttgcagtgagccaagatcgcaccactacactccagcctgggcaacacagcaagactccgtctcaaaaaaaaaaaaaaaaaaaataggttaaggttgtatagaatactaggctttcctttttttgtgagatgggggtctcacactgtggctcaggctggagtgcagtggtgtgatcatggctcactgcagcctcgaagccccggggtcaagtgatcctctcacctcagcctcctaggtagctggaaccacaggcacgcaaccaccactcctggctagttttatttttttagtagaataaggtctcactatgttgcacaggctggtctctaactccttacctcaagccatcctcccgccttggcctcccaaacatgttgggattacaggtgtgagccactggacctggccaaatactgggttttcagtgctcactgccactaataaaaatctgaaattctttcattatgcaatttctaagtgcctggtgagggccaagctcagttctaggctctgaagattaagagagaaacaaggctctgtctgctcctgttgtctctgtgagcatctttgacagagtgctcagattgttgggatatagtgcatcggactggcagcctgaatttgtggagaccgcagtcagtaactttgtgatatatggaatatttagaggacagtaacccatttccctacgccctacctgatcacatcgtgccctgctgggccataccccaaacagcccaccttcctctaggcctggccatggccctgtgcctgccacattgaggattaagtcaggatatcttgagccctctcaaatccctgtttattcaggcctctgccacatatagagccagccttctgtccccaccacttccactaccatggagcccacttagtaaaacgctctctgggcccagcttcgccagaaaagacaccaggggagcaaggctcaaaccaggggcagctaaatctgatcttgtggaccagtctctagtaagggctttcagcgtggctgtctgtccattgctttccaaataggatgcagcaatgattggtacatgggtattaagatcggtagtaggggctagtccaagtttagcaatagccaaactggagagcctctgaagtatgagagtcccagagggatttgtcagctcctggcagacatcctgattttcaccttcctgagtctaccctaccccagagggtgccagtctcactgtggtgatggttagcccagtgtgtgctgcactcacacaccagcacggggtccgtgcttgcaggctggtggatgctgtcctctgggttaagactgtctcccttctcgggagcactggagggttctccatctgcgtgtttcagtggaagttggcagatacgaaaacaggcccctatagggaagcagttccatgaaaatgattaattctttccaaaagacttaaaattttttcctatttcaattttcctttcaaaaaaggaaatacattcatgtagttcaaaacttaagaaaacaaaagtctgttcagcaaaagactcccactccggttccccaaacgctgagccccaccccccatccctggtagcaagaagtgtttccaattttaaggttaagaaacaaagtccctggatttgtgttagggatgtcttcctgagagtgggttgtgttccgtttgaccctggcggttgacctcggcccactaggatcatgccgccctctccagggaggagggcctccccatcaccctgtacagtggcaccccagccctggcactgcccgcccttgctcagcgtacctttcccatggcactctgacgtactggatgtttggtttctgaagttactggctgtttaccctgccgggatgtaagcccctccagggcaggggcttgtctcgtgttcagtgctgcatcccagctgctgggcacggtacctggtccatggcgttcaataaataactgttggatgagtgaa

SEQ ID NO: 104979 - DNA, 1262 bp, Homo sapiens
  Payload ID: 604
  Gene Symbol: AP3S2
  Gene Name: adaptor-related protein complex 3, sigma 2 subunit
  Uniprot ID: P59780
  ENST ID: ENST00000423566
  CDS Start-End: 29-403
ggtgctgagagaaccgtggctggcaaagatgattcaggcgattctggttttcaacaaccatgggaagccacggctagtccgcttctaccagcgtttcccagaagaaattcaacagcagattgttcgagagactttccatctagtcctcaagcgggatgacaacatctgtaacttcttggagggtggaagtttgattggtggctctgactacaaactgatctaccggcactatgctaccctctactttgtattttgtgtggattcctcagagagtgaacttggaatcttggacctcatccagcttaaaaaaagagagaggaagaaaagccagtgcaacaccctacaaactggaacactagctctttgggaacaaggacctgacatcagaacaagaaggctataagttcccaaaccttaaaagtttttgtggaaactctggataagtgtttcgaaaatgtgtgtgaattggatttgatcttccatatggataaggtgcactacatcctccaggaggtggtgatgggtgggatggtgttggaaacaaacatgaatgaaatcgtggctcagattgaggctcaaaacaggctggagaaatccgagggtggcctttcagcagcccctgcgcgggctgtgtctgctgtgaaaaacatcaacctgccagagattcctcggaacatcaacattggcgatctcaacatcaaagttcccaacctgtcccagtttgtctgaggatcaagtattggcctgaaatagagtccttaagacaagcaaagacaagcaaggcaagcacgtctggaaacagaacccattttgagccttagaagagtcaagcctcaggacctggaaactttgtgtctggggaagactgtttggcatggaatagggaagggattcctattgacactgctcgggtgcacccagttctcacatgtgcagtcatgccgttctctgatgcatacggccactgcagatgtgaggggccctgccttcctcagtagggagtcaacatgcccaagtcatttgcacctttacctctcacatggatgctcccaagggttagggactgcattgagcaggcccacctgcttcccagaacctcctcactagggctgagcaccttctctgagtagagtcttcatccttagcaccacagacttctgaggtcctgtgccctttacttgctggtgaggtgtcataggtagaaaagggctggcccttcagatctgggggtgtggtgagtggcaagtaagggcagaatttta

SEQ ID NO: 104980 - DNA, 578 bp, Homo sapiens
  Payload ID: 604
  Gene Symbol: AP3S2
  Gene Name: adaptor-related protein complex 3, sigma 2 subunit
  ENST ID: ENST00000557999
  CDS Start-End: 46-180
gctttctgggagtagccggtgctgagagaaccgtggctggcaaagatgattcaggcgattctggttttcaacaaccatgggaagccacggctagtccgcttctaccagcgtttcgtgaccagaagaaattcaacagcagattgttcgagagactttccatctagtcctcaagcgggatgacaacatctgtaacttcttggagggtggaagtttgattggtggctctgactacaaactgatctaccggcactatgctaccctctactttgtattttgtgtggattcctcagagagtgaacttggaatcttggacctcatccaggtttttgtggaaactctggataagtgtttcgaaaatgtgtgtgaattggatttgatcttccatatggataaggtgcactacatcctccaggaggtggtgatgggtgggatggtgttggaaacaaacatgaatgaaatcgtggctcagattgaggctcaaaacaggctggagaaatccgagggtggcctttcagcagcccctgcgcgggctgtgtctgctgtgaaaaacatcaacctgccagagattcctcggaaca

SEQ ID NO: 104981 - DNA, 738 bp, Homo sapiens
  Payload ID: 604
  Gene Symbol: AP3S2
  Gene Name: adaptor-related protein complex 3, sigma 2 subunit
  ENST ID: ENST00000558011
  CDS Start-End: 46-663
gctttctgggagtagccggtgctgagagaaccgtggctggcaaagatgattcaggcgattctggttttcaacaaccatgggaagccacggctagtccgcttctaccagcgtttcccagaagaaattcaacagcagattgttcgagagactttccatctagtcctcaagcgggatgacaacatctgtaacttcttggagggtggaagtttgattggtggctctgactacaaactgatctaccggcactatgctaccctctactttgtattttgtgtggattcctcagagagtgaacttggaatcttggacctcatccaggtacatctggaagttgttttcttcatagctcccaaggtttttgtggaaactctggataagtgtttcgaaaatgtgtgtgaattggatttgatcttccatatggataaggtgcactacatcctccaggaggtggtgatgggtgggatggtgttggaaacaaacatgaatgaaatcgtggctcagattgaggctcaaaacaggctggagaaatccgagggtggcctttcagcagcccctgcgcgggctgtgtctgctgtgaaaaacatcaacctgccagagattcctcggaacatcaacattggcgatctcaacatcaaagttcccaacctgtcccagtttgtctgaggatcaagtattggcctgaaatagagtccttaagacaagcaaagacaagcaaggcaagcacgtctggaaacagaa

SEQ ID NO: 104982 - DNA, 573 bp, Homo sapiens
  Payload ID: 604
  Gene Symbol: AP3S2
  Gene Name: adaptor-related protein complex 3, sigma 2 subunit
  Uniprot ID: P59780
  ENST ID: ENST00000560251
  CDS Start-End: 29-403
ggtgctgagagaaccgtggctggcaaagatgattcaggcgattctggttttcaacaaccatgggaagccacggctagtccgcttctaccagcgtttcccagaagaaattcaacagcagattgttcgagagactttccatctagtcctcaagcgggatgacaacatctgtaacttcttggagggtggaagtttgattggtggctctgactacaaactgatctaccggcactatgctaccctctactttgtattttgtgtggattcctcagagagtgaacttggaatcttggacctcatccagcttaaaaaaagagagaggaagaaaagccagtgcaacaccctacaaactggaacactagctctttgggaacaaggacctgacatcagaacaagaaggctataagttcccaaaccttaaaagtttttgtggaaactctggataagtgtttcgaaaatgtgtgtgaattggatttgatcttccatatggataagtgcaattcctgggtcataggtgaggcctctagaaggaagaaacaggcctctagaaggaagcacaaaagcaccagcagggct

SEQ ID NO: 104983 - DNA, 653 bp, Homo sapiens
  Payload ID: 604
  Gene Symbol: AP3S2
  Gene Name: adaptor-related protein complex 3, sigma 2 subunit
  ENST ID: ENST00000558999
  CDS Start-End: 46-456
gctttctgggagtagccggtgctgagagaaccgtggctggcaaagatgattcaggcgattctggttttcaacaaccatgggaagccacggctagtccgcttctaccagcgtttcccagaagaaattcaacagcagattgttcgagagactttccatctagtcctcaagcgggatgacaacatctgtaacttcttggagggtggaagtttgattggtggctctgactacaaactgatctaccggcactatgctaccctctactttgtattttgtgtggattcctcagagagtgaacttggaatcttggacctcatccaggtacatctggaagttgttttcttcatagctcccaagcttaaaaaaagagagaggaagaaaagccagtgcaacaccctacaaactggaacactagctctttgggaacaaggacctgacatcagaacaagaaggctataagttcccaaaccttaaaagtttttgtggaaactctggataagtgtttcgaaaatgtgtgtgaattggatttgatcttccatatggataaggtgcactacatcctccaggaggtggtgatgggtgggatggtgttggaaacaaacatgaatgaaatcgtggctcagattgaggctcaaaacaggctggagaaatccgag

SEQ ID NO: 104984 - DNA, 519 bp, Homo sapiens
  Payload ID: 604
  Gene Symbol: AP3S2
  Gene Name: adaptor-related protein complex 3, sigma 2 subunit
  ENST ID: ENST00000560940
  CDS Start-End: 33-503
agccggtgctgagagaaccgtggctggcaaagatgattcaggcgattctggttttcaacaaccatgggaagccacggctagtccgcttctaccagcgtttcccagaagaaattcaacagcagattgttcgagagactttccatctagtcctcaagcgggatgacaacatctgtaacttcttggagggtggaagtttgattggtggctctgactacaaactgatctaccggcactatgctaccctctactttgtattttgtgtggattcctcagagagtgaacttggaatcttggacctcatccaggtttttgtggaaactctggataagtgtttcgaaaatgtgtgtgaattggatttgatcttccatatggataaggtgcactacatcctccaggaggtggtgatgggtgggatggtgttggaaacaaacatgaatgaaatcgtggctcagattgaggctcaaaacaggctggagaaatccgaggatcaagtattggcctgaaatagagtccttaaga

SEQ ID NO: 104985 - DNA, 578 bp, Homo sapiens
  Payload ID: 604
  Gene Symbol: AP3S2
  Gene Name: adaptor-related protein complex 3, sigma 2 subunit
  ENST ID: ENST00000558806
  CDS Start-End: 80-190
aaccggaagtgatcgtgttgtggcggaaggaggagctttctgggagtagccggtgctgagagaaccgtggctggcaaagatgattcaggcgattctggttttcaacaaccatgggaagccacggctagtccgcttctaccagcgtttcaagaaattcaacagcagattgttcgagagactttccatctagtcctcaagcgggatgacaacatctgtaacttcttggagggtggaagtttgattggtggctctgactacaaactgatctaccggcactatgctaccctctactttgtattttgtgtggattcctcagagagtgaacttggaatcttggacctcatccaggtttttgtggaaactctggataagtgtttcgaaaatgtgtgtgaattggatttgatcttccatatggataaggtgcactacatcctccaggaggtggtgatgggtgggatggtgttggaaacaaacatgaatgaaatcgtggctcagattgaggctcaaaacaggctggagaaatccgagggtggcctttcagcagcccctgcgcgggctgtgtctgctgtgaaaaacat

SEQ ID NO: 104986 - DNA, 1561 bp, Homo sapiens
  Payload ID: 604
  Gene Symbol: AP3S2
  Gene Name: adaptor-related protein complex 3, sigma 2 subunit
  ENST ID: ENST00000617003
  CDS Start-End: 690-881
atttgcatctgtatccgctgctccatctgcagtatacggacatgctccacttcacccacactgggtcattaaaagaacaaacaaaaataagaacttgatcgatttgggattttaaatggaaatgcactaaaaattccttaattccaccattcaccgtctaccatagaggaacagcccatctgcacggagagacagctacgtaattcactgcagcattataatactgaaaaattaaaatgaacgaaatgttccataaccgacgaacggccgaatgaccggcgtctccactccgcggaacgttctgcgagcgctaaggggatggcgggagtgcatgatttggagcgggcggtgagaaaagcaagctcccgccgcctctccgttttggcaacccggctgacggtcgtttcggcttctggggccagccgtcggtctgggcgagggacatagatccggattcgcatcctgactggccaaccaacgctggccgaggtgaccactctcctcggcatccgcacctgccctccaaggcgtcagagaggccggacccttgggtgctagggctcgtgagcgccggggccaagtttccgagtgccgctctcagcagcgcaccaaccggaagtgatcgtgttgtggcggaaggaggagctttctgggagtagccggtgctgagagaaccgtggctggcaaagatgattcaggcgattctggttttcaacaaccatgggaagccacggctagtccgcttctaccagcgtttcgtgagtgcggcccggcttcaccacgccccttcagggcgcccactatgtcttccctcctctttggcctctcggcgcccgggggcaccgctctttggtcacctggggctcctgcaccgagcatgaccctcgccctacttaagcatttaatctaggcgcaggctggtgccaggccttctgtctcccgccctactgccccgctctcgctgacccttttcttgatcctggcatttctgtgccattttgtgacattttcccgtgggtctctgggaacgagatagaagcgacagtggggagtgtgcctcgatgagaacttgagtgattgaagtcacattctgtcatctttttggttgttgaccacagtttcatgaggaagaaatattaagtttctgaaagtttttgttatagccagaactggaaaagttcttttttttttggaattattttgcttcagtgttggctgggactttccagagactagatacccttcactcttagggttgaagaaaatcagtttaaaagtggaaaaatgatgagaaattataaatgctgccgcataagggctcaataagtgattacgtaaatttgaattttcccaacacgttcctttgcaaacacataaacatcagtatttgcttcctgtcttcgaagattatatttcttcatggcagggtttcaaaatgttacataattgggggactggtggaactgaagaggggaaagagccagaaaacgtgttcaggcttcagctccaccttttctactcttgcgtctgttgacaagttaataaacccttttcagacttt

SEQ ID NO: 104987 - DNA, 2742 bp, Homo sapiens
  Payload ID: 605
  Gene Symbol: AP4B1
  Gene Name: adaptor-related protein complex 4, beta 1 subunit
  Uniprot ID: Q9Y6B7
  ENST ID: ENST00000256658
  CDS Start-End: 206-2425
ggggaattaaggctggaactggagagggaggggtctgcggtcagtcggacgcggcgctggaaatccggcggaggacctagaagtagcgggagcgatctgtgggcggggcgaacggcctgccggccgacggctcccacatcaggacgagaaggagccctcgagttaccgtgggagctgtgggagctgccctgtgactcttaggaagatgccgtaccttggctccgaggacgtggtgaaggagctgaagaaggctctgtgcaatcctcacattcaagctgataggctgcgctaccggaatgtcatccagcgagtgattaggtacatgactcaaggcttggacatgtctggtgtttttatggaaatggtgaaggccagtgccactgtagatattgtccagaagaagttggtttatctgtacatgtgcacatatgctcccctgaaaccagatctggctctcctggccatcaatacgctgtgcaaagactgctcagaccccaatccaatggtgcgagggctggcgttacggagcatgtgtagcctcaggatgcctggtgtgcaggagtatatacaacagcctattctcaatggtctgcgggataaggcttcatatgtcaggagagtggcagtccttggatgtgccaagatgcataatcttcatggagactctgaagtagatggtgccctggtaaatgaattatacagtttgctgcgtgaccaggatccaattgtagttgtgaactgcttgaggtctctagaggaaattctgaaacaggaaggaggcgttgtcatcaataagcccattgctcaccatctcttaaatcgaatgtcaaaactggaccaatggggccaggctgaagtattgaactttctgctacgctaccaaccccgcagtgaggaagaactatttgacattctcaatctgttggatagtttcctcaagagcagtagcccaggtgtggtgatgggagctaccaaactttttctgatcttggcaaaaatgtttccccacgtacaaactgatgtccttgtgcgggtcaagggacctttgctagctgcctgttcttcagagagccgtgagctctgttttgttgctctttgtcatgtacgccagatcttgcatagtttaccaggtcactttagcagccactacaaaaagtttttttgctcctactcggagccccactacatcaaactacagaaagtggaggtgctgtgtgaactggtgaacgatgagaatgtgcagcaggtgctagaggagcttcgagggtactgcacggatgtgtctgcggactttgcacaggctgccatctttgccataggtggcattgccaggacttacacagatcaatgtgttcagattttaacagagttgctgggtcttcgacaagagcacattaccacagtggtggtgcagactttccgagacctggtttggttgtgtcctcagtgtactgaagctgtatgtcaggccctgcccggctgtgaagagaacattcaagatagtgaggggaagcaagcacttatttggctacttggtgtccatggggaaagaattcctaatgctccttatgtgttagaggactttgttgagaatgtgaagtcggaaacatttccagctgttaagatggagctgctcactgctttgctgcgccttttcctctcccgacctgctgagtgccaggacatgctaggacgtttgttgtattactgcatagaggaagaaaaagatatggctgtacgggaccgaggtctcttctattatcgcctcctcttagttggcattgatgaagttaagcggattctgtgtagccctaaatctgaccctactcttggacttttggaggatccggcagaaagacctgtgaatagctgggcctcagacttcaacacactggtgccagtgtatggcaaagcccactgggcaactatctctaaatgccagggggcagagcgttgtgacccagagcttcctaaaacttcatcctttgccgcatcaggacccttgattcctgaagagaacaaggagagggtacaagaactccctgattctggagccctcatgctagtccccaatcgccagcttactgctgattattttgagaaaacttggcttagccttaaagttgctcatcagcaagtgttgccttggcggggagaattccatcctgacaccctccagatggctcttcaagtagtgaacatccagaccatcgcaatgagtagggctgggtctcggccatggaaagcatacctcagtgctcaggatgatactggctgtctgttcttaacagaactgctattggagcctggaaactcagaaatgcagatctctgtgaaacaaaatgaagcaagaacggagacgctgaatagttttatttctgtattagaaactgtgattggaacaattgaagaaataaaatcataacagagtcttgttgcttgtctagagtaagatgaataactattacactttcttagtctttcctattagagctgccagtaagtccagataatatcagatacaaaggagagtggaaaatctagaaatcaggattcttaagtttttggccaaagaacattgattcattcctttcattcctattggcaattgaccccatttttcagtgatgatgttgtagaggttaatgttggtaaggagatgcgttgaggatgggatttggattatttcctaatcaattttaggaattgtgttagtaattaaagatggctgatgtgtggaaa

SEQ ID NO: 104988 - DNA, 1225 bp, Homo sapiens
  Payload ID: 605
  Gene Symbol: AP4B1
  Gene Name: adaptor-related protein complex 4, beta 1 subunit
  ENST ID: ENST00000369564
  CDS Start-End: 337-1225
ggagtcgggactacgcttagcgctcgctcgcggggagaccggcagcggtcttctgtttggtctcttgacaagggggcgggacttccgcagaaagcaagattgggcctatccgcgatgagaacggcgtggagggggaattaaggctggaactggagagggaggggtctgcggtcagtcggacgcggcgctggaaatccggcggaggacctagaagtagcgggagcgatctgtgggcggggcgaacggcctgccggccgacggctcccacatcaggacgagaaggagccctcgagttaccgtgggagctgtgggagctgccctgtgactcttaggaagatgccgtaccttggctccgaggacgtggtgaaggagctgaagaaggctctgtgcaatcctcacattcaagctgataggctgcgctaccggaatgtcatccagcgagtgattaggatgcctggtgtgcaggagtatatacaacagcctattctcaatggtctgcgggataaggcttcatatgtcaggagagtggcagtccttggatgtgccaagatgcataatcttcatggagactctgaagtagatggtgccctggtaaatgaattatacagtttgctgcgtgaccaggatccaattgtagttgtgaactgcttgaggtctctagaggaaattctgaaacaggaaggaggcgttgtcatcaataagcccattgctcaccatctcttaaatcgaatgtcaaaactggaccaatggggccaggctgaagtattgaactttctgctacgctaccaaccccgcagtgaggaagaactatttgacattctcaatctgttggatagtttcctcaagagcagtagcccaggtgtggtgatgggagctaccaaactttttctgatcttggcaaaaatgtttccccacgtacaaactgatgtccttgtgcgggtcaagggacctttgctagctgcctgttcttcagagagccgtgagctctgttttgttgctctttgtcatgtacgccagatcttgcatagtttaccaggtcactttagcagccactacaaaaagtttttttgctcctactcggagccccactacatcaaactacagaaagtggaggtgctgtgtgaactggtgaacgatgagaatgtgcagcaggtgctagaggagcttcgagggtactgcacggatgtgtctgcggactttgcacaggctgccatctttgccatag

SEQ ID NO: 104989 - DNA, 2144 bp, Homo sapiens
  Payload ID: 605
  Gene Symbol: AP4B1
  Gene Name: adaptor-related protein complex 4, beta 1 subunit
  ENST ID: ENST00000369567
  CDS Start-End: 112-1827
ttgtattttcactgactcatatttcctttactcaggctcccacatcaggacgagaaggagccctcgagttaccgtgggagctgtgggagctgccctgtgactcttaggaagatgccgtaccttggctccgaggacgtggtgaaggagctgaagaaggctctgtgcaatcctcacattcaagctgataggctgcgctaccggaatgtcatccagcgagtgattagaatgtcaaaactggaccaatggggccaggctgaagtattgaactttctgctacgctaccaaccccgcagtgaggaagaactatttgacattctcaatctgttggatagtttcctcaagagcagtagcccaggtgtggtgatgggagctaccaaactttttctgatcttggcaaaaatgtttccccacgtacaaactgatgtccttgtgcgggtcaagggacctttgctagctgcctgttcttcagagagccgtgagctctgttttgttgctctttgtcatgtacgccagatcttgcatagtttaccaggtcactttagcagccactacaaaaagtttttttgctcctactcggagccccactacatcaaactacagaaagtggaggtgctgtgtgaactggtgaacgatgagaatgtgcagcaggtgctagaggagcttcgagggtactgcacggatgtgtctgcggactttgcacaggctgccatctttgccataggtggcattgccaggacttacacagatcaatgtgttcagattttaacagagttgctgggtcttcgacaagagcacattaccacagtggtggtgcagactttccgagacctggtttggttgtgtcctcagtgtactgaagctgtatgtcaggccctgcccggctgtgaagagaacattcaagatagtgaggggaagcaagcacttatttggctacttggtgtccatggggaaagaattcctaatgctccttatgtgttagaggactttgttgagaatgtgaagtcggaaacatttccagctgttaagatggagctgctcactgctttgctgcgccttttcctctcccgacctgctgagtgccaggacatgctaggacgtttgttgtattactgcatagaggaagaaaaagatatggctgtacgggaccgaggtctcttctattatcgcctcctcttagttggcattgatgaagttaagcggattctgtgtagccctaaatctgaccctactcttggacttttggaggatccggcagaaagacctgtgaatagctgggcctcagacttcaacacactggtgccagtgtatggcaaagcccactgggcaactatctctaaatgccagggggcagagcgttgtgacccagagcttcctaaaacttcatcctttgccgcatcaggacccttgattcctgaagagaacaaggagagggtacaagaactccctgattctggagccctcatgctagtccccaatcgccagcttactgctgattattttgagaaaacttggcttagccttaaagttgctcatcagcaagtgttgccttggcggggagaattccatcctgacaccctccagatggctcttcaagtagtgaacatccagaccatcgcaatgagtagggctgggtctcggccatggaaagcatacctcagtgctcaggatgatactggctgtctgttcttaacagaactgctattggagcctggaaactcagaaatgcagatctctgtgaaacaaaatgaagcaagaacggagacgctgaatagttttatttctgtattagaaactgtgattggaacaattgaagaaataaaatcataacagagtcttgttgcttgtctagagtaagatgaataactattacactttcttagtctttcctattagagctgccagtaagtccagataatatcagatacaaaggagagtggaaaatctagaaatcaggattcttaagtttttggccaaagaacattgattcattcctttcattcctattggcaattgaccccatttttcagtgatgatgttgtagaggttaatgttggtaaggagatgcgttgaggatgggatttggattatttcctaatcaattttaggaattgtgttagtaattaaagatggctgatgtgtggaaa

SEQ ID NO: 104990 - DNA, 2818 bp, Homo sapiens
  Payload ID: 605
  Gene Symbol: AP4B1
  Gene Name: adaptor-related protein complex 4, beta 1 subunit
  Uniprot ID: Q9Y6B7
  ENST ID: ENST00000369569
  CDS Start-End: 282-2501
ggacctagaagtagcgggagcgatctgtgggcggggcgaacggcctgccggccgacggtagggcctgaagagcctagggtggggctcgcggtgtcgcggagggcgtggaagtgtgtcagggccagcgtgccggccctacggaagccgagcctgaggcgagatctcgccttttgtattttcactgactcatatttcctttactcaggctcccacatcaggacgagaaggagccctcgagttaccgtgggagctgtgggagctgccctgtgactcttaggaagatgccgtaccttggctccgaggacgtggtgaaggagctgaagaaggctctgtgcaatcctcacattcaagctgataggctgcgctaccggaatgtcatccagcgagtgattaggtacatgactcaaggcttggacatgtctggtgtttttatggaaatggtgaaggccagtgccactgtagatattgtccagaagaagttggtttatctgtacatgtgcacatatgctcccctgaaaccagatctggctctcctggccatcaatacgctgtgcaaagactgctcagaccccaatccaatggtgcgagggctggcgttacggagcatgtgtagcctcaggatgcctggtgtgcaggagtatatacaacagcctattctcaatggtctgcgggataaggcttcatatgtcaggagagtggcagtccttggatgtgccaagatgcataatcttcatggagactctgaagtagatggtgccctggtaaatgaattatacagtttgctgcgtgaccaggatccaattgtagttgtgaactgcttgaggtctctagaggaaattctgaaacaggaaggaggcgttgtcatcaataagcccattgctcaccatctcttaaatcgaatgtcaaaactggaccaatggggccaggctgaagtattgaactttctgctacgctaccaaccccgcagtgaggaagaactatttgacattctcaatctgttggatagtttcctcaagagcagtagcccaggtgtggtgatgggagctaccaaactttttctgatcttggcaaaaatgtttccccacgtacaaactgatgtccttgtgcgggtcaagggacctttgctagctgcctgttcttcagagagccgtgagctctgttttgttgctctttgtcatgtacgccagatcttgcatagtttaccaggtcactttagcagccactacaaaaagtttttttgctcctactcggagccccactacatcaaactacagaaagtggaggtgctgtgtgaactggtgaacgatgagaatgtgcagcaggtgctagaggagcttcgagggtactgcacggatgtgtctgcggactttgcacaggctgccatctttgccataggtggcattgccaggacttacacagatcaatgtgttcagattttaacagagttgctgggtcttcgacaagagcacattaccacagtggtggtgcagactttccgagacctggtttggttgtgtcctcagtgtactgaagctgtatgtcaggccctgcccggctgtgaagagaacattcaagatagtgaggggaagcaagcacttatttggctacttggtgtccatggggaaagaattcctaatgctccttatgtgttagaggactttgttgagaatgtgaagtcggaaacatttccagctgttaagatggagctgctcactgctttgctgcgccttttcctctcccgacctgctgagtgccaggacatgctaggacgtttgttgtattactgcatagaggaagaaaaagatatggctgtacgggaccgaggtctcttctattatcgcctcctcttagttggcattgatgaagttaagcggattctgtgtagccctaaatctgaccctactcttggacttttggaggatccggcagaaagacctgtgaatagctgggcctcagacttcaacacactggtgccagtgtatggcaaagcccactgggcaactatctctaaatgccagggggcagagcgttgtgacccagagcttcctaaaacttcatcctttgccgcatcaggacccttgattcctgaagagaacaaggagagggtacaagaactccctgattctggagccctcatgctagtccccaatcgccagcttactgctgattattttgagaaaacttggcttagccttaaagttgctcatcagcaagtgttgccttggcggggagaattccatcctgacaccctccagatggctcttcaagtagtgaacatccagaccatcgcaatgagtagggctgggtctcggccatggaaagcatacctcagtgctcaggatgatactggctgtctgttcttaacagaactgctattggagcctggaaactcagaaatgcagatctctgtgaaacaaaatgaagcaagaacggagacgctgaatagttttatttctgtattagaaactgtgattggaacaattgaagaaataaaatcataacagagtcttgttgcttgtctagagtaagatgaataactattacactttcttagtctttcctattagagctgccagtaagtccagataatatcagatacaaaggagagtggaaaatctagaaatcaggattcttaagtttttggccaaagaacattgattcattcctttcattcctattggcaattgaccccatttttcagtgatgatgttgtagaggttaatgttggtaaggagatgcgttgaggatgggatttggattatttcctaatcaattttaggaattgtgttagtaattaaagatggctgatgtgtggaaa

SEQ ID NO: 104991 - DNA, 980 bp, Homo sapiens
  Payload ID: 605
  Gene Symbol: AP4B1
  Gene Name: adaptor-related protein complex 4, beta 1 subunit
  ENST ID: ENST00000369571
  CDS Start-End: 194-980
tctgcggtcagtcggacgcggcgctggaaatccggcggaggacctagaagtagcgggagcgatctgtgggcggggcgaacggcctgccggccgacggtagggcctgaagagcctagggctcccacatcaggacgagaaggagccctcgagttaccgtgggagctgtgggagctgccctgtgactcttaggaagatgccgtaccttggctccgaggacgtggtgaaggagctgaagaaggctctgtgcaatcctcacattcaagctgataggctgcgctaccggaatgtcatccagcgagtgattaggtacatgactcaaggcttggacatgtctggtgtttttatggaaatggtgaaggccagtgccactgtagatattgtccagaagaagttggtttatctgtacatgtgcacatatgctcccctgaaaccagatctggctctcctggccatcaatacgctgtgcaaagactgctcagaccccaatccaatggtgcgagggctggcgttacggagcatgtgtagcctcaggatgcctggtgtgcaggagtatatacaacagcctattctcaatggtctgcgggataaggcttcatatgtcaggagagtggcagtccttggatgtgccaagatgcataatcttcatggagactctgaagtagatggtgccctggtaaatgaattatacagtttgctgcgtgaccaggatccaattgtagttgtgaactgcttgaggtctctagaggaaattctgaaacaggaaggaggcgttgtcatcaataagcccattgctcaccatctcttaaatcgaatgtcaaaactggaccaatggggccaggctgaagtattgaactttctgctacgctaccaaccccgcagtgaggaagaactatttgacattctcaatctgttggatagtttcctcaagagcagtagcccaggtgtggtgatgggagctaccaaactttttctgatcttgg

SEQ ID NO: 104992 - DNA, 681 bp, Homo sapiens
  Payload ID: 605
  Gene Symbol: AP4B1
  Gene Name: adaptor-related protein complex 4, beta 1 subunit
  ENST ID: ENST00000432415
  CDS Start-End: 156-681
gcggcgctggaaatccggcggaggacctagaagtagcgggagcgatctgtgggcggggcgaacggcctgccggccgacggctcccacatcaggacgagaaggagccctcgagttaccgtgggagctgtgggagctgccctgtgactcttaggaagatgccgtaccttggctccgaggacgtggtgaaggagctgaagaaggctctgtgcaatcctcacattcaagctgataggctgcgctaccggaatgtcatccagcgagtgattagaatgtcaaaactggaccaatggggccaggctgaagtattgaactttctgctacgctaccaaccccgcagtgaggaagaactatttgacattctcaatctgttggatagtttcctcaagagcagtagcccaggtgtggtgatgggagctaccaaactttttctgatcttggcaaaaatgtttccccacgtacaaactgatgtccttgtgcgggtcaagggacctttgctagctgcctgttcttcagagagccgtgagctctgttttgttgctctttgtcatgtacgccagatcttgcatagtttaccaggtcactttagcagccactacaaaaagtttttttgctcctactcggagccccactacatcaaactacagaaagtggaggtgctgtgtgaactggtgaacgatgaga

SEQ ID NO: 104993 - DNA, 6758 bp, Homo sapiens
  Payload ID: 606
  Gene Symbol: AP4E1
  Gene Name: adaptor-related protein complex 4, epsilon 1 subunit
  Uniprot ID: Q9UPM8
  ENST ID: ENST00000261842
  CDS Start-End: 107-3520
aaaaacaggaagtgcctacggaggccgggccggcagcggcggccgggcatgaagccgggcggctacgggatcgcgggcggcggcggcatcgcgggcggcggcggcgatgagcgacatagtggagaagacgctgacggcgctgccgggactctttctgcagaaccagcccggtggtgggcccgcggccgccaaggcgtccttctcctcgaggctgggcagccttgtccgcggcatcacagccctcacctccaagcacgaagaagaaaaattaatccagcaggaactgagtagtctgaaagcgactgtttctgctcctactacaacactgaaaatgatgaaggaatgtatggtgagacttatatattgtgaaatgcttggatatgatgcttcctttggctatattcatgcaatcaagttagcccaacaaggaaacctcttagaaaaaagagtaggttatttggctgtttccttatttctacatgaaagtcatgaattattgcttctccttgtgaatacagttgtaaaggatctgcagagcactaacctagtagaagtgtgtatggcactgactgttgttagccagattttcccctgcgaaatgattccagctgttcttccattaatagaagataaacttcaacattctaaggagattgtacgaagaaaagctgttctggcattatacaaattccatctcattgctcctaatcaagtacaacatattcatattaagtttcggaaagcactttgtgacagagatgttggggtcatggctgcctccttgcatatatatcttagaatgattaaggagaattcatctggatataaagacttgactgggagttttgtaaccattttgaagcaagtagttggaggaaagctcccagtagaattcaattaccacagtgtgccagcaccatggttacaaattcagctcttgagaatactgggacttctaggaaaagatgatcaaaggacaagtgaattaatgtatgatgttcttgatgaatccttacgaagagctgagttaaatcacaatgtcacatatgctattttgtttgaatgtgtgcatacagtctattctatttatcctaaatcggaattacttgagaaggctgccaagtgcattggaaaatttgttctgtcacctaaaataaatctaaaatatttaggactgaaggctcttacctatgttatccaacaggatcctactctggctcttcaacaccagatgacaataattgaatgtttagatcatcctgatcccattattaaaagagagactctggaacttctttacagaattactaatgcacagaatataacagttattgtccagaaaatgcttgaatatttacatcagagcaaagaagagtatgtcatcgtcaatttggtcggcaaaatagcagagctggctgagaaatatgctcctgataatgcatggtttattcagacaatgaatgctgtgttttcagtaggaggagatgtaatgcatcctgatattcccaataactttctgagactactagcggaaggttttgatgatgaaacagaagatcagcaattaagactctatgcagttcagtcttatctcactttactggatatggaaaatgtgttctatccacagagatttcttcaagttatgagttgggtattaggggaatattcctacctcttagataaggaaacgccagaggaagttatagctaagctctacaagttacttatgaatgactctgtgtcttcagaaacaaaagcctggttaattgctgctgtgaccaaattgacatctcaggcgcactcttctaatacagttgagagattaatccatgaatttaccatatctttggatacttgtatgagacaacatgcatttgaattaaaacatttgcatgagaatgtggaacttatgaagagcttgcttccagttgacaggagttgtgaagacttggtggtagatgcttctttatcttttctggatggttttgtggctgaaggactcagtcagggtgcagcgccttacaaacctccccatcaacgccaggaggaaaagctttctcaggaaaaagttctcaattttgaaccatatggactctccttttcttcatctggcttcactggacgacagtctcctgctggcatttctcttggttcagatgtatctgggaatagtgctgagacaggactgaaagagacaaatagcttgaagctggaaggtataaagaaattgtgggggaaagaaggctatcttcccaagaaggaaagcaaaactggtgatgaaagtggagctctgcctgttcctcaagagagtataatggagaatgtagatcaagctataactaaaaaggatcaatctcaagttcttacccaatctaaagaggagaaagaaaagcagctgctggcatcatcattatttgttggtctaggatcagaaagtacaatcaacctgctgggaaaagcagatactgtctctcacaagttcagaaggaaatcaaaagtcaaagaagctaaaagtggcgaaacaaccagtactcataatatgacctgttcttcctttagttctttgtcaaatgtggcatatgaagatgattattattcgaatactttgcacgatacaggagacaaggaattaaagaaattttctctcacttcagaacttttggattctgagtcactcacagaactgcccttggttgagaaattctcatattgtagtctgtctacaccttcattgtttgctaataacaacatggaaatttttcaccctcctcaatctactgcagcctcagttgccaaggaaagctctttagcttcatcttttttggaagaaactactgaatacatacactcaaatgctatggaagtctgtaataatgaaactatatcagtgtcttcttataaaatttggaaagatgattgtttattgatggtctggtcagtcactaataagagtggtttggaattgaaaagtgctgacttagaaatttttcctgcagaaaatttcaaggtgactgagcaacctggatgctgtttgcctgtaatggaagcagaaagcaccaaaagctttcaatatagtgtgcagatagaaaaaccttttacagaaggaaatcttactggttttattagttatcatatgatggatactcattctgctcagctggaattttctgtaaacttatcactattagatttcattagaccattaaaaatctcaagtgacgactttgggaaactctggttatccttcgcaaatgatgtgaaacaaaatgtaaaaatgtcagaatctcaagctgcacttccttctgcactaaagactctgcaacagaaactaagactccatattattgagattataggcaatgaagggctattggcctgtcagctgctcccatccatcccctgcttactgcattgccgagttcatgcagatgtattagccctgtggttcagatcctcctgttctactcttcctgactatttactgtatcagtgtcaaaaggtgatggagggatcctagcagaagccctgctaaattttactccatcaagatcaatggtttacatagataaacttatttaccaaagtaaaaagaactcatggtacttctaatgaaaatggggattattacaagtgtggtttatatgttttctttgtgattcctggtcaagaaagatccccaaaactgtatccctaacctttaactcaggattgtacagtatgtttaggtccctcaaaaagtgacctaagctaatgttataaactgctaatgatttatatatcacttagtgtgtagagggactgaaaatatttattttgttataaataattttatagcacgtttactctagtgctagctaatttgtaataaagccaagtctcagttttctgcattaaatggaagggagacatgaaattgataatctcaaacttaattcatatttggctttggaatgtagtgtatggtttttggtagggaagtcaatattttcgattatgttttgcttagatcagtgttgaactaagttggcatagcacacactaacagttgtaggagatccatgagcatgctggatattgaggggatccaatctgtgatctattttttattatagataactgttacacataatttcagatcgtttggctgtaaaatttgtctgttttccacttggagttattttaaaattcaaagtaaatcactctattcttattttgaaaactcagagccattttatatagaaacaaaacccataagagcacacagtaacaaagcaaacagatacaaaaatgactttttagttatgacaaatattttagttggttactacttaggtccttttggcaaatgaaaatttgtgattagagtataaatggcaaaactatcttttcctggcctttgaatccactagtacttaatggatatagctgaagcagagactaagtataacatacaggttcttcagtaaaatatatcattttcatgttatagttatgcctgtgtggcctctgtcagaactattatcagtaaaagaggttaagcctatatatgaatgatggaccaaaaccttgaggttgtacattaactgaaatagtattttataaaatcttatggtgctgtggaaaatatttattatttcaccttttctgacacttcaccatggagactattcaggtaatacaattttaagtcattgcagttaatactctggttaattggtactgttaatcacccaggtcaggaattctgattttaggttatctcattaatcatggctgataaagaagctaaggggattctccagatctaatagatttcattagtcatttgtgtcgagtattcctccctaaaaacaaaagcagtattttctttctcaattaatttttaagttattcattaaaaaatatataacatcttaattttattcttttaaaaacatacagtgaagccttgctacaagagtcataagtgactggaatttcttgcataataggttcctccttttgaatagatcagattcatccccaggctctcagcagtgtcatgatgaaatgagtgtgctgacttcaggggtgtggtggacactggtagctagccttatcagctccctccttattcctacctctgtcagcagcatgcctcgccccttacctaattctgctgtgactctgacagagaggaagtgccttctcactttgcaaaggaatgcagcatgtcacaaaggaggtgctccaattttttgtgtccttacttccctatgtttgcctagttactgaggctaggtcgagtgtgaagcaataggtgtaagatgctgagagcacatggacagctaccagggagatctgttgcttggttacagggtgtattcatgagtggtagctgcagttgtcgtgagagacatgcttggcatacagagctgtctaatgggtgggagacatgtaatggtagatttagggctgggagcatgattttgggtctgcccaaaggaacatggtgtcacttttgttctttctgacccactaaataaaaagtagtgtaacagggtttcactggaatgtttattagaaagtttacactttttatatttttatgattttaaaaacaaacaataatagaaaaacagattttaaggaacttcagagcagtatatattctgtctaaactcactgaatattttaagttgtaaatcaggtgtccaccaacctttatttttgcattgcaggagatgtgactgtaaagtagggagtttttttttttgagacagagtttcacccttgttgcccaggctagagtgtaatggtgcaatctccgctcactgcaacctctgcctcccaggttcaagcgattctcctgcctcagcctccctagtagctgggattacaggcatgcaccaccacacccggctaatttttttatatttttagtagagacaaggtttctccatgttggtcaggctggtctcgaactcccgacctcaggtgatctgcccgcctcagcctcccaaagtgctgggattacaggcgtgagccactgcgcccggccaaattatttttgtgggtagattcattctctttacctaatagtcataatttagtcagtgaagggacaacatctggggtaagagctatggaggaggtgctcagctttgtgagttttgtgccaggcatctttgctgaaaatggagatggcagcaagtgtgaatctgggggaatataagggaagacagaaaagccttaagagtagacggaggaagaagggtaccagaatagtccctgtggaggcaggcagatcagagctcagggtttgaaagtgggcctgagtaagggtcctgctagagaaactgcagatggaagctgagcagttaccaactgctaatgtgccaagtataccaagcacagcatgtgtcctgtagaggagcattattttaaacaatgttctactatcatctaccaaaataattgtggtaaaagtgtagtattttattttttccttttatgtcagcaatattttaaaatattgatctgtttatcttatatttttatggataaatgtagtatttgcctcatgattgtgagccactgagagtgcactgaacctattcacatgtctttaagatgttttgctgtgttaaaattttaggagagaaaaatacaagtgaataattatttaataggcatttattactttattttggagttgaattctgtcatttgaaaaagttcagtaatgtaataaatacaaagtgatctgcactgtt

SEQ ID NO: 104994 - DNA, 4024 bp, Homo sapiens
  Payload ID: 606
  Gene Symbol: AP4E1
  Gene Name: adaptor-related protein complex 4, epsilon 1 subunit
  ENST ID: ENST00000561393
  CDS Start-End: 355-1011
aaaaacaggaagtgcctacggaggccgggccggcagcggcggccgggcatgaagccgggcggctacgggatcgcgggcggcggcggcatcgcgggcggcggcggcgatgagcgacatagtggagaagacgctgacggcgctgccgggactctttctgcagaaccagcccggtggtgggcccgcggccgccaaggcgtccttctcctcgaggctgggcagccttgtccgcggcatcacagccctcacctccaagcacgaagaagaaaaattaatccagcaggaactgagtagtctgaaagcgactgtttctgctcctactacaacactgctactggatattttgcttttcagaaaatgatgaaggaatgtatggtgagacttatatattgtgaaatgcttggatatgatgcttcctttggctatattcatgcaatcaagttagcccaacaaggaaacctcttagaaaaaagagtaggttatttggctgtttccttatttctacatgaaagtcatgaattattgcttctccttgtgaatacagttgtaaaggatctgcagagcactaacctagtagaagtgtgtatggcactgactgttgttagccagattttcccctgcgaaatgattccagctgttcttccattaatagaagataaacttcaacattctaaggagattgtacgaagaaaagctgttctggcattatacaaattccatctcattgctcctaatcaagtacaacatattcatattaagtttcggaaagcactttgtgacagagatgttggggtcatggctgcctccttgcatatatatcttagaatgattaaggagaattcatctggatataaagacttgactgggagttttgtaaccattttgaagcaagtagttggaggaaagctcccagtagaattcaattaccacagtgtgccagcaccatggttacaaattcagctcttgagaatactgggacttctaggaaaagatgatcaaagctattttgtttgaatgtgtgcatacagtctattctatttatcctaaatcggaattacttgagaaggctgccaagtgcattggaaaatttgttctgtcacctaaaataaatctaaaatatttaggactgaaggctcttacctatgttatccaacaggatcctactctggctcttcaacaccagatgacaataattgaatgtttagatcatcctgatcccattattaaaagagagactctggaacttctttacagaattactaatgcacagaatataacagttattgtccagaaaatgcttgaatatttacatcagagcaaagaagagtatgtcatcgtcaatttggtcggcaaaatagcagagctggctgagaaatatgctcctgataatgcatggtttattcagacaatgaatgctgtgttttcagtaggaggagatgtaatgcatcctgatattcccaataactttctgagactactagcggaaggttttgatgatgaaacagaagatcagcaattaagactctatgcagttcagtcttatctcactttactggatatggaaaatgtgttctatccacagagatttcttcaagttatgagttgggtattaggggaatattcctacctcttagataaggaaacgccagaggaagttatagctaagctctacaagttacttatgaatgactctgtgtcttcagaaacaaaagcctggttaattgctgctgtgaccaaattgacatctcaggcgcactcttctaatacagttgagagattaatccatgaatttaccatatctttggatacttgtatgagacaacatgcatttgaattaaaacatttgcatgagaatgtggaacttatgaagagcttgcttccagttgacaggagttgtgaagacttggtggtagatgcttctttatcttttctggatggttttgtggctgaaggactcagtcagggtgcagcgccttacaaacctccccatcaacgccaggaggaaaagctttctcaggaaaaagttctcaattttgaaccatatggactctccttttcttcatctggcttcactggacgacagtctcctgctggcatttctcttggttcagatgtatctgggaatagtgctgagacaggactgaaagagacaaatagcttgaagctggaaggtataaagaaattgtgggggaaagaaggctatcttcccaagaaggaaagcaaaactggtgatgaaagtggagctctgcctgttcctcaagagagtataatggagaatgtagatcaagctataactaaaaaggatcaatctcaagttcttacccaatctaaagaggagaaagaaaagcagctgctggcatcatcattatttgttggtctaggatcagaaagtacaatcaacctgctgggaaaagcagatactgtctctcacaagttcagaaggaaatcaaaagtcaaagaagctaaaagtggcgaaacaaccagtactcataatatgacctgttcttcctttagttctttgtcaaatgtggcatatgaagatgattattattcgaatactttgcacgatacaggagacaaggaattaaagaaattttctctcacttcagaacttttggattctgagtcactcacagaactgcccttggttgagaaattctcatattgtagtctgtctacaccttcattgtttgctaataacaacatggaaatttttcaccctcctcaatctactgcagcctcagttgccaaggaaagctctttagcttcatcttttttggaagaaactactgaatacatacactcaaatgctatggaagtctgtaataatgaaactatatcagtgtcttcttataaaatttggaaagatgattgtttattgatggtctggtcagtcactaataagagtggtttggaattgaaaagtgctgacttagaaatttttcctgcagaaaatttcaaggtgactgagcaacctggatgctgtttgcctgtaatggaagcagaaagcaccaaaagctttcaatatagtgtgcagatagaaaaaccttttacagaaggaaatcttactggttttattagttatcatatgatggatactcattctgctcagctggaattttctgtaaacttatcactattagatttcattagaccattaaaaatctcaagtgacgactttgggaaactctggttatccttcgcaaatgatgtgaaacaaaatgtaaaaatgtcagaatctcaagctgcacttccttctgcactaaagactctgcaacagaaactaagactccatattattgagattataggcaatgaagggctattggcctgtcagctgctcccatccatcccctgcttactgcattgccgagttcatgcagatgtattagccctgtggttcagatcctcctgttctactcttcctgactatttactgtatcagtgtcaaaaggtgatggagggatcctagcagaagccctgctaaattttactccatcaagatcaatggtttacatagataaacttatttaccaaagtaaaaagaactcatggtacttctaatgaaaatggggattattacaagtgtggtttatatgttttctttgtgattcctggtcaagaaagatccccaaaactgtatccctaacctttaactcaggattgtacagtatgtttaggtccctcaaaaagtgacctaagctaatgttataaactgctaatgatttatatatcacttagtgtgtagagggactgaaaatatttattttgttataaataattttatagcacgtttactctagtgctagctaatttgtaataaagccaagtctcagttttctgcattaaatggaagggagacatgaaattgataatctcaaacttaattcatatttggctttggaatgtagtgtatggtttttggtagggaagtcaatattttcgattatgttttgcttagatcagtgttgaactaagttggcatagcacacactaacagttgtaggagatccatgagcatgctgga

SEQ ID NO: 104995 - DNA, 4165 bp, Homo sapiens
  Payload ID: 606
  Gene Symbol: AP4E1
  Gene Name: adaptor-related protein complex 4, epsilon 1 subunit
  ENST ID: ENST00000558439
  CDS Start-End: 107-1072
aaaaacaggaagtgcctacggaggccgggccggcagcggcggccgggcatgaagccgggcggctacgggatcgcgggcggcggcggcatcgcgggcggcggcggcgatgagcgacatagtggagaagacgctgacggcgctgccgggactctttctgcagaaccagcccggtggtgggcccgcggccgccaaggcgtccttctcctcgaggctgggcagccttgtccgcggcatcacagccctcacctccaagcacgaagaagaaaaattaatccagcaggaactgagtagtctgaaagcgactgtttctgctcctactacaacactgaaaatgatgaaggaatgtatggtgagacttatatattgtgaaatgcttggatatgatgcttcctttggctatattcatgcaatcaagttagcccaacaaggaaacctcttagaaaaaagagtaggttatttggctgtttccttatttctacatgaaagtcatgaattattgcttctccttgtgaatacagttgtaaaggatctgcagagcactaacctagtagaagtgtgtatggcactgactgttgttagccagattttcccctgcgaaatgattccagctgttcttccattaatagaagataaacttcaacattctaaggagattgtacgaagaaaagctgttctggcattatacaaattccatctcattgctcctaatcaagtacaacatattcatattaagtttcggaaagcactttgtgacagagatgttggggtcatggctgcctccttgcatatatatcttagaatgattaaggagaattcatctggatataaagacttgactgggagttttgtaaccattttgaagcaagtagttggaggaaagctcccagtagaattcaattaccacagtgtgccagcaccatggttacaaattcagctcttgagaatactgggacttctaggaaaagatgatcaaagatcctcagttttaaagagaagtttgaaaaactgttttattgggttagaatactataattctactgcaaataaaatatcttttaaacaggacaagtgaattaatgtatgatgttcttgatgaatccttacgaagagctgagttaaatcacaatgtcacatatgctattttgtttgaatgtgtgcatacagtctattctatttatcctaaatcggaattacttgagaaggctgccaagtgcattggaaaatttgttctgtcacctaaaataaatctaaaatatttaggactgaaggctcttacctatgttatccaacaggatcctactctggctcttcaacaccagatgacaataattgaatgtttagatcatcctgatcccattattaaaagagagactctggaacttctttacagaattactaatgcacagaatataacagttattgtccagaaaatgcttgaatatttacatcagagcaaagaagagtatgtcatcgtcaatttggtcggcaaaatagcagagctggctgagaaacatatgctcctgataatgcatggtttattcagacaatgaatgctgtgttttcagtaggaggagatgtaatgcatcctgatattcccaataactttctgagactactagcggaaggttttgatgatgaaacagaagatcagcaattaagactctatgcagttcagtcttatctcactttactggatatggaaaatgtgttctatccacagagatttcttcaagttatgagttgggtattaggggaatattcctacctcttagataaggaaacgccagaggaagttatagctaagctctacaagttacttatgaatgactctgtgtcttcagaaacaaaagcctggttaattgctgctgtgaccaaattgacatctcaggcgcactcttctaatacagttgagagattaatccatgaatttaccatatctttggatacttgtatgagacaacatgcatttgaattaaaacatttgcatgagaatgtggaacttatgaagagcttgcttccagttgacaggagttgtgaagacttggtggtagatgcttctttatcttttctggatggttttgtggctgaaggactcagtcagggtgcagcgccttacaaacctccccatcaacgccaggaggaaaagctttctcaggaaaaagttctcaattttgaaccatatggactctccttttcttcatctggcttcactggacgacagtctcctgctggcatttctcttggttcagatgtatctgggaatagtgctgagacaggactgaaagagacaaatagcttgaagctggaaggtataaagaaattgtgggggaaagaaggctatcttcccaagaaggaaagcaaaactggtgatgaaagtggagctctgcctgttcctcaagagagtataatggagaatgtagatcaagctataactaaaaaggatcaatctcaagttcttacccaatctaaagaggagaaagaaaagcagctgctggcatcatcattatttgttggtctaggatcagaaagtacaatcaacctgctgggaaaagcagatactgtctctcacaagttcagaaggaaatcaaaagtcaaagaagctaaaagtggcgaaacaaccagtactcataatatgacctgttcttcctttagttctttgtcaaatgtggcatatgaagatgattattattcgaatactttgcacgatacaggagacaaggaattaaagaaattttctctcacttcagaacttttggattctgagtcactcacagaactgcccttggttgagaaattctcatattgtagtctgtctacaccttcattgtttgctaataacaacatggaaatttttcaccctcctcaatctactgcagcctcagttgccaaggaaagctctttagcttcatcttttttggaagaaactactgaatacatacactcaaatgctatggaagtctgtaataatgaaactatatcagtgtcttcttataaaatttggaaagatgattgtttattgatggtctggtcagtcactaataagagtggtttggaattgaaaagtgctgacttagaaatttttcctgcagaaaatttcaaggtgactgagcaacctggatgctgtttgcctgtaatggaagcagaaagcaccaaaagctttcaatatagtgtgcagatagaaaaaccttttacagaaggaaatcttactggttttattagttatcatatgatggatactcattctgctcagctggaattttctgtaaacttatcactattagatttcattagaccattaaaaatctcaagtgacgactttgggaaactctggttatccttcgcaaatgatgtgaaacaaaatgtaaaaatgtcagaatctcaagctgcacttccttctgcactaaagactctgcaacagaaactaagactccatattattgagattataggcaatgaagggctattggcctgtcagctgctcccatccatcccctgcttactgcattgccgagttcatgcagatgtattagccctgtggttcagatcctcctgttctactcttcctgactatttactgtatcagtgtcaaaaggtgatggagggatcctagcagaagccctgctaaattttactccatcaagatcaatggtttacatagataaacttatttaccaaagtaaaaagaactcatggtacttctaatgaaaatggggattattacaagtgtggtttatatgttttctttgtgattcctggtcaagaaagatccccaaaactgtatccctaacctttaactcaggattgtacagtatgtttaggtccctcaaaaagtgacctaagctaatgttataaactgctaatgatttatatatcacttagtgtgtagagggactgaaaatatttattttgttataaataattttatagcacgtttactctagtgctagctaatttgtaataaagccaagtctcagttttctgcattaaatggaagggagacatgaaattgataatctcaaacttaattcatatttggctttggaatgtagtgtatggtttttggtagggaagtcaatattttcgattatgttttgcttagatcagtgttgaactaagttggcatagcacacactaacagttgtaggagatccatgagcatgctgga

SEQ ID NO: 104996 - DNA, 6653 bp, Homo sapiens
  Payload ID: 606
  Gene Symbol: AP4E1
  Gene Name: adaptor-related protein complex 4, epsilon 1 subunit
  Uniprot ID: Q9UPM8
  ENST ID: ENST00000560508
  CDS Start-End: 233-3421
agaagacgctgacggcgctgccgggactctttctgcagaaccagcccggtggtgggcccgcggccgccaaggcgtccttctcctcgaggctgggcagccttgtccgcggcatcacagccctcacctccaagcacgaagaagaaaaattaatccagcaggaactgagtagtctgaaagcgactgtttctgctcctactacaacactgctactggatattttgcttttcagaaaatgatgaaggaatgtatggtgagacttatatattgtgaaatgcttggatatgatgcttcctttggctatattcatgcaatcaagttagcccaacaaggaaacctcttagaaaaaagagtaggttatttggctgtttccttatttctacatgaaagtcatgaattattgcttctccttgtgaatacagttgtaaaggatctgcagagcactaacctagtagaagtgtgtatggcactgactgttgttagccagattttcccctgcgaaatgattccagctgttcttccattaatagaagataaacttcaacattctaaggagattgtacgaagaaaagctgttctggcattatacaaattccatctcattgctcctaatcaagtacaacatattcatattaagtttcggaaagcactttgtgacagagatgttggggtcatggctgcctccttgcatatatatcttagaatgattaaggagaattcatctggatataaagacttgactgggagttttgtaaccattttgaagcaagtagttggaggaaagctcccagtagaattcaattaccacagtgtgccagcaccatggttacaaattcagctcttgagaatactgggacttctaggaaaagatgatcaaaggacaagtgaattaatgtatgatgttcttgatgaatccttacgaagagctgagttaaatcacaatgtcacatatgctattttgtttgaatgtgtgcatacagtctattctatttatcctaaatcggaattacttgagaaggctgccaagtgcattggaaaatttgttctgtcacctaaaataaatctaaaatatttaggactgaaggctcttacctatgttatccaacaggatcctactctggctcttcaacaccagatgacaataattgaatgtttagatcatcctgatcccattattaaaagagagactctggaacttctttacagaattactaatgcacagaatataacagttattgtccagaaaatgcttgaatatttacatcagagcaaagaagagtatgtcatcgtcaatttggtcggcaaaatagcagagctggctgagaaatatgctcctgataatgcatggtttattcagacaatgaatgctgtgttttcagtaggaggagatgtaatgcatcctgatattcccaataactttctgagactactagcggaaggttttgatgatgaaacagaagatcagcaattaagactctatgcagttcagtcttatctcactttactggatatggaaaatgtgttctatccacagagatttcttcaagttatgagttgggtattaggggaatattcctacctcttagataaggaaacgccagaggaagttatagctaagctctacaagttacttatgaatgactctgtgtcttcagaaacaaaagcctggttaattgctgctgtgaccaaattgacatctcaggcgcactcttctaatacagttgagagattaatccatgaatttaccatatctttggatacttgtatgagacaacatgcatttgaattaaaacatttgcatgagaatgtggaacttatgaagagcttgcttccagttgacaggagttgtgaagacttggtggtagatgcttctttatcttttctggatggttttgtggctgaaggactcagtcagggtgcagcgccttacaaacctccccatcaacgccaggaggaaaagctttctcaggaaaaagttctcaattttgaaccatatggactctccttttcttcatctggcttcactggacgacagtctcctgctggcatttctcttggttcagatgtatctgggaatagtgctgagacaggactgaaagagacaaatagcttgaagctggaaggtataaagaaattgtgggggaaagaaggctatcttcccaagaaggaaagcaaaactggtgatgaaagtggagctctgcctgttcctcaagagagtataatggagaatgtagatcaagctataactaaaaaggatcaatctcaagttcttacccaatctaaagaggagaaagaaaagcagctgctggcatcatcattatttgttggtctaggatcagaaagtacaatcaacctgctgggaaaagcagatactgtctctcacaagttcagaaggaaatcaaaagtcaaagaagctaaaagtggcgaaacaaccagtactcataatatgacctgttcttcctttagttctttgtcaaatgtggcatatgaagatgattattattcgaatactttgcacgatacaggagacaaggaattaaagaaattttctctcacttcagaacttttggattctgagtcactcacagaactgcccttggttgagaaattctcatattgtagtctgtctacaccttcattgtttgctaataacaacatggaaatttttcaccctcctcaatctactgcagcctcagttgccaaggaaagctctttagcttcatcttttttggaagaaactactgaatacatacactcaaatgctatggaagtctgtaataatgaaactatatcagtgtcttcttataaaatttggaaagatgattgtttattgatggtctggtcagtcactaataagagtggtttggaattgaaaagtgctgacttagaaatttttcctgcagaaaatttcaaggtgactgagcaacctggatgctgtttgcctgtaatggaagcagaaagcaccaaaagctttcaatatagtgtgcagatagaaaaaccttttacagaaggaaatcttactggttttattagttatcatatgatggatactcattctgctcagctggaattttctgtaaacttatcactattagatttcattagaccattaaaaatctcaagtgacgactttgggaaactctggttatccttcgcaaatgatgtgaaacaaaatgtaaaaatgtcagaatctcaagctgcacttccttctgcactaaagactctgcaacagaaactaagactccatattattgagattataggcaatgaagggctattggcctgtcagctgctcccatccatcccctgcttactgcattgccgagttcatgcagatgtattagccctgtggttcagatcctcctgttctactcttcctgactatttactgtatcagtgtcaaaaggtgatggagggatcctagcagaagccctgctaaattttactccatcaagatcaatggtttacatagataaacttatttaccaaagtaaaaagaactcatggtacttctaatgaaaatggggattattacaagtgtggtttatatgttttctttgtgattcctggtcaagaaagatccccaaaactgtatccctaacctttaactcaggattgtacagtatgtttaggtccctcaaaaagtgacctaagctaatgttataaactgctaatgatttatatatcacttagtgtgtagagggactgaaaatatttattttgttataaataattttatagcacgtttactctagtgctagctaatttgtaataaagccaagtctcagttttctgcattaaatggaagggagacatgaaattgataatctcaaacttaattcatatttggctttggaatgtagtgtatggtttttggtagggaagtcaatattttcgattatgttttgcttagatcagtgttgaactaagttggcatagcacacactaacagttgtaggagatccatgagcatgctggatattgaggggatccaatctgtgatctattttttattatagataactgttacacataatttcagatcgtttggctgtaaaatttgtctgttttccacttggagttattttaaaattcaaagtaaatcactctattcttattttgaaaactcagagccattttatatagaaacaaaacccataagagcacacagtaacaaagcaaacagatacaaaaatgactttttagttatgacaaatattttagttggttactacttaggtccttttggcaaatgaaaatttgtgattagagtataaatggcaaaactatcttttcctggcctttgaatccactagtacttaatggatatagctgaagcagagactaagtataacatacaggttcttcagtaaaatatatcattttcatgttatagttatgcctgtgtggcctctgtcagaactattatcagtaaaagaggttaagcctatatatgaatgatggaccaaaaccttgaggttgtacattaactgaaatagtattttataaaatcttatggtgctgtggaaaatatttattatttcaccttttctgacacttcaccatggagactattcaggtaatacaattttaagtcattgcagttaatactctggttaattggtactgttaatcacccaggtcaggaattctgattttaggttatctcattaatcatggctgataaagaagctaaggggattctccagatctaatagatttcattagtcatttgtgtcgagtattcctccctaaaaacaaaagcagtattttctttctcaattaatttttaagttattcattaaaaaatatataacatcttaattttattcttttaaaaacatacagtgaagccttgctacaagagtcataagtgactggaatttcttgcataataggttcctccttttgaatagatcagattcatccccaggctctcagcagtgtcatgatgaaatgagtgtgctgacttcaggggtgtggtggacactggtagctagccttatcagctccctccttattcctacctctgtcagcagcatgcctcgccccttacctaattctgctgtgactctgacagagaggaagtgccttctcactttgcaaaggaatgcagcatgtcacaaaggaggtgctccaattttttgtgtccttacttccctatgtttgcctagttactgaggctaggtcgagtgtgaagcaataggtgtaagatgctgagagcacatggacagctaccagggagatctgttgcttggttacagggtgtattcatgagtggtagctgcagttgtcgtgagagacatgcttggcatacagagctgtctaatgggtgggagacatgtaatggtagatttagggctgggagcatgattttgggtctgcccaaaggaacatggtgtcacttttgttctttctgacccactaaataaaaagtagtgtaacagggtttcactggaatgtttattagaaagtttacactttttatatttttatgattttaaaaacaaacaataatagaaaaacagattttaaggaacttcagagcagtatatattctgtctaaactcactgaatattttaagttgtaaatcaggtgtccaccaacctttatttttgcattgcaggagatgtgactgtaaagtagggagtttttttttttgagacagagtttcacccttgttgcccaggctagagtgtaatggtgcaatctccgctcactgcaacctctgcctcccaggttcaagcgattctcctgcctcagcctccctagtagctgggattacaggcatgcaccaccacacccggctaatttttttatatttttagtagagacaaggtttctccatgttggtcaggctggtctcgaactcccgacctcaggtgatctgcccgcctcagcctcccaaagtgctgggattacaggcgtgagccactgcgcccggccaaattatttttgtgggtagattcattctctttacctaatagtcataatttagtcagtgaagggacaacatctggggtaagagctatggaggaggtgctcagctttgtgagttttgtgccaggcatctttgctgaaaatggagatggcagcaagtgtgaatctgggggaatataagggaagacagaaaagccttaagagtagacggaggaagaagggtaccagaatagtccctgtggaggcaggcagatcagagctcagggtttgaaagtgggcctgagtaagggtcctgctagagaaactgcagatggaagctgagcagttaccaactgctaatgtgccaagtataccaagcacagcatgtgtcctgtagaggagcattattttaaacaatgttctactatcatctaccaaaataattgtggtaaaagtgtagtattttattttttccttttatgtcagcaatattttaaaatattgatctgtttatcttatatttttatggataaatgtagtatttgcctcatgattgtgagccactgagagtgcactgaacctattcacatgtctttaagatgttttgctgtgttaaaattttaggagagaaaaatacaagtgaataattatttaataggcatttattactttattttggagttgaattctgtcatttgaaaaagttcagtaatgtaataaatacaaagtgatctgc

SEQ ID NO: 104997 - DNA, 1603 bp, Homo sapiens
  Payload ID: 606
  Gene Symbol: AP4E1
  Gene Name: adaptor-related protein complex 4, epsilon 1 subunit
  ENST ID: ENST00000561441
  CDS Start-End: 108-1214
aaaaaacaggaagtgcctacggaggccgggccggcagcggcggccgggcatgaagccgggcggctacgggatcgcgggcggcggcggcatcgcgggcggcggcggcgatgagcgacatagtggagaagacgctgacggcgctgccgggactctttctgcagaaccagcccggtggtgggcccgcggccgccaaggcgtccttctcctcgaggctgggcagccttgtccgcggcatcacagccctcacctccaagcacgaagaagaaaaattaatccagcaggaactgagtagtctgaaagcgactgtttctgctcctactacaacactgaaaatgatgaaggaatgtatggtgagacttatatattgtgaaatgcttggatatgatgcttcctttggctatattcatgcaatcaagttagcccaacaaggaaacctcttagaaaaaagagtaggttatttggctgtttccttatttctacatgaaagtcatgaattattgcttctccttgtgaatacagttgtaaaggatctgcagagcactaacctagtagaagtgtgtatggcactgactgttgttagccagattttcccctgcgaaatgattccagctgttcttccattaatagaagataaacttcaacattctaaggagattgtacgaagaaaagctgttctggcattatacaaattccatctcattgctcctaatcaagtacaacatattcatattaagtttcggaaagcactttgtgacagagatgttggggtcatggctgcctccttgcatatatatcttagaatgattaaggagaattcatctggatataaagacttgactgggagttttgtaaccattttgaagcaagtagttggaggaaagctcccagtagaattcaattaccacagtgtgccagcaccatggttacaaattcagctcttgagaatactgggacttctaggaaaagatgatcaaaggacaagtgaattaatgtatgatgttcttgatgaatccttacgaagagctgagttaaatcacaatgtcacatatgctattttgtttgaatgtgtgcatacagtctattctatttatcctaaatcggaattacttgagaaggctgccaagtgcattggaaaatttgttctgtcacctaaaataaatctaaaatatttaggatcctactctggctcttcaacaccagatgacaataattgaatgtttagatcatcctgatcccattattaaaagagagactctggaacttctttacagaattactaatgcacagaatataacagttattgtccagaaaatgcttgaatatttacatcagagcaaagaagagtatgtcatcgtcaatttggtcggcaaaatagcagagctggctgagaaatatgctcctgataatgcatggtttattcagacaatgaatgctgtgttttcagtaggaggagatgtaatgcatcctgatattcccaataactttctgagactactagcggaaggttttgatgatgaaacagaagatcagcaattaagactctatgcagttcagtcttatctcactttactggatatggaaaatgtgttctatccacagagat

SEQ ID NO: 104998 - DNA, 1817 bp, Homo sapiens
  Payload ID: 607
  Gene Symbol: AP4M1
  Gene Name: adaptor-related protein complex 4, mu 1 subunit
  Uniprot ID: O00189
  ENST ID: ENST00000359593
  CDS Start-End: 159-1520
ggggtagtgcaggcgccgggtttcccgcggtccgagctggcgcgggcggaggagaatcgctcttaaagggccagcgcacacgcgttcttttgttccggggccgcagggcggggcaggcccgactttcgccgtcttcttgtctactctccagaacggccatgatttcccaattcttcattctgtcctccaagggggacccgctcatctacaaagacttccgcggggacagtggcggccgggatgtggccgagctcttctaccggaagctgacgggactgccaggagacgagtccccggttgtcatgcatcaccatggccgtcatttcattcacatcagacacagcggcctctatttggtggtcacaacttcagaaaacgtttctcccttcagcctcctagaactgctctccaggttggccacccttctgggcgattactgtggctccctgggcgaggggaccatctcccgcaatgtggctctggtatacgaactcctggatgaagtgctggactatggctatgtacagaccacatccacggagatgctgaggaatttcatccagacggaagctgtggtcagcaagcccttcagcctctttgacctcagcagcgttggcttgtttggggctgagacacaacagagcaaagtggcccccagcagtgcagccagccgccccgtcctgtccagtcgctctgaccagagccaaaagaatgaagtttttttggatgtggtcgagagattgtctgtactgatagcatctaatggatccctgctgaaggtggatgtgcagggagagattcggctcaagagcttccttcctagcggctctgagatgcgcattggcttgacggaagagttttgtgtggggaagtcagagctgagaggttatgggccaggaatccgggtcgatgaagtctcgtttcacagctctgtgaatctggacgaatttgagtctcatcgaatcctccgcttgcaaccacctcagggcgagctgactgtgatgcggtaccaactctccgatgacctcccctcaccgctccccttccggctcttcccctctgtgcagtgggaccgaggctcaggccggctccaggtttatctaaagttgcgatgtgacctgctctcaaagagccaagccctcaatgtcaggctgcacctccccctgcctcgaggggtggtcagcctgtctcaggagctgagcagcccagagcagaaggctgagctggcagagggagcccttcgctgggacctgcctcgggtgcaaggaggctctcaactctcaggccttttccagatggacgtcccagggcccccaggacctcccagccatgggctctccacctcggcctctcctctggggctgggccctgccagtctctccttcgagcttccccggcacacgtgctctggcctccaggtccgattcctcaggctggccttcaggccatgcggcaatgccaacccccacaagtgggtgcgacacctaagccacagcgacgcctatgtcattcggatctgaggctccccaaacgaggacacgacggccaaggtggcagtttgtcccacgggaggacagtcgtttcttttccagcctcctggccttcggactctgaatctgggcaggaagagtcctcagtcccaagaccaggagggggcaatgggcccagcctttctgtggtatctgatgcaggaaggactgcagtggatcagaacttacaaaccaaacttttattctgagaaactggctgtacaatatctaaaaagaaagtgacatgaaggaagcaatctacaacttccttccgcttagcgagcatgc

SEQ ID NO: 104999 - DNA, 813 bp, Homo sapiens
  Payload ID: 607
  Gene Symbol: AP4M1
  Gene Name: adaptor-related protein complex 4, mu 1 subunit
  ENST ID: ENST00000394061
  CDS Start-End: 167-361
ctccgggcggggtagtgcaggcgccgggtttcccgcggtccgagctggcgcgggcggaggagaatcgctcttaaagggccagcgcacacgcgttcttttgttccggggccgcagggcggggcaggcccgactttcgccgtcttcttgtctactctccagaacggccatgatttcccaattcttcattctgtcctccaagggggacccgctcatctacaaagacttccgcggggacagtggcggccgggatgtggccgagctcttctaccggaagctgacgggactgccaggagacgagtccccggttgtcatgctgggcgtggtggcgggcgcctgtaatcccatctactcgggaagctgaggcttgagaatcgcttgaatccaagaggcagaggttgcagtgagccgagatccggacaccgcactccagcctgggagacagagcgagactccctctcgggcatcaccatggccgtcatttcattcacatcagacacagcggcctctatttggtggtcacaacttcagaaaacgtttctcccttcagcctcctagaactgctctccaggttggccacccttctgggcgattactgtggctccctgggcgaggggaccatctcccgcaatgtggctctggtatacgaactcctggatgaagtgctggactatggctatgtacagaccacatccacggagatgctgaggaatttcatccagacggaagctgtggtcagcaagcccttcagcctctttgacctcagcagcgttggcttgtttggggctgagacacaacagagcaaagtggccccca

SEQ ID NO: 105000 - DNA, 548 bp, Homo sapiens
  Payload ID: 607
  Gene Symbol: AP4M1
  Gene Name: adaptor-related protein complex 4, mu 1 subunit
  ENST ID: ENST00000450807
  CDS Start-End: 1-483
cgggtcgatgaagtctcgtttcacagctctgtgaatctggacgaatttgagtctcatcgaatcctccgcttgcaaccacctcagggcgagctgactgtgatgcggtaccaactctccgatgacctcccctcaccgctccccttccggctcttcccctctgtgcagtgggaccgaggctcaggccggctccaggtttatctaaagttgcgatgtgacctgctctcaaagagccaagccctcaatgtcaggctgcacctccccctgcctcgaggggtggtcagcctgtctcaggagctgagcagcccagagcagaaggctgagctggcagagggagcccttcgctgggacctgcctcgggtgcaaggaggctctcaactctcaggccttttccagaggcctaacatcgtgtcccagctcagccaagcctgcgatggagccataacgagtcgtccagggcgtcttctcgtccacccagctctgtaaggggaaggaaataaactaagatgaaggggtctgaaaggatgattgacagggacctaagtctttca

SEQ ID NO: 105001 - DNA, 678 bp, Homo sapiens
  Payload ID: 607
  Gene Symbol: AP4M1
  Gene Name: adaptor-related protein complex 4, mu 1 subunit
  ENST ID: ENST00000445295
  CDS Start-End: 1-416
ctcagggcgagctgactgtgatgcggtaccaactctccgatgacctcccctcaccgctccccttccggctcttcccctctgtgcagtgggaccgaggctcaggccggctccaggtttatctaaagttgcgatgtgacctgctctcaaagagccaagccctcaatgtcaggctgcacctccccctgcctcgaggggtggtcagcctgtctcaggagctgagcagcccagagcagaaggctgagctggcagagggagcccttcgctgggacctgcctcgggtgcaaggaggctctcaactctcaggccttttccaggtccgattcctcaggctggccttcaggccatgcggcaatgccaacccccacaagtgggtgcgacacctaagccacagcgacgcctatgtcattcggatctgaggctccccaaacgaggacacgacggccaaggtggcagtttgtcccacgggaggacagtcgtttcttttccagcctcctggccttcggactctgaatctgggcaggaagagtcctcagtcccaagaccaggagggggcaatgggcccagcctttctgtggtatctgatgcaggaaggactgcagtggatcagaacttacaaaccaaacttttattctgagaaactggctgtacaatatctaaaaagaaagtgacatgaaggaa

SEQ ID NO: 105002 - DNA, 960 bp, Homo sapiens
  Payload ID: 607
  Gene Symbol: AP4M1
  Gene Name: adaptor-related protein complex 4, mu 1 subunit
  ENST ID: ENST00000446007
  CDS Start-End: 57-713
gcagggcggggcaggcccgactttcgccgtcttcttgtctactctccagaacggccatgatttcccaattcttcattctgtcctccaagggggacccgctcatctacaaagacttccgcggggacagtggcggccgggatgtggccgagctcttctaccggaagctgacgggactgccaggagacgagtccccggttgtcatgcatcaccatggccgtcatttcattcacatcagacacagcggcctctatttggtggtcacaacttcagaaaacgtttctcccttcagcctcctagaactgctctccaggttggccacccttctgggcgattactgtggctccctgggcgaggggaccatctcccgcaatgtggctctggtatacgaactcctggatgaagtgctggactatggctatgtacagaccacatccacggagatgctgaggaatttcatccagacggaagctgtggtcagcaagcccttcagcctctttgacctcagcagcgttggcttgtttggggctgagacacaacagagcaaagtggcccccagcagtgcagccagccgccccgtcctgtccagtcgctctgaccagagccaaaagaatgaagtttttttggatgtggtcgagagattgtctgtactgatagcatctaatgttatgggccaggaatccgggtcgatgaagtctcgtttcacagctctgtgaatctggacgaatttgagtctcatcgaatcctccgcttgcaaccacctcagggcgagctgactgtgatgcggtaccaactctccgatgacctcccctcaccgctccccttccggctcttcccctctgtgcagtgggaccgaggctcaggccggctccaggtttatctaaagttgcgatgtgacctgctctcaaagagccaagccctcaatgtcaggctgcacctccccctgcctcgaggggtggtcag

SEQ ID NO: 105003 - DNA, 1681 bp, Homo sapiens
  Payload ID: 607
  Gene Symbol: AP4M1
  Gene Name: adaptor-related protein complex 4, mu 1 subunit
  ENST ID: ENST00000445208
  CDS Start-End: 159-452
ggggtagtgcaggcgccgggtttcccgcggtccgagctggcgcgggcggaggagaatcgctcttaaagggccagcgcacacgcgttcttttgttccggggccgcagggcggggcaggcccgactttcgccgtcttcttgtctactctccagaacggccatgatttcccaattcttcattctgtcctccaagggggacccgctcatctacaaagacttccgcggggacagtggcggccgggatgtggccgagctcttctaccggaagctgacgggactgccaggagacgagtccccggttgtcatgcatcaccatggccgtcatttcattcacatcagacacagcggcctctatttggtggtcacaacttcagaaaacgtttctcccttcagcctcctagaactgctctccaggactatggctatgtacagaccacatccacggagatgctgaggaatttcatccagacggaagctgtggtcagcaagcccttcagcctctttgacctcagcagcgttggcttgtttggggctgagacacaacagagcaaagtggcccccagcagtgcagccagccgccccgtcctgtccagtcgctctgaccagagccaaaagaatgaagtttttttggatgtggtcgagagattgtctgtactgatagcatctaatggatccctgctgaaggtggatgtgcagggagagattcggctcaagagcttccttcctagcggctctgagatgcgcattggcttgacggaagagttttgtgtggggaagtcagagctgagaggttatgggccaggaatccgggtcgatgaagtctcgtttcacagctctgtgaatctggacgaatttgagtctcatcgaatcctccgcttgcaaccacctcagggcgagctgactgtgatgcggtaccaactctccgatgacctcccctcaccgctccccttccggctcttcccctctgtgcagtgggaccgaggctcaggccggctccaggtttatctaaagttgcgatgtgacctgctctcaaagagccaagccctcaatgtcaggctgcacctccccctgcctcgaggggtggtcagcctgtctcaggagctgagcagcccagagcagaaggctgagctggcagagggagcccttcgctgggacctgcctcgggtgcaaggaggctctcaactctcaggccttttccagatggacgtcccagggcccccaggacctcccagccatgggctctccacctcggcctctcctctggggctgggccctgccagtctctccttcgagcttccccggcacacgtgctctggcctccaggtccgattcctcaggctggccttcaggccatgcggcaatgccaacccccacaagtgggtgcgacacctaagccacagcgacgcctatgtcattcggatctgaggctccccaaacgaggacacgacggccaaggtggcagtttgtcccacgggaggacagtcgtttcttttccagcctcctggccttcggactctgaatctgggcaggaagagtcctcagtcccaagaccaggagggggcaatgggcccagcctttctgtggtatctgatgcaggaaggactgcagtggatcagaacttacaaaccaaacttttattctgagaaactggctgtacaatatctaaaaagaaagtgacatgaa

SEQ ID NO: 105004 - DNA, 1091 bp, Homo sapiens
  Payload ID: 607
  Gene Symbol: AP4M1
  Gene Name: adaptor-related protein complex 4, mu 1 subunit
  ENST ID: ENST00000438383
  CDS Start-End: 159-1091
ggggtagtgcaggcgccgggtttcccgcggtccgagctggcgcgggcggaggagaatcgctcttaaagggccagcgcacacgcgttcttttgttccggggccgcagggcggggcaggcccgactttcgccgtcttcttgtctactctccagaacggccatgatttcccaattcttcattctgtcctccaagggggacccgctcatctacaaagacttccgcggggacagtggcggccgggatgtggccgagctcttctaccggaagctgacgggactgccaggagacgagtccccggttgtcatggactatggctatgtacagaccacatccacggagatgctgaggaatttcatccagacggaagctgtggtcagcaagcccttcagcctctttgacctcagcagcgttggcttgtttggggctgagacacaacagagcaaagtggcccccagcagtgcagccagccgccccgtcctgtccagtcgctctgaccagagccaaaagaatgaagtttttttggatgtggtcgagagattgtctgtactgatagcatctaatggatccctgctgaaggtggatgtgcagggagagattcggctcaagagcttccttcctagcggctctgagatgcgcattggcttgacggaagagttttgtgtggggaagtcagagctgagaggttatgggccaggaatccgggtcgatgaagtctcgtttcacagctctgtgaatctggacgaatttgagtctcatcgaatcctccgcttgcaaccacctcagggcgagctgactgtgatgcggtaccaactctccgatgacctcccctcaccgctccccttccggctcttcccctctgtgcagtgggaccgaggctcaggccggctccaggtttatctaaagttgcgatgtgacctgctctcaaagagccaagccctcaatgtcaggctgcacctccccctgcctcgaggggtggtcagcctgtctcaggagctgagcagcccagagcagaaggctgagctggcagagggagcccttcgctgggacctgcctcgggtgcaaggaggctctcaactctcaggccttttccag

SEQ ID NO: 105005 - DNA, 1836 bp, Homo sapiens
  Payload ID: 607
  Gene Symbol: AP4M1
  Gene Name: adaptor-related protein complex 4, mu 1 subunit
  ENST ID: ENST00000429084
  CDS Start-End: 159-1541
ggggtagtgcaggcgccgggtttcccgcggtccgagctggcgcgggcggaggagaatcgctcttaaagggccagcgcacacgcgttcttttgttccggggccgcagggcggggcaggcccgactttcgccgtcttcttgtctactctccagaacggccatgatttcccaattcttcattctgtcctccaagggggacccgctcatctacaaagacttccgcggggacagtggcggccgggatgtggccgagctcttctaccggaagctgacgggactgccaggagacgagtccccggttgtcatggtaaccagtggcgggaggcggcatcaccatggccgtcatttcattcacatcagacacagcggcctctatttggtggtcacaacttcagaaaacgtttctcccttcagcctcctagaactgctctccaggttggccacccttctgggcgattactgtggctccctgggcgaggggaccatctcccgcaatgtggctctggtatacgaactcctggatgaagtgctggactatggctatgtacagaccacatccacggagatgctgaggaatttcatccagacggaagctgtggtcagcaagcccttcagcctctttgacctcagcagcgttggcttgtttggggctgagacacaacagagcaaagtggcccccagcagtgcagccagccgccccgtcctgtccagtcgctctgaccagagccaaaagaatgaagtttttttggatgtggtcgagagattgtctgtactgatagcatctaatggatccctgctgaaggtggatgtgcagggagagattcggctcaagagcttccttcctagcggctctgagatgcgcattggcttgacggaagagttttgtgtggggaagtcagagctgagaggttatgggccaggaatccgggtcgatgaagtctcgtttcacagctctgtgaatctggacgaatttgagtctcatcgaatcctccgcttgcaaccacctcagggcgagctgactgtgatgcggtaccaactctccgatgacctcccctcaccgctccccttccggctcttcccctctgtgcagtgggaccgaggctcaggccggctccaggtttatctaaagttgcgatgtgacctgctctcaaagagccaagccctcaatgtcaggctgcacctccccctgcctcgaggggtggtcagcctgtctcaggagctgagcagcccagagcagaaggctgagctggcagagggagcccttcgctgggacctgcctcgggtgcaaggaggctctcaactctcaggccttttccagatggacgtcccagggcccccaggacctcccagccatgggctctccacctcggcctctcctctggggctgggccctgccagtctctccttcgagcttccccggcacacgtgctctggcctccaggtccgattcctcaggctggccttcaggccatgcggcaatgccaacccccacaagtgggtgcgacacctaagccacagcgacgcctatgtcattcggatctgaggctccccaaacgaggacacgacggccaaggtggcagtttgtcccacgggaggacagtcgtttcttttccagcctcctggccttcggactctgaatctgggcaggaagagtcctcagtcccaagaccaggagggggcaatgggcccagcctttctgtggtatctgatgcaggaaggactgcagtggatcagaacttacaaaccaaacttttattctgagaaactggctgtacaatatctaaaaagaaagtgacatgaaggaagcaatctacaacttccttccgcttagcgagcat

SEQ ID NO: 105006 - DNA, 3408 bp, Homo sapiens
  Payload ID: 607
  Gene Symbol: AP4M1
  Gene Name: adaptor-related protein complex 4, mu 1 subunit
  ENST ID: ENST00000416938
  CDS Start-End: 1-580
cttccacccgccagtccgcggggacagtggcggccgggatgtggccgagctcttctaccggaagctgacgggactgccaggagacgagtccccggttgtcatgcatcaccatggccgtcatttcattcacatcagacacagcggcctctatttggtggtcacaacttcagaaaacgtttctcccttcagcctcctagaactgctctccaggttggccacccttctgggcgattactgtggctccctgggcgaggggaccatctcccgcaatgtggctctggtatacgaactcctggatgaagtgctggactatggctatgtacagaccacatccacggagatgctgaggaatttcatccagacggaagctgtggtcagcaagcccttcagcctctttgacctcagcagcgttggcttgtttggggctgagacacaacagagcaaagtggcccccagcagtgcagccagccgccccgtcctgtccagtcgctctgaccagagccaaaagaatgaagtttttttggatgtggtcgagagattgtctgtactgatagcatctaatagatgcgcattggcttgacggaagagttttgtgtggggaagtcagagctgagaggttatgggccaggaatccgggtcgatgaagtctcgtttcacagctctgtgaatctggacgaatttgagtctcatcgaatcctccgcttgcaaccacctcagggcgagctgactgtgatgcggtaccaactctccgatgacctcccctcaccgctccccttccggctcttcccctctgtgcagtgggaccgaggctcaggccggctccaggtttatctaaagttgcgatgtgacctgctctcaaagagccaagccctcaatgtcaggctgcacctccccctgcctcgaggggtggtcagcctgtctcaggagctgagcagcccagagcagaaggctgagctggcagagggagcccttcgctgggacctgcctcgggtgcaaggaggctctcaactctcaggccttttccagatggacgtcccagggcccccaggacctcccagccatgggctctccacctcggcctctcctctggggctgggccctgccagtctctccttcgagcttccccggcacacgtgctctggcctccaggtccgattcctcaggctggccttcaggccatgcggcaatgccaacccccacaagtgggtgcgacacctaagccacagcgacgcctatgtcattcggatctgaggctccccaaacgaggacacgacggccaaggtggcagtttgtcccacgggaggacagtcgtttcttttccagcctcctggccttcggactctgaatctgggcaggaagagtcctcagtcccaagaccaggagggggcaatgggcccagcctttctgtggtatctgatgcaggaaggactgcagtggatcagaacttacaaaccaaacttttattctgagaaactggctgtacaatatctaaaaagaaagtgacatgaaggaagcaatctacaacttccttccgcttagcgagcatgcatgtgtgtacgtgcacgtgtgtacatgtctgcatgtgtgggaatccgggggctggcaggtggagcatcacggagcaggctgaggggagccggagttgggctgggagccattggcttttggagtccctggagctggagggggactgtccccagcctcctgcttccccccacaaagggcactgccgctgagtggggacggggacgatgccgggggaggaactggagaaggatgggaggtggggcctcctttgccctcccctgttgggggaagtgagaccacgatgtacttctggacactcccaggaccagagggagcagtgctggggggtgcggtggtggcggtggagaccaacttgacgatgggctgcacgctggggacggtggtggtgacgggcgaagtggtggtggaacctgagccgggggccgaggtgctgagggacaggacctggatagaaaggaaaggcaggccgcttgccctgtgccctccctgccccccagaggcctggcgaggacgcttcactcgctccctgcctgaacaagttgttcctgtagttcaccctgtagacagctatggctggagaccttgttcatgcagggcagctacagccctgcaggaccctggtgggcgcctcttccagctcttgacttggggcccagaggggactgtgctctactcctgggcctccccagggtgctctgaggtaacccaggccctccagatgctccctgtcccacagctctgcatacctgctgggtggatggggcgctggaggacgatgacattacaataaacttggttggaggaggggaaggctgtggtggggcagccgctcgtgcagacaccagtgtctggacaggaagtgcgatggagccaggaaccttcagcaagccaggggtgcgagggccaggctgtggggcctgcgagagggtcagcgtgggccggggctgcggggagaagaggaaagggggaagtggcaccatctactaagaagaggagtctgaagggagaggcctgggctcccctcgctcttcctcagtggctctcactagggctggggcatcctcactcagggcctggttgccctgagactactgactgagggcacatgtggctgtgtgcaagtgcctgtcccacacaggggttctcctctgcttcctcctattcctcctccccacccggccacggacctgcgtgatggtcagagtggtcctgttgacctgctgagcctgcagagcagcctgggcccgagccttgaccacctgggagcagaggaggggcccaagggacccgaattctgcccgataggcgtcctgattgtcaggcggtgggcgcagctttgccagaacaggagcacagtgtttctgcagaacagaaaaaaagccaggtagagggagggctggggaaaaaagccaggtagagggagggctggtgacactcttgagaagaaccttggggatggggtaaaaaaggacattccttatcatctcagtgcccctgttgaaggccaaattatgctgaactattagtgtgtgtacagaacactgtgggctttctcataagaaaagatgggcacggggccaggtgcagcatcttaggcctgtatcccagcacttgggaggctgaggtgggtggatcacttgaggtcaagagcctggccaaaatggagaaacctcatctccactaaaaatacaaaaactagccaggcatggtggcacgcacctgtagtcccagctactggggaggttgaggtactagaatgcttgaacccaggtggtggaggctgcagtgagcagaggttgcatcagtgcactcccgcttgggtgacagagtgagactgtctcagaaaaaaaaaaaaaagaa

SEQ ID NO: 105007 - DNA, 1814 bp, Homo sapiens
  Payload ID: 607
  Gene Symbol: AP4M1
  Gene Name: adaptor-related protein complex 4, mu 1 subunit
  ENST ID: ENST00000422582
  CDS Start-End: 571-1548
acttggggggtgcattccgccaaataaagctaacgtgaggcccggcgcggtggctcacgcctgtaatcccagcactttgggagaccgaggcgggcggatcacctgaggtcaggagttcgaaatcagcctggccaacatggtgaaactccgcctctactaaaaatacaaaaaaaaaaaaaacatagctgggcgtggtggcgggcgcctgtaatcccatctactcgggaagctgaggcttgagaatcgcttgaatccaagaggcagaggttgcagtgagccgagatccggacaccgcactccagcctgggagacagagcgagactccctctcgggcatcaccatggccgtcatttcattcacatcagacacagcggcctctatttggtggtcacaacttcagaaaacgtttctcccttcagcctcctagaactgctctccaggttggccacccttctgggcgattactgtggctccctgggcgaggggaccatctcccgcaatgtggctctggtatacgaactcctggatgaagtgctggactatggctatgtacagaccacatccacggagatgctgaggaatttcatccagacggaagctgtggtcagcaagcccttcagcctctttgacctcagcagcgttggcttgtttggggctgagacacaacagagcaaagtggcccccagcagtgcagccagccgccccgtcctgtccagtcgctctgaccagagccaaaagaatgaagtttttttggatgtggtcgagagattgtctgtactgatagcatctaatggatccctgctgaaggtggatgtgcagggagagattcggctcaagagcttccttcctagcggctctgagatgcgcattggcttgacggaagagttttgtgtggggaagtcagagctgagaggttatgggccaggaatccgggtcgatgaagtctcgtttcacagctctgtgaatctggacgaatttgagtctcatcgaatcctccgcttgcaaccacctcagggcgagctgactgtgatgcggtaccaactctccgatgacctcccctcaccgctccccttccggctcttcccctctgtgcagtgggaccgaggctcaggccggctccaggtttatctaaagttgcgatgtgacctgctctcaaagagccaagccctcaatgtcaggctgcacctccccctgcctcgaggggtggtcagcctgtctcaggagctgagcagcccagagcagaaggctgagctggcagagggagcccttcgctgggacctgcctcgggtgcaaggaggctctcaactctcaggccttttccagatggacgtcccagggcccccaggacctcccagccatgggctctccacctcggcctctcctctggggctgggccctgccagtctctccttcgagcttccccggcacacgtgctctggcctccaggtccgattcctcaggctggccttcaggccatgcggcaatgccaacccccacaagtgggtgcgacacctaagccacagcgacgcctatgtcattcggatctgaggctccccaaacgaggacacgacggccaaggtggcagtttgtcccacgggaggacagtcgtttcttttccagcctcctggccttcggactctgaatctgggcaggaagagtcctcagtcccaagaccaggagggggcaatgggcccagcctttctgtggtatctgatgcaggaaggactgcagtggatcagaacttacaaaccaaacttttattctgagaaactggctgtacaatatctaaaaagaaagtgacatgaaggaagcaa

SEQ ID NO: 105008 - DNA, 1572 bp, Homo sapiens
  Payload ID: 607
  Gene Symbol: AP4M1
  Gene Name: adaptor-related protein complex 4, mu 1 subunit
  Uniprot ID: O00189
  ENST ID: ENST00000421755
  CDS Start-End: 52-1413
gcggggcaggcccgactttcgccgtcttcttgtctactctccagaacggccatgatttcccaattcttcattctgtcctccaagggggacccgctcatctacaaagacttccgcggggacagtggcggccgggatgtggccgagctcttctaccggaagctgacgggactgccaggagacgagtccccggttgtcatgcatcaccatggccgtcatttcattcacatcagacacagcggcctctatttggtggtcacaacttcagaaaacgtttctcccttcagcctcctagaactgctctccaggttggccacccttctgggcgattactgtggctccctgggcgaggggaccatctcccgcaatgtggctctggtatacgaactcctggatgaagtgctggactatggctatgtacagaccacatccacggagatgctgaggaatttcatccagacggaagctgtggtcagcaagcccttcagcctctttgacctcagcagcgttggcttgtttggggctgagacacaacagagcaaagtggcccccagcagtgcagccagccgccccgtcctgtccagtcgctctgaccagagccaaaagaatgaagtttttttggatgtggtcgagagattgtctgtactgatagcatctaatggatccctgctgaaggtggatgtgcagggagagattcggctcaagagcttccttcctagcggctctgagatgcgcattggcttgacggaagagttttgtgtggggaagtcagagctgagaggttatgggccaggaatccgggtcgatgaagtctcgtttcacagctctgtgaatctggacgaatttgagtctcatcgaatcctccgcttgcaaccacctcagggcgagctgactgtgatgcggtaccaactctccgatgacctcccctcaccgctccccttccggctcttcccctctgtgcagtgggaccgaggctcaggccggctccaggtttatctaaagttgcgatgtgacctgctctcaaagagccaagccctcaatgtcaggctgcacctccccctgcctcgaggggtggtcagcctgtctcaggagctgagcagcccagagcagaaggctgagctggcagagggagcccttcgctgggacctgcctcgggtgcaaggaggctctcaactctcaggccttttccagatggacgtcccagggcccccaggacctcccagccatgggctctccacctcggcctctcctctggggctgggccctgccagtctctccttcgagcttccccggcacacgtgctctggcctccaggtccgattcctcaggctggccttcaggccatgcggcaatgccaacccccacaagtgggtgcgacacctaagccacagcgacgcctatgtcattcggatctgaggctccccaaacgaggacacgacggccaagaggcctaacatcgtgtcccagctcagccaagcctgcgatggagccataacgagtcgtccagggcgtcttctcgtccacccagctctgtaaggggaaggaaataaactaagatgaaggggtctgaaagga

SEQ ID NO: 105009 - DNA, 921 bp, Homo sapiens
  Payload ID: 607
  Gene Symbol: AP4M1
  Gene Name: adaptor-related protein complex 4, mu 1 subunit
  ENST ID: ENST00000439416
  CDS Start-End: 125-921
agctggcgcgggcggaggagaatcgctcttaaagggccagcgcacacgcgttcttttgttccggggccgcagggcggggcaggcccgactttcgccgtcttcttgtctactctccagaacggccatgatttcccaattcttcattctgtcctccaagggggacccgctcatctacaaagacttccgcggggacagtggcggccgggatgtggccgagctcttctaccggaagctgacgggactgccaggagacgagtccccggttgtcatgcatcaccatggccgtcatttcattcacatcagacacagcggcctctatttggtggtcacaacttcagaaaacgactatggctatgtacagaccacatccacggagatgctgaggaatttcatccagacggaagctgtggtcagcaagcccttcagcctctttgacctcagcagcgttggcttgtttggggctgagacacaacagagcaaagtggcccccagcagtgcagccagccgccccgtcctgtccagtcgctctgaccagagccaaaagaatgaagtttttttggatgtggtcgagagattgtctgtactgatagcatctaatggatccctgctgaaggtggatgtgcagggagagattcggctcaagagcttccttcctagcggctctgagatgcgcattggcttgacggaagagttttgtgtggggaagtcagagctgagaggttatgggccaggaatccgggtcgatgaagtctcgtttcacagctctgtgaatctggacgaatttgagtctcatcgaatcctccgcttgcaaccacctcagggcgagctgactgtgatgcggtaccaactctccgatgacctcccctcaccgctccccttccggctcttcccctctgtgcagtgggaccgaggctcaggccg

SEQ ID NO: 105010 - DNA, 2256 bp, Homo sapiens
  Payload ID: 608
  Gene Symbol: AP4S1
  Gene Name: adaptor-related protein complex 4, sigma 1 subunit
  Uniprot ID: Q9Y587
  ENST ID: ENST00000216366
  CDS Start-End: 209-688
taaaagccaaaatggctgccccgaggaggcccgcaccgcgtagccagtgaaggttggggagcaagcttatgcgggaaagagggagggggactccaggaaaagccgttgagaggaccatcacaacctgagcagcacaggttccagttacagccatcccttgtcataacttttgaactgtatttggaaaaatactggccaggaaagaaaaatgataaaatttttcctcatggtgaataaacaagggcagactcgactttctaagtactatgaacatgtggatattaataagcgtacacttctggaaacagaagtcataaagagctgtctctctcgatccaatgaacaatgctctttcattgaatataaggattttaagctgatatatcggcagtatgcagctctcttcattgtggttggagttaatgacactgagaacgagatggctatttatgaattcattcataactttgtggaagttttagatgagtatttcagccgagtgagtgaattagatgtatcctttttcaatactgttttccacagtacttggcaaatgcactctggtccttatcaggaaccaattgatgaacttcccaaaatatgctcagccctggagccccagcagacttgcttttctccagacagttcatcattcaaaggagctgcctccaccacccccatctactgaatagccaggggagggcaccaatgaacagcacagtatgggagacacaccaactactcttcaaatcagtgcgtacctgctctacgcgtgaaggtacagaaaacctccacggccttttcagtatttggtgcctttaaagaggcctaaggacttagtttatttgggctagactggaatgcagcagtactgccttcaggcctggacagccaggggctcctcgggccctgtgctctagaaggcccattctatgtctgcttcgccagcaccctttccccatcatggggcagatgcccaccagccctcactatctactgcttgaccatcctctgacttcctgggcccctagaatttataaggtccctagatatcccagaacctgccaccatggcctctgcaagcctctcctccaccttcaccccaagactaggggcaggaatgataagaaggctgggtggtagctgggatgtcccacctacgtgcctggggagagaagcaagagcaggctggagtctctactttgtattcttgtgaggcacaaatataggctagaatccaggccccacaaatataggctagaatccggaatgttttcttgatttaaagacatctttagaccgggcacagtggctcacgccagtaatcccagcactttggagggctgaagcaggaggattgcttgaggccaggagtttgagaccagcctgggcaacatagggagacccagtctctacaaaaaaatttaaaaagccaggcattggtggtgtgtgcctatagtcccaactactagggaggctgaggtgggaggatcacttgagcctgggggactgaggctgcagtgagccatgattgtgctactgcactccaatctggcaacagagcgagaccttgtctttaaaaataaaaataaaaacatctttacaacattcctgtttgtattttataaactcaaaatctcaaagactgagcagttgattctagagccctaaagctctggtgggttgtgtgaaaaaaccctgattcatgtcccttctattgcagttgagggtgggacataggaagggcatcaatgctgtgtgcactctctgtgactccgccagcatctgccatggtgcttcctggagaatgatggtgtgcaggcaacagtgatcagcaccaccatggtttgcagacaggcctcgatcaggcccactgtgggcatctacctctagttccatcagcttcctaaaatctgaaatacttttagagatccggaaaccagaatagggtttctccaagtgggagataatgtcagcctgatttaatgagaaattgcaaaaatacttgttcaaactgaggctataggaataccagccagaagaacaaacaaattcttcagggaagcatccagcactgaagtggcagcttctaaatgaactgaaattttctgcatgttctctcagaaagttacagtgttaattaattaataaaatcattacaaaagaatttcttccgaggtatgatggagcatgtgatgacttcaggaatggcttgatttgtttgtttgtttgtttgtttgttttttgagacagtct

SEQ ID NO: 105011 - DNA, 839 bp, Homo sapiens
  Payload ID: 608
  Gene Symbol: AP4S1
  Gene Name: adaptor-related protein complex 4, sigma 1 subunit
  Uniprot ID: Q9Y587
  ENST ID: ENST00000313566
  CDS Start-End: 390-839
aaggggggtaagatgcctatcctagtccctctcttcgggctcttcatctcaagaggaacaaacaagagcaaactcagtgttgagaggccccaaaccggactctcccacagagaggtgctcggtcccaagccccggaggcccgggaaggccgcctccggaggagcccccgcagacgccatactaaaagccaaaatggctgccccgaggaggcccgcaccgcgtagccagtgaaggttggggagcaagcttatgcgggaaagagggagggggactccaggaaaagccgttgagaggaccatcacaacctgagcagcacaggttccagttacagccatcccttgtcataacttttgaactgtatttggaaaaatactggccaggaaagaaaaatgataaaatttttcctcatggtgaataaacaagggcagactcgactttctaagtactatgaacatgtggatattaataagcgtacacttctggaaacagaagtcataaagagctgtctctctcgatccaatgaacaatgctctttcattgaatataaggattttaagctgatatatcggcagtatgcagctctcttcattgtggttggagttaatgacactgagaacgagatggctatttatgaattcattcataactttgtggaagttttagatgagtatttcagccgagtgagtgaattagatgtatcctttttcaatactgttttccacagtacttggcaaatgcactctggtccttatcagacaaggtcttgctctgtcacccaggctggagtgcagaggtgcgatcatggctcactacaccctggatctcctgggctcaagtga

SEQ ID NO: 105012 - DNA, 1122 bp, Homo sapiens
  Payload ID: 608
  Gene Symbol: AP4S1
  Gene Name: adaptor-related protein complex 4, sigma 1 subunit
  Uniprot ID: Q9Y587
  ENST ID: ENST00000334725
  CDS Start-End: 192-641
gccccgaggaggcccgcaccgcgtagccagtgaaggttggggagcaagcttatgcgggaaagagggagggggactccaggaaaagccgttgagaggaccatcacaacctgagcagcacaggttccagttacagccatcccttgtcataacttttgaactgtatttggaaaaatactggccaggaaagaaaaatgataaaatttttcctcatggtgaataaacaagggcagactcgactttctaagtactatgaacatgtggatattaataagcgtacacttctggaaacagaagtcataaagagctgtctctctcgatccaatgaacaatgctctttcattgaatataaggattttaagctgatatatcggcagtatgcagctctcttcattgtggttggagttaatgacactgagaacgagatggctatttatgaattcattcataactttgtggaagttttagatgagtatttcagccgagtgagtgaattagatgtatcctttttcaatactgttttccacagtacttggcaaatgcactctggtccttatcagacaaggtcttgctctgtcacccaggctggagtgcagaggtgcgatcatggctcactacaccctggatctcctgggctcaagtgatcctcctacctcagcctcccaagtagctgggactacaggaaccaattgatgaacttcccaaaatatgctcagccctggagccccagcagacttgcttttctccagacagttcatcattcaaaggagctgcctccaccacccccatctactgaatagccaggggagggcaccaatgaacagcacagtatgggagacacaccaactactcttcaaatcagtgcgtacctgctctacgcgtgaaggtacagaaaacctccacggccttttcagtatttggtgcctttaaagaggcctaaggacttagtttatttgggctagactggaatgcagcagtactgccttcaggcctggacagccaggggctcctcgggccctgtgctctagaaggcccattctatgtctgcttcgccagcaccctttccccatcatggggcagatgcccaccagccctcactatctactgcttgaccatcctctgact

SEQ ID NO: 105013 - DNA, 4243 bp, Homo sapiens
  Payload ID: 608
  Gene Symbol: AP4S1
  Gene Name: adaptor-related protein complex 4, sigma 1 subunit
  Uniprot ID: Q9Y587
  ENST ID: ENST00000542754
  CDS Start-End: 394-828
ggaaaaggggggtaagatgcctatcctagtccctctcttcgggctcttcatctcaagaggaacaaacaagagcaaactcagtgttgagaggccccaaaccggactctcccacagagaggtgctcggtcccaagccccggaggcccgggaaggccgcctccggaggagcccccgcagacgccatactaaaagccaaaatggctgccccgaggaggcccgcaccgcgtagccagtgaaggttggggagcaagcttatgcgggaaagagggagggggactccaggaaaagccgttgagaggaccatcacaacctgagcagcacaggttccagttacagccatcccttgtcataacttttgaactgtatttggaaaaatactggccaggaaagaaaaatgataaaatttttcctcatggtgaataaacaagggcagactcgactttctaagtactatgaacatgtggatattaataagcgtacacttctggaaacagaagtcataaagagctgtctctctcgatccaatgaacaatgctctttcattgaatataaggattttaagctgatatatcggcagtatgcagctctcttcattgtggttggagttaatgacactgagaacgagatggctatttatgaattcattcataactttgtggaagttttagatgagtatttcagccgagtgagtgaattagatataatgtttaatttggataaagtacacatcattttggatgagatggtgttaaatggctgcattgtggaaactaacagggcaagaattcttgcccctctactaattcttgataagatgtcagaaagctgaaaggaagtctcttcgagacaatatggatttatcagaaatgcgagtaccgtggaatacatctcaacatgttaacccagaagaatctggaagaccacaattacaaaatggggtatccttccaaagacattataaataggcattttccacagttcctaaaaagaaaacacaactgtactttaaaatatgtacaaagaaaaaaatttctttaaactgagagagaagttttattttctaattgtaaacatatctgtcgcactttaaattctgttgagcacctaaggaacccttcttggtctatgcttcttttgcaaattgaattcaggaatagcaggatggtagtgggaagaaagtatggcagttttccgtcagccaataaagttttaaaatttaaacacaaggcattttgagtaacgctgttttctgaaagctatttttttttttttgagacggagtctagtctagctgtgtcacctggcacattctcggctcactgcaacctccacttccggggttcaagcgattctcctgcctcagcctccgagctgggactacaggcatgcaccaccacacctggctaatttttgtatttttagtagagacagggtttcaccatgttggccaggctgtctcaaactcctgacctcaggtgatctgcctgcctcagcctcccagaacgctgggattacagatgagccacagtgcctgacttctgaaggctgtcttattcctttaaaaggcttagtaaaattaactttttaagaggtgtttttttgtttgtttttttgttttgttttttaagacggagtcttgctctgtcacccaagctggagtgcagtggtgtgatctcagctcactgcaacctccacctctgggtttaagcaattctcctgcctcagcctcctgagtagctgcgactacaggcatgtagtccccaggagactgagctgtgattacagatgtgagccaccatgccctgcccggttttatgtaaagcccagctaatttttgtatttttagtagagatagggtttcaccatgttggccaggctgttcttgaactcctgacctcaagtgatccacctgcttcagcctcccaaagtgctgggattacaagcatgagccaccatgcccagccaagaggtgttttttgtttgtttgtttttaagagaagcaggtcttgctgtgttgtccaggctggactgcagtggcttttcacaagcatgatcatgttgtactacaaccttgaaccttcctggcctggctctaaaagctttgtaatgtggggctggtgcagtgcctcacacctgtaacccctgcactttgggaggctgaggaaggaggatcgcttgaggccagaaattcaagaccagcctgggcaacatagacctcatctctacaaaaaatgcaaaaatcagccgggtgtggtggcacatacctgtagtctcaactactcgggagtctgaggcagaagatttcttgagcccaggagttcgagtctgcagtgagctatgatcgtgtcactgcactccagcctgggtgacagagtgaaaccctgtctcaaaaataaaaaagtccgagtgcggtggctcaggcctgtaatcccaacattttggggggccaagccaggaggattggttgagcccattagttcaagaccagcctgggcaacacagcaagaccatatctctacaaaaaataaataggtgtgatggctcatgcctgtaatcctagtactttgggaggccgaggcaggcagatcacttgaggtcaggagtttgaaaccagcctggccaacatggcaaaaccttgtctctactaaaaatacaaaaagttagccaggcatggtggcaagcacctctaatctcagctactcaggaggctgaggcagtagaattgcttgaacccgggaggcagaggttgcagtgagccgagatcatgccactgcactccagcctgggcgacagagtgagaccctgtctctaaaaataagtaaataactaattaaaaagttagccagctgtggtggtgagcacctgtactcctaactactcaagaggctgagatgggagaattgatcaagcctaggagtttgaggctgcagtgaactatgatcacaacactgtactccaacctgggtaatggagtgaggccctgcctcaaaaacacaaaaacaaaacaaaaaaacttttataacatgtacctaacaaagatgcagagttaaattttatttgccagtttgtaaaagcctttgatactcattttaagggcacttagtaattacaatgccattatgtaattaactctatagagaacattactttcaaataatggatggtcagacattaagacagccccagagagcccctacagctatcctttatcccgttttttgtttgttttttggagacagcatctccgtctcctaggctggagtgcagtggtgtgatcatgcctcactacagcctgtacctcctgggctcaggtgctcctcccacctcagcctcctgagtaactgggaccacaggtgcgcaccccctccacccagctaatttttgtattttgttgtagagatagggtttcactatgttgcccagactggtctcgaattcctgcagtcacatgatccatctgccttcgccttccaaagtgttgggattacaggcctgagccactgtgcccagtctttttatgccacattttaaaaggtttgcttattaataagcttactgttaatgaaatttagttcaaagtttaaaagtagaatgcagccaggcatggtggcttacgcctataatcccagcactttgggacgccaaggtgggtagatcatttgaggtcaggagttcaagaccagcttggccaacatggtgagaccctgtctctactaaaactacgaaaaattagccgggcatggtggcacgcgcctataatcccaactacttgggaggctgtggtaggaggatcacttgaacccaggagacagaggttgcagtgagttgagatcgagattgtgccactgcactccagcctgggcacagagtgagattccgtctcaaaaaaaaaaaaaaaaaaaaaagtagaaagcaagaaagtgtctctgtacaggtaggcatgaaatgaatccttctcttcctcccctttactcctttaaccccttctcctgcaatgtcttgaagtaaattactgtcattacagaagagcaatgcactgcatccccccaaaacctttctatatgcttttgctaccccgttaacagaagaatatacagaactgtcttaggcgaaagtatgtacagtagtccctctcttatccactgtttcgcattctgtggtttgtgttactcatggtcaactgaggtcccaaaatattaaacagaaaattccagaaataaacaatgtataagttttaaactgca

SEQ ID NO: 105014 - DNA, 1491 bp, Homo sapiens
  Payload ID: 608
  Gene Symbol: AP4S1
  Gene Name: adaptor-related protein complex 4, sigma 1 subunit
  Uniprot ID: Q9Y587
  ENST ID: ENST00000554345
  CDS Start-End: 177-584
gcaccgcgtagccagtgaaggttggggagcaagcttatgcgggaaagagggagggggactccaggaaaagccgttgagaggaccatcacaacctgagcagcacaggttccagttacagccatcccttgtcataacttttgaactgtatttggaaaaatactggccaggaaagaaaaatgataaaatttttcctcatggtgaataaacaagggcagactcgactttctaagtactatgaacatgtggatattaataagcgtacacttctggaaacagaagtcataaagagctgtctctctcgatccaatgaacaatgctctttcattgaatataaggattttaagctgatatatcggcagtatgcagctctcttcattgtggttggagttaatgacactgagaacgagatggctatttatgaattcattcataactttgtggaagttttagatgagtatttcagccgagtggaaccaattgatgaacttcccaaaatatgctcagccctggagccccagcagacttgcttttctccagacagttcatcattcaaaggagctgcctccaccacccccatctactgaatagccaggggagggcaccaatgaacagcacagtatgggagacacaccaactactcttcaaatcagtgcgtacctgctctacgcgtgaaggtacagaaaacctccacggccttttcagtatttggtgcctttaaagaggcctaaggacttagtttatttgggctagactggaatgcagcagtactgccttcaggcctggacagccaggggctcctcgggccctgtgctctagaaggcccattctatgtctgcttcgccagcaccctttccccatcatggggcagatgcccaccagccctcactatctactgcttgaccatcctctgacttcctgggcccctagaatttataaggtccctagatatcccagaacctgccaccatggcctctgcaagcctctcctccaccttcaccccaagactaggggcaggaatgataagaaggctgggtggtagctgggatgtcccacctacgtgcctggggagagaagcaagagcaggctggagtctctactttgtattcttgtgaggcacaaatataggctagaatccaggccccacaaatataggctagaatccggaatgttttcttgatttaaagacatctttagaccgggcacagtggctcacgccagtaatcccagcactttggagggctgaagcaggaggattgcttgaggccaggagtttgagaccagcctgggcaacatagggagacccagtctctacaaaaaaatttaaaaagccaggcattggtggtgtgtgcctatagtcccaactactagggaggctgaggtgggaggatcacttgagcctgggggactgaggctgcagtgagccatgattgtgctactgcactccaatctggcaacagagcgagaccttgtctttaaaaataaaaataaaaa

SEQ ID NO: 105015 - DNA, 663 bp, Homo sapiens
  Payload ID: 608
  Gene Symbol: AP4S1
  Gene Name: adaptor-related protein complex 4, sigma 1 subunit
  ENST ID: ENST00000557346
  CDS Start-End: 265-663
aaatctcttcagtcgtttcataaatacagcatcgatcgtctggtttggtttttttatagataaagaaacggatgggggaaaggagatctagtggagagtactgtaaaaagaaaaattcagtgctgaaagcgttgatgagtcactaagtaaggaataactacagagaatccaagtgagtaaggcagcatctcaggttccagttacagccatcccttgtcataacttttgaactgtatttggaaaaatactggccaggaaagaaaaatgataaaatttttcctcatggtgaataaacaagggcagactcgactttctaagtactatgaacatgtggatattaataagcgtacacttctggaaacagaagtcataaagagctgtctctctcgatccaatgaacaatgctctttcattgaatataaggattttaagctgatatatcggcagtatgcagctctcttcattgtggttggagttaatgacactgagaacgagatggctatttatgaattcattcataactttgtggaagttttagatgagtatttcagccgagtgagtgaattagatataatgtttaatttggataaagtacacatcattttggatgagatggtgttaaatggctgcattgtggaaactaacagggcaagaattcttgcc

SEQ ID NO: 105016 - DNA, 769 bp, Homo sapiens
  Payload ID: 608
  Gene Symbol: AP4S1
  Gene Name: adaptor-related protein complex 4, sigma 1 subunit
  ENST ID: ENST00000555417
  CDS Start-End: 747-769
gccgcagctaccggacacctgggctccgactctgacttttggaagcgaggcggccttaggcttcctggttatcagtttccttttagcaggccgtccccgggcgctgtttccttcccaggggtctctcacccgtgtcccggctttctgagctggttgttaacctggctggtcgctctggccgaccgcatcccgtctcggattcctgacgtttctttttcattctttgagtgtttcaggcagtcccaagggtgggccctctttcccttcctgtcactcgctctgcctctggtttcttagaaccagtcagttctctgctggcaaatagccaagatcctccggctgtggttactgattcctcgtctctgtcttgagcctgggctttggtcccatttctatgcgctcggtcgcccgtcgtaacttattccactttgcgtcccctcttctttccttttctggaatgggttgtgggggggttgggagagggggaggagcgattttttttttcttgggagaagaagaggtagtgaattcctttagatcttgacgatgatgggtagagggagagaagtttgaaggagactggctagactaacaatttgatacggtagaaatgaatgggctcacaaatattgtcatcaatagactattttgatcgaaacagaaaataaaagcactgttccagttacagccatcccttgtcataacttttgaactgtatttggaaaaatactggccaggaaagaaaaatgataaaatttttcctcatggt

SEQ ID NO: 105017 - DNA, 407 bp, Homo sapiens
  Payload ID: 608
  Gene Symbol: AP4S1
  Gene Name: adaptor-related protein complex 4, sigma 1 subunit
  ENST ID: ENST00000556480
  CDS Start-End: 1-252
gaagtcataaagagctgtctctctcgatccaatgaacaatgctctttcattgaatataaggattttaagctgatatatcggcagtatgcagctctcttcattgtggttggagttaatgacactgagaacgagatggctatttatgaattcattcataactttgtggaagttttagatgagtatttcagccgagtggtaagtctaatggctaaaaaatggtttacttcctcaacccagtttcccagaaattgagtctctttggatctatatcaagaacatgtgttaatacagagttttaataagtaaaagttaaaacttaagtgatgccaaattttctttatctttccttctggtttatccaaagtgttacaagcctatacatgcctgagatctttataaagaactgg

SEQ ID NO: 105018 - DNA, 542 bp, Homo sapiens
  Payload ID: 608
  Gene Symbol: AP4S1
  Gene Name: adaptor-related protein complex 4, sigma 1 subunit
  ENST ID: ENST00000556232
  CDS Start-End: 249-542
atactaaaagccaaaatggctgccccgaggaggcccgcaccgcgtagccagtgaaggttggggagcaagcttatgcgggaaagagggagggggactccaggaaaagccgttgagaggaccatcacaacctgagcagcacagtgaagaaagaaagctgaagagctcttggtcacttcagttccagttacagccatcccttgtcataacttttgaactgtatttggaaaaatactggccaggaaagaaaaatgataaaatttttcctcatggtgaataaacaagggcagactcgactttctaagtactatgaacatgtggatattaataagcgtacacttctggaaacagaagtcataaagagctgtctctctcgatccaatgaacaatgctctttcattgaatataaggattttaagctgatatatcggcagtatgcagctctcttcattgtggttggagttaatgacactgagaacgagatggctatttatgaattcattcataactttgtggaagttttagatgagtatttcagccgagtg

SEQ ID NO: 105019 - DNA, 1012 bp, Homo sapiens
  Payload ID: 608
  Gene Symbol: AP4S1
  Gene Name: adaptor-related protein complex 4, sigma 1 subunit
  ENST ID: ENST00000554609
  CDS Start-End: 189-497
ccgaggaggcccgcaccgcgtagccagtgaaggttggggagcaagcttatgcgggaaagagggagggggactccaggaaaagccgttgagaggaccatcacaacctgagcagcacaggttccagttacagccatcccttgtcataacttttgaactgtatttggaaaaatactggccaggaaagaaaaatgataaaatttttcctcatggtgaataaacaagggcagactcgactttctaagtactatgaacatgtggatattaataagcgtacacttctggaaacagaagtcataaagagctgtctctctcgatccaatgaacaatgctctttcattgaatataaggattttaagctgatatatcggcagtatgcagctctcttcattgtggttggagttaatgacactgagaacgagatggctatttatgaattcattcataactttgtggaagttttagatgagtatttcagccgagtggtaaataatgtttaatttggataaagtacacatcattttggatgagatggtgttaaatggctgcattgtggaaactaacagggcaagaattcttgcccctctactaattcttgataagatgtcagaaagctgaaaggaagtctcttcgagacaatatggatttatcagaaatgcgagtaccgtggaatacatctcaacatgttaacccagaagaatctggaagaccacaattacaaaatggggtatccttccaaagacattataaataggcattttccacagttcctaaaaagaaaacacaactgtactttaaaatatgtacaaagaaaaaaatttctttaaactgagagagaagttttattttctaattgtaaacatatctgtcgcactttaaattctgttgagcacctaaggaacccttcttggtctatgcttcttttgcaaattgaattcaggaatagcaggatggtagtgggaagaaagtatggcagttttccgtcagccaataaagttttaaaatttaaacacaa

SEQ ID NO: 105020 - DNA, 4595 bp, Homo sapiens
  Payload ID: 608
  Gene Symbol: AP4S1
  Gene Name: adaptor-related protein complex 4, sigma 1 subunit
  Uniprot ID: Q9Y587
  ENST ID: ENST00000616371
  CDS Start-End: 747-1181
gccgcagctaccggacacctgggctccgactctgacttttggaagcgaggcggccttaggcttcctggttatcagtttccttttagcaggccgtccccgggcgctgtttccttcccaggggtctctcacccgtgtcccggctttctgagctggttgttaacctggctggtcgctctggccgaccgcatcccgtctcggattcctgacgtttctttttcattctttgagtgtttcaggcagtcccaagggtgggccctctttcccttcctgtcactcgctctgcctctggtttcttagaaccagtcagttctctgctggcaaatagccaagatcctccggctgtggttactgattcctcgtctctgtcttgagcctgggctttggtcccatttctatgcgctcggtcgcccgtcgtaacttattccactttgcgtcccctcttctttccttttctggaatgggttgtgggggggttgggagagggggaggagcgattttttttttcttgggagaagaagaggtagtgaattcctttagatcttgacgatgatgggtagagggagagaagtttgaaggagactggctagactaacaatttgatacggtagaaatgaatgggctcacaaatattgtcatcaatagactattttgatcgaaacagaaaataaaagcactgttccagttacagccatcccttgtcataacttttgaactgtatttggaaaaatactggccaggaaagaaaaatgataaaatttttcctcatggtgaataaacaagggcagactcgactttctaagtactatgaacatgtggatattaataagcgtacacttctggaaacagaagtcataaagagctgtctctctcgatccaatgaacaatgctctttcattgaatataaggattttaagctgatatatcggcagtatgcagctctcttcattgtggttggagttaatgacactgagaacgagatggctatttatgaattcattcataactttgtggaagttttagatgagtatttcagccgagtgagtgaattagatataatgtttaatttggataaagtacacatcattttggatgagatggtgttaaatggctgcattgtggaaactaacagggcaagaattcttgcccctctactaattcttgataagatgtcagaaagctgaaaggaagtctcttcgagacaatatggatttatcagaaatgcgagtaccgtggaatacatctcaacatgttaacccagaagaatctggaagaccacaattacaaaatggggtatccttccaaagacattataaataggcattttccacagttcctaaaaagaaaacacaactgtactttaaaatatgtacaaagaaaaaaatttctttaaactgagagagaagttttattttctaattgtaaacatatctgtcgcactttaaattctgttgagcacctaaggaacccttcttggtctatgcttcttttgcaaattgaattcaggaatagcaggatggtagtgggaagaaagtatggcagttttccgtcagccaataaagttttaaaatttaaacacaaggcattttgagtaacgctgttttctgaaagctatttttttttttttgagacggagtctagtctagctgtgtcacctggcacattctcggctcactgcaacctccacttccggggttcaagcgattctcctgcctcagcctccgagctgggactacaggcatgcaccaccacacctggctaatttttgtatttttagtagagacagggtttcaccatgttggccaggctgtctcaaactcctgacctcaggtgatctgcctgcctcagcctcccagaacgctgggattacagatgagccacagtgcctgacttctgaaggctgtcttattcctttaaaaggcttagtaaaattaactttttaagaggtgtttttttgtttgtttttttgttttgttttttaagacggagtcttgctctgtcacccaagctggagtgcagtggtgtgatctcagctcactgcaacctccacctctgggtttaagcaattctcctgcctcagcctcctgagtagctgcgactacaggcatgtagtccccaggagactgagctgtgattacagatgtgagccaccatgccctgcccggttttatgtaaagcccagctaatttttgtatttttagtagagatagggtttcaccatgttggccaggctgttcttgaactcctgacctcaagtgatccacctgcttcagcctcccaaagtgctgggattacaagcatgagccaccatgcccagccaagaggtgttttttgtttgtttgtttttaagagaagcaggtcttgctgtgttgtccaggctggactgcagtggcttttcacaagcatgatcatgttgtactacaaccttgaaccttcctggcctggctctaaaagctttgtaatgtggggctggtgcagtgcctcacacctgtaacccctgcactttgggaggctgaggaaggaggatcgcttgaggccagaaattcaagaccagcctgggcaacatagacctcatctctacaaaaaatgcaaaaatcagccgggtgtggtggcacatacctgtagtctcaactactcgggagtctgaggcagaagatttcttgagcccaggagttcgagtctgcagtgagctatgatcgtgtcactgcactccagcctgggtgacagagtgaaaccctgtctcaaaaataaaaaagtccgagtgcggtggctcaggcctgtaatcccaacattttggggggccaagccaggaggattggttgagcccattagttcaagaccagcctgggcaacacagcaagaccatatctctacaaaaaataaataggtgtgatggctcatgcctgtaatcctagtactttgggaggccgaggcaggcagatcacttgaggtcaggagtttgaaaccagcctggccaacatggcaaaaccttgtctctactaaaaatacaaaaagttagccaggcatggtggcaagcacctctaatctcagctactcaggaggctgaggcagtagaattgcttgaacccgggaggcagaggttgcagtgagccgagatcatgccactgcactccagcctgggcgacagagtgagaccctgtctctaaaaataagtaaataactaattaaaaagttagccagctgtggtggtgagcacctgtactcctaactactcaagaggctgagatgggagaattgatcaagcctaggagtttgaggctgcagtgaactatgatcacaacactgtactccaacctgggtaatggagtgaggccctgcctcaaaaacacaaaaacaaaacaaaaaaacttttataacatgtacctaacaaagatgcagagttaaattttatttgccagtttgtaaaagcctttgatactcattttaagggcacttagtaattacaatgccattatgtaattaactctatagagaacattactttcaaataatggatggtcagacattaagacagccccagagagcccctacagctatcctttatcccgttttttgtttgttttttggagacagcatctccgtctcctaggctggagtgcagtggtgtgatcatgcctcactacagcctgtacctcctgggctcaggtgctcctcccacctcagcctcctgagtaactgggaccacaggtgcgcaccccctccacccagctaatttttgtattttgttgtagagatagggtttcactatgttgcccagactggtctcgaattcctgcagtcacatgatccatctgccttcgccttccaaagtgttgggattacaggcctgagccactgtgcccagtctttttatgccacattttaaaaggtttgcttattaataagcttactgttaatgaaatttagttcaaagtttaaaagtagaatgcagccaggcatggtggcttacgcctataatcccagcactttgggacgccaaggtgggtagatcatttgaggtcaggagttcaagaccagcttggccaacatggtgagaccctgtctctactaaaactacgaaaaattagccgggcatggtggcacgcgcctataatcccaactacttgggaggctgtggtaggaggatcacttgaacccaggagacagaggttgcagtgagttgagatcgagattgtgccactgcactccagcctgggcacagagtgagattccgtctcaaaaaaaaaaaaaaaaaaaaaagtagaaagcaagaaagtgtctctgtacaggtaggcatgaaatgaatccttctcttcctcccctttactcctttaaccccttctcctgcaatgtcttgaagtaaattactgtcattacagaagagcaatgcactgcatccccccaaaacctttctatatgcttttgctaccccgttaacagaagaatatacagaactgtcttaggcgaaagtatgtacagtagtccctctcttatccactgtttcgcattctgtggtttgtgttactcatggtcaactgaggtcccaaaatattaaacagaaaattccagaaataaacaatgtataagttttaaactgc

SEQ ID NO: 105021 - DNA, 4113 bp, Homo sapiens
  Payload ID: 608
  Gene Symbol: AP4S1
  Gene Name: adaptor-related protein complex 4, sigma 1 subunit
  Uniprot ID: Q9Y587
  ENST ID: ENST00000622409
  CDS Start-End: 265-699
aaatctcttcagtcgtttcataaatacagcatcgatcgtctggtttggtttttttatagataaagaaacggatgggggaaaggagatctagtggagagtactgtaaaaagaaaaattcagtgctgaaagcgttgatgagtcactaagtaaggaataactacagagaatccaagtgagtaaggcagcatctcaggttccagttacagccatcccttgtcataacttttgaactgtatttggaaaaatactggccaggaaagaaaaatgataaaatttttcctcatggtgaataaacaagggcagactcgactttctaagtactatgaacatgtggatattaataagcgtacacttctggaaacagaagtcataaagagctgtctctctcgatccaatgaacaatgctctttcattgaatataaggattttaagctgatatatcggcagtatgcagctctcttcattgtggttggagttaatgacactgagaacgagatggctatttatgaattcattcataactttgtggaagttttagatgagtatttcagccgagtgagtgaattagatataatgtttaatttggataaagtacacatcattttggatgagatggtgttaaatggctgcattgtggaaactaacagggcaagaattcttgcccctctactaattcttgataagatgtcagaaagctgaaaggaagtctcttcgagacaatatggatttatcagaaatgcgagtaccgtggaatacatctcaacatgttaacccagaagaatctggaagaccacaattacaaaatggggtatccttccaaagacattataaataggcattttccacagttcctaaaaagaaaacacaactgtactttaaaatatgtacaaagaaaaaaatttctttaaactgagagagaagttttattttctaattgtaaacatatctgtcgcactttaaattctgttgagcacctaaggaacccttcttggtctatgcttcttttgcaaattgaattcaggaatagcaggatggtagtgggaagaaagtatggcagttttccgtcagccaataaagttttaaaatttaaacacaaggcattttgagtaacgctgttttctgaaagctatttttttttttttgagacggagtctagtctagctgtgtcacctggcacattctcggctcactgcaacctccacttccggggttcaagcgattctcctgcctcagcctccgagctgggactacaggcatgcaccaccacacctggctaatttttgtatttttagtagagacagggtttcaccatgttggccaggctgtctcaaactcctgacctcaggtgatctgcctgcctcagcctcccagaacgctgggattacagatgagccacagtgcctgacttctgaaggctgtcttattcctttaaaaggcttagtaaaattaactttttaagaggtgtttttttgtttgtttttttgttttgttttttaagacggagtcttgctctgtcacccaagctggagtgcagtggtgtgatctcagctcactgcaacctccacctctgggtttaagcaattctcctgcctcagcctcctgagtagctgcgactacaggcatgtagtccccaggagactgagctgtgattacagatgtgagccaccatgccctgcccggttttatgtaaagcccagctaatttttgtatttttagtagagatagggtttcaccatgttggccaggctgttcttgaactcctgacctcaagtgatccacctgcttcagcctcccaaagtgctgggattacaagcatgagccaccatgcccagccaagaggtgttttttgtttgtttgtttttaagagaagcaggtcttgctgtgttgtccaggctggactgcagtggcttttcacaagcatgatcatgttgtactacaaccttgaaccttcctggcctggctctaaaagctttgtaatgtggggctggtgcagtgcctcacacctgtaacccctgcactttgggaggctgaggaaggaggatcgcttgaggccagaaattcaagaccagcctgggcaacatagacctcatctctacaaaaaatgcaaaaatcagccgggtgtggtggcacatacctgtagtctcaactactcgggagtctgaggcagaagatttcttgagcccaggagttcgagtctgcagtgagctatgatcgtgtcactgcactccagcctgggtgacagagtgaaaccctgtctcaaaaataaaaaagtccgagtgcggtggctcaggcctgtaatcccaacattttggggggccaagccaggaggattggttgagcccattagttcaagaccagcctgggcaacacagcaagaccatatctctacaaaaaataaataggtgtgatggctcatgcctgtaatcctagtactttgggaggccgaggcaggcagatcacttgaggtcaggagtttgaaaccagcctggccaacatggcaaaaccttgtctctactaaaaatacaaaaagttagccaggcatggtggcaagcacctctaatctcagctactcaggaggctgaggcagtagaattgcttgaacccgggaggcagaggttgcagtgagccgagatcatgccactgcactccagcctgggcgacagagtgagaccctgtctctaaaaataagtaaataactaattaaaaagttagccagctgtggtggtgagcacctgtactcctaactactcaagaggctgagatgggagaattgatcaagcctaggagtttgaggctgcagtgaactatgatcacaacactgtactccaacctgggtaatggagtgaggccctgcctcaaaaacacaaaaacaaaacaaaaaaacttttataacatgtacctaacaaagatgcagagttaaattttatttgccagtttgtaaaagcctttgatactcattttaagggcacttagtaattacaatgccattatgtaattaactctatagagaacattactttcaaataatggatggtcagacattaagacagccccagagagcccctacagctatcctttatcccgttttttgtttgttttttggagacagcatctccgtctcctaggctggagtgcagtggtgtgatcatgcctcactacagcctgtacctcctgggctcaggtgctcctcccacctcagcctcctgagtaactgggaccacaggtgcgcaccccctccacccagctaatttttgtattttgttgtagagatagggtttcactatgttgcccagactggtctcgaattcctgcagtcacatgatccatctgccttcgccttccaaagtgttgggattacaggcctgagccactgtgcccagtctttttatgccacattttaaaaggtttgcttattaataagcttactgttaatgaaatttagttcaaagtttaaaagtagaatgcagccaggcatggtggcttacgcctataatcccagcactttgggacgccaaggtgggtagatcatttgaggtcaggagttcaagaccagcttggccaacatggtgagaccctgtctctactaaaactacgaaaaattagccgggcatggtggcacgcgcctataatcccaactacttgggaggctgtggtaggaggatcacttgaacccaggagacagaggttgcagtgagttgagatcgagattgtgccactgcactccagcctgggcacagagtgagattccgtctcaaaaaaaaaaaaaaaaaaaaaagtagaaagcaagaaagtgtctctgtacaggtaggcatgaaatgaatccttctcttcctcccctttactcctttaaccccttctcctgcaatgtcttgaagtaaattactgtcattacagaagagcaatgcactgcatccccccaaaacctttctatatgcttttgctaccccgttaacagaagaatatacagaactgtcttaggcgaaagtatgtacagtagtccctctcttatccactgtttcgcattctgtggtttgtgttactcatggtcaactgaggtcccaaaatattaaacagaaaattccagaaataaacaatgtataagttttaaactgc

SEQ ID NO: 105022 - DNA, 4811 bp, Homo sapiens
  Payload ID: 609
  Gene Symbol: AP5B1
  Gene Name: adaptor-related protein complex 5, beta 1 subunit
  Uniprot ID: Q2VPB7
  ENST ID: ENST00000532090
  CDS Start-End: 212-2848
ctgtcctgtcccgcgagggccccggcgcccagctctggcgtcggccccgagagccctggtctcaccgtgggagccgggcgcgggtcccgccggcatctgcgcggcgtctgggggtgaccgcagcccctcggggtcggcagcgggccccgcgctcccggtggctgcggcctgagggtccctcttccctgcgcaggggcccgcgcgcctcaccatggggcccctgagccgggacgcctgggcccagcgcttgggggccttccgggccagcccgtctgccttcatggcaggtcccgagggggaggatttgggtcgcgacctgctgagcgacctgagaagtgagaagctgagcgaacagaccaaggtttccctgctggccctgagcatggagtaccctgcgcagctgtggcccgacgcctctgcggccgaagtggccgccacctccctgttggacaccttggtcctcctacccccgcggccctcagctctccgtcggccactgctgctggcggccaccactgccctggcggcgggcggcgcgctgggccccacctcgggcgcctcctgccggctcctgcccctactgctcggcctggccgcgggtagcgatctggggcgaggctttgtccccgcctcggaacagcgccccttgcaggccacggcctgcgagtgcctgcgagagctagagagctgcaagcccgggctgctggggggctccctggggttgctgcggggcctgctggggcaggaaggccctgtccagccactcagcctgttgctggccctcgctttgcgcaacaccttggtgctccagtcccgggttggggctggcctggggggactgctcacggataaggtctccccaactgggggtggtccctgggattggacactagtggaggagggcgatggacgccttcagccccaggcacccagctggccggcagctgaggagggagagggggagcgtagccttacagcacgagagcacagccctgaggaggcgcgggagctgcgggctgcggtgatccagcttctggacacctcctatctgctcactcctgtggcccaggcccagctcctgtggctgctgggctgggccctgcggggtctgcagggacagccaccggcactcttcaagccgcagctggtacggctgctaggcacagcacagctgacactgttgcacgccatgcttgcgctcaaggcggcctttggtgaggccttgttcacagcccaggatgaagcgttgctgctccgccggctcaccttggctgcccagcaccctgctctgcctccgcccacccatctcttttaccttcactgcgtcctgagcttccctgagaactggccgctgggccctgaaggtgaggaggctgccccactgctgctagggccccagctatgccgtggtctcctgcccagtctcctgcatgacccaatggccctcctggcccgcctgcatttactgtgcctgctctgtgccgaggaggaagaagaggagaaaggccagcttccaagcccacggcactacctggaagagctgctggctggcttgcggcagcgggcagccctggatgggggcccccgggccttggccactctctgcttccaggcctcgtatctggtggcctgctgcctggctgggcaacctacggtgctgacccccttgatccacggactggcccagctgtaccaagcccggcccatgctggctccccactttgtggacctcttggatcaggtggactctgagctgagggagcccctgaaggtggtgttgcggcaggtggtggtgtccaggccgggcagggatgaagctctttgctggcacctgcaaatgctggcaaaggtggcagatggagatgcccagagtgctaccctcaactttctacaggccgcggctgcccactgcacgaactgggacctacagcagggcctgctgcgggtctgccgggcgctgctgcgggcaggggtgaggggcggcctggtcgacttgctgcaggtgctggccaggcagctggaggaccctgatgggcgtgaccacgcccgcctctactacatcctgctggcacacctggcagcacccaagttgggggtggccctgggcccctcgcttgccgcacctgcactggcctcttcactggtggccgagaaccagggctttgtggcagcactgatggtgcaggaggcaccggccctggtacggctgagcctggggtcccatcgggtcaagggcccactcccagtgttgaagctccagccggaggcgctggagcccatctactctctggagctgcgcttccgtgtggaaggacagctgtatgcacccctggaggctgtccatgtgccctgcctgtgtcctggccgccctgcccgccctctgctcctgcctctgcagccccgatgcccggcccccgcacggctggatgtccatgccctttacaccacatccactggtctcacgtgccatgcccacttgccacccctgttcgtgaactttgccgacctctttctgcctttcccgcagcctccagagggggccgggctgggcttctttgaggagctctgggattcctgcctgccagagggtgctgagagtcgtgtgtggtgtccacttgggccacagggcctggagggcttggtgtcccgccacctggagccttttgtggtggtggcccagcctcctaccagctactgtgtagcaatccacctgcccccggactcaaagctgctgctgcggctggaggcggccctggcagatggagtgcctgtggccctgcggaccgatgactgggccgtgctgcccctggcgggggactacctccgtgggctggcggctgctgtctgagccccgggagaccaggtgggggcaggactgtggcccttgtgggggccaaggcacactcctgtagctctgtcgccaaaaccctgcattccgcagtgccctcgctggcttgttttcttttgggccccggttgggagcaggctcctgggggtgagggtctgtctgagtctgtttttgctgctctagcaagatccctgagacggggtaagttataataaacagaaatgtattggctcagagctctggaggctgggaagtccatagtggagggcccagagcccagtgaggacccttctgcatcttcccatgacagaggacagagtgacaggagtgaggggagagagcgaacccactcccaagataacggcctgagtccacgcaggagggcagagccctcgtggcctgaccacctcttagggtctaatcttatactgttacagtggcaatcgcatttcaacgtgagcgtgggaggggacaaacattcaaaccatagcagggtcataggccccaagaaggcttccagacagaacccggcactgtagagctacagagttccttctcacccagacacactagtgctctccagaatctctgcccaggaggcaggggaaaaatctcctttctgcttcccagagagggtctggccttgcccaaggccactcagtgatttaggaagaaggctgaagctagagtgtggacctgacctgttggacagtacttttctttctttttttttcggggaggggttaaagacaggatctcactctggcgctctggagtgcagtggtgtgattagggatcattgcagactctgcctctcaggctcaggtgatcctcccatctcagcctgcctccgagtagctgggactacaggtgtgagtcaccactgtattttttgcagacaggatctccctgtttcctaggctggtctcgaactcctgggcttaaatgactcttctgcctcagcctcaccaaagtgttgggattactggtgtgagcccccacacctggccgagccagcgcttctcaactcccaaggtttgcaagctccctgccccagggagctcacgccaggcaggccagtgggcctaagccagaaacagaaagacagcagtggccaggtggagagcttcccaagctgtgccgattagagccagctctaggaagggcctgctaataaggtctagggtctgagaccaagttttttctaatctcagcccctaagaaacctaatttgtgcttaggaatcttcccaggtaagaagaactagttcctctagttgttgtttttttttcccaaacatgcaaacactgaggattgagctgtgtggggtcagctgtgctgccaggcacatgtacgttgcctcatttcatccttgcaacagctctgcagggccccgcagatgaggaaatccgtaggcaggagcggttgagtgattttcctaaggtcacccagctgtttggtaatagtgttttgtcatctggtagcaggtttccattaccatgccatcagagcagacctcagccagggccacagaggtcccaaccgtctctgccctcttctgctgcccctgcctcatgggctcccagccacaggttccccatgggccagctttacgcctcctgatccttccgattggggcagactaggagaggaaagacgggcctgggctgggtgcggtggctcatgcctgtaatcccagcactttgagaggctgcggcgggtggatcacctgaggccaggtgtttgagatcagcctggccagcatggcgaaaccctgtgtctaataaaaatacaaaaattagccgggcgtggtggcgggcgcctgtaatcccagctacttgggaggctgaggcaggagaattacttgaacctgggaggcagaagttgcagtgagccgagatcacgccactgcactccagcctgggcgacagagcaaggctctgtctcaaaaaaagaaaaaaaa

SEQ ID NO: 105023 - DNA, 11737 bp, Homo sapiens
  Payload ID: 610
  Gene Symbol: AP5M1
  Gene Name: adaptor-related protein complex 5, mu 1 subunit
  Uniprot ID: Q9H0R1
  ENST ID: ENST00000261558
  CDS Start-End: 407-1879
cgcgccagggaggttgtcgggaggggccggcgaataaaacgagcggcgaaagaaccgaaaaaaggctcgacgctaccgtgtatgaggaactttgatccttgcgggccaccattccggaagtagaatttagaggaagaaaataccggagttgcagggtataggtaaatttctcaaggttataggttggggttcttagaactttttgtggtgtgtgttggcctagagcgactcagaagcgttagtgacttcacctaaaaaagctaacctctctgctgagcgcgaccggtatgcggcgcaggatgagcctcagggcttctgttaagagtctgtctgagaaagccggtctgcgctgttcctcggtggcgaccttaattatgagatgagctaatgctttactgacttaaccatggcgcagcgggcagtgtggctcataagccacgaaccgggaactccactttgtggcaccgtgagattctccagacggtatccaactgttgaaaaacgagccagagtcttcaatggagcaagttatgtgcctgttcctgaagatggtccctttcttaaagcactgctctttgaacttagattattggatgatgataaagacttcgttgagagtcgtgatagctgttcacgcatcaataaaacatccatttatggactcctgataggaggtgaagaactctggccagttgttgcttttctgaagaatgacatgatatatgcttgtgttccactagttgaacaaactctgtcccctcgtccgccactaattagtgtcagtggagtttcacaaggctttgaatttctttttgggatacaggattttctttattcaggtcaaaaaaatgactctgagctgaatacaaaattgagccagttgcctgacttgcttctgcaggcttgtccatttggtactttattagatgccaacttacagaattcattagataataccaattttgcatctgtgactcagccacagaaacagccagcttggaaaactgggacgtacaaaggaaaaccacaagtttctatttctatcactgaaaaggtaaaatccatgcaatatgataaacagggtatagcagatacatggcaagttgttggaacagtgacttgcaagtgtgatttggaaggaatcatgccaaatgttaccatcagcttgagtctccccaccaatggatctccacttcaggatattctagttcacccttgtgtaacttctcttgactctgcaattctgacttctagtagtattgatgcaatggatgactctgcatttagtgggccttacaaatttccattcactccacctttagagtcattcaacttatgcttctacacttcccaggtccctgtcccaccaattttgggtttttatcaaatgaaggaggaagaagtacaactaagaataaccattaatttaaaacttcatgaaagtgtgaaaaataattttgaattctgtgaagcccatatacctttttacaatagaggtccaattacacatttggaatacaaaactagttttggccagcttgaagtatttcgagagaaaagcttattgatctggattattggccagaagttcccaaaatcaatggaaattagtctttctggaactgtaacttttggagccaagagccatgagaagcagccatttgacccaatttgtactggagaaacagcatatttaaagcttcattttaggatcttagattacacacttactggatgttatgcagatcagcattcagttcaagtttttgcatcaggaaaaccaaaaataagtgcacaccggaaactaatttcttctgattattacatctggaattctaaagcccctgctccagtaacatatggatcattattattgtaatagtctcatgtttaaatgggattatataatgataacagtttaaagaaaatcataatcttatatttttaatgtggatgcatataacctgtgagtgaaaaatcactgaatgatttaattgtaaaagtagtcttatgtggtgtttgtagtctgatagagcttgaaaggacattttaaaagctaatgtctccaattttgttaaccttcgattttatgccagtataattcagaacatagaaaagtaatgattcacttgggctcattttagactggtcctgggtcaccctgccacacttgtttcctagtgtttctgtggcagacattgctaatcaattacagcccttttctgtactgagccttggataaagggtcaggctcctttttagttcagagattcaggcagccactcccagtgggttgtagataatgtgcaagataaaaactattttctcttccaaatctaagtactaagctcctagtataaggtgttgttacagaataccagagaccatgttagagacaactacatctcttcaaaaaacagccaacagagacaaaggaaaagtgtttaaatagtaagctgttcttcttaatcagaactatcctattgactaataaataatctgcataattctacttaaggtgtgtaatctctgttctagagttagtttttaagtaagcttgttaatctgccactttgacattttgcttaggatgtcagtagccatattaagatgtgtagaataccttcagaagatgatcatagtgttttgtaatcatttaatgtctgcagccaaatttttaaaggtaatttagacctaatactgctcttgctgtgtcttattaagttaaaattaatgaatgaattctggtaaaaattcaaaaggcactctgtgagtagagagtatcatttaagcttattttagtcacatgtagtatatatctccttaaagctgtcactctcactttcttaccattctcttgatttcttcagaaaccatctagtcatcatctttatactctacctgcttctgcaattatatatcatattatgttttcagagcagttcattgtcaagttggactttaagtgaccattcaagaaaagatgaaatctcacgaacctcaaaacttcattcatgtctttttacaaatgagaaaaaaaaatgcattaaagattaatactcaatttgattatatcttgggttctgttttttaatgagtgttctaaggaaaagcttagaaaagctgctaactcctcagaagaaagcatgatagtttaaaggtatagggcatataaatttaggatttgaaatatgattttttaattaaggtcagtcctactcataaactcattttctgcaaagcattatcatggcataaggttctatgttcaaaattatcccaagtaacaaagaaaaaaagaataactgcctgaccaggattttaacttgttattctagcttaatcatagataatcagcagtgaaaactttccttttgaaagaagaaaatatcattccctataagttatttgatctctcttaaactcaaagcttaacatttcacttatgttgataagttaatggtaatggagccatttggaatcttgattgtataaatgtttaccaaatacactaaggtaagcaagaggcatttatctagtgagtaggcaaagatttaatataataatcccctaggcaaaagtttataagcagttagaaaaatcagtgaatcttctatttgacatttctagaaaccggaggaaaatctagggtgtcctggaaaagtgatgaggtgttggggaacctgatgccatctgttgccattccattctaacatagtgctacagaactgaaccaacttaggttttcatcccattgagatcagctgggcacactgtgatgcttttgattttgtctagaaacctgtcacttcaggataatttctgaagacaaagtctgtttcccgtttggtaggtgacctgtttaatgttttccctgtgtctgggaactccttagtgtaattagcgacctttgaactccacaactaatcctgagctattttgtattccttactcatctttaaggctggacctttcctttcttcagagtccgttgccacaattaaagaagaaacagctgcatttcaaagggattccgattccagaagcttaatcgtgattgacatgttcttattctaagctataagacactctaagagtcctttcttgggttaaaacttcaatcattttctaaaaaattatctcactatggattttattcattttctttgataactattctttgcattttttaacttgaaagatgctttgcgtttgcagtgaatatgagcaactacttccagtgaaagatttggatagtgtcagaccttctctagatgcaaaattgctaaattcccttttagtgccaaaatatgattatgaaatctgatgtctatcacataggtaattattcttcaataaactcgaaaggttaaaaaaaaaagtgttaattttttagaatgaactccagaaaagatcgttcatgattttgtaaacgcttcttttctccattttttactaaacaatattttaaaaactttttagagccagcaatatagtacttaggcaatacccttacggtggtggcaatttttttttaactttttaagtaattgattcaaatgtcaagtttgaagcagtcttgtcaggaattctgatgacaattatttgtttaaaaaattttttttattaaacattagtctgtcccataaaatcgttttcatttttttcacaccaattcagtatttctactaggttaaaattatggtgtttttatacattgtatgatttaagatctttcaaggcagacatttatacttggtaacaattgccaatttttttttctggtttttgttgtagtatttcaaaatacttcgtagacattgatagactcctacactacccctgggagctaggtaggtggaattatcatccaggccttctgtagggactgctgccacaacagagtggttgttcctaagacaaaggtcaaaaaaaggggtgttaataaacagtcctcaggtttaagggacttttttaggattacatcttaaattccaacaaatcagatttaggagttactgaaagtgaaattgatccatccctcatccaaactttgcaatactttcctgttctgacatcatttagatagttagctgtattatcagattagaaaccattgtaccaggctgctgaaaggaaaaggaggcaaaaagctaaacatgggatgaattctgaaccttttaacctggctgaagtacgttggtccctgttatgcaaataccttcaatcctctgctaagttcagtggaaataattttcttgaatgacaggtttattcagcaaggattcagttggtgattaatccccctttgatctagggtatttcacttaactaccagttacctcgttctgacaaagtgcaactgagattagggagatcactagaacactaccagggtgtgcgtttattctctataaccttttaaagcaagggccaagaatgcaatttattttcagtatttgaagatgtaaagtcctgtctgctaagttagaaagtcaattgaataccaaatgaagtttatttcttacgtaatagaacaaacatttctttttgcttcgcctaacaatgatattaggaaacataggctttgaagaaagaagaaacaaagactacattctaagtattgcttctagttttgtttcatgcactagggtatacttaactggccttgacataaccaaaaatcaaagcagtggctacaacttagactgagaaaatgcttctgttttattaagctgcatggtttcttctcacctttccccctaccaccaccaccaccattagaaaatgtcatactgtgtggtaaagaaatccagttgaggaaaatgtgttgcagtacacagttatccaccttaagactaatgatttcgaagctttgttaactatttcttttcttgaggcaaaggagcttcttgtgtttccattataagaataattgcattcattttcagaatgcttttttaaaaaaaaaaagtgacagcattaccaaaatagccgagtaattaaattttttctgcctgcctttttctcagttatctgagtacctcttcttccataattttaaattttgaaatattatatggaattttgcacagtattttgagaaagaaaaggtaatgtttcatggtaggtttctcaatttgctgtttaaaactgtttcaatagcaatgtcagtctttatcttgtaagatgtcaaatcgggatttattcctccagtatattttaagacctttaaaaaaaaagtatagtgatttgttacaaaatatgtttttaaagattagattttgattaatgatttagttatatacagcattttaatgcttagtaattactgttctagtagcattttgcaatacaagggatgtatttagattattatactttttttggctcagactttttgtgatctaatttataaattgaaacaatgactcaaagaagtgcatacctaacttacgtttgtgccaagccagcctcctctagtttcaatttaataactagtttcaaaatatattttgatagcaagttcctaaaccacagcagaattgcggatcaggaaaaatacaagataacggcattctataaagatagagggcaggttcccatggctatgttgctaagaaactagtgtttttaatcattacactccgtgcagtcatatttaatcaataaaacaggatatattttgaaattcaccatcacagaatatatatatatatacacacaacatatatatacaagtatatgaatttacgtaaatgtgtacaacactagtgtgtctgacttggtgggtttccctgtgaaacatgtcagtatcatgtaagatgaagaatattttaagggcaaatattcaaatatctttcctccaaacacagtattagttaatagtaatgaaatgattcattaaactgaaaattgcaaaggaactcatgagttcctttgtgattgaaacaaagtgattaaaactcttatgacctgaaggctttccaactagcctccaactgtccgcaccagctgtttcatggatataacattagtgtttgtgtatagcctggaacaatacaaggctgtatctgtatcactagcttcttgccttataagcaggatactgcaaggtctggttgatttctctaatgccctagctaatctgcctaattgacatcagtgtcatgttaatgtatgatgcacaagcatttacagatggacaaatgctccacactaaaaaccacctgctgaattttttttccagtaggatgtgaaattttgcacttctaatctgttgaacatttaaagtcaaaactacatgtttcctttaaatggcctctttaaatgatattttatgtttataaattttgttatgaaaaatttaaaaattagttattcctcttaaatttttactttttccttcaaaggacttgggtgccctctgcaggttataaagagataattagtgactatatctattttaaaaccctgtgatttttctctttcatacacatagcctgcttacacccaatttcaaagaaagtgtgagctaatttatttatattaactcttattaatttgccagtggttgaagttggagtttcttttctccactggttttataggtgtgtttagtgtgaagaatgtgataccattgaacttccagactacttagctggggctctttaaatgttggaactatagtaacacacattccctcacagaaaggagattgggaaaatagctattttgaaagttattgcagatgtagggaatagcttgtttcccattatgtttctagaatattacacatttggagtaagccttgctttttcaacatgcatcatgtaaaattacatgaaagaaaataatttgaaaattacacaagatttctctttcttgatcttgttgatgatgattgtgttctagctcaaaaaacagaccttcttagaatttcttattttttaaaaaagtgagtactcaacagataatactttggtactgcccgttgcagacatgggcctactaaactagaaagagcatttgaagagcaaaaggcaaaggttccatcaccatcctgtggaaatacgtgagttgttcatttcagtacacccatagtttctcaacaggtgtagcagatttgtttctaaaggacataggagtgcattttttatatgaaaccagaactggagtggtaatggcacttctgattcaattaacttacttggtgaagctgccagggaaactaaatatgatgagaagaagaggaatgactggatcaaattaatagaaatagatctttttgcaagcaacataatgattctgatcatcaaccttgaaaagtaaattagaacaagcaaattgctgttgaaaaattctttcagcactctgctgttgctactcagctagtcatagctcagccagagggaaggaaaaaatgcactcggttttgcattaacaaaggaaacattattaaagtgaatgtttacattgtgtttattgaagtgttgaaagaatatttgttgcatcttcaagcaacctgctgctctccagactgttacagtgcatgagtgataataaaaatgagtcagtcacttgtacattttagaaaataaataacttttaacatagtatttctcaactatgttacttcaaaatgtttaagtgccaaacttaatgttaccttctctgctaaagatttttgtctctaggaaatatattccattaaaaaaaaaaagaaagaaactcatttatttatttatttgggtataccttccagttacttccagatgctttatgtaactttcctcccagaagctgcaatacataagaaataataagctgaaaataatcaaaaaatgaaaacaattgtgaaattactgaaatgagtatgtaattgagtatgtaatatatgcattggagaaataccggttgattattgtgataacttttgagagctacagttattttgaactacctcgtaaagactacattgagaatgaaaaagccattgaacaatagatgtaccaatttgacctttaaaagttcaatctttattatatgcattgataaatgggaaagttagtaattaaaaatttagaaggaattttagcctttacctttctaaaatgaacaatttaaatcactcttacactttagaaattgaaatatagtatttaacagggattaaaatgttttacttggtctcttagtgttactgaatacaagtttagtattctgtaatcccttatggattggctgatttttgaagaactattttcttagatttaccaacaggacaagttgtcggccttttcccacatttcaacctaaaaatggtatctatcacagttatcaaagattaccccttgctaaaggctcttaagaaactgttagcctgttactttattacttaccatttctataacatgtacatttatagagcatcatatatttattttaagtctagaatcagtaaaaagttatgtgtttgtcaataatcaaaaaatgtttaatctaaaataaagtagatgccacgcttctaattctgcttttgctaaggcaataatcagtagaagtggttagtaatatttgtagcttgttaaccaactggagcaaaaggactttttaatatgaataacagtggtctcgtgccataagtatttctctcatacatattaaaatagcatgttattttatttaatattgaaggcctaaacacaattgaacataaggtatggcttggaatttagaactgctgagcaatatggttgagagggagaccttaatttagtcaataaaaattcataattaatgttaagctttgtgctcatattatatgccactctgggattagacaaaagacaaaaaacagttccatattttgaacgatatattctacctcctgcagtgtattagcattgtagcgtaggagactatttctgtatgttattagtacagaaactgcccaaaaaggtgatggttgaagttccccagccagttaaagggcacaccgtgggggcagcatatctccatgggtctatctctagcaaacagaatcccagaaacttgagcacctgatatagcagaaggaaataaagattatagtaagtatattcatgagagagaattttttttgcctccagatgtttggggtttggatatgtagggtaaatataaatgtctaatgaaagtaattactattatatttgatttgatatttaatttattatactgaaatactaaattaaatacaaaaaaactcctacatactaactatatgtttctcccactgattcccctcctgcctccttcactgattttgaatgtgtgctcaatttgctagtatgagatttacctctgccttatcagtgaagaaaatatgatgtctatatagaattataaggaaaatatatatgtgaagaaatgttaggtaatctaacatttgtatgctaatgtgtcttagatttaccaactatcctaatgtgtagtcaattgataaactaaatttttctttaggatagttcacatccagtagaacttctaccttggaaaacattcttagccttgtttattttgaatgtatgtgtgtgtgtgtgcatgtgtggaaaacaagaaaaatacaagctctagagtagtggcctcacattgatttatattagtgtgccagtctttcccctacctccctaatatttcaaacttcttgtggacaatgacattcattttcatacctttatatttccagtgccaccagaaacacaaaagcagcttagtgttgatttaatgaagtagcaaaatgttaaatacataacaaaacagattgtcctgtcacctaaaacaaattagtgatgtttgagtaattagggttttgcatgtgtatatagaaaggctattttgcaaacagtggttcagtctgtattgggcacaggtgaattctgccctgcgattgccatctttagcacttttcagagaatttgttgccatttatgacactgatcttcagacacactgtgtagtgccttggcttaaactgtcagactggcaacagctgaggctgcccatcataggacacgttccttgcagttatgcttcagtgaactttaaaacatttggcactcgtatcttagaaatgtccttccgaaactcactctacaacagctttgtgggctccctactatttactagagtcaatcctgattttgtttggcataatgagacctgatatgctatgactctccctatcctataaagccacagctttcagcggtccccgtatactaatgaaatggagtcgccagtatccaaaagttccaagtgattatttagaacatttccattaaccataaaggcaaagtggtatagagaaaataatacagtctttgaagtcacacaggcctgatttcaaatcccagctctgtcatttacaaactgggtggtcctggataaattacttaacctctgtggtcttcagtttcctcccaactttgtagggttattgtgagcattgaatgataccaagttataagtgcataggtattcaatcagtgttcattcccttctgtatcaaagacttataatggccttttcatggaattgtctctacctataattatgtgactgtgccttcagattatcaaaattatatgaattgtccatgtgcccttggttttgaatgttcaattctgtattgcaggaatgcctactcagttgcttgaatgggtgtttggagttaataaaatggctgtacaattga

SEQ ID NO: 105024 - DNA, 1815 bp, Homo sapiens
  Payload ID: 610
  Gene Symbol: AP5M1
  Gene Name: adaptor-related protein complex 5, mu 1 subunit
  ENST ID: ENST00000431972
  CDS Start-End: 260-1774
gttgcagggtataggtaaatttctcaaggttataggttggggttcttagaactttttgtggtgtgtgttggcctagagcgactcagaagcgttagtgacttcacctaaaaaagctaacctctctgctgagcgcgaccggtatgcggcgcaggatgagcctcagggcttctgttaagagtctgtctgagaaagccggtctgcgctgttcctcggtggcgaccttaattatgagatgagctaatgctttactgacttaaccatggcgcagcgggcagtgtggctcataagccacgaaccgggaactccactttgtggcaccgtgagattctccagggattggcaagaagactcagggtacctgtcattcactataagacggtatccaactgttgaaaaacgagccagagtcttcaatggagcaagttatgtgcctgttcctgaagatggtccctttcttaaagcactgctctttgaacttagattattggatgatgataaagacttcgttgagagtcgtgatagctgttcacgcatcaataaaacatccatttatggactcctgataggaggtgaagaactctggccagttgttgcttttctgaagaatgacatgatatatgcttgtgttccactagttgaacaaactctgtcccctcgtccgccactaattagtgtcagtggagtttcacaaggctttgaatttctttttgggatacaggattttctttattcaggtcaaaaaaatgactctgagctgaatacaaaattgagccagttgcctgacttgcttctgcaggcttgtccatttggtactttattagatgccaacttacagaattcattagataataccaattttgcatctgtgactcagccacagaaacagccagcttggaaaactgggacgtacaaaggaaaaccacaagtttctatttctatcactgaaaaggtaaaatccatgcaatatgataaacagggtatagcagatacatggcaagttgttggaacagtgacttgcaagtgtgatttggaaggaatcatgccaaatgttaccatcagcttgagtctccccaccaatggatctccacttcaggatattctagttcacccttgtgtaacttctcttgactctgcaattctgacttctagtagtattgatgcaatggatgactctgcatttagtgggccttacaaatttccattcactccacctttagagtcattcaacttatgcttctacacttcccaggtccctgtcccaccaattttgggtttttatcaaatgaaggaggaagaagtacaactaagaataaccattaatttaaaacttcatgaaagtgtgaaaaataattttgaattctgtgaagcccatatacctttttacaatagaggtccaattacacatttggaatacaaaactagttttggccagcttgaagtatttcgagagaaaagcttattgatctggattattggccagaagttcccaaaatcaatggaaattagtctttctggaactgtaacttttggagccaagagccatgagaagcagccatttgacccaatttgtactggagaaacagcatatttaaagcttcattttaggatcttagattacacacttactggatgttatgcagatcagcattcagttcaagtttttgcatcaggaaaaccaaaaataagtgcacaccggaaactaatttcttctgattattacatctggaattctaaagcccctgctccagtaacatatggatcattattattgtaatagtctcatgtttaaatgggattatataatgataacagttt

SEQ ID NO: 105025 - DNA, 466 bp, Homo sapiens
  Payload ID: 610
  Gene Symbol: AP5M1
  Gene Name: adaptor-related protein complex 5, mu 1 subunit
  ENST ID: ENST00000556377
  CDS Start-End: 1-180
cttcattttaggatcttagattacacacttactggatgttatgcagatcagcattcagttcaagtttttgcatcaggaaaaccaaaaataagtgcacaccggaaactaatttcttctgattattacatctggaattctaaagcccctgctccagtaacatatggatcattattattgtaatagtctcatgtttaaatgggattatataatgataacagtttaaagaaaatcataatcttatatttttaatgtggatgcatataacctaaaccatctagtcatcatctttatactctacctgcttctgcaattatatatcatattatgttttcagagcagttcattgtcaagttggactttaagtgaccattcaagaaaagatgaaatctcacgaacctcaaaacttcattcatgtctttttacaaatgagaaaaaaaaatgcattaaagattaatactcaatttga

SEQ ID NO: 105026 - DNA, 817 bp, Homo sapiens
  Payload ID: 610
  Gene Symbol: AP5M1
  Gene Name: adaptor-related protein complex 5, mu 1 subunit
  ENST ID: ENST00000555448
  CDS Start-End: 290-406
aagtagaatttagaggaagaaaataccggagttgcagggtataggtaaatttctcaaggttataggttggggttcttagaactttttgtggtgtgtgttggcctagagcgactcagaagcgttagtgacttcacctaaaaaagctaacctctctgctgagcgcgaccggtatgcggcgcaggatgagcctcagggcttctgttaagagtctgtctgagaaagccggtctgcgctgttcctcggtggcgaccttaattatgagatgagctaatgctttactgacttaaccatggcgcagcgggcagtgtggctcataagccacgaaccgggaactccactttgtggcaccgtgagattctccagtgtgatttggaaggaatcatgccaaatgttaccatcagcttgagtctccccaccaatggatctccacttcaggatattctagttcacccttgtgtaacttctcttgactctgcaattctgacttctagtagtattgatgcaatggatgactctgcatttagtgggccttacaaatttccattcactccacctttagagtcattcaacttatgcttctacacttcccaggtccctgtcccaccaattttgggtttttatcaaatgaaggaggaagaagtacaactaagaataaccattaatttaaaacttcatgaaagtgtgaaaaataattttgaattctgtgaagcccatatacctttttacaatagaggtccaattacacatttggaatacaaaactagttttggccagcttgaagtatttcgagagaaaagcttattgatctggattattg

SEQ ID NO: 105027 - DNA, 610 bp, Homo sapiens
  Payload ID: 610
  Gene Symbol: AP5M1
  Gene Name: adaptor-related protein complex 5, mu 1 subunit
  ENST ID: ENST00000556995
  CDS Start-End: 366-610
gaataaaacgagcggcgaaagaaccgaaaaaaggctcgacgctaccgtgtatgaggaactttgatccttgcgggccaccattccggaagtagaatttagaggaagaaaataccggagttgcagggtatagacggtatccaactgttgaaaaacgagccagagtcttcaatggagcaagttatgtgcctgttcctgaagatggtccctttcttaaagcactgctctttgaacttagattattggatgatgataaagacttcgttgagagtcgtgatagctgttcacgcatcaataaaacatccatttatggactcctgataggaggtgaagaactctggccagttgttgcttttctgaagaatgacatgatatatgcttgtgttccactagttgaacaaactctgtcccctcgtccgccactaattagtgtcagtggagtttcacaaggctttgaatttctttttgggatacaggattttctttattcaggtcaaaaaaatgactctgagctgaatacaaaattgagccagttgcctgacttgcttctgcaggcttgtccatttggtactttattagatgccaacttacagaattcattagataataccaa

SEQ ID NO: 105028 - DNA, 496 bp, Homo sapiens
  Payload ID: 610
  Gene Symbol: AP5M1
  Gene Name: adaptor-related protein complex 5, mu 1 subunit
  ENST ID: ENST00000554863
  CDS Start-End: 1-280
atttcgagagaaaagcttattgatctggattattggccagaagttcccaaaatcaatggaaattagtctttctggaactgtaacttttggagccaagagccatgagaagcagccatttgacccaatttgtactggagaaacagcatatttaaagcttcattttaggatcttagattacacacttactggatgttatgcagatcagcattcagttcaagtttttgcatcaggaaaaccaaaaataagtgcacgtaagttacacagattcaaactaacttaagggaattaaaatggtgtttgcagttattacctaaggtaaaatttgaatgtaacagaacttagagattagagaataatcccaatttataaaattctgggctgattctaccccacataacagtttgtgtactttacactgccctctgccgccttcttgtttataaagtggtctggataagcaaagattgggatagaggggaacttcagtgtaaaattg

SEQ ID NO: 105029 - DNA, 1960 bp, Homo sapiens
  Payload ID: 611
  Gene Symbol: AP5S1
  Gene Name: adaptor-related protein complex 5, sigma 1 subunit
  Uniprot ID: Q9NUS5
  ENST ID: ENST00000246041
  CDS Start-End: 348-950
gtgcgcaggcgcccacgggccgcgcagccgccattgctctcctgccacggaggggagcgcttggtggcagtccgcgggcccggacggaaggctgaggcgacgcctcgacgacagcggaccggagctgcaggggcaacacattcagggcggggtgccccatttaggcctggctgaccggagtaagaaactacaacccccgaagtgccttgcgcctcaaggttacggaggcagtgacgtaagctgtcttgaccgctaccatttctctagtagaggcgggacgcggcggcgcggagtgatgacgcgctctgctggcggctggagggttgcggagcacccaccctggagccatggtccacgccttcctcattcacaccttgagggccccgaatactgaggacacgggcctttgccgagtgctgtactcctgcgtcttcggtgctgagaagtcacctgatgacccacggccgcatggtgccgagagggacaggcttctccggaaggaacagattttagctgtggccaggcaggtagagtcaatgtgtcggctgcagcagcaggcatctggccggccccccatggacctgcagccgcaatcctcagatgagcaagtgccgctgcacgaggccccacgtggggctttccgcctggcagcagagaaccctttccaggagccacggacggtggtgtggctgggcgtgctctcgttaggctttgccctggtgctggatgcccatgagaacctgctactggctgagggcacgctccggctgctgacacgcctcctccttgaccacctccggctgctggcgcccagcaccagccttctgctgcgggctgaccgcattgagggcatcctcacccgcttcctgccacatggtcagctgcttttcctcaacgaccagtttgtccaaggcctggagaaggaattcagtgccgcttggccccgctgattcctcgttgggatggtgcttctgagggcaggcagagggtagacacacagccagatgaagcttggcatctccctcctacccagcagctctgatgtgctgctataccaggacaagtgggtgacacaagcctgcagaaagggggctgggcagagggtggaggaggtcctgcctgtcctcaggttagtggaaccacagaacttcctgagcctagagctgctgtgttacttagaccgctgccgtgcggcagccacgcttgtccttgaacccaccttcctccatccctgccagccgatagtgctagggtgaggagctgcctggagctcaccccgctcttcttccaaacccacagtcaaggccaggcgcggtggctcacgcctgtaatcccagcactttgcggggctgaggtggttggaccacctcaggtcgggagttcaagaccagcctggccaacatagtgaaaccccatctctactaaaaatacaaaaattagctgggtgtatggcgcccacctgtaatcctagctgctcagggggctgagtcatgggaatcacttgaacctgggaggcagagtttgcagtgagccgagagtgcgccacttcactccagcctgggcaacagagtgagactccatctcaaaaaaaaaaaaaaaatcccacagtcatcgaaacacaaaaggggtctcagactcccctgagggtggaggagctgtgcctgcatgctggcaggccacagcccctggctttgtgcccacttaggcagtattatcaacaaggtcctgctcagtgtccagcccccgctgagttcagaaatgcatctgccaatcagcagcaggattctgcagctccttttgtgccaagcccgttcccaccaggcaggctcgagataaagtcatcacagccttccctcatctgcagggagagaagttgctgtcagatgaatgtgagcagtctagcctggatgacatatttttcgttttgaattaaaagcactggctgtgtgattttaccctc

SEQ ID NO: 105030 - DNA, 1791 bp, Homo sapiens
  Payload ID: 611
  Gene Symbol: AP5S1
  Gene Name: adaptor-related protein complex 5, sigma 1 subunit
  Uniprot ID: Q9NUS5
  ENST ID: ENST00000379567
  CDS Start-End: 184-786
ccacgggccgcgcagccgccattgctctcctgccacggaggggagcgcttggtggcagtccgcgggcccggacggaaggctgaggcgacgcctcgacgacagcggaccggagctgcaggggcaacacattcagggcggggtgccccatttaggcctggctgaccggacacccaccctggagccatggtccacgccttcctcattcacaccttgagggccccgaatactgaggacacgggcctttgccgagtgctgtactcctgcgtcttcggtgctgagaagtcacctgatgacccacggccgcatggtgccgagagggacaggcttctccggaaggaacagattttagctgtggccaggcaggtagagtcaatgtgtcggctgcagcagcaggcatctggccggccccccatggacctgcagccgcaatcctcagatgagcaagtgccgctgcacgaggccccacgtggggctttccgcctggcagcagagaaccctttccaggagccacggacggtggtgtggctgggcgtgctctcgttaggctttgccctggtgctggatgcccatgagaacctgctactggctgagggcacgctccggctgctgacacgcctcctccttgaccacctccggctgctggcgcccagcaccagccttctgctgcgggctgaccgcattgagggcatcctcacccgcttcctgccacatggtcagctgcttttcctcaacgaccagtttgtccaaggcctggagaaggaattcagtgccgcttggccccgctgattcctcgttgggatggtgcttctgagggcaggcagagggtagacacacagccagatgaagcttggcatctccctcctacccagcagctctgatgtgctgctataccaggacaagtgggtgacacaagcctgcagaaagggggctgggcagagggtggaggaggtcctgcctgtcctcaggttagtggaaccacagaacttcctgagcctagagctgctgtgttacttagaccgctgccgtgcggcagccacgcttgtccttgaacccaccttcctccatccctgccagccgatagtgctagggtgaggagctgcctggagctcaccccgctcttcttccaaacccacagtcaaggccaggcgcggtggctcacgcctgtaatcccagcactttgcggggctgaggtggttggaccacctcaggtcgggagttcaagaccagcctggccaacatagtgaaaccccatctctactaaaaatacaaaaattagctgggtgtatggcgcccacctgtaatcctagctgctcagggggctgagtcatgggaatcacttgaacctgggaggcagagtttgcagtgagccgagagtgcgccacttcactccagcctgggcaacagagtgagactccatctcaaaaaaaaaaaaaaaatcccacagtcatcgaaacacaaaaggggtctcagactcccctgagggtggaggagctgtgcctgcatgctggcaggccacagcccctggctttgtgcccacttaggcagtattatcaacaaggtcctgctcagtgtccagcccccgctgagttcagaaatgcatctgccaatcagcagcaggattctgcagctccttttgtgccaagcccgttcccaccaggcaggctcgagataaagtcatcacagccttccctcatctgcagggagagaagttgctgtcagatgaatgtgagcagtctagcctggatgacatatttttcgttttgaattaaaagcactggctgtgtgatttta

SEQ ID NO: 105031 - DNA, 1848 bp, Homo sapiens
  Payload ID: 611
  Gene Symbol: AP5S1
  Gene Name: adaptor-related protein complex 5, sigma 1 subunit
  ENST ID: ENST00000379573
  CDS Start-End: 245-424
ggcgcccacgggccgcgcagccgccattgctctcctgccacggaggggagcgcttggtggcagtccgcgggcccggacggaaggctgaggcgacgcctcgacgacagcggaccggagctgcaggggcaacacattcagggcggggtgccccatttaggcctggctgaccggagtaagaaactacaacccccgaagtgccttgcgcctcaaggttacggaggcagtgaccacccaccctggagccatggtccacgccttcctcattcacaccttgagggccccgaatactgaggacacgggcctttgccgagtgctgtactcctgcgtcttcggtgctgagaagtcacctgatgacccacggccgcatggtgccgagagggacaggcttctccggaaggaacagattttagctgtggccaggtagagtcaatgtgtcggctgcagcagcaggcatctggccggccccccatggacctgcagccgcaatcctcagatgagcaagtgccgctgcacgaggccccacgtggggctttccgcctggcagcagagaaccctttccaggagccacggacggtggtgtggctgggcgtgctctcgttaggctttgccctggtgctggatgcccatgagaacctgctactggctgagggcacgctccggctgctgacacgcctcctccttgaccacctccggctgctggcgcccagcaccagccttctgctgcgggctgaccgcattgagggcatcctcacccgcttcctgccacatggtcagctgcttttcctcaacgaccagtttgtccaaggcctggagaaggaattcagtgccgcttggccccgctgattcctcgttgggatggtgcttctgagggcaggcagagggtagacacacagccagatgaagcttggcatctccctcctacccagcagctctgatgtgctgctataccaggacaagtgggtgacacaagcctgcagaaagggggctgggcagagggtggaggaggtcctgcctgtcctcaggttagtggaaccacagaacttcctgagcctagagctgctgtgttacttagaccgctgccgtgcggcagccacgcttgtccttgaacccaccttcctccatccctgccagccgatagtgctagggtgaggagctgcctggagctcaccccgctcttcttccaaacccacagtcaaggccaggcgcggtggctcacgcctgtaatcccagcactttgcggggctgaggtggttggaccacctcaggtcgggagttcaagaccagcctggccaacatagtgaaaccccatctctactaaaaatacaaaaattagctgggtgtatggcgcccacctgtaatcctagctgctcagggggctgagtcatgggaatcacttgaacctgggaggcagagtttgcagtgagccgagagtgcgccacttcactccagcctgggcaacagagtgagactccatctcaaaaaaaaaaaaaaaatcccacagtcatcgaaacacaaaaggggtctcagactcccctgagggtggaggagctgtgcctgcatgctggcaggccacagcccctggctttgtgcccacttaggcagtattatcaacaaggtcctgctcagtgtccagcccccgctgagttcagaaatgcatctgccaatcagcagcaggattctgcagctccttttgtgccaagcccgttcccaccaggcaggctcgagataaagtcatcacagccttccctcatctgcagggagagaagttgctgtcagatgaatgtgagcagtctagcctggatgacatatttttcgttttgaattaaaagcactggctgtgtgatttta

SEQ ID NO: 105032 - DNA, 584 bp, Homo sapiens
  Payload ID: 611
  Gene Symbol: AP5S1
  Gene Name: adaptor-related protein complex 5, sigma 1 subunit
  ENST ID: ENST00000455742
  CDS Start-End: 325-584
gcagccgccattgctctcctgccacggaggggagcgcttggtggcagtccgcgggcccggacggaaggctgaggcgacgcctcgacgacagcggaccggagctgcaggggcaacacattcagggcggggtgccccatttaggcctggctgaccggagtaagaaactacaacccccgaagtgccttgcgcctcaaggttacggaggcagtgacgtaagctgtcttgaccgctaccatttctctagtagaggcgggacgcggcggcgcggagtgatgacgcgctctgctggcggctggagggttgcggagcacccaccctggagccatggtccacgccttcctcattcacaccttgagggccccgaatactgaggacacgggcctttgccgagtgctgtactcctgcgtcttcggtgctgagaagtcacctgatgacccacggccgcatggtgccgagagggacaggcttctccggaaggaacagattttagctgtggccaggcaggtagagtcaatgtgtcggctgcagcagcaggcatctggccggccccccatggacctgcagccgcaatcctcagatgagca

SEQ ID NO: 105033 - DNA, 5362 bp, Homo sapiens
  Payload ID: 611
  Gene Symbol: AP5S1
  Gene Name: adaptor-related protein complex 5, sigma 1 subunit
  Uniprot ID: Q9NUS5
  ENST ID: ENST00000615891
  CDS Start-End: 220-822
attgctctcctgccacggaggggagcgcttggtggcagtccgcgggcccggacggaaggctgaggcgacgcctcgacgacagcggaccggagctgcaggggcaacacattcagggcggggtgccccatttaggcctggctgaccggagtaagaaactacaacccccgaagtgccttgcgcctcaaggttacggaggcagtgaccacccaccctggagccatggtccacgccttcctcattcacaccttgagggccccgaatactgaggacacgggcctttgccgagtgctgtactcctgcgtcttcggtgctgagaagtcacctgatgacccacggccgcatggtgccgagagggacaggcttctccggaaggaacagattttagctgtggccaggcaggtagagtcaatgtgtcggctgcagcagcaggcatctggccggccccccatggacctgcagccgcaatcctcagatgagcaagtgccgctgcacgaggccccacgtggggctttccgcctggcagcagagaaccctttccaggagccacggacggtggtgtggctgggcgtgctctcgttaggctttgccctggtgctggatgcccatgagaacctgctactggctgagggcacgctccggctgctgacacgcctcctccttgaccacctccggctgctggcgcccagcaccagccttctgctgcgggctgaccgcattgagggcatcctcacccgcttcctgccacatggtcagctgcttttcctcaacgaccagtttgtccaaggcctggagaaggaattcagtgccgcttggccccgctgattcctcgttgggatggtgcttctgagggcaggcagagggtagacacacagccagatgaagcttggcatctccctcctacccagcagctctgatgtgctgctataccaggacaagtgggtgacacaagcctgcagaaagggggctgggcagagggtggaggaggtcctgcctgtcctcaggttagtggaaccacagaacttcctgagcctagagctgctgtgttacttagaccgctgccgtgcggcagccacgcttgtccttgaacccaccttcctccatccctgccagccgatagtgctagggtgaggagctgcctggagctcaccccgctcttcttccaaacccacagtcaaggccaggcgcggtggctcacgcctgtaatcccagcactttgcggggctgaggtggttggaccacctcaggtcgggagttcaagaccagcctggccaacatagtgaaaccccatctctactaaaaatacaaaaattagctgggtgtatggcgcccacctgtaatcctagctgctcagggggctgagtcatgggaatcacttgaacctgggaggcagagtttgcagtgagccgagagtgcgccacttcactccagcctgggcaacagagtgagactccatctcaaaaaaaaaaaaaaaatcccacagtcatcgaaacacaaaaggggtctcagactcccctgagggtggaggagctgtgcctgcatgctggcaggccacagcccctggctttgtgcccacttaggcagtattatcaacaaggtcctgctcagtgtccagcccccgctgagttcagaaatgcatctgccaatcagcagcaggattctgcagctccttttgtgccaagcccgttcccaccaggcaggctcgagataaagtcatcacagccttccctcatctgcagggagagaagttgctgtcagatgaatgtgagcagtctagcctggatgacatatttttcgttttgaattaaaagcactggctgtgtgattttaccctctttctgtgagtttgatgcgtgcatcctgctcctatgagtgagtgcctctctggatggccccaaagctgcgtgtctgagctttcgtggtcaaggatccccctaggaggcttcttgggatgcctccatctctcatccccacctcacctctgtctccttagaggcctcctttggatggtggcacacatttctccaccaaagtatatgtcacaggtggcaggtggctgtggcagagccgtctgagaagcagtgcttgggctgagaattggtgcgagtggtttatgtggggtgggcggtgatcccgggaagcaggaaggggacacagtcctcgtgaatgcttgtcaagcctattaggactgtggtagggagctgagtgcctctagggggctgcacacagcagttgcctctgaattacctcacctgagaggtggcggctgtgggtgtttgcctactgcctttagtcagtggttacaggttgatcccagggtgcatacattccctggctctttctgcccctgagaaaaagccttcaggcaatgtggagctgggcctgcctgcaccatgttgagtcccaaagggatatgggtggggtaccaaaagtcggtggttaggaggtcttcaatcagcagcttctagtgaaggtttaaacttactcagttgggggcggggggtgggggaaaaaccacttcagtttacattgattttcatgatcttcctgttaccaaggaaggtgaggctttcttggcagaacgagcctcctaggtgctcagctctcatgcttgccatccatcagttgccctttagcatccaggatggacccaactacacccactttggaggcagcactgatgattagcccttccaagtccatggccaaggccaccagccatgccaggccttctaccaccactgtcaacataattgggatgaggccaccttttccattttatggtgccacaaaccaccttgaccatgaagacctaaagggatgttactctgtgtgtgtggccaagtcccaccagtggaaatgtcccacaggcctctagtagggacaccccttccctatacattctgttctcctggcccacccctcaccccaggctggcggtcctggtggattggctgtgttctcagggaacaggccattttgtcctctatggaaaggctcaagcttactgatctgaattctttctgcctttttttcaaacggaacttaaggaagaggttgagactctgctcccctgggagctgtgggaagttgaggttaggcgtggctggtggcctggttctcatgaggtggggcaaactgatggacaagagaatagtagagactgagaccacaccgtggggctgctgagctccagttcctgtccagctggaccagggttttcttaaccagatgagcttgcccagcacccttcccacacttcacacttctgccccagcctcttgggctgggtttccaccacaatttatgctcaccatatatttatcgagcctcccttgggcctgatgctctgctgggtgcaatgcaggatacagaatgaccccaaagttccaggagagacagagctaaggccaggtgactgcagatgactgcaaagcagcaatggtttgagcatccctgaattgctgctcacaagtgctttaaacacctaaaggaagaaggggcacttcagtgacgaaggccaagtgaaggagccaggatttagaactaaaagtgagatggctatggaagcaaacttgcctccctctccaagcctcttccctttcttctccctgccccaggaaccctggccaaaccacatatccctcagcttcttgagagaactagagactttgagcagctagtagtgttaccagtgtacctccacaaacactcctgggacaacagatgatgacaggagggcagtagagcccagagaagagagcttacctggaaggaggaagaagtcacaggttttgttttgttttgttttaggcggagtttctctttgttgcccaggctggagtgcagtggcgcaatctcggctcattgcaagctccgcctcccagattcacgccattctgtctcagcctcccaagtagctgggactacaggtgcctgccaccacgtccggttaagtttttctatttttagtagagacggggtttcaccgtgttagccaggttggtctacatctcctgaccttgtgatccgcccgccgtggcctctcaaagtaccgggattataggcgtgagccaccacgactgactggcatgaagtcacaggttttaaggcaggaactggcctgcatgtatgtgggtcactgattgggtcacatacactgcatgtatgtgagccctgggatgggattggatcatcttgtctcctttagggcagggtgtttttttctagccctgtggtgctgcgcactgtccagcatccccccagggctcaatgttttcttttctttttcttttttttttttttttgagatggagtctcactctgttgctcaggctggagtgcagtggtgcaatcttggctcactgcaacctctgcctcctgggttcaagcaattctaccgcctcagcctcccaagtagctgggattacaagcatgtgccaccatgcctggctaatttttgtatctttagtagagacagggtttcaccgtgttggccaggctggtctcgaactccttacctcaggtgatccacccatattggcctcccaaagtgctgagattacaggtgtgagccaccatgcctggcctcaatcttttcttttaaacaattattcctatattttattgtaatgcagttaaccgtgtttgtcagattcaatactctgtgacccgttaaccaagtctctgtatgtttattactgcaattcaagtggccgtgaccgttttcttaaatatactttatttgtttagtgcaattttaggttcacagtaaaactgagcagagggtacagagagttctcatttactccctgtccccacacatgcacagcctcccttatcaccaacactgggcaccagagtggtcatttgttacaactgatggaccttcattgacacgtcactatcaccagagtccatagtttacattagggttcactcttggggtggtacattctataggtttggatgtattttcagtgacatgcatctaccattatagtatcatacagaagagtttccctgcccgaacagtcctctgctgcacctgttcattcttccctcccctcaacccctagcaaccattgatccttttactgcttccatagttttgccttttccagaatgttgtgtagttagattcatactgtatatgtagccttttcagattgacttccttcacttagtaatgtacatttaagattccttcaagtcttttcatggctgaatcatgagcttgacagctcattttggaagtactgctgaatagtattccattatgtggatgtacattatctgttcacctactgaaggacatcttggttgcttccaagttttggcaattatgaatacaactgctacaaac

SEQ ID NO: 105034 - DNA, 2901 bp, Homo sapiens
  Payload ID: 612
  Gene Symbol: AP5Z1
  Gene Name: adaptor-related protein complex 5, zeta 1 subunit
  Uniprot ID: O43299
  ENST ID: ENST00000348624
  CDS Start-End: 95-2518
tgacgcggtcccggaagttgaccggggtgcggagctcctgggctgcagctcctggagtttccgaggttcgtgcgcgtctggtggcggcggcgtgatgttctcggcaggagcggagagtttgctccaccaggccagggagatccaggacgaggagctgaagaagttctgttcccggatctgtaaactgctgcaggcggaggacttggggccggacaccctcgactccctgcagaggctcttcctcatcatctcagccacgaagtacagccggaggctggagaagacatgcgtagacctgctgcaggccaccctcggcctgcctgcatgccccgagcagctccaggtgctttgcgccgccatcctgcgagagatgtccccctctgacagcctcagcctggcctgggaccacacgcagaacagccggcagctgagcctggtggcctccgttctcttggcccagggtgacagaaacgaggaggtcagagccgtgggccagggcgtgctacgagcgctggagagccggcagcctgagggacccagcctcagacacctcctccccgtcatggccaaggtcgtggtcctcagcccgggcaccctccaggaggaccaggccaccctgctcagcaagcggctggtcgactggctgcgctacgccagcctccagcaagggctcccacactccggcggcttcttctccacgcccagggcccggcagccgggccccgtcaccgaggtggacggggcggtagccacagacttcttcacggtgctctccagcggccaccgcttcacagacgaccagtggctgaacgtgcaggccttctctatgctgcgggcgtggctgctgcacagcggccccgagggcccgggcaccctggacacagatgacaggtcagagcaggagggctccactctgtcggtgatctccgccacctcctctgccggccgcctgctgccgccccgggagcggcttcgggaggtggccttcgagtactgccagcgcctcattgagcaaagtaaccgacgagccctgaggaagggggactccgacctgcagaaagcttgcctggtggaggccgtgctggtgctggacgtgctgtgccggcaggacccgtccttcctgtaccgaagtctctcctgcctgaaggccctgcacgggcgggtgcgcggggacccggcctctgtgcgggtgctgctgcccctcgcccacttcttcctgagccacggggaagcggctgcagtggactcggaagccgtctaccagcacctgttcaccaggatcccggtggagcagttccacagccccatgctggcctttgaattcatccagttctgcagggacaacctccacctgttcagcgggcacctcagcaccctcagattgagcttccccaacctctttaagttcctggcctggaacagcccacccctcacctccgagtttgtggcgctcctcccggccctggtggacgctggcacagccctggagatgctgcacgcgctgctggacctgccctgcttgacggcggtgctggacctgcagctcaggtcagcaccggctgcatccgagaggccactctgggacacctctctcagggcccccagctgcctggaggccttccgggacccgcagttccagggtcttttccaatacctgctgcgccccaaggccagtggcgccactgagaggttggcgccactccaccagctgctgcagcccatggccggctgtgcccgcgtggcccagtgtgcccaggccgtgcccacgctgctgcaggcattcttctcagcagtgacccaggtggctgacgggtccctgatcaaccagctggcgctgctgctcctgggcaggagcgactcgctctacccggccccagggtacgctgccggtgtgcacagtgtgctgagttctcagttcctggccctgtgtacgctgaaaccctccctggtggtggagctggcaagagacctgctggagttcctgggcagcgtgaatggtctctgcagcagggcgagcctcgtcaccagcgtggtgtgggccatcggcgagtacctgtcggtgacctacgatcggaggtgcaccgtggagcagatcaacaagttcttcgaagccctggaggctctgctattcgaggtcacccagtgccgcccctctgctgccctgcccaggtgtcccccccaggtggtcaccgtgctgatgaccacgctgacgaagctggcctcccggagccaagatctgatccccagggcctctttattgctgtcaaagatgaggaccctggctcacagtccagccaccagctccacgcacagcgaggagggcgcggaagccatccgtacccgggccacagagctgctgaccctgctgaagatgcctagcgtggcccagtttgtgctcacacccagcacggaggtgtgcagcccccgctatcaccgcgatgccaacacggccctgcccctggccctgcgcacggtcagccggctggtggagagggaggccggcctcatgccagggtgaagggacagtggccagggacttcggtgcagattaagagcctgggcagccagcttgctactgaggccaggctgataggagctcaggagggcgcgggagtcctgggagaggaggcaaggcccacggtgggcttggcaccctcacagacacgcggggctggcccccctgctcaccctctgggctttgtctccgagccttttgctcccaggcaacactgagctgagctgaggggtgccatggagcggctctgattggaggcttgaggccctgtggctgggtcgggtggaggctgctgggtctgtttcctagtcttttgtttttggacagttgatgggcaagaagagctgcagtaaaagtaaatctcctttaataagcgtctgtatgaa

SEQ ID NO: 105035 - DNA, 6591 bp, Homo sapiens
  Payload ID: 613
  Gene Symbol: ASXL1
  Gene Name: additional sex combs like transcriptional regulator 1
  ENST ID: ENST00000306058
  CDS Start-End: 1-4611
atgggggttgtgaattttgtgttcagagcgtcagaggacttgcaggtattagaaaactactcggatgctccaatgacaccaaaacagattctgcaggtcatagaggcagaaggactaaaggaaatgagtgggacttcccctctcgcatgcctcaatgctatgctacattccaattcaagaggaggagaggggttgttttataaactgcctggccgaatcagccttttcacgctcaagaaggatgccctgcagtggtctcgccatccagctacagtggagggagaggagccagaggacacggctgatgtggagagctgtgggtctaatgaagccagcactgtgagtggtgaaaacgatgtatctcttgatgaaacatcttcgaacgcatcctgttctacagaatctcagagtcgacctctttccaatcccagggacagctacagagcttcctcacaggcgaacaaacaaaagaaaaagactggggtgatgctgcctcgagttgtcctgactcctctgaaggtaaacggggcccacgtggaatctgcatcagggttctcgggctgccacgccgatggcgagagcggcagcccgtccagcagcagcagcggctctctggccctgggcagcgctgctattcgtggccaggccgaggtcacccaggaccctgccccgctcctgagaggcttccggaagccagccacaggtcaaatgaagcgcaacagaggggaagaaatagattttgagacacctgggtccattcttgtcaacaccaacctccgtgccctgatcaactctcggaccttccatgccttaccatcacacttccagcagcagctcctcttcctcctgcctgaagtagacagacaggtggggacggatggcctgttgcgtctcagcagcagtgcactaaataacgagttttttacccatgcggctcagagctggcgggagcgcctggctgatggtgaatttactcatgagatgcaagtcaggatacgacaggaaatggagaaggaaaagaaggtggaacaatggaaagaaaagttctttgaagactactatggacagaagctgggtttgaccaaagaagagtcattgcagcagaacgtgggccaggaggaggctgaaatcaaaagtggcttgtgtgtcccaggagaatcagtgcgtatacagcgtggtccagccacccgacagcgagatgggcattttaagaaacgctctcggccagatctccgaaccagagccagaaggaatctgtacaaaaaacaggagtcagaacaagcaggggttgctaaggatgcaaaatctgtggcctcagatgttcccctctacaaggatggggaggctaagactgacccagcagggctgagcagtccccatctgccaggcacatcctctgcagcacccgacctggagggtcccgaattcccagttgagtctgtggcttctcggatccaggctgagccagacaacttggcacgtgcctctgcatctccagacagaattcctagcctgcctcaggaaactgtggatcaggaacccaaggatcagaagaggaaatcctttgagcaggcggcctctgcatcctttcccgaaaagaagccccggcttgaagatcgtcagtcctttcgtaacacaattgaaagtgttcacaccgaaaagccacagcccactaaagaggagcccaaagtcccgcccatccggattcaactttcacgtatcaaaccaccctgggtggttaaaggtcagcccacttaccagatatgcccccggatcatccccaccacggagtcctcctgccggggttggactggcgccaggaccctcgcagacattaaagcccgtgctctgcaggtccgaggggcgagaggtcaccactgccatagagaggcggccaccactgccatcggaggggggggtggcccgggtggaggtggcggcggggccaccgatgagggaggtggcagaggcagcagcagtggtgatggtggtgaggcctgtggccaccctgagcccaggggaggcccgagcacccctggaaagtgtacgtcagatctacagcgaacacaactactgccgccttatcctctaaatggggagcatacccaggccggaactgccatgtccagagctaggagagaggacctgccttctctgagaaaggaggaaagctgcctactacagagggctacagttggactcacagatgggctaggagatgcctcccaactccccgttgctcccactggggaccagccatgccaggccttgcccctactgtcctcccaaacctcagtagctgagagattagtggagcagcctcagttgcatccggatgttagaactgaatgtgagtctggcaccacttcctgggaaagtgatgatgaggagcaaggacccaccgttcctgcagacaatggtcccattccgtctctagtgggagatgatacattagagaaaggaactggccaagctcttgacagtcatcccactatgaaggatcctgtaaatgtgacccccagttccacacctgaatcctcaccgactgattgcctgcagaacagagcatttgatgacgaattagggcttggtggctcatgccctcctatgagggaaagtgatactagacaagaaaacttgaaaaccaaggctctcgtttctaacagttctttgcattggatacccatcccatcgaatgatgaggtagtgaaacagcccaaaccagaatccagagaacacataccatctgttgagccccaggttggagaggagtgggagaaagctgctcccacccctcctgcattgcctggggatttgacagctgaggagggtctagatcctcttgacagccttacttcactctggactgtgccatctcgaggaggcagtgacagcaatggcagttactgtcaacaggtggacattgaaaagctgaaaatcaacggagactctgaagcactgagtcctcacggtgagtccacggatacagcctctgactttgaaggtcacctcacggaggacagcagtgaggctgacactagagaagctgcagtgacaaagggatcttcggtggacaaggatgagaaacccaattggaaccaatctgccccactgtccaaggtgaatggtgacatgcgtctggttacaaggacagatgggatggttgctcctcagagctgggtgtctcgagtatgtgcggtccgccaaaagatcccagattccctactgctggccagtactgagtaccagccaagagccgtgtgcctgtccatgcctgggtcctcagtggaggccactaacccacttgtgatgcagttgctgcagggtagcttgcccctagagaaggttcttccaccagcccacgatgacagcatgtcagaatccccacaagtaccacttacaaaagaccagagccatggctcgctacgcatgggatctttacatggtcttggaaaaaacagtggcatggttgatggaagcagccccagttctttaagggctttgaaggagcctcttctgccagatagctgtgaaacaggcactggtcttgccaggattgaggccacccaggctcctggagcaccccaaaagaattgcaaggcagtcccaagttttgactccctccatccagtgacaaatcccattacatcctctaggaaactggaagaaatggattccaaagagcagttctcttcctttagttgtgaagatcagaaggaagtccgtgctatgtcacaggacagtaattcaaatgctgctccaggaaagagcccaggagatcttactacctcgagaacacctcgtttctcatctccaaatgtgatctcctttggtccagagcagacaggtcgggccctgggtgatcagagcaatgttacaggccaagggaagaagctttttggctctgggaatgtggctgcaacccttcagcgccccaggcctgcggacccgatgcctcttcctgctgagatccctccagtttttcccagtgggaagttgggaccaagcacaaactccatgtctggtggggtacagactccaagggaagactgggctccaaagccacatgcctttgttggcagcgtcaagaatgagaagacttttgtggggggtcctcttaaggcaaatgccgagaacaggaaagctactgggcatagtcccctggaactggtgggtcacttggaagggatgccctttgtcatggacttgcccttctggaaattaccccgagagccagggaaggggctcagtgagcctctggagccttcttctctcccctcccaactcagcatcaagcaggcattttatgggaagctttctaaactccaactgagttccaccagctttaattattcctctagctctcccacctttcccaaaggccttgctggaagtgtggtgcagctgagccacaaagcaaactttggtgcgagccacagtgcatcactttccttgcaaatgttcactgacagcagcacggtggaaagcatctcgctccagtgtgcgtgcagcctgaaagccatgatcatgtgccaaggctgcggtgcgttctgtcacgatgactgtattggaccctcaaagctctgtgtattgtgccttgtggtgagataataaattatggccatgggaaacattgtatatttagtgtgtgtattttgataatgattgatcttaaatctgtatacagaatatcattgatataatactctttaggcaggagcactcttgccttcccccaaaatttacactgctaaagccctctgtcacttggcgacccttctggtcttgctggaggggtttcctgggtataacccattgggctgcccaaggccagccagcctgagctctcctgcaagacagagcctgatgtggcacggagtggggttgcggggggtggggggactgcctgactcccagagggacttgaaactgaagcaagaaggttgcattctccaccaagggagttaacctacctgaactaagtagaaatgccagtcttccactaccccctccctgccatcttttcttctgctactttggggagttgatggccaggaaagaagccagcacagggttaaagtaactcctggcattgcccaccagggggctggtgcacctgctgacctcagggtcacagttgagtcatttgccagttgacggagcaagtttgaccttggttctgttgctgaagcaaatttggaacttttctgtctcagtgtgatccactaacccacaggatcatttggaaccttgaatagctctgcttggacaatggggttggggaatagggttgtctttcctatgaaaatgccatctgtagaccttgtgagtcagccgtccagatgtttgcaggtgaattcctctgcttgacatcctccctgtcactttggaccctatgggagtgggcatctccacgcacctgtgtatgtgaaagtcattttacatttcaaagcagtgtgtgtttcttatttttatatttttaactctttattcttggatgtataaagtgaactttttggcttctgtaagtatgctctatgcacctctaatgttttatcatgtatttatatgttgtacacagtactggctgattctgtaaatggatgtattgtacagagaacatgaacgtctcttcctaattttacatcttcagcatcattgcattaaagtggtgtaatctccttctctacatctgttgtcagagccactgagtgctgtgctgctcgacgtgagggtgaaatgattgacttgtgacctgccaggttgcccgatgccctgttgggtcaccggctggacctgctgcagcctgcagagccacagtcagcctgcccacatgccaccgagcaaacgcatcttgcttttcacatctctcctcctacagccttaatggctgcttgctgccatatgtgacaaatcaccaccaccagtgttaagtgcttctggattcatgggtgagttccctgggcagcccccaggaaggccttccagatctggctccagggtcaccacctgtcacagcaatacctgggaccatgctctcctgggactgtgaggctccttttgacgtacttttgacatcaggcaggtttgggaagaaacaaagccatgcctgctcctgcctctctcccaacatgtttccagcaagtagatgcccctgtgtgtgttttcccttgccttgtttcctgccttatatcttgtatttcgacttattacagagttgagggttcttgcttaatttagatcaagtataaaatttgtatgacttcaagtctcattttatctgaaaggtttttttctcatttaatctgatgtggcattttcgtcatctgaagcatgagtgacaagttgggaatgatgtggtgatttagaatgcagtattggccaagtccaagttgtcaacttaagcgtctgtttaccaaagaccgggaacaggggcccaaacatgtccagtcctcttcttccctctgctggaacctttggggacactcaagggtacagtttgacactgatctggtccatgaggctgcccagagaaagcactgcttctgtatgtctcttgtggtattggaacaataaacccgtacaacctgc

SEQ ID NO: 105036 - DNA, 7031 bp, Homo sapiens
  Payload ID: 613
  Gene Symbol: ASXL1
  Gene Name: additional sex combs like transcriptional regulator 1
  Uniprot ID: Q8IXJ9
  ENST ID: ENST00000375687
  CDS Start-End: 425-5050
cggcagacacgcacgcacccgggcgccgaagggaaagccgcgtctcgccctcccgccccgccgtcggtcctgtctcagtccctcagcagagcgggaaagcggaggccggagccgtgacctctgaccccgtggttatgcggagccgccgcattccttagcgatcgcggggcagccgccgctgccgccgtgggcgactgacgcagcgcgggcgcgtggagccgccgccgcccctcccccaccgccgctctcgcgccagccggtccccgcgtgcccgccccttctccccggccgcacccgagacctcgcgcgccgccgctgccacgcgccccccccaccgccgccgccgccccagccccgcgccaccgccccagcccgcccagcccggaggtcccgcgtggagctgccgccgccgccggggagaaggatgaaggacaaacagaagaagaagaaggagcgcacgtgggccgaggccgcgcgcctggtattagaaaactactcggatgctccaatgacaccaaaacagattctgcaggtcatagaggcagaaggactaaaggaaatgagaagtgggacttcccctctcgcatgcctcaatgctatgctacattccaattcaagaggaggagaggggttgttttataaactgcctggccgaatcagccttttcacgctcaagaaggatgccctgcagtggtctcgccatccagctacagtggagggagaggagccagaggacacggctgatgtggagagctgtgggtctaatgaagccagcactgtgagtggtgaaaacgatgtatctcttgatgaaacatcttcgaacgcatcctgttctacagaatctcagagtcgacctctttccaatcccagggacagctacagagcttcctcacaggcgaacaaacaaaagaaaaagactggggtgatgctgcctcgagttgtcctgactcctctgaaggtaaacggggcccacgtggaatctgcatcagggttctcgggctgccacgccgatggcgagagcggcagcccgtccagcagcagcagcggctctctggccctgggcagcgctgctattcgtggccaggccgaggtcacccaggaccctgccccgctcctgagaggcttccggaagccagccacaggtcaaatgaagcgcaacagaggggaagaaatagattttgagacacctgggtccattcttgtcaacaccaacctccgtgccctgatcaactctcggaccttccatgccttaccatcacacttccagcagcagctcctcttcctcctgcctgaagtagacagacaggtggggacggatggcctgttgcgtctcagcagcagtgcactaaataacgagttttttacccatgcggctcagagctggcgggagcgcctggctgatggtgaatttactcatgagatgcaagtcaggatacgacaggaaatggagaaggaaaagaaggtggaacaatggaaagaaaagttctttgaagactactatggacagaagctgggtttgaccaaagaagagtcattgcagcagaacgtgggccaggaggaggctgaaatcaaaagtggcttgtgtgtcccaggagaatcagtgcgtatacagcgtggtccagccacccgacagcgagatgggcattttaagaaacgctctcggccagatctccgaaccagagccagaaggaatctgtacaaaaaacaggagtcagaacaagcaggggttgctaaggatgcaaaatctgtggcctcagatgttcccctctacaaggatggggaggctaagactgacccagcagggctgagcagtccccatctgccaggcacatcctctgcagcacccgacctggagggtcccgaattcccagttgagtctgtggcttctcggatccaggctgagccagacaacttggcacgtgcctctgcatctccagacagaattcctagcctgcctcaggaaactgtggatcaggaacccaaggatcagaagaggaaatcctttgagcaggcggcctctgcatcctttcccgaaaagaagccccggcttgaagatcgtcagtcctttcgtaacacaattgaaagtgttcacaccgaaaagccacagcccactaaagaggagcccaaagtcccgcccatccggattcaactttcacgtatcaaaccaccctgggtggttaaaggtcagcccacttaccagatatgcccccggatcatccccaccacggagtcctcctgccggggttggactggcgccaggaccctcgcagacattaaagcccgtgctctgcaggtccgaggggcgagaggtcaccactgccatagagaggcggccaccactgccatcggaggggggggtggcccgggtggaggtggcggcggggccaccgatgagggaggtggcagaggcagcagcagtggtgatggtggtgaggcctgtggccaccctgagcccaggggaggcccgagcacccctggaaagtgtacgtcagatctacagcgaacacaactactgccgccttatcctctaaatggggagcatacccaggccggaactgccatgtccagagctaggagagaggacctgccttctctgagaaaggaggaaagctgcctactacagagggctacagttggactcacagatgggctaggagatgcctcccaactccccgttgctcccactggggaccagccatgccaggccttgcccctactgtcctcccaaacctcagtagctgagagattagtggagcagcctcagttgcatccggatgttagaactgaatgtgagtctggcaccacttcctgggaaagtgatgatgaggagcaaggacccaccgttcctgcagacaatggtcccattccgtctctagtgggagatgatacattagagaaaggaactggccaagctcttgacagtcatcccactatgaaggatcctgtaaatgtgacccccagttccacacctgaatcctcaccgactgattgcctgcagaacagagcatttgatgacgaattagggcttggtggctcatgccctcctatgagggaaagtgatactagacaagaaaacttgaaaaccaaggctctcgtttctaacagttctttgcattggatacccatcccatcgaatgatgaggtagtgaaacagcccaaaccagaatccagagaacacataccatctgttgagccccaggttggagaggagtgggagaaagctgctcccacccctcctgcattgcctggggatttgacagctgaggagggtctagatcctcttgacagccttacttcactctggactgtgccatctcgaggaggcagtgacagcaatggcagttactgtcaacaggtggacattgaaaagctgaaaatcaacggagactctgaagcactgagtcctcacggtgagtccacggatacagcctctgactttgaaggtcacctcacggaggacagcagtgaggctgacactagagaagctgcagtgacaaagggatcttcggtggacaaggatgagaaacccaattggaaccaatctgccccactgtccaaggtgaatggtgacatgcgtctggttacaaggacagatgggatggttgctcctcagagctgggtgtctcgagtatgtgcggtccgccaaaagatcccagattccctactgctggccagtactgagtaccagccaagagccgtgtgcctgtccatgcctgggtcctcagtggaggccactaacccacttgtgatgcagttgctgcagggtagcttgcccctagagaaggttcttccaccagcccacgatgacagcatgtcagaatccccacaagtaccacttacaaaagaccagagccatggctcgctacgcatgggatctttacatggtcttggaaaaaacagtggcatggttgatggaagcagccccagttctttaagggctttgaaggagcctcttctgccagatagctgtgaaacaggcactggtcttgccaggattgaggccacccaggctcctggagcaccccaaaagaattgcaaggcagtcccaagttttgactccctccatccagtgacaaatcccattacatcctctaggaaactggaagaaatggattccaaagagcagttctcttcctttagttgtgaagatcagaaggaagtccgtgctatgtcacaggacagtaattcaaatgctgctccaggaaagagcccaggagatcttactacctcgagaacacctcgtttctcatctccaaatgtgatctcctttggtccagagcagacaggtcgggccctgggtgatcagagcaatgttacaggccaagggaagaagctttttggctctgggaatgtggctgcaacccttcagcgccccaggcctgcggacccgatgcctcttcctgctgagatccctccagtttttcccagtgggaagttgggaccaagcacaaactccatgtctggtggggtacagactccaagggaagactgggctccaaagccacatgcctttgttggcagcgtcaagaatgagaagacttttgtggggggtcctcttaaggcaaatgccgagaacaggaaagctactgggcatagtcccctggaactggtgggtcacttggaagggatgccctttgtcatggacttgcccttctggaaattaccccgagagccagggaaggggctcagtgagcctctggagccttcttctctcccctcccaactcagcatcaagcaggcattttatgggaagctttctaaactccaactgagttccaccagctttaattattcctctagctctcccacctttcccaaaggccttgctggaagtgtggtgcagctgagccacaaagcaaactttggtgcgagccacagtgcatcactttccttgcaaatgttcactgacagcagcacggtggaaagcatctcgctccagtgtgcgtgcagcctgaaagccatgatcatgtgccaaggctgcggtgcgttctgtcacgatgactgtattggaccctcaaagctctgtgtattgtgccttgtggtgagataataaattatggccatgggaaacattgtatatttagtgtgtgtattttgataatgattgatcttaaatctgtatacagaatatcattgatataatactctttaggcaggagcactcttgccttcccccaaaatttacactgctaaagccctctgtcacttggcgacccttctggtcttgctggaggggtttcctgggtataacccattgggctgcccaaggccagccagcctgagctctcctgcaagacagagcctgatgtggcacggagtggggttgcggggggtggggggactgcctgactcccagagggacttgaaactgaagcaagaaggttgcattctccaccaagggagttaacctacctgaactaagtagaaatgccagtcttccactaccccctccctgccatcttttcttctgctactttggggagttgatggccaggaaagaagccagcacagggttaaagtaactcctggcattgcccaccagggggctggtgcacctgctgacctcagggtcacagttgagtcatttgccagttgacggagcaagtttgaccttggttctgttgctgaagcaaatttggaacttttctgtctcagtgtgatccactaacccacaggatcatttggaaccttgaatagctctgcttggacaatggggttggggaatagggttgtctttcctatgaaaatgccatctgtagaccttgtgagtcagccgtccagatgtttgcaggtgaattcctctgcttgacatcctccctgtcactttggaccctatgggagtgggcatctccacgcacctgtgtatgtgaaagtcattttacatttcaaagcagtgtgtgtttcttatttttatatttttaactctttattcttggatgtataaagtgaactttttggcttctgtaagtatgctctatgcacctctaatgttttatcatgtatttatatgttgtacacagtactggctgattctgtaaatggatgtattgtacagagaacatgaacgtctcttcctaattttacatcttcagcatcattgcattaaagtggtgtaatctccttctctacatctgttgtcagagccactgagtgctgtgctgctcgacgtgagggtgaaatgattgacttgtgacctgccaggttgcccgatgccctgttgggtcaccggctggacctgctgcagcctgcagagccacagtcagcctgcccacatgccaccgagcaaacgcatcttgcttttcacatctctcctcctacagccttaatggctgcttgctgccatatgtgacaaatcaccaccaccagtgttaagtgcttctggattcatgggtgagttccctgggcagcccccaggaaggccttccagatctggctccagggtcaccacctgtcacagcaatacctgggaccatgctctcctgggactgtgaggctccttttgacgtacttttgacatcaggcaggtttgggaagaaacaaagccatgcctgctcctgcctctctcccaacatgtttccagcaagtagatgcccctgtgtgtgttttcccttgccttgtttcctgccttatatcttgtatttcgacttattacagagttgagggttcttgcttaatttagatcaagtataaaatttgtatgacttcaagtctcattttatctgaaaggtttttttctcatttaatctgatgtggcattttcgtcatctgaagcatgagtgacaagttgggaatgatgtggtgatttagaatgcagtattggccaagtccaagttgtcaacttaagcgtctgtttaccaaagaccgggaacaggggcccaaacatgtccagtcctcttcttccctctgctggaacctttggggacactcaagggtacagtttgacactgatctggtccatgaggctgcccagagaaagcactgcttctgtatgtctcttgtggtattggaacaataaacccgtacaacctgca

SEQ ID NO: 105037 - DNA, 812 bp, Homo sapiens
  Payload ID: 613
  Gene Symbol: ASXL1
  Gene Name: additional sex combs like transcriptional regulator 1
  ENST ID: ENST00000375689
  CDS Start-End: 183-428
cagactgggctgtttgccttcagaagctggactggaaattggtattttgaggagaactgaatccactttgcaaagaatgtatgttggacaaagacaaagtatctctgttgggagacgttgttcactgaggatttagcaagggagagcgtaacttgagtgtttgaagccgtctcgttcaaccgatgggggttgtgaattttgtgttcagagcgtcagaggacttgcaggtattagaaaactactcggatgctccaatgacaccaaaacagattctgcaggtcatagaggcagaaggactaaaggaaatgagaagtgggacttcccctctcgcatgcctcaatgctatgctacattccaattcaagaggaggagaggggttgttttataaactgcctggccgaatcagccttttcacgctcaaggtgtgagccactgcaccaggccccttcatcttaattttaatatatctttgaataaacaccattgtatgaacctgctgtaagcttgggagtggtctgttagtctacagcttgtgtctgagatgtgctaattgaatatttgctcagtacctcatcttaactgcctttggctttatgttgcttatccttcatagtatcttgttcattggccttttacatccataggcatcacttctctgatattcgttgtgctcttttaatggattaatggtttgcttggttggttcctctagttagactgtaaactccttgagagcagagtctgtattttattaattacccacagtactaggtacatagttgccttcaataaatatatatttaatgaacgaa

SEQ ID NO: 105038 - DNA, 1068 bp, Homo sapiens
  Payload ID: 613
  Gene Symbol: ASXL1
  Gene Name: additional sex combs like transcriptional regulator 1
  ENST ID: ENST00000542461
  CDS Start-End: 433-690
cacacccacggcagacacgcacgcacccgggcgccgaagggaaagccgcgtctcgccctcccgccccgccgtcggtcctgtctcagtccctcagcagagcgggaaagcggaggccggagccgtgacctctgaccccgtggttatgcggagccgccgcattccttagcgatcgcggggcagccgccgctgccgccgtgggcgactgacgcagcgcgggcgcgtggagccgccgccgcccctcccccaccgccgctctcgcgccagccggtccccgcgtgcccgccccttctccccggccgcacccgagacctcgcgcgccgccgctgccacgcgccccccccaccgccgccgccgccccagccccgcgccaccgccccagcccgcccagcccggaggtcccgcgtggagctgccgccgccgccggggagaaggatgaaggacaaacagaagaagaagaaggagcgcacgtgggccgaggccgcgcgcctggtattagaaaactactcggatgctccaatgacaccaaaacagattctgcaggtcatagaggcagaaggactaaaggaaatgaggagtgggacttcccctctcgcatgcctcaatgctatgctacattccaattcaagaggaggagaggggttgttttataaactgcctggccgaatcagccttttcacgctcaaggtgtgagccactgcaccaggccccttcatcttaattttaatatatctttgaataaacaccattgtatgaacctgctgtaagcttgggagtggtctgttagtctacagcttgtgtctgagatgtgctaattgaatatttgctcagtacctcatcttaactgcctttggctttatgttgcttatccttcatagtatcttgttcattggccttttacatccataggcatcacttctctgatattcgttgtgctcttttaatggattaatggtttgcttggttggttcctctagttagactgtaaactccttgagagcagagtctgtattttattaattacccacagtactaggtacatagttgccttcaataaatatatatttaatg

SEQ ID NO: 105039 - DNA, 296 bp, Homo sapiens
  Payload ID: 613
  Gene Symbol: ASXL1
  Gene Name: additional sex combs like transcriptional regulator 1
  ENST ID: ENST00000497249
  CDS Start-End: 1-223
gtgggccgaggccgcgcgcctggtattagaaaactactcggatgctccaatgacaccaaaacagattctgcaggtcatagaggcagaaggactaaaggaaatgagaagtgggacttcccctctcgcatgcctcaatgctatgctacattccaattcaagaggaggagaggggttgttttataaactgcctggccgaatcagccttttcacgctcaaggtgtgagccactgcaccaggccccttcatcttaattttaatatatctttgaataaacaccattgtatgaacctgctgta

SEQ ID NO: 105040 - DNA, 1034 bp, Homo sapiens
  Payload ID: 613
  Gene Symbol: ASXL1
  Gene Name: additional sex combs like transcriptional regulator 1
  ENST ID: ENST00000555343
  CDS Start-End: 695-868
aattttctctcttattttgaagtgagttttctgcttcaaaggtgttgtgcaaaaaaaaaaaaaatagactgtattgggggggttgacacaaacctgaagtacacctttttctttctcgaagtctgtaaaagttacagatttataaaaactgaaggaatttgggctacagaattttcattggtgcttgctatcctcttccctagtcatttgttgcccagggaacaaaaatagcaattgtttgtatgctgaagttttgtgcttcagtttattttggcctggcatgtgaagtttgaagattttgaggttccgaaatattttttttctgattgagtcaaaattggaagcttgggctagttttcaggatcttgtagaaatttcaggatttctctaacggttctgcacctggaaacaaatataggcctgatggggagtgggagagagctctcgttctcctcctcgacaatgagttttgtgtgttcattgacattctccttggcgttcctgttatgcgggtgtttatgaccctgggcacccaaggaaatttgcttgccagagttttacttgttagagtctctttagattctcgaatttaccgtggtctgaacttcaacatcgaggttgctatttctgttttatcattgactcaacttcaagccaggttatcagggtattagaaaactactcggatgctccaatgacaccaaaacagattctgcaggtcatagaggcagaaggactaaaggaaatgagaagtgggacttcccctctcgcatgcctcaatgctatgctacattccaattcaagaggaggagaggggttgttttataaactgcctggccgaatcagccttttcacgctcaagagatgaagtcttgctatgttggttaaactggtctcaaactcctggcctcaagtgatcttcccaccacagcttcacaaagcactgggatggattacaggtgtgagccactgcaccaggccccttcatcttaattttaatatatctttgaataaacaccattgtatgaacctgc

SEQ ID NO: 105041 - DNA, 7038 bp, Homo sapiens
  Payload ID: 613
  Gene Symbol: ASXL1
  Gene Name: additional sex combs like transcriptional regulator 1
  Uniprot ID: Q8IXJ9
  ENST ID: ENST00000613218
  CDS Start-End: 433-5058
cacacccacggcagacacgcacgcacccgggcgccgaagggaaagccgcgtctcgccctcccgccccgccgtcggtcctgtctcagtccctcagcagagcgggaaagcggaggccggagccgtgacctctgaccccgtggttatgcggagccgccgcattccttagcgatcgcggggcagccgccgctgccgccgtgggcgactgacgcagcgcgggcgcgtggagccgccgccgcccctcccccaccgccgctctcgcgccagccggtccccgcgtgcccgccccttctccccggccgcacccgagacctcgcgcgccgccgctgccacgcgccccccccaccgccgccgccgccccagccccgcgccaccgccccagcccgcccagcccggaggtcccgcgtggagctgccgccgccgccggggagaaggatgaaggacaaacagaagaagaagaaggagcgcacgtgggccgaggccgcgcgcctggtattagaaaactactcggatgctccaatgacaccaaaacagattctgcaggtcatagaggcagaaggactaaaggaaatgaggagtgggacttcccctctcgcatgcctcaatgctatgctacattccaattcaagaggaggagaggggttgttttataaactgcctggccgaatcagccttttcacgctcaagaaggatgccctgcagtggtctcgccatccagctacagtggagggagaggagccagaggacacggctgatgtggagagctgtgggtctaatgaagccagcactgtgagtggtgaaaacgatgtatctcttgatgaaacatcttcgaacgcatcctgttctacagaatctcagagtcgacctctttccaatcccagggacagctacagagcttcctcacaggcgaacaaacaaaagaaaaagactggggtgatgctgcctcgagttgtcctgactcctctgaaggtaaacggggcccacgtggaatctgcatcagggttctcgggctgccacgccgatggcgagagcggcagcccgtccagcagcagcagcggctctctggccctgggcagcgctgctattcgtggccaggccgaggtcacccaggaccctgccccgctcctgagaggcttccggaagccagccacaggtcaaatgaagcgcaacagaggggaagaaatagattttgagacacctgggtccattcttgtcaacaccaacctccgtgccctgatcaactctcggaccttccatgccttaccatcacacttccagcagcagctcctcttcctcctgcctgaagtagacagacaggtggggacggatggcctgttgcgtctcagcagcagtgcactaaataacgagttttttacccatgcggctcagagctggcgggagcgcctggctgatggtgaatttactcatgagatgcaagtcaggatacgacaggaaatggagaaggaaaagaaggtggaacaatggaaagaaaagttctttgaagactactatggacagaagctgggtttgaccaaagaagagtcattgcagcagaacgtgggccaggaggaggctgaaatcaaaagtggcttgtgtgtcccaggagaatcagtgcgtatacagcgtggtccagccacccgacagcgagatgggcattttaagaaacgctctcggccagatctccgaaccagagccagaaggaatctgtacaaaaaacaggagtcagaacaagcaggggttgctaaggatgcaaaatctgtggcctcagatgttcccctctacaaggatggggaggctaagactgacccagcagggctgagcagtccccatctgccaggcacatcctctgcagcacccgacctggagggtcccgaattcccagttgagtctgtggcttctcggatccaggctgagccagacaacttggcacgtgcctctgcatctccagacagaattcctagcctgcctcaggaaactgtggatcaggaacccaaggatcagaagaggaaatcctttgagcaggcggcctctgcatcctttcccgaaaagaagccccggcttgaagatcgtcagtcctttcgtaacacaattgaaagtgttcacaccgaaaagccacagcccactaaagaggagcccaaagtcccgcccatccggattcaactttcacgtatcaaaccaccctgggtggttaaaggtcagcccacttaccagatatgcccccggatcatccccaccacggagtcctcctgccggggttggactggcgccaggaccctcgcagacattaaagcccgtgctctgcaggtccgaggggcgagaggtcaccactgccatagagaggcggccaccactgccatcggaggggggggtggcccgggtggaggtggcggcggggccaccgatgagggaggtggcagaggcagcagcagtggtgatggtggtgaggcctgtggccaccctgagcccaggggaggcccgagcacccctggaaagtgtacgtcagatctacagcgaacacaactactgccgccttatcctctaaatggggagcatacccaggccggaactgccatgtccagagctaggagagaggacctgccttctctgagaaaggaggaaagctgcctactacagagggctacagttggactcacagatgggctaggagatgcctcccaactccccgttgctcccactggggaccagccatgccaggccttgcccctactgtcctcccaaacctcagtagctgagagattagtggagcagcctcagttgcatccggatgttagaactgaatgtgagtctggcaccacttcctgggaaagtgatgatgaggagcaaggacccaccgttcctgcagacaatggtcccattccgtctctagtgggagatgatacattagagaaaggaactggccaagctcttgacagtcatcccactatgaaggatcctgtaaatgtgacccccagttccacacctgaatcctcaccgactgattgcctgcagaacagagcatttgatgacgaattagggcttggtggctcatgccctcctatgagggaaagtgatactagacaagaaaacttgaaaaccaaggctctcgtttctaacagttctttgcattggatacccatcccatcgaatgatgaggtagtgaaacagcccaaaccagaatccagagaacacataccatctgttgagccccaggttggagaggagtgggagaaagctgctcccacccctcctgcattgcctggggatttgacagctgaggagggtctagatcctcttgacagccttacttcactctggactgtgccatctcgaggaggcagtgacagcaatggcagttactgtcaacaggtggacattgaaaagctgaaaatcaacggagactctgaagcactgagtcctcacggtgagtccacggatacagcctctgactttgaaggtcacctcacggaggacagcagtgaggctgacactagagaagctgcagtgacaaagggatcttcggtggacaaggatgagaaacccaattggaaccaatctgccccactgtccaaggtgaatggtgacatgcgtctggttacaaggacagatgggatggttgctcctcagagctgggtgtctcgagtatgtgcggtccgccaaaagatcccagattccctactgctggccagtactgagtaccagccaagagccgtgtgcctgtccatgcctgggtcctcagtggaggccactaacccacttgtgatgcagttgctgcagggtagcttgcccctagagaaggttcttccaccagcccacgatgacagcatgtcagaatccccacaagtaccacttacaaaagaccagagccatggctcgctacgcatgggatctttacatggtcttggaaaaaacagtggcatggttgatggaagcagccccagttctttaagggctttgaaggagcctcttctgccagatagctgtgaaacaggcactggtcttgccaggattgaggccacccaggctcctggagcaccccaaaagaattgcaaggcagtcccaagttttgactccctccatccagtgacaaatcccattacatcctctaggaaactggaagaaatggattccaaagagcagttctcttcctttagttgtgaagatcagaaggaagtccgtgctatgtcacaggacagtaattcaaatgctgctccaggaaagagcccaggagatcttactacctcgagaacacctcgtttctcatctccaaatgtgatctcctttggtccagagcagacaggtcgggccctgggtgatcagagcaatgttacaggccaagggaagaagctttttggctctgggaatgtggctgcaacccttcagcgccccaggcctgcggacccgatgcctcttcctgctgagatccctccagtttttcccagtgggaagttgggaccaagcacaaactccatgtctggtggggtacagactccaagggaagactgggctccaaagccacatgcctttgttggcagcgtcaagaatgagaagacttttgtggggggtcctcttaaggcaaatgccgagaacaggaaagctactgggcatagtcccctggaactggtgggtcacttggaagggatgccctttgtcatggacttgcccttctggaaattaccccgagagccagggaaggggctcagtgagcctctggagccttcttctctcccctcccaactcagcatcaagcaggcattttatgggaagctttctaaactccaactgagttccaccagctttaattattcctctagctctcccacctttcccaaaggccttgctggaagtgtggtgcagctgagccacaaagcaaactttggtgcgagccacagtgcatcactttccttgcaaatgttcactgacagcagcacggtggaaagcatctcgctccagtgtgcgtgcagcctgaaagccatgatcatgtgccaaggctgcggtgcgttctgtcacgatgactgtattggaccctcaaagctctgtgtattgtgccttgtggtgagataataaattatggccatgggaaacattgtatatttagtgtgtgtattttgataatgattgatcttaaatctgtatacagaatatcattgatataatactctttaggcaggagcactcttgccttcccccaaaatttacactgctaaagccctctgtcacttggcgacccttctggtcttgctggaggggtttcctgggtataacccattgggctgcccaaggccagccagcctgagctctcctgcaagacagagcctgatgtggcacggagtggggttgcggggggtggggggactgcctgactcccagagggacttgaaactgaagcaagaaggttgcattctccaccaagggagttaacctacctgaactaagtagaaatgccagtcttccactaccccctccctgccatcttttcttctgctactttggggagttgatggccaggaaagaagccagcacagggttaaagtaactcctggcattgcccaccagggggctggtgcacctgctgacctcagggtcacagttgagtcatttgccagttgacggagcaagtttgaccttggttctgttgctgaagcaaatttggaacttttctgtctcagtgtgatccactaacccacaggatcatttggaaccttgaatagctctgcttggacaatggggttggggaatagggttgtctttcctatgaaaatgccatctgtagaccttgtgagtcagccgtccagatgtttgcaggtgaattcctctgcttgacatcctccctgtcactttggaccctatgggagtgggcatctccacgcacctgtgtatgtgaaagtcattttacatttcaaagcagtgtgtgtttcttatttttatatttttaactctttattcttggatgtataaagtgaactttttggcttctgtaagtatgctctatgcacctctaatgttttatcatgtatttatatgttgtacacagtactggctgattctgtaaatggatgtattgtacagagaacatgaacgtctcttcctaattttacatcttcagcatcattgcattaaagtggtgtaatctccttctctacatctgttgtcagagccactgagtgctgtgctgctcgacgtgagggtgaaatgattgacttgtgacctgccaggttgcccgatgccctgttgggtcaccggctggacctgctgcagcctgcagagccacagtcagcctgcccacatgccaccgagcaaacgcatcttgcttttcacatctctcctcctacagccttaatggctgcttgctgccatatgtgacaaatcaccaccaccagtgttaagtgcttctggattcatgggtgagttccctgggcagcccccaggaaggccttccagatctggctccagggtcaccacctgtcacagcaatacctgggaccatgctctcctgggactgtgaggctccttttgacgtacttttgacatcaggcaggtttgggaagaaacaaagccatgcctgctcctgcctctctcccaacatgtttccagcaagtagatgcccctgtgtgtgttttcccttgccttgtttcctgccttatatcttgtatttcgacttattacagagttgagggttcttgcttaatttagatcaagtataaaatttgtatgacttcaagtctcattttatctgaaaggtttttttctcatttaatctgatgtggcattttcgtcatctgaagcatgagtgacaagttgggaatgatgtggtgatttagaatgcagtattggccaagtccaagttgtcaacttaagcgtctgtttaccaaagaccgggaacaggggcccaaacatgtccagtcctcttcttccctctgctggaacctttggggacactcaagggtacagtttgacactgatctggtccatgaggctgcccagagaaagcactgcttctgtatgtctcttgtggtattggaacaataaacccgtacaacctgc

SEQ ID NO: 105042 - DNA, 5374 bp, Homo sapiens
  Payload ID: 613
  Gene Symbol: ASXL1
  Gene Name: additional sex combs like transcriptional regulator 1
  Uniprot ID: Q8IXJ9
  ENST ID: ENST00000620121
  CDS Start-End: 196-4821
cgtcggtcctgtctcagtccctcagcagagcgggaaagcggaggccggagccgtgacctctgaccccgtggttatgcggagccgccgcattccttagcgatcgcggggcagccgccgctgccgccgtgggcgactgacgcagcgcgggcgcgtggagccgccgccgcccctcccccaccgccgccggggagaaggatgaaggacaaacagaagaagaagaaggagcgcacgtgggccgaggccgcgcgcctggtattagaaaactactcggatgctccaatgacaccaaaacagattctgcaggtcatagaggcagaaggactaaaggaaatgaggagtgggacttcccctctcgcatgcctcaatgctatgctacattccaattcaagaggaggagaggggttgttttataaactgcctggccgaatcagccttttcacgctcaagaaggatgccctgcagtggtctcgccatccagctacagtggagggagaggagccagaggacacggctgatgtggagagctgtgggtctaatgaagccagcactgtgagtggtgaaaacgatgtatctcttgatgaaacatcttcgaacgcatcctgttctacagaatctcagagtcgacctctttccaatcccagggacagctacagagcttcctcacaggcgaacaaacaaaagaaaaagactggggtgatgctgcctcgagttgtcctgactcctctgaaggtaaacggggcccacgtggaatctgcatcagggttctcgggctgccacgccgatggcgagagcggcagcccgtccagcagcagcagcggctctctggccctgggcagcgctgctattcgtggccaggccgaggtcacccaggaccctgccccgctcctgagaggcttccggaagccagccacaggtcaaatgaagcgcaacagaggggaagaaatagattttgagacacctgggtccattcttgtcaacaccaacctccgtgccctgatcaactctcggaccttccatgccttaccatcacacttccagcagcagctcctcttcctcctgcctgaagtagacagacaggtggggacggatggcctgttgcgtctcagcagcagtgcactaaataacgagttttttacccatgcggctcagagctggcgggagcgcctggctgatggtgaatttactcatgagatgcaagtcaggatacgacaggaaatggagaaggaaaagaaggtggaacaatggaaagaaaagttctttgaagactactatggacagaagctgggtttgaccaaagaagagtcattgcagcagaacgtgggccaggaggaggctgaaatcaaaagtggcttgtgtgtcccaggagaatcagtgcgtatacagcgtggtccagccacccgacagcgagatgggcattttaagaaacgctctcggccagatctccgaaccagagccagaaggaatctgtacaaaaaacaggagtcagaacaagcaggggttgctaaggatgcaaaatctgtggcctcagatgttcccctctacaaggatggggaggctaagactgacccagcagggctgagcagtccccatctgccaggcacatcctctgcagcacccgacctggagggtcccgaattcccagttgagtctgtggcttctcggatccaggctgagccagacaacttggcacgtgcctctgcatctccagacagaattcctagcctgcctcaggaaactgtggatcaggaacccaaggatcagaagaggaaatcctttgagcaggcggcctctgcatcctttcccgaaaagaagccccggcttgaagatcgtcagtcctttcgtaacacaattgaaagtgttcacaccgaaaagccacagcccactaaagaggagcccaaagtcccgcccatccggattcaactttcacgtatcaaaccaccctgggtggttaaaggtcagcccacttaccagatatgcccccggatcatccccaccacggagtcctcctgccggggttggactggcgccaggaccctcgcagacattaaagcccgtgctctgcaggtccgaggggcgagaggtcaccactgccatagagaggcggccaccactgccatcggaggggggggtggcccgggtggaggtggcggcggggccaccgatgagggaggtggcagaggcagcagcagtggtgatggtggtgaggcctgtggccaccctgagcccaggggaggcccgagcacccctggaaagtgtacgtcagatctacagcgaacacaactactgccgccttatcctctaaatggggagcatacccaggccggaactgccatgtccagagctaggagagaggacctgccttctctgagaaaggaggaaagctgcctactacagagggctacagttggactcacagatgggctaggagatgcctcccaactccccgttgctcccactggggaccagccatgccaggccttgcccctactgtcctcccaaacctcagtagctgagagattagtggagcagcctcagttgcatccggatgttagaactgaatgtgagtctggcaccacttcctgggaaagtgatgatgaggagcaaggacccaccgttcctgcagacaatggtcccattccgtctctagtgggagatgatacattagagaaaggaactggccaagctcttgacagtcatcccactatgaaggatcctgtaaatgtgacccccagttccacacctgaatcctcaccgactgattgcctgcagaacagagcatttgatgacgaattagggcttggtggctcatgccctcctatgagggaaagtgatactagacaagaaaacttgaaaaccaaggctctcgtttctaacagttctttgcattggatacccatcccatcgaatgatgaggtagtgaaacagcccaaaccagaatccagagaacacataccatctgttgagccccaggttggagaggagtgggagaaagctgctcccacccctcctgcattgcctggggatttgacagctgaggagggtctagatcctcttgacagccttacttcactctggactgtgccatctcgaggaggcagtgacagcaatggcagttactgtcaacaggtggacattgaaaagctgaaaatcaacggagactctgaagcactgagtcctcacggtgagtccacggatacagcctctgactttgaaggtcacctcacggaggacagcagtgaggctgacactagagaagctgcagtgacaaagggatcttcggtggacaaggatgagaaacccaattggaaccaatctgccccactgtccaaggtgaatggtgacatgcgtctggttacaaggacagatgggatggttgctcctcagagctgggtgtctcgagtatgtgcggtccgccaaaagatcccagattccctactgctggccagtactgagtaccagccaagagccgtgtgcctgtccatgcctgggtcctcagtggaggccactaacccacttgtgatgcagttgctgcagggtagcttgcccctagagaaggttcttccaccagcccacgatgacagcatgtcagaatccccacaagtaccacttacaaaagaccagagccatggctcgctacgcatgggatctttacatggtcttggaaaaaacagtggcatggttgatggaagcagccccagttctttaagggctttgaaggagcctcttctgccagatagctgtgaaacaggcactggtcttgccaggattgaggccacccaggctcctggagcaccccaaaagaattgcaaggcagtcccaagttttgactccctccatccagtgacaaatcccattacatcctctaggaaactggaagaaatggattccaaagagcagttctcttcctttagttgtgaagatcagaaggaagtccgtgctatgtcacaggacagtaattcaaatgctgctccaggaaagagcccaggagatcttactacctcgagaacacctcgtttctcatctccaaatgtgatctcctttggtccagagcagacaggtcgggccctgggtgatcagagcaatgttacaggccaagggaagaagctttttggctctgggaatgtggctgcaacccttcagcgccccaggcctgcggacccgatgcctcttcctgctgagatccctccagtttttcccagtgggaagttgggaccaagcacaaactccatgtctggtggggtacagactccaagggaagactgggctccaaagccacatgcctttgttggcagcgtcaagaatgagaagacttttgtggggggtcctcttaaggcaaatgccgagaacaggaaagctactgggcatagtcccctggaactggtgggtcacttggaagggatgccctttgtcatggacttgcccttctggaaattaccccgagagccagggaaggggctcagtgagcctctggagccttcttctctcccctcccaactcagcatcaagcaggcattttatgggaagctttctaaactccaactgagttccaccagctttaattattcctctagctctcccacctttcccaaaggccttgctggaagtgtggtgcagctgagccacaaagcaaactttggtgcgagccacagtgcatcactttccttgcaaatgttcactgacagcagcacggtggaaagcatctcgctccagtgtgcgtgcagcctgaaagccatgatcatgtgccaaggctgcggtgcgttctgtcacgatgactgtattggaccctcaaagctctgtgtattgtgccttgtggtgagataataaattatggccatgggaaacattgtatatttagtgtgtgtattttgataatgattgatcttaaatctgtatacagaatatcattgatataatactctttaggcaggagcactcttgccttcccccaaaatttacactgctaaagccctctgtcacttggcgacccttctggtcttgctggaggggtttcctgggtataacccattgggctgcccaaggccagccagcctgagctctcctgcaagacagagcctgatgtggcacggagtggggttgcggggggtggggggactgcctgactcccagagggacttgaaactgaagcaagaaggttgcattctccaccaagggagttaacctacctgaactaagtagaaatgccagtcttccactaccccctccctgccatcttttcttctgctactttggggagttgatggccaggaaagaagccagcacagggttaaagtaactcctggcattgcccaccagggggctggtgcacctgctgacctcagggtcacagttgagtcatttgccagttgacggagca

SEQ ID NO: 105043 - DNA, 8889 bp, Homo sapiens
  Payload ID: 614
  Gene Symbol: ASXL2
  Gene Name: additional sex combs like transcriptional regulator 2
  ENST ID: ENST00000336112
  CDS Start-End: 329-4552
gtacagtaagaacccaatatggcagcggcggtagcagtggcaacggcagcaagaggaccggccgccccatagacccccccgcgcaccacccccgccgcttcctctgcttgggtgcccccccggtctgacttcccttttctcccacctttcccggcaccgcgggaaaagcagcgcagggcagagcaggcagggagggcggccggagcccggacacgggagcctcccagtcagttcaagacccgacatgagggaaaagggacgtaggaagaagggcaggacctgggcggaggccgccaagacggtcttagaaaaataccccaatacacccatgagtcataaagaaattcttcaagttatccagagagaaggactaaaagaaatcagcagtgggacttctcctcttgcatgcctgaatgcaatgcttcacacaaactccagaggtgaagagggcatcttctataaggttccaggtagaatgggagtatatactttgaagaaagatgtgccggatggggtgaaagagctgtcagaaggttcagaagaaagcagtgatggtcagtcagattcccagagttctgagaacagcagcagcagcagtgatggtggcagcaacaaggagggaaaaaagagcaggtggaaaaggaaagtatcgtcgtcctccccgcagtcaggctgcccatcacccaccattccagcaggtaaagtcatttctccatcacagaagcacagcaagaaggcactaaagcaggcgctaaagcagcaacagcagaagaagcagcagcagcaatgcaggccaagcatatccatctcctccaaccagcatctctcactaaagactgtcaaagcagccagtgactctgtacctgccaaacctgcaacatgggaaggaaagcaatctgatggacagacaggcagccctcaaaactcaaactccagcttttcttcctcagttaaagtggaaaatactttactaggcttggggaagaagtcattccagagatctgagagactccataccagacaaatgaaaagaactaaatgtgctgacattgacgttgagacaccggactccattctggttaatacaaatctgcgagcactgatcaacaagcacacattttcagtccttcctggagattgccagcaacgactgcttttactactcccagaggtagatcgacaggttggtccagatggtttaatgaagttaaatggctcagcccttaacaatgaattcttcacttcagcagcccaaggctggaaggaaagactctcagaaggtgagtttacacctgagatgcaggtgagaattcgacaagagattgagaaggagaaaaaagtggagccatggaaagaacaattctttgaaagctactatgggcagagttctggcctgagccttgaagattctaagaaattgacagcttctcccagtgatcccaaagtaaagaaaaccccagctgaacaaccaaaatccatgcctgtgtcagaggcctctcttatcagaatagttccagtagtctcccagtcagagtgtaaagaagaagcattgcaaatgtcatcaccaggcagaaaagaagagtgtgaaagccaaggtgaagtgcagccgaacttctccacatcttcagagcccctgctttcctcagctctcaatacacatgagcttagcagcattcttcccatcaagtgcccaaaggatgaggatctcttggagcagaagccagtcacctctgctgaacaggaatctgagaagaaccatctcaccacagcttctaattataacaaaagtgaaagccaagaatctttagttacatcgccaagcaaacccaagagtcctggggttgaaaaaccaatagtgaagcccacagcaggagcgggtccacaggagactaatatgaaagaacctctagcaactcttgttgatcagagcccagaaagcctcaagaggaagtcttccctcacccaagaagaggcccctgtgagctgggagaagaggccacgtgtcactgagaatcgccagcaccagcagccatttcaggtctcaccacagccctttctcaatagaggggacagaatccaggtgcgaaaagtaccacctctcaagatcccggtctccagaatctcccccatgccgtttcatccatcgcaggtctctcccagggctcgttttccagtctccatcactagtcctaacagaacaggagccagaactcttgcagacatcaaagcaaaagcccaactggtcaaagcacagagggcagcagctgccgctgccgccgcagctgctgcagccgcctcagttggagggaccattccaggacctggcccagggggtggacaaggtccaggagagggtggtgaagggcagactgctagaggaggcagtccaggctcagacagagtcagtgaaactggaaagggccccacactggaactggcaggaactggaagcaggggaggtacgagagagcttttaccctgtggtccagagactcagccccagtctgagaccaagaccaccccaagccaggcacagcctcatagtgtctctggagcacaactacagcaaacccccccagtgcctccaacacctgccgtcagtggagcatgcacaagtgtcccatcaccagcccacatagagaaattggataatgaaaaactgaaccccaccagagcaacagccacagtggcctctgtcagccatccacaagggcccagtagttgcagacaggagaaagcaccttctccaacaggtcctgctctaatctcaggtgcctcacctgttcattgtgcagctgatggcacagttgagctcaaagcaggtcctagtaagaatatacctaacccttcagcctcatcaaagacagatgctagtgtgccagtggctgtaactccctcccctttaacatctttattgaccacagccactttagaaaagcttcctgtaccccaggtcagtgcaactacagcacctgctggatcagctccaccctcgagcactttgccagcagcttctagccttaaaaccccaggaacttctttaaacatgaatggacccactttaagaccaacctctagtatccctgctaataatcctttagtgactcagctgcttcaaggcaaagatgttcccatggagcaaattctgcctaaacctctcaccaaagttgaaatgaaaacggttccactgactgcaaaagaggaaagggggatgggagcgctcatagctaccaacacaacagaaaatagcaccagagaggaagttaatgagagacagtcccatccagctacgcagcagcagctgggcaaaaccttgcaaagtaagcagctcccccaggttccaaggccccttcagctcttttcagctaaggagctgagggactccagcattgacacacaccaataccacgaaggactaagtaaagcaacccaagatcagatccttcagactctcattcagagggttcggaggcagaatcttctctcagttgtgccgccctcacagttcaacttcgctcactcaggtttccagctggaagacatctccacaagccagaggttcatgctgggttttgctggcagaaggacatccaaacctgcaatggcagggcactacttactgaatatttctacctacggccggggctcagagagctttaggaggacccattctgtaaaccctgaagatcgtttttgtctaagcagccccactgaagccttgaaaatgggatatacagactgtaaaaatgcaacaggagagagtagcagcagcaaagaagatgacactgatgaggaaagtactggtgatgagcaggaatctgtcacagtgaaagaggagccccaggtttcccagagtgctggcaagggtgacacaagttcaggacctcacagcagggaaactctatctaccagtgattgcttagctagcaagaatgtgaaggctgagataccattgaatgagcaaaccactttaagtaaggagaattacctgttcactagaggccaaacatttgatgaaaagaccctagccagagatttaattcaggcagcacagaagcagatggctcatgcagtgagaggtaaggcaatccgtagcagccccgagcttttcagttctactgttcttcctctgcctgcagacagccccacccaccagcccctactccttccacccctgcaaaccccgaagttgtatggaagccccacccagatagggccaagctatagaggcatgatcaatgtctccacctcatctgacatggaccataactctgctgtaccaggtagccaggtatctagcaatgtaggtgatgtcatgtcattttcagtgactgtcactaccatccctgctagccaagctatgaatcccagcagccatggccagaccattcctgttcaggcgttctccgaagagaacagcatagagggcacgccttcgaaatgttactgccgcttgaaagccatgatcatgtgcaaaggctgtggcgctttctgccatgatgattgcatcggcccctccaaactgtgcgtctcctgccttgtcgttcggtaatgagactagaaagagatacactgtaaaggagggggaagggaagggttgaccagttgggttttttgcgtccttttggaatcacagaaataaacaagtaggtttcagttgtcttcagagacaaatgttacttaatcaggaatacaaagtacagattttttacattttagaggaagagcaccttgtatagtaagtctaagtcaagcaagactttgtgaatttgtgacaagtttgcacttacaaaatcatgtaaatatgtcacattttgtttaacattatttttccaagtgtttaggtaataatgtattactttgaattcagattaatgttctactacttgtgactgagaaaagtttaatgccggcatggtaaaaggaagctgtctcccttctgacatttcctaggaagctaggaaaaggaaagtgaaggaatggtctaaagaaatgaccattcacactgattttgtctggacagtctggccgcaggttattcatagattattcagcctttgcaggacttggattcagggttttactcagtccctttaccttaggtggaatcttcttaaattgaaatttttggtaaggaattcatttcacaggtagtgtttcagactctgaaagccctgacttggttcttggcttctactgtactagttactagttactggtactgttgccaagcaatctgcttggaatttgtggatccctgctgttccctaatcccaccccctgccctgagacagtgaatgtagtccgtgaagggagtgcctctctgggaccccctgtgttgttacaggctgtgcagtgcaacaattccagcaaaaataccctatccccgcacttagtcattcgtggtaactaacaattttgaaatactcatataaaatgaacaggaaagtgttagtgattgggtgatttgagctacatcttgttgagcaaggggagtgaaaccacagaaactgttaaattgaacgtaaataactttggaaaacagttttgacactagaacaaggtcgcttctcttttcctcttctctcccaacctgttaacctagtgctagatagtcagctgctgttgcaggtagaaaagctcaccaatgccacatttgttcattctgttcaacctgttttgacctcccaggcatctgaacaggatgacatcatcttattatatcttactttacacatacgtgtatgtacacacacacacacaatacaagacatttttcctgttttagaaaatatagcccttgtttggattactgctgtctgagcactagaaatttctaatggaaagaggcctctgaatggctaagggaacatctggaaaggaaggaaaatgagccctaaaggttttttggttgcttgtttttgtttctttttctttcttgtttccttttttgtttttaaatccttctctagtgactgaagaaattgtgagtacataatatttaggtcatggttaaggaacattaaaataaacctgcagtttaacagaattttgtattaaatgggggagtgtcaatttgcatcatttgcatattgatttcaagtctcctaatttggaatgggtaaagtacaaatgttaatgcaacatagtacagttgtatttgtccttcatattcaggatgtgatatttacaaaatgcagaacagtttaaacttgttaagtcacattccagattaggagaaaatgggcaataatcatctctgttttgcccccattctactacccaccactgcccaccccacccccacatcacacactcttcgatgctttcccacagcccctgctccgctcctctccgtaagaaactcacttcactgtttttcacttttcacttctggcttttttgtggcccaaggccaatataggattaatatctgtgttccagcttcagccagaacgatatgtctgtccatctttctcctttcttccagcacacacagctaagagataagaaggctgcaaggattggggataaggagtatattttcaagccaagaaccagtagaaaacagaaataatggtgctcccaaatattcagtaccttgggcaatccaggaagggtttaaagagacctgttgctgcatagaactctccctgccctaccccttaactccaccttagtgccagggccgagggctggtctgcatgctggaagaggttgagagttttggaattgattccatgctaaatgtcagttaccagtttggattgatgaaagtgatttttctgctttacctttttcctgtcagaaaggttttcctctgtgctacccttaacttagggatgaacagactataactaggaaaggaggaaaggtatcagggatttttaagtccgtttagagagcaaaccatattgtgcctcttcatcttgacccaggctcttatagataggtcctaaacattgctgttcactagattatcttaacaaataatactcagctaaatatttgcatttaggaatactcctaaaacagatattgccaactagatacactgcctcaatcttgaccagacaagagaacagttaagttctctcagttgggtagtaacttgaataccagtctatttatcagttggtttcaacacagaggtttcaagtggaaagccattcatcttaaaagctgaacagaaaaattaaaaaaaaaaaaaacacattacaatctggccttttagaaaatgaagcagtagaaacaaaacctttattagtatggtattccagcagcacctttaaagcaatctttaccttagttttttgagttgttttacctttcatcccaatctgaaaagttttaataaatgctgagcttattcttagggtatgacctggcattatttccagtgactagtcaggcattatgcctgatgcatacgcctcccgtgcacccctatctagccttcagatgtcctccactgcaggtcaccccaggagatagcatcaataatatagtctcagtcttgtttataaagattctaagttgtctagtaaataagtctccctgaatcttaaataattttggagaattagaattctccatcctattaaacagaaagtaaagccaaatagcctggagttgtttgtcctacttgttccataacccctatgctcaagatactgaagctatctgtggtatttcatgtaacatttctaagaataagagctggcaaatgggaaacttggggtggagagagcatacttattgggctgtgaaggcatacggatgtacatgttttagagcttatctcagatttaaatagccaaaggaagacctcattgccttccaggtgaaggtgcaaagtcatacatattaatgacctgacagttaacattctgttgtttattattgcctttctccaccttagagagccataaataactctctggtgaagtgatttgctataatgggggtgaggagtggggagacttctctggtcattacactgctatttatttctagaactcactatcagtgagcagtgccagagtgttttctctttgacctagaggtttcacatcatagcaaggagggaaaagtctccccatctccttacaactgtgtgctaagtaagtaacttggccaagggtagttttcagctcaatttatagaatagtccaaagagactttgagaaacatggtgataggcaggggcctttcctaccatgtttcaatacctacaaacctattgaaagagaacagtaggtaaaacatttcctaaagttgaagcaatagcttcgtagattcttggttactttattttttttaatgctttacatttgatacaactattgaagatcaattttaaaaatagctttccagtaatatattttaagtaatatatattttaatatctgtaaaaagtgacagtggaagactttgaatttctcatatatggtatgtttgatgtaggacctcactgttaaggcacaaattatttcaaaggaagttactctaaagacactcagattatttcagaaaaatgcaataaggggaatagttttggggtttattttttattttaaaagaaaattgacttatttaccacaagctatttttttcccttctggctgtaaggtttgtacagactggtttggtaaatgctaaacttttgtgtcttttgcctttttaaaggaattgttaacattggaattgagggtatgtacagagaagttggtgtcaacaccatttaaaaagtcatattttttcacaaatatagaaaatcattttacataagaattttaagtatttgcaataaatatatgtatatagattgtatgtattcctatattcttatttttcattttattattaagtaaaagatcattaaaagtg

SEQ ID NO: 105044 - DNA, 3299 bp, Homo sapiens
  Payload ID: 614
  Gene Symbol: ASXL2
  Gene Name: additional sex combs like transcriptional regulator 2
  Uniprot ID: Q76L83
  ENST ID: ENST00000404843
  CDS Start-End: 439-3195
tcctccaggatgcattgagttttttcacttaaatcaaagtggctcccgcctgggcaacagatatcgtcgtcctccccgcagtcaggctgcccatcacccaccattccagcaggtaaagtcatttctccatcacagaagcacagcaagaaggcactaaagcaggcgctaaagcagcaacagcagaagaagcagcagcagcaatgcaggccaagcatatccatctcctccaaccagcatctctcactaaagactgtcaaagcagccagtgactctgtacctgccaaacctgcaacatgggaaggaaagcaatctgatggacagacaggcagccctcaaaactcaaactccagcttttcttcctcagttaaagtggaaaatactttactaggcttggggaagaagtcattccagagatctgagagactccataccagacaaatgaaaagaactaaatgtgctgacattgacgttgagacaccggactccattctggttaatacaaatctgcgagcactgatcaacaagcacacattttcagtccttcctggagattgccagcaacgactgcttttactactcccagaggtagatcgacaggttggtccagatggtttaatgaagttaaatggctcagcccttaacaatgaattcttcacttcagcagcccaaggctggaaggaaagactctcagaaggtgagtttacacctgagatgcaggtgagaattcgacaagagattgagaaggagaaaaaagtggagccatggaaagaacaattctttgaaagctactatgggcagagttctggcctgagccttgaagattctaagaaattgacagcttctcccagtgatcccaaagtaaagaaaaccccagctgaacaaccaaaatccatgcctgtgtcagaggcctctcttatcagaatagttccagtagtctcccagtcagagtgtaaagaagaagcattgcaaatgtcatcaccaggcagaaaagaagagtgtgaaagccaaggtgaagtgcagccgaacttctccacatcttcagagcccctgctttcctcagctctcaatacacatgagcttagcagcattcttcccatcaagtgcccaaaggatgaggatctcttggagcagaagccagtcacctctgctgaacaggaatctgagaagaaccatctcaccacagcttctaattataacaaaagtgaaagccaagaatctttagttacatcgccaagcaaacccaagagtcctggggttgaaaaaccaatagtgaagcccacagcaggagcgggtccacaggagactaatatgaaagaacctctagcaactcttgttgatcagagcccagaaagcctcaagaggaagtcttccctcacccaagaagaggcccctgtgagctgggagaagaggccacgtgtcactgagaatcgccagcaccagcagccatttcaggtctcaccacagccctttctcaatagaggggacagaatccaggtgcgaaaagtaccacctctcaagatcccggtctccagaatctcccccatgccgtttcatccatcgcaggtctctcccagggctcgttttccagtctccatcactagtcctaacagaacaggagccagaactcttgcagacatcaaagcaaaagcccaactggtcaaagcacagagggcagcagctgccgctgccgccgcagctgctgcagccgcctcagttggagggaccattccaggacctggcccagggggtggacaaggtccaggagagggtggtgaagggcagactgctagaggaggcagtccaggctcagacagagtcagtgaaactggaaagggccccacactggaactggcaggaactggaagcaggggaggtacgagagagcttttaccctgtggtccagagactcagccccagtctgagaccaagaccaccccaagccaggcacagcctcatagtgtctctggagcacaactacagcaaacccccccagtgcctccaacacctgccgtcagtggagcatgcacaagtgtcccatcaccagcccacatagagaaattggataatgaaaaactgaaccccaccagagcaacagccacagtggcctctgtcagccatccacaagggcccagtagttgcagacaggagaaagcaccttctccaacaggtttccagctggaagacatctccacaagccagaggttcatgctgggttttgctggcagaaggacatccaaacctgcaatggcagggcactacttactgaatatttctacctacggccggggctcagagagctttaggaggacccattctgtaaaccctgaagatcgtttttgtctaagcagccccactgaagccttgaaaatgggatatacagactgtaaaaatgcaacaggagagagtagcagcagcaaagaagatgacactgatgaggaaagtactggtgatgagcaggaatctgtcacagtgaaagaggagccccaggtttcccagagtgctggcaagggtgacacaagttcaggacctcacagcagggaaactctatctaccagtgattgcttagctagcaagaatgtgaaggctgagataccattgaatgagcaaaccactttaagtaaggagaattacctgttcactagaggccaaacatttgatgaaaagaccctagccagagatttaattcaggcagcacagaagcagatggctcatgcagtgagaggtaaggcaatccgtagcagccccgagcttttcagttctactgttcttcctctgcctgcagacagccccacccaccagcccctactccttccacccctgcaaaccccgaagttgtatggaagccccacccagatagggccaagctatagaggcatgatcaatgtctccacctcatctgacatggaccataactctgctgtaccaggtagccaggtatctagcaatgtaggtgatgtcatgtcattttcagtgactgtcactaccatccctgctagccaagctatgaatcccagcagccatggccagaccattcctgttcaggcgttctccgaagagaacagcatagagggcacgccttcgaaatgttactgccgcttgaaagccatgatcatgtgcaaaggctgtggcgctttctgccatgatgattgcatcggcccctccaaactgtgcgtctcctgccttgtcgttcggtaatgagactagaaagagatacactgtaaaggagggggaagggaagggttgaccagttgggttttttgcgtccttttggaatcacagaaataaacaagtaggtttca

SEQ ID NO: 105045 - DNA, 12878 bp, Homo sapiens
  Payload ID: 614
  Gene Symbol: ASXL2
  Gene Name: additional sex combs like transcriptional regulator 2
  Uniprot ID: Q76L83
  ENST ID: ENST00000435504
  CDS Start-End: 295-4602
acagtagtgacggccgcgcgggagcggtcacatgaccgtagcggcagcctgtacagtaagaacccaatatggcagcggcggtagcagtggcaacggcagcaagaggaccggccgccccatagacccccccgcgcaccacccccgccgcttcctctgcttgggtgcccccccggtctgacttcccttttctcccacctttcccggcaccgcgggaaaagcagcgcagggcagagcaggcagggagggcggccggagcccggacacgggagcctcccagtcagttcaagacccgacatgagggaaaagggacgtaggaagaagggcaggacctgggcggaggccgccaagacggtcttagaaaaataccccaatacacccatgagtcataaagaaattcttcaagttatccagagagaaggactaaaagaaatcagaagtgggacttctcctcttgcatgcctgaatgcaatgcttcacacaaactccagaggtgaagagggcatcttctataaggttccaggtagaatgggagtatatactttgaagaaagatgtgccggatggggtgaaagagctgtcagaaggttcagaagaaagcagtgatggtcagtcagattcccagagttctgagaacagcagcagcagcagtgatggtggcagcaacaaggagggaaaaaagagcaggtggaaaaggaaagtatcgtcgtcctccccgcagtcaggctgcccatcacccaccattccagcaggtaaagtcatttctccatcacagaagcacagcaagaaggcactaaagcaggcgctaaagcagcaacagcagaagaagcagcagcagcaatgcaggccaagcatatccatctcctccaaccagcatctctcactaaagactgtcaaagcagccagtgactctgtacctgccaaacctgcaacatgggaaggaaagcaatctgatggacagacaggcagccctcaaaactcaaactccagcttttcttcctcagttaaagtggaaaatactttactaggcttggggaagaagtcattccagagatctgagagactccataccagacaaatgaaaagaactaaatgtgctgacattgacgttgagacaccggactccattctggttaatacaaatctgcgagcactgatcaacaagcacacattttcagtccttcctggagattgccagcaacgactgcttttactactcccagaggtagatcgacaggttggtccagatggtttaatgaagttaaatggctcagcccttaacaatgaattcttcacttcagcagcccaaggctggaaggaaagactctcagaaggtgagtttacacctgagatgcaggtgagaattcgacaagagattgagaaggagaaaaaagtggagccatggaaagaacaattctttgaaagctactatgggcagagttctggcctgagccttgaagattctaagaaattgacagcttctcccagtgatcccaaagtaaagaaaaccccagctgaacaaccaaaatccatgcctgtgtcagaggcctctcttatcagaatagttccagtagtctcccagtcagagtgtaaagaagaagcattgcaaatgtcatcaccaggcagaaaagaagagtgtgaaagccaaggtgaagtgcagccgaacttctccacatcttcagagcccctgctttcctcagctctcaatacacatgagcttagcagcattcttcccatcaagtgcccaaaggatgaggatctcttggagcagaagccagtcacctctgctgaacaggaatctgagaagaaccatctcaccacagcttctaattataacaaaagtgaaagccaagaatctttagttacatcgccaagcaaacccaagagtcctggggttgaaaaaccaatagtgaagcccacagcaggagcgggtccacaggagactaatatgaaagaacctctagcaactcttgttgatcagagcccagaaagcctcaagaggaagtcttccctcacccaagaagaggcccctgtgagctgggagaagaggccacgtgtcactgagaatcgccagcaccagcagccatttcaggtctcaccacagccctttctcaatagaggggacagaatccaggtgcgaaaagtaccacctctcaagatcccggtctccagaatctcccccatgccgtttcatccatcgcaggtctctcccagggctcgttttccagtctccatcactagtcctaacagaacaggagccagaactcttgcagacatcaaagcaaaagcccaactggtcaaagcacagagggcagcagctgccgctgccgccgcagctgctgcagccgcctcagttggagggaccattccaggacctggcccagggggtggacaaggtccaggagagggtggtgaagggcagactgctagaggaggcagtccaggctcagacagagtcagtgaaactggaaagggccccacactggaactggcaggaactggaagcaggggaggtacgagagagcttttaccctgtggtccagagactcagccccagtctgagaccaagaccaccccaagccaggcacagcctcatagtgtctctggagcacaactacagcaaacccccccagtgcctccaacacctgccgtcagtggagcatgcacaagtgtcccatcaccagcccacatagagaaattggataatgaaaaactgaaccccaccagagcaacagccacagtggcctctgtcagccatccacaagggcccagtagttgcagacaggagaaagcaccttctccaacaggtcctgctctaatctcaggtgcctcacctgttcattgtgcagctgatggcacagttgagctcaaagcaggtcctagtaagaatatacctaacccttcagcctcatcaaagacagatgctagtgtgccagtggctgtaactccctcccctttaacatctttattgaccacagccactttagaaaagcttcctgtaccccaggtcagtgcaactacagcacctgctggatcagctccaccctcgagcactttgccagcagcttctagccttaaaaccccaggaacttctttaaacatgaatggacccactttaagaccaacctctagtatccctgctaataatcctttagtgactcagctgcttcaaggcaaagatgttcccatggagcaaattctgcctaaacctctcaccaaagttgaaatgaaaacggttccactgactgcaaaagaggaaagggggatgggagcgctcatagctaccaacacaacagaaaatagcaccagagaggaagttaatgagagacagtcccatccagctacgcagcagcagctgggcaaaaccttgcaaagtaagcagctcccccaggttccaaggccccttcagctcttttcagctaaggagctgagggactccagcattgacacacaccaataccacgaaggactaagtaaagcaacccaagatcagatccttcagactctcattcagagggttcggaggcagaatcttctctcagttgtgccgccctcacagttcaacttcgctcactcaggtttccagctggaagacatctccacaagccagaggttcatgctgggttttgctggcagaaggacatccaaacctgcaatggcagggcactacttactgaatatttctacctacggccggggctcagagagctttaggaggacccattctgtaaaccctgaagatcgtttttgtctaagcagccccactgaagccttgaaaatgggatatacagactgtaaaaatgcaacaggagagagtagcagcagcaaagaagatgacactgatgaggaaagtactggtgatgagcaggaatctgtcacagtgaaagaggagccccaggtttcccagagtgctggcaagggtgacacaagttcaggacctcacagcagggaaactctatctaccagtgattgcttagctagcaagaatgtgaaggctgagataccattgaatgagcaaaccactttaagtaaggagaattacctgttcactagaggccaaacatttgatgaaaagaccctagccagagatttaattcaggcagcacagaagcagatggctcatgcagtgagaggtaaggcaatccgtagcagccccgagcttttcagttctactgttcttcctctgcctgcagacagccccacccaccagcccctactccttccacccctgcaaaccccgaagttgtatggaagccccacccagatagggccaagctatagaggcatgatcaatgtctccacctcatctgacatggaccataactctgctgtaccaggtagccaggtatctagcaatgtaggtgatgtcatgtcattttcagtgactgtcactaccatccctgctagccaagctatgaatcccagcagccatggccagaccattcctgttcaggcgttctccgaagagaacagcatagagggcacgccttcgaaatgttactgccgcttgaaagccatgatcatgtgcaaaggctgtggcgctttctgccatgatgattgcatcggcccctccaaactgtgcgtctcctgccttgtcgttcggtaatgagactagaaagagatacactgtaaaggagggggaagggaagggttgaccagttgggttttttgcgtccttttggaatcacagaaataaacaagtaggtttcagttgtcttcagagacaaatgttacttaatcaggaatacaaagtacagattttttacattttagaggaagagcaccttgtatagtaagtctaagtcaagcaagactttgtgaatttgtgacaagtttgcacttacaaaatcatgtaaatatgtcacattttgtttaacattatttttccaagtgtttaggtaataatgtattactttgaattcagattaatgttctactacttgtgactgagaaaagtttaatgccggcatggtaaaaggaagctgtctcccttctgacatttcctaggaagctaggaaaaggaaagtgaaggaatggtctaaagaaatgaccattcacactgattttgtctggacagtctggccgcaggttattcatagattattcagcctttgcaggacttggattcagggttttactcagtccctttaccttaggtggaatcttcttaaattgaaatttttggtaaggaattcatttcacaggtagtgtttcagactctgaaagccctgacttggttcttggcttctactgtactagttactagttactggtactgttgccaagcaatctgcttggaatttgtggatccctgctgttccctaatcccaccccctgccctgagacagtgaatgtagtccgtgaagggagtgcctctctgggaccccctgtgttgttacaggctgtgcagtgcaacaattccagcaaaaataccctatccccgcacttagtcattcgtggtaactaacaattttgaaatactcatataaaatgaacaggaaagtgttagtgattgggtgatttgagctacatcttgttgagcaaggggagtgaaaccacagaaactgttaaattgaacgtaaataactttggaaaacagttttgacactagaacaaggtcgcttctcttttcctcttctctcccaacctgttaacctagtgctagatagtcagctgctgttgcaggtagaaaagctcaccaatgccacatttgttcattctgttcaacctgttttgacctcccaggcatctgaacaggatgacatcatcttattatatcttactttacacatacgtgtatgtacacacacacacacaatacaagacatttttcctgttttagaaaatatagcccttgtttggattactgctgtctgagcactagaaatttctaatggaaagaggcctctgaatggctaagggaacatctggaaaggaaggaaaatgagccctaaaggttttttggttgcttgtttttgtttctttttctttcttgtttccttttttgtttttaaatccttctctagtgactgaagaaattgtgagtacataatatttaggtcatggttaaggaacattaaaataaacctgcagtttaacagaattttgtattaaatgggggagtgtcaatttgcatcatttgcatattgatttcaagtctcctaatttggaatgggtaaagtacaaatgttaatgcaacatagtacagttgtatttgtccttcatattcaggatgtgatatttacaaaatgcagaacagtttaaacttgttaagtcacattccagattaggagaaaatgggcaataatcatctctgttttgcccccattctactacccaccactgcccaccccacccccacatcacacactcttcgatgctttcccacagcccctgctccgctcctctccgtaagaaactcacttcactgtttttcacttttcacttctggcttttttgtggcccaaggccaatataggattaatatctgtgttccagcttcagccagaacgatatgtctgtccatctttctcctttcttccagcacacacagctaagagataagaaggctgcaaggattggggataaggagtatattttcaagccaagaaccagtagaaaacagaaataatggtgctcccaaatattcagtaccttgggcaatccaggaagggtttaaagagacctgttgctgcatagaactctccctgccctaccccttaactccaccttagtgccagggccgagggctggtctgcatgctggaagaggttgagagttttggaattgattccatgctaaatgtcagttaccagtttggattgatgaaagtgatttttctgctttacctttttcctgtcagaaaggttttcctctgtgctacccttaacttagggatgaacagactataactaggaaaggaggaaaggtatcagggatttttaagtccgtttagagagcaaaccatattgtgcctcttcatcttgacccaggctcttatagataggtcctaaacattgctgttcactagattatcttaacaaataatactcagctaaatatttgcatttaggaatactcctaaaacagatattgccaactagatacactgcctcaatcttgaccagacaagagaacagttaagttctctcagttgggtagtaacttgaataccagtctatttatcagttggtttcaacacagaggtttcaagtggaaagccattcatcttaaaagctgaacagaaaaattaaaaaaaaaaaaaacacattacaatctggccttttagaaaatgaagcagtagaaacaaaacctttattagtatggtattccagcagcacctttaaagcaatctttaccttagttttttgagttgttttacctttcatcccaatctgaaaagttttaataaatgctgagcttattcttagggtatgacctggcattatttccagtgactagtcaggcattatgcctgatgcatacgcctcccgtgcacccctatctagccttcagatgtcctccactgcaggtcaccccaggagatagcatcaataatatagtctcagtcttgtttataaagattctaagttgtctagtaaataagtctccctgaatcttaaataattttggagaattagaattctccatcctattaaacagaaagtaaagccaaatagcctggagttgtttgtcctacttgttccataacccctatgctcaagatactgaagctatctgtggtatttcatgtaacatttctaagaataagagctggcaaatgggaaacttggggtggagagagcatacttattgggctgtgaaggcatacggatgtacatgttttagagcttatctcagatttaaatagccaaaggaagacctcattgccttccaggtgaaggtgcaaagtcatacatattaatgacctgacagttaacattctgttgtttattattgcctttctccaccttagagagccataaataactctctggtgaagtgatttgctataatgggggtgaggagtggggagacttctctggtcattacactgctatttatttctagaactcactatcagtgagcagtgccagagtgttttctctttgacctagaggtttcacatcatagcaaggagggaaaagtctccccatctccttacaactgtgtgctaagtaagtaacttggccaagggtagttttcagctcaatttatagaatagtccaaagagactttgagaaacatggtgataggcaggggcctttcctaccatgtttcaatacctacaaacctattgaaagagaacagtaggtaaaacatttcctaaagttgaagcaatagcttcgtagattcttggttactttattttttttaatgctttacatttgatacaactattgaagatcaattttaaaaatagctttccagtaatatattttaagtaatatatattttaatatctgtaaaaagtgacagtggaagactttgaatttctcatatatggtatgtttgatgtaggacctcactgttaaggcacaaattatttcaaaggaagttactctaaagacactcagattatttcagaaaaatgcaataaggggaatagttttggggtttattttttattttaaaagaaaattgacttatttaccacaagctatttttttcccttctggctgtaaggtttgtacagactggtttggtaaatgctaaacttttgtgtcttttgcctttttaaaggaattgttaacattggaattgagggtatgtacagagaagttggtgtcaacaccatttaaaaagtcatattttttcacaaatatagaaaatcattttacataagaattttaagtatttgcaataaatatatgtatatagattgtatgtattcctatattcttatttttcattttattattaagtaaaagatcattaaaagtgaaaataaaaaccttggagttttttggtgaatcttgaggtttaacatacatctgagagtggcgtgggtaagagtcctcagttactgccttatactcctatgggatggttcccacagattgtatggaagagagtaaaatgaggaacttggtgataaatcagggtagtgtatttcttttggaatttaagtaaaactgattaaattttccttatctgtctgtctccatgttttctcccttaatctgttttgtctcctaaccccctaacattactggaaaagtgaagaaatgcggtgcagcctctttattaatgtgcccattgtttgctcctaaatcaaagaatggtaaggaaatatctcgggggaaaaaataggttttcctttctccacagtggttgacatttactgccaccactttccaggccttaggggagtgtgaagaaatagtttcttgaagatgatagaaatttttttttttccgtttcccagttctctcagaagtgagtttcatagccagtcatgtccttcctgcccgtctaatctggagaggtcaaagagcaaggaaaataatgtgaagagaaacacctgtgccttgattaggttctatttcagcatttgacacttgaattttgaactcctctgggtcaggaagggtagctatggaaatgaggtctgagccagttggtaggagaggttgtctatgttcccataccgagattgctgtctaatccacgagaactcattttgtggctgcaaagtaaatacttgattttaggatatgataggagcaaaatggtgcctacatcgtctttataaagaaaagtatatagcccattttttaacaaatgaataatatatcgaatcattgatgacctaaaagaaaaattgttaaggtcagattttcgagagtgtatcttgatgacccataaaactgactttttattgtagttcactagttcccataattgcccagctgtggttactttcactgaaaagaaaaaatatattttggaagttaatgtaaggatacattggctttttttttttttctttacattggctttttaaaagacagtttttatttttcagatactggaatgtcaagtatctgggttgtcccaagacgttggagataattcagccttccaagagaacagcagtctagatcttagctgaaaatgtgctgtttctaaaggaagcttcttaagtctcaggggacattagcatcttcataatttccatatataataagaatgaaggtaaaatatttaaatgtgtataaactaatccataatgaccatttacaaagattgactccccatttctggtacatatttatcattatttagatgggtctcctatcttgtgggaagataaatttatattcaggtgatgacatgggtgcctgcaagtagagttggtctgcagctgagggagaaggcaacataccagaagacaaggcagcttcaacctggatccccagctaccctttatttacttcactgagtcagaaacccgtgttcattgcttctgagactacttgacctcagctggtctttagaagtctggtaactttttatgtacaaatcatgttatttactaattcaagtatttatagagcacctactgtgcactaagcactaaagtgctggttatgcaaaggtaagcaaaaatagtcatgtaagttgcagaaaggttttcctaaagtagtgactatacagcatgtttttagttctaggctcaaggagtaatactacctttttcccaagataggttgaaaatttaaatgagttatgaaatggaagtgtttgagacactggacacagtagtggcaaatacatgaagaaagaaggtccctagatgaaaaaagtgtggaaatgaggagccatattaataaaatgcaccttttttgagaactattgttggaatagctaaagttgtctatagaaatttcaagaaatctcttaacatctaaattagaagcaggccaacagcaatctctgtcagtagttaatttaggtcagtaagttagtgttttgttaaactaaccctttcaaacacagttgggtaaataatgcagctttcctgtcactgttcaaacctaaaagaagctaaagggaatttttcttaaaacatgattttcatcttatagatgataagtaactgtatctcttcatttggaattgttgcatcccagtttttctccataatggataaaattacttttgtgtccttttctattctaatgtagaagtggcttttccttttttctcttgagtcacaacttgaattaaaaagggcttcagcaggactctagcgctttttaaagaagaatttggtgtattccactatgtaacgtagtctctgtccaggaaccaggaggatgagtgtcctcagttttcctaatacttggtaacatttaataatagattgagttttgcttttgtttttcatagagactgtatagactctgtacttccatgtaactttctgccttaacctaaaaaggcattccctggaaggagatcttgtaacaggaagaaaaagcgaaaccaggaaaagagccagaaaggatcaacttggagatgggctgtggctaaatagtgggttttcctgaaaagtaactgcaaccttgcttttcgtgcttcttcaaacccaaaagaacctaaagggaatttttaaaaatcctgattttcttcttaattgtaaaacctagaggatgccttagggagaagaaagataacctggaatttggttttaaatggatttaagtaaactttgaattaagtagcttattccatttttgagagatttctttttaagattttagattcacttaatgtaatgttgaattgccatgaatgtaacctggagtttgatttgagacattctgtgggataaggaatagttttctattgaactgtggtggcttttgccactaatcaggatttagggctgtgcacctccatctgttaagtgaaatggaacttggcttcctaaacactatattagaccaacttgagtcaatacttttattaagtttaatcagggattctcaaaatatttaggattcaaattagcccaattagaaagcagtgcattaaatgttaccaaaatatctgaagatactttagaactattttacacaaagcttatgtctttcctatggaaagtatcatacataaaattttacattcttttaaaaaacagaatctaatgtcttcagatacctagagcttggaaattataatagagttgggctttgacccgaagtcagcagttcttttcattttagattttcaggcaagtttcagtagtttggagacttcttcagtagtgaccccagcttaacctacatataatcactttgcacacattttaagttaatcagatgcttccagagtcttggatttggttacccctttgttagataaggagacagattctaggttgggacaaacatcttaatttattctctaataataaagtactgattaaagagcaagttctcagagaattcacaaaatttctagaatccatgaaagatctagagaacataacaaatgaaactctagaaatttgaaagaaaaaaaaacacttagctgtaagtgctttgacctattttttttaaaaaaaaaaaacctgtcttaattctgtgactgcattgcacccttcaccagcactaagagaagtcggaatggaagaaattaccgtatgtaattcttattcacttaaaatctttgtgcgcataggccttagcactttgacaaataaactctgccttttagctcctcactattgtcttctttcctgtcacttttaggctgtttcattggtcgtataaaaacaaccttcttcgaagttgaatgtatgtttctgcacatagacaaaccatattttactgactcattctatgttgaataaaggcatacagttttacccta

SEQ ID NO: 105046 - DNA, 11344 bp, Homo sapiens
  Payload ID: 615
  Gene Symbol: ASXL3
  Gene Name: additional sex combs like transcriptional regulator 3
  Uniprot ID: Q9C0F0
  ENST ID: ENST00000269197
  CDS Start-End: 1-6747
atgaaagacaagaggaagaagaaggaccgcacctgggccgaggctgcccgcctggcactagaaaaacaccccaactcaccaatgacagcaaagcagatattggaagtcattcagaaagaagggttaaaagaaacaagtggaacctctccattagcctgtctgaatgcaatgcttcacactaacactcgaataggggatggaacattcttcaaaatccctggaaagtcaggcctctatgctctcaaaaaagaggagtcgtcatgcccagcagatggcacgttggatttagtctgtgaatctgaattggatggtacagatatggccgaggcaaatgcccatggagaagaaaatggagtttgttcgaagcaggtaactgatgaagcatcttccactcgagattcaagccttactaacacagcagtgcaaagcaagttagtgtcttccttccagcagcacaccaaaaaggctcttaaacaggctttgaggcagcagcagaaaagaagaaatggagtctcaatgatggtaaacaagactgttcctcgtgttgttttgacaccattaaaggtgtctgatgagcagtcggattcgccttcaggatctgaatctaaaaatggtgaagcagacagttcagataaagaaatgaaacatgggcaaaaatctcccactggaaaacaaacaagtcagcacttaaaacgattaaaaaagtctggtttagggcacttgaaatggaccaaagctgaggacattgacatagaaaccccaggatctattcttgtcaacactaacttgagggcattaataaataaacatacgtttgcttccttacctcagcattttcaacaatacctcctgcttttgctcccagaagtggataggcagatgggaagtgatggaattttacgcctcagtacttcagctctaaataatgaattctttgcatatgcagcacaagggtggaaacagcgactggcagaaggagagtttaccccagaaatgcagttgcggataaggcaagaaattgagaaggaaaagaaaacagaaccttggaaagaaaaattctttgagaggttttatggagaaaagctgggcatgtcaagagaggaatctgtgaagctcactactggaccaaacaacgctggagctcaaagtagttcttcatgtgggacttctggccttccagtttctgcacagacagccttggcagaacaacagccaaaaagcatgaaaagcccagcttctccagagcctggtttctgtgctactctttgccctatggtagaaattccacctaaagatataatggcagaattggagtcagaggatatcttgatccctgaagaatctgtaattcaggaggaaattgcagaagaggtagagactagtatctgtgaatgccaggatgaaaatcataagacaatacctgaattttctgaggaggctgaaagtctaaccaattctcatgaagaaccccaaatagcacctcctgaagataacttggaatcctgtgttatgatgaatgatgttttagaaactttgcctcatattgaagttaagatagaagggaagtcagaatcaccccaggaagaaatgacagttgttatcgatcagttagaagtctgtgactctcttattccttccacttcatctatgactcatgtcagtgacacagaacataaggagtcagaaactgcagtagagaccagtacccccaaaataaaaacagggtcatcttctctagaaggccagtttccaaatgaaggaattgctatagatatggagctacagagtgaccctgaagaacagctttcagaaaatgcctgcatctctgaaacgtccttttcttctgagagcccagagggagcctgtaccagcctgccttctccaggaggggaaacacagtccacatcagaagaatcatgtactccagcctcccttgagacaacattttgttctgaggtatctagcactgaaaatacagacaaatacaaccagagaaattccactgatgaaaactttcatgcatctttgatgtcagaaatatctccaatatccacttcacctgaaatatcagaagcatctcttatgtccaacttaccattaacatctgaagcatcaccagtatccaacttacctttaacatcagaaacctcaccgatgtctgacttacctttaacatcagaaacttcttcagtgtcttccatgcttctcacctctgagaccacttttgtatccagtttgccacttccttcagaaacatctccaatttccaactcttccataaatgagagaatggcacatcagcaaagaaagtcaccttctgtatctgaagagccactctccccgcagaaagatgagtcttccgccactgccaaacctctgggagagaaccttacctcccagcagaagaatctgtctaatactcccgaacccatcataatgagttcttcttccattgctcctgaagcatttccgtctgaagatttgcacaataagaccctgagtcagcaaacctgtaaatcacatgttgacactgagaagccctaccctgcttcaattccagaacttgcttctactgaaatgataaaagttaaaaatcatagcgtcctgcaaagaacagaaaaaaaagtgttaccttcaccattggaattatctgtcttttctgaagggacagataataagggaaatgagcttccatctgctaaattacaggacaagcaatatatctcatcagtggataaggctccattttcagaaggctctagaaataaaacacataagcaagggagtacacagagtcggttagaaacctcacatacttccaagtcatcagagccctccaagtcacctgatgggataagaaatgaaagtagagattcagagatatcaaagagaaaaactgcagagcaacacagctttggaatctgtaaggaaaagagagctaggatagaagatgatcagtcaacccggaacatatcatctagcagcccacctgagaaagaacagcctcccagagaggaaccaagggttccccctctcaagattcagctttccaaaattgggccaccttttataatcaagagccaaccagtctccaaacctgagtctcgagcatccactagcacatctgtcagtggcgggaggaacacaggagccaggaccctcgcagatatcaaggcccgggcccaacaagctcgggcccagcgagaggctgctgcagctgctgctgtggctgctgcagcgagcattgtctctggagccatgggaagtccaggagagggtggaaagacgagaactctggcacacatcaaagagcagacaaaggctaagctctttgcaaagcatcaagctcgagcccatctcttccagacctctaaagagacccggttgcctcctccgctcagctcaaaggaagggcctccaaacttagaagtctcttctacccctgaaacaaaaatggaaggttcgactggtgtcattattgtcaatccaaactgtagatctcctagcaacaagtctgcccacctccgggagaccaccactgtactacagcagtctcttaacccaagtaaacttccagaaactgccactgacttatctgtgcatagttctgatgaaaacatacctgtgtcacatttatctgagaaaattgtttcatctacctcttctgaaaatagcagtgtgcccatgctttttaataaaaattctgtccctgtatctgtttgcagcactgctatatcgggagcaattaaagaacatccctttgtgagttctgttgataaatcctctgtcctaatgtctgttgacagtgcaaacactacaatttctgcttgtaatataagcatgttaaaaaccatccagggaactgacactccatgcatagccattataccaaaatgtattgaaagcactcccatttcagccactacagagggctccagcatatcaagctccatggatgataagcagttactaatatcaagcagcagtgctagtaacttagtctccactcagtacacctctgtgccaactccctccatcggaaacaatttgccaaacctctccactagctctgtcttgattcccccaatgggaattaacaacagatttccttctgagaagatagccatacctgggagtgaagaacaggccactgtatccatgggtaccactgtgagagcagccctcagctgcagtgattctgtagcggtcacagactctctggttgcacacccgaccgtcgcaatgtttactggaaacatgctgacaataaactcttatgatagtcctcccaagttaagtgctgaaagcttggacaaaaattcagggcctcgaaacagggcagataattctggaaaacctcagcaaccaccagggggctttgcaccagcagccataaaccgatcaattccgtgtaaagtcatcgttgaccacagcaccacgctgacctccagtttgtctctgactgtctccgttgaaagctcagaagccagcttggacctgcagggcagaccagtgaggacagaggcatccgtacagcccgtggcgtgtcctcaggtgtctgtgattagcaggcctgagccagttgccaacgaaggtatagatcacagttccactttcattgctgcttcggcagcaaaacaagacagtaaaacattgccggccacctgcacaagtctccgagaattaccccttgttccagataaattaaatgagccgactgctcccagtcataactttgctgagcaggcacgtggcccagctcctttcaaaagtgaagcagacacaacctgtagcaatcagtataacccaagtaaccggatttgctggaatgatgatgggatgaggagcacaggacagcctctggttactcactcgggttcaagtaaacaaaaagaatatctagagcaaagctgtccaaaggctatcaaaactgaacatgccaactacttgaacgtgtcagaacttcatcccaggaatcttgtaacaaatgttgctcttcctgtgaaatctgaacttcacgaagcagacaagggctttagaatggacactgaagacttccctggccctgagctgcctcctccggctgcagagggagcctctagtgtacaacaaacacagaacatgaaagcttccacctcaagtcccatggaagaggctatttccttggctaccgatgccctgaagagagtccctggtgcagggagctcaggctgtcgtctgtcctctgtggaggctaacaatccgctggtgacgcagttactacagggcaacctgcctttggaaaaagtgttgccacagcccagattgggagccaagcttgaaatcaacaggcttccattgcctcttcaaactacctcagtgggtaaaacagcaccagagagaaacgttgaaattccgcccagctctccaaatccagatggtaagggctacttggcagggactctggcaccactccaaatgagaaagcgagaaaaccaccccaaaaagagagtagctaggactgtaggagaacacactcaagttaaatgtgaaccaggaaaattgttggtggagccagatgttaaaggggtgccttgtgtcatcagttccggcatcagtcagctaggacacagccagccatttaagcaagaatggctaaacaagcactccatgcagaacagaattgttcacagccctgaggtcaaacagcaaaagcggctgctcccctcgtgtagcttccagcagaacctatttcatgttgacaagaatggcggcttccacactgacgctggtacctcacacagacagcagttttaccaaatgcctgtggctgccaggggccccattcctactgcagctctgttacaggcctcttccaagaccccagtggggtgtaatgcatttgccttcaacaggcatcttgaacagaagggattgggagaggttagtctttcctcagcacctcaccagctaaggttagccaacatgttatcccccaatatgcccatgaaagaaggtgatgaggtgggaggcactgcacacacaatgccaaacaaagcactagtacatccgccgccgccaccgcctccccctccccctccacccttggctttgcccccgcctccccccccaccacctccgctacctccacctctccctaatgcagaagtcccatctgatcaaaaacaacctccagttaccatggaaaccactaagagacttagttggccacagtccacgggcatatgtagcaatataaaatcggaacctctttcttttgaggaaggtttaagcagcagctgtgaactgggcatgaaacaagtttcctatgaccagaatgaaatgaaagaacagttaaaagcattcgcgctaaaaagtgcagatttctcttcctatttgctttctgagccacaaaagccttttacccaattagctgctcagaaaatgcaggtgcagcaacaacagcagctctgtggaaattatccaacaatacactttggtagcacgagtttcaaaagggcagcatctgcaattgaaaagtccattgggattttgggaagtggctccaatcctgccacaggcttgtctggtcagaacgctcagatgcccgttcagaactttgccgacagcagcaatgcagatgaattggaactgaaatgctcttgccggctgaaagccatgattgtgtgcaaaggctgtggggccttctgccatgacgactgcataggtccttcaaaactttgtgtagcatgcctggttgtacgataagagctgagtgaaagatgcagtatcccttttccacacggaaaagccaaatagcatcagcaacaacaaatagaataatgcagtggtttctatcatgctaatttattttgctttggagcaggtacctttcctctatggcattattttcttgcatttctcataaaggggaggatgcatcccaactgaatggctcactggcatgtcttttatgtgttcagttgccattcctagctttggaaagtttctatctgtccatgtgtatacaagtcaatgccccatttttgtttttcttttaaccgaggtgtagataggaaaaggacatttttaattacttaataaccggaaatgcagatgtgtaaggagaatgagaggaatgagttaaagtggttatgcatttttctatagatgagccattacagcaaggaattttacagttgacttctctgaacctagctttaccacagtgattaaatcctatttagaaaggggaatctgatttaaatgtgtgattccttgtatttgctcctatcacaaaagatatattaaaggaggtatgccattaatgaaatccactgtcctgagtattatctttcctcctgttgtactttctcagagactatggcagaatatctggatcttccttggattttgtacacatattgtagtgaaatgtgtcctacatctgaaattgcatgggactcatgcccagcaatctggttctaggcctttgacacctgataatatgagagcaattggccagccaatagccataagcccagaggattttagagcttcatgtgtggcttttaagagcaggtttgaaaaaaaaaaaaaaaagaccctaaacttcaaagcaaggaaataagatgctgtatatgcacacataaatgcattgataatgtaaatatcctattcacgctaatgaattactagatattaaaagtggggggtggaaatcattgtagccctttattgatgacacccattcattctggcttcagaccttgcagaggttggccatatctttttaaaagtgtcattgatgataaaagggactacccaaggctaaagcgtcaacatttttcagaacaattgcttttctcattatttacaacctatataattcaactttgaaataacccttattttgaaaaaaactgttctaggtatggcatgttttgttttttccctcaggtatattcaatacattcttcatatttgggggaactgcttttgaaaaagggatactgcatcttaacagttatcttcagtgtgcatccagtaaagtctgcgtgttgagtatttgagctacattccatatattttggccaccctcataccagaggacagccgtagttcaggaggctctgttttcaaaagcaagttcaaaagcacatgcacattgagggaagatgaaagaaaacaaaaaccaaccatgcccatttaacttcagattacagagcacaaaatgtggagtgccattaacccattgattgattgtggctgtagaatttaaaaagcaaacatggggggggtggggaatcatctgtatccagggtaagaatgaccaatattttcacatgggatcatcctaatcactgtaaactttttgacattcccgtaaaacacgtcttaaaagttgactggaatgagcagaaattacattcctgaaaacaagaacacttgtgatttttttataataaccaactatataatatgtttttttctccgtatttattgtgatgttgccaaatttctttctttaggtgatagagacatcatttcgaataacaaattgctgatagtgagaggtactttactttatcttagaaagaaagaaaaggcctgctgctgtagccatgattttggtgcttcagtactgtcatttctgtttttcacagtaaaattggcaaaactaatgactgagaaagttagttagcaatgcacttaaccagccttacccgaggaaagcagcataagttccagtggatccttagttttctcttcactgcctgccaggttgtgttggggtggcatccttatcagtggtgtctttgtctgcctggctctgatatcatcctgatttcgaagatcatgctgttagtctcacagcggggcacccctataatatagacacttgcatgccaactccttccaaattcattcactgctataccagtgtcagatactgtctacaccagcaaattgaaaaccatcacatcagtaactgacatggtgtcggaagaaactccagtctacagaacctttgcactcagtatgtgaggtacaattgaggctgatgagatactgagctcattatcagttccttcattgttgaatactgcctgcaagttgcttattgggaataagaaaaagtgtccttctgtatgttttgatttttcacataacaggcttggagaatcagttgttgatagtgcatggattctatcatccaggtccgattagcataatttttctgcgccctttttttttttttttttgctccagttcaaattcctagtgttctcatatggtttatattactgaaaaattaatatctttaagctaaaatataagggaaaggaagaagagaaatttagatgtaaaatgtgggtcagatattttataggtttccatttaatatatatatacacacaaaatccagtatattctgagtaggttcttagttttctgatttctacatgtgtctgctatgtgcaaatgtagtatattatttactacatggttattgtggtgtagtgtgcaaatgttagcatgtgcattatcctgattactggacacagttttattcttatcaggaatagaacttgcacatgtaccatacaatttttttttttttaatcacaaaggatgtatttccctaagtagcacttttggagcaggggaaggaagaaaactgctattccctaatcctcctcctataagatatgcatatgcctgaggtgtataaagacatttaggttagttaatgggcatgttaataagagcattgtgatgcaaattcattttcaaaatgaaaataattttttcttccccaaaatgagaatagtagaaattttggtgaactgagcaccatagttatataatatttccctgcgaaggtctagtttgaagaaaaaaaaaacttgaaaacaaacctatgaggttgagcctggttgctataaagactttgggatggtatgtgtttctgggatgagctatatagaaagtttagttgactgctggaccttggatattcttactcggttcaaaatacacaaaaacaagctggtacatatggtgctttataatgcagtcgagagtaagaatacatgttgctgtagccccatttcctttacaaacccccgcacaatttcaaaagtggaagttaccgtggcctctggtttcccagttcctccgtggtgtaatgaagtcccaggttttagaagctgaagccaagcctagggtagcatcgtctgtacggtggtgaggcccagcacagcggtagctgcctagtgggaatgaccccctgagcatgcagagcccagagtcactgtccatctgcgttcccagagaacaattgtgaagagtcctagaacaggaactctgaatcagactgtcaggggcctatgtagccaaaatgttactaaatataaaattcctgtcgtcttcagtcttcatgctttgtcactgtaaaaagaacaaaaagcatttttactataatttaaaggagctgcttttttatagcacatactatttcgctttgtactatatttgatagttgcagaataatttagactgtagaaaaactttgttgtatttgtactgttcttgaatgtttcaaagaaagtgctttacttggttgccataattttcttgtactgctgtattcccctccttcccctgcttcatggaaacctgatatgatacatattttcagtagttttttttttttaatgtgtgttcgtttgtacaattttttttttttggtcagtattctgaatgtttacatctgtttgacattagccatttaatgccttttttaaaggcggtattactcctacagtgtaacagcaaaatgtgaaatcaacccaaacataacatgcatgacaaacacagattgggggcgaaggccctgaacctacatagacattttatatcagcatacagaaaagtaaaatcctccttcagtcctctaccaaagaatatattattcccacaggaaaaactcagaaaaggtgtgtaaaatcctcagaagggggagcagttgattcagtaagactgcgacaatttaatactgttacgcttgctttgatacctgactaaatgtgactgagtgcaacaagcatttaagaaaatttttagacagtgttttgtttagaattcagggatcatgcattctttaatggtgctgtttgttttttatttcttttctacaaagaaaacaagtgttgcctacaaaagtgactgctcacaataccataagttaaatgaaatgaaatgtttgtctcttcatgtttctctgtctttccctttctcaaagtaacaacttgggtttcaatattaagatattctggagaaaataaagaaattaaacatg

SEQ ID NO: 105047 - DNA, 540 bp, Homo sapiens
  Payload ID: 615
  Gene Symbol: ASXL3
  Gene Name: additional sex combs like transcriptional regulator 3
  ENST ID: ENST00000590973
  CDS Start-End: 15-191
accccaactcaccaatgacagcaaagcagatattggaagtcattcagaaagaagggttaaaagaaacaagaccccggcatggcttggagacagcgttggtgtgtatgaaggatcttcctccaatgaaggatttgggacaactttccatgatgattatattagagcctcagctgctttcgtgttggtcatgaggtgatgctgaaccgaatgcttgaactagcaggagtggctgggattgcattggagtggttccgttcattccttccggaaatggaacctctccattagcctgtctgaatgcaatgcttcacactaacactcgaataggggatggaacattcttcaaaatccctggaaagtcaggcctctatgctctcaaaaaagaggagtcgtcatgcccagcagatggcacgttggatttagtctgtgaatctgaattggatggtacagatatggccgaggcaaatgcccatggagaagaaaatggagtttgttcgaagcaggtaactgatgaagcatcttccactcgagattcaagcc

SEQ ID NO: 105048 - DNA, 3811 bp, Homo sapiens
  Payload ID: 615
  Gene Symbol: ASXL3
  Gene Name: additional sex combs like transcriptional regulator 3
  ENST ID: ENST00000592288
  CDS Start-End: 18-974
atcaatgagatgcaaacatgaaagacaagaggaagaagaaggaccgcacctgggccgaggctgcccgcctggcactagaaaaacaccccaactcaccaatgacagcaaagcagatattggaagtcattcagaaagaagggttaaaagaaacaagaaatggaacctctccattagcctgtctgaatgcaatgcttcacactaacactcgaataggggatggaacattcttcaaaatccctggaaagtcaggcctctatgctctcaaaaaagaggagtcgtcatgcccagcagatggcacgttggatttagtctgtgaatctgaattggatggtacagatatggccgaggcaaatgcccatggagaagaaaatggagtttgttcgaagcaggtaactgatgaagcatcttccactcgagattcaagccttactaacacagcagtgcaaagcaagttagtgtcttccttccagcagcacaccaaaaaggctcttaaacaggctttgaggcagcagcagaaaagaagaaatggagtctcaatgatggtaaacaagactgttcctcgtgttgttttgacaccattaaaggtgtctgatgagcagtcggattcgccttcaggatctgaatctaaaaatggtgaagcagacagttcagataaagaaatgaaacatgggcaaaaatctcccactggaaaacaaacaagtcagcacttaaaacgattaaaaaagtctggtttagggcacttgaaatggaccaaagctgaggacattgacatagaaaccccaggatctattcttgtcaacactaacttgagggcattaataaataaacatacgtttgcttccttacctcagcattttcaacaatacctcctgcttttgctcccagaagtggataggcagtccaggaatgaaccctttcttcaagaagccatggttcccattagtggaggatgtcatgaaatcaagatgtcatgaaagatgggaagtgatggaattttacgcctcagtacttcagctctaaataatgaattctttgcatatgcagcacaagggtggaaacagcgactggcagaaggagagtttaccccagaaatgcagttgcggataaggcaagaaattgagaaggaaaagaaaacagaaccttggaaagaaaaattctttgagaggttttatggagaaaagctgggcatgtcaagagaggaatctgtgaagctcactactggaccaaacaacgctggagctcaaagtagttcttcatgtgggacttctggccttccagtttctgcacagacagccttggcagaacaacagccaaaaagcatgaaaagcccagcttctccagagcctggtttctgtgctactctttgccctatggtagaaattccacctaaagatataatggcagaattggagtcagaggatatcttgatccctgaagaatctgtaattcaggaggaaattgcagaagaggtagagactagtatctgtgaatgccaggatgaaaatcataagacaatacctgaattttctgaggaggctgaaagtctaaccaattctcatgaagaaccccaaatagcacctcctgaagataacttggaatcctgtgttatgatgaatgatgttttagaaactttgcctcatattgaagttaagatagaagggaagtcagaatcaccccaggaagaaatgacagttgttatcgatcagttagaagtctgtgactctcttattccttccacttcatctatgactcatgtcagtgacacagaacataaggagtcagaaactgcagtagagaccagtacccccaaaataaaaacagggtcatcttctctagaaggccagtttccaaatgaaggaattgctatagatatggagctacagagtgaccctgaagaacagctttcagaaaatgcctgcatctctgaaacgtccttttcttctgagagcccagagggagcctgtaccagcctgccttctccaggaggggaaacacagtccacatcagaagaatcatgtactccagcctcccttgagacaacattttgttctgaggtatctagcactgaaaatacagacaaatacaaccagagaaattccactgatgaaaactttcatgcatctttgatgtcagaaatatctccaatatccacttcacctgaaatatcagaagcatctcttatgtccaacttaccattaacatctgaagcatcaccagtatccaacttacctttaacatcagaaacctcaccgatgtctgacttacctttaacatcagaaacttcttcagtgtcttccatgcttctcacctctgagaccacttttgtatccagtttgccacttccttcagaaacatctccaatttccaactcttccataaatgagagaatggcacatcagcaaagaaagtcaccttctgtatctgaagagccactctccccgcagaaagatgagtcttccgccactgccaaacctctgggagagaaccttacctcccagcagaagaatctgtctaatactcccgaacccatcataatgagttcttcttccattgctcctgaagcatttccgtctgaagatttgcacaataagaccctgagtcagcaaacctgtaaatcacatgttgacactgagaagccctaccctgcttcaattccagaacttgcttctactgaaatgataaaagttaaaaatcatagcgtcctgcaaagaacagaaaaaaaagtgttaccttcaccattggaattatctgtcttttctgaagggacagataataagggaaatgagcttccatctgctaaattacaggacaagcaatatatctcatcagtggataaggctccattttcagaaggctctagaaataaaacacataagcaagggagtacacagagtcggttagaaacctcacatacttccaagtcatcagagccctccaagtcacctgatgggataagaaatgaaagtagagattcagagatatcaaagagaaaaactgcagagcaacacagctttggaatctgtaaggaaaagagagctaggatagaagatgatcagtcaacccggaacatatcatctagcagcccacctgagaaagaacagcctcccagagaggaaccaagggttccccctctcaagattcagctttccaaaattgggccaccttttataatcaagagccaaccagtctccaaacctgagtctcgagcatccactagcacatctgtcagtggcgggaggaacacaggagccaggaccctcgcagatatcaaggcccgggcccaacaagctcgggcccagcgagaggctgctgcagctgctgctgtggctgctgcagcgagcattgtctctggagccatgggaagtccaggagagggtggaaagacgagaactctggcacacatcaaagagcagacaaaggctaagctctttgcaaagcatcaagctcgagcccatctcttccagacctctaaagagacccggttgcctcctccgctcagctcaaaggaagggcctccaaacttagaagtctcttctacccctgaaacaaaaatggaaggttcgactggtgtcattattgtcaatccaaactgtagatctcctagcaacaagtctgcccacctccgggagaccaccactgtactacagcagtctcttaacccaagtaaacttccagaaactgccactgacttatctgtgcatagttctgatgaaaacatacctgtgtcacatttatctgagaaaattgtttcatctacctcttctgaaaatagcagtgtgcccatgctttttaataaaaattctgtccctgt

SEQ ID NO: 105049 - DNA, 523 bp, Homo sapiens
  Payload ID: 615
  Gene Symbol: ASXL3
  Gene Name: additional sex combs like transcriptional regulator 3
  ENST ID: ENST00000586596
  CDS Start-End: 1-523
gggccgaggctgcccgcctggcactagaaaaacaccccaactcaccaatgacagcaaagcagatattggaagtcattcagaaagaagggttaaaagaaacaagaaatggaacctctccattagcctgtctgaatgcaatgcttcacactaacactcgaataggggatggaacattcttcaaaatccctggaaagtcaggcctctatgctctcaaaaaagaggagtcgtcatgcccagcagatggcacgttggatttagtctgtgaatctgaattggatggtacagatatggccgaggcaaatgcccatggagaagaaaatggagtttgttcgaagcaggtaactgatgaagcatcttccactcgagattcaagccttactaacacagcagtgcaaagcaagttagtgtcttccttccagcagcacaccaaaaaggctcttaaacaggctttgaggcagcagcagaaaagaagaaatggagtctcaatgatggtaaacaagactgttcctcgtgttgttttgac

SEQ ID NO: 105050 - DNA, 573 bp, Homo sapiens
  Payload ID: 615
  Gene Symbol: ASXL3
  Gene Name: additional sex combs like transcriptional regulator 3
  ENST ID: ENST00000588741
  CDS Start-End: 88-192
gagctgcccaggtgtgctgaggggcctgtactcaggaagagaaacagggaatcctccacagcactagaaaaacaccccaactcaccaatgacagcaaagcagatattggaagtcattcagaaagaagggttaaaagaaacaagtctggtttcagaccccggcatggcttggagacagcgttggtgtgtatgaaggatcttcctccaatgaaggatttgggacaactttccatgatgattatattagagcctcagctgctttcgtgttggtcatgaggtgatgctgaaccgaatgcttgaactagcaggagtggctgggattgcattggagtggttccgttcattccttccggaaatggaacctctccattagcctgtctgaatgcaatgcttcacactaacactcgaataggggatggaacattcttcaaaatccctggaaagtcaggcctctatgctctcaaaaaagaggagtcgtcatgcccagcagatggcacgttggatttagtctgtgaatctgaattggatggtacagatatggccgaggcaaatgcccatggagaagaaaatggag

SEQ ID NO: 105051 - DNA, 594 bp, Homo sapiens
  Payload ID: 615
  Gene Symbol: ASXL3
  Gene Name: additional sex combs like transcriptional regulator 3
  ENST ID: ENST00000593195
  CDS Start-End: 1-186
atgaaagacaagaggaagaagaaggaccgcacctgggccgaggctgcccgcctggcactagaaaaacaccccaactcaccaatgacagcaaagcagatattggaagtcattcagaaagaagggttaaaagaaacaagtctggtttcagaccccggcatggcttggagacagcgttggtgtgtatgaaggatcttcctccaatgaaggatttgggacaactttccatgatgattatattagagcctcagctgctttcgtgttggtcatgaggtgatgctgaaccgaatgcttgaactagcaggagtggctgggattgcattggagtggttccgttcattccttccggtggaacctctccattagcctgtctgaatgcaatgcttcacactaacactcgaataggggatggaacattcttcaaaatccctggaaagtcaggcctctatgctctcaaaaaagaggagtcgtcatgcccagcagatggcacgttggatttagtctgtgaatctgaattggatggtacagatatggccgaggcaaatgcccatggagaagaaaatggagtttgttcgaagcaggtaactgatgaagcat

SEQ ID NO: 105052 - DNA, 544 bp, Homo sapiens
  Payload ID: 615
  Gene Symbol: ASXL3
  Gene Name: additional sex combs like transcriptional regulator 3
  ENST ID: ENST00000586327
  CDS Start-End: 101-544
caattgctgggaggagctgcccaggtgtgctgaggggcctgtactcaggaagagaaacagggaatcctccacagcactagaaaaacaccccaactcaccaatgacagcaaagcagatattggaagtcattcagaaagaagggttaaaagaaacaagttctggaagacagaaagcccagattaaggttggcagtgtccgtttctgtggaacctctccattagcctgtctgaatgcaatgcttcacactaacactcgaataggggatggaacattcttcaaaatccctggaaagtcaggcctctatgctctcaaaaaagaggagtcgtcatgcccagcagatggcacgttggatttagtctgtgaatctgaattggatggtacagatatggccgaggcaaatgcccatggagaagaaaatggagtttgttcgaagcaggtaactgatgaagcatcttccactcgagattcaagccttactaacacagcagtgcaaagcaagttagtgtcttccttccagcagcacaccaaaaaggctcttaaacag

SEQ ID NO: 105053 - DNA, 752 bp, Homo sapiens
  Payload ID: 615
  Gene Symbol: ASXL3
  Gene Name: additional sex combs like transcriptional regulator 3
  ENST ID: ENST00000592541
  CDS Start-End: 70-246
aggaagaagaaggaccgcacctgggccgaggctgcccgcctggcactagaaaaacaccccaactcaccaatgacagcaaagcagatattggaagtcattcagaaagaagggttaaaagaaacaagaccccggcatggcttggagacagcgttggtgtgtatgaaggatcttcctccaatgaaggatttgggacaactttccatgatgattatattagagcctcagctgctttcgtgttggtcatgaggtgatgctgaaccgaatgcttgaactagcaggagtggctgggattgcattggagtggttccgttcattccttccggtggaacctctccattagcctgtctgaatgcaatgcttcacactaacactcgaataggggatggaacattcttcaaaatccctggaaagtcaggcctctatgctctcaaaaaagaggagtcgtcatgcccagcagatggcacgttggatttagtctgtgaatctgaattggatggtacagatatggccgaggcaaatgcccatggagaagaaaatggagtttgttcgaagcaggtaactgatgaagcatcttccactcgagattcaagccttactaacacagcagtgcaaagcaagttagtgtcttccttccagcagcacaccaaaaaggctcttaaacaggctttgaggcagcagcagaaaagaagaaatggagtctcaatgatggtaaacaagactgttcctcgtgttgttttgacaccattaaaggt

SEQ ID NO: 105054 - DNA, 653 bp, Homo sapiens
  Payload ID: 615
  Gene Symbol: ASXL3
  Gene Name: additional sex combs like transcriptional regulator 3
  ENST ID: ENST00000585426
  CDS Start-End: 93-197
gggaggagctgcccaggtgtgctgaggggcctgtactcaggaagagaaacagggaatcctccacagcactagaaaaacaccccaactcaccaatgacagcaaagcagatattggaagtcattcagaaagaagggttaaaagaaacaagttctggaagacagaaagcccagattaaggttggcagtgtccgtttctgaccccggcatggcttggagacagcgttggtgtgtatgaaggatcttcctccaatgaaggatttgggacaactttccatgatgattatattagagcctcagctgctttcgtgttggtcatgaggtgatgctgaaccgaatgcttgaactagcaggagtggctgggattgcattggagtggttccgttcattccttccggtggaacctctccattagcctgtctgaatgcaatgcttcacactaacactcgaataggggatggaacattcttcaaaatccctggaaagtcaggcctctatgctctcaaaaaagaggagtcgtcatgcccagcagatggcacgttggatttagtctgtgaatctgaattggatggtacagatatggccgaggcaaatgcccatggagaagaaaatggagtcatgttcgggaccactctacaagtacagaagatgtgtata

SEQ ID NO: 105055 - DNA, 493 bp, Homo sapiens
  Payload ID: 615
  Gene Symbol: ASXL3
  Gene Name: additional sex combs like transcriptional regulator 3
  ENST ID: ENST00000593235
  CDS Start-End: 61-165
gtactcaggaagagaaacagggaatcctccacagcactagaaaaacaccccaactcaccaatgacagcaaagcagatattggaagtcattcagaaagaagggttaaaagaaacaagtctggtttcagaccccggcatggcttggagacagcgttggtgtgtatgaaggatcttcctccaatgaaggatttgggacaactttccatgatgattatattagagcctcagctgctttcgtgttggtcatgaggtgatgctgaaccgaatgcttgaactagcaggagtggctgggattgcattggagtggttccgttcattccttccggtttgttcgaagcaggtaactgatgaagcatcttccactcgagattcaagccttactaacacagcagtgcaaagcaagttagtgtcttccttccagcagcacaccaaaaaggctcttaaacaggctttgaggcagcagcagaaaagaagaaatggagtctcaatgatgg

SEQ ID NO: 105056 - DNA, 538 bp, Homo sapiens
  Payload ID: 615
  Gene Symbol: ASXL3
  Gene Name: additional sex combs like transcriptional regulator 3
  ENST ID: ENST00000590189
  CDS Start-End: 1-538
aagaggaagaagaaggaccgcacctgggccgaggctgcccgcctggcactagaaaaacaccccaactcaccaatgacagcaaagcagatattggaagtcattcagaaagaagggttaaaagaaacaagtggaacctctccattagcctgtctgaatgcaatgcttcacactaacactcgaataggggatggaacattcttcaaaatccctggaaagtcaggcctctatgctctcaaaaaagaggagtcgtcatgcccagcagatggcacgttggatttagtctgtgaatctgaattggatggtacagatatggccgaggcaaatgcccatggagaagaaaatggagtttgttcgaagcaggtaactgatgaagcatcttccactcgagattcaagccttactaacacagcagtgcaaagcaagttagtgtcttccttccagcagcacaccaaaaaggctcttaaacaggctttgaggcagcagcagaaaagaagaaatggagtctcaatgatggtaaacaagactgttcctcgtgttg

SEQ ID NO: 105057 - DNA, 572 bp, Homo sapiens
  Payload ID: 615
  Gene Symbol: ASXL3
  Gene Name: additional sex combs like transcriptional regulator 3
  ENST ID: ENST00000588038
  CDS Start-End: 100-159
aattgctgggaggagctgcccaggtgtgctgaggggcctgtactcaggaagagaaacagggaatcctccacagcactagaaaaacaccccaactcaccaatgacagcaaagcagatattggaagtcattcagaaagaagggttaaaagaaacaagatagaaaataactgacaaggatggaatggggtcaagtagagcaagttaagtggagataagaagacagaattctgttaaccttaaatgcaattatatatgatgagcatttttatagatagcagcttgactcaaaaataatttagggacaaactattttccatttgggatcacctcaacaaccttaacaggcagcaccaggtcttcatatgcttttaagtttaccttctgctatggaaaggatctttccttgaatgttcatattttcatcttgagaagtctggtttcagaccccggcatggcttggagacagcgttggtgtgtatgaaggatcttcctccaatgaaggatttgggacaactttccatgatgattatattagagcctcagctgctttcgtgttggtcatgaggtgatgct

SEQ ID NO: 105058 - DNA, 546 bp, Homo sapiens
  Payload ID: 615
  Gene Symbol: ASXL3
  Gene Name: additional sex combs like transcriptional regulator 3
  ENST ID: ENST00000590225
  CDS Start-End: 79-255
aggtgtgctgaggggcctgtactcaggaagagaaacagggaatcctccacagcactagaaaaacaccccaactcaccaatgacagcaaagcagatattggaagtcattcagaaagaagggttaaaagaaacaagaccccggcatggcttggagacagcgttggtgtgtatgaaggatcttcctccaatgaaggatttgggacaactttccatgatgattatattagagcctcagctgctttcgtgttggtcatgaggtgatgctgaaccgaatgcttgaactagcaggagtggctgggattgcattggagtggttccgttcattccttccggtggaacctctccattagcctgtctgaatgcaatgcttcacactaacactcgaataggggatggaacattcttcaaaatccctggaaagtcaggcctctatgctctcaaaaaagaggagtcgtcatgcccagcagatggcacgttggatttagtctgtgaatctgaattggatggtacagatatggccgaggcaaatgcccatggagaagaaaat

SEQ ID NO: 105059 - DNA, 4045 bp, Homo sapiens
  Payload ID: 616
  Gene Symbol: ADD1
  Gene Name: adducin 1 (alpha)
  Uniprot ID: P35611
  ENST ID: ENST00000264758
  CDS Start-End: 189-2495
gcacccaggtcgggcggtgggggcgagcggaggggctgaggggcggagaggcctggcgggccgctgctgcgggccaggggacgggggcggagccggagccggagccgacgggcggtggccgcactgggaccccggaatcccgcgcgctgcccacgattcgcttctgaggaacctagaaagattgtacaatgaatggtgattctcgtgctgcggtggtgacctcaccacccccgaccacagcccctcacaaggagaggtacttcgaccgagtagatgagaacaacccagagtacttgagggagaggaacatggcaccagaccttcgccaggacttcaacatgatggagcaaaagaagagggtgtccatgattctgcaaagccctgctttctgtgaagaattggaatcaatgatacaggagcaatttaagaaggggaagaaccccacaggcctattggcattacagcagattgcagattttatgaccacgaatgtaccaaatgtctacccagcagctccgcaaggagggatggctgccttaaacatgagtcttggtatggtgactcctgtgaacgatcttagaggatctgattctattgcgtatgacaaaggagagaagttattacggtgtaaattggcagcgttttatagactagcagatctctttgggtggtctcagcttatctacaatcatatcacaaccagagtgaactccgagcaggaacacttcctcattgtcccttttgggcttctttacagtgaagtgactgcatccagtttggttaagatcaatctacaaggagatatagtagatcgtggaagcactaatctgggagtgaatcaggccggcttcaccttacactctgcaatttatgctgcacgcccggacgtgaagtgcgtcgtgcacattcacaccccagcaggggctgcggtctctgcaatgaaatgtggcctcttgccaatctccccggaggcgctttcccttggagaagtggcttatcatgactaccatggcattctggttgatgaagaggaaaaagttttgattcagaaaaatctggggcctaaaagcaaggttcttattctccggaaccatgggctcgtgtcagttggagagagcgttgaggaggccttctattacatccataaccttgtggttgcctgtgagatccaggttcgaactctggccagtgcaggaggaccagacaacttagtcctgctgaatcctgagaagtacaaagccaagtcccgttccccagggtctccggtaggggaaggcactggatcgcctcccaagtggcagattggtgagcaggaatttgaagccctcatgcggatgctcgataatctgggctacagaactggctacccttatcgataccctgctctgagagagaagtctaaaaaatacagcgatgtggaggttcctgctagtgtcacaggttactcctttgctagtgacggtgattcgggcacttgctccccactcagacacagttttcagaagcagcagcgggagaagacaagatggctgaactctggccggggcgacgaagcttccgaggaagggcagaatggaagcagtcccaagtcgaagactaaggtgtggacgaacattacacacgatcacgtgaaacccttgctgcagtctctctcgtccggtgtctgcgtgccaagctgtattaccaactgcttgtggactaaagaggatggacatagaacttccacctctgctgtccctaacctgtttgttccattgaacactaacccaaaagaggtccaggagatgaggaacaagatccgagagcagaatttacaggacattaagacggctggccctcagtcccaggttttgtgtggtgtagtgatggacaggagcctcgtccagggagagctggtgacggcctccaaggccatcattgaaaaggagtaccagccccacgtcattgtgagcaccacgggccccaaccccttcaccacactcacagaccgtgagctggaggagtaccgcagggaggtggagaggaagcagaagggctctgaagagaatctggacgaggctagagaacagaaagaaaagagtcctccagaccagcctgcggtcccccacccgcctcccagcactcccatcaagctggaggaagaccttgtgccggagccgactactggagatgacagtgatgctgccacctttaagccaactctccccgatctgtcccctgatgaaccttcagaagcactcggcttcccaatgttagagaaggaggaggaagcccatagacccccaagccccactgaggcccctactgaggccagccccgagccagccccagacccagccccggtggctgaagaggctgccccctcagctgtcgaggagggggccgccgcggaccctggcagcgatgggtctccaggcaagtccccgtccaaaaagaagaagaagttccgtaccccgtcctttctgaagaagagcaagaagaagagtgactcctgaaagccctgcgctaacactgtcctgtccggagcgaccctggctctgccagcgtccccggccacgtctgtgctctgtccttgtgtaatggaatgcaaaaaagccaagccctccgcctagaggtcccctcacgtgaccagccccgtgtagccccgggctgacccagtgtgtgctcagcagccccaccccaccctgccccttgtcctctcagagcctcagcttctgggggagacatgctctccccacaggggggaggcactaagtcatggtcctggctggaaggtactgaaggcttctgcagctttggctgcacgtcaccctcctgagcctcacctttcctgccgtccctcctgttgtgaaatcaccacattctgtctctgcttggcttcccctccaccctaaagtctcaggtgacggactcagactcctggcttcatgtggcattctctctgctcagtgatctcacttaaatctatatacaaagccttggtcccgtgaaaacactcgtgtgcccaccagcggccttgaagaggcaggtctgggccagatgctgggcaggaaaccccagcggcagatgggcctgtgtgcacccaacgtgatgctatgcatgtctgaccgacgatccctcgaccagaatcagattcaggagctcagtttctttttcacttgggtctctggattcctgtcatagggaaggtatatcaggaggggaagaggcctttctagaattttctttgagcaggtttacaatttagcttacatttttcgactgtgaacgtgaataggctgctttttgctttcttctttccagaccccacagtagagcacttttcacttatttgggggaggcttcaggggactgttctcaccttaactcagccagaaagatgccctagttgtgatcaaaggtaactcgaggtggagggtagccctggggcccctcgacatcaccgtcattgatggagcctgaaccgtgtgctcctcggcagatgctgttgttgttacttccctccaagaggctggaaaagggctcagagctgctgagcaggaaccggagggtgacccatttcaggaggtgccggtaccagcctgactaggtacaggcaagcttgtgtgggcccaacaggcccttggtagagctggtgccagatgtgggctcagatcctgggcatgatgggccgagccacctcggatcccactgattggccagccgagcgagaaccaggctgctgcatggcactgaccgccgcttccagcttcctctgagccgcagggcctgctacgcgggcaagcgtgctgcctctcttctgtgtcgttttgttgccaaggcagaatgaaaagtccttaaccgtggactcttcctttatcccctcctttaccccacatatgcaatgacttttaattttcacttttgtagtttaatcctttgtattacaacatgaaatatagttgcatatatggacaccgacttgggaggacaggtcctgaatgtcctttctccagtgtaacatgttttactcacaaataaaattctttcagcaagttccttgtct

SEQ ID NO: 105060 - DNA, 4743 bp, Homo sapiens
  Payload ID: 616
  Gene Symbol: ADD1
  Gene Name: adducin 1 (alpha)
  Uniprot ID: P35611
  ENST ID: ENST00000355842
  CDS Start-End: 864-2852
gggggcggggaggccgctgcggcgccgagggcgtcttggaggggtccccgcggggccttcggcctgggccgagccggggagcgagggcgccgcagatctttcatcgggataggaccccggggactaggcttttcccgggccgctcgttcctggccggcttgtgggctgcaggggtgggggcggaggaggacgaccctggctggacgctggtcagcatcctgcttgtgagaccggttccgcggtccgcagcgctggtggctgcaaggtttgtgtacggacgcatctgtcggctctcgtatttaaaaacgacggcttctgccaaaagagaaaagccatatctgccgacggacgctcgagagataatcgtggaactttatcagcgatggggctgttggtcacctttgccctccctctcttttcttttttcttaatcttttattttcgttttttgggagatgtcagagggcctttccctgttaggatgacttttatctttgctcttgtaatggctcaagatagttgggaggtaatttgcattcactttatgcatacccaccttgaaaaacgtattttggttcgcctgaaactgttgttggtttgagcataatttatgtttagaaagacaaaaagcaattgtcatatctccaaagaccaaagacatagctgatagctgtatgcattactggggccttttgagcagctgcttctgcaagaggacatccggagacacaggaatagaaatgatccgatcagagtaattaaaggcttttaactgagctctgaggtcccaaacagggcacactccgtcagcctaaagctgtgaagaagaaccttcaacataaggaacctagaaagattgtacaatgaatggtgattctcgtgctgcggtggtgacctcaccacccccgaccacagcccctcacaaggagaggtacttcgaccgagtagatgagaacaacccagagtacttgagggagaggaacatggcaccagaccttcgccaggacttcaacatgatggagcaaaagaagagggtgtccatgattctgcaaagccctgctttctgtgaagaattggaatcaatgatacaggagcaatttaagaaggggaagaaccccacaggcctattggcattacagcagattgcagattttatgaccacgaatgtaccaaatgtctacccagcagctccgcaaggagggatggctgccttaaacatgagtcttggtatggtgactcctgtgaacgatcttagaggatctgattctattgcgtatgacaaaggagagaagttattacggtgtaaattggcagcgttttatagactagcagatctctttgggtggtctcagcttatctacaatcatatcacaaccagagtgaactccgagcaggaacacttcctcattgtcccttttgggcttctttacagtgaagtgactgcatccagtttggttaagatcaatctacaaggagatatagtagatcgtggaagcactaatctgggagtgaatcaggccggcttcaccttacactctgcaatttatgctgcacgcccggacgtgaagtgcgtcgtgcacattcacaccccagcaggggctgcggtctctgcaatgaaatgtggcctcttgccaatctccccggaggcgctttcccttggagaagtggcttatcatgactaccatggcattctggttgatgaagaggaaaaagttttgattcagaaaaatctggggcctaaaagcaaggttcttattctccggaaccatgggctcgtgtcagttggagagagcgttgaggaggccttctattacatccataaccttgtggttgcctgtgagatccaggttcgaactctggccagtgcaggaggaccagacaacttagtcctgctgaatcctgagaagtacaaagccaagtcccgttccccagggtctccggtaggggaaggcactggatcgcctcccaagtggcagattggtgagcaggaatttgaagccctcatgcggatgctcgataatctgggctacagaactggctacccttatcgataccctgctctgagagagaagtctaaaaaatacagcgatgtggaggttcctgctagtgtcacaggttactcctttgctagtgacggtgattcgggcacttgctccccactcagacacagttttcagaagcagcagcgggagaagacaagatggctgaactctggccggggcgacgaagcttccgaggaagggcagaatggaagcagtcccaagtcgaagactaagtggactaaagaggatggacatagaacttccacctctgctgtccctaacctgtttgttccattgaacactaacccaaaagaggtccaggagatgaggaacaagatccgagagcagaatttacaggacattaagacggctggccctcagtcccaggttttgtgtggtgtagtgatggacaggagcctcgtccaggatgcacctctctctgactgtacggaaactatcgaagggctcgagcttacagagcagacctttagtcccgctaaatctctctcttttagaaagggagagctggtgacggcctccaaggccatcattgaaaaggagtaccagccccacgtcattgtgagcaccacgggccccaaccccttcaccacactcacagaccgtgagctggaggagtaccgcagggaggtggagaggaagcagaagggctctgaagagaatctggacgaggctagagaacagaaagaaaagagtcctccagaccagcctgcggtcccccacccgcctcccagcactcccatcaagctggaggaaggagacggatgcgctagagagtacctgttaccctaaccttgtgccggagccgactactggagatgacagtgatgctgccacctttaagccaactctccccgatctgtcccctgatgaaccttcagaagcactcggcttcccaatgttagagaaggaggaggaagcccatagacccccaagccccactgaggcccctactgaggccagccccgagccagccccagacccagccccggtggctgaagaggctgccccctcagctgtcgaggagggggccgccgcggaccctggcagcgatgggtctccaggcaagtccccgtccaaaaagaagaagaagttccgtaccccgtcctttctgaagaagagcaagaagaagagtgactcctgaaagccctgcgctaacactgtcctgtccggagcgaccctggctctgccagcgtccccggccacgtctgtgctctgtccttgtgtaatggaatgcaaaaaagccaagccctccgcctagaggtcccctcacgtgaccagccccgtgtagccccgggctgacccagtgtgtgctcagcagccccaccccaccctgccccttgtcctctcagagcctcagcttctgggggagacatgctctccccacaggggggaggcactaagtcatggtcctggctggaaggtactgaaggcttctgcagctttggctgcacgtcaccctcctgagcctcacctttcctgccgtccctcctgttgtgaaatcaccacattctgtctctgcttggcttcccctccaccctaaagtctcaggtgacggactcagactcctggcttcatgtggcattctctctgctcagtgatctcacttaaatctatatacaaagccttggtcccgtgaaaacactcgtgtgcccaccagcggccttgaagaggcaggtctgggccagatgctgggcaggaaaccccagcggcagatgggcctgtgtgcacccaacgtgatgctatgcatgtctgaccgacgatccctcgaccagaatcagattcaggagctcagtttctttttcacttgggtctctggattcctgtcatagggaaggtatatcaggaggggaagaggcctttctagaattttctttgagcaggtttacaatttagcttacatttttcgactgtgaacgtgaataggctgctttttgctttcttctttccagaccccacagtagagcacttttcacttatttgggggaggcttcaggggactgttctcaccttaactcagccagaaagatgccctagttgtgatcaaaggtaactcgaggtggagggtagccctggggcccctcgacatcaccgtcattgatggagcctgaaccgtgtgctcctcggcagatgctgttgttgttacttccctccaagaggctggaaaagggctcagagctgctgagcaggaaccggagggtgacccatttcaggaggtgccggtaccagcctgactaggtacaggcaagcttgtgtgggcccaacaggcccttggtagagctggtgccagatgtgggctcagatcctgggcatgatgggccgagccacctcggatcccactgattggccagccgagcgagaaccaggctgctgcatggcactgaccgccgcttccagcttcctctgagccgcagggcctgctacgcgggcaagcgtgctgcctctcttctgtgtcgttttgttgccaaggcagaatgaaaagtccttaaccgtggactcttcctttatcccctcctttaccccacatatgcaatgacttttaattttcacttttgtagtttaatcctttgtattacaacatgaaatatagttgcatatatggacaccgacttgggaggacaggtcctgaatgtcctttctccagtgtaacatgttttactcacaaataaaattctttcagcaa

SEQ ID NO: 105061 - DNA, 2361 bp, Homo sapiens
  Payload ID: 616
  Gene Symbol: ADD1
  Gene Name: adducin 1 (alpha)
  Uniprot ID: P35611
  ENST ID: ENST00000398123
  CDS Start-End: 21-2009
gaacctagaaagattgtacaatgaatggtgattctcgtgctgcggtggtgacctcaccacccccgaccacagcccctcacaaggagaggtacttcgaccgagtagatgagaacaacccagagtacttgagggagaggaacatggcaccagaccttcgccaggacttcaacatgatggagcaaaagaagagggtgtccatgattctgcaaagccctgctttctgtgaagaattggaatcaatgatacaggagcaatttaagaaggggaagaaccccacaggcctattggcattacagcagattgcagattttatgaccacgaatgtaccaaatgtctacccagcagctccgcaaggagggatggctgccttaaacatgagtcttggtatggtgactcctgtgaacgatcttagaggatctgattctattgcgtatgacaaaggagagaagttattacggtgtaaattggcagcgttttatagactagcagatctctttgggtggtctcagcttatctacaatcatatcacaaccagagtgaactccgagcaggaacacttcctcattgtcccttttgggcttctttacagtgaagtgactgcatccagtttggttaagatcaatctacaaggagatatagtagatcgtggaagcactaatctgggagtgaatcaggccggcttcaccttacactctgcaatttatgctgcacgcccggacgtgaagtgcgtcgtgcacattcacaccccagcaggggctgcggtctctgcaatgaaatgtggcctcttgccaatctccccggaggcgctttcccttggagaagtggcttatcatgactaccatggcattctggttgatgaagaggaaaaagttttgattcagaaaaatctggggcctaaaagcaaggttcttattctccggaaccatgggctcgtgtcagttggagagagcgttgaggaggccttctattacatccataaccttgtggttgcctgtgagatccaggttcgaactctggccagtgcaggaggaccagacaacttagtcctgctgaatcctgagaagtacaaagccaagtcccgttccccagggtctccggtaggggaaggcactggatcgcctcccaagtggcagattggtgagcaggaatttgaagccctcatgcggatgctcgataatctgggctacagaactggctacccttatcgataccctgctctgagagagaagtctaaaaaatacagcgatgtggaggttcctgctagtgtcacaggttactcctttgctagtgacggtgattcgggcacttgctccccactcagacacagttttcagaagcagcagcgggagaagacaagatggctgaactctggccggggcgacgaagcttccgaggaagggcagaatggaagcagtcccaagtcgaagactaaggtgtggacgaacattacacacgatcacgtgaaacccttgctgcagtctctctcgtccggtgtctgcgtgccaagctgtattaccaactgcttgtggactaaagaggatggacatagaacttccacctctgctgtccctaacctgtttgttccattgaacactaacccaaaagaggtccaggagatgaggaacaagatccgagagcagaatttacaggacattaagacggctggccctcagtcccaggttttgtgtggtgtagtgatggacaggagcctcgtccagggagagctggtgacggcctccaaggccatcattgaaaaggagtaccagccccacgtcattgtgagcaccacgggccccaaccccttcaccacactcacagaccgtgagctggaggagtaccgcagggaggtggagaggaagcagaagggctctgaagagaatctggacgaggctagagaacagaaagaaaagagtcctccagaccagcctgcggtcccccacccgcctcccagcactcccatcaagctggaggaaggagacggatgcgctagagagtacctgttaccctaaccttgtgccggagccgactactggagatgacagtgatgctgccacctttaagccaactctccccgatctgtcccctgatgaaccttcagaagcactcggcttcccaatgttagagaaggaggaggaagcccatagacccccaagccccactgaggcccctactgaggccagccccgagccagccccagacccagccccggtggctgaagaggctgccccctcagctgtcgaggagggggccgccgcggaccctggcagcgatgggtctccaggcaagtccccgtccaaaaagaagaagaagttccgtaccccgtcctttctgaagaagagcaagaagaagagtgactcctga

SEQ ID NO: 105062 - DNA, 4079 bp, Homo sapiens
  Payload ID: 616
  Gene Symbol: ADD1
  Gene Name: adducin 1 (alpha)
  Uniprot ID: P35611
  ENST ID: ENST00000398125
  CDS Start-End: 189-2177
gcacccaggtcgggcggtgggggcgagcggaggggctgaggggcggagaggcctggcgggccgctgctgcgggccaggggacgggggcggagccggagccggagccgacgggcggtggccgcactgggaccccggaatcccgcgcgctgcccacgattcgcttctgaggaacctagaaagattgtacaatgaatggtgattctcgtgctgcggtggtgacctcaccacccccgaccacagcccctcacaaggagaggtacttcgaccgagtagatgagaacaacccagagtacttgagggagaggaacatggcaccagaccttcgccaggacttcaacatgatggagcaaaagaagagggtgtccatgattctgcaaagccctgctttctgtgaagaattggaatcaatgatacaggagcaatttaagaaggggaagaaccccacaggcctattggcattacagcagattgcagattttatgaccacgaatgtaccaaatgtctacccagcagctccgcaaggagggatggctgccttaaacatgagtcttggtatggtgactcctgtgaacgatcttagaggatctgattctattgcgtatgacaaaggagagaagttattacggtgtaaattggcagcgttttatagactagcagatctctttgggtggtctcagcttatctacaatcatatcacaaccagagtgaactccgagcaggaacacttcctcattgtcccttttgggcttctttacagtgaagtgactgcatccagtttggttaagatcaatctacaaggagatatagtagatcgtggaagcactaatctgggagtgaatcaggccggcttcaccttacactctgcaatttatgctgcacgcccggacgtgaagtgcgtcgtgcacattcacaccccagcaggggctgcggtctctgcaatgaaatgtggcctcttgccaatctccccggaggcgctttcccttggagaagtggcttatcatgactaccatggcattctggttgatgaagaggaaaaagttttgattcagaaaaatctggggcctaaaagcaaggttcttattctccggaaccatgggctcgtgtcagttggagagagcgttgaggaggccttctattacatccataaccttgtggttgcctgtgagatccaggttcgaactctggccagtgcaggaggaccagacaacttagtcctgctgaatcctgagaagtacaaagccaagtcccgttccccagggtctccggtaggggaaggcactggatcgcctcccaagtggcagattggtgagcaggaatttgaagccctcatgcggatgctcgataatctgggctacagaactggctacccttatcgataccctgctctgagagagaagtctaaaaaatacagcgatgtggaggttcctgctagtgtcacaggttactcctttgctagtgacggtgattcgggcacttgctccccactcagacacagttttcagaagcagcagcgggagaagacaagatggctgaactctggccggggcgacgaagcttccgaggaagggcagaatggaagcagtcccaagtcgaagactaaggtgtggacgaacattacacacgatcacgtgaaacccttgctgcagtctctctcgtccggtgtctgcgtgccaagctgtattaccaactgcttgtggactaaagaggatggacatagaacttccacctctgctgtccctaacctgtttgttccattgaacactaacccaaaagaggtccaggagatgaggaacaagatccgagagcagaatttacaggacattaagacggctggccctcagtcccaggttttgtgtggtgtagtgatggacaggagcctcgtccagggagagctggtgacggcctccaaggccatcattgaaaaggagtaccagccccacgtcattgtgagcaccacgggccccaaccccttcaccacactcacagaccgtgagctggaggagtaccgcagggaggtggagaggaagcagaagggctctgaagagaatctggacgaggctagagaacagaaagaaaagagtcctccagaccagcctgcggtcccccacccgcctcccagcactcccatcaagctggaggaaggagacggatgcgctagagagtacctgttaccctaaccttgtgccggagccgactactggagatgacagtgatgctgccacctttaagccaactctccccgatctgtcccctgatgaaccttcagaagcactcggcttcccaatgttagagaaggaggaggaagcccatagacccccaagccccactgaggcccctactgaggccagccccgagccagccccagacccagccccggtggctgaagaggctgccccctcagctgtcgaggagggggccgccgcggaccctggcagcgatgggtctccaggcaagtccccgtccaaaaagaagaagaagttccgtaccccgtcctttctgaagaagagcaagaagaagagtgactcctgaaagccctgcgctaacactgtcctgtccggagcgaccctggctctgccagcgtccccggccacgtctgtgctctgtccttgtgtaatggaatgcaaaaaagccaagccctccgcctagaggtcccctcacgtgaccagccccgtgtagccccgggctgacccagtgtgtgctcagcagccccaccccaccctgccccttgtcctctcagagcctcagcttctgggggagacatgctctccccacaggggggaggcactaagtcatggtcctggctggaaggtactgaaggcttctgcagctttggctgcacgtcaccctcctgagcctcacctttcctgccgtccctcctgttgtgaaatcaccacattctgtctctgcttggcttcccctccaccctaaagtctcaggtgacggactcagactcctggcttcatgtggcattctctctgctcagtgatctcacttaaatctatatacaaagccttggtcccgtgaaaacactcgtgtgcccaccagcggccttgaagaggcaggtctgggccagatgctgggcaggaaaccccagcggcagatgggcctgtgtgcacccaacgtgatgctatgcatgtctgaccgacgatccctcgaccagaatcagattcaggagctcagtttctttttcacttgggtctctggattcctgtcatagggaaggtatatcaggaggggaagaggcctttctagaattttctttgagcaggtttacaatttagcttacatttttcgactgtgaacgtgaataggctgctttttgctttcttctttccagaccccacagtagagcacttttcacttatttgggggaggcttcaggggactgttctcaccttaactcagccagaaagatgccctagttgtgatcaaaggtaactcgaggtggagggtagccctggggcccctcgacatcaccgtcattgatggagcctgaaccgtgtgctcctcggcagatgctgttgttgttacttccctccaagaggctggaaaagggctcagagctgctgagcaggaaccggagggtgacccatttcaggaggtgccggtaccagcctgactaggtacaggcaagcttgtgtgggcccaacaggcccttggtagagctggtgccagatgtgggctcagatcctgggcatgatgggccgagccacctcggatcccactgattggccagccgagcgagaaccaggctgctgcatggcactgaccgccgcttccagcttcctctgagccgcagggcctgctacgcgggcaagcgtgctgcctctcttctgtgtcgttttgttgccaaggcagaatgaaaagtccttaaccgtggactcttcctttatcccctcctttaccccacatatgcaatgacttttaattttcacttttgtagtttaatcctttgtattacaacatgaaatatagttgcatatatggacaccgacttgggaggacaggtcctgaatgtcctttctccagtgtaacatgttttactcacaaataaaattctttcagcaagttccttgtct

SEQ ID NO: 105063 - DNA, 3787 bp, Homo sapiens
  Payload ID: 616
  Gene Symbol: ADD1
  Gene Name: adducin 1 (alpha)
  Uniprot ID: P35611
  ENST ID: ENST00000398129
  CDS Start-End: 21-2234
gaacctagaaagattgtacaatgaatggtgattctcgtgctgcggtggtgacctcaccacccccgaccacagcccctcacaaggagaggtacttcgaccgagtagatgagaacaacccagagtacttgagggagaggaacatggcaccagaccttcgccaggacttcaacatgatggagcaaaagaagagggtgtccatgattctgcaaagccctgctttctgtgaagaattggaatcaatgatacaggagcaatttaagaaggggaagaaccccacaggcctattggcattacagcagattgcagattttatgaccacgaatgtaccaaatgtctacccagcagctccgcaaggagggatggctgccttaaacatgagtcttggtatggtgactcctgtgaacgatcttagaggatctgattctattgcgtatgacaaaggagagaagttattacggtgtaaattggcagcgttttatagactagcagatctctttgggtggtctcagcttatctacaatcatatcacaaccagagtgaactccgagcaggaacacttcctcattgtcccttttgggcttctttacagtgaagtgactgcatccagtttggttaagatcaatctacaaggagatatagtagatcgtggaagcactaatctgggagtgaatcaggccggcttcaccttacactctgcaatttatgctgcacgcccggacgtgaagtgcgtcgtgcacattcacaccccagcaggggctgcggtctctgcaatgaaatgtggcctcttgccaatctccccggaggcgctttcccttggagaagtggcttatcatgactaccatggcattctggttgatgaagaggaaaaagttttgattcagaaaaatctggggcctaaaagcaaggttcttattctccggaaccatgggctcgtgtcagttggagagagcgttgaggaggccttctattacatccataaccttgtggttgcctgtgagatccaggttcgaactctggccagtgcaggaggaccagacaacttagtcctgctgaatcctgagaagtacaaagccaagtcccgttccccagggtctccggtaggggaaggcactggatcgcctcccaagtggcagattggtgagcaggaatttgaagccctcatgcggatgctcgataatctgggctacagaactggctacccttatcgataccctgctctgagagagaagtctaaaaaatacagcgatgtggaggttcctgctagtgtcacaggttactcctttgctagtgacggtgattcgggcacttgctccccactcagacacagttttcagaagcagcagcgggagaagacaagatggctgaactctggccggggcgacgaagcttccgaggaagggcagaatggaagcagtcccaagtcgaagactaagtggactaaagaggatggacatagaacttccacctctgctgtccctaacctgtttgttccattgaacactaacccaaaagaggtccaggagatgaggaacaagatccgagagcagaatttacaggacattaagacggctggccctcagtcccaggttttgtgtggtgtagtgatggacaggagcctcgtccagggagagctggtgacggcctccaaggccatcattgaaaaggagtaccagccccacgtcattgtgagcaccacgggccccaaccccttcaccacactcacagaccgtgagctggaggagtaccgcagggaggtggagaggaagcagaagggctctgaagagaatctggacgaggctagagaacagaaagaaaagagtcctccagaccagcctgcggtcccccacccgcctcccagcactcccatcaagctggaggaagaccttgtgccggagccgactactggagatgacagtgatgctgccacctttaagccaactctccccgatctgtcccctgatgaaccttcagaagcactcggcttcccaatgttagagaaggaggaggaagcccatagacccccaagccccactgaggcccctactgaggccagccccgagccagccccagacccagccccggtggctgaagaggctgccccctcagctgtcgaggagggggccgccgcggaccctggcagcgatgggtctccaggcaagtccccgtccaaaaagaagaagaagttccgtaccccgtcctttctgaagaagagcaagaagaagagtgactcctgaaagccctgcgctaacactgtcctgtccggagcgaccctggctctgccagcgtccccggccacgtctgtgctctgtccttgtgtaatggaatgcaaaaaagccaagccctccgcctagaggtcccctcacgtgaccagccccgtgtagccccgggctgacccagtgtgtgctcagcagccccaccccaccctgccccttgtcctctcagagcctcagcttctgggggagacatgctctccccacaggggggaggcactaagtcatggtcctggctggaaggtactgaaggcttctgcagctttggctgcacgtcaccctcctgagcctcacctttcctgccgtccctcctgttgtgaaatcaccacattctgtctctgcttggcttcccctccaccctaaagtctcaggtgacggactcagactcctggcttcatgtggcattctctctgctcagtgatctcacttaaatctatatacaaagccttggtcccgtgaaaacactcgtgtgcccaccagcggccttgaagaggcaggtctgggccagatgctgggcaggaaaccccagcggcagatgggcctgtgtgcacccaacgtgatgctatgcatgtctgaccgacgatccctcgaccagaatcagattcaggagctcagtttctttttcacttgggtctctggattcctgtcatagggaaggtatatcaggaggggaagaggcctttctagaattttctttgagcaggtttacaatttagcttacatttttcgactgtgaacgtgaataggctgctttttgctttcttctttccagaccccacagtagagcacttttcacttatttgggggaggcttcaggggactgttctcaccttaactcagccagaaagatgccctagttgtgatcaaaggtaactcgaggtggagggtagccctggggcccctcgacatcaccgtcattgatggagcctgaaccgtgtgctcctcggcagatgctgttgttgttacttccctccaagaggctggaaaagggctcagagctgctgagcaggaaccggagggtgacccatttcaggaggtgccggtaccagcctgactaggtacaggcaagcttgtgtgggcccaacaggcccttggtagagctggtgccagatgtgggctcagatcctgggcatgatgggccgagccacctcggatcccactgattggccagccgagcgagaaccaggctgctgcatggcactgaccgccgcttccagcttcctctgagccgcagggcctgctacgcgggcaagcgtgctgcctctcttctgtgtcgttttgttgccaaggcagaatgaaaagtccttaaccgtggactcttcctttatcccctcctttaccccacatatgcaatgacttttaattttcacttttgtagtttaatcctttgtattacaacatgaaatatagttgcatatatggacaccgacttgggaggacaggtcctgaatgtcctttctccagtgtaacatgttttactcacaaataaaattctttcagcaagttccttgtctaaa

SEQ ID NO: 105064 - DNA, 3745 bp, Homo sapiens
  Payload ID: 616
  Gene Symbol: ADD1
  Gene Name: adducin 1 (alpha)
  ENST ID: ENST00000446856
  CDS Start-End: 124-1326
gctgcgggccaggggacgggggcggagccggagccggagccgacgggcggtggccgcactgggaccccggaatcccgcgcgctgcccacgattcgcttctgaggaacctagaaagattgtacaatgaatggtgattctcgtgctgcggtggtgacctcaccacccccgaccacagcccctcacaaggagaggtacttcgaccgagtagatgagaacaacccagagtacttgagggagaggaacatggcaccagaccttcgccaggacttcaacatgatggagcaaaagaagagggtgtccatgattctgcaaagccctgctttctgtgaagaattggaatcaatgatacaggagcaatttaagaaggggaagaaccccacaggcctattggcattacagcagattgcagattttatgaccacgaatgtaccaaatgtctacccagcagctccgcaaggagggatggctgccttaaacatgagtcttggtatggtgactcctgtgaacgatcttagaggatctgattctattgcgtatgacaaaggagagaagttattacggtgtaaattggcagcgttttatagactagcagatctctttgggtggtctcagcttatctacaatcatatcacaaccagagtgaactccgagcaggaacacttcctcattgtcccttttgggcttctttacagtgaagtgactgcatccagtttggttaagatcaatctacaaggagatatagtagatcgtggaagcactaatctgggagtgaatcaggccggcttcaccttacactctgcaatttatgctgcacgcccggacgtgaagtgcgtcgtgcacattcacaccccagcaggggctgcggtctctgcaatgaaatgtggcctcttgccaatctccccggaggcgctttcccttggagaagtggcttatcatgactaccatggcattctggttgatgaagaggaaaaagttttgattcagaaaaatctggggcctaaaagcaaggttcttattctccggaaccatgggctcgtgtcagttggagagagcgttgaggaggccttctattacatccataaccttgtggttgcctgtgagatccaggttcgaactctggccagtgcaggaggaccagacaacttagtcctgctgaatcctgagaagtacaaagccaagtcccgttccccagggtctccggtaggggaaggcactggatcgcctcccaagtggcagattggtgagcaggaatttgaagccctcatgcggatgctcgataatctgggctacagaactggcagcagcgggagaagacaagatggctgaactctggccggggcgacgaagcttccgaggaagggcagaatggaagcagtcccaagtcgaagactaagtggactaaagaggatggacatagaacttccacctctgctgtccctaacctgtttgttccattgaacactaacccaaaagaggtccaggagatgaggaacaagatccgagagcagaatttacaggacattaagacggctggccctcagtcccaggttttgtgtggtgtagtgatggacaggagcctcgtccagggagagctggtgacggcctccaaggccatcattgaaaaggagtaccagccccacgtcattgtgagcaccacgggccccaaccccttcaccacactcacagaccgtgagctggaggagtaccgcagggaggtggagaggaagcagaagggctctgaagagaatctggacgaggctagagaacagaaagaaaagagtcctccagaccagcctgcggtcccccacccgcctcccagcactcccatcaagctggaggaagaccttgtgccggagccgactactggagatgacagtgatgctgccacctttaagccaactctccccgatctgtcccctgatgaaccttcagaagcactcggcttcccaatgttagagaaggaggaggaagcccatagacccccaagccccactgaggcccctactgaggccagccccgagccagccccagacccagccccggtggctgaagaggctgccccctcagctgtcgaggagggggccgccgcggaccctggcagcgatgggtctccaggcaagtccccgtccaaaaagaagaagaagttccgtaccccgtcctttctgaagaagagcaagaagaagagtgactcctgaaagccctgcgctaacactgtcctgtccggagcgaccctggctctgccagcgtccccggccacgtctgtgctctgtccttgtgtaatggaatgcaaaaaagccaagccctccgcctagaggtcccctcacgtgaccagccccgtgtagccccgggctgacccagtgtgtgctcagcagccccaccccaccctgccccttgtcctctcagagcctcagcttctgggggagacatgctctccccacaggggggaggcactaagtcatggtcctggctggaaggtactgaaggcttctgcagctttggctgcacgtcaccctcctgagcctcacctttcctgccgtccctcctgttgtgaaatcaccacattctgtctctgcttggcttcccctccaccctaaagtctcaggtgacggactcagactcctggcttcatgtggcattctctctgctcagtgatctcacttaaatctatatacaaagccttggtcccgtgaaaacactcgtgtgcccaccagcggccttgaagaggcaggtctgggccagatgctgggcaggaaaccccagcggcagatgggcctgtgtgcacccaacgtgatgctatgcatgtctgaccgacgatccctcgaccagaatcagattcaggagctcagtttctttttcacttgggtctctggattcctgtcatagggaaggtatatcaggaggggaagaggcctttctagaattttctttgagcaggtttacaatttagcttacatttttcgactgtgaacgtgaataggctgctttttgctttcttctttccagaccccacagtagagcacttttcacttatttgggggaggcttcaggggactgttctcaccttaactcagccagaaagatgccctagttgtgatcaaaggtaactcgaggtggagggtagccctggggcccctcgacatcaccgtcattgatggagcctgaaccgtgtgctcctcggcagatgctgttgttgttacttccctccaagaggctggaaaagggctcagagctgctgagcaggaaccggagggtgacccatttcaggaggtgccggtaccagcctgactaggtacaggcaagcttgtgtgggcccaacaggcccttggtagagctggtgccagatgtgggctcagatcctgggcatgatgggccgagccacctcggatcccactgattggccagccgagcgagaaccaggctgctgcatggcactgaccgccgcttccagcttcctctgagccgcagggcctgctacgcgggcaagcgtgctgcctctcttctgtgtcgttttgttgccaaggcagaatgaaaagtccttaaccgtggactcttcctttatcccctcctttaccccacatatgcaatgacttttaattttcacttttgtagtttaatcctttgtattacaacatgaaatatagttgcatatatggacaccgacttgggaggacaggtcctgaatgtcctttctccagtgtaacatgttttactcacaaataaaattctttcagcaagttccttgtct

SEQ ID NO: 105065 - DNA, 3107 bp, Homo sapiens
  Payload ID: 616
  Gene Symbol: ADD1
  Gene Name: adducin 1 (alpha)
  ENST ID: ENST00000513328
  CDS Start-End: 73-1971
ggccgcactgggaccccggaatcccgcgcgctgcccacgattcgcttctgaggaacctagaaagattgtacaatgaatggtgattctcgtgctgcggtggtgacctcaccacccccgaccacagcccctcacaaggagaggtacttcgaccgagtagatgagaacaacccagagtacttgagggagaggaacatggcaccagaccttcgccaggacttcaacatgatggagcaaaagaagagggtgtccatgattctgcaaagccctgctttctgtgaagaattggaatcaatgatacaggagcaatttaagaaggggaagaaccccacaggcctattggcattacagcagattgcagattttatgaccacgaatgtaccaaatgtctacccagcagctccgcaaggagggatggctgccttaaacatgagtcttggtatggtgactcctgtgaacgatcttagaggatctgattctattgcgtatgacaaaggagagaagttattacggtgtaaattggcagcgttttatagactagcagatctctttgggtggtctcagcttatctacaatcatatcacaaccagagtgaactccgagcaggaacacttcctcattgtcccttttgggcttctttacagtgaagtgactgcatccagtttggttaagatcaatctacaaggagatatagtagatcgtggaagcactaatctgggagtgaatcaggccggcttcaccttacactctgcaatttatgctgcacgcccggacgtgaagtgcgtcgtgcacattcacaccccagcaggggctgcggtctctgcaatgaaatgtggcctcttgccaatctccccggaggcgctttcccttggagaagtggcttatcatgactaccatggcattctggttgatgaagaggaaaaagttttgattcagaaaaatctggggcctaaaagcaaggttcttattctccggaaccatgggctcgtgtcagttggagagagcgttgaggaggccttctattacatccataaccttgtggttgcctgtgagatccaggttcgaactctggccagtgcaggaggaccagacaacttagtcctgctgaatcctgagaagtacaaagccaagtcccgttccccagggtctccggtaggggaaggcactggatcgcctcccaagtggcagattggtgagcaggaatttgaagccctcatgcggatgctcgataatctgggctacagaactggctacccttatcgataccctgctctgagagagaagtctaaaaaatacagcgatgtggaggttcctgctagtgtcacaggttactcctttgctagtgacggtgattcgggcacttgctccccactcagacacagttttcagaagcagcagcgggagaagacaagatggctgaactctggccggggcgacgaagcttccgaggaagggcagaatggaagcagtcccaagtcgaagactaagtggactaaagaggatggacatagaacttccacctctgctgtccctaacctgtttgttccattgaacactaacccaaaagaggtccaggagatgaggaacaagatccgagagcagaatttacaggacattaagacggctggccctcagtcccaggttttgtgtggtgtagtgatggacaggagcctcgtccagggagagctggtgacggcctccaaggccatcattgaaaaggagtaccagccccacgtcattgtgagcaccacgggccccaaccccttcaccacactcacagaccgtgagctggaggagtaccgcagggaggtggagaggaagcagaagggctctgaagagaatctggacgaggctagagaacagaaagaaaagagtcctccagaccagcctgcggtcccccacccgcctcccagcactcccatcaagctggaggaagcaggagacggatgcgctagagagtacctgttaccctaaccttgtgccggagccgactactggagatgacagtgatgctgccacctttaagccaactctccccgatctgtcccctgatgaaccttcagaagcactcggcttcccaatgttagagaaggaggaggaagcccatagacccccaagccccactgaggcccctactgaggccagccccgagccagccccagacccagccccggtggctgaagaggctgccccctcagctgtcgaggagggggccgccgcggaccctggcagcgatgggtctccaggcaagtccccgtccaaaaagaagaagaagttccgtaccccgtcctttctgaagaagagcaagaagaagagtgactcctgaaagccctgcgctaacactgtcctgtccggagcgaccctggctctgccagcgtccccggccacgtctgtgctctgtccttgtgtaatggaatgcaaaaaagccaagccctccgcctagaggtcccctcacgtgaccagccccgtgtagccccgggctgacccagtgtgtgctcagcagccccaccccaccctgccccttgtcctctcagagcctcagcttctgggggagacatgctctccccacaggggggaggcactaagtcatggtcctggctggaaggtactgaaggcttctgcagctttggctgcacgtcaccctcctgagcctcacctttcctgccgtccctcctgttgtgaaatcaccacattctgtctctgcttggcttcccctccaccctaaagtctcaggtgacggactcagactcctggcttcatgtggcattctctctgctcagtgatctcacttaaatctatatacaaagccttggtcccgtgaaaacactcgtgtgcccaccagcggccttgaagaggcaggtctgggccagatgctgggcaggaaaccccagcggcagatgggcctgtgtgcacccaacgtgatgctatgcatgtctgaccgacgatccctcgaccagaatcagattcaggagctcagtttctttttcacttgggtctctggattcctgtcatagggaaggtatatcaggaggggaagaggcctttctagaattttctttgagcaggtttacaatttagcttacatttttcgactgtgaacgtgaataggc

SEQ ID NO: 105066 - DNA, 671 bp, Homo sapiens
  Payload ID: 616
  Gene Symbol: ADD1
  Gene Name: adducin 1 (alpha)
  ENST ID: ENST00000511797
  CDS Start-End: 259-671
ggagccggagccggagccgacgggcggtggccgcactgggaccccggaatcccgcgcgctgcccacgattcgcttctgaggggccttttgagcagctgcttctgcaagaggacatccggagacacaggaatagaaatgatccgatcagagtaattaaaggcttttaactgagctctgaggtcccaaacagggcacactccgtcagcctaaagctgtgaagaagaaccttcaacataaggaacctagaaagattgtacaatgaatggtgattctcgtgctgcggtggtgacctcaccacccccgaccacagcccctcacaaggagaggtacttcgaccgagtagatgagaacaacccagagtacttgagggagaggaacatggcaccagaccttcgccaggacttcaacatgatggagcaaaagaagagggtgtccatgattctgcaaagccctgctttctgtgaagaattggaatcaatgatacaggagcaatttaagaaggggaagaaccccacaggcctattggcattacagcagattgcagattttatgaccacgaatgtaccaaatgtctacccagcagctccgcaaggagggatggctgccttaaacatgagtcttggtatggtgactcctgtgaacgatcttagaggatctgattctattgcgta

SEQ ID NO: 105067 - DNA, 3206 bp, Homo sapiens
  Payload ID: 616
  Gene Symbol: ADD1
  Gene Name: adducin 1 (alpha)
  ENST ID: ENST00000503455
  CDS Start-End: 59-2050
cccggaatcccgcgcgctgcccacgattcgcttctgaggaacctagaaagattgtacaatgaatggtgattctcgtgctgcggtggtgacctcaccacccccgaccacagcccctcacaaggagaggtacttcgaccgagtagatgagaacaacccagagtacttgagggagaggaacatggcaccagaccttcgccaggacttcaacatgatggagcaaaagaagagggtgtccatgattctgcaaagccctgctttctgtgaagaattggaatcaatgatacaggagcaatttaagaaggggaagaaccccacaggcctattggcattacagcagattgcagattttatgaccacgaatgtaccaaatgtctacccagcagctccgcaaggagggatggctgccttaaacatgagtcttggtatggtgactcctgtgaacgatcttagaggatctgattctattgcgtatgacaaaggagagaagttattacggtgtaaattggcagcgttttatagactagcagatctctttgggtggtctcagcttatctacaatcatatcacaaccagagtgaactccgagcaggaacacttcctcattgtcccttttgggcttctttacagtgaagtgactgcatccagtttggttaagatcaatctacaaggagatatagtagatcgtggaagcactaatctgggagtgaatcaggccggcttcaccttacactctgcaatttatgctgcacgcccggacgtgaagtgcgtcgtgcacattcacaccccagcaggggctgcggtctctgcaatgaaatgtggcctcttgccaatctccccggaggcgctttcccttggagaagtggcttatcatgactaccatggcattctggttgatgaagaggaaaaagttttgattcagaaaaatctggggcctaaaagcaaggttcttattctccggaaccatgggctcgtgtcagttggagagagcgttgaggaggccttctattacatccataaccttgtggttgcctgtgagatccaggttcgaactctggccagtgcaggaggaccagacaacttagtcctgctgaatcctgagaagtacaaagccaagtcccgttccccagggtctccggtaggggaaggcactggatcgcctcccaagtggcagattggtgagcaggaatttgaagccctcatgcggatgctcgataatctgggctacagaactggctacccttatcgataccctgctctgagagagaagtctaaaaaatacagcgatgtggaggttcctgctagtgtcacaggttactcctttgctagtgacggtgattcgggcacttgctccccactcagacacagttttcagaagcagcagcgggagaagacaagatggctgaactctggccggggcgacgaagcttccgaggaagggcagaatggaagcagtcccaagtcgaagactaaggtgtggacgaacattacacacgatcacgtgaaacccttgctgcagtctctctcgtccggtgtctgcgtgccaagctgtattaccaactgcttgtggactaaagaggatggacatagaacttccacctctgctgtccctaacctgtttgttccattgaacactaacccaaaagaggtccaggagatgaggaacaagatccgagagcagaatttacaggacattaagacggctggccctcagtcccaggttttgtgtggtgtagtgatggacaggagcctcgtccagggagagctggtgacggcctccaaggccatcattgaaaaggagtaccagccccacgtcattgtgagcaccacgggccccaaccccttcaccacactcacagaccgtgagctggaggagtaccgcagggaggtggagaggaagcagaagggctctgaagagaatctggacgaggctagagaacagaaagaaaagagtcctccagaccagcctgcggtcccccacccgcctcccagcactcccatcaagctggaggaagcaggagacggatgcgctagagagtacctgttaccctaaccttgtgccggagccgactactggagatgacagtgatgctgccacctttaagccaactctccccgatctgtcccctgatgaaccttcagaagcactcggcttcccaatgttagagaaggaggaggaagcccatagacccccaagccccactgaggcccctactgaggccagccccgagccagccccagacccagccccggtggctgaagaggctgccccctcagctgtcgaggagggggccgccgcggaccctggcagcgatgggtctccaggcaagtccccgtccaaaaagaagaagaagttccgtaccccgtcctttctgaagaagagcaagaagaagagtgactcctgaaagccctgcgctaacactgtcctgtccggagcgaccctggctctgccagcgtccccggccacgtctgtgctctgtccttgtgtaatggaatgcaaaaaagccaagccctccgcctagaggtcccctcacgtgaccagccccgtgtagccccgggctgacccagtgtgtgctcagcagccccaccccaccctgccccttgtcctctcagagcctcagcttctgggggagacatgctctccccacaggggggaggcactaagtcatggtcctggctggaaggtactgaaggcttctgcagctttggctgcacgtcaccctcctgagcctcacctttcctgccgtccctcctgttgtgaaatcaccacattctgtctctgcttggcttcccctccaccctaaagtctcaggtgacggactcagactcctggcttcatgtggcattctctctgctcagtgatctcacttaaatctatatacaaagccttggtcccgtgaaaacactcgtgtgcccaccagcggccttgaagaggcaggtctgggccagatgctgggcaggaaaccccagcggcagatgggcctgtgtgcacccaacgtgatgctatgcatgtctgaccgacgatccctcgaccagaatcagattcaggagctcagtttctttttcacttgggtctctggattcctgtcatagggaaggtatatcaggaggggaagaggcctttctagaattttctttgagcaggtttacaatttagcttacatttttcgactgtgaacgtgaataggctgctttttgctttcttcttt

SEQ ID NO: 105068 - DNA, 1332 bp, Homo sapiens
  Payload ID: 616
  Gene Symbol: ADD1
  Gene Name: adducin 1 (alpha)
  ENST ID: ENST00000514940
  CDS Start-End: 1-1332
aggttcttattctccggaaccatgggctcgtgtcagttggagagagcgttgaggaggccttctattacatccataaccttgtggttgcctgtgagatccaggttcgaactctggccagtgcaggaggaccagacaacttagtcctgctgaatcctgagaagtacaaagccaagtcccgttccccagggtctccggtaggggaaggcactggatcgcctcccaagtggcagattggtgagcaggaatttgaagccctcatgcggatgctcgataatctgggctacagaactggctacccttatcgataccctgctctgagagagaagtctaaaaaatacagcgatgtggaggttcctgctagtgtcacaggttactcctttgctagtgacggtgattcgggcacttgctccccactcagacacagttttcagaagcagcagcgggagaagacaagatggctgaactctggccggggcgacgaagcttccgaggaagggcagaatggaagcagtcccaagtcgaagactaaggtgtggacgaacattacacacgatcacgtgaaacccttgctgcagtctctctcgtccggtgtctgcgtgccaagctgtattaccaactgcttgtggactaaagaggatggacatagaacttccacctctgctgtccctaacctgtttgttccattgaacactaacccaaaagaggtccaggagatgaggaacaagatccgagagcagaatttacaggacattaagacggctggccctcagtcccaggttttgtgtggtgtagtgatggacaggagcctcgtccagggagagctggtgacggcctccaaggccatcattgaaaaggagtaccagccccacgtcattgtgagcaccacgggccccaaccccttcaccacactcacagaccgtgagctggaggagtaccgcagggaggtggagaggaagcagaagggctctgaagagaatctggacgaggctagagaacagaaagaaaagagtcctccagaccagcctgcggtcccccacccgcctcccagcactcccatcaagctggaggaagaccttgtgccggagccgactactggagatgacagtgatgctgccacctttaagccaactctccccgatctgtcccctgatgaaccttcagaagcactcggcttcccaatgttagagaaggaggaggaagcccatagacccccaagccccactgaggcccctactgaggccagccccgagccagccccagacccagccccggtggctgaagaggctgccccctcagctgtcgaggagggggccgccgcggaccctggcagcg

SEQ ID NO: 105069 - DNA, 704 bp, Homo sapiens
  Payload ID: 616
  Gene Symbol: ADD1
  Gene Name: adducin 1 (alpha)
  ENST ID: ENST00000510101
  CDS Start-End: 174-383
ggtgggggcgagcggaggggctgaggggcggagaggcctggcgggccgctgctgcgggccaggggacgggggcggagccggagccggagccgacgggcggtggccgcactgggaccccggaatcccgcgcgctgcccacgattcgcttctgaggaacctagaaagattgtacaatgaatggtgattctcgtgctgcggtggtgacctcaccacccccgaccacagcccctcacaaggagaggtacttcgaccgagtagatgagaacaacccagagtacttgagggagaggaacatggcaccagaccttcgccaggacttcaacatgatggagcaaaagaagagggtgtccatgattctgcaaagccctgtcttggtatggtgactcctgtgaacgatcttagaggatctgattctattgcgtatgacaaaggagagaagttattacggtgtaaattggcagcgttttatagactagcagatctctttgggtggtctcagcttatctacaatcatatcacaaccagagtgaactccgagcaggaacacttcctcattgtcccttttgggcttctttacagtgaagtgactgcatccagtttggttaagatcaatctacaaggagatatagtagatcgtggaagcactaatctgggagtgaatcaggccggcttcaccttacactctgcaatttatgctgcacgcc

SEQ ID NO: 105070 - DNA, 491 bp, Homo sapiens
  Payload ID: 616
  Gene Symbol: ADD1
  Gene Name: adducin 1 (alpha)
  ENST ID: ENST00000508277
  CDS Start-End: 64-491
gggaccccggaatcccgcgcgctgcccacgattcgcttctgaggaacctagaaagattgtacaatgaatggtgattctcgtgctgcggtggtgacctcaccacccccgaccacagcccctcacaaggagaggtacttcgaccgagtagatgagaacaacccagagtacttgagggagaggaacatggcaccagaccttcgccaggacttcaacatgatggagcaaaagaagagggtgtccatgattctgcaaagccctaccagagtgaactccgagcaggaacacttcctcattgtcccttttgggcttctttacagtgaagtgactgcatccagtttggttaagatcaatctacaaggagatatagtagatcgtggaagcactaatctgggagtgaatcaggccggcttcaccttacactctgcaatttatgctgcacgcccggacgtgaagtgcgtcgtgcacattcacaccccagcaggggctgcggt

SEQ ID NO: 105071 - DNA, 594 bp, Homo sapiens
  Payload ID: 616
  Gene Symbol: ADD1
  Gene Name: adducin 1 (alpha)
  ENST ID: ENST00000536424
  CDS Start-End: 1-318
gagatgaggaacaagatccgagagcagaatttacaggacattaagacggctggccctcagtcccaggttttgtgtggtgtagtgatggacaggagcctcgtccagagaatctggacgaggctagagaacagaaagaaaagagtcctccagaccagcctgcggtcccccacccgcctcccagcactcccatcaagctggaggaagaccttgtgccggagccgactactggagatgacagtgatgctgccacctttaagccaactctccccgatctgtcccctgatgaaccttcagaagcactcggcttcccaatgttagagaaggaggaggaagcccatagacccccaagccccactgaggcccctactgaggccagccccgagccagccccagacccagccccggtggctgaagaggctgccccctcagctgtcgaggagggggccgccgcggaccctggcagcgatgggtctccaggcaagtccccgtccaaaaagaagaagaagttccgtaccccgtcctttctgaagaagagcaagaagaagagtgactcctgaaagccctgcgctaacactgtcctgtccggagcgaccc

SEQ ID NO: 105072 - DNA, 406 bp, Homo sapiens
  Payload ID: 616
  Gene Symbol: ADD1
  Gene Name: adducin 1 (alpha)
  ENST ID: ENST00000541843
  CDS Start-End: 1-344
ttgtgagcaccacgggccccaaccccttcaccacactcacagaccgtgagctggaggagtaccgcagggaggtggagaggaagcagaagggctctgaagagaatctggacgaggctagagaacagaaagaaaagagtcctccagaccagcctgcggtcccccacccgcctcccagcactcccatcaagctggaggaaggcaaaacagatttgtatgtgagctgtgaccagaccttgtgccggagccgactactggagatgacagtgatgctgccacctttaagccaactctccccgatctgtcccctgatgaaccttcagaagcactcggcttcccaatgttagagaaggaggaggaagcccatagacccccaagccccactgaggcccctactgaggccagcccc

SEQ ID NO: 105073 - DNA, 9267 bp, Homo sapiens
  Payload ID: 617
  Gene Symbol: ADD2
  Gene Name: adducin 2 (beta)
  Uniprot ID: P35612
  ENST ID: ENST00000264436
  CDS Start-End: 446-2626
gggaaatggctttaattctgacggcagggctgtgagggactagcgggaacccgagccttttgtcaaggaactgcggcgtcggtggccagtcatccccgccgccgcggagccgctgcactgctgggggatctcccagcagctctgacgagcgcgggctgcagcatgggcagaaaacgctgccctgcagattagctgggtggattttttaagcgcaccccaccccccaaacccataaaataacaaaaccaacccgcagtggccgaccggagatagctaagatgccgcgcaggagtttccacctggatgtttgaggttgtgtagatgtggccggcacccttgagagtggagctagggggtgcagactgagcagtgaacagaaggagccttggacagggctgggccagcctcccgagttccaggagcgaattgcaaacccaccgggaaaatgagcgaagagacggtccccgaggctgcctcgccgccgcccccgcaggggcagccttactttgaccgcttctcagaggacgaccccgagtacatgcgccttcgcaaccgggcggcggacctgcggcaggacttcaacctgatggagcagaagaagcgcgtcaccatgatcctgcagagtccctctttcagggaggagctggaaggcctcatccaggagcagatgaagaaggggaacaactcctccaacatctgggccctgcgacagatcgcggacttcatggccagcacctcccacgcagtcttcccgacatcttccatgaatgtctccatgatgacgcctatcaatgacctccacacagctgactccctgaacctggccaaaggggagcggctcatgcggtgcaagatcagcagtgtctaccgactcctggacctctatggctgggcccagctgagtgacacctatgtcacgttgagagtcagcaaggagcaggaccacttcctgatcagccctaagggagtttcttgcagtgaagtcacagcgtccagcctgatcaaggtgaacattctgggagaggtggtggagaagggcagcagctgcttcccagtggacaccacaggcttctgtctgcactcggccatctatgcagcgaggcccgacgtgcgctgcatcatccacctgcacacaccggccacagcagcggtgtcggccatgaagtggggcctcctgcctgtctcccacaatgccctgctggtgggggacatggcctattatgacttcaatggggaaatggagcaggaagccgatcggatcaacctgcagaagtgccttggacccacctgcaagatcctggtgctaagaaaccatggagtggttgctctgggtgacacggtagaggaggcattttacaagatcttccacctgcaggctgcatgtgagatacaggtgtcggctctgtccagtgccgggggagtggagaacctcatcctcctggagcaggagaagcaccggccccatgaggtgggctccgtgcagtgggccgggagcacctttgggcctatgcagaagagtcggctgggggagcatgagtttgaggccctcatgaggatgctggacaacctgggctacagaacaggttacacgtatcgccacccctttgttcaagagaaaaccaaacacaaaagtgaggtggagattccagccacggtcacagccttcgtgtttgaggaggacggtgccccggtgcccgccctgcgacagcatgcccagaagcagcagaaggagaagacccgctggctcaatacgcccaacacctacctgcgggtcaatgtggccgatgaggtccagaggagcatgggcagcccccgacccaagaccacgtggatgaaggctgacgaggtggagaaatccagcagtggcatgccgattcgcatcgaaaacccaaaccaatttgtgcctctctatactgacccccaggaagtactggagatgaggaacaagattcgagaacaaaaccgacaagatgtgaagtcagcggggcctcagtcccagctcctggcgagcgtcattgccgagaagagccgaagcccgtctacagagagccagctgatgtccaagggagacgaggataccaaagacgattcagaggagacggtgcccaaccccttcagccaactcactgaccaggagttggaggagtacaagaaagaggtggagaggaagaaactagaacttgatggagagaaagaaactgccccagaagagcctggctcacctgcaaagtctgcacctgcttctccagtgcagagcccagcgaaggaggcagagacaaagagccctttagtctctccttccaagtctttagaggaaggtactaagaagacagaaacaagcaaagccgccaccacagagcccgaaacaacccagccggaaggggtggtggtcaacgggagggaggaggagcagacggcagaggaaatcctcagcaaaggcctgagccagatgaccaccagtgctgacacggatgttgatacctctaaggacaaaaccgagtcggtcaccagcggccccatgtccccagagggctcaccttccaagtctccctcaaagaagaaaaagaaattccgaaccccctccttcctgaaaaagagcaaaaagaaggagaaagtggagtcctgattcatgacacccttgggctccctcctgcctcctctctctcctccccttcccttctcccatctctgtccctgcaagcacagggctaaggagggatagagtaggaccctggaccacattcggaaggggaacttagagatcacccgaccaacccttcgttttacagttgcccaagagaaatcaggtgacttgcccaaggtcacacagctagttagcggcagagcctgcactcgaattcaggtctcctgacttccagtccagtgctccttctactacacaacactgcctagttgtgggctgcctttgtttggatgctgtccaccaatctgagcctagggcaagaaggccagaaatgggccgtgagctctcacaggctcagactaaatcagaggtcaaggcttcccctgagtaaggtccatttcttcccaggaatccaatctcctgtggatggagctatctctacatttaaaaatctcttctcttttccactttgggtccctgccctgctgctcaaagtgactagccaaattgacccctccaacagaaagtaatctttgttcccaagggctgatggcttagcttgtactaccccaaacattaaccctgagctttcttcatggaacctcttgaatgatggatggaagagctataagaggtggtaggcataggggcaagccatgtaagctgaggattggggatggtttcatcaacataagaggccaggaacttgacccctttgaattgtgcatctcaggcacttcaaaactaaaaccaaatttagcataggaaaaagttgtttaatgctcagggcagaaatttggggaagttgaaatcctctgttggctttgggttgtataaggaggatcaaaacaacagaggaaatgctgactttctagctttgcatgacacctggagcaatgcactgtacctgcctcactcctgtccagtggtcaggtttcccctgaccttccctcacccccagaaacacttgcttacagaccgaaactggcatcttactcttggcaccttgacttgcaccctctgaggttccaactcagtcattctttgtccagcagaggagaatcagaaatgagcccttcaggattaatcctcttgcaccagctctcagagaaatgctgggtatccctgtccttgtccctatctgtccatcctggggcctggtaatggccacagttattgttttaaatgccaacactgtcttctcatgttcttccgtggggcattgattaatgagcatttgttggctcctaaaaattagacaatccattctcttgaaagcaccgtgtcttgaaagaatatttttccttttgatctgactatcgtgaaaatatttttgaaagttcttaatcatagttttccacttttgagcacttgctatctatagacactgtgcaggcttcacatacattacattctttaaccctcacagtaatcctttgaggggggtaagatcattcccattttgtgggtgaggaaattgaccccctaaaatgataattgacttgtcccagctgacttggctagaaagatctggatcctggatttgaatccaggtcagtctgagtccagagcccttgctcttaacagctatggtgaacagacaactttaatccccaggggtggtggttttcatccaggatttgtctctatgactgttctccattgcataatgttagcacgtgaagcaaaggtagggaacaccctgtgctcatcctcatcactgcacgtgaagttcctggtcaatgtggactgtggtgatgctactgtgtgcctctgacaaaggagaggcaagagccttctggttggggcgggaaataccatccatagttggctatttcttgagaaggaaggaaactgacctaggaccaaggtaaacctgacactgtgtctctctagtgcagattcctaactgctaccccaggctccatctctgttctacttcctgattgggtcaaattttaggagggacaacccactcatgcctcagaaaaatctgtcatatgggaaatgcctttaaaagccaatcccttgatgccttcttttaaaaagtagatttcacacttattcatttatccttacatggtatttgttaaggatccactgagcaccaggcattatgctgacgttgaaagagagccatcattatgactagaataataagtggcaaacgatgttgtgagaatggtgaacacgacctctgatgcagccttttgtgtgcgagttgttctacttcgggggtgatgttgattgcctctgcattcaacacactctattcccttgacaatgaggcctcacttaggcctcattgggtggagtcttgctgcagcattattctgggaatttatgccatgggcccactttctattgatagatgaacctgtcagttggttcattcctcatgcattccaaaaacatgcattgagcttgggtcaagggccaggcatgaggataggcatagttcctgccctcaagaagttcatgagcataggaggtgtatagacaaattgcaaaacaggcaagggtaccaaggtggcataagaaagcatcaattaactatcttggggaccagagaaaccctgagagaagcaatggctgctaaggttttaaaacaaagagtaaatttccagtagaatgaaaggattggcagggcatgccacaatgagggaagaatgtgcaaaggtgtggacgcatgaaatgccatgatgggttccgctgagcaacgtggcattgccagagcatgatgtggaagctcaggggttgaggggtcccttcataggtaggcagggctgaatcctaaggaaactggtaggaagtgtggaggagctagacttgtcatggaaggggtttggagccactggagcctttaaatcaggatagagtcatgatcagaattgcattttaggaaaatccctttggtggctgaatggagactgtggactggatgggcgtgggatggtggcatgggagctatgaggcctttttgaaatgtcaatactaaaacatagttgatggcctgctttacacgatgtttcctctacagcagatagtgagtttccaacacaaaatttatttccataaaagtctttggataaagcaccttaagagggattttcaacaaggagaggggagcattcaaagagctaatgtttccagttttattttgtcttggtgtagaattgctgggagaggtgtccagccatcctgccatttcttcttcccttgcacagaatgtggcacatttagctccaggcttgaggacatgcaccaaatgctacagaaacagacatgtggtccaaacaaatctacaggctattagaaaggaaaggccattttctttggctgtggataaaagttggctgaaaactttgaccaatatctgactggagaaaatgtgtattcaagagctcagatttggtgggcagtaggttcatgtctggttgagctactgtgcttggatgtgccagagaaaagggtaacatttgaaccaatgtgctgctctgtggctggctgagctgggaagtggagaggtttctgagcttatttccatcgcaaggcaggcaggaggagagaggacaagaaggattagtggtttcgcagagacaggcttggctccaacggctccttgcgtagtgttggctgcacccaacagtggtgtgagagaaccgtccataccatgtgaccttcctcccaaactgcagaaagagacaccttctagcccagatctggactccctaagagcctcctggcctgcatgcaacccaagtaactgtcctactttggccagttgaccccctccactctcctataactaaaacagggttcttcctctgtgaacagataagttctttttaaaggacttgggggaaattggatgaagagcagtaagttcttacagtaagaaccccactgtaaagcactgccctctgccactgatccatgtagactgaatttgaatcccattccctgtggatgataccgtcacttgctcatggtgacatggcaagacagtcattcagatgtttggcattgttgtagcagggctactgctagtgtgggggaaaatgctataaatccacttctttgattgccatggatttgaaagaaccatttgcccaacagcatgattcgcctctgaaagtctaaaaataattttcaatttttccatgaaggtatgtggagggtaaacacacagcctacgcataggtctgcatgacatgttttttctttttctttctttttttttttttttttttttttttttagacggagctttgctctttgttgcccaggctggagtgcagtggtgcaatcttagctcactgcaacctctgcctcccggtttttcaagcgattcttctgtctcagcctcccaagtagctggaattacaggagcccgccaccttgcccagctaatttttgtatttttagtagagacggggtttcaccatgttggccaggctggtcttgaactcctgacctcgtgatccacctgcctcggcttcccaaagtgctgggattacaggaatgagccactgtgccagctgacacgttttttcttttgtgtgaattttatgttctagttttgggacaagggtaatcagttcttgactagtgaacaaatgagagaacatttaccccttactcattttacacatgcaggtcagcagaagccctagagttggttggcacagtcgcagttgactgagcatagaggaaacaggtctttttacattctctctcatcactggagctcagttgaactctaagaccttagcactcaaagagtctgaaaagaaatgagggagaggctaaatttaagctctccactcccacagaaaggacagggcaccctacaatctaaaagccagtgaggcagcctatcatctgtttcacatctgttctgaaagggatagtttaatgcaagaagtaagaggcctgtagtgactgtaaactcatgaaatgtgcacattggttatctgtgcacatttccacttgcaccataacataagaaagcgtacatggagtgtaattacttccagaagccccgtctaaccaacctattcagatgtggcacactttctgtcataaatgagagaccacacgtagagctcggtcaccaaggaatgcccaacatccctttacctctcacaatgagcagccacgctcaccgggaagcagtgtggggacttcagtggggtgtcccttagtggagaacacctttcatcatttttatagagacaattcccttgagaatgtaggcttttcatcttaggaacaattaggaagaatctccagctgggagtgttcttatgtatacagaaacaatgggtcgcattggttcatacttaggtgatattaggtttggctatattgatgtttggtgccacttaccttctagattttcccaaaagttgggtcattgctatgggaaattggggcctgcagatgggggagaaatgatcattattggtgcagggaaggggttcaggcagagctggagtctgaggctcagtgtgagaaagcactggcagttttctagtagagtcaggtcctgggctcctctcctcacccactgtgtcccgaactgaggccagctgtgatcggcaaattgcttatctctaggtagtttaaagaaaacgtaagagtttggggggtggtgggagaataactgtagaaagaccctaaactcttctctcccccagcaaattatcttgtataatgtttaaaaacccaaaggccagatctccccttttaacgtgaatcagaaggaggatggcaattggaccaagggcagagtggccacacttgaaacacattataaaatgggaatatatttcagggaaccccacccccacacttccactccacctcacacctgttggtcctgctttgtgggtgattgattgatacccaaggactgccccacctttaaattcctgcaatttatgctgcaaccaacatcttagtgtttgctctctccgggaagaggccaggtgggggagaacatacggtccagagcctgagatcgcctggctggggtgcaggcaagcaggaacccagtctagatagaatgcagtgttctctaaagctatggatggtttcagtgaaatgtctgtgtctgacaatcgtcacgcaagagtacttactgtcttcccttgtacatacattgtctgtgtttagcttttcctagtattgtgaggtttcaaataggggttccatgtaaatactctttctgctactgaaatgccggcccccttgagtatgcatcacccccacagatggttttgcctttctctatgctaacactttttgagccactgacgtgcagatcggtggttagtttcttgggcttttattttgcaattttatatatatacacatattatatatatatatatatttatgggttggttttgtatagttttctgtttgaatctctgagcaccaaagctgccctttgattttcacgagaactttccaaagccacttcctgagccctcctgctgctttggtgtctgacggtgatgctgcggtggcatctctgcccgtgaatttctgtatgtgtgtgctgttacctcacctgcagacatgaccctagtaaatctaacgtgcttggcttccca

SEQ ID NO: 105074 - DNA, 2654 bp, Homo sapiens
  Payload ID: 617
  Gene Symbol: ADD2
  Gene Name: adducin 2 (beta)
  Uniprot ID: P35612
  ENST ID: ENST00000355733
  CDS Start-End: 446-2377
gggaaatggctttaattctgacggcagggctgtgagggactagcgggaacccgagccttttgtcaaggaactgcggcgtcggtggccagtcatccccgccgccgcggagccgctgcactgctgggggatctcccagcagctctgacgagcgcgggctgcagcatgggcagaaaacgctgccctgcagattagctgggtggattttttaagcgcaccccaccccccaaacccataaaataacaaaaccaacccgcagtggccgaccggagatagctaagatgccgcgcaggagtttccacctggatgtttgaggttgtgtagatgtggccggcacccttgagagtggagctagggggtgcagactgagcagtgaacagaaggagccttggacagggctgggccagcctcccgagttccaggagcgaattgcaaacccaccgggaaaatgagcgaagagacggtccccgaggctgcctcgccgccgcccccgcaggggcagccttactttgaccgcttctcagaggacgaccccgagtacatgcgccttcgcaaccgggcggcggacctgcggcaggacttcaacctgatggagcagaagaagcgcgtcaccatgatcctgcagagtccctctttcagggaggagctggaaggcctcatccaggagcagatgaagaaggggaacaactcctccaacatctgggccctgcgacagatcgcggacttcatggccagcacctcccacgcagtcttcccgacatcttccatgaatgtctccatgatgacgcctatcaatgacctccacacagctgactccctgaacctggccaaaggggagcggctcatgcggtgcaagatcagcagtgtctaccgactcctggacctctatggctgggcccagctgagtgacacctatgtcacgttgagagtcagcaaggagcaggaccacttcctgatcagccctaagggagtttcttgcagtgaagtcacagcgtccagcctgatcaaggtgaacattctgggagaggtggtggagaagggcagcagctgcttcccagtggacaccacaggcttctgtctgcactcggccatctatgcagcgaggcccgacgtgcgctgcatcatccacctgcacacaccggccacagcagcggtgtcggccatgaagtggggcctcctgcctgtctcccacaatgccctgctggtgggggacatggcctattatgacttcaatggggaaatggagcaggaagccgatcggatcaacctgcagaagtgccttggacccacctgcaagatcctggtgctaagaaaccatggagtggttgctctgggtgacacggtagaggaggcattttacaagatcttccacctgcaggctgcatgtgagatacaggtgtcggctctgtccagtgccgggggagtggagaacctcatcctcctggagcaggagaagcaccggccccatgaggtgggctccgtgcagtgggccgggagcacctttgggcctatgcagaagagtcggctgggggagcatgagtttgaggccctcatgaggatgctggacaacctgggctacagaacaggttacacgtatcgccacccctttgttcaagagaaaaccaaacacaaaagtgaggtggagattccagccacggtcacagccttcgtgtttgaggaggacggtgccccggtgcccgccctgcgacagcatgcccagaagcagcagaaggagaagacccgctggctcaatacgcccaacacctacctgcgggtcaatgtggccgatgaggtccagaggagcatgggcagcccccgacccaagaccacgtggatgaaggctgacgaggtggagaaatccagcagtggcatgccgattcgcatcgaaaacccaaaccaatttgtgcctctctatactgacccccaggaagtactggagatgaggaacaagattcgagaacaaaaccgacaagatgtgaagtcagcggggcctcagtcccagctcctggcgagcgtcattgccgagaagagccgaagcccgtctacagagagccagctgatgtccaagggagacgaggataccaaagacgattcagaggagacggtgcccaaccccttcagccaactcactgaccaggagttggaggagtacaagaaagaggtggagaggaagaaactagaacttgatgagacaggacaggaacgagagccaggctctggtccggccgtgtgcgagttcttcagcgttgccctccacatctggagtaacatattggagagaaagaaactgccccagaagagcctggctcacctgcaaagtctgcacctgcttctccagtgcagagcccagcgaaggaggcagagacaaagagccctttagtctctccttccaagtctttagaggaaggtactaagaagacagaaacaagcaaagccgccaccacagagcccgaaacaacccagccggaaggggtggtggtcaacgggagggaggaggagcagacggcagaggaaatcctcagcaaaggcctgagccagatgaccaccagtgctgacacggatgttgatacctctaaggacaaaaccgagtcggtcaccagcggccccatgtccccagagggctcaccttccaagtctccctcaaagaagaaaaagaa

SEQ ID NO: 105075 - DNA, 3745 bp, Homo sapiens
  Payload ID: 617
  Gene Symbol: ADD2
  Gene Name: adducin 2 (beta)
  Uniprot ID: P35612
  ENST ID: ENST00000403045
  CDS Start-End: 467-2647
catttcctcccagcctcgtgcgggaaatggctttaattctgacggcagggctgtgagggactagcgggaacccgagccttttgtcaaggaactgcggcgtcggtggccagtcatccccgccgccgcggagccgctgcactgctgggggatctcccagcagctctgacgagcgcgggctgcagcatgggcagaaaacgctgccctgcagattagctgggtggattttttaagcgcaccccaccccccaaacccataaaataacaaaaccaacccgcagtggccgaccggagatagctaagatgccgcgcaggagtttccacctggatgtttgaggttgtgtagatgtggccggcacccttgagagtggagctagggggtgcagactgagcagtgaacagaaggagccttggacagggctgggccagcctcccgagttccaggagcgaattgcaaacccaccgggaaaatgagcgaagagacggtccccgaggctgcctcgccgccgcccccgcaggggcagccttactttgaccgcttctcagaggacgaccccgagtacatgcgccttcgcaaccgggcggcggacctgcggcaggacttcaacctgatggagcagaagaagcgcgtcaccatgatcctgcagagtccctctttcagggaggagctggaaggcctcatccaggagcagatgaagaaggggaacaactcctccaacatctgggccctgcgacagatcgcggacttcatggccagcacctcccacgcagtcttcccgacatcttccatgaatgtctccatgatgacgcctatcaatgacctccacacagctgactccctgaacctggccaaaggggagcggctcatgcggtgcaagatcagcagtgtctaccgactcctggacctctatggctgggcccagctgagtgacacctatgtcacgttgagagtcagcaaggagcaggaccacttcctgatcagccctaagggagtttcttgcagtgaagtcacagcgtccagcctgatcaaggtgaacattctgggagaggtggtggagaagggcagcagctgcttcccagtggacaccacaggcttctgtctgcactcggccatctatgcagcgaggcccgacgtgcgctgcatcatccacctgcacacaccggccacagcagcggtgtcggccatgaagtggggcctcctgcctgtctcccacaatgccctgctggtgggggacatggcctattatgacttcaatggggaaatggagcaggaagccgatcggatcaacctgcagaagtgccttggacccacctgcaagatcctggtgctaagaaaccatggagtggttgctctgggtgacacggtagaggaggcattttacaagatcttccacctgcaggctgcatgtgagatacaggtgtcggctctgtccagtgccgggggagtggagaacctcatcctcctggagcaggagaagcaccggccccatgaggtgggctccgtgcagtgggccgggagcacctttgggcctatgcagaagagtcggctgggggagcatgagtttgaggccctcatgaggatgctggacaacctgggctacagaacaggttacacgtatcgccacccctttgttcaagagaaaaccaaacacaaaagtgaggtggagattccagccacggtcacagccttcgtgtttgaggaggacggtgccccggtgcccgccctgcgacagcatgcccagaagcagcagaaggagaagacccgctggctcaatacgcccaacacctacctgcgggtcaatgtggccgatgaggtccagaggagcatgggcagcccccgacccaagaccacgtggatgaaggctgacgaggtggagaaatccagcagtggcatgccgattcgcatcgaaaacccaaaccaatttgtgcctctctatactgacccccaggaagtactggagatgaggaacaagattcgagaacaaaaccgacaagatgtgaagtcagcggggcctcagtcccagctcctggcgagcgtcattgccgagaagagccgaagcccgtctacagagagccagctgatgtccaagggagacgaggataccaaagacgattcagaggagacggtgcccaaccccttcagccaactcactgaccaggagttggaggagtacaagaaagaggtggagaggaagaaactagaacttgatggagagaaagaaactgccccagaagagcctggctcacctgcaaagtctgcacctgcttctccagtgcagagcccagcgaaggaggcagagacaaagagccctttagtctctccttccaagtctttagaggaaggtactaagaagacagaaacaagcaaagccgccaccacagagcccgaaacaacccagccggaaggggtggtggtcaacgggagggaggaggagcagacggcagaggaaatcctcagcaaaggcctgagccagatgaccaccagtgctgacacggatgttgatacctctaaggacaaaaccgagtcggtcaccagcggccccatgtccccagagggctcaccttccaagtctccctcaaagaagaaaaagaaattccgaaccccctccttcctgaaaaagagcaaaaagaaggagaaagtggagtcctgattcatgacacccttgggctccctcctgcctcctctctctcctccccttcccttctcccatctctgtccctgcaagcacagggctaaggagggatagagtaggaccctggaccacattcggaaggggaacttagagatcacccgaccaacccttcgttttacagttgcccaagagaaatcagattacctgagactgggtcatttataatgaacacagatttatttctctcacatctggaagctgggaagtccaagatcaaggcaccagcatttggtgaagccttctttctgtgtcatcccatggcagaagacagaagggcaagagaggaaaccggtccaagcaggatgccttcctttttctgacaggcagcccccagcagtaccatcacaaaccttggtctcttcttgtcaccagcaaagggatgaaggataagtgatgaggagactgaagcacagaggtgaagcagcttgcccaacgtcacactgctgcttagtgatagaggcagtgctagaccccggggctcctgaatgttactgttggaggctcttaacccactgggatcaagaaggtgtcaagagctagactctccctccaggagaatgaacacagacacaaaaccttgcatatatgcttccgggtaaagaacctgcctgcattttggtaccactacgtgctggcctgtcctgggcatgttatatcatgagaaggcagggaaggctgaatcattaaggacatgaatcagattgattctcgtggctttaaaaacaaacactacaggaccagcatgacccgccagcctgttatccacagaggcttgtggtctccattgaaaagaagcaaagacagcacgtcccaactcaaaagattgtgtcatcctaaaggtgaaaggaagagatgatccaagcaaatttaggaccaatagcagactcttcacactgcctggggatagagggaccaccctgggctcctcttactcctggatttacttggatgaccagactcaggacttcatttaaatagaatttggtttcataatggaatcttcagcttgaaatataaatttgtttctgtctccctctgccatctcagcctttcttg

SEQ ID NO: 105076 - DNA, 3741 bp, Homo sapiens
  Payload ID: 617
  Gene Symbol: ADD2
  Gene Name: adducin 2 (beta)
  Uniprot ID: P35612
  ENST ID: ENST00000407644
  CDS Start-End: 266-2446
aaaggtttctggtgatgatgtagcatccgaggctcttaggaaatcggggctgcaagcactggcccctgcttggggatggtgggaccctcgcccggagcgtaacgcctgacagtttccacctggatgtttgaggttgtgtagatgtggccggcacccttgagagtggagctagggggtgcagactgagcagtgaacagaaggagccttggacagggctgggccagcctcccgagttccaggagcgaattgcaaacccaccgggaaaatgagcgaagagacggtccccgaggctgcctcgccgccgcccccgcaggggcagccttactttgaccgcttctcagaggacgaccccgagtacatgcgccttcgcaaccgggcggcggacctgcggcaggacttcaacctgatggagcagaagaagcgcgtcaccatgatcctgcagagtccctctttcagggaggagctggaaggcctcatccaggagcagatgaagaaggggaacaactcctccaacatctgggccctgcgacagatcgcggacttcatggccagcacctcccacgcagtcttcccgacatcttccatgaatgtctccatgatgacgcctatcaatgacctccacacagctgactccctgaacctggccaaaggggagcggctcatgcggtgcaagatcagcagtgtctaccgactcctggacctctatggctgggcccagctgagtgacacctatgtcacgttgagagtcagcaaggagcaggaccacttcctgatcagccctaagggagtttcttgcagtgaagtcacagcgtccagcctgatcaaggtgaacattctgggagaggtggtggagaagggcagcagctgcttcccagtggacaccacaggcttctgtctgcactcggccatctatgcagcgaggcccgacgtgcgctgcatcatccacctgcacacaccggccacagcagcggtgtcggccatgaagtggggcctcctgcctgtctcccacaatgccctgctggtgggggacatggcctattatgacttcaatggggaaatggagcaggaagccgatcggatcaacctgcagaagtgccttggacccacctgcaagatcctggtgctaagaaaccatggagtggttgctctgggtgacacggtagaggaggcattttacaagatcttccacctgcaggctgcatgtgagatacaggtgtcggctctgtccagtgccgggggagtggagaacctcatcctcctggagcaggagaagcaccggccccatgaggtgggctccgtgcagtgggccgggagcacctttgggcctatgcagaagagtcggctgggggagcatgagtttgaggccctcatgaggatgctggacaacctgggctacagaacaggttacacgtatcgccacccctttgttcaagagaaaaccaaacacaaaagtgaggtggagattccagccacggtcacagccttcgtgtttgaggaggacggtgccccggtgcccgccctgcgacagcatgcccagaagcagcagaaggagaagacccgctggctcaatacgcccaacacctacctgcgggtcaatgtggccgatgaggtccagaggagcatgggcagcccccgacccaagaccacgtggatgaaggctgacgaggtggagaaatccagcagtggcatgccgattcgcatcgaaaacccaaaccaatttgtgcctctctatactgacccccaggaagtactggagatgaggaacaagattcgagaacaaaaccgacaagatgtgaagtcagcggggcctcagtcccagctcctggcgagcgtcattgccgagaagagccgaagcccgtctacagagagccagctgatgtccaagggagacgaggataccaaagacgattcagaggagacggtgcccaaccccttcagccaactcactgaccaggagttggaggagtacaagaaagaggtggagaggaagaaactagaacttgatggagagaaagaaactgccccagaagagcctggctcacctgcaaagtctgcacctgcttctccagtgcagagcccagcgaaggaggcagagacaaagagccctttagtctctccttccaagtctttagaggaaggtactaagaagacagaaacaagcaaagccgccaccacagagcccgaaacaacccagccggaaggggtggtggtcaacgggagggaggaggagcagacggcagaggaaatcctcagcaaaggcctgagccagatgaccaccagtgctgacacggatgttgatacctctaaggacaaaaccgagtcggtcaccagcggccccatgtccccagagggctcaccttccaagtctccctcaaagaagaaaaagaaattccgaaccccctccttcctgaaaaagagcaaaaagaaggagaaagtggagtcctgattcatgacacccttgggctccctcctgcctcctctctctcctccccttcccttctcccatctctgtccctgcaagcacagggctaaggagggatagagtaggaccctggaccacattcggaaggggaacttagagatcacccgaccaacccttcgttttacagttgcccaagagaaatcaggtgacttgcccaaggtcacacagctagttagcggcagagcctgcactcgaattcaggtctcctgacttccagtccagtgctccttctactacacaacactgcctagttgtgggctgcctttgtttggatgctgtccaccaatctgagcctagggcaagaaggccagaaatgggccgtgagctctcacaggctcagactaaatcagaggtcaaggcttcccctgagtaaggtccatttcttcccaggaatccaatctcctgtggatggagctatctctacatttaaaaatctcttctcttttccactttgggtccctgccctgctgctcaaagtgactagccaaattgacccctccaacagaaagtaatctttgttcccaagggctgatggcttagcttgtactaccccaaacattaaccctgagctttcttcatggaacctcttgaatgatggatggaagagctataagaggtggtaggcataggggcaagccatgtaagctgaggattggggatggtttcatcaacataagaggccaggaacttgacccctttgaattgtgcatctcaggcacttcaaaactaaaaccaaatttagcataggaaaaagttgtttaatgctcagggcagaaatttggggaagttgaaatcctctgttggctttgggttgtataaggaggatcaaaacaacagaggaaatgctgactttctagctttgcatgacacctggagcaatgcactgtacctgcctcactcctgtccagtggtcaggtttcccctgaccttccctcacccccagaaacacttgcttacagaccgaaactggcatcttactcttggcaccttgacttgcaccctctgaggttccaactcagtcattctttgtccagcagaggagaatcagaaatgagcccttcaggattaatcctcttgcaccagctctcagagaaatgctgggtatccctgtccttgtccctatctgtccatcctggggcctggtaatggccacagttattgttttaaatgccaacactgtcttctcatgttcttccgtggggcattgattaatgagcatttgttggctcctaaaaattagacaatccattctcttgaaa

SEQ ID NO: 105077 - DNA, 3776 bp, Homo sapiens
  Payload ID: 617
  Gene Symbol: ADD2
  Gene Name: adducin 2 (beta)
  Uniprot ID: P35612
  ENST ID: ENST00000413157
  CDS Start-End: 481-2160
gccaggagagctctcatttcctcccagcctcgtgcgggaaatggctttaattctgacggcagggctgtgagggactagcgggaacccgagccttttgtcaaggaactgcggcgtcggtggccagtcatccccgccgccgcggagccgctgcactgctgggggatctcccagcagctctgacgagcgcgggctgcagcatgggcagaaaacgctgccctgcagattagctgggtggattttttaagcgcaccccaccccccaaacccataaaataacaaaaccaacccgcagtggccgaccggagatagctaagatgccgcgcaggagtttccacctggatgtttgaggttgtgtagatgtggccggcacccttgagagtggagctagggggtgcagactgagcagtgaacagaaggagccttggacagggctgggccagcctcccgagttccaggagcgaattgcaaacccaccgggaaaatgagcgaagagacggtccccgaggctgcctcgccgccgcccccgcaggggcagccttactttgaccgcttctcagaggacgaccccgagtacatgcgccttcgcaaccgggcggcggacctgcggcaggacttcaacctgatggagcagaagaagcgcgtcaccatgatcctgcagagtccctctttcagggaggagctggaaggcctcatccaggagcagatgaagaaggggaacaactcctccaacatctgggccctgcgacagatcgcggacttcatggccagcacctcccacgcagtcttcccgacatcttccatgaatgtctccatgatgacgcctatcaatgacctccacacagctgactccctgaacctggccaaaggggagcggctcatgcggtgcaagatcagcagtgtctaccgactcctggacctctatggctgggcccagctgagtgacacctatgtcacgttgagagtcagcaaggagcaggaccacttcctgatcagccctaagggagtttcttgcagtgaagtcacagcgtccagcctgatcaaggtgaacattctgggagaggtggtggagaagggcagcagctgcttcccagtggacaccacaggcttctgtctgcactcggccatctatgcagcgaggcccgacgtgcgctgcatcatccacctgcacacaccggccacagcagcggtgtcggccatgaagtggggcctcctgcctgtctcccacaatgccctgctggtgggggacatggcctattatgacttcaatggggaaatggagcaggaagccgatcggatcaacctgcagaagtgccttggacccacctgcaagatcctggtgctaagaaaccatggagtggttgctctgggtgacacggtagaggaggcattttacaagatcttccacctgcaggctgcatgtgagatacaggtgtcggctctgtccagtgccgggggagtggagaacctcatcctcctggagcaggagaagcaccggccccatgaggtgggctccgtgcagtgggccgggagcacctttgggcctatgcagaagagtcggctgggggagcatgagtttgaggccctcatgaggatgctggacaacctgggctacagaacaggttacacgtatcgccacccctttgttcaagagaaaaccaaacacaaaagtgaggtggagattccagccacggtcacagccttcgtgtttgaggaggacggtgccccggtgcccgccctgcgacagcatgcccagaagcagcagaaggagaagacccgctggctcaatacgcccaacacctacctgcgggtcaatgtggccgatgaggtccagaggagcatgggcagcccccgacccaagaccacgtggatgaaggctgacgaggtggagaaatccagcagtggcatgccgattcgcatcgaaaacccaaaccaatttgtgcctctctatactgacccccaggaagtactggagatgaggaacaagattcgagaacaaaaccgacaagatgtgaagtcagcggggcctcagtcccagctcctggcgagcgtcattgccgagaagagccgaagcccggtagagcagaggctgcccctgactggcggggaaacgtgtttgccttcggggtcttctgtgcctggggctgggttgcaggacccctgagtcctcatacccaccttcccctgtgatcttgggtgccggtgctcttgctgcaaaatggaggccaacctcacaggggtgctgtgaggaccagggaggacaatgtctgatggcccctgtgggcactgggctggagaacagcagcccagcctgcctgcaggagtgatgcggccggcttccgtacctcctgccatggaactccactctgtcctcccttactaccccgtgaagtggggactcataggcttggggctggagactcccaggtgccccaggtgtgcccagccctgagagtctctgacctctgagcctggtatgacatcatccaaccagagctctggaaagatgatcatgtacccatagagaaggggtatatagacaggacccatgctcctacaggatgggaagggacaatattacccacacaaacccacattgagttagaaagtattgtaattgtttttgtgcttgagatagaacagtgttttgtctagtgcttagcaaaaggggtgaagttcagaattctggcatgtgtttgaaatcactgctgctccttgcaaggtagcaatgggcatgacattttccttagcagtaaaaattggggaaatacaggaaatgttcctctctgcagggcaaattgtgatgatgcaatgatttcaggtcaagactgcagcccacagggtgggtgcccattggcaggagaagtgtgaaagttgtatcatcacacttacctccccccaaccccaactcagccaagatggggaacactgaatatcccgcagggtcaagtatagaaatagccatgttctggcgggaggtgagagttcattacaatgagcaacactgttaaaaaaacaaacaaaaatctcccctgccatttataccaagtgctcttctcggagtccctcttcttgggtttttggtcttggattctcggttgactccatgattccctacattaggcctactgtggcctcccttttggaaggggcccaggggcagaagacctggcgggccagggcagggaggactggcagcctccaggctcacctccctttggcttcactctctttgctcctcagcttcagagcactgcatcctcaaaggccaagatgaggatgctgaattaggaaaaaaggctgtggagtctgaattttagttcctatcttgggctagaggggtcaaagaattcctgaagcttatgtaagggccggctggtcagctccctagaaccacgggctccacagaggtggcaaaacccagtgattttgccagtatccctgcagggacctgcggtacaggcaggttgaagatctgagactcaggaaccttggcccctttgtcacttacaactgtgtgtgaaacaggactaacagtttggactgagagcactgaagctgctgtgtgttgtgcatataacttaatgctgtgtgttgtggcttgcactgctgtgggggcggggagggcagtggtggggaatggctggcatgaagcttgcttgagccaatgctatgcttgctgggctttggctgactggctttgggccaccaactgtatttgcatagtgatggcttggaagtgtccatagaagggattgcaataaaggtgtgtcttccttc

SEQ ID NO: 105078 - DNA, 2332 bp, Homo sapiens
  Payload ID: 617
  Gene Symbol: ADD2
  Gene Name: adducin 2 (beta)
  Uniprot ID: P35612
  ENST ID: ENST00000430656
  CDS Start-End: 299-2026
atttcctcccagcctcgtgcgggaaatggctttaattctgacggcagggctgtgagggactagcgggaacccgagccttttgtcaaggaactgcggcgtcggtggccagtcatccccgccgccgcggagccgctgcactgctgggggatctcccagcagctctgacgagcgcgggctgcagcatgggcagaaaacgctgccctgcagattagctgggtggattttttaagcgcaccccaccccccaaacccataaaataacaaaaccaacccgcagtggccgaccggagatagctaagatgccgcgcaggagagttccaggagcgaattgcaaacccaccgggaaaatgagcgaagagacggtccccgaggctgcctcgccgccgcccccgcaggggcagccttactttgaccgcttctcagaggacgaccccgagtacatgcgccttcgcaaccgggcggcggacctgcggcaggacttcaacctgatggagcagaagaagcgcgtcaccatgatcctgcagagtccctctttcagggaggagctggaaggcctcatccaggagcagatgaagaaggggaacaactcctccaacatctgggccctgcgacagatcgcggacttcatggccagcacctcccacgcagtcttcccgacatcttccatgaatgtctccatgatgacgcctatcaatgacctccacacagctgactccctgaacctggccaaaggggagcggctcatgcggtgcaagatcagcagtgtctaccgactcctggacctctatggctgggcccagctgagtgacacctatgtcacgttgagagtcagcaaggagcaggaccacttcctgatcagccctaagggagtttcttgcagtgaagtcacagcgtccagcctgatcaaggtgaacattctgggagaggtggtggagaagggcagcagctgcttcccagtggacaccacaggcttctgtctgcactcggccatctatgcagcgaggcccgacgtgcgctgcatcatccacctgcacacaccggccacagcagcggtgtcggccatgaagtggggcctcctgcctgtctcccacaatgccctgctggtgggggacatggcctattatgacttcaatggggaaatggagcaggaagccgatcggatcaacctgcagaagtgccttggacccacctgcaagatcctggtgctaagaaaccatggagtggttgctctgggtgacacggtagaggaggcattttacaagatcttccacctgcaggctgcatgtgagatacaggtgtcggctctgtccagtgccgggggagtggagaacctcatcctcctggagcaggagaagcaccggccccatgaggtgggctccgtgcagtgggccgggagcacctttgggcctatgcagaagagtcggctgggggagcatgagtttgaggccctcatgaggatgctggacaacctgggctacagaacaggttacacgtatcgccacccctttgttcaagagaaaaccaaacacaaaagtgaggtggagattccagccacggtcacagccttcgtgtttgaggaggacggtgccccggtgcccgccctgcgacagcatgcccagaagcagcagaaggagaagacccgctggctcaatacgcccaacacctacctgcgggtcaatgtggccgatgaggtccagaggagcatgggcagcccccgacccaagaccacgtggatgaaggctgacgaggtggagaaatccagcagtggcatgccgattcgcatcgaaaacccaaaccaatttgtgcctctctatactgacccccaggaagtactggagatgaggaacaagattcgagaacaaaaccgacaagatgtgaagtcagcggggcctcagtcccagctcctggcgagcgtcattgccgagaagagccgaagcccggtagagcagaggctgcccctgactggcggggaaacgtgtttgccttcggggtcttctgtgcctggggctgggttgcaggacccctgagtcctcatacccaccttcccctgtgatcttgggtgccggtgctcttgctgcaaaatggaggccaacctcacaggggtgctgtgaggaccagggaggacaatgtctgatggcccctgtgggcactgggctggagaacagcagcccagcctgcctgcaggagtgatgcggccggcttccgtacctcctgccatggaactccactctgtcctcccttactaccccgtgaagtggggactcataggcttggggctggagactcccaggtgccccaggtgtgcccagccctgagagtctctgacctctgag

SEQ ID NO: 105079 - DNA, 582 bp, Homo sapiens
  Payload ID: 617
  Gene Symbol: ADD2
  Gene Name: adducin 2 (beta)
  ENST ID: ENST00000447731
  CDS Start-End: 531-582
tttcctcccagcctcgtgcgggaaatggctttaattctgacggcagggctgtgagggactagcgggaacccgagccttttgtcaaggaactgcggcgtcggtggccagtcatccccgccgccgcggagccgctgcactgctgggggatctcccagcagctctgacgagcgcgggctgcagcatgggcagaaaacgctgccctgcagattagctgggtggattttttaagcgcaccccaccccccaaacccataaaataacaaaaccaacccgcagtggccgaccggagatagctaagatgccgcgcaggagagcaccactaacacgaagctcttctgcacatcagactcttaatcaaaggattgggcatatcagaagtttccacctggatgtttgaggttgtgtagatgtggccggcacccttgagagtggagctagggggtgcagactgagcagtgaacagaaggagccttggacagggctgggccagcctcccgagttccaggagcgaattgcaaacccaccgggaaaatgagcgaagagacggtccccgaggctgcctcgccgccgcccccgcaggggc

SEQ ID NO: 105080 - DNA, 930 bp, Homo sapiens
  Payload ID: 617
  Gene Symbol: ADD2
  Gene Name: adducin 2 (beta)
  ENST ID: ENST00000415348
  CDS Start-End: 251-930
tcccttattcaactgtcttcatttattctgtaaaagtagcagcagctcagccctgaccatctcctctctcacttgtgggagtctcatttagggatcgtttccacctggatgtttgaggttgtgtagatgtggccggcacccttgagagtggagctagggggtgcagactgagcagtgaacagaaggagccttggacagggctgggccagcctcccgagttccaggagcgaattgcaaacccaccgggaaaatgagcgaagagacggtccccgaggctgcctcgccgccgcccccgcaggggcagccttactttgaccgcttctcagaggacgaccccgagtacatgcgccttcgcaaccgggcggcggacctgcggcaggacttcaacctgatggagcagaagaagcgcgtcaccatgatcctgcagagtccctctttcagggaggagctggaaggcctcatccaggagcagatgaagaaggggaacaactcctccaacatctgggccctgcgacagatcgcggacttcatggccagcacctcccacgcagtcttcccgacatcttccatgaatgtctccatgatgacgcctatcaatgacctccacacagctgactccctgaacctggccaaaggggagcggctcatgcggtgcaagatcagcagtgtctaccgactcctggacctctatggctgggcccagctgagtgacacctatgtcacgttgagagtcagcaaggagcaggaccacttcctgatcagccctaagggagtttcttgcagtgaagtcacagcgtccagcctgatcaaggtgaacattctgggagaggtggtggagaagggcagcagctgcttcccagtggacaccacaggcttctgtctgcactcggccatctatgcagcgaggcccgacgtgcgctgcatcatcca

SEQ ID NO: 105081 - DNA, 721 bp, Homo sapiens
  Payload ID: 617
  Gene Symbol: ADD2
  Gene Name: adducin 2 (beta)
  ENST ID: ENST00000425976
  CDS Start-End: 294-721
cggtgcgaggcgggcttggcggggctgggcgcgtcccccggggcctcgcgatcgctggctgcgcggcgctcagccgcagtggccggccgagcaggtgcggcgtcggcagccgcctacattgagatcggggcaaccggcactttccacctggatgtttgaggttgtgtagatgtggccggcacccttgagagtggagctagggggtgcagactgagcagtgaacagaaggagccttggacagggctgggccagcctcccgagttccaggagcgaattgcaaacccaccgggaaaatgagcgaagagacggtccccgaggctgcctcgccgccgcccccgcaggggcagccttactttgaccgcttctcagaggacgaccccgagtacatgcgccttcgcaaccgggcggcggacctgcggcaggacttcaacctgatggagcagaagaagcgcgtcaccatgatcctgcagagtccctctttcagggaggagctggaaggcctcatccaggagcagatgaagaaggggaacaactcctccaacatctgggccctgcgacagatcgcggacttcatggccagcacctcccacgcagtcttcccgacatcttccatgaatgtctccatgatgacgcctatcaatgacctccacacagctgactccctgaacctggccaaaggggagcggctcatgcggtgcaagatcagcagtgtctaccgact

SEQ ID NO: 105082 - DNA, 997 bp, Homo sapiens
  Payload ID: 617
  Gene Symbol: ADD2
  Gene Name: adducin 2 (beta)
  ENST ID: ENST00000456320
  CDS Start-End: 1-997
atgagcgaagagacggtccccgaggctgcctcgccgccgcccccgcaggggcagccttactttgaccgcttctcagaggacgaccccgagtacatgcgccttcgcaaccgggcggcggacctgcggcaggacttcaacctgatggagcagaagaagcgcgtcaccatgatcctgcagagtccctctttcagggaggagctggaaggcctcatccaggagcagatgaagaaggggaacaactcctccaacatctgggccctgcgacagatcgcggacttcatggccagcacctcccacgcagtcttcccgacatcttccatgaatgtctccatgatgacgcctatcaatgacctccacacagctgactccctgaacctggccaaaggggagcggctcatgcggtgcaagatcagcagtgtctaccgactcctggacctctatggctgggcccagctgagtgacacctatgtcacgttgagagtcagcaaggagcaggaccacttcctgatcagccctaagggagtttcttgcagtgaagtcacagcgtccagcctgatcaaggtgaacattctgggagaggtggtggagaagggcagcagctgcttcccagtggacaccacaggcttctgtctgcactcggccatctatgcagcgaggcccgacgtgcgctgcatcatccacctgcacacaccggccacagcagcggtgtcggccatgaagtggggcctcctgcctgtctcccacaatgccctgctggtgggggacatggcctattatgacttcaatggggaaatggagcaggaagccgatcggatcaacctgcagaagtgccttggacccacctgcaagtctacagagagccagctgatgtccaagggagacgaggataccaaagacgattcagaggagacggtgcccaaccccttcagccaactcactgaccaggagttggaggagtacaagaaagaggtggagaggaagaaactagaacttgatg

SEQ ID NO: 105083 - DNA, 874 bp, Homo sapiens
  Payload ID: 617
  Gene Symbol: ADD2
  Gene Name: adducin 2 (beta)
  ENST ID: ENST00000522886
  CDS Start-End: 36-874
gagttccaggagcgaattgcaaacccaccgggaaaatgagcgaagagacggtccccgaggctgcctcgccgccgcccccgcaggggcagccttactttgaccgcttctcagaggacgaccccgagtacatgcgccttcgcaaccgggcggcggacctgcggcaggacttcaacctgatggagcagaagaagcgcgtcaccatgatcctgcagagtccctctttcagggaggagctggaaggcctcatccaggagcagatgaagaaggggaacaactcctccaacatctgggccctgcgacagatcgcggacttcatggccagcacctcccacgcagtcttcccgacatcttccatgaatgtctccatgatgacgcctatcaatgacctccacacagctgactccctgaacctggccaaaggggagcggctcatgcggtgcaagatcagcagtgtctaccgactcctggacctctatggctgggcccagctgagtgacacctatgtcacgttgagagtcagcaaggagcaggaccacttcctgatcagccctaagggagtttcttgcagtgaagtcacagcgtccagcctgatcaaggaagtactggagatgaggaacaagattcgagaacaaaaccgacaagatgtgaagtcagcggggcctcagtcccagctcctggcgagcgtcattgccgagaagagccgaagcccgtctacagagagccagctgatgtccaagggagacgaggataccaaagacgattcagaggagacggtgcccaaccccttcagccaactcactgaccaggagttggaggagtacaagaaagaggtggagaggaagaaactagaacttgatgagacaggacaggaacg

SEQ ID NO: 105084 - DNA, 4337 bp, Homo sapiens
  Payload ID: 618
  Gene Symbol: ADD3
  Gene Name: adducin 3 (gamma)
  Uniprot ID: Q9UEY8
  ENST ID: ENST00000277900
  CDS Start-End: 366-2390
ggcgctcggctagtcccgccagagcgcgagccgccagcccgtaacggtcgccagtgtgaggggcgggagggaaagaagaggggtttaaattagattttttaaaacacagagcaagcgccagaggcgtcggcatcccaggtgtcgccgcttcctgctgcacagggctcggcgtacaggtccctccctcctcaagccccctccccttctcccgccctaccctctggggctctgcggcgcttaagaggcggccgcagcggcggatccggcggctgctgcagcccgggcggctgccgagaaggagggaggggaaacacaaagccggctacgcgctgcgagataacaagagtaatccacagacttaaaacatgagctcagatgccagccaaggcgtgattaccactcctcctcctcccagcatgcctcacaaagagagatattttgaccgcatcaatgaaaatgacccagaatacattagggagaggaacatgtctcctgatctacgacaagacttcaacatgatggagcagaggaaacgagttactcagatcctgcaaagtcctgcctttcgggaagacttggaatgccttattcaagaacagatgaagaaaggccacaacccaactggattactagcattacagcagattgcagattacatcatggccaattctttctcgggtttttcttcacctcctctcagtcttggcatggtcacacctatcaatgaccttcctggtgcagatacatcctcatatgtgaagggagaaaaacttactcgctgtaaacttgccagcctgtacagacttgtagacttgtttggatgggcacacctggcaaatacctatatctcagtaagaataagtaaggagcaagaccacattataataattcccagaggcctatctttttctgaagctacagcctccaatttggtgaaagtcaatataataggagaagtggttgaccagggaagtaccaatttgaaaattgaccatacaggattcagtccccatgctgcaatctattcaacacgtcctgatgttaagtgtgtgatacacatccatacccttgcaacagcagctgtatcctccatgaaatgtgggatccttccaatttctcaagagtctcttcttctgggagatgttgcctattatgactaccaagggtcacttgaagaacaggaggagagaattcaactgcagaaggttctgggaccaagttgtaaggtgctggtactcaggaatcatggtgtggttgcacttggagaaacattagaggaggcttttcattatatttttaatgtgcaactagcctgtgagattcaggtgcaggccctagcaggtgcaggtggagtagacaatctccatgtactggactttcagaagtataaagctttcacttacactgtagcagcgtctggtggaggaggtgtgaatatgggttcccatcaaaaatggaaggttggcgaaattgagtttgaagggcttatgaggactctggacaacttggggtatagaacaggctatgcttacaggcatcctctcattcgagagaagcctaggcacaagagtgatgtggaaatcccagcaactgtgactgctttttcctttgaagacgatacagtgccactctctcctctcaaatacatggcacagaggcaacagcgtgaaaaaacaagatggctgaactcaccaaatacttacatgaaagtgaatgtgcctgaggagtctcggaacggagaaaccagtccccgaaccaaaatcacgtggatgaaagcagaagactcatctaaagttagtggtggaacacctatcaaaattgaagatccaaatcagtttgttcctttaaacacaaacccgaatgaggtactagaaaagagaaataagattcgggaacaaaatcgatatgacttgaaaacagcaggaccacaatctcagttgcttgctggaattgttgtggataagccaccttctactatgcaatttgaagatgatgatcatggcccaccagctcctcctaacccatttagtcatctcacagaaggagaacttgaagagtataagaggacaatcgaacgtaaacaacaaggcctagaagaaaaccatgagctgttttccaagagcttcatctccatggaagtgcctgtcatggtagtaaatggcaaggatgatatgcatgatgttgaagatgagcttgctaagcgagtgagtaggttaagcacaagtacaaccatagaaaacatcgagattactattaagtctccagagaaaatcgaagaagtcctgtcacctgaaggctccccttcaaaatcgccatccaagaaaaagaagaaattccgcactccttcttttctgaaaaagaacaaaaaaaaggagaaagttgaggcctaaataaagtctttttataattattattataacaatgtgacattgcacatctaaataccacatttaagttgatcattaatatgcaatggtagatcagattgggggatgtagcaaactggactttaagaactggaaagaggttttacaaaagaaaaactttcagattcatctctcattttatatgtccagaaatggctttgaattttaagcaattactagttttaattagctctgccctcatgaagtattattataattcaccataaacagctatctgtctgaattacttcaggccttctccataatatctgttagaaagaaattgccagtgagcaagtgagaatttttatttctcaatacctgcttcacttgataatcatattataattttttatcatgattattgactatatttttggagtcccattgtttcagtgggcattaacagaatgctttaaaaacttctaagacaagaatctatagcattagtatacactggcacataattttttaaaaagttttaagaaaagattcatttggaattttattcacagtataaaatttcctcacctgaagtaactttgtttgccaaaaaagttgttttaataaactataatttttgaaaacttccttttttattagtttagaaagccccttatttttcaacaaaggggattttgtacacataacatgggttatttagtttaactctggcaaaaaaaaaaaaaaaaattttgtatgttgatgtttgtataccgttcagtataaaagtgtcctaagcatattagccaatcttttcacagtagagcatacttaaggctgcttggtactgagtatacttaaatataactccagaatccagggacttggtgttaaaacaggattagagcatgtaaaggtacatctagattcatatttgaatcttaaactgtatttttctcttagtattgctaatgagtaaagaaaagtctcataaggtagccaaatgaaaaagaatgaaagggaaagtgaaaaattaaggggacaaaagatgggatgtgaaaagaagaattctagtttgatggtgactcatattcacgataggatacaaagtgtgatttgttggaaacatgtcccaaatttctaaaattctgcttctctgccaaaagcaatgtctttcttggttgatatttgagttttaaaagggtcaaatctttctaattttttgtatctttagagggcagcactagaagaaatcagcaggtctaatcccaccagtaagaaaactaccacttcttgatttttacagatttaaaaaaatcttttcagtgacctttctttttaatgtaaatacaaatttaaacctaggcttaatataggcgtttcccctttcacccaagtgatgtcacagttcgatgcaaaatcaatgatccagaatgatcgtgggtaaaaataactcaaagtgtttcttaagggtgagttggcatgcaaaaaattacattgattacagtgtgttttggagctggctctgtttgtgtgcatatgataatgcagagttgagccagagcctggaaatgtcattctagatctcactaactactggaatcagtgttttaatctcttggtggaaactttcagttgcttaactctctattggaagatttttttaatgttctacatcatttatgttgtattacaatgtatgtagaaatagtaacctgtgaactatgcttttccataactttttaaaaatatatatatctaaatgaatgcaatgtgcataaatattttttaaacataacagtgaactattgcaccttttgctaatgcctctatttacttgctttggcataaagaatgagccaatgaacctctgtgtcctgtggaaaaatgtataaatgttatctgatattgctcttagatgtaatgctaattaatgttaaatcacaaataaacagtattttaaatata

SEQ ID NO: 105085 - DNA, 3081 bp, Homo sapiens
  Payload ID: 618
  Gene Symbol: ADD3
  Gene Name: adducin 3 (gamma)
  Uniprot ID: Q9UEY8
  ENST ID: ENST00000356080
  CDS Start-End: 368-2488
ggggcgctcggctagtcccgccagagcgcgagccgccagcccgtaacggtcgccagtgtgaggggcgggagggaaagaagaggggtttaaattagattttttaaaacacagagcaagcgccagaggcgtcggcatcccaggtgtcgccgcttcctgctgcacagggctcggcgtacaggtccctccctcctcaagccccctccccttctcccgccctaccctctggggctctgcggcgcttaagaggcggccgcagcggcggatccggcggctgctgcagcccgggcggctgccgagaaggagggaggggaaacacaaagccggctacgcgctgcgagataacaagagtaatccacagacttaaaacatgagctcagatgccagccaaggcgtgattaccactcctcctcctcccagcatgcctcacaaagagagatattttgaccgcatcaatgaaaatgacccagaatacattagggagaggaacatgtctcctgatctacgacaagacttcaacatgatggagcagaggaaacgagttactcagatcctgcaaagtcctgcctttcgggaagacttggaatgccttattcaagaacagatgaagaaaggccacaacccaactggattactagcattacagcagattgcagattacatcatggccaattctttctcgggtttttcttcacctcctctcagtcttggcatggtcacacctatcaatgaccttcctggtgcagatacatcctcatatgtgaagggagaaaaacttactcgctgtaaacttgccagcctgtacagacttgtagacttgtttggatgggcacacctggcaaatacctatatctcagtaagaataagtaaggagcaagaccacattataataattcccagaggcctatctttttctgaagctacagcctccaatttggtgaaagtcaatataataggagaagtggttgaccagggaagtaccaatttgaaaattgaccatacaggattcagtccccatgctgcaatctattcaacacgtcctgatgttaagtgtgtgatacacatccatacccttgcaacagcagctgtatcctccatgaaatgtgggatccttccaatttctcaagagtctcttcttctgggagatgttgcctattatgactaccaagggtcacttgaagaacaggaggagagaattcaactgcagaaggttctgggaccaagttgtaaggtgctggtactcaggaatcatggtgtggttgcacttggagaaacattagaggaggcttttcattatatttttaatgtgcaactagcctgtgagattcaggtgcaggccctagcaggtgcaggtggagtagacaatctccatgtactggactttcagaagtataaagctttcacttacactgtagcagcgtctggtggaggaggtgtgaatatgggttcccatcaaaaatggaaggttggcgaaattgagtttgaagggcttatgaggactctggacaacttggggtatagaacaggctatgcttacaggcatcctctcattcgagagaagcctaggcacaagagtgatgtggaaatcccagcaactgtgactgctttttcctttgaagacgatacagtgccactctctcctctcaaatacatggcacagaggcaacagcgtgaaaaaacaagatggctgaactcaccaaatacttacatgaaagtgaatgtgcctgaggagtctcggaacggagaaaccagtccccgaaccaaaatcacgtggatgaaagcagaagactcatctaaagttagtggtggaacacctatcaaaattgaagatccaaatcagtttgttcctttaaacacaaacccgaatgaggtactagaaaagagaaataagattcgggaacaaaatcgatatgacttgaaaacagcaggaccacaatctcagttgcttgctggaattgttgtggataagccaccttctactatgcaatttgaagatgatgatcatggcccaccagctcctcctaacccatttagtcatctcacagaaggagaacttgaagagtataagaggacaatcgaacgtaaacaacaaggcctagaagatgctgagcaggaattactctcagatgacgcttcatctgtttcacaaattcagtctcaaactcagtcaccgcaaaatgtccctgaaaaattagaagaaaaccatgagctgttttccaagagcttcatctccatggaagtgcctgtcatggtagtaaatggcaaggatgatatgcatgatgttgaagatgagcttgctaagcgagtgagtaggttaagcacaagtacaaccatagaaaacatcgagattactattaagtctccagagaaaatcgaagaagtcctgtcacctgaaggctccccttcaaaatcgccatccaagaaaaagaagaaattccgcactccttcttttctgaaaaagaacaaaaaaaaggagaaagttgaggcctaaataaagtctttttataattattattataacaatgtgacattgcacatctaaataccacatttaagttgatcattaatatgcaatggtagatcagattgggggatgtagcaaactggactttaagaactggaaagaggttttacaaaagaaaaactttcagattcatctctcattttatatgtccagaaatggctttgaattttaagcaattactagttttaattagctctgccctcatgaagtattattataattcaccataaacagctatctgtctgaattacttcaggccttctccataatatctgttagaaagaaattgccagtgagcaagtgagaatttttatttctcaatacctgcttcacttgataatcatattataattttttatcatgattattgactatatttttggagtcccattgtttcagtgggcattaacagaatgctttaaaaacttctaagacaagaatctatagcattagtatacactggcacataattttttaaaaagttttaagaaaagattcatttggaattttattcacagtataaaatttcctcacctgaagtaactttgtttgccaaaaaa

SEQ ID NO: 105086 - DNA, 3114 bp, Homo sapiens
  Payload ID: 618
  Gene Symbol: ADD3
  Gene Name: adducin 3 (gamma)
  Uniprot ID: Q9UEY8
  ENST ID: ENST00000360162
  CDS Start-End: 378-2402
agtccacaaaactccctgattccatcctctctgcctcttatgaagcaatactagagaggaaaaacaaaacccattcctttaagaaagattccgcctcctctcataagcaagcgcctaatggtaattgtagagtttactaagtcaaacacttactactcagcattgagagaagctgctgctgctaatgctgctgctgctgctgccgccgccgccgctgctgctgctgctgttggtctgaggctgcagtaggtttctgtgcagcattgcagaatccacacctagagaacagaagacacagacacgtacgtctactacccttgttagaaggaagctttggatcttcggtggataacaagagtaatccacagacttaaaacatgagctcagatgccagccaaggcgtgattaccactcctcctcctcccagcatgcctcacaaagagagatattttgaccgcatcaatgaaaatgacccagaatacattagggagaggaacatgtctcctgatctacgacaagacttcaacatgatggagcagaggaaacgagttactcagatcctgcaaagtcctgcctttcgggaagacttggaatgccttattcaagaacagatgaagaaaggccacaacccaactggattactagcattacagcagattgcagattacatcatggccaattctttctcgggtttttcttcacctcctctcagtcttggcatggtcacacctatcaatgaccttcctggtgcagatacatcctcatatgtgaagggagaaaaacttactcgctgtaaacttgccagcctgtacagacttgtagacttgtttggatgggcacacctggcaaatacctatatctcagtaagaataagtaaggagcaagaccacattataataattcccagaggcctatctttttctgaagctacagcctccaatttggtgaaagtcaatataataggagaagtggttgaccagggaagtaccaatttgaaaattgaccatacaggattcagtccccatgctgcaatctattcaacacgtcctgatgttaagtgtgtgatacacatccatacccttgcaacagcagctgtatcctccatgaaatgtgggatccttccaatttctcaagagtctcttcttctgggagatgttgcctattatgactaccaagggtcacttgaagaacaggaggagagaattcaactgcagaaggttctgggaccaagttgtaaggtgctggtactcaggaatcatggtgtggttgcacttggagaaacattagaggaggcttttcattatatttttaatgtgcaactagcctgtgagattcaggtgcaggccctagcaggtgcaggtggagtagacaatctccatgtactggactttcagaagtataaagctttcacttacactgtagcagcgtctggtggaggaggtgtgaatatgggttcccatcaaaaatggaaggttggcgaaattgagtttgaagggcttatgaggactctggacaacttggggtatagaacaggctatgcttacaggcatcctctcattcgagagaagcctaggcacaagagtgatgtggaaatcccagcaactgtgactgctttttcctttgaagacgatacagtgccactctctcctctcaaatacatggcacagaggcaacagcgtgaaaaaacaagatggctgaactcaccaaatacttacatgaaagtgaatgtgcctgaggagtctcggaacggagaaaccagtccccgaaccaaaatcacgtggatgaaagcagaagactcatctaaagttagtggtggaacacctatcaaaattgaagatccaaatcagtttgttcctttaaacacaaacccgaatgaggtactagaaaagagaaataagattcgggaacaaaatcgatatgacttgaaaacagcaggaccacaatctcagttgcttgctggaattgttgtggataagccaccttctactatgcaatttgaagatgatgatcatggcccaccagctcctcctaacccatttagtcatctcacagaaggagaacttgaagagtataagaggacaatcgaacgtaaacaacaaggcctagaagaaaaccatgagctgttttccaagagcttcatctccatggaagtgcctgtcatggtagtaaatggcaaggatgatatgcatgatgttgaagatgagcttgctaagcgagtgagtaggttaagcacaagtacaaccatagaaaacatcgagattactattaagtctccagagaaaatcgaagaagtcctgtcacctgaaggctccccttcaaaatcgccatccaagaaaaagaagaaattccgcactccttcttttctgaaaaagaacaaaaaaaaggagaaagttgaggcctaaataaagtctttttataattattattataacaatgtgacattgcacatctaaataccacatttaagttgatcattaatatgcaatggtagatcagattgggggatgtagcaaactggactttaagaactggaaagaggttttacaaaagaaaaactttcagattcatctctcattttatatgtccagaaatggctttgaattttaagcaattactagttttaattagctctgccctcatgaagtattattataattcaccataaacagctatctgtctgaattacttcaggccttctccataatatctgttagaaagaaattgccagtgagcaagtgagaatttttatttctcaatacctgcttcacttgataatcatattataattttttatcatgattattgactatatttttggagtcccattgtttcagtgggcattaacagaatgctttaaaaacttctaagacaagaatctatagcattagtatacactggcacataattttttaaaaagttttaagaaaagattcatttggaattttattcacagtataaaatttcctcacctgaagtaactttgtttgccaaaaaagttgttttaataaactataatttttgaaaacttccttttttattagtttagaaagccccttatttttcaacaaaggggattttgtacacataacatgggttatttagtttaactctggc

SEQ ID NO: 105087 - DNA, 2394 bp, Homo sapiens
  Payload ID: 618
  Gene Symbol: ADD3
  Gene Name: adducin 3 (gamma)
  ENST ID: ENST00000611329
  CDS Start-End: 125-2143
gaggcggccgcagcggcggatccggcggctgctgcagcccgggcggctgccgagaaggagggaggggaaacacaaagccggctacgcgctgcgagataacaagagtaatccacagacttaaaacatgagctcagatgccagccaaggcgtgattaccactcctcctcctcccagcatgcctcacaaagagagatattttgaccgcatcaatgaaaatgacccagaatacattagggagaggaacatgtctcctgatctacgacaagacttcaacatgatggagcagaggaaacgagttactcagatcctgcaaagtcctgcctttcgggaagacttggaatgccttattcaagaacagatgaagaaaggccacaacccaactggattactagcattacagcagattgcagattacatcatggccaattctttctcgggtttttcttcacctcctctcagtcttggcatggtcacacctatcaatgaccttcctggtgcagatacatcctcatatgtgaagggagaaaaacttactcgctgtaaacttgccagcctgtacagacttgtagacttgtttggatgggcacacctggcaaatacctatatctcagtaagaataagtaaggagcaagaccacattataataattcccagaggcctatctttttctgaagctacagcctccaatttggtgaaagtcaatataataggagaagtggttgaccagggaagtaccaatttgaaaattgaccatacaggattcagtccccatgctgcaatctattcaacacgtcctgatgttaagtgtgtgatacacatccatacccttgcaacagcagctgtatcctccatgaaatgtgggatccttccaatttctcaagagtctcttcttctgggagatgttgcctattatgactaccaagggtcacttgaagaacaggaggagagaattcaactgcagaaggttctgggaccaagttgtaaggtgctggtactcaggaatcatggtgtggttgcacttggagaaacattagaggaggcttttcattatatttttaatgtgcaactagcctgtgagattcaggtgcaggccctagcaggtgcaggtggagtagacaatctccatgtactggactttcagaagtataaagctttcacttacactgtagcagcgtctggtggaggaggtgtgaatatgggttcccatcaaaaatggaaggttggcgaaattgagtttgaagggcttatgaggactctggacaacttggggtatagaacaggctatgcttacaggcatcctctcattcgagagaagcctaggcacaagagtgatgtggaaatcccagcaactgtgactgctttttcctttgaagacgatacagtgccactctctcaaatacatggcacaaggcaacagcgtgaaaaaacaagatggctgaactcaccaaatacttacatgaaagtgaatgtgcctgaggagtctcggaacggagaaaccagtccccgaaccaaaatcacgtggatgaaagcagaagactcatctaaagttagtggtggaacacctatcaaaattgaagatccaaatcagtttgttcctttaaacacaaacccgaatgaggtactagaaaagagaaataagattcgggaacaaaatcgatatgacttgaaaacagcaggaccacaatctcagttgcttgctggaattgttgtggataagccaccttctactatgcaatttgaagatgatgatcatggcccaccagctcctcctaacccatttagtcatctcacagaaggagaacttgaagagtataagaggacaatcgaacgtaaacaacaaggcctagaagaaaaccatgagctgttttccaagagcttcatctccatggaagtgcctgtcatggtagtaaatggcaaggatgatatgcatgatgttgaagatgagcttgctaagcgagtgagtaggttaagcacaagtacaaccatagaaaacatcgagattactattaagtctccagagaaaatcgaagaagtcctgtcacctgaaggctccccttcaaaatcgccatccaagaaaaagaagaaattccgcactccttcttttctgaaaaagaacaaaaaaaaggagaaagttgaggcctaaataaagtctttttataattattattataacaatgtgacattgcacatctaaataccacatttaagttgatcattaatatgcaatggtagatcagattgggggatgtagcaaactggactttaagaactggaaagaggttttacaaaagaaaaactttcagattcatctctcattttatatgtccagaaatggctttgaattttaagcaattactagttttaattagctctgccctcatgaagtattattat

SEQ ID NO: 105088 - DNA, 947 bp, Homo sapiens
  Payload ID: 619
  Gene Symbol: APRT
  Gene Name: adenine phosphoribosyltransferase
  Uniprot ID: P07741
  ENST ID: ENST00000378364
  CDS Start-End: 46-588
ccgcgcaggcgcgctcgggctgccgctggctcttcgcacgcggccatggccgactccgagctgcagctggttgagcagcggatccgcagcttccccgacttccccaccccaggcgtggtattcagggacatctcgcccgtcctgaaggaccccgcctccttccgcgccgccatcggcctcctggcgcgacacctgaaggcgacccacgggggccgcatcgactacatcgcaggcctagactcccgaggcttcctctttggcccctccctggcccaggagcttggactgggctgcgtgctcatccgaaagcgggggaagctgccaggccccactctgtgggcctcctattccctggagtacgggaaggctgagctggagattcagaaagacgccctggagccaggacagagggtggtcgtcgtggatgatctgctggccactggtggaaccatgaacgctgcctgtgagctgctgggccgcctgcaggctgaggtcctggagtgcgtgagcctggtggagctgacctcgcttaagggcagggagaagctggcacctgtacccttcttctctctcctgcagtatgagtgaccacagggcctcccagcccaacatctccagctggatcccagggaaatatcagccttgggcaactgcagtgaccaggggcaccggctgcccacagggaacacattcctttgctggggttcagcgcctctcctggggctggaagtgccaaagcctggggcaaagctgtgtttcagccacactgaacccaattacacacagcgggagaacgcagtaaacagctttcccacaagagccgtctcctgtcctcctgttccccagggcagggagccccaggacaacaccagacttcagctgtactgtgggcatgtgctgcttggcgtgatgcccagcagaacctgtcctggttctcacctcaggag

SEQ ID NO: 105089 - DNA, 664 bp, Homo sapiens
  Payload ID: 619
  Gene Symbol: APRT
  Gene Name: adenine phosphoribosyltransferase
  Uniprot ID: P07741
  ENST ID: ENST00000426324
  CDS Start-End: 27-431
ctgccgctggctcttcgcacgcggccatggccgactccgagctgcagctggttgagcagcggatccgcagcttccccgacttccccaccccaggcgtggtattcagggacatctcgcccgtcctgaaggaccccgcctccttccgcgccgccatcggcctcctggcgcgacacctgaaggcgacccacgggggccgcatcgactacatcgcaggcctagactcccgaggcttcctctttggcccctccctggcccaggagcttggactgggctgcgtgctcatccgaaagcgggggaagctgccaggccccactctgtgggcctcctattccctggagtacgggaaggctgagctggagattcagaaagacgccctggagccaggacagagggtggtcgtcgtggatgatctgctggccactggtgtatgagtgaccacagggcctcccagcccaacatctccagctggatcccagggaaatatcagccttgggcaactgcagtgaccaggggcaccggctgcccacagggaacacattcctttgctggggttcagcgcctctcctggggctggaagtgccaaagcctggggcaaagctgtgtttcagccacactgaacccaattacacacagcgggagaacgcagtaaacagctttcccacaa

SEQ ID NO: 105090 - DNA, 788 bp, Homo sapiens
  Payload ID: 619
  Gene Symbol: APRT
  Gene Name: adenine phosphoribosyltransferase
  ENST ID: ENST00000569616
  CDS Start-End: 1-487
ggccgactccgagctgcagctggttgagcagcggatccgcagcttccccgacttccccaccccaggcgtggtattcagggacatctcgcccgtcctgaaggaccccgcctccttccgcgccgccatcggcctcctggcgcgacacctgaaggcgacccacgggggccgcatcgactacatcgcaggcctagactcccgaggcttcctctttggcccctccctggcccaggagcttggactgggctgcgtgctcatccgaaagcgggggaagctgccaggccccactctgtgggcctcctattccctggagtacgggaaggctgagctggagattcagaaagacgccctggagccaggacagagggtggtcgtcgtggatgatctgctggccactggtggggctggcctggagcacctgctctctgcagcccaggccaactggggacctcaccctcccatccccaggaaccatgaacgctgcctgtgagctgctgggccgcctgcaggctgaggtcctggagtgcgtgagcctggtggagctgacctcgcttaagggcagggagaagctggcacctgtacccttcttctctctcctgcagtatgagtgaccacagggcctcccagcccaacatctccagctggatcccagggaaatatcagccttgggcaactgcagtgaccaggggcaccggctgcccacagggaacacattcctttgctggggttcagcgcctctcctggggctggaagtgccaaagcctggggcaaagctgtgtttcagccacact

SEQ ID NO: 105091 - DNA, 470 bp, Homo sapiens
  Payload ID: 619
  Gene Symbol: APRT
  Gene Name: adenine phosphoribosyltransferase
  ENST ID: ENST00000567713
  CDS Start-End: 25-470
gccgctggctcttcgcacgcggccatggccgactccgagctgcagctggttgagcagcggatccgcagcttccccgacttccccaccccaggcgtggtattcagggacatctcgcccgtcctgaaggaccccgcctccttccgcgccgccatcggcctcctggcgcgacacctgaaggcgacccacgggggccgcatcgactacatcgcaggcctagactcccgaggcttcctctttggcccctccctggcccaggagcttggactgggctgcgtgctcatccgaaagcgggggaagctgccaggccccactctgtgggcctcctattccctggagtacgggaagctgtgtttcagccacactgaacccaattacacacagcgggagaacgcagtaaacagctttcccacaagagccgtctcctgtcctcctgttccccagggcagggagccccaggacaacaccagact

SEQ ID NO: 105092 - DNA, 709 bp, Homo sapiens
  Payload ID: 619
  Gene Symbol: APRT
  Gene Name: adenine phosphoribosyltransferase
  ENST ID: ENST00000563655
  CDS Start-End: 22-483
gctggctcttcgcacgcggccatggccgactccgagctgcagctggttgagcagcggatccgcagcttccccgacttccccaccccaggcgtggtattcagggacatctcgcccgtcctgaaggaccccgcctccttccgcgccgccatcggcctcctggcgcgacacctgaaggcgacccacgggggccgcatcgactacatcgcaggcgagtgcccagtggccgcatctagggcgcttccgcctctgcgcgcgccgagggctgagctggagattcagaaagacgccctggagccaggacagagggtggtcgtcgtggatgatctgctggccactggtggaaccatgaacgctgcctgtgagctgctgggccgcctgcaggctgaggtcctggagtgcgtgagcctggtggagctgacctcgcttaagggcagggagaagctggcacctgtacccttcttctctctcctgcagtatgagtgaccacagggcctcccagcccaacatctccagctggatcccagggaaatatcagccttgggcaactgcagtgaccaggggcaccggctgcccacagggaacacattcctttgctggggttcagcgcctctcctggggctggaagtgccaaagcctggggcaaagctgtgtttcagccacactgaacccaattacacacagcgggagaacgcagtaaacagctttccca

SEQ ID NO: 105093 - DNA, 542 bp, Homo sapiens
  Payload ID: 619
  Gene Symbol: APRT
  Gene Name: adenine phosphoribosyltransferase
  ENST ID: ENST00000568319
  CDS Start-End: 39-230
ggcgcgctcgggctgccgctggctcttcgcacgcggccatggccgactccgagctgcagctggttgagcagcggatccgcagcttccccgacttccccaccccaggcgtggtattcagggacatctcgcccgtcctgaaggaccccgcctccttccgcgccgccatcggcctcctggcgcgacacctgaaggcgacccacgggggccgcatcgactacatcgcaggctgagctggagattcagaaagacgccctggagccaggacagagggtggtcgtcgtggatgatctgctggccactggtgtatgagtgaccacagggcctcccagcccaacatctccagctggatcccagggaaatatcagccttgggcaactgcagtgaccaggggcaccggctgcccacagggaacacattcctttgctggggttcagcgcctctcctggggctggaagtgccaaagcctggggcaaagctgtgtttcagccacactgaacccaattacacacagcgggagaacgcagtaaacagctttcccacaa

SEQ ID NO: 105094 - DNA, 667 bp, Homo sapiens
  Payload ID: 619
  Gene Symbol: APRT
  Gene Name: adenine phosphoribosyltransferase
  ENST ID: ENST00000567391
  CDS Start-End: 30-221
gggctgccgctggctcttcgcacgcggccatggccgactccgagctgcagctggttgagcagcggatccgcagcttccccgacttccccaccccaggcgtggtattcagggacatctcgcccgtcctgaaggaccccgcctccttccgcgccgccatcggcctcctggcgcgacacctgaaggcgacccacgggggccgcatcgactacatcgcaggctgagctggagattcagaaagacgccctggagccaggacagagggtggtcgtcgtggatgatctgctggccactggtggaaccatgaacgctgcctgtgagctgctgggccgcctgcaggctgaggtcctggagtgcgtgagcctggtggagctgacctcgcttaagggcagggagaagctggcacctgtacccttcttctctctcctgcagtatgagtgaccacagggcctcccagcccaacatctccagctggatcccagggaaatatcagccttgggcaactgcagtgaccaggggcaccggctgcccacagggaacacattcctttgctggggttcagcgcctctcctggggctggaagtgccaaagcctggggcaaagctgtgtttcagccacactgaacccaattacacacagcgggagaacgcagtaaacagctttcccacaa

SEQ ID NO: 105095 - DNA, 10151 bp, Homo sapiens
  Payload ID: 620
  Gene Symbol: APC2
  Gene Name: adenomatosis polyposis coli 2
  Uniprot ID: O95996
  ENST ID: ENST00000233607
  CDS Start-End: 209-7120
gcagcgccgcctgcccaggcccggaccgggctttgtccgccccggagcccctgcccgcgccgcggagaccccggagcccgcgcgctccgaggccaccccgggccgggatttccggtggggcccgcggagccgcgcagagggaggaggccccagacccaggcgccccgccagcccagctgcacgtaagcggacgctgcaggagctgaagatggcgagctccgtggcgccctacgagcagctggtgaggcaggtggaggccttgaaggctgagaacagccacctgaggcaggagctaagggacaactccagccacctgtccaagctggagacagagacgtcgggcatgaaggaggtcctgaagcacctacagggaaaactggagcaggaggcccgagtgctggtgtcctcggggcagacggaggtgctggagcagctgaaggccctacagatggacatcaccagcctgtacaacctcaagttccagccgcccaccctgggcccggagcctgccgcccggacccccgagggcagcccagtacacggctccgggccctccaaggacagctttggggagctgagccgggccaccatccggctgctggaggaactggaccgggaacggtgtttcctgctgaatgagattgagaaggaggagaaggagaagctctggtactactctcagctgcagggcctgtccaagcgcctggacgagctgccgcacgtggagacgcagttctcgatgcagatggacctgatccggcagcagcttgagttcgaggcccagcacatccgctcgctgatggaggagcgcttcggcacctcggacgagatggtgcagcgggcacagatccgcgcctcgcgcctggagcagattgacaaggagctgctggaggcgcaggaccgagtgcagcagacggagccccaggccttgctggcggtgaagtcggtgccggtggacgaggaccccgagacagaggtccccacacaccctgaggatggcacccctcagccgggcaacagcaaggtggaggtggtcttctggctgttgtccatgttggcgacgcgcgaccaggaggatacagcgcgcacgctgctggccatgtccagctcgcccgagagctgcgtggccatgcgccgctcgggctgtctgcctctgctgctgcaaatcctccacggcaccgaggccgcggccgggggtcgcgccggggccccaggggcaccgggcgccaaggacgcacgcatgcgcgccaacgcggcgctgcacaacatcgtcttctcgcagccggaccagggcctggcgcgcaaggagatgcgcgtcctgcacgtgctggagcagatccgggcctactgcgagacctgctgggactggctgcaggcccgagacggcgggcccgagggaggtggcgccggcagcgccccgatccccatcgagccgcagatctgccaggccacctgtgctgttatgaagctgtcctttgatgaggagtaccgccgtgccatgaacgagctaggtgggctgcaggccgtggcagagctgctgcaggttgactatgagatgcacaagatgacccgggacccgctgaacctggcgctgcgccgctacgcgggcatgaccctcaccaacctcacctttggggacgttgccaacaaggccaccctgtgtgcgcgccgcggctgcatggaggccatcgtggcccagctggcctccgacagtgaggagctccaccaggtggtgtccagcatccttcggaacttgtcctggagggccgacatcaacagcaagaaggtgctgagggaggcgggcagcgtgactgccctggtgcagtgtgtcctgcgggccaccaaggagtccaccctgaagagcgtgctgagcgccctgtggaatctgtctgcacacagcacagagaacaaggcggccatctgccaggtggatggcgccctgggcttcctggtgagcaccctgacctacaagtgtcagagcaactcgctggccatcatcgagagcggcggcggcatcctccgcaatgtgtccagcctcgtcgccacccgtgaggactacaggcaggtgctccgggatcacaactgtctgcagacgctgctgcagcatctgacttcgcacagcctgaccatcgtgagcaacgcgtgcggcacgctctggaacctgtcggcccgcagcgcccgtgaccaggagctgctgtgggacctgggcgccgtgggcatgctgcgtaatctggtgcactccaagcacaagatgatcgccatgggcagcgccgccgccctgcgcaacctgctggcccatcggcccgccaagcaccaggcggccgccaccgccgtgtccccaggcagctgcgtgcccagcctgtacgtgcgcaagcagcgggcgctggaggccgagctggacgcacggcacctcgcgcaggcgctggagcacctggagaagcagggcccgccggcagccgaggccgccactaagaagccgctgccgcccctgcgacacctggacggcctggcccaagactatgcttccgattcgggctgctttgacgacgacgatgcaccgtcatccctggctgcggccgcggccaccggggagccagccagccctgccgcgctgtccctcttcctgggcagccccttcctgcaggggcaggcgctggctcgcaccccgcccacccgccgaggcggcaaggaggcagagaaggacaccagtggggaggcagccgtggcggccaaggccaaggccaagctggcgcttgcagtggcgcgcatcgaccagctggtggaggacatctccgccctgcacacctcgtccgacgatagcttcagcctcagctctggagacccgggacaggaggcgccacgggagggccgcgcccagtcctgctcgccatgccgcggcccggagggcgggcggcgagaggcaggaagccgggcgcacccgctgctgcggctcaaggcggcccacgccagcctctccaacgacagcctcaacagcggcagtgccagcgacgggtactgcccacgcgaacatatgctgccctgcccgctggccgcactggcttcgcgccgcgaggaccccaggtgtgggcagcctcggcccagccggcttgaccttgacctgcccggctgccaggccgagcccccggcccgcgaggccacctccgccgacgcccgcgtgcgcaccatcaagctgtcgcctacctatcagcacgtgccactgcttgagggtgcctcaagggcgggtgcagagcccctcgcggggcctggaatctctccaggggcccggaagcaggcctggctgccggcagaccacctgagcaaggttcccgagaagctggcggctgccccgctgtctgtggccagcaaggcactgcagaaactggcggcgcaagaggggccactctcgctgtcccgatgcagctccctttcctcgctgtcctcggccggccgcccaggccccagcgagggtggtgacctggatgacagtgactcctccctggaggggctggaggaggccggccccagcgaggctgagctggacagcacgtggcgggcgcccggggccacctcgctgcccgtagccattccggctccccggcgtaaccgaggccggggcctgggggtggaagacgccacgccgtccagctcgtcggagaactacgtgcaggagacaccgcttgtgctgagccgctgcagctctgtgagctcgctgggcagcttcgagagcccgtccatcgccagctccatccccagtgaaccttgcagcgggcagggcagcggcaccatcagccctagcgagctgcccgacagccccggacagaccatgcctcccagccggagcaagacgccaccgctggcgcccgcgccacagggtccccccgaggccacccagttcagcctgcagtgggagagctacgtgaagcgcttcctggacatcgccgactgccgggagcgctgccggctgccatctgagctggacgcaggcagcgtgcgctttaccgtggagaagccagacgagaacttctcgtgcgcctccagcctcagcgcgctggccttgcacgagcactacgtgcagcaggacgtggagctgcggctgctgccctcggcctgccccgagcgcggcgggggcgccgggggcgccggcctccactttgcagggcaccggcggcgggaggaggggccggcgcccacgggttctcgccctcgcggcgccgcggaccaggagctggaactgctgcgggagtgcctgggagccgccgtgcctgcccggctgcgcaaggtggcctccgcgctggtgccaggtcgccgcgcactccccgtgcccgtctacatgttggtgcccgccccggccccggcccaggaggacgactcctgcactgactccgcggagggcacgccggtcaacttctctagcgccgcctcgctcagcgacgagacgctgcagggaccccccagggaccagcccgggggaccagcgggcaggcaaagacccaccggccgccccacctctgccagacaggccatggggcaccggcacaaggcgggaggcgccggccgcagcgcggagcagtctcggggcgcgggcaagaacagagcagggctggagctgcccctgggccggcccccgagcgcccccgcagacaaggacggctcaaagcccggccggacccgcggggacggggcgctccagtcgctgtgcctcacgacgcccactgaggaggccgtgtactgcttctacggcaacgactcggacgaggagcccccggcggccgcgcccacgccaacccaccggcgcacatcggccatccctcgcgcttttacgcgggagcgtccgcagggccggaaggaggcccctgccccgtccaaggctgcaccagctgccccgccgcccgcccggacccagcccagcctcattgctgacgagaccccgccctgctactccctgagctcctccgccagctccctcagcgagcccgagccctcggagccgccggccgtccatccacgaggccgggagcccgcggtcaccaaggacccgggcccaggaggcggacgcgacagctcgcccagcccgcgggccgcggaggagcttctgcagcggtgcatcagctcggccctgcccaggcgccggccccccgtgtctggcctgcggcgccgcaagccccgagccacccggctggatgagcggcccgcagaggggtcccgggaacgcggcgaggaggcagcgggctcggaccgggcctccgacctggatagcgtggagtggcgcgccatccaggagggcgccaattcaattgtcacgtggctgcaccaggcagcagctgccacgcgggaggcctcgtccgagtccgactccatcctgtccttcgtatccgggctgtcagtgggatccaccctacagccccccaagcacaggaagggacgacaggcggagggagaaatgggcagtgcccggcggccagagaaaaggggcgcagcctcagtcaagaccagcgggagcccccgttcccctgcaggccccgagaagccacgtggcacacagaagaccacgcccggggtgccagctgtgctccggggacgaacagtgatctacgtccccagcccggcaccccgtgcccagcccaaagggacccccggcccccgcgccacaccgcggaaggtggcgcccccttgcctggcacagcccgcggctccagccaaagtcccgagccccgggcagcagcggtcgcggagcctacaccggcctgccaagacctcggagctggcgacgctgagccagccccccagaagcgccacaccgcccgcccgcctcgccaagaccccctcctccagctcctcccagacctcgcccgcctcccagcccctgcccagaaagcgccccccggtcacccaggctgctggggccctgcccggccccggagcctccccggtgcccaaaacgccggcgcgcacccttctggcgaagcagcacaagacgcagagatcgcccgtgcggatcccgttcatgcagaggccggcccggcgtgggccgccaccgctggctcgggcagtcccggagccgggccccaggggccgggcggggaccgaggcgggcccgggggcgcgcgggggccgcctgggcctggtgcgtgtggcctcagccctctccagcggcagcgagtcctccgaccgctcgggcttccggcgacagctaaccttcatcaaggagtcgccgggcttgcggcgccgccgctccgagctgtcctcggccgagtccgcggcctctgccccccagggcgcctcgccccgccgcggccggcccgcgctgcccgccgtcttcctctgctcctcgcgctgcgaagagctccgagcggcaccccggcagggcccggccccggcccggcagcggccccccgcggcccgacccagccctggcgagcgccctgcccggcgcaccacctccgagagcccgtcccgcctgcctgtgcgcgcgcccgccgcccggccggagactgtcaagcgctacgcgtcgctgccgcacatcagcgtggcccgcaggcccgacggcgccgtccccgcggcccctgcctcagccgacgccgcgcgccgcagcagcgacggggagccccggccgctccccagggtggccgcgccgggcacgacctggcggcgcatccgagatgaggacgtgccccacatcctgcgcagcacgcttcccgccacggccctgccactgcggggctccacgcccgaggacgccccggccgggcccccgccgcgcaagaccagcgacgccgtggtccagaccgaggaggtcgccgcccccaagaccaactccagcacgtccccgagcctggagaccagggagccccccggggcccccgccggcggccagctctccctcctcggcagcgacgtggacggtcccagcctcgccaaggctcccatctccgcacccttcgtgcacgagggcctgggggtcgccgtggggggcttccccgccagccggcacggctcccccagccgctcggcccgagtaccccccttcaactatgtgcccagccccatggtggtcgcagccaccaccgactcggccgcggagaaagccccggccactgcctccgccaccctcctggaatagtggcctaggccggccttctggaacgttctctcccggccctgcggcgcggtctggctgccccatgggcctgcgctgtagacgtcccccataggtcgccccagggcctctgcccacccgagccccaccactctcagaacccccgcccagcgcacggcgacctcgcgcctcaccggaagaccttgcctctgtgccgcggaggtccaggaggaaacggggcggccgctaggcctcaagtcccgaccgtggagcgctggcaagggcgtcctggcccagccctgagcgcgcggcccttcccctgtcggaagccgttgcttgaccccgggcgagggaggcggtagcctccgggtccgggtctgggtctgggtccgctgcttcgcagggacagcgctggggaggtgacggcgcccgccgcaggtggggcgaggctgggggagggcggcgccgcggcgggcctgccagctgggggcctttgcggcgcgcaggggcgaagcctgtaatcactgcagccgccggtaattcgctaatgagggctttgcagggattgttttcattctcagccccagctgtgggagtgcgggtgggggtgtggccgagccccggcaggaagccccgcccagacggtgttcagggaacccggagcccaagcgctccggcggagcccaaaagggtgggggtgggaggggcagaggccaacggatccccctgcctgtcgcaccccttggcgggagacgggaaggcagcgggctgcgtacgatgggaccctggtgcagacgccgggccggctgacatttggaccccatcccagaggagatgctggctaccagctggggcgaccccaagggtcgctggagtcagtatcggcccggcgcagccgcggcgggcgaggccaatggaaaggagactgaggggagtcccggcagtgagcccgaggccctgggacctggagcccgcgctggcctctccccagcggagcctgcacgttacggagaccatcacatgtgggcgtggtcagtgcccaggaccgcaccgctgctcatcttgtcccttttcaattcccttctggttcatgatgcataaagcgctaggccctagaactccagaaacagcacagctggggcggggacccagccttgccctccacccgaggctctgggacaaggcgggaggttcgggggccttccggcaggtgaacgcagggctggagagtatttggtgccagatgaggtgaaagcttatagaagggcctgaggggctcggctgcctcatcccctggcgggggaggctgggagctgggcctcctgcgtggggtgggactcgcaggggccgggtctccgtgactggggcaacgcctcgtcctgcagagggagccgacgacctcttttctgcagaaaagctccagcaggcgctgccttcacccacggatctgcccaggctgaaggcacacgctcaatgccccacgtgccttctccaggaggaacgaagcagggtttgagggttgggtggatggagctcagaaggaaaccccagccccaccacggatgacaccatccctcccgtcccatccccagcatgggcaaggccagcctttctggcagaaggagctgtcctcaactcagggccgctgtgagcaaagctgaccccagcccccacccccagttaacactgctgcttctctgaatgcatgtcacgctgcaccccatgctccgggcccacaccctgcaggacaaggagctccagacaggacgtccataagtcaccgaggtgtgccacccagcaggtgctggaggtgcccaatgctccctcctaggacctcgcagccaggcaaggctgtcaggttgttttgggggaagagggggtcatggatggctgagcagagagcggggaaaatgcaggctgagtggggcgacctcctgcctgccaggagccccctttcaggacacagcgggggtctcacacttgctgtccccatccatggcccgagggggaacctggtggtctcttctgagcttttggacttggggatgccaaacacgtgctcaccctcacactcgccccggcccgctgcgcccctaattgccaaagggtagggaaatggcgaagccagccaccaggtcgctggtgacagggccagggttatgcaggaaggtggtgcggcattgccttccacatatgtaagtctctgggcggcgccctcccagctccctgcctctgtttccccatgtgggccgtggggaactcccagagctacctcttgggggagcgtggtggcagcgatgatggggagacgcctggaagctcacagaacttgggtctggctggctcctgcccgtgacgccttgcccagcagcaaggtgcgcaacatggctgccagccccgcctcccacccccaccccgagtcctgagctcactttcgccttctccatcccctgccgtgggggccacagccacacctcaccgcccagtccagctgtctccagaaggggacaggcagtccgcggtctctggacaatcaactcaaggtacgcccactgcaaggcctccctcccaccgcggcccctgcctggccacctggcctctctgcaccagggtgacaaggggtcctcgtctgccccccaatgctccagggccagtcctaaggagctgagggtctgaggacgcagggagggtggaggtgtcctgaggctgatggacagtgaccgccactggcccccaacatgaccacacgtgggtgctgaactcggggcgccgtgcccaccggcatggtcctcccgagctccgacagcattacctcacccggccccatctgttgccccggtccagccctgatggcgcgcgcctggtctgtctgattcccctagccgccaccccacgtttctgtaccgggtctctgcagtgttaaacggacgtgtaaatagtggtaaatagtgaaagcctgtccttccctaaatgtaaagccatctgtccggcgtaaggacgacaccgtcagctgtccgactcgcacacatttaataaactgagctcttgcattgcc

SEQ ID NO: 105096 - DNA, 2394 bp, Homo sapiens
  Payload ID: 620
  Gene Symbol: APC2
  Gene Name: adenomatosis polyposis coli 2
  ENST ID: ENST00000238483
  CDS Start-End: 203-2394
ccggattgcctggccaccaccacgtgggcctgtacttgtccacaccagtgactcctgcctgagaccccccccaacccaggatcaggcaggacggctggggcttaggtcaggggccgtctgtccggaaggcatcaccgcgccctccccagaccatcagctgaaccctctgaccctgtgatcccagacgctgcaggagctgaagatggcgagctccgtggcgccctacgagcagctggtgaggcaggtggaggccttgaaggctgagaacagccacctgaggcaggagctaagggacaactccagccacctgtccaagctggagacagagacgtcgggcatgaaggaggtcctgaagcacctacagggaaaactggagcaggaggcccgagtgctggtgtcctcggggcagacggaggtgctggagcagctgaaggccctacagatggacatcaccagcctgtacaacctcaagttccagccgcccaccctgggcccggagcctgccgcccggacccccgagggcagcccagtacacggctccgggccctccaaggacagctttggggagctgagccgggccaccatccggctgctggaggaactggaccgggaacggtgtttcctgctgaatgagattgagaaggaggagaaggagaagctctggtactactctcagctgcagggcctgtccaagcgcctggacgagctgccgcacgtggagacgttctcgatgcagatggacctgatccggcagcagcttgagttcgaggcccagcacatccgctcgctgatggaggagcgcttcggcacctcggacgagatggtgcagcgggcacagatccgcgcctcgcgcctggagcagattgacaaggagctgctggaggcgcaggaccgagtgcagcagacggagccccaggccttgctggcggtgaagtcggtgccggtggacgaggaccccgagacagaggtccccacacaccctgaggatggcacccctcagccgggcaacagcaaggtggaggtggtcttctggctgttgtccatgttggcgacgcgcgaccaggaggatacagcgcgcacgctgctggccatgtccagctcgcccgagagctgcgtggccatgcgccgctcgggctgtctgcctctgctgctgcaaatcctccacggcaccgaggccgcggccgggggtcgcgccggggccccaggggcaccgggcgccaaggacgcacgcatgcgcgccaacgcggcgctgcacaacatcgtcttctcgcagccggaccagggcctggcgcgcaaggagatgcgcgtcctgcacgtgctggagcagatccgggcctactgcgagacctgctgggactggctgcaggcccgagacggcgggcccgagggaggtggcgccggcagcgccccgatccccatcgagccgcagatctgccaggccacctgtgctgttatgaagctgtcctttgatgaggagtaccgccgtgccatgaacgagctaggtgggctgcaggccgtggcagagctgctgcaggttgactatgagatgcacaagatgacccgggacccgctgaacctggcgctgcgccgctacgcgggcatgaccctcaccaacctcacctttggggacgttgccaacaaggccaccctgtgtgcgcgccgcggctgcatggaggccatcgtggcccagctggcctccgacagtgaggagctccaccaggtggtgtccagcatccttcggaacttgtcctggagggccgacatcaacagcaagaaggtgctgagggaggcgggcagcgtgactgccctggtgcagtgtgtcctgcgggccaccaaggagtccaccctgaagagcgtgctgagcgccctgtggaatctgtctgcacacagcacagagaacaaggcggccatctgccaggtggatggcgccctgggcttcctggtgagcaccctgacctacaagtgtcagagcaactcgctggccatcatcgagagcggcggcggcatcctccgcaatgtgtccagcctcgtcgccacccgtgaggactacaggcaggtgctccgggatcacaactgtctgcagacgctgctgcagcatctgacttcgcacagcctgaccatcgtgagcaacgcgtgcggcacgctctggaacctgtcggcccgcagcgcccgtgaccaggagctgctgtgggacctgggcgccgtgggcatgctgcgtaatctggtgcactccaagcacaagatgatcgccatgggcagcgccgccgccctgcgcaacctgctggcccatcggcccgccaagcaccaggcggccgccaccgccgtgtccccaggcagctgcgtgcccagcctgtacgtgcgcaagcagcgggcgctggaggccgagctggacgc

SEQ ID NO: 105097 - DNA, 11656 bp, Homo sapiens
  Payload ID: 620
  Gene Symbol: APC2
  Gene Name: adenomatosis polyposis coli 2
  Uniprot ID: O95996
  ENST ID: ENST00000535453
  CDS Start-End: 1714-8625
gggtttggggagcaggaggcagacatgtgttgctttgcacgtcatctggtccttccacctggctgggcatgggatggtgacctcagctggaacatggggctcgagccagaccccagggtctccctgcgtgtagcccccaaccccaagcctgatccccactggagacctgaacagccttggacatcatcggatcagggtgggaggtgccagcctctgccacctgacttccagtccctgtgcccctcccaccctgcccttgggcactcctgccctgcaggttcctcagaggggcaacccaaagccagagaggggcgggtcttgtcgggcctccagcctggacttcccagcccctctggggcagcatctgggtgccagacctcggttcctagggcctcgtttctccctctgggaacagccaaatggtggtccctgagactcaggacagaccaagaaggagccggatgacatggcaagccacacactgcgtcccctgagcaggacgggacagcccgactccatcctcccacctgcgactgagcccccacccctactcctgtcccagccgtgcccctggtgacatttgggtgggaggggaggggatgagggggcacctgggggtcagagaacaaatgacgggtgaatacatgtgtgtggccaggtggaggagggaggggaggagcaggtgggctggacagggccggtgtgaggaaggggctcaggctggcagggggaggtggcagagggatgggctgccattggtgcgtctgagacaaaggcggagggaggaggcgagcgctgatgggaaaggaacaaagagggaaggggggcgtgaaggggggctccggcgggagggccgagccgagggaggaggcgccggccagctggacagagggaggaggccaggccagagccagaagacggccagaggcacaaagaagccagcgcgctggcagagtcaagggatggggcaggggctgccggggccagcagggaccagctgaaggctgcgcagggggtgcgggccacacaggtagccaccctgagctcagccaccgatggagggtcgtggggctgctgcggtgatggcggtgggcttgggtccatctgtcctgccgtttctgcacagcttaggtgtcacccactggccttcgtggtgttttcattgtccatcggcagggacagctggtggtctgtccgccccgcgtgtctggctgtcagcctctgggcaggcttgcttttatgggggagggtcctgtctgtctgtctgtcgccctctctggctgtgagcctgggggtgctgggctggccagtcggcttgctgggttaggctgtcccagctgtctgtgtgtttgtccggctgtcaggatgtgtcctgggggctgggaaggagaggccgacccatcgtctgtcggtcgactggtcagttggacgttcagctgtctgtacgtctgtctgctggcccctctgtctccccttggggccacctctcactccacctgcccctctgcgccccggattgcctggccaccaccacgtgggcctgtacttgtccacaccagtgactcctgcctgagaccccccccaacccaggatcaggcaggacggctggggcttaggtcaggggccgtctgtccggaaggcatcaccgcgccctccccagaccatcagctgaaccctctgaccctgtgatcccagacgctgcaggagctgaagatggcgagctccgtggcgccctacgagcagctggtgaggcaggtggaggccttgaaggctgagaacagccacctgaggcaggagctaagggacaactccagccacctgtccaagctggagacagagacgtcgggcatgaaggaggtcctgaagcacctacagggaaaactggagcaggaggcccgagtgctggtgtcctcggggcagacggaggtgctggagcagctgaaggccctacagatggacatcaccagcctgtacaacctcaagttccagccgcccaccctgggcccggagcctgccgcccggacccccgagggcagcccagtacacggctccgggccctccaaggacagctttggggagctgagccgggccaccatccggctgctggaggaactggaccgggaacggtgtttcctgctgaatgagattgagaaggaggagaaggagaagctctggtactactctcagctgcagggcctgtccaagcgcctggacgagctgccgcacgtggagacgcagttctcgatgcagatggacctgatccggcagcagcttgagttcgaggcccagcacatccgctcgctgatggaggagcgcttcggcacctcggacgagatggtgcagcgggcacagatccgcgcctcgcgcctggagcagattgacaaggagctgctggaggcgcaggaccgagtgcagcagacggagccccaggccttgctggcggtgaagtcggtgccggtggacgaggaccccgagacagaggtccccacacaccctgaggatggcacccctcagccgggcaacagcaaggtggaggtggtcttctggctgttgtccatgttggcgacgcgcgaccaggaggatacagcgcgcacgctgctggccatgtccagctcgcccgagagctgcgtggccatgcgccgctcgggctgtctgcctctgctgctgcaaatcctccacggcaccgaggccgcggccgggggtcgcgccggggccccaggggcaccgggcgccaaggacgcacgcatgcgcgccaacgcggcgctgcacaacatcgtcttctcgcagccggaccagggcctggcgcgcaaggagatgcgcgtcctgcacgtgctggagcagatccgggcctactgcgagacctgctgggactggctgcaggcccgagacggcgggcccgagggaggtggcgccggcagcgccccgatccccatcgagccgcagatctgccaggccacctgtgctgttatgaagctgtcctttgatgaggagtaccgccgtgccatgaacgagctaggtgggctgcaggccgtggcagagctgctgcaggttgactatgagatgcacaagatgacccgggacccgctgaacctggcgctgcgccgctacgcgggcatgaccctcaccaacctcacctttggggacgttgccaacaaggccaccctgtgtgcgcgccgcggctgcatggaggccatcgtggcccagctggcctccgacagtgaggagctccaccaggtggtgtccagcatccttcggaacttgtcctggagggccgacatcaacagcaagaaggtgctgagggaggcgggcagcgtgactgccctggtgcagtgtgtcctgcgggccaccaaggagtccaccctgaagagcgtgctgagcgccctgtggaatctgtctgcacacagcacagagaacaaggcggccatctgccaggtggatggcgccctgggcttcctggtgagcaccctgacctacaagtgtcagagcaactcgctggccatcatcgagagcggcggcggcatcctccgcaatgtgtccagcctcgtcgccacccgtgaggactacaggcaggtgctccgggatcacaactgtctgcagacgctgctgcagcatctgacttcgcacagcctgaccatcgtgagcaacgcgtgcggcacgctctggaacctgtcggcccgcagcgcccgtgaccaggagctgctgtgggacctgggcgccgtgggcatgctgcgtaatctggtgcactccaagcacaagatgatcgccatgggcagcgccgccgccctgcgcaacctgctggcccatcggcccgccaagcaccaggcggccgccaccgccgtgtccccaggcagctgcgtgcccagcctgtacgtgcgcaagcagcgggcgctggaggccgagctggacgcacggcacctcgcgcaggcgctggagcacctggagaagcagggcccgccggcagccgaggccgccactaagaagccgctgccgcccctgcgacacctggacggcctggcccaagactatgcttccgattcgggctgctttgacgacgacgatgcaccgtcatccctggctgcggccgcggccaccggggagccagccagccctgccgcgctgtccctcttcctgggcagccccttcctgcaggggcaggcgctggctcgcaccccgcccacccgccgaggcggcaaggaggcagagaaggacaccagtggggaggcagccgtggcggccaaggccaaggccaagctggcgcttgcagtggcgcgcatcgaccagctggtggaggacatctccgccctgcacacctcgtccgacgatagcttcagcctcagctctggagacccgggacaggaggcgccacgggagggccgcgcccagtcctgctcgccatgccgcggcccggagggcgggcggcgagaggcaggaagccgggcgcacccgctgctgcggctcaaggcggcccacgccagcctctccaacgacagcctcaacagcggcagtgccagcgacgggtactgcccacgcgaacatatgctgccctgcccgctggccgcactggcttcgcgccgcgaggaccccaggtgtgggcagcctcggcccagccggcttgaccttgacctgcccggctgccaggccgagcccccggcccgcgaggccacctccgccgacgcccgcgtgcgcaccatcaagctgtcgcctacctatcagcacgtgccactgcttgagggtgcctcaagggcgggtgcagagcccctcgcggggcctggaatctctccaggggcccggaagcaggcctggctgccggcagaccacctgagcaaggttcccgagaagctggcggctgccccgctgtctgtggccagcaaggcactgcagaaactggcggcgcaagaggggccactctcgctgtcccgatgcagctccctttcctcgctgtcctcggccggccgcccaggccccagcgagggtggtgacctggatgacagtgactcctccctggaggggctggaggaggccggccccagcgaggctgagctggacagcacgtggcgggcgcccggggccacctcgctgcccgtagccattccggctccccggcgtaaccgaggccggggcctgggggtggaagacgccacgccgtccagctcgtcggagaactacgtgcaggagacaccgcttgtgctgagccgctgcagctctgtgagctcgctgggcagcttcgagagcccgtccatcgccagctccatccccagtgaaccttgcagcgggcagggcagcggcaccatcagccctagcgagctgcccgacagccccggacagaccatgcctcccagccggagcaagacgccaccgctggcgcccgcgccacagggtccccccgaggccacccagttcagcctgcagtgggagagctacgtgaagcgcttcctggacatcgccgactgccgggagcgctgccggctgccatctgagctggacgcaggcagcgtgcgctttaccgtggagaagccagacgagaacttctcgtgcgcctccagcctcagcgcgctggccttgcacgagcactacgtgcagcaggacgtggagctgcggctgctgccctcggcctgccccgagcgcggcgggggcgccgggggcgccggcctccactttgcagggcaccggcggcgggaggaggggccggcgcccacgggttctcgccctcgcggcgccgcggaccaggagctggaactgctgcgggagtgcctgggagccgccgtgcctgcccggctgcgcaaggtggcctccgcgctggtgccaggtcgccgcgcactccccgtgcccgtctacatgttggtgcccgccccggccccggcccaggaggacgactcctgcactgactccgcggagggcacgccggtcaacttctctagcgccgcctcgctcagcgacgagacgctgcagggaccccccagggaccagcccgggggaccagcgggcaggcaaagacccaccggccgccccacctctgccagacaggccatggggcaccggcacaaggcgggaggcgccggccgcagcgcggagcagtctcggggcgcgggcaagaacagagcagggctggagctgcccctgggccggcccccgagcgcccccgcagacaaggacggctcaaagcccggccggacccgcggggacggggcgctccagtcgctgtgcctcacgacgcccactgaggaggccgtgtactgcttctacggcaacgactcggacgaggagcccccggcggccgcgcccacgccaacccaccggcgcacatcggccatccctcgcgcttttacgcgggagcgtccgcagggccggaaggaggcccctgccccgtccaaggctgcaccagctgccccgccgcccgcccggacccagcccagcctcattgctgacgagaccccgccctgctactccctgagctcctccgccagctccctcagcgagcccgagccctcggagccgccggccgtccatccacgaggccgggagcccgcggtcaccaaggacccgggcccaggaggcggacgcgacagctcgcccagcccgcgggccgcggaggagcttctgcagcggtgcatcagctcggccctgcccaggcgccggccccccgtgtctggcctgcggcgccgcaagccccgagccacccggctggatgagcggcccgcagaggggtcccgggaacgcggcgaggaggcagcgggctcggaccgggcctccgacctggatagcgtggagtggcgcgccatccaggagggcgccaattcaattgtcacgtggctgcaccaggcagcagctgccacgcgggaggcctcgtccgagtccgactccatcctgtccttcgtatccgggctgtcagtgggatccaccctacagccccccaagcacaggaagggacgacaggcggagggagaaatgggcagtgcccggcggccagagaaaaggggcgcagcctcagtcaagaccagcgggagcccccgttcccctgcaggccccgagaagccacgtggcacacagaagaccacgcccggggtgccagctgtgctccggggacgaacagtgatctacgtccccagcccggcaccccgtgcccagcccaaagggacccccggcccccgcgccacaccgcggaaggtggcgcccccttgcctggcacagcccgcggctccagccaaagtcccgagccccgggcagcagcggtcgcggagcctacaccggcctgccaagacctcggagctggcgacgctgagccagccccccagaagcgccacaccgcccgcccgcctcgccaagaccccctcctccagctcctcccagacctcgcccgcctcccagcccctgcccagaaagcgccccccggtcacccaggctgctggggccctgcccggccccggagcctccccggtgcccaaaacgccggcgcgcacccttctggcgaagcagcacaagacgcagagatcgcccgtgcggatcccgttcatgcagaggccggcccggcgtgggccgccaccgctggctcgggcagtcccggagccgggccccaggggccgggcggggaccgaggcgggcccgggggcgcgcgggggccgcctgggcctggtgcgtgtggcctcagccctctccagcggcagcgagtcctccgaccgctcgggcttccggcgacagctaaccttcatcaaggagtcgccgggcttgcggcgccgccgctccgagctgtcctcggccgagtccgcggcctctgccccccagggcgcctcgccccgccgcggccggcccgcgctgcccgccgtcttcctctgctcctcgcgctgcgaagagctccgagcggcaccccggcagggcccggccccggcccggcagcggccccccgcggcccgacccagccctggcgagcgccctgcccggcgcaccacctccgagagcccgtcccgcctgcctgtgcgcgcgcccgccgcccggccggagactgtcaagcgctacgcgtcgctgccgcacatcagcgtggcccgcaggcccgacggcgccgtccccgcggcccctgcctcagccgacgccgcgcgccgcagcagcgacggggagccccggccgctccccagggtggccgcgccgggcacgacctggcggcgcatccgagatgaggacgtgccccacatcctgcgcagcacgcttcccgccacggccctgccactgcggggctccacgcccgaggacgccccggccgggcccccgccgcgcaagaccagcgacgccgtggtccagaccgaggaggtcgccgcccccaagaccaactccagcacgtccccgagcctggagaccagggagccccccggggcccccgccggcggccagctctccctcctcggcagcgacgtggacggtcccagcctcgccaaggctcccatctccgcacccttcgtgcacgagggcctgggggtcgccgtggggggcttccccgccagccggcacggctcccccagccgctcggcccgagtaccccccttcaactatgtgcccagccccatggtggtcgcagccaccaccgactcggccgcggagaaagccccggccactgcctccgccaccctcctggaatagtggcctaggccggccttctggaacgttctctcccggccctgcggcgcggtctggctgccccatgggcctgcgctgtagacgtcccccataggtcgccccagggcctctgcccacccgagccccaccactctcagaacccccgcccagcgcacggcgacctcgcgcctcaccggaagaccttgcctctgtgccgcggaggtccaggaggaaacggggcggccgctaggcctcaagtcccgaccgtggagcgctggcaagggcgtcctggcccagccctgagcgcgcggcccttcccctgtcggaagccgttgcttgaccccgggcgagggaggcggtagcctccgggtccgggtctgggtctgggtccgctgcttcgcagggacagcgctggggaggtgacggcgcccgccgcaggtggggcgaggctgggggagggcggcgccgcggcgggcctgccagctgggggcctttgcggcgcgcaggggcgaagcctgtaatcactgcagccgccggtaattcgctaatgagggctttgcagggattgttttcattctcagccccagctgtgggagtgcgggtgggggtgtggccgagccccggcaggaagccccgcccagacggtgttcagggaacccggagcccaagcgctccggcggagcccaaaagggtgggggtgggaggggcagaggccaacggatccccctgcctgtcgcaccccttggcgggagacgggaaggcagcgggctgcgtacgatgggaccctggtgcagacgccgggccggctgacatttggaccccatcccagaggagatgctggctaccagctggggcgaccccaagggtcgctggagtcagtatcggcccggcgcagccgcggcgggcgaggccaatggaaaggagactgaggggagtcccggcagtgagcccgaggccctgggacctggagcccgcgctggcctctccccagcggagcctgcacgttacggagaccatcacatgtgggcgtggtcagtgcccaggaccgcaccgctgctcatcttgtcccttttcaattcccttctggttcatgatgcataaagcgctaggccctagaactccagaaacagcacagctggggcggggacccagccttgccctccacccgaggctctgggacaaggcgggaggttcgggggccttccggcaggtgaacgcagggctggagagtatttggtgccagatgaggtgaaagcttatagaagggcctgaggggctcggctgcctcatcccctggcgggggaggctgggagctgggcctcctgcgtggggtgggactcgcaggggccgggtctccgtgactggggcaacgcctcgtcctgcagagggagccgacgacctcttttctgcagaaaagctccagcaggcgctgccttcacccacggatctgcccaggctgaaggcacacgctcaatgccccacgtgccttctccaggaggaacgaagcagggtttgagggttgggtggatggagctcagaaggaaaccccagccccaccacggatgacaccatccctcccgtcccatccccagcatgggcaaggccagcctttctggcagaaggagctgtcctcaactcagggccgctgtgagcaaagctgaccccagcccccacccccagttaacactgctgcttctctgaatgcatgtcacgctgcaccccatgctccgggcccacaccctgcaggacaaggagctccagacaggacgtccataagtcaccgaggtgtgccacccagcaggtgctggaggtgcccaatgctccctcctaggacctcgcagccaggcaaggctgtcaggttgttttgggggaagagggggtcatggatggctgagcagagagcggggaaaatgcaggctgagtggggcgacctcctgcctgccaggagccccctttcaggacacagcgggggtctcacacttgctgtccccatccatggcccgagggggaacctggtggtctcttctgagcttttggacttggggatgccaaacacgtgctcaccctcacactcgccccggcccgctgcgcccctaattgccaaagggtagggaaatggcgaagccagccaccaggtcgctggtgacagggccagggttatgcaggaaggtggtgcggcattgccttccacatatgtaagtctctgggcggcgccctcccagctccctgcctctgtttccccatgtgggccgtggggaactcccagagctacctcttgggggagcgtggtggcagcgatgatggggagacgcctggaagctcacagaacttgggtctggctggctcctgcccgtgacgccttgcccagcagcaaggtgcgcaacatggctgccagccccgcctcccacccccaccccgagtcctgagctcactttcgccttctccatcccctgccgtgggggccacagccacacctcaccgcccagtccagctgtctccagaaggggacaggcagtccgcggtctctggacaatcaactcaaggtacgcccactgcaaggcctccctcccaccgcggcccctgcctggccacctggcctctctgcaccagggtgacaaggggtcctcgtctgccccccaatgctccagggccagtcctaaggagctgagggtctgaggacgcagggagggtggaggtgtcctgaggctgatggacagtgaccgccactggcccccaacatgaccacacgtgggtgctgaactcggggcgccgtgcccaccggcatggtcctcccgagctccgacagcattacctcacccggccccatctgttgccccggtccagccctgatggcgcgcgcctggtctgtctgattcccctagccgccaccccacgtttctgtaccgggtctctgcagtgttaaacggacgtgtaaatagtggtaaatagtgaaagcctgtccttccctaaatgtaaagccatctgtccggcgtaaggacgacaccgtcagctgtccgactcgcacacatttaataaactgagctcttgcattgcc

SEQ ID NO: 105098 - DNA, 781 bp, Homo sapiens
  Payload ID: 620
  Gene Symbol: APC2
  Gene Name: adenomatosis polyposis coli 2
  ENST ID: ENST00000590877
  CDS Start-End: 201-781
gcagcgccgcctgcccaggcccggaccgggctttgtccgccccggagcccctgcccgcgccgcggagaccccggagcccgcgcgctccgaggccaccccgggccgggatttccggtggggcccgcggagccgcgcagagggaggaggccccagacccaggcgccccgccagcccagctgcacacgctgcaggagctgaagatggcgagctccgtggcgccctacgagcagctggtgaggcaggtggaggccttgaaggctgagaacagccacctgaggcaggagctaagggacaactccagccacctgtccaagctggagacagagacgtcgggcatgaaggaggtcctgaagcacctacagggaaaactggagcaggaggcccgagtgctggtgtcctcggggcagacggaggtgctggagcagctgaaggccctacagatggacatcaccagcctgtacaacctcaagttccagccgcccaccctgggcccggagcctgccgcccggacccccgagggcagcccagtacacggctccgggccctccaaggacagctttggggagctgagccgggccaccatccggctgctggaggaactggaccgggaacggtgtttcctgctgaatgagattgagaaggaggagaaggagaagctctggtactactctcagctgcagggcctgtccaagcgcctggacgagctgccgcacgtggagacgttctcgatgcagatggacctgatccggcagcagcttgagttcgaggcccagcacatccg

SEQ ID NO: 105099 - DNA, 568 bp, Homo sapiens
  Payload ID: 620
  Gene Symbol: APC2
  Gene Name: adenomatosis polyposis coli 2
  ENST ID: ENST00000587869
  CDS Start-End: 59-568
gctcctgagcctgctgcactcggccttcttcggggaccagacgctgcaggagctgaagatggcgagctccgtggcgccctacgagcagctggtgaggcaggtggaggccttgaaggctgagaacagccacctgaggcaggagctaagggacaactccagccacctgtccaagctggagacagagacgtcgggcatgaaggaggtcctgaagcacctacagggaaaactggagcaggaggcccgagtgctggtgtcctcggggcagacggaggtgctggagcagctgaaggccctacagatggacatcaccagcctgtacaacctcaagttccagccgcccaccctgggcccggagcctgccgcccggacccccgagggcagcccagtacacggctccgggccctccaaggacagctttggggagctgagccgggccaccatccggctgctggaggaactggaccgggaacggtgtttcctgctgaatgagattgagaaggaggagaaggagaagctctggtactactctcagctgcagggcctgtccaagcgcctggacgagctgccg

SEQ ID NO: 105100 - DNA, 2316 bp, Homo sapiens
  Payload ID: 620
  Gene Symbol: APC2
  Gene Name: adenomatosis polyposis coli 2
  ENST ID: ENST00000590469
  CDS Start-End: 209-2316
gcagcgccgcctgcccaggcccggaccgggctttgtccgccccggagcccctgcccgcgccgcggagaccccggagcccgcgcgctccgaggccaccccgggccgggatttccggtggggcccgcggagccgcgcagagggaggaggccccagacccaggcgccccgccagcccagctgcacgtaagcggacgctgcaggagctgaagatggcgagctccgtggcgccctacgagcagctggtgaggcaggtggaggccttgaaggctgagaacagccacctgaggcaggagctaagggacaactccagccacctgtccaagctggagacagagacgtcgggcatgaaggaggtcctgaagcacctacagggaaaactggagcaggaggcccgagtgctggtgtcctcggggcagacggaggtgctggagcagctgaaggccctacagatggacatcaccagcctgtacaacctcaagttccagccgcccaccctgggcccggagcctgccgcccggacccccgagggcagcccagtacacggctccgggccctccaaggacagctttggggagctgagccgggccaccatccggctgctggaggaactggaccgggaacggtgtttcctgctgaatgagattgagaaggaggagaaggagaagctctggtactactctcagctgcagggcctgtccaagcgcctggacgagctgccgcacgtggagacgcagttctcgatgcagatggacctgatccggcagcagcttgagttcgaggcccagcacatccgctcgctgatggaggagcgcttcggcacctcggacgagatggtgcagcgggcacagatccgcgcctcgcgcctggagcagattgacaaggagctgctggaggcgcaggaccgagtgcagcagacggagccccaggccttgctggcggtgaagtcggtgccggtggacgaggaccccgagacagaggtccccacacaccctgaggatggcacccctcagccgggcaacagcaaggtggaggtggtcttctggctgttgtccatgttggcgacgcgcgaccaggaggatacagcgcgcacgctgctggccatgtccagctcgcccgagagctgcgtggccatgcgccgctcgggctgtctgcctctgctgctgcaaatcctccacggcaccgaggccgcggccgggggtcgcgccggggccccaggggcaccgggcgccaaggacgcacgcatgcgcgccaacgcggcgctgcacaacatcgtcttctcgcagccggaccagggcctggcgcgcaaggagatgcgcgtcctgcacgtgctggagcagatccgggcctactgcgagacctgctgggactggctgcaggcccgagacggcgggcccgagggaggtggcgccggcagcgccccgatccccatcgagccgcagatctgccaggccacctgtgctgttatgaagctgtcctttgatgaggagtaccgccgtgccatgaacgagctaggtgggctgcaggccgtggcagagctgctgcaggttgactatgagatgcacaagatgacccgggacccgctgaacctggcgctgcgccgctacgcgggcatgaccctcaccaacctcacctttggggacgttgccaacaaggccaccctgtgtgcgcgccgcggctgcatggaggccatcgtggcccagctggcctccgacagtgaggagctccaccaggtggtgtccagcatccttcggaacttgtcctggagggccgacatcaacagcaagaaggtgctgagggaggcgggcagcgtgactgccctggtgcagtgtgtcctgcgggccaccaaggagtccaccctgaagagcgtgctgagcgccctgtggaatctgtctgcacacagcacagagaacaaggcggccatctgccaggtggatggcgccctgggcttcctggtgagcaccctgacctacaagtgtcagagcaactcgctggccatcatcgagagcggcggcggcatcctccgcaatgtgtccagcctcgtcgccacccgtgaggactacaggcaggtgctccgggatcacaactgtctgcagacgctgctgcagcatctgacttcgcacagcctgaccatcgtgagcaacgcgtgcggcacgctctggaacctgtcggcccgcagcgcccgtgaccaggagctgctgtgggacctgggcgccgtgggcatgctgcgtaatctggtgcactccaagcacaagatgatcgccatgggcagcgccgccgccctgcgcaacctgctggcccatcggcccgccaagcacca

SEQ ID NO: 105101 - DNA, 555 bp, Homo sapiens
  Payload ID: 620
  Gene Symbol: APC2
  Gene Name: adenomatosis polyposis coli 2
  ENST ID: ENST00000587149
  CDS Start-End: 140-555
gccagaagacggccagaggcacaaagaagccagcgcgctggcagagtcaagggatggggcaggggctgccggggccagcagggaccagctgaaggctgcgcagggggtgcgggccacacagacgctgcaggagctgaagatggcgagctccgtggcgccctacgagcagctggtgaggcaggtggaggccttgaaggctgagaacagccacctgaggcaggagctaagggacaactccagccacctgtccaagctggagacagagacgtcgggcatgaaggaggtcctgaagcacctacagggaaaactggagcaggaggcccgagtgctggtgtcctcggggcagacggaggtgctggagcagctgaaggccctacagatggacatcaccagcctgtacaacctcaagttccagccgcccaccctgggcccggagcctgccgcccggacccccgagggcagcccagtacacggctccgggccctccaaggacagctttggggagctgagccgggccaccatccggctgctggaggaactggaccgggaacggtg

SEQ ID NO: 105102 - DNA, 3809 bp, Homo sapiens
  Payload ID: 621
  Gene Symbol: APCDD1
  Gene Name: adenomatosis polyposis coli down-regulated 1
  Uniprot ID: Q8J025
  ENST ID: ENST00000355285
  CDS Start-End: 355-1899
gaaatatgaagagacgctgcagctgcggtggcggtggcggccactgcagctcagagcggcgcacgcggcggccggggcgggacgcggggccgggcgcggagaagtcggggcgggcggcagagaggccgggacgcggaccgggccggggcgcccacagccgcccgacggcgcccagagagcgcgcgccccgcagccccgcgcctagcccgccgggcatggggcgcgcggcagccgcctgaagccccggcctggcccggccgcacccggccggaggcggagggcagagcgcgcgcccagttgcccgggcaccaaatcggagcgcggcgtgcgggaggccccagagcaggactggaaatgtcctggccgcgccgcctcctgctcagatacctgttcccggccctcctgcttcacgggctgggagagggttctgccctccttcatccagacagcaggtctcatcctaggtccttagagaaaagtgcctggagggcttttaaggagtcacagtgccatcacatgctcaaacatctccacaatggtgcaaggatcacagtgcagatgccacctacaatcgagggccactgggtctccacaggctgtgaagtaaggtcaggcccagagttcatcacaaggtcctacagattctaccacaataacaccttcaaggcctaccaattttattatggcagcaaccggtgcacaaatcccacttatactctcatcatccggggcaagatccgcctccgccaggcctcctggatcatccgagggggcacggaagccgactaccagctgcacaacgtccaggtgatctgccacacagaggcggtggccgagaagctcggccagcaggtgaaccgcacatgcccgggcttcctcgcagacgggggtccctgggtgcaggacgtggcctatgacctctggcgagaggagaacggctgtgagtgcaccaaggccgtgaactttgccatgcatgaacttcagctcatccgggtggagaagcagtaccttcaccacaacctcgaccacctggtcgaggagctcttccttggtgacattcacactgatgccacccagaggatgttctaccggccctccagttaccagccccctctgcagaatgccaagaaccacgaccatgcctgcatcgcctgtcggatcatctatcggtcagacgagcaccaccctcccatcctgcccccaaaggcagacctgaccatcggcctgcacggggagtgggtgagccagcgctgtgaggtgcgccccgaagtcctcttcctcacccgccacttcatcttccatgacaacaacaacacctgggagggccactactaccactactcagacccggtgtgcaagcaccccaccttctccatctacgcccggggccgctacagccgcggcgtcctctcgtccagggtcatgggaggcaccgagttcgtgttcaaagtgaatcacatgaaggtcacccccatggatgcggccacagcctcactgctcaacgtcttcaacgggaatgagtgcggggccgagggctcctggcaggtgggcatccagcaggatgtgacccacaccaatggctgcgtggccctgggcatcaaactacctcacacggagtacgagatcttcaaaatggaacaggatgcccgggggcgctatctgctgttcaacggtcagaggcccagcgacgggtccagcccagacaggccagagaagagagccacgtcctaccagatgcccttggtccagtgtgcctcctcttcgccgagggcagaggacctcgcagaagacagtggaagcagcctgtatggccgggcccctgggaggcacacctggtccctgctgctggctgcacttgcctgccttgtccctctgctgcattggaacatccgcagatagaagttttagaaagttctatttttccaaaccaggattccttactattgacagatttgctttaccaaaagaaaagacatttattcttttgatgcacttgaatgccagagaactgtccttctttttctcctctccctccctcccagcccctgagtcatgaacagcaaggagtgtttgaagtttctgctttgaactccgtccagcctgatccctggcctgagcaacttcacaacagtaattgcactttaagacagcctagagttctggacgagcgtgtttggtagcagggatgaaagctagggcctcttatttttttctcttaattattattatatttctgagttaaacttagaagaaacaactatcaagctacaacttttcctgccattttcctgtggttgcagcctgtcttcctttgaaattgttttactctctgagttttatatgctggaatccaatgcagagttggtttgggactgtgatcaagacaccttttattaataaagaagagacacaggtgtagatatgtatatacaaaaagatgtacggtctggccaaaccaccttcccagcctttatgcaaaaaaaggggagaatcaaagctttcatttcagaaatgttgcgtggaaaagtatctgtaattaaagtttcgaagtaatttaacctatttttacatcatttgtcttaccttgttgagagaggagactggcttgttggcttctggttgttgcaggaggcatgtggcttcctgccttctcagtagacaggatcattaggaaaatagcaacatcaatcctgttacacaggagcagtgacacgggtggctgcagtgtggtacatgccacacaaatgatagagaaagtgcccgttcattgcagtttcctcttcctgggggacctgagccctgactcactgtcttattaggggcaggcggaagaagctgcactctggcatccatgccaccttctaagatgaacatgcagagacagaacttcagctgctcagagagagtgcagtgggcatggtctgccctgggggcttgctccattacaccctgacttggcatgcaaccgagtctttgtgtaaagccatcctgtcattgcacatactggctcactcagtgtctttcctgctgctgatgtggctctgtgctggcagtttcagggtcagtgtgctgctttcctagggacattagaagggcgcaggagtgcatgtctgcccattcctttggagtatcgcagatgatgctatacgataccaagtgttaccgctcacagagactgggaaagggaaatgggagtaaccgaaagccagatggaacgaaagcaaacatggaaaccatgatcacggcaaagagccatccttgtatttaagaagtaactttggccaggtgtgatggctcacgccgtaaccccagcactttgggagaccaaggagggtggatcacgaggtcaggagatcaagaccatcctggctaacactgtgaaatgctgtctctactaaaaatacaaaaaattagccaggcgtggtggtgggcacctgtagtcccagctactcgggaggctgaggcaggagaatggcatgaacctgggaggtggagcttgcagtgagccgagattgtgccactgcgctcgagcctgggcaacagagcgagactccatctcaaaaaaaaaaaaaagtaactttatgaaatgccacagcattcagtgtggcattaagttacaacgaccacatagagtaccaaagtgcttcaggttatattttaagttgtggtgcagactgagggggcttattcaaaatgaaaatactaacttaaatggccaccaagttcaataaacaaagatgtcaaaatactctcagaaatacaactgatactatctttaaaagacgtaataaaatcatgtgaaaaactgt

SEQ ID NO: 105103 - DNA, 833 bp, Homo sapiens
  Payload ID: 621
  Gene Symbol: APCDD1
  Gene Name: adenomatosis polyposis coli down-regulated 1
  ENST ID: ENST00000423585
  CDS Start-End: 147-332
gccgggcatggggcgcgcggcagccgcctgaagccccggcctggcccggccgcacccggccggaggcggagggcagagcgcgcgcccagttgcccgggcaccaaatcggagcgcggcgtgcgggaggccccagagcaggactggaaatgtcctggccgcgccgcctcctgctcagatacctgttcccggccctcctgcttcacgaaccacgaccatgcctgcatcgcctgtcggatcatctatcggtcagacgagcaccaccctcccatcctgcccccaaaggcagacctgaccatcggcctgcacggggagtgggtgagccagcgctgtgaggtgcgccccgaagtcctcttcctcacccgccacttcatcttccatgacaacaacaacacctgggagggccactactaccactactcagacccggtgtgcaagcaccccaccttctccatctacgcccggggccgctacagccgcggcgtcctctcgtccagggtcatgggaggcaccgagttcgtgttcaaagtgaatcacatgaaggtcacccccatggatgcggccacagcctcactgctcaacgtcttcaacgggaatgagtgcggggccgagggctcctggcaggtgggcatccagcaggatgtgacccacaccaatggctgcgtggccctgggcatcaaactacctcacacggagtacgagatcttcaaaatggaacaggatgcccgggggcgctatctgctgttcaacggtcagaggcccagcgacgggtccagcccagacaggccagagaagagagccacgtcctaccagatgcccttggtccagtgtgcctc

SEQ ID NO: 105104 - DNA, 559 bp, Homo sapiens
  Payload ID: 621
  Gene Symbol: APCDD1
  Gene Name: adenomatosis polyposis coli down-regulated 1
  ENST ID: ENST00000578882
  CDS Start-End: 1-555
atgtcctggccgcgccgcctcctgctcagatacctgttcccggccctcctgcttcacgggctgggagagggttctgccctccttcatccagacagcaggtctcatcctaggtccttagagaaaagtgcctggagggcttttaaggagtcacagtgccatcacatgctcaaacatctccacaatggtgcaaggatcacagtgcagatgccacctacaatcgagggccactgggtctccacaggctgtgaagtaaggtcaggcccagagttcatcacaaggtcctacagattctaccacaataacaccttcaaggcctaccaattttattatggcagcaaccggtgcacaaatcccacttatactctcatcatccggggcaagatccgcctccgccaggcctcctggatcatccgagggggcacggaagccgactaccagctgcacaacgtccagggtcatgggaggcaccgagttcgtgttcaaagtgaatcacatgaaggtcacccccatggatgcggccacagcctcactgctcaacgtcttcaacgggaatgagtgc

SEQ ID NO: 105105 - DNA, 730 bp, Homo sapiens
  Payload ID: 621
  Gene Symbol: APCDD1
  Gene Name: adenomatosis polyposis coli down-regulated 1
  ENST ID: ENST00000582723
  CDS Start-End: 99-167
gccgcacccggccggaggcggagggcagagcgcgcgcccagttgcccgggcaccaaatcggagcgcggcgtgcgggaggccccagagcaggactggaaatgtcctggccgcgccgcctcctgctcagatacctgttcccggccctcctgcttcacgctgtgaagtaaggtcaggcccagagttcatcacaaggtcctacagattctaccacaataacaccttcaaggcctaccaattttattatggcagcaaccggtgcacaaatcccacttatactctcatcatccggggcaagatccgcctccgccaggcctcctggatcatccgagggggcacggaagccgactaccagctgcacaacgtccaggtgatctgccacacagaggcggtggccgagaagctcggccagcaggtgaaccgcacatgcccgggcttcctcgcagacgggggtccctgggtgcaggacgtggcctatgacctctggcgagaggagaacggctgtgagtgcaccaaggccgtgaactttgccatgcatgaacttcagctcatccgggtggagaagcagtaccttcaccacaacctcgaccacctggtcgaggagctcttccttggtgacattcacactgatgccacccagaggatgttctaccggccctccagttaccagccccctctgcagaatgccaagaaccacgaccatgcctgcatcgcctgtcggatcatctatcgg

SEQ ID NO: 105106 - DNA, 744 bp, Homo sapiens
  Payload ID: 621
  Gene Symbol: APCDD1
  Gene Name: adenomatosis polyposis coli down-regulated 1
  ENST ID: ENST00000579685
  CDS Start-End: 1-285
ccagaggatgttctaccggccctccagttaccagccccctctgcagaatgccaagtggagatggggtttcaccatgttggccaggatggtctccaactcccgacctccagtgatccgcccgccttggcctcccaaagtgctgggattacaggcgtgagccaccgtccgcccggccgccatctttcaaatgatctcagaaccacgaccatgcctgcatcgcctgtcggatcatctatcggtcagacgagcaccaccctcccatcctgcccccaaaggcagacctgaccatcggcctgcacggggagtgggtgagccagcgctgtgaggtgcgccccgaagtcctcttcctcacccgccacttcatcttccatgacaacaacaacacctgggagggccactactaccactactcagacccggtgtgcaagcaccccaccttctccatctacgcccggggccgctacagccgcggcgtcctctcgtccagggtcatgggaggcaccgagttcgtgttcaaagtgaatcacatgaaggtcacccccatggatgcggccacagcctcactgctcaacgtcttcaacgggaatgagtgcggggccgagggctcctggcaggtgggcatccagcaggatgtgacccacaccaatggctgcgtggccctgggcatcaaactacctcacacggagtacgagatcttcaaaatggaacaggatgcccgggggcgctatctgctgttcaacggtc

SEQ ID NO: 105107 - DNA, 2218 bp, Homo sapiens
  Payload ID: 621
  Gene Symbol: APCDD1
  Gene Name: adenomatosis polyposis coli down-regulated 1
  ENST ID: ENST00000584596
  CDS Start-End: 1-682
ggacgtggcctatgacctctggcgagaggagaacggctgtgagtgcaccaaggccgtgaactttgccatgcatgaacttcagctcatccgggtggagaagcagtaccttcaccacaacctcgaccacctggtcgaggagctcttccttggtgacattcacactgatgccacccagaggatgttctaccggccctccagttaccagccccctctgcagaatgccaagtgtgcagcggagtcttcaggaagttttcagatccttccccaggacagctctgagaaggaacaaaatggactcagccattggtgtctttccagacccgggcaccagaaagactgggcactgtgtgcccacgcgggcccagccacagcaggttgtccgagctgtctgtggccgccagcggagacaggaagaaaggctgggagaacgtcttcaaagaccgtacacgcctgcccaggagaggctggaacctcctcctttgaactcttctacttccctaattgctggtccatagagaccaagctgaaaattagtttaaatgctaaattgagtttcaaaccacgagcctcagcccctctagaaacaggacaccgtgtaaaaatagaaactttaagtcaacttgtttttctaagctttatacagctttgctgtgaggtccagagtcctttggcaaataagtgacgtttgaagagattcaggtgtgctgggagggttcattcaggatggaactggctactcttcattataaaaaagtcaagacagcgtaaagtaaccctgaaagaagatgctttgcctgaatcaagtttagcgtcagagcagccataatcctctgccgagattcttcagaactatgcagttggaggggtagaagccaggctcattctttcagggatggaatcaaatggtaattaaaagcaaatgattgccaaggtcgttagagatgccagagcctcaggatcagactcgtaagcaaatggaattggtctttctccaaaatcctgcactgatttaaccacaggatcgtaaatcaaaggggctgtctgaaaaccagacagccttccccaggctgtgcatctgaaatactcgatcccagcacatgtacagcaggggagctacacacgggagggagaaaagcaccgggctttgggagtacctgagaactgcagaaaaagagcatgctgtgctttctctctcaaattctttaggagccgctaggctggagccagcatatgtttttgaggtagcttgcctctcagaggctttttagaggatgtgtgacctgtgcagcttcctgatgtcagtgacaccatggggatgttgagtcaggtggtcttggagcctggacttttcagcctagctgcaggagccagcatggagggacgtctcctgagcatgtgcttggtgtggctcctgggtgggtgggcggctgcgtctctggggtatagaaggagccaggtgcttgtggaagaattccataccacttttctttctgctagtgtggatttgcagaggtgatgggagatggacgaggtggtggacaaccagaagttcaagaagtcatgacctaagacagtttcaagaactagtcttacaggaaggagaaccctagaagaaaactgtgactgctccctggagccaggtgtttcctataaggcagcaaatgttgcacaattctatgaaaaaacagagctggcaattgggataggttgagggggtcttgaccctgaaggggttgcttttgtggaccttttatctgggccgaggtgtgcagtgtcacaatcactgggctacaaggctgctgatagacacttctattgcagaaacagctcattatatttcttgactccagagtatttcagcagataaacaggcatgcaaggttgctttatttaaggagttaggggaccaggaaatatttgttgtcagggacaatgcaagtggtaaatattttatcccttaaaaggcaagaaagctcagaggacatgaggaaaccctgcaaaagcaggaaattggccatttaaaaagtacgcatgaggtccctactccagggagtgtttgctgagccccaggggagaaaggaagaggatgggccagccaggagtgcccagtggatttacagcagatttaataagtctactttaattatttaaatgaatcaaaatgcataggagtggaagaaagaaacaagtaaaaagaaataaaaattcttttcggaaa

SEQ ID NO: 105108 - DNA, 3426 bp, Homo sapiens
  Payload ID: 622
  Gene Symbol: APCDD1L
  Gene Name: adenomatosis polyposis coli down-regulated 1-like
  Uniprot ID: Q8NCL9
  ENST ID: ENST00000371149
  CDS Start-End: 232-1737
ccacctcttctggcaagttggacctatgagtgcgcagctccgcttacaactatcaacagccgggaaggctgagcgcgtgtgagcgccgaggggggcgcaggaccctcgcaacttcttcgcaggactccagcctggccgccggcgcccgcagccgtccgagagccctgcgcccgcgcctccccttgcgcaccgtggcagcgcccggcgggcggtcctgccagccccgacgggatgcccgcagccatgctcccctacgcttgcgtcctggtgcttttgggagcccacactgcaccggcggctggggaggccgggggcagctgcctgcgctgggaaccccactgccagcagcccttgccagatagagtgcccagcactgcgatcctgcctccacgccttaatggaccttggatctccacaggctgcgaggtgcgcccaggaccggagttcctgacccgcgcctacaccttctaccccagccggctctttcgagcccaccagttctactacgaggaccccttctgcggggaacctgcccactcgctgctcgtcaagggcaaagtccgcctgcgccgggcctcctgggtcacccggggagccaccgaggccgactaccacctgcacaaggtgggcatcgtcttccacagccgccgggccctggtcgacgtcaccgggcgcctcaaccagacccgcgccggccgggactgcgcgcggcggctgcctccggcccgggcctggctgcctggggcgctgtacgagctgcggagcgcccgggctcagggggactgcctggaggcgctgggcctcaccatgcacgagctcagcctggtccgcgtgcagcgccgcctgcagccgcagccccgggcgtcgccccggctggtggaggagctgtacctgggggacatccacaccgacccggcggagaggcggcactaccggcccacgggctaccagcgcccgctgcagagcgcactgcaccacgtgcagccgtgcccagcctgtggcctcattgcccgctccgatgtgcaccacccgcccgtgctgccgccccctctggccctgcccctgcacctgggcggctggtgggtcagctcggggtgcgaggtgcgcccagcagtcctgttcctcacccggctcttcactttccacgggcacagccgctcctgggaagggtattaccaccacttctcagacccagcctgccggcagcccaccttcaccgtgtatgccgccggccgctacaccaggggcacgccatccaccagggtccgcggcggcaccgagctggtgtttgaggtcacacgggcccatgtgacccccatggaccaggtcaccacggccatgctcaacttctctgagccaagcagctgtgggggtgcgggggcctggtccatgggcactgagcgggatgtcacagccaccaacggctgcctaccgctgggcatccggctcccgcatgtggagtacgagcttttcaagatggaacaagaccccctcgggcaaagcctgctcttcatcggacaaaggcccaccgatggctcaagtcccgataccccagagaaacgtcccacctcctaccaagcacccctggtgctctgtcatggggaggcccccgacttctccaggccaccgcagcacaggccatcgctgcagaagcaccccagcacagggggtcttcacatagcccccttcccacttctgcccctagttctagggctggccttcctccactggctatgacattggacttgacatcaggatggcggctctggacacccattcaacccttcagactccctcctggcagctgtagggaaggaaccattctcctctgctctgtcatggatggatgcacagccccactgcttccaaactctgcctgtgtcccatgtggctcaggacatgagcttaacccctgcaaagcctataccacatcccacagcccgggtccccagtcaagcacttggatgcggcagtgatgttcatcgctacgtgagtttctaaagatcactcccaatttttctactttcctcatccttggcagctcgccaacaggtgcagtcagggggccacacggaacacccccatcccatgttccccccagttcttcccatcctgacccttgggattccaagatgggagcaagaggagatcctgaggctctgcctagggacgaggcctacagttctgccatgtctgtaggttgttgtttaaagattattaattcgaatttagcaatacgatctctaagtggtgccatgaattaaagatgccacttcgggctttcagtgcttctcagcttttgggcaaagggcttgtgtcttcaggggcagctcagctttcctgagtcctgactgctggcattcgtctgcatttgcctgtgcttctgcgagtcggacctcaagctgccaacactgcatgtggataaatccagttttcccgggccagcatgcaaaatgaagaggactccatctaagctgagaagcatggcctccccagagcagcctgcggcctccaagccttcctggcccaggcaaatgccagtgtgcaccaggctggctgctgggggcaggtctttggaggggagcagcatttccagccttctgaacatagttaatagtaatgacagccgtaacactaacgcgctctgcaattcgccctgcccagccatcctcggttgccaagattgcctgtgcctgcctgacaaaggaagagaatctccgaatgtgtatctttgggcccaccctagggagaggtcggggtcaccaggctacatggcgacatctaggcagctccgccttgcccagcctccttgccataatcctaatatattggtgtcctctgctcagaggggactgtcatcatggtgggaacaggctgtgcctccccagggactctgcccatgttcccagggcctcatctgtacactgtgaaattaactggcatcctggtgggcccaagggttttcaggactgggggccaatgactcaccccctccttcctcctcctgatccctatctctagctcttatcacagattttgaacaattgtctgtgaggttaatgatggtttcagagggaagcccttttcctccctgagactgtgtggggttcagtcagcctgctgaaattgcttccacttattacccatccttcctcttaaaaaaaaaaaaagcccaccaagttagtattctctgtagctctcagacagctacaagtgttcctggcatatttaccaaagtacaagaaatcattacattatttacggtctcagactacatcagggttgggggagctcctggtggggatggcagtgggtgtcgatgatatgtccacggctgagcaggtcttgtatccgaagcttgaagtaaccatgccaccatttatcatcaaatttgaaccttttaataaaattaaacagcctgaaaaa

SEQ ID NO: 105109 - DNA, 802 bp, Homo sapiens
  Payload ID: 622
  Gene Symbol: APCDD1L
  Gene Name: adenomatosis polyposis coli down-regulated 1-like
  ENST ID: ENST00000425773
  CDS Start-End: 563-802
gcaaggagcgcatcgctctgccttggccgggaccagagcttgggggaggcctccttgcccactgcgaagactttggggaaggcgacggccaggggacggacatctgggggagggctgggggtctgaatggcaggagctgcaccagggggctgtgcgcgctgcgcgggtgtgcgcgcctcgccgggggctgtctccacctcttctggcaagttggacctatgagtgcgcagctccgcttacaactatcaacagccgggaaggctgagcgcgtgtgagcgccgaggggggcgcaggaccctcgcaacttcttcgcaggactccagcctggccgccggcgcccgcagccgtccgagagccctgcgcccgcgcctccccttgcgcaccgtggcagcgcccggcgggcggtcctgccagccccgacgggatgcccgcagccatgctcccctacgcttgcgtcctggtgcttttgggaggggcccagtcaccactgacaaaaatgacagtaaccacagttgaagtgtgcccagctgggggctcatccccaagcaccctcacattatgaatggctgagaattctggccctggagttagaccacctggctgggaagcccagatcaacatcatatcaacccgtctggctttggcccacactgcaccggcggctggggaggccgggggcagctgcctgcgctgggaaccccactgccagcagcccttgccagatagagtgcccagcactgcgatcctgcctccacgccttaatggaccttggatctccacaggctgcgaggtgcgcccagga

SEQ ID NO: 105110 - DNA, 10701 bp, Homo sapiens
  Payload ID: 623
  Gene Symbol: APC
  Gene Name: adenomatous polyposis coli
  Uniprot ID: P25054
  ENST ID: ENST00000257430
  CDS Start-End: 57-8588
ggagacagaatggaggtgctgccggactcggaaatggggtccaagggtagccaaggatggctgcagcttcatatgatcagttgttaaagcaagttgaggcactgaagatggagaactcaaatcttcgacaagagctagaagataattccaatcatcttacaaaactggaaactgaggcatctaatatgaaggaagtacttaaacaactacaaggaagtattgaagatgaagctatggcttcttctggacagattgatttattagagcgtcttaaagagcttaacttagatagcagtaatttccctggagtaaaactgcggtcaaaaatgtccctccgttcttatggaagccgggaaggatctgtatcaagccgttctggagagtgcagtcctgttcctatgggttcatttccaagaagagggtttgtaaatggaagcagagaaagtactggatatttagaagaacttgagaaagagaggtcattgcttcttgctgatcttgacaaagaagaaaaggaaaaagactggtattacgctcaacttcagaatctcactaaaagaatagatagtcttcctttaactgaaaatttttccttacaaacagatatgaccagaaggcaattggaatatgaagcaaggcaaatcagagttgcgatggaagaacaactaggtacctgccaggatatggaaaaacgagcacagcgaagaatagccagaattcagcaaatcgaaaaggacatacttcgtatacgacagcttttacagtcccaagcaacagaagcagagaggtcatctcagaacaagcatgaaaccggctcacatgatgctgagcggcagaatgaaggtcaaggagtgggagaaatcaacatggcaacttctggtaatggtcagggttcaactacacgaatggaccatgaaacagccagtgttttgagttctagtagcacacactctgcacctcgaaggctgacaagtcatctgggaaccaaggtggaaatggtgtattcattgttgtcaatgcttggtactcatgataaggatgatatgtcgcgaactttgctagctatgtctagctcccaagacagctgtatatccatgcgacagtctggatgtcttcctctcctcatccagcttttacatggcaatgacaaagactctgtattgttgggaaattcccggggcagtaaagaggctcgggccagggccagtgcagcactccacaacatcattcactcacagcctgatgacaagagaggcaggcgtgaaatccgagtccttcatcttttggaacagatacgcgcttactgtgaaacctgttgggagtggcaggaagctcatgaaccaggcatggaccaggacaaaaatccaatgccagctcctgttgaacatcagatctgtcctgctgtgtgtgttctaatgaaactttcatttgatgaagagcatagacatgcaatgaatgaactagggggactacaggccattgcagaattattgcaagtggactgtgaaatgtatgggcttactaatgaccactacagtattacactaagacgatatgctggaatggctttgacaaacttgacttttggagatgtagccaacaaggctacgctatgctctatgaaaggctgcatgagagcacttgtggcccaactaaaatctgaaagtgaagacttacagcaggttattgcgagtgttttgaggaatttgtcttggcgagcagatgtaaatagtaaaaagacgttgcgagaagttggaagtgtgaaagcattgatggaatgtgctttagaagttaaaaaggaatcaaccctcaaaagcgtattgagtgccttatggaatttgtcagcacattgcactgagaataaagctgatatatgtgctgtagatggtgcacttgcatttttggttggcactcttacttaccggagccagacaaacactttagccattattgaaagtggaggtgggatattacggaatgtgtccagcttgatagctacaaatgaggaccacaggcaaatcctaagagagaacaactgtctacaaactttattacaacacttaaaatctcatagtttgacaatagtcagtaatgcatgtggaactttgtggaatctctcagcaagaaatcctaaagaccaggaagcattatgggacatgggggcagttagcatgctcaagaacctcattcattcaaagcacaaaatgattgctatgggaagtgctgcagctttaaggaatctcatggcaaataggcctgcgaagtacaaggatgccaatattatgtctcctggctcaagcttgccatctcttcatgttaggaaacaaaaagccctagaagcagaattagatgctcagcacttatcagaaacttttgacaatatagacaatttaagtcccaaggcatctcatcgtagtaagcagagacacaagcaaagtctctatggtgattatgtttttgacaccaatcgacatgatgataataggtcagacaattttaatactggcaacatgactgtcctttcaccatatttgaatactacagtgttacccagctcctcttcatcaagaggaagcttagatagttctcgttctgaaaaagatagaagtttggagagagaacgcggaattggtctaggcaactaccatccagcaacagaaaatccaggaacttcttcaaagcgaggtttgcagatctccaccactgcagcccagattgccaaagtcatggaagaagtgtcagccattcatacctctcaggaagacagaagttctgggtctaccactgaattacattgtgtgacagatgagagaaatgcacttagaagaagctctgctgcccatacacattcaaacacttacaatttcactaagtcggaaaattcaaataggacatgttctatgccttatgccaaattagaatacaagagatcttcaaatgatagtttaaatagtgtcagtagtagtgatggttatggtaaaagaggtcaaatgaaaccctcgattgaatcctattctgaagatgatgaaagtaagttttgcagttatggtcaatacccagccgacctagcccataaaatacatagtgcaaatcatatggatgataatgatggagaactagatacaccaataaattatagtcttaaatattcagatgagcagttgaactctggaaggcaaagtccttcacagaatgaaagatgggcaagacccaaacacataatagaagatgaaataaaacaaagtgagcaaagacaatcaaggaatcaaagtacaacttatcctgtttatactgagagcactgatgataaacacctcaagttccaaccacattttggacagcaggaatgtgtttctccatacaggtcacggggagccaatggttcagaaacaaatcgagtgggttctaatcatggaattaatcaaaatgtaagccagtctttgtgtcaagaagatgactatgaagatgataagcctaccaattatagtgaacgttactctgaagaagaacagcatgaagaagaagagagaccaacaaattatagcataaaatataatgaagagaaacgtcatgtggatcagcctattgattatagtttaaaatatgccacagatattccttcatcacagaaacagtcattttcattctcaaagagttcatctggacaaagcagtaaaaccgaacatatgtcttcaagcagtgagaatacgtccacaccttcatctaatgccaagaggcagaatcagctccatccaagttctgcacagagtagaagtggtcagcctcaaaaggctgccacttgcaaagtttcttctattaaccaagaaacaatacagacttattgtgtagaagatactccaatatgtttttcaagatgtagttcattatcatctttgtcatcagctgaagatgaaataggatgtaatcagacgacacaggaagcagattctgctaataccctgcaaatagcagaaataaaagaaaagattggaactaggtcagctgaagatcctgtgagcgaagttccagcagtgtcacagcaccctagaaccaaatccagcagactgcagggttctagtttatcttcagaatcagccaggcacaaagctgttgaattttcttcaggagcgaaatctccctccaaaagtggtgctcagacacccaaaagtccacctgaacactatgttcaggagaccccactcatgtttagcagatgtacttctgtcagttcacttgatagttttgagagtcgttcgattgccagctccgttcagagtgaaccatgcagtggaatggtaagtggcattataagccccagtgatcttccagatagccctggacaaaccatgccaccaagcagaagtaaaacacctccaccacctcctcaaacagctcaaaccaagcgagaagtacctaaaaataaagcacctactgctgaaaagagagagagtggacctaagcaagctgcagtaaatgctgcagttcagagggtccaggttcttccagatgctgatactttattacattttgccacggaaagtactccagatggattttcttgttcatccagcctgagtgctctgagcctcgatgagccatttatacagaaagatgtggaattaagaataatgcctccagttcaggaaaatgacaatgggaatgaaacagaatcagagcagcctaaagaatcaaatgaaaaccaagagaaagaggcagaaaaaactattgattctgaaaaggacctattagatgattcagatgatgatgatattgaaatactagaagaatgtattatttctgccatgccaacaaagtcatcacgtaaagcaaaaaagccagcccagactgcttcaaaattacctccacctgtggcaaggaaaccaagtcagctgcctgtgtacaaacttctaccatcacaaaacaggttgcaaccccaaaagcatgttagttttacaccgggggatgatatgccacgggtgtattgtgttgaagggacacctataaacttttccacagctacatctctaagtgatctaacaatcgaatcccctccaaatgagttagctgctggagaaggagttagaggaggggcacagtcaggtgaatttgaaaaacgagataccattcctacagaaggcagaagtacagatgaggctcaaggaggaaaaacctcatctgtaaccatacctgaattggatgacaataaagcagaggaaggtgatattcttgcagaatgcattaattctgctatgcccaaagggaaaagtcacaagcctttccgtgtgaaaaagataatggaccaggtccagcaagcatctgcgtcttcttctgcacccaacaaaaatcagttagatggtaagaaaaagaaaccaacttcaccagtaaaacctataccacaaaatactgaatataggacacgtgtaagaaaaaatgcagactcaaaaaataatttaaatgctgagagagttttctcagacaacaaagattcaaagaaacagaatttgaaaaataattccaaggtcttcaatgataagctcccaaataatgaagatagagtcagaggaagttttgcttttgattcacctcatcattacacgcctattgaaggaactccttactgtttttcacgaaatgattctttgagttctctagattttgatgatgatgatgttgacctttccagggaaaaggctgaattaagaaaggcaaaagaaaataaggaatcagaggctaaagttaccagccacacagaactaacctccaaccaacaatcagctaataagacacaagctattgcaaagcagccaataaatcgaggtcagcctaaacccatacttcagaaacaatccacttttccccagtcatccaaagacataccagacagaggggcagcaactgatgaaaagttacagaattttgctattgaaaatactccggtttgcttttctcataattcctctctgagttctctcagtgacattgaccaagaaaacaacaataaagaaaatgaacctatcaaagagactgagccccctgactcacagggagaaccaagtaaacctcaagcatcaggctatgctcctaaatcatttcatgttgaagataccccagtttgtttctcaagaaacagttctctcagttctcttagtattgactctgaagatgacctgttgcaggaatgtataagctccgcaatgccaaaaaagaaaaagccttcaagactcaagggtgataatgaaaaacatagtcccagaaatatgggtggcatattaggtgaagatctgacacttgatttgaaagatatacagagaccagattcagaacatggtctatcccctgattcagaaaattttgattggaaagctattcaggaaggtgcaaattccatagtaagtagtttacatcaagctgctgctgctgcatgtttatctagacaagcttcgtctgattcagattccatcctttccctgaaatcaggaatctctctgggatcaccatttcatcttacacctgatcaagaagaaaaaccctttacaagtaataaaggcccacgaattctaaaaccaggggagaaaagtacattggaaactaaaaagatagaatctgaaagtaaaggaatcaaaggaggaaaaaaagtttataaaagtttgattactggaaaagttcgatctaattcagaaatttcaggccaaatgaaacagccccttcaagcaaacatgccttcaatctctcgaggcaggacaatgattcatattccaggagttcgaaatagctcctcaagtacaagtcctgtttctaaaaaaggcccaccccttaagactccagcctccaaaagccctagtgaaggtcaaacagccaccacttctcctagaggagccaagccatctgtgaaatcagaattaagccctgttgccaggcagacatcccaaataggtgggtcaagtaaagcaccttctagatcaggatctagagattcgaccccttcaagacctgcccagcaaccattaagtagacctatacagtctcctggccgaaactcaatttcccctggtagaaatggaataagtcctcctaacaaattatctcaacttccaaggacatcatcccctagtactgcttcaactaagtcctcaggttctggaaaaatgtcatatacatctccaggtagacagatgagccaacagaaccttaccaaacaaacaggtttatccaagaatgccagtagtattccaagaagtgagtctgcctccaaaggactaaatcagatgaataatggtaatggagccaataaaaaggtagaactttctagaatgtcttcaactaaatcaagtggaagtgaatctgatagatcagaaagacctgtattagtacgccagtcaactttcatcaaagaagctccaagcccaaccttaagaagaaaattggaggaatctgcttcatttgaatctctttctccatcatctagaccagcttctcccactaggtcccaggcacaaactccagttttaagtccttcccttcctgatatgtctctatccacacattcgtctgttcaggctggtggatggcgaaaactcccacctaatctcagtcccactatagagtataatgatggaagaccagcaaagcgccatgatattgcacggtctcattctgaaagtccttctagacttccaatcaataggtcaggaacctggaaacgtgagcacagcaaacattcatcatcccttcctcgagtaagcacttggagaagaactggaagttcatcttcaattctttctgcttcatcagaatccagtgaaaaagcaaaaagtgaggatgaaaaacatgtgaactctatttcaggaaccaaacaaagtaaagaaaaccaagtatccgcaaaaggaacatggagaaaaataaaagaaaatgaattttctcccacaaatagtacttctcagaccgtttcctcaggtgctacaaatggtgctgaatcaaagactctaatttatcaaatggcacctgctgtttctaaaacagaggatgtttgggtgagaattgaggactgtcccattaacaatcctagatctggaagatctcccacaggtaatactcccccggtgattgacagtgtttcagaaaaggcaaatccaaacattaaagattcaaaagataatcaggcaaaacaaaatgtgggtaatggcagtgttcccatgcgtaccgtgggtttggaaaatcgcctgaactcctttattcaggtggatgcccctgaccaaaaaggaactgagataaaaccaggacaaaataatcctgtccctgtatcagagactaatgaaagttctatagtggaacgtaccccattcagttctagcagctcaagcaaacacagttcacctagtgggactgttgctgccagagtgactccttttaattacaacccaagccctaggaaaagcagcgcagatagcacttcagctcggccatctcagatcccaactccagtgaataacaacacaaagaagcgagattccaaaactgacagcacagaatccagtggaacccaaagtcctaagcgccattctgggtcttaccttgtgacatctgtttaaaagagaggaagaatgaaactaagaaaattctatgttaattacaactgctatatagacattttgtttcaaatgaaactttaaaagactgaaaaattttgtaaataggtttgattcttgttagagggtttttgttctggaagccatatttgatagtatactttgtcttcactggtcttattttgggaggcactcttgatggttaggaaaaaaatagtaaagccaagtatgtttgtacagtatgttttacatgtatttaaagtagcatcccatcccaacttcctttaattattgcttgtcttaaaataatgaacactacagatagaaaatatgatatattgctgttatcaatcatttctagattataaactgactaaacttacatcagggaaaaattggtatttatgcaaaaaaaaatgtttttgtccttgtgagtccatctaacatcataattaatcatgtggctgtgaaattcacagtaatatggttcccgatgaacaagtttacccagcctgctttgctttactgcatgaatgaaactgatggttcaatttcagaagtaatgattaacagttatgtggtcacatgatgtgcatagagatagctacagtgtaataatttacactattttgtgctccaaacaaaacaaaaatctgtgtaactgtaaaacattgaatgaaactattttacctgaactagattttatctgaaagtaggtagaatttttgctatgctgtaatttgttgtatattctggtatttgaggtgagatggctgctcttttattaatgagacatgaattgtgtctcaacagaaactaaatgaacatttcagaataaattattgctgtatgtaaactgttactgaaattggtatttgtttgaagggtcttgtttcacatttgtattaataattgtttaaaatgcctcttttaaaagcttatataaatttttttcttcagcttctatgcattaagagtaaaattcctcttactgtaataaaaacaattgaagaagactgttgccacttaaccattccatgcgttggcacttatctattcctgaaatttcttttatgtgattagctcatcttgatttttaatatttttccacttaaacttttttttcttactccactggagctcagtaaaagtaaattcatgtaatagcaatgcaagcagcctagcacagactaagcattgagcataataggcccacataatttcctctttcttaatattatagaattctgtacttgaaattgattcttagacattgcagtctcttcgaggctttacagtgtaaactgtcttgccccttcatcttcttgttgcaactgggtctgacatgaacactttttatcaccctgtatgttagggcaagatctcagcagtgaagtataatcagcactttgccatgctcagaaaattcaaatcacatggaactttagaggtagatttaatacgattaagatattcagaagtatattttagaatccctgcctgttaaggaaactttatttgtggtaggtacagttctggggtacatgttaagtgtccccttatacagtggagggaagtcttccttcctgaaggaaaataaactgacacttattaactaagataatttacttaatatatcttccctgatttgttttaaaagatcagagggtgactgatgatacatgcatacatatttgttgaataaatgaaaatttatttttagtgataagattcatacactctgtatttggggagggaaaacctttttaagcatggtggggcactcagataggagtgaatacacctacctggtgccttgaaaatcacatcaagtagttaattatctaccccttacctgtgtttataacttccaggtaatgagaatgattttttttaaagctaaaatgccagtaaataaaagtgctatgacttgagctaagatatttgactccaatgcctgtactgtgtctactgcaccactttgtaaacacttcaatttactatctttgaaatgattgacctttaaatttttgccaaatgttatctgaaattgtctatgaataccatctacttctgttgttttcccaggcttccataaacaatggagatacatgca

SEQ ID NO: 105111 - DNA, 3602 bp, Homo sapiens
  Payload ID: 623
  Gene Symbol: APC
  Gene Name: adenomatous polyposis coli
  ENST ID: ENST00000507379
  CDS Start-End: 197-3602
caagatggcggagggcaagtagcaagggggcggggtgtggccgccggaagcctagccgctgctcgggggggacctgcgggctcaggcccgggagctgcggaccgaggttggctcgatgctgttcccaggtactgttgttggctgttggtgaggaaggtgaagcactcagttgccttctcgggcctcggcgccccctatgtacgcctccctgggctcgggtccggtcgcccctttgcccgcttctgtaccaccctcagttctcgggtcctggagcaccggcggcagcaggagctgcgtccggcaggagacgaagagcccgggcggcgctcgtacttctggccactgggcgagcgtctggcaggaagtacttaaacaactacaaggaagtattgaagatgaagctatggcttcttctggacagattgatttattagagcgtcttaaagagcttaacttagatagcagtaatttccctggagtaaaactgcggtcaaaaatgtccctccgttcttatggaagccgggaaggatctgtatcaagccgttctggagagtgcagtcctgttcctatgggttcatttccaagaagagggtttgtaaatggaagcagagaaagtactggatatttagaagaacttgagaaagagaggtcattgcttcttgctgatcttgacaaagaagaaaaggaaaaagactggtattacgctcaacttcagaatctcactaaaagaatagatagtcttcctttaactgaaaatttttccttacaaacagatatgaccagaaggcaattggaatatgaagcaaggcaaatcagagttgcgatggaagaacaactaggtacctgccaggatatggaaaaacgagcacagaggtcatctcagaacaagcatgaaaccggctcacatgatgctgagcggcagaatgaaggtcaaggagtgggagaaatcaacatggcaacttctggtaatggtcagggttcaactacacgaatggaccatgaaacagccagtgttttgagttctagtagcacacactctgcacctcgaaggctgacaagtcatctgggaaccaaggtggaaatggtgtattcattgttgtcaatgcttggtactcatgataaggatgatatgtcgcgaactttgctagctatgtctagctcccaagacagctgtatatccatgcgacagtctggatgtcttcctctcctcatccagcttttacatggcaatgacaaagactctgtattgttgggaaattcccggggcagtaaagaggctcgggccagggccagtgcagcactccacaacatcattcactcacagcctgatgacaagagaggcaggcgtgaaatccgagtccttcatcttttggaacagatacgcgcttactgtgaaacctgttgggagtggcaggaagctcatgaaccaggcatggaccaggacaaaaatccaatgccagctcctgttgaacatcagatctgtcctgctgtgtgtgttctaatgaaactttcatttgatgaagagcatagacatgcaatgaatgaactagggggactacaggccattgcagaattattgcaagtggactgtgaaatgtatgggcttactaatgaccactacagtattacactaagacgatatgctggaatggctttgacaaacttgacttttggagatgtagccaacaaggctacgctatgctctatgaaaggctgcatgagagcacttgtggcccaactaaaatctgaaagtgaagacttacagcaggttattgcgagtgttttgaggaatttgtcttggcgagcagatgtaaatagtaaaaagacgttgcgagaagttggaagtgtgaaagcattgatggaatgtgctttagaagttaaaaaggaatcaaccctcaaaagcgtattgagtgccttatggaatttgtcagcacattgcactgagaataaagctgatatatgtgctgtagatggtgcacttgcatttttggttggcactcttacttaccggagccagacaaacactttagccattattgaaagtggaggtgggatattacggaatgtgtccagcttgatagctacaaatgaggaccacaggcaaatcctaagagagaacaactgtctacaaactttattacaacacttaaaatctcatagtttgacaatagtcagtaatgcatgtggaactttgtggaatctctcagcaagaaatcctaaagaccaggaagcattatgggacatgggggcagttagcatgctcaagaacctcattcattcaaagcacaaaatgattgctatgggaagtgctgcagctttaaggaatctcatggcaaataggcctgcgaagtacaaggatgccaatattatgtctcctggctcaagcttgccatctcttcatgttaggaaacaaaaagccctagaagcagaattagatgctcagcacttatcagaaacttttgacaatatagacaatttaagtcccaaggcatctcatcgtagtaagcagagacacaagcaaagtctctatggtgattatgtttttgacaccaatcgacatgatgataataggtcagacaattttaatactggcaacatgactgtcctttcaccatatttgaatactacagtgttacccagctcctcttcatcaagaggaagcttagatagttctcgttctgaaaaagatagaagtttggagagagaacgcggaattggtctaggcaactaccatccagcaacagaaaatccaggaacttcttcaaagcgaggtttgcagatctccaccactgcagcccagattgccaaagtcatggaagaagtgtcagccattcatacctctcaggaagacagaagttctgggtctaccactgaattacattgtgtgacagatgagagaaatgcacttagaagaagctctgctgcccatacacattcaaacacttacaatttcactaagtcggaaaattcaaataggacatgttctatgccttatgccaaattagaatacaagagatcttcaaatgatagtttaaatagtgtcagtagtagtgatggttatggtaaaagaggtcaaatgaaaccctcgattgaatcctattctgaagatgatgaaagtaagttttgcagttatggtcaatacccagccgacctagcccataaaatacatagtgcaaatcatatggatgataatgatggagaactagatacaccaataaattatagtcttaaatattcagatgagcagttgaactctggaaggcaaagtccttcacagaatgaaagatgggcaagacccaaacacataatagaagatgaaataaaacaaagtgagcaaagacaatcaaggaatcaaagtacaacttatcctgtttatactgagagcactgatgataaacacctcaagttccaaccacattttggacagcaggaatgtgtttctccatacaggtcacggggagccaatggttcagaaacaaatcgagtgggttctaatcatggaattaatcaaaatgtaagccagtctttgtgtcaagaagatgactatgaagatgataagcctaccaattatagtgaacgttactctgaagaagaacagcatg

SEQ ID NO: 105112 - DNA, 4061 bp, Homo sapiens
  Payload ID: 623
  Gene Symbol: APC
  Gene Name: adenomatous polyposis coli
  ENST ID: ENST00000512211
  CDS Start-End: 148-4061
cttttcctccctggcgacaaggacacatgcattggtggccaaaagagagaggagacaaaaccgctgcagatggctgatgtgaatctagtggaaagagctactggggatgagagaaagaggaggaggcaggtccaagggtagccaaggatggctgcagcttcatatgatcagttgttaaagcaagttgaggcactgaagatggagaactcaaatcttcgacaagagctagaagataattccaatcatcttacaaaactggaaactgaggcatctaatatgaaggaagtacttaaacaactacaaggaagtattgaagatgaagctatggcttcttctggacagattgatttattagagcgtcttaaagagcttaacttagatagcagtaatttccctggagtaaaactgcggtcaaaaatgtccctccgttcttatggaagccgggaaggatctgtatcaagccgttctggagagtgcagtcctgttcctatgggttcatttccaagaagagggtttgtaaatggaagcagagaaagtactggatatttagaagaacttgagaaagagaggtcattgcttcttgctgatcttgacaaagaagaaaaggaaaaagactggtattacgctcaacttcagaatctcactaaaagaatagatagtcttcctttaactgaaaatttttccttacaaacagatatgaccagaaggcaattggaatatgaagcaaggcaaatcagagttgcgatggaagaacaactaggtacctgccaggatatggaaaaacgagcacagcgaagaatagccagaattcagcaaatcgaaaaggacatacttcgtatacgacagcttttacagtcccaagcaacagaagcagagaggtcatctcagaacaagcatgaaaccggctcacatgatgctgagcggcagaatgaaggtcaaggagtgggagaaatcaacatggcaacttctggtaatggtcagggttcaactacacgaatggaccatgaaacagccagtgttttgagttctagtagcacacactctgcacctcgaaggctgacaagtcatctgggaaccaaggtggaaatggtgtattcattgttgtcaatgcttggtactcatgataaggatgatatgtcgcgaactttgctagctatgtctagctcccaagacagctgtatatccatgcgacagtctggatgtcttcctctcctcatccagcttttacatggcaatgacaaagactctgtattgttgggaaattcccggggcagtaaagaggctcgggccagggccagtgcagcactccacaacatcattcactcacagcctgatgacaagagaggcaggcgtgaaatccgagtccttcatcttttggaacagatacgcgcttactgtgaaacctgttgggagtggcaggaagctcatgaaccaggcatggaccaggacaaaaatccaatgccagctcctgttgaacatcagatctgtcctgctgtgtgtgttctaatgaaactttcatttgatgaagagcatagacatgcaatgaatgaactagggggactacaggccattgcagaattattgcaagtggactgtgaaatgtatgggcttactaatgaccactacagtattacactaagacgatatgctggaatggctttgacaaacttgacttttggagatgtagccaacaaggctacgctatgctctatgaaaggctgcatgagagcacttgtggcccaactaaaatctgaaagtgaagacttacagcaggttattgcgagtgttttgaggaatttgtcttggcgagcagatgtaaatagtaaaaagacgttgcgagaagttggaagtgtgaaagcattgatggaatgtgctttagaagttaaaaaggaatcaaccctcaaaagcgtattgagtgccttatggaatttgtcagcacattgcactgagaataaagctgatatatgtgctgtagatggtgcacttgcatttttggttggcactcttacttaccggagccagacaaacactttagccattattgaaagtggaggtgggatattacggaatgtgtccagcttgatagctacaaatgaggaccacaggcaaatcctaagagagaacaactgtctacaaactttattacaacacttaaaatctcatagtttgacaatagtcagtaatgcatgtggaactttgtggaatctctcagcaagaaatcctaaagaccaggaagcattatgggacatgggggcagttagcatgctcaagaacctcattcattcaaagcacaaaatgattgctatgggaagtgctgcagctttaaggaatctcatggcaaataggcctgcgaagtacaaggatgccaatattatgtctcctggctcaagcttgccatctcttcatgttaggaaacaaaaagccctagaagcagaattagatgctcagcacttatcagaaacttttgacaatatagacaatttaagtcccaaggcatctcatcgtagtaagcagagacacaagcaaagtctctatggtgattatgtttttgacaccaatcgacatgatgataataggtcagacaattttaatactggcaacatgactgtcctttcaccatatttgaatactacagtgttacccagctcctcttcatcaagaggaagcttagatagttctcgttctgaaaaagatagaagtttggagagagaacgcggaattggtctaggcaactaccatccagcaacagaaaatccaggaacttcttcaaagcgaggtttgcagatctccaccactgcagcccagattgccaaagtcatggaagaagtgtcagccattcatacctctcaggaagacagaagttctgggtctaccactgaattacattgtgtgacagatgagagaaatgcacttagaagaagctctgctgcccatacacattcaaacacttacaatttcactaagtcggaaaattcaaataggacatgttctatgccttatgccaaattagaatacaagagatcttcaaatgatagtttaaatagtgtcagtagtagtgatggttatggtaaaagaggtcaaatgaaaccctcgattgaatcctattctgaagatgatgaaagtaagttttgcagttatggtcaatacccagccgacctagcccataaaatacatagtgcaaatcatatggatgataatgatggagaactagatacaccaataaattatagtcttaaatattcagatgagcagttgaactctggaaggcaaagtccttcacagaatgaaagatgggcaagacccaaacacataatagaagatgaaataaaacaaagtgagcaaagacaatcaaggaatcaaagtacaacttatcctgtttatactgagagcactgatgataaacacctcaagttccaaccacattttggacagcaggaatgtgtttctccatacaggtcacggggagccaatggttcagaaacaaatcgagtgggttctaatcatggaattaatcaaaatgtaagccagtctttgtgtcaagaagatgactatgaagatgataagcctaccaattatagtgaacgttactctgaagaagaacagcatgaagaagaagagagaccaacaaattatagcataaaatataatgaagagaaacgtcatgtggatcagcctattgattatagtttaaaatatgccacagatattccttcatcacagaaacagtcattttcattctcaaagagttcatctggacaaagcagtaaaaccgaacatatgtcttcaagcagtgagaatacgtccacaccttcatctaatgccaagaggcagaatcagctccatccaagttctgcacagagtagaagtggtcagcctcaaaaggctgccacttgcaaagtttcttctattaaccaagaaacaatacagacttattgtgtagaagatactccaatatgtttttcaagatgtagttcattatcatctttgtcatcagctgaagatgaaataggatgtaatcagacgacacaggaagcagattctgctaataccctgcaaatagc

SEQ ID NO: 105113 - DNA, 7406 bp, Homo sapiens
  Payload ID: 623
  Gene Symbol: APC
  Gene Name: adenomatous polyposis coli
  ENST ID: ENST00000508624
  CDS Start-End: 60-923
actggagacagaatggaggtgctgccggactcggaaatggggtccaagggtagccaaggatggctgcagcttcatatgatcagttgttaaagcaagttgaggcactgaagatggagaactcaaatcttcgacaagagctagaagataattccaatcatcttacaaaactggaaactgaggcatctaatatgaaggaagtacttaaacaactacaaggaagtattgaagatgaagctatggcttcttctggacagattgatttattagagcgtcttaaagagcttaacttagatagcagtaatttccctggagtaaaactgcggtcaaaaatgtccctccgttcttatggaagccgggaaggatctgtatcaagccgttctggagagtgcagtcctgttcctatgggttcatttccaagaagagggtttgtaaatggaagcagagaaagtactggatatttagaagaacttgagaaagagaggtcattgcttcttgctgatcttgacaaagaagaaaaggaaaaagactggtattacgctcaacttcagaatctcactaaaagaatagatagtcttcctttaactgaaaatttttccttacaaacagatatgaccagaaggcaattggaatatgaagcaaggcaaatcagagttgcgatggaagaacaactaggtacctgccaggatatggaaaaacgagcacagcgaagaatagccagaattcagcaaatcgaaaaggacatacttcgtatacgacagcttttacagtcccaagcaacagaagcagagaggtcatctcagaacaagcatgaaaccggctcacatgatgctgagcggcagaatgaaggtcaaggagtgggagaaatcaacatggcaacttctggtaatggtcagatagaaaagatgaggatgtttgaatgctgatgggaaggagccagtagagaagagagttgaagatccctaagatcaaagagaaatggagagagaaaggatccagagcacatctaaagggatggaccttagataggaggaggggaactctgatgtcacagcaaaaggtggcgatggatatatacgcagggttcaactacacgaatggaccatgaaacagccagtgttttgagttctagtagcacacactctgcacctcgaaggctgacaagtcatctgggaaccaaggtggaaatggtgtattcattgttgtcaatgcttggtactcatgataaggatgatatgtcgcgaactttgctagctatgtctagctcccaagacagctgtatatccatgcgacagtctggatgtcttcctctcctcatccagcttttacatggcaatgacaaagactctgtattgttgggaaattcccggggcagtaaagaggctcgggccagggccagtgcagcactccacaacatcattcactcacagcctgatgacaagagaggcaggcgtgaaatccgagtccttcatcttttggaacagatacgcgcttactgtgaaacctgttgggagtggcaggaagctcatgaaccaggcatggaccaggacaaaaatccaatgccagctcctgttgaacatcagatctgtcctgctgtgtgtgttctaatgaaactttcatttgatgaagagcatagacatgcaatgaatgaactagggggactacaggccattgcagaattattgcaagtggactgtgaaatgtatgggcttactaatgaccactacagtattacactaagacgatatgctggaatggctttgacaaacttgacttttggagatgtagccaacaaggctacgctatgctctatgaaaggctgcatgagagcacttgtggcccaactaaaatctgaaagtgaagacttacagcaggttattgcgagtgttttgaggaatttgtcttggcgagcagatgtaaatagtaaaaagacgttgcgagaagttggaagtgtgaaagcattgatggaatgtgctttagaagttaaaaaggaatcaaccctcaaaagcgtattgagtgccttatggaatttgtcagcacattgcactgagaataaagctgatatatgtgctgtagatggtgcacttgcatttttggttggcactcttacttaccggagccagacaaacactttagccattattgaaagtggaggtgggatattacggaatgtgtccagcttgatagctacaaatgaggaccacaggcaaatcctaagagagaacaactgtctacaaactttattacaacacttaaaatctcatagtttgacaatagtcagtaatgcatgtggaactttgtggaatctctcagcaagaaatcctaaagaccaggaagcattatgggacatgggggcagttagcatgctcaagaacctcattcattcaaagcacaaaatgattgctatgggaagtgctgcagctttaaggaatctcatggcaaataggcctgcgaagtacaaggatgccaatattatgtctcctggctcaagcttgccatctcttcatgttaggaaacaaaaagccctagaagcagaattagatgctcagcacttatcagaaacttttgacaatatagacaatttaagtcccaaggcatctcatcgtagtaagcagagacacaagcaaagtctctatggtgattatgtttttgacaccaatcgacatgatgataataggtcagacaattttaatactggcaacatgactgtcctttcaccatatttgaatactacagtgttacccagctcctcttcatcaagaggaagcttagatagttctcgttctgaaaaagatagaagtttggagagagaacgcggaattggtctaggcaactaccatccagcaacagaaaatccaggaacttcttcaaagcgaggtttgcagatctccaccactgcagcccagattgccaaagtcatggaagaagtgtcagccattcatacctctcaggaagacagaagttctgggtctaccactgaattacattgtgtgacagatgagagaaatgcacttagaagaagctctgctgcccatacacattcaaacacttacaatttcactaagtcggaaaattcaaataggacatgttctatgccttatgccaaattagaatacaagagatcttcaaatgatagtttaaatagtgtcagtagtagtgatggttatggtaaaagaggtcaaatgaaaccctcgattgaatcctattctgaagatgatgaaagtaagttttgcagttatggtcaatacccagccgacctagcccataaaatacatagtgcaaatcatatggatgataatgatggagaactagatacaccaataaattatagtcttaaatattcagatgagcagttgaactctggaaggcaaagtccttcacagaatgaaagatgggcaagacccaaacacataatagaagatgaaataaaacaaagtgagcaaagacaatcaaggaatcaaagtacaacttatcctgtttatactgagagcactgatgataaacacctcaagttccaaccacattttggacagcaggaatgtgtttctccatacaggtcacggggagccaatggttcagaaacaaatcgagtgggttctaatcatggaattaatcaaaatgtaagccagtctttgtgtcaagaagatgactatgaagatgataagcctaccaattatagtgaacgttactctgaagaagaacagcatgaagaagaagagagaccaacaaattatagcataaaatataatgaagagaaacgtcatgtggatcagcctattgattatagtttaaaatatgccacagatattccttcatcacagaaacagtcattttcattctcaaagagttcatctggacaaagcagtaaaaccgaacatatgtcttcaagcagtgagaatacgtccacaccttcatctaatgccaagaggcagaatcagctccatccaagttctgcacagagtagaagtggtcagcctcaaaaggctgccacttgcaaagtttcttctattaaccaagaaacaatacagacttattgtgtagaagatactccaatatgtttttcaagatgtagttcattatcatctttgtcatcagctgaagatgaaataggatgtaatcagacgacacaggaagcagattctgctaataccctgcaaatagcagaaataaaagaaaagattggaactaggtcagctgaagatcctgtgagcgaagttccagcagtgtcacagcaccctagaaccaaatccagcagactgcagggttctagtttatcttcagaatcagccaggcacaaagctgttgaattttcttcaggagcgaaatctccctccaaaagtggtgctcagacacccaaaagtccacctgaacactatgttcaggagaccccactcatgtttagcagatgtacttctgtcagttcacttgatagttttgagagtcgttcgattgccagctccgttcagagtgaaccatgcagtggaatggtaagtggcattataagccccagtgatcttccagatagccctggacaaaccatgccaccaagcagaagtaaaacacctccaccacctcctcaaacagctcaaaccaagcgagaagtacctaaaaataaagcacctactgctgaaaagagagagagtggacctaagcaagctgcagtaaatgctgcagttcagagggtccaggttcttccagatgctgatactttattacattttgccacggaaagtactccagatggattttcttgttcatccagcctgagtgctctgagcctcgatgagccatttatacagaaagatgtggaattaagaataatgcctccagttcaggaaaatgacaatgggaatgaaacagaatcagagcagcctaaagaatcaaatgaaaaccaagagaaagaggcagaaaaaactattgattctgaaaaggacctattagatgattcagatgatgatgatattgaaatactagaagaatgtattatttctgccatgccaacaaagtcatcacgtaaagcaaaaaagccagcccagactgcttcaaaattacctccacctgtggcaaggaaaccaagtcagctgcctgtgtacaaacttctaccatcacaaaacaggttgcaaccccaaaagcatgttagttttacaccgggggatgatatgccacgggtgtattgtgttgaagggacacctataaacttttccacagctacatctctaagtgatctaacaatcgaatcccctccaaatgagttagctgctggagaaggagttagaggaggggcacagtcaggtgaatttgaaaaacgagataccattcctacagaaggcagaagtacagatgaggctcaaggaggaaaaacctcatctgtaaccatacctgaattggatgacaataaagcagaggaaggtgatattcttgcagaatgcattaattctgctatgcccaaagggaaaagtcacaagcctttccgtgtgaaaaagataatggaccaggtccagcaagcatctgcgtcttcttctgcacccaacaaaaatcagttagatggtaagaaaaagaaaccaacttcaccagtaaaacctataccacaaaatactgaatataggacacgtgtaagaaaaaatgcagactcaaaaaataatttaaatgctgagagagttttctcagacaacaaagattcaaagaaacagaatttgaaaaataattccaaggtcttcaatgataagctcccaaataatgaagatagagtcagaggaagttttgcttttgattcacctcatcattacacgcctattgaaggaactccttactgtttttcacgaaatgattctttgagttctctagattttgatgatgatgatgttgacctttccagggaaaaggctgaattaagaaaggcaaaagaaaataaggaatcagaggctaaagttaccagccacacagaactaacctccaaccaacaatcagctaataagacacaagctattgcaaagcagccaataaatcgaggtcagcctaaacccatacttcagaaacaatccacttttccccagtcatccaaagacataccagacagaggggcagcaactgatgaaaagttacagaattttgctattgaaaatactccggtttgcttttctcataattcctctctgagttctctcagtgacattgaccaagaaaacaacaataaagaaaatgaacctatcaaagagactgagccccctgactcacagggagaaccaagtaaacctcaagcatcaggctatgctcctaaatcatttcatgttgaagataccccagtttgtttctcaagaaacagttctctcagttctcttagtattgactctgaagatgacctgttgcaggaatgtataagctccgcaatgccaaaaaagaaaaagccttcaagactcaagggtgataatgaaaaacatagtcccagaaatatgggtggcatattaggtgaagatctgacacttgatttgaaagatatacagagaccagattcagaacatggtctatcccctgattcagaaaattttgattggaaagctattcaggaaggtgcaaattccatagtaagtagtttacatcaagctgctgctgctgcatgtttatctagacaagcttcgtctgattcagattccatcctttccctgaaatcaggaatctctctgggatcaccatttcatcttacacctgatcaagaagaaaaaccctttacaagtaataaaggcccacgaattctaaaaccaggggagaaaagtacattggaaactaaaaagatagaatctgaaagtaaaggaatcaaaggaggaaaaaaagtttataaaagtttgattactggaaaagttcgatctaattcagaaatttcaggccaaatgaaacagccccttcaagcaaacatgccttcaatctctcgaggcaggacaatgattcatattccaggagttcgaaatagctcctcaagtacaagtcctgtttctaaaaaaggcccaccccttaagactccagcctccaaaagccctagtgaaggtcaaacagccaccacttctcctagaggagccaagccatctgtgaaatcagaattaagccctgttgccaggcagacatcccaaataggtgggtcaagtaaagcaccttctagatcaggatctagagattcgaccccttcaagacctgcccagcaaccattaagtagacctatacagtctcctggccgaaactcaatttcccctggtagaaatggaataagtcctcctaacaaattatctcaacttccaaggacatcatcccctagtactgcttcaactaagtcctcaggttctggaaaaatgtcatatacatctccaggtagacagatgagccaacagaaccttaccaaacaaacaggtttatccaagaat

SEQ ID NO: 105114 - DNA, 524 bp, Homo sapiens
  Payload ID: 623
  Gene Symbol: APC
  Gene Name: adenomatous polyposis coli
  ENST ID: ENST00000509732
  CDS Start-End: 171-524
gcattgtagtcttcccacctcccacaagatggcggagggcaagtagcaagggggcggggtgtggccgccggaagcctagccgctgctcgggggggacctgcgggctcaggcccgggagctgcggaccgaggttggctcgatgctgttcccaggtccaagggtagccaaggatggctgcagcttcatatgatcagttgttaaagcaagttgaggcactgaagatggagaactcaaatcttcgacaagagctagaagataattccaatcatcttacaaaactggaaactgaggcatctaatatgaaggaagtacttaaacaactacaaggaagtattgaagatgaagctatggcttcttctggacagattgatttattagagcgtcttaaagagcttaacttagatagcagtaatttccctggagtaaaactgcggtcaaaaatgtccctccgttcttatggaagccgggaaggatctgtatcaagccgttctggagagtgcagtcctgttcctatgggttcattt

SEQ ID NO: 105115 - DNA, 10619 bp, Homo sapiens
  Payload ID: 623
  Gene Symbol: APC
  Gene Name: adenomatous polyposis coli
  Uniprot ID: P25054
  ENST ID: ENST00000508376
  CDS Start-End: 158-8689
gaatggaggtgctgccggactcggaaatggggacacatgcattggtggccaaaagagagaggagacaaaaccgctgcagatggctgatgtgaatctagtggaaagagctactggggatgagagaaagaggaggaggcaggtccaagggtagccaaggatggctgcagcttcatatgatcagttgttaaagcaagttgaggcactgaagatggagaactcaaatcttcgacaagagctagaagataattccaatcatcttacaaaactggaaactgaggcatctaatatgaaggaagtacttaaacaactacaaggaagtattgaagatgaagctatggcttcttctggacagattgatttattagagcgtcttaaagagcttaacttagatagcagtaatttccctggagtaaaactgcggtcaaaaatgtccctccgttcttatggaagccgggaaggatctgtatcaagccgttctggagagtgcagtcctgttcctatgggttcatttccaagaagagggtttgtaaatggaagcagagaaagtactggatatttagaagaacttgagaaagagaggtcattgcttcttgctgatcttgacaaagaagaaaaggaaaaagactggtattacgctcaacttcagaatctcactaaaagaatagatagtcttcctttaactgaaaatttttccttacaaacagatatgaccagaaggcaattggaatatgaagcaaggcaaatcagagttgcgatggaagaacaactaggtacctgccaggatatggaaaaacgagcacagcgaagaatagccagaattcagcaaatcgaaaaggacatacttcgtatacgacagcttttacagtcccaagcaacagaagcagagaggtcatctcagaacaagcatgaaaccggctcacatgatgctgagcggcagaatgaaggtcaaggagtgggagaaatcaacatggcaacttctggtaatggtcagggttcaactacacgaatggaccatgaaacagccagtgttttgagttctagtagcacacactctgcacctcgaaggctgacaagtcatctgggaaccaaggtggaaatggtgtattcattgttgtcaatgcttggtactcatgataaggatgatatgtcgcgaactttgctagctatgtctagctcccaagacagctgtatatccatgcgacagtctggatgtcttcctctcctcatccagcttttacatggcaatgacaaagactctgtattgttgggaaattcccggggcagtaaagaggctcgggccagggccagtgcagcactccacaacatcattcactcacagcctgatgacaagagaggcaggcgtgaaatccgagtccttcatcttttggaacagatacgcgcttactgtgaaacctgttgggagtggcaggaagctcatgaaccaggcatggaccaggacaaaaatccaatgccagctcctgttgaacatcagatctgtcctgctgtgtgtgttctaatgaaactttcatttgatgaagagcatagacatgcaatgaatgaactagggggactacaggccattgcagaattattgcaagtggactgtgaaatgtatgggcttactaatgaccactacagtattacactaagacgatatgctggaatggctttgacaaacttgacttttggagatgtagccaacaaggctacgctatgctctatgaaaggctgcatgagagcacttgtggcccaactaaaatctgaaagtgaagacttacagcaggttattgcgagtgttttgaggaatttgtcttggcgagcagatgtaaatagtaaaaagacgttgcgagaagttggaagtgtgaaagcattgatggaatgtgctttagaagttaaaaaggaatcaaccctcaaaagcgtattgagtgccttatggaatttgtcagcacattgcactgagaataaagctgatatatgtgctgtagatggtgcacttgcatttttggttggcactcttacttaccggagccagacaaacactttagccattattgaaagtggaggtgggatattacggaatgtgtccagcttgatagctacaaatgaggaccacaggcaaatcctaagagagaacaactgtctacaaactttattacaacacttaaaatctcatagtttgacaatagtcagtaatgcatgtggaactttgtggaatctctcagcaagaaatcctaaagaccaggaagcattatgggacatgggggcagttagcatgctcaagaacctcattcattcaaagcacaaaatgattgctatgggaagtgctgcagctttaaggaatctcatggcaaataggcctgcgaagtacaaggatgccaatattatgtctcctggctcaagcttgccatctcttcatgttaggaaacaaaaagccctagaagcagaattagatgctcagcacttatcagaaacttttgacaatatagacaatttaagtcccaaggcatctcatcgtagtaagcagagacacaagcaaagtctctatggtgattatgtttttgacaccaatcgacatgatgataataggtcagacaattttaatactggcaacatgactgtcctttcaccatatttgaatactacagtgttacccagctcctcttcatcaagaggaagcttagatagttctcgttctgaaaaagatagaagtttggagagagaacgcggaattggtctaggcaactaccatccagcaacagaaaatccaggaacttcttcaaagcgaggtttgcagatctccaccactgcagcccagattgccaaagtcatggaagaagtgtcagccattcatacctctcaggaagacagaagttctgggtctaccactgaattacattgtgtgacagatgagagaaatgcacttagaagaagctctgctgcccatacacattcaaacacttacaatttcactaagtcggaaaattcaaataggacatgttctatgccttatgccaaattagaatacaagagatcttcaaatgatagtttaaatagtgtcagtagtagtgatggttatggtaaaagaggtcaaatgaaaccctcgattgaatcctattctgaagatgatgaaagtaagttttgcagttatggtcaatacccagccgacctagcccataaaatacatagtgcaaatcatatggatgataatgatggagaactagatacaccaataaattatagtcttaaatattcagatgagcagttgaactctggaaggcaaagtccttcacagaatgaaagatgggcaagacccaaacacataatagaagatgaaataaaacaaagtgagcaaagacaatcaaggaatcaaagtacaacttatcctgtttatactgagagcactgatgataaacacctcaagttccaaccacattttggacagcaggaatgtgtttctccatacaggtcacggggagccaatggttcagaaacaaatcgagtgggttctaatcatggaattaatcaaaatgtaagccagtctttgtgtcaagaagatgactatgaagatgataagcctaccaattatagtgaacgttactctgaagaagaacagcatgaagaagaagagagaccaacaaattatagcataaaatataatgaagagaaacgtcatgtggatcagcctattgattatagtttaaaatatgccacagatattccttcatcacagaaacagtcattttcattctcaaagagttcatctggacaaagcagtaaaaccgaacatatgtcttcaagcagtgagaatacgtccacaccttcatctaatgccaagaggcagaatcagctccatccaagttctgcacagagtagaagtggtcagcctcaaaaggctgccacttgcaaagtttcttctattaaccaagaaacaatacagacttattgtgtagaagatactccaatatgtttttcaagatgtagttcattatcatctttgtcatcagctgaagatgaaataggatgtaatcagacgacacaggaagcagattctgctaataccctgcaaatagcagaaataaaagaaaagattggaactaggtcagctgaagatcctgtgagcgaagttccagcagtgtcacagcaccctagaaccaaatccagcagactgcagggttctagtttatcttcagaatcagccaggcacaaagctgttgaattttcttcaggagcgaaatctccctccaaaagtggtgctcagacacccaaaagtccacctgaacactatgttcaggagaccccactcatgtttagcagatgtacttctgtcagttcacttgatagttttgagagtcgttcgattgccagctccgttcagagtgaaccatgcagtggaatggtaagtggcattataagccccagtgatcttccagatagccctggacaaaccatgccaccaagcagaagtaaaacacctccaccacctcctcaaacagctcaaaccaagcgagaagtacctaaaaataaagcacctactgctgaaaagagagagagtggacctaagcaagctgcagtaaatgctgcagttcagagggtccaggttcttccagatgctgatactttattacattttgccacggaaagtactccagatggattttcttgttcatccagcctgagtgctctgagcctcgatgagccatttatacagaaagatgtggaattaagaataatgcctccagttcaggaaaatgacaatgggaatgaaacagaatcagagcagcctaaagaatcaaatgaaaaccaagagaaagaggcagaaaaaactattgattctgaaaaggacctattagatgattcagatgatgatgatattgaaatactagaagaatgtattatttctgccatgccaacaaagtcatcacgtaaagcaaaaaagccagcccagactgcttcaaaattacctccacctgtggcaaggaaaccaagtcagctgcctgtgtacaaacttctaccatcacaaaacaggttgcaaccccaaaagcatgttagttttacaccgggggatgatatgccacgggtgtattgtgttgaagggacacctataaacttttccacagctacatctctaagtgatctaacaatcgaatcccctccaaatgagttagctgctggagaaggagttagaggaggggcacagtcaggtgaatttgaaaaacgagataccattcctacagaaggcagaagtacagatgaggctcaaggaggaaaaacctcatctgtaaccatacctgaattggatgacaataaagcagaggaaggtgatattcttgcagaatgcattaattctgctatgcccaaagggaaaagtcacaagcctttccgtgtgaaaaagataatggaccaggtccagcaagcatctgcgtcttcttctgcacccaacaaaaatcagttagatggtaagaaaaagaaaccaacttcaccagtaaaacctataccacaaaatactgaatataggacacgtgtaagaaaaaatgcagactcaaaaaataatttaaatgctgagagagttttctcagacaacaaagattcaaagaaacagaatttgaaaaataattccaaggtcttcaatgataagctcccaaataatgaagatagagtcagaggaagttttgcttttgattcacctcatcattacacgcctattgaaggaactccttactgtttttcacgaaatgattctttgagttctctagattttgatgatgatgatgttgacctttccagggaaaaggctgaattaagaaaggcaaaagaaaataaggaatcagaggctaaagttaccagccacacagaactaacctccaaccaacaatcagctaataagacacaagctattgcaaagcagccaataaatcgaggtcagcctaaacccatacttcagaaacaatccacttttccccagtcatccaaagacataccagacagaggggcagcaactgatgaaaagttacagaattttgctattgaaaatactccggtttgcttttctcataattcctctctgagttctctcagtgacattgaccaagaaaacaacaataaagaaaatgaacctatcaaagagactgagccccctgactcacagggagaaccaagtaaacctcaagcatcaggctatgctcctaaatcatttcatgttgaagataccccagtttgtttctcaagaaacagttctctcagttctcttagtattgactctgaagatgacctgttgcaggaatgtataagctccgcaatgccaaaaaagaaaaagccttcaagactcaagggtgataatgaaaaacatagtcccagaaatatgggtggcatattaggtgaagatctgacacttgatttgaaagatatacagagaccagattcagaacatggtctatcccctgattcagaaaattttgattggaaagctattcaggaaggtgcaaattccatagtaagtagtttacatcaagctgctgctgctgcatgtttatctagacaagcttcgtctgattcagattccatcctttccctgaaatcaggaatctctctgggatcaccatttcatcttacacctgatcaagaagaaaaaccctttacaagtaataaaggcccacgaattctaaaaccaggggagaaaagtacattggaaactaaaaagatagaatctgaaagtaaaggaatcaaaggaggaaaaaaagtttataaaagtttgattactggaaaagttcgatctaattcagaaatttcaggccaaatgaaacagccccttcaagcaaacatgccttcaatctctcgaggcaggacaatgattcatattccaggagttcgaaatagctcctcaagtacaagtcctgtttctaaaaaaggcccaccccttaagactccagcctccaaaagccctagtgaaggtcaaacagccaccacttctcctagaggagccaagccatctgtgaaatcagaattaagccctgttgccaggcagacatcccaaataggtgggtcaagtaaagcaccttctagatcaggatctagagattcgaccccttcaagacctgcccagcaaccattaagtagacctatacagtctcctggccgaaactcaatttcccctggtagaaatggaataagtcctcctaacaaattatctcaacttccaaggacatcatcccctagtactgcttcaactaagtcctcaggttctggaaaaatgtcatatacatctccaggtagacagatgagccaacagaaccttaccaaacaaacaggtttatccaagaatgccagtagtattccaagaagtgagtctgcctccaaaggactaaatcagatgaataatggtaatggagccaataaaaaggtagaactttctagaatgtcttcaactaaatcaagtggaagtgaatctgatagatcagaaagacctgtattagtacgccagtcaactttcatcaaagaagctccaagcccaaccttaagaagaaaattggaggaatctgcttcatttgaatctctttctccatcatctagaccagcttctcccactaggtcccaggcacaaactccagttttaagtccttcccttcctgatatgtctctatccacacattcgtctgttcaggctggtggatggcgaaaactcccacctaatctcagtcccactatagagtataatgatggaagaccagcaaagcgccatgatattgcacggtctcattctgaaagtccttctagacttccaatcaataggtcaggaacctggaaacgtgagcacagcaaacattcatcatcccttcctcgagtaagcacttggagaagaactggaagttcatcttcaattctttctgcttcatcagaatccagtgaaaaagcaaaaagtgaggatgaaaaacatgtgaactctatttcaggaaccaaacaaagtaaagaaaaccaagtatccgcaaaaggaacatggagaaaaataaaagaaaatgaattttctcccacaaatagtacttctcagaccgtttcctcaggtgctacaaatggtgctgaatcaaagactctaatttatcaaatggcacctgctgtttctaaaacagaggatgtttgggtgagaattgaggactgtcccattaacaatcctagatctggaagatctcccacaggtaatactcccccggtgattgacagtgtttcagaaaaggcaaatccaaacattaaagattcaaaagataatcaggcaaaacaaaatgtgggtaatggcagtgttcccatgcgtaccgtgggtttggaaaatcgcctgaactcctttattcaggtggatgcccctgaccaaaaaggaactgagataaaaccaggacaaaataatcctgtccctgtatcagagactaatgaaagttctatagtggaacgtaccccattcagttctagcagctcaagcaaacacagttcacctagtgggactgttgctgccagagtgactccttttaattacaacccaagccctaggaaaagcagcgcagatagcacttcagctcggccatctcagatcccaactccagtgaataacaacacaaagaagcgagattccaaaactgacagcacagaatccagtggaacccaaagtcctaagcgccattctgggtcttaccttgtgacatctgtttaaaagagaggaagaatgaaactaagaaaattctatgttaattacaactgctatatagacattttgtttcaaatgaaactttaaaagactgaaaaattttgtaaataggtttgattcttgttagagggtttttgttctggaagccatatttgatagtatactttgtcttcactggtcttattttgggaggcactcttgatggttaggaaaaaaatagtaaagccaagtatgtttgtacagtatgttttacatgtatttaaagtagcatcccatcccaacttcctttaattattgcttgtcttaaaataatgaacactacagatagaaaatatgatatattgctgttatcaatcatttctagattataaactgactaaacttacatcagggaaaaattggtatttatgcaaaaaaaaatgtttttgtccttgtgagtccatctaacatcataattaatcatgtggctgtgaaattcacagtaatatggttcccgatgaacaagtttacccagcctgctttgctttactgcatgaatgaaactgatggttcaatttcagaagtaatgattaacagttatgtggtcacatgatgtgcatagagatagctacagtgtaataatttacactattttgtgctccaaacaaaacaaaaatctgtgtaactgtaaaacattgaatgaaactattttacctgaactagattttatctgaaagtaggtagaatttttgctatgctgtaatttgttgtatattctggtatttgaggtgagatggctgctcttttattaatgagacatgaattgtgtctcaacagaaactaaatgaacatttcagaataaattattgctgtatgtaaactgttactgaaattggtatttgtttgaagggtcttgtttcacatttgtattaataattgtttaaaatgcctcttttaaaagcttatataaatttttttcttcagcttctatgcattaagagtaaaattcctcttactgtaataaaaacaattgaagaagactgttgccacttaaccattccatgcgttggcacttatctattcctgaaatttcttttatgtgattagctcatcttgatttttaatatttttccacttaaacttttttttcttactccactggagctcagtaaaagtaaattcatgtaatagcaatgcaagcagcctagcacagactaagcattgagcataataggcccacataatttcctctttcttaatattatagaattctgtacttgaaattgattcttagacattgcagtctcttcgaggctttacagtgtaaactgtcttgccccttcatcttcttgttgcaactgggtctgacatgaacactttttatcaccctgtatgttagggcaagatctcagcagtgaagtataatcagcactttgccatgctcagaaaattcaaatcacatggaactttagaggtagatttaatacgattaagatattcagaagtatattttagaatccctgcctgttaaggaaactttatttgtggtaggtacagttctggggtacatgttaagtgtccccttatacagtggagggaagtcttccttcctgaaggaaaataaactgacacttattaactaagataatttacttaatatatcttccctgatttgttttaaaagatcagagggtgactgatgatacatgcatacatatttgttgaataaatgaaaatttatttttagtgataagattcatacactctgtatttggggagggaaaacctttttaagcatggtggggcactcagataggagtgaatacacctacctggtgccttgaaaatcacatcaagtagttaattatctaccccttacctgtgtttataacttccaggtaatgagaatgattttttttaaagctaaaatgccagtaaataaaagtgctatgacttg

SEQ ID NO: 105116 - DNA, 817 bp, Homo sapiens
  Payload ID: 623
  Gene Symbol: APC
  Gene Name: adenomatous polyposis coli
  ENST ID: ENST00000504915
  CDS Start-End: 1-817
ctttcatttgatgaagagcatagacatgcaatgaatgaactaggtaggaaggctacccggggcatttcatcacaggagctagggcaggggctttcagggggactacaggccattgcagaattattgcaagtggactgtgaaatgtatgggcttactaatgaccactacagtattacactaagacgatatgctggaatggctttgacaaacttgacttttggagatgtagccaacaaggctacgctatgctctatgaaaggctgcatgagagcacttgtggcccaactaaaatctgaaagtgaagacttacagcaggttattgcgagtgttttgaggaatttgtcttggcgagcagatgtaaatagtaaaaagacgttgcgagaagttggaagtgtgaaagcattgatggaatgtgctttagaagttaaaaaggaatcaaccctcaaaagcgtattgagtgccttatggaatttgtcagcacattgcactgagaataaagctgatatatgtgctgtagatggtgcacttgcatttttggttggcactcttacttaccggagccagacaaacactttagccattattgaaagtggaggtgggatattacggaatgtgtccagcttgatagctacaaatgaggaccacaggcaaatcctaagagagaacaactgtctacaaactttattacaacacttaaaatctcatagtttgacaatagtcagtaatgcatgtggaactttgtggaatctctcagcaagaaatcctaaagaccaggaagcattatgggacatgggggcagttagcatgctcaagaacc

SEQ ID NO: 105117 - DNA, 573 bp, Homo sapiens
  Payload ID: 623
  Gene Symbol: APC
  Gene Name: adenomatous polyposis coli
  ENST ID: ENST00000505350
  CDS Start-End: 198-374
acaagatggcggagggcaagtagcaagggggcggggtgtggccgccggaagcctagccgctgctcgggggggacctgcgggctcaggcccgggagctgcggaccgaggttggctcgatgctgttcccaggtactgttgttggctgttggtgaggaaggtgaagcactcagttgccttctcgggcctcggcgccccctatgtacgcctccctgggctcgggtccggtcgcccctttgcccgcttctgtaccaccctcagttctcgggtcctggagcaccggcggcagcaggagctgcgtccggcaggagacgaagagcccgggcggcgctcgtacttctggccactgggcgagcgtctggcaggtccaagggtagccaaggatggctgcagcttcatatgatcagttgttaaagcaagttgaggcactgaagatggagaactcaaatcttcgacaagagctagaagataattccaatcatcttacaaaactggaaactgaggcatctaatatgaaggaagtacttaaacaactacaaggaagtattgaagatgaagctatggcttcttctggac

SEQ ID NO: 105118 - DNA, 2630 bp, Homo sapiens
  Payload ID: 623
  Gene Symbol: APC
  Gene Name: adenomatous polyposis coli
  ENST ID: ENST00000502371
  CDS Start-End: 1-155
tgccagctcctgttgaacatcagatctgtcctgctgtgtgtgttctaatgaaactttcatttgatgaagagcatagacatgcaatgaatgaactaggaatcaaccctcaaaagcgtattgagtgccttatggaatttgtcagcacattgcactgagaataaagctgatatatgtgctgtagatggtgcacttgcatttttggttggcactcttacttaccggagccagacaaacactttagccattattgaaagtggaggtgggatattacggaatgtgtccagcttgatagctacaaatgaggaccacaggcaaatcctaagagagaacaactgtctacaaactttattacaacacttaaaatctcatagtttgacaatagtcagtaatgcatgtggaactttgtggaatctctcagcaagaaatcctaaagaccaggaagcattatgggacatgggggcagttagcatgctcaagaacctcattcattcaaagcacaaaatgattgctatgggaagtgctgcagctttaaggaatctcatggcaaataggcctgcgaagtacaaggatgccaatattatgtctcctggctcaagcttgccatctcttcatgttaggaaacaaaaagccctagaagcagaattagatgctcagcacttatcagaaacttttgacaatatagacaatttaagtcccaaggcatctcatcgtagtaagcagagacacaagcaaagtctctatggtgattatgtttttgacaccaatcgacatgatgataataggtcagacaattttaatactggcaacatgactgtcctttcaccatatttgaatactacagtgttacccagctcctcttcatcaagaggaagcttagatagttctcgttctgaaaaagatagaagtttggagagagaacgcggaattggtctaggcaactaccatccagcaacagaaaatccaggaacttcttcaaagcgaggtttgcagatctccaccactgcagcccagattgccaaagtcatggaagaagtgtcagccattcatacctctcaggaagacagaagttctgggtctaccactgaattacattgtgtgacagatgagagaaatgcacttagaagaagctctgctgcccatacacattcaaacacttacaatttcactaagtcggaaaattcaaataggacatgttctatgccttatgccaaattagaatacaagagatcttcaaatgatagtttaaatagtgtcagtagtagtgatggttatggtaaaagaggtcaaatgaaaccctcgattgaatcctattctgaagatgatgaaagtaagttttgcagttatggtcaatacccagccgacctagcccataaaatacatagtgcaaatcatatggatgataatgatggagaactagatacaccaataaattatagtcttaaatattcagatgagcagttgaactctggaaggcaaagtccttcacagaatgaaagatgggcaagacccaaacacataatagaagatgaaataaaacaaagtgagcaaagacaatcaaggaatcaaagtacaacttatcctgtttatactgagagcactgatgataaacacctcaagttccaaccacattttggacagcaggaatgtgtttctccatacaggtcacggggagccaatggttcagaaacaaatcgagtgggttctaatcatggaattaatcaaaatgtaagccagtctttgtgtcaagaagatgactatgaagatgataagcctaccaattatagtgaacgttactctgaagaagaacagcatgaagaagaagagagaccaacaaattatagcataaaatataatgaagagaaacgtcatgtggatcagcctattgattatagtttaaaatatgccacagatattccttcatcacagaaacagtcattttcattctcaaagagttcatctggacaaagcagtaaaaccgaacatatgtcttcaagcagtgagaatacgtccacaccttcatctaatgccaagaggcagaatcagctccatccaagttctgcacagagtagaagtggtcagcctcaaaaggctgccacttgcaaagtttcttctattaaccaagaaacaatacagacttattgtgtagaagatactccaatatgtttttcaagatgtagttcattatcatctttgtcatcagctgaagatgaaataggatgtaatcagacgacacaggaagcagattctgctaataccctgcaaatagcagaaataaaagaaaagattggaactaggtcagctgaagatcctgtgagcgaagttccagcagtgtcacagcaccctagaaccaaatccagcagactgcagggttctagtttatcttcagaatcagccaggcacaaagctgttgaattttcttcaggagcgaaatctccctccaaaagtggtgctcagacacccaaaagtccacctgaacactatgttcaggagaccccactcatgtttagcagatgtacttctgtcagttcacttgatagttttgagagtcgttcgattgccagctccgttcagagtgaaccatgcagtggaatggtaagtggcattataagccccagtgatcttccagatag

SEQ ID NO: 105119 - DNA, 2896 bp, Homo sapiens
  Payload ID: 624
  Gene Symbol: ADORA1
  Gene Name: adenosine A1 receptor
  Uniprot ID: P30542
  ENST ID: ENST00000309502
  CDS Start-End: 412-1392
atgagtgtcagaagtgtgaagggtgcctgttctgaatcccagagcctcctctccctctgtgaggctggcaggtgaggaagggtttaacctcactggaaggaatccctggagctagcggctgctgaaggcgtcgaggtgtgggggcacttggacagaacagtcaggcagccgggagctctgccagctttggtgaccttgggccgggctgggagcgctgcggcgggagccggaggactatgagctgccgcgcgttgtccagagcccagcccagccctaccgcgcgcggcccggagctctgttccctggaactttgggcactgcctctgggacccctgccggccagcaggcaggatggtgcttgcctcgtgccccttggtgcccgtctgctgatgtgcccagcctgtgcccgccatgccgccctccatctcagctttccaggccgcctacatcggcatcgaggtgctcatcgccctggtctctgtgcccgggaacgtgctggtgatctgggcggtgaaggtgaaccaggcgctgcgggatgccaccttctgcttcatcgtgtcgctggcggtggctgatgtggccgtgggtgccctggtcatccccctcgccatcctcatcaacattgggccacagacctacttccacacctgcctcatggttgcctgtccggtcctcatcctcacccagagctccatcctggccctgctggcaattgctgtggaccgctacctccgggtcaagatccctctccggtacaagatggtggtgaccccccggagggcggcggtggccatagccggctgctggatcctctccttcgtggtgggactgacccctatgtttggctggaacaatctgagtgcggtggagcgggcctgggcagccaacggcagcatgggggagcccgtgatcaagtgcgagttcgagaaggtcatcagcatggagtacatggtctacttcaacttctttgtgtgggtgctgcccccgcttctcctcatggtcctcatctacctggaggtcttctacctaatccgcaagcagctcaacaagaaggtgtcggcctcctccggcgacccgcagaagtactatgggaaggagctgaagatcgccaagtcgctggccctcatcctcttcctctttgccctcagctggctgcctttgcacatcctcaactgcatcaccctcttctgcccgtcctgccacaagcccagcatccttacctacattgccatcttcctcacgcacggcaactcggccatgaaccccattgtctatgccttccgcatccagaagttccgcgtcaccttccttaagatttggaatgaccatttccgctgccagcctgcacctcccattgacgaggatctcccagaagagaggcctgatgactagaccccgccttccgctcccaccagcccacatccagtggggtctcagtccagtcctcacatgcccgctgtcccaggggtctccctgagcctgccccagctgggctgttggctgggggcatgggggaggctctgaagagatacccacagagtgtggtccctccactaggagttaactaccctacacctctgggccctgcaggaggcctgggagggcaagggtcctacggagggaccaggtgtctagaggcaacagtgttctgagcccccacctgcctgaccatcccatgagcagtccagagcttcagggctgggcaggtcctggggaggctgagactgcagaggagccacctgggctgggagaaggtgcttgggcttctgcggtgaggcaggggagtctgcttgtcttagatgttggtggtgcagccccaggaccaagcttaaggagaggagagcatctgctctgagacggatggaaggagagaggttgaggatgcactggcctgttctgtaggagagactggccagaggcagctaaggggcaggaatcaaggagcctccgttcccacctctgaggactctggaccccaggccataccaggtgctagggtgcctgctctccttgccctgggccagcccaggattgtacgtgggagaggcagaaagggtaggttcagtaatcatttctgatatttgctggagtgctggctccacgccctggggagtgagcttggtgcggtaggtgctggcctcaaacagccacgaggtggtagctctgagccctccttcttgccctgagctttccggggaggagccttggagtgtaattacctgtcatctgggccaccagctccactggcctgcccgttgccgggcctggactgtcctaggtgaccccatctctgctgcttctgggcctgatggagaggagaacactagacatgccaactcgggagcattctgcctgcctgggaacggggtggacgagggagtgtctgtaaggactcagtgttgactgtaggcgcccctggggtgggtttagcaggctgcagcaggcagaggagagtacccccctgagagcatgtgggggaaggccttgctgtcatgtgaatccctcaatacccctagtatctggctgggttttcaggggctttggaagctctgttgcaggtgtccgggggtctaggactttagggatctggggaaggaccaacccatgccctgccaagcctggagcccctgtgttggggggcaaggtgggggagcctggagcccctgtgtgggagggcgaggcgggggagcctggagcccctgtgtgggagggcgaggcgggggatcctggagcccctgtgtcggggggcgagggaggggaggtggccgtcgagttgaccttctgaacatgagtgtcaactccaggacttgcttccaagcccttccctctgttggaaattgggtgtgccctggctcccaagggaggcccatgtgactaataaaaaactgtgaaccct

SEQ ID NO: 105120 - DNA, 2919 bp, Homo sapiens
  Payload ID: 624
  Gene Symbol: ADORA1
  Gene Name: adenosine A1 receptor
  Uniprot ID: P30542
  ENST ID: ENST00000337894
  CDS Start-End: 434-1414
gtgcggagcccgattgtcactcagctcctgcgccgggggcgacagagccgcaggcgcccgagtcgagtcccagccagctaccatccctctggagcttaccggccggccttggcttccccaggaatccctggagctagcggctgctgaaggcgtcgaggtgtgggggcacttggacagaacagtcaggcagccgggagctctgccagctttggtgaccttgggccgggctgggagcgctgcggcgggagccggaggactatgagctgccgcgcgttgtccagagcccagcccagccctaccgcgcgcggcccggagctctgttccctggaactttgggcactgcctctgggacccctgccggccagcaggcaggatggtgcttgcctcgtgccccttggtgcccgtctgctgatgtgcccagcctgtgcccgccatgccgccctccatctcagctttccaggccgcctacatcggcatcgaggtgctcatcgccctggtctctgtgcccgggaacgtgctggtgatctgggcggtgaaggtgaaccaggcgctgcgggatgccaccttctgcttcatcgtgtcgctggcggtggctgatgtggccgtgggtgccctggtcatccccctcgccatcctcatcaacattgggccacagacctacttccacacctgcctcatggttgcctgtccggtcctcatcctcacccagagctccatcctggccctgctggcaattgctgtggaccgctacctccgggtcaagatccctctccggtacaagatggtggtgaccccccggagggcggcggtggccatagccggctgctggatcctctccttcgtggtgggactgacccctatgtttggctggaacaatctgagtgcggtggagcgggcctgggcagccaacggcagcatgggggagcccgtgatcaagtgcgagttcgagaaggtcatcagcatggagtacatggtctacttcaacttctttgtgtgggtgctgcccccgcttctcctcatggtcctcatctacctggaggtcttctacctaatccgcaagcagctcaacaagaaggtgtcggcctcctccggcgacccgcagaagtactatgggaaggagctgaagatcgccaagtcgctggccctcatcctcttcctctttgccctcagctggctgcctttgcacatcctcaactgcatcaccctcttctgcccgtcctgccacaagcccagcatccttacctacattgccatcttcctcacgcacggcaactcggccatgaaccccattgtctatgccttccgcatccagaagttccgcgtcaccttccttaagatttggaatgaccatttccgctgccagcctgcacctcccattgacgaggatctcccagaagagaggcctgatgactagaccccgccttccgctcccaccagcccacatccagtggggtctcagtccagtcctcacatgcccgctgtcccaggggtctccctgagcctgccccagctgggctgttggctgggggcatgggggaggctctgaagagatacccacagagtgtggtccctccactaggagttaactaccctacacctctgggccctgcaggaggcctgggagggcaagggtcctacggagggaccaggtgtctagaggcaacagtgttctgagcccccacctgcctgaccatcccatgagcagtccagagcttcagggctgggcaggtcctggggaggctgagactgcagaggagccacctgggctgggagaaggtgcttgggcttctgcggtgaggcaggggagtctgcttgtcttagatgttggtggtgcagccccaggaccaagcttaaggagaggagagcatctgctctgagacggatggaaggagagaggttgaggatgcactggcctgttctgtaggagagactggccagaggcagctaaggggcaggaatcaaggagcctccgttcccacctctgaggactctggaccccaggccataccaggtgctagggtgcctgctctccttgccctgggccagcccaggattgtacgtgggagaggcagaaagggtaggttcagtaatcatttctgatatttgctggagtgctggctccacgccctggggagtgagcttggtgcggtaggtgctggcctcaaacagccacgaggtggtagctctgagccctccttcttgccctgagctttccggggaggagccttggagtgtaattacctgtcatctgggccaccagctccactggcctgcccgttgccgggcctggactgtcctaggtgaccccatctctgctgcttctgggcctgatggagaggagaacactagacatgccaactcgggagcattctgcctgcctgggaacggggtggacgagggagtgtctgtaaggactcagtgttgactgtaggcgcccctggggtgggtttagcaggctgcagcaggcagaggagagtacccccctgagagcatgtgggggaaggccttgctgtcatgtgaatccctcaatacccctagtatctggctgggttttcaggggctttggaagctctgttgcaggtgtccgggggtctaggactttagggatctggggaaggaccaacccatgccctgccaagcctggagcccctgtgttggggggcaaggtgggggagcctggagcccctgtgtgggagggcgaggcgggggagcctggagcccctgtgtgggagggcgaggcgggggatcctggagcccctgtgtcggggggcgagggaggggaggtggccgtcgagttgaccttctgaacatgagtgtcaactccaggacttgcttccaagcccttccctctgttggaaattgggtgtgccctggctcccaagggaggcccatgtgactaataaaaaactgtgaaccctg

SEQ ID NO: 105121 - DNA, 2219 bp, Homo sapiens
  Payload ID: 624
  Gene Symbol: ADORA1
  Gene Name: adenosine A1 receptor
  Uniprot ID: P30542
  ENST ID: ENST00000367235
  CDS Start-End: 185-562
cggaggactatgagctgccgcgcgttgtccagagcccagcccagccctaccgcgcgcggcccggagctctgttccctggaactttgggcactgcctctgggacccctgccggccagcaggcaggatggtgcttgcctcgtgccccttggtgcccgtctgctgatgtgcccagcctgtgcccgccatgccgccctccatctcagctttccaggccgcctacatcggcatcgaggtgctcatcgccctggtctctgtgcccgggaacgtgctggtgatctgggcggtgaaggtgaaccaggcgctgcgggatgccaccttctgcttcatcgtgtcgctggcggtggctgatgtggccgtgggtgccctggtcatccccctcgccatcctcatcaacattgggccacagacctacttccacacctgcctcatggttgcctgtccggtcctcatcctcacccagagctccatcctggccctgctggcaattgctgtggaccgctacctccgggtcaagatccctctccggagaataagccaatgcatggcaagcactaaatcttagatcctgaagactcagccctcgagcaaaagacatgcacctccccactcaccgggccctggaagaggagggtgctcctcttagaggcccctggaggccaggcgtgcctcagaggggcctttcgaggcagctgggaggcagatcctcacactctgccctcctctcccccaggtacaagatggtggtgaccccccggagggcggcggtggccatagccggctgctggatcctctccttcgtggtgggactgacccctatgtttggctggaacaatctgagtgcggtggagcgggcctgggcagccaacggcagcatgggggagcccgtgatcaagtgcgagttcgagaaggtcatcagcatggagtacatggtctacttcaacttctttgtgtgggtgctgcccccgcttctcctcatggtcctcatctacctggaggtcttctacctaatccgcaagcagctcaacaagaaggtgtcggcctcctccggcgacccgcagaagtactatgggaaggagctgaagatcgccaagtcgctggccctcatcctcttcctctttgccctcagctggctgcctttgcacatcctcaactgcatcaccctcttctgcccgtcctgccacaagcccagcatccttacctacattgccatcttcctcacgcacggcaactcggccatgaaccccattgtctatgccttccgcatccagaagttccgcgtcaccttccttaagatttggaatgaccatttccgctgccagcctgcacctcccattgacgaggatctcccagaagagaggcctgatgactagaccccgccttccgctcccaccagcccacatccagtggggtctcagtccagtcctcacatgcccgctgtcccaggggtctccctgagcctgccccagctgggctgttggctgggggcatgggggaggctctgaagagatacccacagagtgtggtccctccactaggagttaactaccctacacctctgggccctgcaggaggcctgggagggcaagggtcctacggagggaccaggtgtctagaggcaacagtgttctgagcccccacctgcctgaccatcccatgagcagtccagagcttcagggctgggcaggtcctggggaggctgagactgcagaggagccacctgggctgggagaaggtgcttgggcttctgcggtgaggcaggggagtctgcttgtcttagatgttggtggtgcagccccaggaccaagcttaaggagaggagagcatctgctctgagacggatggaaggagagaggttgaggatgcactggcctgttctgtaggagagactggccagaggcagctaaggggcaggaatcaaggagcctccgttcccacctctgaggactctggaccccaggccataccaggtgctagggtgcctgctctccttgccctgggccagcccaggattgtacgtgggagaggcagaaagggtaggttcagtaatcatttctgatatttgctggagtgctggctccacgccctggggagtgagcttggtgcggtaggtgctggcctcaaacagccacgaggtggtagctctgagccctccttcttgccctgagctttccggggaggagccttggagtgtaattacctgtcatctgggccaccagctc

SEQ ID NO: 105122 - DNA, 3407 bp, Homo sapiens
  Payload ID: 624
  Gene Symbol: ADORA1
  Gene Name: adenosine A1 receptor
  Uniprot ID: P30542
  ENST ID: ENST00000367236
  CDS Start-End: 922-1902
aacatgaggggattggactggatgccttatggcttagcgctgtgctatgaagaggaagaaggaggaaggaaaaggagcgcagagcgggttacactgccaggagatcctgggaagctaggtcacttccctgagcctcagcatccttatctgcaaaatagaaattgctaatagactaaaaggcaattctgaaagatggatgagaaaggaatataatgactcagggtagagcctgcaaaacaatatgggatgagaagatgcagggactggtttcatggagagagcagggttttaggattgggggagggtgccagggctaccgactgctttgggagatcccagagggggcattctgaagtcctgcagaagagatgctgtgccgtgaggggtgaggggtcgctggaggccagaccagggctcccaggagtcctgcattgagaagggagagagtggacacaggaaggatgcgcctctgtccagtcctgaggctgggcgcacacaccaggcccttcgaaaagctcacattttttccagcttttctcacccagtatcacttcctttgttaagaggagggggtgggggaggagacggaggatgaggagggaggggctggcgggtgccgccgccgcccccgccccctcccggtgtgcggagcccgattgtcactcagctcctgcgccgggggcgacagagccgcaggcgcccgagtcgagtcccagccagctaccatccctctggagcttaccggccggccttggcttccccaggaatccctggagctagcggctgctgaaggcgtcgaggtgtgggggcacttggacagaacagtcaggcagccgggagctctgccagctttggtgaccttgggtgcttgcctcgtgccccttggtgcccgtctgctgatgtgcccagcctgtgcccgccatgccgccctccatctcagctttccaggccgcctacatcggcatcgaggtgctcatcgccctggtctctgtgcccgggaacgtgctggtgatctgggcggtgaaggtgaaccaggcgctgcgggatgccaccttctgcttcatcgtgtcgctggcggtggctgatgtggccgtgggtgccctggtcatccccctcgccatcctcatcaacattgggccacagacctacttccacacctgcctcatggttgcctgtccggtcctcatcctcacccagagctccatcctggccctgctggcaattgctgtggaccgctacctccgggtcaagatccctctccggtacaagatggtggtgaccccccggagggcggcggtggccatagccggctgctggatcctctccttcgtggtgggactgacccctatgtttggctggaacaatctgagtgcggtggagcgggcctgggcagccaacggcagcatgggggagcccgtgatcaagtgcgagttcgagaaggtcatcagcatggagtacatggtctacttcaacttctttgtgtgggtgctgcccccgcttctcctcatggtcctcatctacctggaggtcttctacctaatccgcaagcagctcaacaagaaggtgtcggcctcctccggcgacccgcagaagtactatgggaaggagctgaagatcgccaagtcgctggccctcatcctcttcctctttgccctcagctggctgcctttgcacatcctcaactgcatcaccctcttctgcccgtcctgccacaagcccagcatccttacctacattgccatcttcctcacgcacggcaactcggccatgaaccccattgtctatgccttccgcatccagaagttccgcgtcaccttccttaagatttggaatgaccatttccgctgccagcctgcacctcccattgacgaggatctcccagaagagaggcctgatgactagaccccgccttccgctcccaccagcccacatccagtggggtctcagtccagtcctcacatgcccgctgtcccaggggtctccctgagcctgccccagctgggctgttggctgggggcatgggggaggctctgaagagatacccacagagtgtggtccctccactaggagttaactaccctacacctctgggccctgcaggaggcctgggagggcaagggtcctacggagggaccaggtgtctagaggcaacagtgttctgagcccccacctgcctgaccatcccatgagcagtccagagcttcagggctgggcaggtcctggggaggctgagactgcagaggagccacctgggctgggagaaggtgcttgggcttctgcggtgaggcaggggagtctgcttgtcttagatgttggtggtgcagccccaggaccaagcttaaggagaggagagcatctgctctgagacggatggaaggagagaggttgaggatgcactggcctgttctgtaggagagactggccagaggcagctaaggggcaggaatcaaggagcctccgttcccacctctgaggactctggaccccaggccataccaggtgctagggtgcctgctctccttgccctgggccagcccaggattgtacgtgggagaggcagaaagggtaggttcagtaatcatttctgatatttgctggagtgctggctccacgccctggggagtgagcttggtgcggtaggtgctggcctcaaacagccacgaggtggtagctctgagccctccttcttgccctgagctttccggggaggagccttggagtgtaattacctgtcatctgggccaccagctccactggcctgcccgttgccgggcctggactgtcctaggtgaccccatctctgctgcttctgggcctgatggagaggagaacactagacatgccaactcgggagcattctgcctgcctgggaacggggtggacgagggagtgtctgtaaggactcagtgttgactgtaggcgcccctggggtgggtttagcaggctgcagcaggcagaggagagtacccccctgagagcatgtgggggaaggccttgctgtcatgtgaatccctcaatacccctagtatctggctgggttttcaggggctttggaagctctgttgcaggtgtccgggggtctaggactttagggatctggggaaggaccaacccatgccctgccaagcctggagcccctgtgttggggggcaaggtgggggagcctggagcccctgtgtgggagggcgaggcgggggagcctggagcccctgtgtgggagggcgaggcgggggatcctggagcccctgtgtcggggggcgagggaggggaggtggccgtcgagttgaccttctgaacatgagtgtcaactccaggacttgcttccaagcccttccctctgttggaaattgggtgtgccctggctcccaagggaggcccatgtgactaataaaaaactgtgaaccctg

SEQ ID NO: 105123 - DNA, 862 bp, Homo sapiens
  Payload ID: 624
  Gene Symbol: ADORA1
  Gene Name: adenosine A1 receptor
  ENST ID: ENST00000618295
  CDS Start-End: 68-700
tctgttccctggaactttgggcactgcctctgggacccctgccggccagcaggcaggatggtacaagatggtggtgaccccccggagggcggcggtggccatagccggctgctggatcctctccttcgtggtgggactgacccctatgtttggctggaacaatctgagtgcggtggagcgggcctgggcagccaacggcagcatgggggagcccgtgatcaagtgcgagttcgagaaggtcatcagcatggagtacatggtctacttcaacttctttgtgtgggtgctgcccccgcttctcctcatggtcctcatctacctggaggtcttctacctaatccgcaagcagctcaacaagaaggtgtcggcctcctccggcgacccgcagaagtactatgggaaggagctgaagatcgccaagtcgctggccctcatcctcttcctctttgccctcagctggctgcctttgcacatcctcaactgcatcaccctcttctgcccgtcctgccacaagcccagcatccttacctacattgccatcttcctcacgcacggcaactcggccatgaaccccattgtctatgccttccgcatccagaagttccgcgtcaccttccttaagatttggaatgaccatttccgctgccagcctgcacctcccattgacgaggatctcccagaagagaggcctgatgactagaccccgccttccgctcccaccagcccacatccagtggggtctcagtccagtcctcacatgcccgctgtcccaggggtctccctgagcctgccccagctgggctgttggctgggggcatgggggaggctctgaagagatacccacagagtgtggtccctccac

SEQ ID NO: 105124 - DNA, 2569 bp, Homo sapiens
  Payload ID: 625
  Gene Symbol: ADORA2A
  Gene Name: adenosine A2a receptor
  Uniprot ID: P29274
  ENST ID: ENST00000337539
  CDS Start-End: 460-1698
acagcctgtgtacatgtgagcagccgcgtgcagaggggaagctctgcctgggcctcagggactgtgacatggagcaggagccgcccccagccaagctgctttcagcacagcgtgggcccccagcaccttggtgcggggtgcggcccctcggaggagggctgtcaggtgaagcctcgtgtgagggggtgcctcaggaaccctgaagctgggctgagccatgatgctgctgccagaacccctgcagagggcctggtttcaggagactcagagtcctctgtgaaaaagcccttggagagcgccccagcagggctgcacttggctcctgtgaggaaggggctcaggggtctgggcccctccgcctgggccgggctgggagccaggcgggcggctgggctgcagcaatggaccgtgagctggcccagcccgcgtccgtgctgagcctgcctgtcgtctgtggccatgcccatcatgggctcctcggtgtacatcacggtggagctggccattgctgtgctggccatcctgggcaatgtgctggtgtgctgggccgtgtggctcaacagcaacctgcagaacgtcaccaactactttgtggtgtcactggcggcggccgacatcgcagtgggtgtgctcgccatcccctttgccatcaccatcagcaccgggttctgcgctgcctgccacggctgcctcttcattgcctgcttcgtcctggtcctcacgcagagctccatcttcagtctcctggccatcgccattgaccgctacattgccatccgcatcccgctccggtacaatggcttggtgaccggcacgagggctaagggcatcattgccatctgctgggtgctgtcgtttgccatcggcctgactcccatgctaggttggaacaactgcggtcagccaaaggagggcaagaaccactcccagggctgcggggagggccaagtggcctgtctctttgaggatgtggtccccatgaactacatggtgtacttcaacttctttgcctgtgtgctggtgcccctgctgctcatgctgggtgtctatttgcggatcttcctggcggcgcgacgacagctgaagcagatggagagccagcctctgccgggggagcgggcacggtccacactgcagaaggaggtccatgctgccaagtcactggccatcattgtggggctctttgccctctgctggctgcccctacacatcatcaactgcttcactttcttctgccccgactgcagccacgcccctctctggctcatgtacctggccatcgtcctctcccacaccaattcggttgtgaatcccttcatctacgcctaccgtatccgcgagttccgccagaccttccgcaagatcattcgcagccacgtcctgaggcagcaagaacctttcaaggcagctggcaccagtgcccgggtcttggcagctcatggcagtgacggagagcaggtcagcctccgtctcaacggccacccgccaggagtgtgggccaacggcagtgctccccaccctgagcggaggcccaatggctatgccctggggctggtgagtggagggagtgcccaagagtcccaggggaacacgggcctcccagacgtggagctccttagccatgagctcaagggagtgtgcccagagccccctggcctagatgaccccctggcccaggatggagcaggagtgtcctgatgattcatggagtttgccccttcctaagggaaggagatctttatctttctggttggcttgaccagtcacgttgggagaagagagagagtgccaggagaccctgagggcagccggttcctactttggactgagagaagggagccccaggctggagcagcatgaggcccagcaagaagggcttgggttctgaggaagcagatgtttcatgctgtgaggccttgcaccaggtgggggccacagcaccagcagcatctttgctgggcagggcccagccctccactgcagaagcatctggaagcaccaccttgtctccacagagcagcttgggcacagcagactggcctggccctgagactggggagtggctccaacagcctcctgccacccacacaccactctccctagactctcctagggttcaggagctgctgggcccagaggtgacatttgacttttttccaggaaaaatgtaagtgtgaggaaaccctttttattttattacctttcactctctggctgctgggtctgccgtcggtcctgctgctaacctggcaccagagcctctgcccggggagcctcaggcagtcctctcctgctgtcacagctgccatccacttctcagtcccagggccatctcttggagtgacaaagctgggatcaaggacagggagttgtaacagagcagtgccagagcatgggcccaggtcccaggggagaggttggggctggcaggccactggcatgtgctgagtagcgcagagctacccagtgagaggccttgtctaactgcctttccttctaaagggaatgtttttttctgagataaaataaaaacgagccacatcgtgttttaagcttgtccaaatgagaa

SEQ ID NO: 105125 - DNA, 669 bp, Homo sapiens
  Payload ID: 625
  Gene Symbol: ADORA2A
  Gene Name: adenosine A2a receptor
  ENST ID: ENST00000436735
  CDS Start-End: 477-669
cacagtcagctgcagcgccgcccctgccctgactgcagctgactggcaggggcacctggaggcagcgggttcgggcgcagtatgagagggcttaccctctgcggcagtgggagacaggaccaggcagctccccacatccttccacatccgagctccaggggtctctggcttgtcctttcacagggcggctggtgtcccttaggtgcctcaggaaccctgaagctgggctgagccatgatgctgctgccagaacccctgcagagggcctggtttcaggagactcagagtcctctgtgaaaaagcccttggagagcgccccagcagggctgcacttggctcctgtgaggaaggggctcaggggtctgggcccctccgcctgggccgggctgggagccaggcgggcggctgggctgcagcaatggaccgtgagctggcccagcccgcgtccgtgctgagcctgcctgtcgtctgtggccatgcccatcatgggctcctcggtgtacatcacggtggagctggccattgctgtgctggccatcctgggcaatgtgctggtgtgctgggccgtgtggctcaacagcaacctgcagaacgtcaccaactactttgtggtgtcactggcggcggccgacatcgcagtgggtgtgctcgccatcccctttgccatca

SEQ ID NO: 105126 - DNA, 560 bp, Homo sapiens
  Payload ID: 625
  Gene Symbol: ADORA2A
  Gene Name: adenosine A2a receptor
  ENST ID: ENST00000439591
  CDS Start-End: 331-560
attggaccaggggaaccagccttgctcagtgacttctctgggtgtcctcctctaaagtgcctcaggaaccctgaagctgggctgagccatgatgctgctgccagaacccctgcagagggcctggtttcaggagactcagagtcctctgtgaaaaagcccttggagagcgccccagcagggctgcacttggctcctgtgaggaaggggctcaggggtctgggcccctccgcctgggccgggctgggagccaggcgggcggctgggctgcagcaatggaccgtgagctggcccagcccgcgtccgtgctgagcctgcctgtcgtctgtggccatgcccatcatgggctcctcggtgtacatcacggtggagctggccattgctgtgctggccatcctgggcaatgtgctggtgtgctgggccgtgtggctcaacagcaacctgcagaacgtcaccaactactttgtggtgtcactggcggcggccgacatcgcagtgggtgtgctcgccatcccctttgccatcaccatcagcaccgggttctgcgctgcctgccacggctg

SEQ ID NO: 105127 - DNA, 569 bp, Homo sapiens
  Payload ID: 625
  Gene Symbol: ADORA2A
  Gene Name: adenosine A2a receptor
  ENST ID: ENST00000424232
  CDS Start-End: 307-569
gactcccaggcccgaggactcctggaagggaggtgcctcaggaaccctgaagctgggctgagccatgatgctgctgccagaacccctgcagagggcctggtttcaggagactcagagtcctctgtgaaaaagcccttggagagcgccccagcagggctgcacttggctcctgtgaggaaggggctcaggggtctgggcccctccgcctgggccgggctgggagccaggcgggcggctgggctgcagcaatggaccgtgagctggcccagcccgcgtccgtgctgagcctgcctgtcgtctgtggccatgcccatcatgggctcctcggtgtacatcacggtggagctggccattgctgtgctggccatcctgggcaatgtgctggtgtgctgggccgtgtggctcaacagcaacctgcagaacgtcaccaactactttgtggtgtcactggcggcggccgacatcgcagtgggtgtgctcgccatcccctttgccatcaccatcagcaccgggttctgcgctgcctgccacggctgcctcttcattgcctgcttcgtcctggtcctcac

SEQ ID NO: 105128 - DNA, 1517 bp, Homo sapiens
  Payload ID: 625
  Gene Symbol: ADORA2A
  Gene Name: adenosine A2a receptor
  ENST ID: ENST00000444262
  CDS Start-End: 423-1517
ccgcgcgctcgcatgaaccttcgcgagctcctccagcagggatggaccgggggcgcagaggcgcttcctgaggggtggcgggccgggccccggggcgagggagattccccaggtggaggagccgggcggagaccggttccccgggaaggtgcctcaggaaccctgaagctgggctgagccatgatgctgctgccagaacccctgcagagggcctggtttcaggagactcagagtcctctgtgaaaaagcccttggagagcgccccagcagggctgcacttggctcctgtgaggaaggggctcaggggtctgggcccctccgcctgggccgggctgggagccaggcgggcggctgggctgcagcaatggaccgtgagctggcccagcccgcgtccgtgctgagcctgcctgtcgtctgtggccatgcccatcatgggctcctcggtgtacatcacggtggagctggccattgctgtgctggccatcctgggcaatgtgctggtgtgctgggccgtgtggctcaacagcaacctgcagaacgtcaccaactactttgtggtgtcactggcggcggccgacatcgcagtgggtgtgctcgccatcccctttgccatcaccatcagcaccgggttctgcgctgcctgccacggctgcctcttcattgcctgcttcgtcctggtcctcacgcagagctccatcttcagtctcctggccatcgccattgaccgctacattgccatccgcatcccgctccggtacaatggcttggtgaccggcacgagggctaagggcatcattgccatctgctgggtgctgtcgtttgccatcggcctgactcccatgctaggttggaacaactgcggtcagccaaaggagggcaagaaccactcccagggctgcggggagggccaagtggcctgtctctttgaggatgtggtccccatgaactacatggtgtacttcaacttctttgcctgtgtgctggtgcccctgctgctcatgctgggtgtctatttgcggatcttcctggcggcgcgacgacagctgaagcagatggagagccagcctctgccgggggagcgggcacggtccacactgcagaaggaggtccatgctgccaagtcactggccatcattgtggggctctttgccctctgctggctgcccctacacatcatcaactgcttcactttcttctgccccgactgcagccacgcccctctctggctcatgtacctggccatcgtcctctcccacaccaattcggttgtgaatcccttcatctacgcctaccgtatccgcgagttccgccagaccttccgcaagatcattcgcagccacgtcctgaggcagcaagaacctttcaaggcagctggcaccagtgcccgggtcttggcagctcatggcagtgacggagagcaggtcagcctccgtctcaacggccacccgccaggagtgtgggccaacggcagtgctccccaccctgagcggaggcccaatggctatgccctggggctg

SEQ ID NO: 105129 - DNA, 926 bp, Homo sapiens
  Payload ID: 625
  Gene Symbol: ADORA2A
  Gene Name: adenosine A2a receptor
  ENST ID: ENST00000486108
  CDS Start-End: 602-926
gagtgtggcgctgaggaagcggcgggacggatgcgagcccgggaggagcgcgctggggggccgcaggcgggggatgtggcgcggtccaggcccgtcgcggcctcgtcctgacagggacacctgcgggatcgtccttccaggatcgcctgcgggcctcgcgggccgatgcctcgggtccccctccggcctcggtttctccgcgcagcggggcggggcgggggcagcgcgggtctcaaagctgcctgcagggggcgcccgtgagcggcgcggccggagccggagacccagcggccgccgagacagcgggagccggcgtgcgagcggcaggtgcctcaggaaccctgaagctgggctgagccatgatgctgctgccagaacccctgcagagggcctggtttcaggagactcagagtcctctgtgaaaaagcccttggagagcgccccagcagggctgcacttggctcctgtgaggaaggggctcaggggtctgggcccctccgcctgggccgggctgggagccaggcgggcggctgggctgcagcaatggaccgtgagctggcccagcccgcgtccgtgctgagcctgcctgtcgtctgtggccatgcccatcatgggctcctcggtgtacatcacggtggagctggccattgctgtgctggccatcctgggcaatgtgctggtgtgctgggccgtgtggctcaacagcaacctgcagaacgtcaccaactactttgtggtgtcactggcggcggccgacatcgcagtgggtgtgctcgccatcccctttgccatcaccatcagcaccgggttctgcgctgcctgccacggctgcctcttcattgcctgcttcgtcctggtcctcacgcagagctccatcttcagtctcctggccatcgccattgaccgctacattgccatccgcatcc

SEQ ID NO: 105130 - DNA, 689 bp, Homo sapiens
  Payload ID: 625
  Gene Symbol: ADORA2A
  Gene Name: adenosine A2a receptor
  ENST ID: ENST00000496258
  CDS Start-End: 440-689
acagcctgtgtacatgtgagcagccgcgtgcagaggggaagctctgcctgggcctcagggactgtgacatggagcaggagccgcccccagccaagctgctttcagcacagcgtgggcccccagcaccttggtgcggggtgcggcccctcggaggagggctgtcaggtgcctcaggaaccctgaagctgggctgagccatgatgctgctgccagaacccctgcagagggcctggtttcaggagactcagagtcctctgtgaaaaagcccttggagagcgccccagcagggctgcacttggctcctgtgaggaaggggctcaggggtctgggcccctccgcctgggccgggctgggagccaggcgggcggctgggctgcagcaatggaccgtgagctggcccagcccgcgtccgtgctgagcctgcctgtcgtctgtggccatgcccatcatgggctcctcggtgtacatcacggtggagctggccattgctgtgctggccatcctgggcaatgtgctggtgtgctgggccgtgtggctcaacagcaacctgcagaacgtcaccaactactttgtggtgtcactggcggcggccgacatcgcagtgggtgtgctcgccatcccctttgccatcaccatcagcaccgggttctgcgctgcctgccacggctgcctcttcattgcctgcttcg

SEQ ID NO: 105131 - DNA, 558 bp, Homo sapiens
  Payload ID: 625
  Gene Symbol: ADORA2A
  Gene Name: adenosine A2a receptor
  ENST ID: ENST00000464977
  CDS Start-End: 540-558
gcagaccggccccgcgcgctcgcatgaaccttcgcgagctcctccagcagggatggaccgggggcgcagaggcgcttcctgaggggtggcgggccgggccccggggcgagggagattccccaggtggaggagccgggcggagaccggttccccgggaaggaaaaaaacagaccacatctgatccttggccctgagtccagagtgggaggcaccgtgacaacaatgcgcagagcagggaatgcagggagccatggatagtgctggggtgcctcaggaaccctgaagctgggctgagccatgatgctgctgccagaacccctgcagagggcctggtttcaggagactcagagtcctctgtgaaaaagcccttggagagcgccccagcagggctgcacttggctcctgtgaggaaggggctcaggggtctgggcccctccgcctgggccgggctgggagccaggcgggcggctgggctgcagcaatggaccgtgagctggcccagcccgcgtccgtgctgagcctgcctgtcgtctgtggccatgcccatcatgggctcct

SEQ ID NO: 105132 - DNA, 718 bp, Homo sapiens
  Payload ID: 625
  Gene Symbol: ADORA2A
  Gene Name: adenosine A2a receptor
  ENST ID: ENST00000472248
  CDS Start-End: 631-718
gagggcgtgggaggagggaggtgaggcagctccctccgagtggaagctcacagtcagctgcagcgccgcccctgccctgactgcagctgactggcaggggcacctggaggcagcgggttcgggcgcagtatgagagggcttaccctctgcggcagtgggagacaggaccaggcagctccccacatccttccacatccgagctccaggggtctctggcttgtcctttcacagggcggctggtgtcccttaggaaaaaaacagaccacatctgatccttggccctgagtccagagtgggaggcaccgtgacaacaatgcgcagagcagggaatgcagggagccatggatagtgctggggtgcctcaggaaccctgaagctgggctgagccatgatgctgctgccagaacccctgcagagggcctggtttcaggagactcagagtcctctgtgaaaaagcccttggagagcgccccagcagggctgcacttggctcctgtgaggaaggggctcaggggtctgggcccctccgcctgggccgggctgggagccaggcgggcggctgggctgcagcaatggaccgtgagctggcccagcccgcgtccgtgctgagcctgcctgtcgtctgtggccatgcccatcatgggctcctcggtgtacatcacggtggagctggccattgctgtgctggccatcctgggcaatgtgctggtgtgctggg

SEQ ID NO: 105133 - DNA, 1735 bp, Homo sapiens
  Payload ID: 626
  Gene Symbol: ADORA2B
  Gene Name: adenosine A2b receptor
  Uniprot ID: P29275
  ENST ID: ENST00000304222
  CDS Start-End: 333-1331
gggcaatttgttagttatccgccgccaccaagacgcggcacggcgcctggaccggaggggccccgcgcgggcgcgaactttgggctcgggcgagtgggtggtgctccgcccagcccgagacgggcgggcgcgcgggccaatgggtgccgcctcttggccgcggggggccccgacccgtgggtcccggccaccagcgccccagccccgaggctcagaagcggcaggcggaggcgcggtccgggcgctatggccatgcccggcgggtctcacgcggctgcccctcgcccggcgcgccttcggtagggggcgcccggggcccagctggcccggccatgctgctggagacacaggacgcgctgtacgtggcgctggagctggtcatcgccgcgctttcggtggcgggcaacgtgctggtgtgcgccgcggtgggcacggcgaacactctgcagacgcccaccaactacttcctggtgtccctggctgcggccgacgtggccgtggggctcttcgccatcccctttgccatcaccatcagcctgggcttctgcactgacttctacggctgcctcttcctcgcctgcttcgtgctggtgctcacgcagagctccatcttcagccttctggccgtggcagtcgacagatacctggccatctgtgtcccgctcaggtataaaagtttggtcacggggacccgagcaagaggggtcattgctgtcctctgggtccttgcctttggcatcggattgactccattcctggggtggaacagtaaagacagtgccaccaacaactgcacagaaccctgggatggaaccacgaatgaaagctgctgccttgtgaagtgtctctttgagaatgtggtccccatgagctacatggtatatttcaatttctttgggtgtgttctgcccccactgcttataatgctggtgatctacattaagatcttcctggtggcctgcaggcagcttcagcgcactgagctgatggaccactcgaggaccaccctccagcgggagatccatgcagccaagtcactggccatgattgtggggatttttgccctgtgctggttacctgtgcatgctgttaactgtgtcactcttttccagccagctcagggtaaaaataagcccaagtgggcaatgaatatggccattcttctgtcacatgccaattcagttgtcaatcccattgtctatgcttaccggaaccgagacttccgctacacttttcacaaaattatctccaggtatcttctctgccaagcagatgtcaagagtgggaatggtcaggctggggtacagcctgctctcggtgtgggcctatgatctaggctctcgcctcttccaggagaagatacaaatccacaagaaacaaagaggacacggctggttttcattgtgaaagatagctacacctcacaaggaaatggactgcctctcttgagcacttccctggagctaccacgtatctagctaatatgtatgtgtcagtagtaggctccaaggattgacaaatatatttatgatctattcagctgcttttactgtgtggattatgccaacagcttgaatggattctaacagactcttttgtttttaaaagtctgccttgtttatggtggaaaattactgaaactattttactgtgaaacagtgtgaactattataatgcaaatactttttaacttagaggcaatggaaaaataaaagttgactgtactaaaaatgta

SEQ ID NO: 105134 - DNA, 1884 bp, Homo sapiens
  Payload ID: 627
  Gene Symbol: ADORA3
  Gene Name: adenosine A3 receptor
  Uniprot ID: P0DMS8
  ENST ID: ENST00000241356
  CDS Start-End: 407-1363
ctcacttcctgaaacacccctgaagagggttgcttatcttgatggaactcaaaaagccaaaaagctgcaggcagaggcgttgaggacatctgtttggggaactaagagcagcagcactttcagattcagtccatatagagctgtcctacagcattctggaaacttgaggatgtgcggtgcataaaggggctggaagtgacccacctgtgatgagccctttctaaggagaagggtttccaagagatcaccccaccagaaaagggtaggaatgagcaagttgggaattttagactgtcactgcacatggacctctgggaagacgtctggcgagagctaggcccactggccctacagacggatcttgctggctcacctgtccctgtggaggttcccctgggaaggcaagatgcccaacaacagcactgctctgtcattggccaatgttacctacatcaccatggaaattttcattggactctgcgccatagtgggcaacgtgctggtcatctgcgtggtcaagctgaaccccagcctgcagaccaccaccttctatttcattgtctctctagccctggctgacattgctgttggggtgctggtcatgcctttggccattgttgtcagcctgggcatcacaatccacttctacagctgcctttttatgacttgcctactgcttatctttacccacgcctccatcatgtccttgctggccatcgctgtggaccgatacttgcgggtcaagcttaccgtcagatacaagagggtcaccactcacagaagaatatggctggccctgggcctttgctggctggtgtcattcctggtgggattgacccccatgtttggctggaacatgaaactgacctcagagtaccacagaaatgtcaccttcctttcatgccaatttgtttccgtcatgagaatggactacatggtatacttcagcttcctcacctggattttcatccccctggttgtcatgtgcgccatctatcttgacatcttttacatcattcggaacaaactcagtctgaacttatctaactccaaagagacaggtgcattttatggacgggagttcaagacggctaagtccttgtttctggttcttttcttgtttgctctgtcatggctgcctttatctatcatcaactgcatcatctactttaatggtgaggtaccacagcttgtgctgtacatgggcatcctgctgtcccatgccaactccatgatgaaccctatcgtctatgcctataaaataaagaagttcaaggaaacctaccttttgatcctcaaagcttgtgtggtctgccatccctctgattctttggacacaagcattgagaagaattctgagtagttatccatcagagatgactctgtctcattgaccttcagattccccatcaacaaacacttgagggcctgtatgcctgggccaagggatttttacatccttgattacttccactgaggtgggagcatctccagtgctccccaattatatctcccccactccactactctcttcctccacttcatttttcccttgtcctttctctctaattcagtgttttggaggcctgacttggggacaacgtattattgatattattgtctgttttccttcttcccaatagaagaataagtcatggagcctgaagggtgcctagttgacttactgacaaaaggctccagttgggctgaacatgtgtgtggtggtgactcatttccataccattgtggaattgagcagagaacctgctctcggaggatgcctaggagatgttgggaacagaaaaaataaactgagtttaagggggacttaaactgctgaattcacctgtggatgtttttgagtaaataaaagctaatagctaa

SEQ ID NO: 105135 - DNA, 1201 bp, Homo sapiens
  Payload ID: 627
  Gene Symbol: ADORA3
  Gene Name: adenosine A3 receptor
  ENST ID: ENST00000632535
  CDS Start-End: 59-430
ctacagacggatcttgctggctcacctgtccctgtggaggttcccctgggaaggcaagatgcccaacaacagcactgctctgtcattggccaatgttacctacatcaccatggaaattttcattggactctgcgccatagtgggcaacgtgctggtcatctgcgtggtcaagctgaaccccagcctgcagaccaccaccttctatttcattgtctctctagccctggctgacattgctgttggggtgctggtcatgcctttggccattgttgtcagcctgggcatcacaatccacttctacagctgcctttttatgacttgcctactgcttatctttacccacgcctccatcatgtccttgctggccatcgctgtggaccgatacttgcgggtcaagcttaccgtcagctccatctcccctaccctttagcaattactgctgtggactcactgactctcttcattcacacagatacaagagggtcaccactcacagaagaatatggctggccctgggcctttgctggctggtgtcattcctggtgggattgacccccatgtttggctggaacatgaaactgacctcagagtaccacagaaatgtcaccttcctttcatgccaatttgtttccgtcatgagaatggactacatggtatacttcagcttcctcacctggattttcatccccctggttgtcatgtgcgccatctatcttgacatcttttacatcattcggaacaaactcagtctgaacttatctaactccaaagagacaggtgcattttatggacgggagttcaagacggctaagtccttgtttctggttcttttcttgtttgctctgtcatggctgcctttatctatcatcaactgcatcatctactttaatggtgaggtaccacagcttgtgctgtacatgggcatcctgctgtcccatgccaactccatgatgaaccctatcgtctatgcctataaaataaagaagttcaaggaaacctaccttttgatcctcaaagcttgtgtggtctgccatccctctgattctttggacacaagcattgagaagaattctgagtagttatccatcagagatgactctgtctcattgaccttcagattccccatcaacaaacacttgagggcctgtatgcctgggccaagggatttttacatccttgattacttccactgaggtgggag

SEQ ID NO: 105136 - DNA, 1539 bp, Homo sapiens
  Payload ID: 628
  Gene Symbol: ADA
  Gene Name: adenosine deaminase
  Uniprot ID: P00813
  ENST ID: ENST00000372874
  CDS Start-End: 136-1227
ggggcccggcccgttaagaagagcgtggccggccgcggccaccgctggccccagggaaagccgagcggccaccgagccggcagagacccaccgagcggcggcggagggagcagcgccggggcgcacgagggcaccatggcccagacgcccgccttcgacaagcccaaagtggaactgcatgtccacctagacggatccatcaagcctgaaaccatcttatactatggcaggaggagagggatcgccctcccagctaacacagcagaggggctgctgaacgtcattggcatggacaagccgctcacccttccagacttcctggccaagtttgactactacatgcctgctatcgcgggctgccgggaggctatcaaaaggatcgcctatgagtttgtagagatgaaggccaaagagggcgtggtgtatgtggaggtgcggtacagtccgcacctgctggccaactccaaagtggagccaatcccctggaaccaggctgaaggggacctcaccccagacgaggtggtggccctagtgggccagggcctgcaggagggggagcgagacttcggggtcaaggcccggtccatcctgtgctgcatgcgccaccagcccaactggtcccccaaggtggtggagctgtgtaagaagtaccagcagcagaccgtggtagccattgacctggctggagatgagaccatcccaggaagcagcctcttgcctggacatgtccaggcctaccaggaggctgtgaagagcggcattcaccgtactgtccacgccggggaggtgggctcggccgaagtagtaaaagaggctgtggacatactcaagacagagcggctgggacacggctaccacaccctggaagaccaggccctttataacaggctgcggcaggaaaacatgcacttcgagatctgcccctggtccagctacctcactggtgcctggaagccggacacggagcatgcagtcattcggctcaaaaatgaccaggctaactactcgctcaacacagatgacccgctcatcttcaagtccaccctggacactgattaccagatgaccaaacgggacatgggctttactgaagaggagtttaaaaggctgaacatcaatgcggccaaatctagtttcctcccagaagatgaaaagagggagcttctcgacctgctctataaagcctatgggatgccaccttcagcctctgcagggcagaacctctgaagacgccactcctccaagccttcaccctgtggagtcaccccaactctgtggggctgagcaacatttttacatttattccttccaagaagaccatgatctcaatagtcagttactgatgctcctgaaccctatgtgtccatttctgcacacacgtatacctcggcatggccgcgtcacttctctgattatgtgccctggccagggaccagcgcccttgcacatgggcatggttgaatctgaaaccctccttctgtggcaacttgtactgaaaatctggtgctcaataaagaagcccatggctggtggcatgca

SEQ ID NO: 105137 - DNA, 1356 bp, Homo sapiens
  Payload ID: 628
  Gene Symbol: ADA
  Gene Name: adenosine deaminase
  ENST ID: ENST00000536532
  CDS Start-End: 75-866
cgagcggccaccgagccggcagagacccaccgagcggcggcggagggagcagcgccggggcgcacgagggcaccatggcccagacgcccgccttcgacaagcccaaagtggaactgcatgtccacctagacggatccatcaagcctgaaaccatcttatactatggcaggaggagagggatcgccctcccagctaacacagcagaggggctgctgaacgtcattggcatggacaagccgctcacccttccagacttcctggccaagtttgactactacatgcctgctatcgcgggctgccgggaggctatcaaaaggatcgcctatgagtttgtagagatgaaggccaaagagggcgtggtgtatgtggaggtgcggtacagtccgcacctgctggccaactccaaagtggagccaatcccctggaaccaggctgaaggggacctcaccccagacgaggtggtggccctagtgggccagggcctgcaggagggggagcgagacttcggggtcaaggcccggtccatcctgtgctgcatgcgccaccagcccaactggtcccccaaggtggtggagctgtgtaagaagtaccagcagcagaccgtggtagccattgacctggctggagatgagaccatcccaggaagcagcctcttgcctggacatgtccaggcctaccaggaggctgtgaagagcggcattcaccgtactgtccacgccggggaggtgggctcggccgaagtagtaaaagaggctgtggacatactcaagacagagcggctgggacacggctaccacaccctggaagaccaggccctttataacaggctgcggcaggaaaacatgcacttcgaggctcaaaaatgaccaggctaactactcgctcaacacagatgacccgctcatcttcaagtccaccctggacactgattaccagatgaccaaacgggacatgggctttactgaagaggagtttaaaaggctgaacatcaatgcggccaaatctagtttcctcccagaagatgaaaagagggagcttctcgacctgctctataaagcctatgggatgccaccttcagcctctgcagggcagaacctctgaagacgccactcctccaagccttcaccctgtggagtcaccccaactctgtggggctgagcaacatttttacatttattccttccaagaagaccatgatctcaatagtcagttactgatgctcctgaaccctatgtgtccatttctgcacacacgtatacctcggcatggccgcgtcacttctctgattatgtgccctggccagggaccagcgcccttgcacatgggcatggttgaatctgaaaccctccttctgtg

SEQ ID NO: 105138 - DNA, 1128 bp, Homo sapiens
  Payload ID: 628
  Gene Symbol: ADA
  Gene Name: adenosine deaminase
  ENST ID: ENST00000537820
  CDS Start-End: 85-1104
cagggaaagccgagcggccaccgagccggcagagacccaccgagcggcggcggagggagcagcgccggggcgcacgagggcaccatggcccagacgcccgccttcgacaagcccaaagtggaactgcatgtccacctagacggatccatcaagcctgaaaccatcttatactatggcaggaggagagggatcgccctcccagctaacacagcagaggggctgctgaacgtcattggcatggacaagccgctcacccttccagacttcctggccaagtttgactactacatgcctgctatcgcgggctgccgggaggctatcaaaaggatcgcctatgagtttgtagagatgaaggccaaagagggcgtggtgtatgtggaggtgcggtacagtccgcacctgctggccaactccaaagtggagccaatcccctggaaccaggctgaaggggacctcaccccagacgaggtggtggccctagtgggccagggcctgcaggagggggagcgagacttcggggtcaaggcccggtccatcctgtgctgcatgcgccaccagcccaactggtcccccaaggtggtggagctgtgtaagaagtaccagcagcagaccgtggtagccattgacctggctggagatgagaccatcccaggaagcagcctcttgcctggacatgtccaggcctaccaggctgtggacatactcaagacagagcggctgggacacggctaccacaccctggaagaccaggccctttataacaggctgcggcaggaaaacatgcacttcgagatctgcccctggtccagctacctcactggtgcctggaagccggacacggagcatgcagtcattcggctcaaaaatgaccaggctaactactcgctcaacacagatgacccgctcatcttcaagtccaccctggacactgattaccagatgaccaaacgggacatgggctttactgaagaggagtttaaaaggctgaacatcaatgcggccaaatctagtttcctcccagaagatgaaaagagggagcttctcgacctgctctataaagcctatgggatgccaccttcagcctctgcagggcagaacctctgaagacgccactcctccaagccttca

SEQ ID NO: 105139 - DNA, 812 bp, Homo sapiens
  Payload ID: 628
  Gene Symbol: ADA
  Gene Name: adenosine deaminase
  ENST ID: ENST00000539235
  CDS Start-End: 85-312
cagggaaagccgagcggccaccgagccggcagagacccaccgagcggcggcggagggagcagcgccggggcgcacgagggcaccatggcccagacgcccgccttcgacaagcccaaagtggaactgcatgtccacctagacggatccatcaagcctgaaaccatcttatactatggcaggaggagagggatcgccctcccagctaacacagcagaggggctgctgaacgtcattggcatggacaagccgctcacccttccagacttcctggccaagtttgactactacatgcctgctatcgcgaggctgtgaagagcggcattcaccgtactgtccacgccggggaggtgggctcggccgaagtagtaaaagaggctgtggacatactcaagacagagcggctgggacacggctaccacaccctggaagaccaggccctttataacaggctgcggcaggaaaacatgcacttcgagatctgcccctggtccagctacctcactggtgcctggaagccggacacggagcatgcagtcattcggctcaaaaatgaccaggctaactactcgctcaacacagatgacccgctcatcttcaagtccaccctggacactgattaccagatgaccaaacgggacatgggctttactgaagaggagtttaaaaggctgaacatcaatgcggccaaatctagtttcctcccagaagatgaaaagagggagcttctcgacctgctctataaagcctatgggatgccaccttcagcctctgcagggcagaacctctgaagacgccactcctccaagccttca

SEQ ID NO: 105140 - DNA, 1961 bp, Homo sapiens
  Payload ID: 629
  Gene Symbol: ADAD1
  Gene Name: adenosine deaminase domain containing 1 (testis -specific)
  Uniprot ID: Q96M93
  ENST ID: ENST00000296513
  CDS Start-End: 186-1916
aaacaggaaggccacagtggaggccaagccttccccatgggcaccttctcagattgcgattgtggatgaaatgagggattttcttgaaacaaccctcacgcaggtgacgcaagacgcggagctcggctgcacgacgctggcgcaagcgcgggggcaagagcgccggcctccgagacggtgagaaaatggctagcaacaatcattggtttcagagttcgcaggtccccagctttgcccagatgctgaaaaagaacctgccagttcaaccagcgacaaagacgataactacacccacaggatggtcctcagaaagttacggcctgtccaagatggcatccaaggttacgcaagtaacgggtaattttccagagccgttgctttccaagaatctttcatctatttcaaatcctgtccttcctccaaaaaaaatacctaaggaatttataatgaaatacaaacgtggagagataaatcctgtgtcagccttgcaccagtttgcacaaatgcagcgagttcagcttgaccttaaggaaactgtgacaacaggtaatgttatgggaccatattttgccttttgtgctgtggtggatggtattcagtacaagactggactgggacaaaataaaaaggagtctagatccaatgcagcaaaattagctcttgatgagcttctacaactggatgaacctgaaccacgaattttagaaacatcaggtcctcctcctttccctgcagaacctgttgttttatctgaactagcatatgtttcaaaagtacattatgaagggagacatattcaatatgcaaagatttcacagatcgttaaagaaagatttaatcaactaatttctaatcgttcagaatacctgaaatatagcagttcattggctgcttttataattgaaagagctggacaacatgaggttgtagctataggcacaggtgaatacaattacagccaggacattaagccagatggaagagtattgcatgacactcatgctgttgttacagcaagaaggtctcttcttaggtacttttatagacaacttctgctcttctacagcaaaaatcctgctatgatggaaaaatcaatattttgtacagaaccaacttctaatctactcactcttaaacagaatatcaacatttgcctttacatgaaccagttgcctaaaggatcagcccagattaagtcacagttacgtcttaatccacattctatatctgcatttgaagccaatgaagaactctgtctccacgtggctgttgaaggcaaaatttatctgactgtttactgtcctaaagatggtgttaatagaataagcagtatgtcctcaagtgacaaattgaccagatgggaagtgcttggtgtacagggagcattgctgagtcattttatacagccagtttacatcagcagtatacttattggtgatgggaattgcagtgataccagaggcttagaaatcgctataaagcaacgtgttgatgatgcactcacttcaaaacttccaatgttttacttagtcaacagacctcatattagtttagtaccctctgcatatccccttcaaatgaacttggaatataaatttctgagtctgaattgggcacaaggagatgtttctttggagattgtggatggcctgagtgggaagatcactgaaagttccccatttaaaagtggtatgtcaatggcaagtcggctttgtaaggctgcaatgttaagtcggtttaacctgcttgccaaagaagctaaaaaagaattacttgaagctggtacatatcatgcagctaagtgtatgtctgcctcctatcaagaagctaaatgtaagttgaaatcctacttacaacaacatggctatggatcctggattgtgaaatctccctgcatagagcaatttaacatgtgaaataggcaatccattatcacattaaaaatcttgttttgtttggtg

SEQ ID NO: 105141 - DNA, 1912 bp, Homo sapiens
  Payload ID: 629
  Gene Symbol: ADAD1
  Gene Name: adenosine deaminase domain containing 1 (testis -specific)
  Uniprot ID: Q96M93
  ENST ID: ENST00000388724
  CDS Start-End: 152-1849
acggttagtgattggacgaagcagggcgcgggggcgcaagcccgggtcctgcaggggcgacgcgaggcctcttttgaaagatgcggccctgaccctgtgaacctcgcgcagagcggcctgaagcgagaggttgaggctgggaggtgagaaaatggctagcaacaatcattggtttcagagttcgcaggtccccagctttgcccagatgctgaaaaagaacctgccagttcaaccagcgacaaagacgataactacacccacaggatggtcctcagaaagttacggcctgtccaagatggcatccaaggttacgcaagtaacgggtaattttccagagccgttgctttccaagaatctttcatctatttcaaatcctgtccttcctccaaaaaaaatacctaaggaatttataatgaaatacaaacgtggagagataaatcctgtgtcagccttgcaccagtttgcacaaatgcagcgagttcagcttgaccttaaggaaactgtgacaacaggtaatgttatgggaccatattttgccttttgtgctgtggtggatggtattcagtacaagactggactgggacaaaataaaaaggagtctagatccaatgcagcaaaattagctcttgatgagcttctacaactggatgaacctgaaccacgaattttagaaacatcaggtcctcctcctttccctgcagaacctgttgttttatctgaactagcatatgtttcaaaagtacattatgaagggagacatattcaatatgcaaagatttcacagatcgttaaagaaagatttaatcaactaatttctaatcgttcagaatacctgaaatatagcagttcattggctgcttttataattgaaagagctggacaacatgaggttgtagctataggcacaggtgaatacaattacagccaggacattaagccagatggaagagtattgcatgacactcatgctgttgttacagcaagaaggtctcttcttagcaaaaatcctgctatgatggaaaaatcaatattttgtacagaaccaacttctaatctactcactcttaaacagaatatcaacatttgcctttacatgaaccagttgcctaaaggatcagcccagattaagtcacagttacgtcttaatccacattctatatctgcatttgaagccaatgaagaactctgtctccacgtggctgttgaaggcaaaatttatctgactgtttactgtcctaaagatggtgttaatagaataagcagtatgtcctcaagtgacaaattgaccagatgggaagtgcttggtgtacagggagcattgctgagtcattttatacagccagtttacatcagcagtatacttattggtgatgggaattgcagtgataccagaggcttagaaatcgctataaagcaacgtgttgatgatgcactcacttcaaaacttccaatgttttacttagtcaacagacctcatattagtttagtaccctctgcatatccccttcaaatgaacttggaatataaatttctgagtctgaattgggcacaaggagatgtttctttggagattgtggatggcctgagtgggaagatcactgaaagttccccatttaaaagtggtatgtcaatggcaagtcggctttgtaaggctgcaatgttaagtcggtttaacctgcttgccaaagaagctaaaaaagaattacttgaagctggtacatatcatgcagctaagtgtatgtctgcctcctatcaagaagctaaatgtaagttgaaatcctacttacaacaacatggctatggatcctggattgtgaaatctccctgcatagagcaatttaacatgtgaaataggcaatccattatcacattaaaaatcttgttttgtttggtgtgttttgactagtaaaaa

SEQ ID NO: 105142 - DNA, 1918 bp, Homo sapiens
  Payload ID: 629
  Gene Symbol: ADAD1
  Gene Name: adenosine deaminase domain containing 1 (testis -specific)
  Uniprot ID: Q96M93
  ENST ID: ENST00000388725
  CDS Start-End: 197-1873
ttgaaagatgcggccctgaccctgtgaacctcgcgcagagcggcctgaagcgagaggttgaggctgggaggtgggagcaacggcggcggcggccgcctgcgagcccccggcctgaggcgcagcagcagctgcccgtcttcccacatagagggcaggaaggacaactttgagttcgcaggtccccagctttgcccagatgctgaaaaagaacctgccagttcaaccagcgacaaagacgataactacacccacaggatggtcctcagaaagttacggcctgtccaagatggcatccaaggttacgcaagtaacgggtaattttccagagccgttgctttccaagaatctttcatctatttcaaatcctgtccttcctccaaaaaaaatacctaaggaatttataatgaaatacaaacgtggagagataaatcctgtgtcagccttgcaccagtttgcacaaatgcagcgagttcagcttgaccttaaggaaactgtgacaacaggtaatgttatgggaccatattttgccttttgtgctgtggtggatggtattcagtacaagactggactgggacaaaataaaaaggagtctagatccaatgcagcaaaattagctcttgatgagcttctacaactggatgaacctgaaccacgaattttagaaacatcaggtcctcctcctttccctgcagaacctgttgttttatctgaactagcatatgtttcaaaagtacattatgaagggagacatattcaatatgcaaagatttcacagatcgttaaagaaagatttaatcaactaatttctaatcgttcagaatacctgaaatatagcagttcattggctgcttttataattgaaagagctggacaacatgaggttgtagctataggcacaggtgaatacaattacagccaggacattaagccagatggaagagtattgcatgacactcatgctgttgttacagcaagaaggtctcttcttaggtacttttatagacaacttctgctcttctacagcaaaaatcctgctatgatggaaaaatcaatattttgtacagaaccaacttctaatctactcactcttaaacagaatatcaacatttgcctttacatgaaccagttgcctaaaggatcagcccagattaagtcacagttacgtcttaatccacattctatatctgcatttgaagccaatgaagaactctgtctccacgtggctgttgaaggcaaaatttatctgactgtttactgtcctaaagatggtgttaatagaataagcagtatgtcctcaagtgacaaattgaccagatgggaagtgcttggtgtacagggagcattgctgagtcattttatacagccagtttacatcagcagtatacttattggtgatgggaattgcagtgataccagaggcttagaaatcgctataaagcaacgtgttgatgatgcactcacttcaaaacttccaatgttttacttagtcaacagacctcatattagtttagtaccctctgcatatccccttcaaatgaacttggaatataaatttctgagtctgaattgggcacaaggagatgtttctttggagattgtggatggcctgagtgggaagatcactgaaagttccccatttaaaagtggtatgtcaatggcaagtcggctttgtaaggctgcaatgttaagtcggtttaacctgcttgccaaagaagctaaaaaagaattacttgaagctggtacatatcatgcagctaagtgtatgtctgcctcctatcaagaagctaaatgtaagttgaaatcctacttacaacaacatggctatggatcctggattgtgaaatctccctgcatagagcaatttaacatgtgaaataggcaatccattatcacattaaaaatcttgttttgtttggtg

SEQ ID NO: 105143 - DNA, 627 bp, Homo sapiens
  Payload ID: 629
  Gene Symbol: ADAD1
  Gene Name: adenosine deaminase domain containing 1 (testis -specific)
  ENST ID: ENST00000446706
  CDS Start-End: 159-627
gttcgctcactggccaagcttcaggacgtgtgaggtagtttttctgtaaacaggaaggccacagtggaggccaagccttccccatgggcaccttctcagattgcgattgtggatgaaatgagggattttcttgaaacaaccctcacgcaggtgagaaaatggctagcaacaatcattggtttcagagttcgcaggtccccagctttgcccagatgctgaaaaagaacctgccagttcaaccagcgacaaagacgataactacacccacaggatggtcctcagaaagttacggcctgtccaagatggcatccaaggttacgcaagtaacgggtaattttccagagccgttgctttccaagaatctttcatctatttcaaatcctgtccttcctccaaaaaaaatacctaaggaatttataatgaaatacaaacgtggagagataaatcctgtgtcagccttgcaccagtttgcacaaatgcagcgagttcagcttgaccttaaggaaactgtgacaacaggtaatgttatgggaccatattttgccttttgtgctgtggtggatggtattcagtacaagactggactgggacaaaataaaaaggagtctagatccaatgcagcaaaat

SEQ ID NO: 105144 - DNA, 977 bp, Homo sapiens
  Payload ID: 629
  Gene Symbol: ADAD1
  Gene Name: adenosine deaminase domain containing 1 (testis -specific)
  ENST ID: ENST00000439307
  CDS Start-End: 254-977
gagacggttagtgattggacgaagcagggcgcgggggcgcaagcccgggtcctgcaggggcgacgcgaggcctcttttgaaagatgcggccctgaccctgtgaacctcgcgcagagcggcctgaagcgagaggttgaggctgggaggtgggagcaacggcggcggcggccgcctgcgagcccccggcctgaggcgcagcagcagctgcccgtcttcccacatagagggcaggaaggacaactttggtgagaaaatggctagcaacaatcattggtttcagagttcgcaggtccccagctttgcccagatgctgaaaaagaacctgccagttcaaccagcgacaaagacgataactacacccacaggatggtcctcagaaagttacggcctgtccaagatggcatccaaggttacgcaagtaacgggtaattttccagagccgttgctttccaagaatctttcatctatttcaaatcctgtccttcctccaaaaaaaatacctaaggaatttataatgaaatacaaacgtggagagataaatcctgtgtcagccttgcaccagtttgcacaaatgcagcgagttcagcttgaccttaaggaaactgtgacaacaggtaatgttatgggaccatattttgccttttgtgctgtggtggatggtattcagtacaagactggactgggacaaaataaaaaggagtctagatccaatgcagcaaaattagctcttgatgagcttctacaactggatgaacctgaaccacgaattttagaaacatcaggtcctcctcctttccctgcagaacctgttgttttatctgaactagcatatgtttcaaaagtacattatgaagggagacatattcaatatgcaaagatttcacagatcgttaaagaaagatttaatcaactaatttctaatcgttcagaatacctgaaatatagcagttcattggctgcttttataattgaaagag

SEQ ID NO: 105145 - DNA, 2283 bp, Homo sapiens
  Payload ID: 630
  Gene Symbol: ADAD2
  Gene Name: adenosine deaminase domain containing 2
  Uniprot ID: Q8NCV1
  ENST ID: ENST00000268624
  CDS Start-End: 94-2091
gtgctccccacgtgaaggcacccgccctgcgcgtgtgaaagggcgagagcagcgcgagatagggcctagcgcctcagatcttcgttggcggccatggcttcggcttctcagggcgctgacgacgacggcagtcgtaggaagccccgcctggctgcatcgttgcagatcagcccccagccccgcccctggcgaccgctacccgcccaggcccaaagtgcctgggggcccgcgcccgcgcccgcgacgtatcgcgcggagggcgggtggccccaggtctcggtgttgagggacagtgggcctggggcaggggccggagtcggggaactgggggcagcccgggcgtgggaaaacttgggggaacagatggggaaggccccgagggtccctgtgcccccagcagggctcagcctgccgctcaaagacccacctgccagccaggccgtgtccttgctcacggagtacgcggccagcctgggcatcttcctgctcttccgggaggaccagccaccaggaaaagtgttcaaatatagagcccctggaggagaggaattgaaagcaatgtgtctgtggcaggtggaagtgctcagagccttcctcctgagaacagggtggcgtgggctctggagaggggacctggatttgggtcctgactcaagttgggcaaaccgcctgccgtttctgctcatctgtgaaatggagtcacgcatccctgctgtggaggagttgggtccctgcttccccttctcggtgagcgcggaactggatggggtggtctgccctgcgggcactgcgaatagcaagacggaggccaaacagcaggcagcgctctctgccctctgctacatccggagtcagctggagaacccagagtccccccagacctccagccggcctccactggcccccctgagcgtagagaacatcctgacccatgagcagcgctgcgcagcgttggtgagcgccggctttgacctcctgttggacgagcgctcgccatactgggcctgtaaggggactgtggctggagtcatcctggagaggggctgggccgtctctgccccctcctgcacagagatcccgcgtgccaggggccacgtgaaggagatctacaagctggtggctctgggcaccggcagcagctgctgtgctggctggctggagttctcgggccagcagctccacgactgccatggcctggtcatcgcccgcagggccctgctgaggttcttgttccggcagctcctgctggccacacaggggggccccaagggcaaggagcagtccgtgctggccccccagccagggcccggacccccattcaccctcaagccccgcgtcttcctgcacctctacatcagcaacacccccaagggcgcggcccgtgacatctacctgccccccacctcggaaggtggcctcccgcacagcccacccatgcgcctgcaggcccatgtgctcgggcagctgaagcctgtgtgctacgtggcgccctcgctctgtgacacccacgtgggctgcctgtcagccagtgacaagctggcacgctgggccgtgctggggctgggtggtgccctgctggcccacctggtgtccccactctacagcaccagcctcatcctggctgactcatgccacgaccctccgactctgagcagggccatccacacccggccctgcctggacagtgtcctggggccatgcctgccacctccctacgtccggaccgccctgcacctgtttgcagggcccccggtggccccttccgaacccacccctgacacctgccgtggcctgagcctcaactggagcctgggggaccctggcatcgaggttgtggatgtggccaccgggcgtgtgaaggccaatgccgccctggggcctccctcccgtctctgcaaggcctcctttctccgggcctttcaccaggcggccagggctgtggggaagccctacctcctggccttgaagacctacgaggctgccaaggctgggccctaccaggaggctcgcaggcagctgtctctcctcctggaccagcagggcctgggggcttggccctcgaagccactggtgggcaaattcagaaactgaagccagcctcggcgggaccgaggtcccggagccaagctgtacccctgctgggggagtgccctatctgaggagcgttgtggggagaacatgggttgtgcggggtgaaactggggctggagggaaggaggagcctgctgtggttgggaggcggctgctgcacgtttgggcttgaataaagaagtatttctggtt

SEQ ID NO: 105146 - DNA, 1995 bp, Homo sapiens
  Payload ID: 630
  Gene Symbol: ADAD2
  Gene Name: adenosine deaminase domain containing 2
  Uniprot ID: Q8NCV1
  ENST ID: ENST00000315906
  CDS Start-End: 53-1804
ggcgagagcagcgcgagatagggcctagcgcctcagatcttcgttggcggccatggcttcggcttctcagggcgctgacgacgacggcagtcgtaggaagccccgcctggctgcatcgttgcagatcagcccccagccccgcccctggcgaccgctacccgcccaggcccaaagtgcctgggggcccgcgcccgcgcccgcgacgtatcgcgcggagggcgggtggccccaggtctcggtgttgagggacagtgggcctggggcaggggccggagtcggggaactgggggcagcccgggcgtgggaaaacttgggggaacagatggggaaggccccgagggtccctgtgcccccagcagggctcagcctgccgctcaaagacccacctgccagccaggccgtgtccttgctcacggagtacgcggccagcctgggcatcttcctgctcttccgggaggaccagccaccaggtccctgcttccccttctcggtgagcgcggaactggatggggtggtctgccctgcgggcactgcgaatagcaagacggaggccaaacagcaggcagcgctctctgccctctgctacatccggagtcagctggagaacccagagtccccccagacctccagccggcctccactggcccccctgagcgtagagaacatcctgacccatgagcagcgctgcgcagcgttggtgagcgccggctttgacctcctgttggacgagcgctcgccatactgggcctgtaaggggactgtggctggagtcatcctggagagggagatcccgcgtgccaggggccacgtgaaggagatctacaagctggtggctctgggcaccggcagcagctgctgtgctggctggctggagttctcgggccagcagctccacgactgccatggcctggtcatcgcccgcagggccctgctgaggttcttgttccggcagctcctgctggccacacaggggggccccaagggcaaggagcagtccgtgctggccccccagccagggcccggacccccattcaccctcaagccccgcgtcttcctgcacctctacatcagcaacacccccaagggcgcggcccgtgacatctacctgccccccacctcggaaggtggcctcccgcacagcccacccatgcgcctgcaggcccatgtgctcgggcagctgaagcctgtgtgctacgtggcgccctcgctctgtgacacccacgtgggctgcctgtcagccagtgacaagctggcacgctgggccgtgctggggctgggtggtgccctgctggcccacctggtgtccccactctacagcaccagcctcatcctggctgactcatgccacgaccctccgactctgagcagggccatccacacccggccctgcctggacagtgtcctggggccatgcctgccacctccctacgtccggaccgccctgcacctgtttgcagggcccccggtggccccttccgaacccacccctgacacctgccgtggcctgagcctcaactggagcctgggggaccctggcatcgaggttgtggatgtggccaccgggcgtgtgaaggccaatgccgccctggggcctccctcccgtctctgcaaggcctcctttctccgggcctttcaccaggcggccagggctgtggggaagccctacctcctggccttgaagacctacgaggctgccaaggctgggccctaccaggaggctcgcaggcagctgtctctcctcctggaccagcagggcctgggggcttggccctcgaagccactggtgggcaaattcagaaactgaagccagcctcggcgggaccgaggtcccggagccaagctgtacccctgctgggggagtgccctatctgaggagcgttgtggggagaacatgggttgtgcggggtgaaactggggctggagggaaggaggagcctgctgtggttgggaggcggctgctgcacgtttgggcttgaataaagaagtatttctggt

SEQ ID NO: 105147 - DNA, 801 bp, Homo sapiens
  Payload ID: 630
  Gene Symbol: ADAD2
  Gene Name: adenosine deaminase domain containing 2
  ENST ID: ENST00000567685
  CDS Start-End: 1-801
gggaactgggggcagcccgggcgtgggaaaacttgggggaacagatggggaaggccccgagggtccctgtgcccccagcagggctcagcctgccgctcaaagacccacctgccagccaggccgtgtccttgctcacggagtacgcggccagcctgggcatcttcctgctcttccgggaggaccagccaccaggtccctgcttccccttctcggtgagcgcggaactggatggggtggtctgccctgcgggcactgcgaatagcaagacggaggccaaacagcaggcagcgctctctgccctctgctacatccggagtcagctggagaacccagagaacatcctgacccatgagcagcgctgcgcagcgttggtgagcgccggctttgacctcctgttggacgagcgctcgccatactgggcctgtaaggggactgtggctggagtcatcctggagagggagatcccgcgtgccaggggccacgtgaaggagatctacaagctggtggctctgggcaccggcagcagctgctgtgctggctggctggagttctcgggccagcagctccacgactgccatggcctggtcatcgcccgcagggccctgctgaggttcttgttccggcagctcctgctggccacacaggggggccccaagggcaaggagcagtccgtgctggccccccagccagggcccggacccccattcaccctcaagccccgcgtcttcctgcacctctacatcagcaacacccccaagggcgcggcccgtgacatctacctgccccccacctcggaaggtg

SEQ ID NO: 105148 - DNA, 6515 bp, Homo sapiens
  Payload ID: 631
  Gene Symbol: ADAR
  Gene Name: adenosine deaminase, RNA-specific
  Uniprot ID: P55265
  ENST ID: ENST00000368471
  CDS Start-End: 981-3776
cccgactgaaggtagagaaggctacgtggtgggggagggtggggggagggtcgcggccgcactggcagtctccgggtgtccggccgtgtcccgaggaagtgcaagacccggggtattccctcagcggatactacacccatccatttcaaggctatgagcacagacagctcaggtaccagcagcctgggccaggatcttcccccagtagtttcctgcttaagcaaatagaatttctcaaggggcagctcccagaagcaccggtgattggaaagcagacaccgtcactgccaccttccctcccaggactccggccaaggtttccagtactacttgcctccagtaccagaggcaggcaagtggacatcaggggtgtccccaggggcgtgcatctcagaagtcaggggctccagagagggttccagcatccttcaccacgtggcaggagtctgccacagagaggtgttgattgcctttcctcacatttccaggaactgagtatctaccaagatcaggaacaaaggatcttaaagttcctggaagagcttggggaagggaaggccaccacagcacatgatctgtctgggaaacttgggactccgaagaaagaaatcaatcgagttttatactccctggcaaagaagggcaagctacagaaagaggcaggaacaccccctttgtggaaaatcgcggtctccactcaggcttggaaccagcacagcggagtggtaagaccagacggtcatagccaaggagccccaaactcagacccgagtttggaaccggaagacagaaactccacatctgtctcagaagatcttcttgagccttttattgcagtctcagctcaggcttggaaccagcacagcggagtggtaagaccagacagtcatagccaaggatccccaaactcagacccaggtttggaacctgaagacagcaactccacatctgccttggaagatcctcttgagtttttagacatggccgagatcaaggagaaaatctgcgactatctcttcaatgtgtctgactcctctgccctgaatttggctaaaaatattggccttaccaaggcccgagatataaatgctgtgctaattgacatggaaaggcagggggatgtctatagacaagggacaacccctcccatatggcatttgacagacaagaagcgagagaggatgcaaatcaagagaaatacgaacagtgttcctgaaaccgctccagctgcaatccctgagaccaaaagaaacgcagagttcctcacctgtaatatacccacatcaaatgcctcaaataacatggtaaccacagaaaaagtggagaatgggcaggaacctgtcataaagttagaaaacaggcaagaggccagaccagaaccagcaagactgaaaccacctgttcattacaatggcccctcaaaagcagggtatgttgactttgaaaatggccagtgggccacagatgacatcccagatgacttgaatagtatccgcgcagcaccaggtgagtttcgagccatcatggagatgccctccttctacagtcatggcttgccacggtgttcaccctacaagaaactgacagagtgccagctgaagaaccccatcagcgggctgttagaatatgcccagttcgctagtcaaacctgtgagttcaacatgatagagcagagtggaccaccccatgaacctcgatttaaattccaggttgtcatcaatggccgagagtttcccccagctgaagctggaagcaagaaagtggccaagcaggatgcagctatgaaagccatgacaattctgctagaggaagccaaagccaaggacagtggaaaatcagaagaatcatcccactattccacagagaaagaatcagagaagactgcagagtcccagacccccaccccttcagccacatccttcttttctgggaagagccccgtcaccacactgcttgagtgtatgcacaaattggggaactcctgcgaattccgtctcctgtccaaagaaggccctgcccatgaacccaagttccaatactgtgttgcagtgggagcccaaactttccccagtgtgagtgctcccagcaagaaagtggcaaagcagatggccgcagaggaagccatgaaggccctgcatggggaggcgaccaactccatggcttctgataaccagcctgaaggtatgatctcagagtcacttgataacttggaatccatgatgcccaacaaggtcaggaagattggcgagctcgtgagatacctgaacaccaaccctgtgggtggccttttggagtacgcccgctcccatggctttgctgctgaattcaagttggtcgaccagtccggacctcctcacgagcccaagttcgtttaccaagcaaaagttgggggtcgctggttcccagccgtctgcgcacacagcaagaagcaaggcaagcaggaagcagcagatgcggctctccgtgtcttgattggggagaacgagaaggcagaacgcatgggtttcacagaggtaaccccagtgacaggggccagtctcagaagaactatgctcctcctctcaaggtccccagaagcacagccaaagacactccctctcactggcagcaccttccatgaccagatagccatgctgagccaccggtgcttcaacactctgactaacagcttccagccctccttgctcggccgcaagattctggccgccatcattatgaaaaaagactctgaggacatgggtgtcgtcgtcagcttgggaacagggaatcgctgtgtgaaaggagattctctcagcctaaaaggagaaactgtcaatgactgccatgcagaaataatctcccggagaggcttcatcaggtttctctacagtgagttaatgaaatacaactcccagactgcgaaggatagtatatttgaacctgctaagggaggagaaaagctccaaataaaaaagactgtgtcattccatctgtatatcagcactgctccgtgtggagatggcgccctctttgacaagtcctgcagcgaccgtgctatggaaagcacagaatcccgccactaccctgtcttcgagaatcccaaacaaggaaagctccgcaccaaggtggagaacggagaaggcacaatccctgtggaatccagtgacattgtgcctacgtgggatggcattcggctcggggagagactccgtaccatgtcctgtagtgacaaaatcctacgctggaacgtgctgggcctgcaaggggcactgttgacccacttcctgcagcccatttatctcaaatctgtcacattgggttaccttttcagccaagggcatctgacccgtgctatttgctgtcgtgtgacaagagatgggagtgcatttgaggatggactacgacatccctttattgtcaaccaccccaaggttggcagagtcagcatatatgattccaaaaggcaatccgggaagactaaggagacaagcgtcaactggtgtctggctgatggctatgacctggagatcctggacggtaccagaggcactgtggatgggccacggaatgaattgtcccgggtctccaaaaagaacatttttcttctatttaagaagctctgctccttccgttaccgcagggatctactgagactctcctatggtgaggccaagaaagctgcccgtgactacgagacggccaagaactacttcaaaaaaggcctgaaggatatgggctatgggaactggattagcaaaccccaggaggaaaagaacttttatctctgcccagtatagtatgctccagtgacagatggattagggtgtgtcatactagggtgtgagagaggtaggtcgtagcattcctcatcacatggtcaggggatttttttttctcctttttttttctttttaagccataattggtgatactgaaaactttgggttcccatttatcctgctttctttgggattgctaggcaaggtctggccaggccccccttttttcccccaagtgaagaggcagaaacctaagaagttatcttttctttctacccaaagcatacatagtcactgagcacctgcggtccatttcctcttaaaagttttgttttgatttgtttccatttcctttccctttgtgtttgctacactgacctcttgcggtcttgattaggtttcagtcaactctggatcatgtcagggactgataatttcatttgtggattacgcagacccctctacttcccctctttcccttctgagattctttccttgtgatctgaatgtctccttttccccctcagagggcaaagaggtgaacataaaggatttggtgaaacatttgtaagggtaggagttgaaaactgcagttcccagtgccacggaagtgtgattggagcctgcagataatgcccagccatcctcccatcctgcactttagccagctgcagggcgggcaaggcaaggaaagctgcttccctggaagtgtatcactttctccggcagctgggaagtctagaaccagccagactgggttaagggagctgctcaagcaatagcagaggtttcacccggcaggatgacacagaccacttcccagggagcacgggcatgccttggaatattgccaagcttccagctgcctcttctcctaaagcattcctaggaatattttccccgccaatgctgggcgtacaccctagccaacgggacaaatcctagagggtataaaatcatctctgctcagataatcatgacttagcaagaataagggcaaaaaatcctgttggcttaacgtcactgttccacccggtgtaatatctctcatgacagtgacaccaagggaagttgactaagtcacatgtaaattaggagtgttttaaagaatgccatagatgttgattcttaactgctacagataacctgtaattgagcagatttaaaattcaggcatacttttccatttatccaagtgctttcatttttccagatggcttcagaagtaggctcgtgggcagggcgcagacctgatctttatagggttgacatagaaagcagtagttgtgggtgaaagggcaggttgtcttcaaactctgtgaggtagaatcctttgtctatacctccatgaacattgactcgtgtgttcagagcctttggcctctctgtggagtctggctctctggctcctgtgcattctttgaatagtcactcgtaaaaactgtcagtgcttgaaactgtttcctttactcatgttgaagggactttgttggcttttagagtgttggtcatgactccaagagcagagcagggaagagcccaagcatagacttggtgccgtggtgatggctgcagtccagttttgtgatgctgcttttacgtgtccctcgataacagtcagctagacacactcaggaggactactgaggctctgcgaccttcaggagctgagcctgcctctctcctttagatgacagaccttcatctgggaacgtgctgagccagcaccctcagatgatttccctccaaactgctgactaggtcatcctctgtctggtagagacattcacatctttgcttttattctatgctctctgtacttttgaccaaaaattgaccaaagtaagaaaatgcaagttctaaaaatagactaaggatgcctttgcagaacaccaaagcatcccaaggaactggtagggaagtggcgcctgtctcctggagtggaagaggcctgctccctggctctgggtctgctgggggcacagtaaatcagtcttggcacccacatccagggcagagaggtctgtggttctcagcatcagaaggcagcgcagcccctctcctcttcaggctacagggttgtcacctgctgagtcctcaggttgtttggcctctctggtccatcttgggcattaggttctccagcagagctctggccagctgcctcttctttaactgggaacacaggctctcacaagatcagaacccccactcacccccaagatcttatctagcaagcctgtagtattcagtttctgttgtaggaagagagcgaggcatccctgaattccacgcatctgctggaaacgagccgtgtcagatcgcacatccctgcgcccccatgcccctctgagtcacacaggacagaggaggcagagcttctgcccactgttatcttcactttctttgtccagtcttttgtttttaataagcagtgaccctccctactcttctttttaatgatttttgtagttgatttgtctgaactgtggctactgtgcattccttgaataatcacttgtaaaaattgtcagtgcttgaagctgtttcctttactcacattgaagggacttcgttggttttttggagtcttggttgtgactccaagagcagagtgaggaagacccccaagcatagactcgggtactgtgatgatggctgcagtccagttttatgattctgcttttatgtgtcccttgataacagtgacttaacaatatacattcctcataaataaaaaaaaaacaagaatctgaa

SEQ ID NO: 105149 - DNA, 6625 bp, Homo sapiens
  Payload ID: 631
  Gene Symbol: ADAR
  Gene Name: adenosine deaminase, RNA-specific
  Uniprot ID: P55265
  ENST ID: ENST00000368474
  CDS Start-End: 201-3881
gaggaaacgaaagcgaaattgaaccggagccatcttgggcccggcgcgcagacccgcggagtttcccgtgccgacgccccggggccacttccagtgcggagtagcggaggcgtgggggcctcgaggggctggcgcggcccagcggtcgggccagggtcgtgccgccggcgggtcgggccgggcaatgcctcgcgggcgcaatgaatccgcggcaggggtattccctcagcggatactacacccatccatttcaaggctatgagcacagacagctcaggtaccagcagcctgggccaggatcttcccccagtagtttcctgcttaagcaaatagaatttctcaaggggcagctcccagaagcaccggtgattggaaagcagacaccgtcactgccaccttccctcccaggactccggccaaggtttccagtactacttgcctccagtaccagaggcaggcaagtggacatcaggggtgtccccaggggcgtgcatctcagaagtcaggggctccagagagggttccagcatccttcaccacgtggcaggagtctgccacagagaggtgttgattgcctttcctcacatttccaggaactgagtatctaccaagatcaggaacaaaggatcttaaagttcctggaagagcttggggaagggaaggccaccacagcacatgatctgtctgggaaacttgggactccgaagaaagaaatcaatcgagttttatactccctggcaaagaagggcaagctacagaaagaggcaggaacaccccctttgtggaaaatcgcggtctccactcaggcttggaaccagcacagcggagtggtaagaccagacggtcatagccaaggagccccaaactcagacccgagtttggaaccggaagacagaaactccacatctgtctcagaagatcttcttgagccttttattgcagtctcagctcaggcttggaaccagcacagcggagtggtaagaccagacagtcatagccaaggatccccaaactcagacccaggtttggaacctgaagacagcaactccacatctgccttggaagatcctcttgagtttttagacatggccgagatcaaggagaaaatctgcgactatctcttcaatgtgtctgactcctctgccctgaatttggctaaaaatattggccttaccaaggcccgagatataaatgctgtgctaattgacatggaaaggcagggggatgtctatagacaagggacaacccctcccatatggcatttgacagacaagaagcgagagaggatgcaaatcaagagaaatacgaacagtgttcctgaaaccgctccagctgcaatccctgagaccaaaagaaacgcagagttcctcacctgtaatatacccacatcaaatgcctcaaataacatggtaaccacagaaaaagtggagaatgggcaggaacctgtcataaagttagaaaacaggcaagaggccagaccagaaccagcaagactgaaaccacctgttcattacaatggcccctcaaaagcagggtatgttgactttgaaaatggccagtgggccacagatgacatcccagatgacttgaatagtatccgcgcagcaccaggtgagtttcgagccatcatggagatgccctccttctacagtcatggcttgccacggtgttcaccctacaagaaactgacagagtgccagctgaagaaccccatcagcgggctgttagaatatgcccagttcgctagtcaaacctgtgagttcaacatgatagagcagagtggaccaccccatgaacctcgatttaaattccaggttgtcatcaatggccgagagtttcccccagctgaagctggaagcaagaaagtggccaagcaggatgcagctatgaaagccatgacaattctgctagaggaagccaaagccaaggacagtggaaaatcagaagaatcatcccactattccacagagaaagaatcagagaagactgcagagtcccagacccccaccccttcagccacatccttcttttctgggaagagccccgtcaccacactgcttgagtgtatgcacaaattggggaactcctgcgaattccgtctcctgtccaaagaaggccctgcccatgaacccaagttccaatactgtgttgcagtgggagcccaaactttccccagtgtgagtgctcccagcaagaaagtggcaaagcagatggccgcagaggaagccatgaaggccctgcatggggaggcgaccaactccatggcttctgataaccagcctgaaggtatgatctcagagtcacttgataacttggaatccatgatgcccaacaaggtcaggaagattggcgagctcgtgagatacctgaacaccaaccctgtgggtggccttttggagtacgcccgctcccatggctttgctgctgaattcaagttggtcgaccagtccggacctcctcacgagcccaagttcgtttaccaagcaaaagttgggggtcgctggttcccagccgtctgcgcacacagcaagaagcaaggcaagcaggaagcagcagatgcggctctccgtgtcttgattggggagaacgagaaggcagaacgcatgggtttcacagaggtaaccccagtgacaggggccagtctcagaagaactatgctcctcctctcaaggtccccagaagcacagccaaagacactccctctcactggcagcaccttccatgaccagatagccatgctgagccaccggtgcttcaacactctgactaacagcttccagccctccttgctcggccgcaagattctggccgccatcattatgaaaaaagactctgaggacatgggtgtcgtcgtcagcttgggaacagggaatcgctgtgtgaaaggagattctctcagcctaaaaggagaaactgtcaatgactgccatgcagaaataatctcccggagaggcttcatcaggtttctctacagtgagttaatgaaatacaactcccagactgcgaaggatagtatatttgaacctgctaagggaggagaaaagctccaaataaaaaagactgtgtcattccatctgtatatcagcactgctccgtgtggagatggcgccctctttgacaagtcctgcagcgaccgtgctatggaaagcacagaatcccgccactaccctgtcttcgagaatcccaaacaaggaaagctccgcaccaaggtggagaacggagaaggcacaatccctgtggaatccagtgacattgtgcctacgtgggatggcattcggctcggggagagactccgtaccatgtcctgtagtgacaaaatcctacgctggaacgtgctgggcctgcaaggggcactgttgacccacttcctgcagcccatttatctcaaatctgtcacattgggttaccttttcagccaagggcatctgacccgtgctatttgctgtcgtgtgacaagagatgggagtgcatttgaggatggactacgacatccctttattgtcaaccaccccaaggttggcagagtcagcatatatgattccaaaaggcaatccgggaagactaaggagacaagcgtcaactggtgtctggctgatggctatgacctggagatcctggacggtaccagaggcactgtggatgggccacggaatgaattgtcccgggtctccaaaaagaacatttttcttctatttaagaagctctgctccttccgttaccgcagggatctactgagactctcctatggtgaggccaagaaagctgcccgtgactacgagacggccaagaactacttcaaaaaaggcctgaaggatatgggctatgggaactggattagcaaaccccaggaggaaaagaacttttatctctgcccagtatagtatgctccagtgacagatggattagggtgtgtcatactagggtgtgagagaggtaggtcgtagcattcctcatcacatggtcaggggatttttttttctcctttttttttctttttaagccataattggtgatactgaaaactttgggttcccatttatcctgctttctttgggattgctaggcaaggtctggccaggccccccttttttcccccaagtgaagaggcagaaacctaagaagttatcttttctttctacccaaagcatacatagtcactgagcacctgcggtccatttcctcttaaaagttttgttttgatttgtttccatttcctttccctttgtgtttgctacactgacctcttgcggtcttgattaggtttcagtcaactctggatcatgtcagggactgataatttcatttgtggattacgcagacccctctacttcccctctttcccttctgagattctttccttgtgatctgaatgtctccttttccccctcagagggcaaagaggtgaacataaaggatttggtgaaacatttgtaagggtaggagttgaaaactgcagttcccagtgccacggaagtgtgattggagcctgcagataatgcccagccatcctcccatcctgcactttagccagctgcagggcgggcaaggcaaggaaagctgcttccctggaagtgtatcactttctccggcagctgggaagtctagaaccagccagactgggttaagggagctgctcaagcaatagcagaggtttcacccggcaggatgacacagaccacttcccagggagcacgggcatgccttggaatattgccaagcttccagctgcctcttctcctaaagcattcctaggaatattttccccgccaatgctgggcgtacaccctagccaacgggacaaatcctagagggtataaaatcatctctgctcagataatcatgacttagcaagaataagggcaaaaaatcctgttggcttaacgtcactgttccacccggtgtaatatctctcatgacagtgacaccaagggaagttgactaagtcacatgtaaattaggagtgttttaaagaatgccatagatgttgattcttaactgctacagataacctgtaattgagcagatttaaaattcaggcatacttttccatttatccaagtgctttcatttttccagatggcttcagaagtaggctcgtgggcagggcgcagacctgatctttatagggttgacatagaaagcagtagttgtgggtgaaagggcaggttgtcttcaaactctgtgaggtagaatcctttgtctatacctccatgaacattgactcgtgtgttcagagcctttggcctctctgtggagtctggctctctggctcctgtgcattctttgaatagtcactcgtaaaaactgtcagtgcttgaaactgtttcctttactcatgttgaagggactttgttggcttttagagtgttggtcatgactccaagagcagagcagggaagagcccaagcatagacttggtgccgtggtgatggctgcagtccagttttgtgatgctgcttttacgtgtccctcgataacagtcagctagacacactcaggaggactactgaggctctgcgaccttcaggagctgagcctgcctctctcctttagatgacagaccttcatctgggaacgtgctgagccagcaccctcagatgatttccctccaaactgctgactaggtcatcctctgtctggtagagacattcacatctttgcttttattctatgctctctgtacttttgaccaaaaattgaccaaagtaagaaaatgcaagttctaaaaatagactaaggatgcctttgcagaacaccaaagcatcccaaggaactggtagggaagtggcgcctgtctcctggagtggaagaggcctgctccctggctctgggtctgctgggggcacagtaaatcagtcttggcacccacatccagggcagagaggtctgtggttctcagcatcagaaggcagcgcagcccctctcctcttcaggctacagggttgtcacctgctgagtcctcaggttgtttggcctctctggtccatcttgggcattaggttctccagcagagctctggccagctgcctcttctttaactgggaacacaggctctcacaagatcagaacccccactcacccccaagatcttatctagcaagcctgtagtattcagtttctgttgtaggaagagagcgaggcatccctgaattccacgcatctgctggaaacgagccgtgtcagatcgcacatccctgcgcccccatgcccctctgagtcacacaggacagaggaggcagagcttctgcccactgttatcttcactttctttgtccagtcttttgtttttaataagcagtgaccctccctactcttctttttaatgatttttgtagttgatttgtctgaactgtggctactgtgcattccttgaataatcacttgtaaaaattgtcagtgcttgaagctgtttcctttactcacattgaagggacttcgttggttttttggagtcttggttgtgactccaagagcagagtgaggaagacccccaagcatagactcgggtactgtgatgatggctgcagtccagttttatgattctgcttttatgtgtcccttgataacagtgacttaacaatatacattcctcataaataaaaaaaaaacaagaatctgaattctt

SEQ ID NO: 105150 - DNA, 3585 bp, Homo sapiens
  Payload ID: 631
  Gene Symbol: ADAR
  Gene Name: adenosine deaminase, RNA-specific
  ENST ID: ENST00000529168
  CDS Start-End: 1-3585
gggtattccctcagcggatactacacccatccatttcaaggctatgagcacagacagctcaggtaccagcagcctgggccaggatcttcccccagtagtttcctgcttaagcaaatagaatttctcaaggggcagctcccagaagcaccggtgattggaaagcagacaccgtcactgccaccttccctcccaggactccggccaaggtttccagtactacttgcctccagtaccagaggcaggcaagtggacatcaggggtgtccccaggggcgtgcatctcagaagtcaggggctccagagagggttccagcatccttcaccacgtggcaggagtctgccacagagaggtgttgattgcctttcctcacatttccaggaactgagtatctaccaagatcaggaacaaaggatcttaaagttcctggaagagcttggggaagggaaggccaccacagcacatgatctgtctgggaaacttgggactccgaagaaagaaatcaatcgagttttatactccctggcaaagaagggcaagctacagaaagaggcaggaacaccccctttgtggaaaatcgcggtctccactcaggcttggaaccagcacagcggagtggtaagaccagacggtcatagccaaggagccccaaactcagacccgagtttggaaccggaagacagaaactccacatctgtctcagaagatcttcttgagccttttattgcagtctcagctcaggcttggaaccagcacagcggagtggtaagaccagacagtcatagccaaggatccccaaactcagacccaggtttggaacctgaagacagcaactccacatctgccttggaagatcctcttgagtttttagacatggccgagatcaaggagaaaatctgcgactatctcttcaatgtgtctgactcctctgccctgaatttggctaaaaatattggccttaccaaggcccgagatataaatgctgtgctaattgacatggaaaggcagggggatgtctatagacaagggacaacccctcccatatggcatttgacagacaagaagcgagagaggatgcaaatcaagagaaatacgaacagtgttcctgaaaccgctccagctgcaatccctgagaccaaaagaaacgcagagttcctcacctgtaatatacccacatcaaatgcctcaaataacatggtaaccacagaaaaagtggagaatgggcaggaacctgtcataaagttagaaaacaggcaagaggccagaccagaaccagcaagactgaaaccacctgttcattacaatggcccctcaaaagcagggtatgttgactttgaaaatggccagtgggccacagatgacatcccagatgacttgaatagtatccgcgcagcaccaggtgagtttcgagccatcatggagatgccctccttctacagtcatggcttgccacggtgttcaccctacaagaaactgacagagtgccagctgaagaaccccatcagcgggctgttagaatatgcccagttcgctagtcaaacctgtgagttcaacatgatagagcagagtggaccaccccatgaacctcgatttaaattccaggttgtcatcaatggccgagagtttcccccagctgaagctggaagcaagaaagtggccaagcaggatgcagctatgaaagccatgacaattctgctagaggaagccaaagccaaggacagtggaaaatcagaagaatcatcccactattccacagagaaagaatcagagaagactgcagagtcccagacccccaccccttcagccacatccttcttttctgggaagagccccgtcaccacactgcttgagtgtatgcacaaattggggaactcctgcgaattccgtctcctgtccaaagaaggccctgcccatgaacccaagttccaatactgtgttgcagtgggagcccaaactttccccagtgtgagtgctcccagcaagaaagtggcaaagcagatggccgcagaggaagccatgaaggccctgcatggggaggcgaccaactccatggcttctgataaccagcctgaaggtatgatctcagagtcacttgataacttggaatccatgatgcccaacaaggtcaggaagattggcgagctcgtgagatacctgaacaccaaccctgtgggtggccttttggagtacgcccgctcccatggctttgctgctgaattcaagttggtcgaccagtccggacctcctcacgagcccaagttcgtttaccaagcaaaagttgggggtcgctggttcccagccgtctgcgcacacagcaagaagcaaggcaagcaggaagcagcagatgcggctctccgtgtcttgattggggagaacgagaaggcagaacgcatgggtttcacagagctccctctcactggcagcaccttccatgaccagatagccatgctgagccaccggtgcttcaacactctgactaacagcttccagccctccttgctcggccgcaagattctggccgccatcattatgaaaaaagactctgaggacatgggtgtcgtcgtcagcttgggaacagggaatcgctgtgtgaaaggagattctctcagcctaaaaggagaaactgtcaatgactgccatgcagaaataatctcccggagaggcttcatcaggtttctctacagtgagttaatgaaatacaactcccagactgcgaaggatagtatatttgaacctgctaagggaggagaaaagctccaaataaaaaagactgtgtcattccatctgtatatcagcactgctccgtgtggagatggcgccctctttgacaagtcctgcagcgaccgtgctatggaaagcacagaatcccgccactaccctgtcttcgagaatcccaaacaaggaaagctccgcaccaaggtggagaacggagaaggcacaatccctgtggaatccagtgacattgtgcctacgtgggatggcattcggctcggggagagactccgtaccatgtcctgtagtgacaaaatcctacgctggaacgtgctgggcctgcaaggggcactgttgacccacttcctgcagcccatttatctcaaatctgtcacattgggttaccttttcagccaagggcatctgacccgtgctatttgctgtcgtgtgacaagagatgggagtgcatttgaggatggactacgacatccctttattgtcaaccaccccaaggttggcagagtcagcatatatgattccaaaaggcaatccgggaagactaaggagacaagcgtcaactggtgtctggctgatggctatgacctggagatcctggacggtaccagaggcactgtggatgggccacggaatgaattgtcccgggtctccaaaaagaacatttttcttctatttaagaagctctgctccttccgttaccgcagggatctactgagactctcctatggtgaggccaagaaagctgcccgtgactacgagacggccaagaactacttcaaaaaaggcctgaaggatatgggctatgggaactggattagcaaaccccaggaggaaaagaacttttatctctgcccagta

SEQ ID NO: 105151 - DNA, 6882 bp, Homo sapiens
  Payload ID: 632
  Gene Symbol: ADARB1
  Gene Name: adenosine deaminase, RNA-specific, B1
  Uniprot ID: P78563
  ENST ID: ENST00000348831
  CDS Start-End: 414-2519
gcggcggcggcggcggcggcggcagcggcggccaagcggccaggttggcggccggggctccgggccgcgcgaggccacggccacgccgcgccgctgcgcacaaccaacgaggcagagcgccgcccggcgcgagactgcggccgaagcgtggggcgcgcgtgcggaggaccaggcgcggcgcggctgcggctgagagtggagcctttcaggctggcatggagagcttaaggggcaactgaaggagacacactggccaagcgcggagttctgcttacttcagtcctgctgagatactctctcagtccgctcgcaccgaaggaagctgccttgggatcagagcagacataaagctagaaaaatttcaagacagaaacagtctccgccagtcaagaaaccctcaaaagtattttgccatggatatagaagatgaagaaaacatgagttccagcagcactgatgtgaaggaaaaccgcaatctggacaacgtgtcccccaaggatggcagcacacctgggcctggcgagggctctcagctctccaatgggggtggtggtggccccggcagaaagcggcccctggaggagggcagcaatggccactccaagtaccgcctgaagaaaaggaggaaaacaccagggcccgtcctccccaagaacgccctgatgcagctgaatgagatcaagcctggtttgcagtacacactcctgtcccagactgggcccgtgcacgcgcctttgtttgtcatgtctgtggaggtgaatggccaggtttttgagggctctggtcccacaaagaaaaaggcaaaactccatgctgctgagaaggccttgaggtctttcgttcagtttcctaatgcctctgaggcccacctggccatggggaggaccctgtctgtcaacacggacttcacatctgaccaggccgacttccctgacacgctcttcaatggttttgaaactcctgacaaggcggagcctcccttttacgtgggctccaatggggatgactccttcagttccagcggggacctcagcttgtctgcttccccggtgcctgccagcctagcccagcctcctctccctgtcttaccaccattcccacccccgagtgggaagaatcccgtgatgatcttgaacgaactgcgcccaggactcaagtatgacttcctctccgagagcggggagagccatgccaagagcttcgtcatgtctgtggtcgtggatggtcagttctttgaaggctcggggagaaacaagaagcttgccaaggcccgggctgcgcagtctgccctggccgccatttttaacttgcacttggatcagacgccatctcgccagcctattcccagtgagggtcttcagctgcatttaccgcaggttttagctgacgctgtctcacgcctggtcctgggtaagtttggtgacctgaccgacaacttctcctcccctcacgctcgcagaaaagtgctggctggagtcgtcatgacaacaggcacagatgttaaagatgccaaggtgataagtgtttctacaggaacaaaatgtattaatggtgaatacatgagtgatcgtggccttgcattaaatgactgccatgcagaaataatatctcggagatccttgctcagatttctttatacacaacttgagctttacttaaataacaaagatgatcaaaaaagatccatctttcagaaatcagagcgaggggggtttaggctgaaggagaatgtccagtttcatctgtacatcagcacctctccctgtggagatgccagaatcttctcaccacatgagccaatcctggaagaaccagcagatagacacccaaatcgtaaagcaagaggacagctacggaccaaaatagagtctggtgaggggacgattccagtgcgctccaatgcgagcatccaaacgtgggacggggtgctgcaaggggagcggctgctcaccatgtcctgcagtgacaagattgcacgctggaacgtggtgggcatccagggatccctgctcagcattttcgtggagcccatttacttctcgagcatcatcctgggcagcctttaccacggggaccacctttccagggccatgtaccagcggatctccaacatagaggacctgccacctctctacaccctcaacaagcctttgctcagtggcatcagcaatgcagaagcacggcagccagggaaggcccccaacttcagtgtcaactggacggtaggcgactccgctattgaggtcatcaacgccacgactgggaaggatgagctgggccgcgcgtcccgcctgtgtaagcacgcgttgtactgtcgctggatgcgtgtgcacggcaaggttccctcccacttactacgctccaagattaccaagcccaacgtgtaccatgagtccaagctggcggcaaaggagtaccaggccgccaaggcgcgtctgttcacagccttcatcaaggcggggctgggggcctgggtggagaagcccaccgagcaggaccagttctcactcacgccctgacccgggcagacatgatggggggtgcagggggctgtgggcatccagcgtcatcctccagaacctcacatctgaactgggggcaggtgcataccttggggagggagtagggggacacgggggaccaccaggtgtccacggttgtccccagcatctcacatcagacctggggcaggtgcgcagtgtggggaggggatggggtgcgtcagggcccagcatcgccgcctggcatctctctgccgcagcatttccccttctgaaccgtccagtgactgctttcaatctcggtttacgtttagaaattgagttctactgagtagggcttccttaagtttaggaaaatagaaattactttgtgtgaaattcttgaataaataatttattcagagctaggaatgtggtttataaaataggaagtaattgtgtcaggtcacttttatgccacattattttaattgcaaaaaagcatctatatatggaggagggtgggaaaatagaggtaggaaatagtagcctaaaggaaatcgccacacgtctgtctaaacttaggtctcttttctccgtaggtacctccctgggtagttccacacactaggttgtaacagtctctccctgaggagcagactcccagcatggtgtagcgtggccctgtcatgcacatggggtcccgcagcagtgactgtgtgtcctgcagaggcgtgacccaggcccctgtagccctcagcctcctctagaagcttctgtactccttgtaggatcagatcatggaaaacttttctcagtttacttctaagtaatcacagataatacatggccagtaatcccaggctggccattcattcaggttttttaaaggatatttaacttttatggactagaaggaatcacgagggctactgcacaatacatggcctaagttccctctgttccttcctctgaatcgaatggatgtgggtgaccgcccgaaggccttcacaggatggaagtagaatgatttcagtagatactcattcttggaaaatgccatagttttaaattattgtttccagctttatcaaagacatgtttgaaaaataaaaagcatccaagtgagagctggtgagaccacgtgctgctggcgtagtgtaggccagacattgacagtcctgacgggagctcagggctgcccagcgcccagcgtgcacgggacggccccacgacagagggagtcagcccgggaggtcaggagcgcggcgggcgagggccctgtgtggaccacctccaccaagctcagagatttgcaccaggtgccttgttgcctccgctcaggatgaaagaggagctgagagaagtgctctgcctgccagtgcagtgcccagctccaaggctctagagggtgttcaggtgggtctcctggggccatggggagagattggtgcagaccttaccccacagcatacacctgccacagcgaaatccagggtgttggcacctgtgtgtccgtgatgagcctaggaaaccagagcaggggcagaggggcgtcatcctcccaccggacgctgggagctcagaccccaaaactgaaacaccgtggcttcggcggggggtgtgcctcctgatgtcaggagccccatccacgtgtgtccacacagatctcgtcgcagcacggcaggaaggggtgctgcttagggctcattgttggggacatgaccgggttcagcggctagaacatctgccccacagcagcctcctcctccaccgaagagggtagttgtctccctgaagcagtcacagcaggcgtctctgccgctccgtcaccacagtggggttttgttcaggcagatcgcgctggggttctgcacctgcagaaggagaggggtctgttgtcgctggctttcccccaagcaggctcttgcacactctagaaaaaacaccttgtaagtctgtgcatttttattgtcttgataaattgtatttttttctaatggggattgggagatggacttcgtttttaaaaatatgtggattttggttaccaagtttagtgttaatatattccatatacatacaaaactacccggtatgtctggcttttcccttctgtcaggtaatagctaaagtcagcatgattgctccctgtaccaccccaaataagtgagtgcctcaccttgtggggcctgagcagctaccttgagaccatgtgaggtggcacctttccggggtggactcgtgcggccttgaggacaggcacagggcaccctatcccaagccgtccaggcaggaggaaggcagccaaggcaactgggttctgggagccctgggtggggcagctgtggggaggaactgggttcggggagccctgggcggggcggctgttggggggaactgggttcggggtgccctgggcagggggctactggggggcggctgtgaggaggagttgggttcagggagccctgggcggggtggctgtcagggggaactgggttccgggagccctgggccggggcagggggcggctgtaggaaggaactggtttcggggagccctgggcggggcggctgtggggaggaaggtgacgtgcaggggaccagaggctctgcactgctcctaggacagctcatctgtaatcagaaaaaaaataaacaaaatacagaacgctgactcctccgtgagacagatcggggaccttagcactttaatccctcccttctgagcgctcggtgtgcacttttagactatagctgtttcattgacgtgtcactctccatccagtgtccttgatgtggcttttagagacttagcagaaaattcgacacaagcaggaacttgattttttaagaaaaaatattacattttgaggacattttgacaagtaggggaagagagggcttctgttgttttgttttgttttgttttgttaactaaacctgaagtattaattccacaaagacactgtccctcaggaccactcaggtacagctctgccagggacagagtcctgctagtgggaggtctcaggtggggcggtgtgttctgtgccatgaggcagcgacaggtccagatggatgtcgtcaccaccttcctcagctctcatcacctggtcgtacgccaggcccacctcttcccagcaagggacgccaaagaactgcagtttttattctgagtcttaatttaacttttcatcatcttttcctattttggagaattttttgtaattaaaagcaattattttaaaatgtgcaagccagtatctcacaaggcatggatttctgtggaatttatttttattcaaataaccatatttatctccaggctgtggaatcgccactttctttgtgaagacagtgtctctccttgtaatctcacacaggtacactgaggaggggacggctccgtcttcacattgtgcacagatctgaggatgggattagcgaagctgtggagactgcacatccggacctgcccatgtctcaaaacaaacacatgtacagtggctctttttccttctcaaacactttaccccagaagcaggtggtctgccccaggcataaagaaggaaaattggccatctttcccacctctaaattctgtaaaattatagacttgctcaaaagattcctttttatcatccccacgctgtgtaagtggaaagggcattgtgttccgtgtgtgtccagtttacagcgtctctgccccctagcgtgttttgtgacaatctccctgggtgaggagtgggtgcacccagccccgaggccagtggttgctcggggccttccgtgtgagttctagtgttcacttgatgccggggaatagaattagagaaaactctgacctgccgggttccagggactggtggaggtggatggcaggtccgactcgaccatgacttagttgtaagggtgtgtcggctttttcagtctcatgtgaaaatcctcctgtctctggcagcactgtctgcactttcttgtttactgtttgaagggacgagtaccaagccacaagaacacttcttttggccacagcataagctgatggtatgtaaggaaccgatgggccattaaacatgaactgaacggttaaaagcacagtctatggaacgctaatggagtcagcccctaaagctgtttgctttttcaggctttggattacatgcttttaatttgattttagaatctggacactttctatgaatgtaattcggctgagaaacatgttgctgagatgcaatcctcagtgttctctgtatgtaaatctgtgtatacaccacacgttacaactgcatgagcttcctctcgcacaagaccagctggaactgagcatgagacgctgtcaaatacagacaaaggatttgagatgttctcaataaaaagaaaatgtttcacta

SEQ ID NO: 105152 - DNA, 6604 bp, Homo sapiens
  Payload ID: 632
  Gene Symbol: ADARB1
  Gene Name: adenosine deaminase, RNA-specific, B1
  Uniprot ID: P78563
  ENST ID: ENST00000360697
  CDS Start-End: 16-2241
caaaagtattttgccatggatatagaagatgaagaaaacatgagttccagcagcactgatgtgaaggaaaaccgcaatctggacaacgtgtcccccaaggatggcagcacacctgggcctggcgagggctctcagctctccaatgggggtggtggtggccccggcagaaagcggcccctggaggagggcagcaatggccactccaagtaccgcctgaagaaaaggaggaaaacaccagggcccgtcctccccaagaacgccctgatgcagctgaatgagatcaagcctggtttgcagtacacactcctgtcccagactgggcccgtgcacgcgcctttgtttgtcatgtctgtggaggtgaatggccaggtttttgagggctctggtcccacaaagaaaaaggcaaaactccatgctgctgagaaggccttgaggtctttcgttcagtttcctaatgcctctgaggcccacctggccatggggaggaccctgtctgtcaacacggacttcacatctgaccaggccgacttccctgacacgctcttcaatggttttgaaactcctgacaaggcggagcctcccttttacgtgggctccaatggggatgactccttcagttccagcggggacctcagcttgtctgcttccccggtgcctgccagcctagcccagcctcctctccctgtcttaccaccattcccacccccgagtgggaagaatcccgtgatgatcttgaacgaactgcgcccaggactcaagtatgacttcctctccgagagcggggagagccatgccaagagcttcgtcatgtctgtggtcgtggatggtcagttctttgaaggctcggggagaaacaagaagcttgccaaggcccgggctgcgcagtctgccctggccgccatttttaacttgcacttggatcagacgccatctcgccagcctattcccagtgagggtcttcagctgcatttaccgcaggttttagctgacgctgtctcacgcctggtcctgggtaagtttggtgacctgaccgacaacttctcctcccctcacgctcgcagaaaagtgctggctggagtcgtcatgacaacaggcacagatgttaaagatgccaaggtgataagtgtttctacaggaacaaaatgtattaatggtgaatacatgagtgatcgtggccttgcattaaatgactgccatgcagaaataatatctcggagatccttgctcagatttctttatacacaacttgagctttacttaaataacaaagatgatcaaaaaagatccatctttcagaaatcagagcgaggggggtttaggctgaaggagaatgtccagtttcatctgtacatcagcacctctccctgtggagatgccagaatcttctcaccacatgagccaatcctggaagggtctcgctcttacacccaggctggagtgcagtggtgcaatcatggctcactgcagcctcgacctcctgggctcttaagcgatccttccacctcaaccttccaaggagctgggactacagaaccagcagatagacacccaaatcgtaaagcaagaggacagctacggaccaaaatagagtctggtgaggggacgattccagtgcgctccaatgcgagcatccaaacgtgggacggggtgctgcaaggggagcggctgctcaccatgtcctgcagtgacaagattgcacgctggaacgtggtgggcatccagggatccctgctcagcattttcgtggagcccatttacttctcgagcatcatcctgggcagcctttaccacggggaccacctttccagggccatgtaccagcggatctccaacatagaggacctgccacctctctacaccctcaacaagcctttgctcagtggcatcagcaatgcagaagcacggcagccagggaaggcccccaacttcagtgtcaactggacggtaggcgactccgctattgaggtcatcaacgccacgactgggaaggatgagctgggccgcgcgtcccgcctgtgtaagcacgcgttgtactgtcgctggatgcgtgtgcacggcaaggttccctcccacttactacgctccaagattaccaagcccaacgtgtaccatgagtccaagctggcggcaaaggagtaccaggccgccaaggcgcgtctgttcacagccttcatcaaggcggggctgggggcctgggtggagaagcccaccgagcaggaccagttctcactcacgccctgacccgggcagacatgatggggggtgcagggggctgtgggcatccagcgtcatcctccagaacctcacatctgaactgggggcaggtgcataccttggggagggagtagggggacacgggggaccaccaggtgtccacggttgtccccagcatctcacatcagacctggggcaggtgcgcagtgtggggaggggatggggtgcgtcagggcccagcatcgccgcctggcatctctctgccgcagcatttccccttctgaaccgtccagtgactgctttcaatctcggtttacgtttagaaattgagttctactgagtagggcttccttaagtttaggaaaatagaaattactttgtgtgaaattcttgaataaataatttattcagagctaggaatgtggtttataaaataggaagtaattgtgtcaggtcacttttatgccacattattttaattgcaaaaaagcatctatatatggaggagggtgggaaaatagaggtaggaaatagtagcctaaaggaaatcgccacacgtctgtctaaacttaggtctcttttctccgtaggtacctccctgggtagttccacacactaggttgtaacagtctctccctgaggagcagactcccagcatggtgtagcgtggccctgtcatgcacatggggtcccgcagcagtgactgtgtgtcctgcagaggcgtgacccaggcccctgtagccctcagcctcctctagaagcttctgtactccttgtaggatcagatcatggaaaacttttctcagtttacttctaagtaatcacagataatacatggccagtaatcccaggctggccattcattcaggttttttaaaggatatttaacttttatggactagaaggaatcacgagggctactgcacaatacatggcctaagttccctctgttccttcctctgaatcgaatggatgtgggtgaccgcccgaaggccttcacaggatggaagtagaatgatttcagtagatactcattcttggaaaatgccatagttttaaattattgtttccagctttatcaaagacatgtttgaaaaataaaaagcatccaagtgagagctggtgagaccacgtgctgctggcgtagtgtaggccagacattgacagtcctgacgggagctcagggctgcccagcgcccagcgtgcacgggacggccccacgacagagggagtcagcccgggaggtcaggagcgcggcgggcgagggccctgtgtggaccacctccaccaagctcagagatttgcaccaggtgccttgttgcctccgctcaggatgaaagaggagctgagagaagtgctctgcctgccagtgcagtgcccagctccaaggctctagagggtgttcaggtgggtctcctggggccatggggagagattggtgcagaccttaccccacagcatacacctgccacagcgaaatccagggtgttggcacctgtgtgtccgtgatgagcctaggaaaccagagcaggggcagaggggcgtcatcctcccaccggacgctgggagctcagaccccaaaactgaaacaccgtggcttcggcggggggtgtgcctcctgatgtcaggagccccatccacgtgtgtccacacagatctcgtcgcagcacggcaggaaggggtgctgcttagggctcattgttggggacatgaccgggttcagcggctagaacatctgccccacagcagcctcctcctccaccgaagagggtagttgtctccctgaagcagtcacagcaggcgtctctgccgctccgtcaccacagtggggttttgttcaggcagatcgcgctggggttctgcacctgcagaaggagaggggtctgttgtcgctggctttcccccaagcaggctcttgcacactctagaaaaaacaccttgtaagtctgtgcatttttattgtcttgataaattgtatttttttctaatggggattgggagatggacttcgtttttaaaaatatgtggattttggttaccaagtttagtgttaatatattccatatacatacaaaactacccggtatgtctggcttttcccttctgtcaggtaatagctaaagtcagcatgattgctccctgtaccaccccaaataagtgagtgcctcaccttgtggggcctgagcagctaccttgagaccatgtgaggtggcacctttccggggtggactcgtgcggccttgaggacaggcacagggcaccctatcccaagccgtccaggcaggaggaaggcagccaaggcaactgggttctgggagccctgggtggggcagctgtggggaggaactgggttcggggagccctgggcggggcggctgttggggggaactgggttcggggtgccctgggcagggggctactggggggcggctgtgaggaggagttgggttcagggagccctgggcggggtggctgtcagggggaactgggttccgggagccctgggccggggcagggggcggctgtaggaaggaactggtttcggggagccctgggcggggcggctgtggggaggaaggtgacgtgcaggggaccagaggctctgcactgctcctaggacagctcatctgtaatcagaaaaaaaataaacaaaatacagaacgctgactcctccgtgagacagatcggggaccttagcactttaatccctcccttctgagcgctcggtgtgcacttttagactatagctgtttcattgacgtgtcactctccatccagtgtccttgatgtggcttttagagacttagcagaaaattcgacacaagcaggaacttgattttttaagaaaaaatattacattttgaggacattttgacaagtaggggaagagagggcttctgttgttttgttttgttttgttttgttaactaaacctgaagtattaattccacaaagacactgtccctcaggaccactcaggtacagctctgccagggacagagtcctgctagtgggaggtctcaggtggggcggtgtgttctgtgccatgaggcagcgacaggtccagatggatgtcgtcaccaccttcctcagctctcatcacctggtcgtacgccaggcccacctcttcccagcaagggacgccaaagaactgcagtttttattctgagtcttaatttaacttttcatcatcttttcctattttggagaattttttgtaattaaaagcaattattttaaaatgtgcaagccagtatctcacaaggcatggatttctgtggaatttatttttattcaaataaccatatttatctccaggctgtggaatcgccactttctttgtgaagacagtgtctctccttgtaatctcacacaggtacactgaggaggggacggctccgtcttcacattgtgcacagatctgaggatgggattagcgaagctgtggagactgcacatccggacctgcccatgtctcaaaacaaacacatgtacagtggctctttttccttctcaaacactttaccccagaagcaggtggtctgccccaggcataaagaaggaaaattggccatctttcccacctctaaattctgtaaaattatagacttgctcaaaagattcctttttatcatccccacgctgtgtaagtggaaagggcattgtgttccgtgtgtgtccagtttacagcgtctctgccccctagcgtgttttgtgacaatctccctgggtgaggagtgggtgcacccagccccgaggccagtggttgctcggggccttccgtgtgagttctagtgttcacttgatgccggggaatagaattagagaaaactctgacctgccgggttccagggactggtggaggtggatggcaggtccgactcgaccatgacttagttgtaagggtgtgtcggctttttcagtctcatgtgaaaatcctcctgtctctggcagcactgtctgcactttcttgtttactgtttgaagggacgagtaccaagccacaagaacacttcttttggccacagcataagctgatggtatgtaaggaaccgatgggccattaaacatgaactgaacggttaaaagcacagtctatggaacgctaatggagtcagcccctaaagctgtttgctttttcaggctttggattacatgcttttaatttgattttagaatctggacactttctatgaatgtaattcggctgagaaacatgttgctgagatgcaatcctcagtgttctctgtatgtaaatctgtgtatacaccacacgttacaactgcatgagcttcctctcgcacaagaccagctggaactgagcatgagacgctgtcaaatacagacaaaggatttgagatgttctcaataaaaagaaaatgtttcacta

SEQ ID NO: 105153 - DNA, 3563 bp, Homo sapiens
  Payload ID: 632
  Gene Symbol: ADARB1
  Gene Name: adenosine deaminase, RNA-specific, B1
  Uniprot ID: P78563
  ENST ID: ENST00000389863
  CDS Start-End: 414-2558
gcggcggcggcggcggcggcggcagcggcggccaagcggccaggttggcggccggggctccgggccgcgcgaggccacggccacgccgcgccgctgcgcacaaccaacgaggcagagcgccgcccggcgcgagactgcggccgaagcgtggggcgcgcgtgcggaggaccaggcgcggcgcggctgcggctgagagtggagcctttcaggctggcatggagagcttaaggggcaactgaaggagacacactggccaagcgcggagttctgcttacttcagtcctgctgagatactctctcagtccgctcgcaccgaaggaagctgccttgggatcagagcagacataaagctagaaaaatttcaagacagaaacagtctccgccagtcaagaaaccctcaaaagtattttgccatggatatagaagatgaagaaaacatgagttccagcagcactgatgtgaaggaaaaccgcaatctggacaacgtgtcccccaaggatggcagcacacctgggcctggcgagggctctcagctctccaatgggggtggtggtggccccggcagaaagcggcccctggaggagggcagcaatggccactccaagtaccgcctgaagaaaaggaggaaaacaccagggcccgtcctccccaagaacgccctgatgcagctgaatgagatcaagcctggtttgcagtacacactcctgtcccagactgggcccgtgcacgcgcctttgtttgtcatgtctgtggaggtgaatggccaggtttttgagggctctggtcccacaaagaaaaaggcaaaactccatgctgctgagaaggccttgaggtctttcgttcagtttcctaatgcctctgaggcccacctggccatggggaggaccctgtctgtcaacacggacttcacatctgaccaggccgacttccctgacacgctcttcaatggttttgaaactcctgacaaggcggagcctcccttttacgtgggctccaatggggatgactccttcagttccagcggggacctcagcttgtctgcttccccggtgcctgccagcctagcccagcctcctctccctgtcttaccaccattcccacccccgagtgggaagaatcccgtgatgatcttgaacgaactgcgcccaggactcaagtatgacttcctctccgagagcggggagagccatgccaagagcttcgtcatgtctgtggtcgtggatggtcagttctttgaaggctcggggagaaacaagaagcttgccaaggcccgggctgcgcagtctgccctggccgccatttttaacttgcacttggatcagacgccatctcgccagcctattcccagtgagggtcttcagctgcatttaccgcaggttttagctgacgctgtctcacgcctggtcctgggtaagtttggtgacctgaccgacaacttctcctcccctcacgctcgcagaaaagtgctggctggagtcgtcatgacaacaggcacagatgttaaagatgccaaggtgataagtgtttctacaggaacaaaatgtattaatggtgaatacatgagtgatcgtggccttgcattaaatgactgccatgcagaaataatatctcggagatccttgctcagatttctttatacacaacttgagctttacttaaataacaaagatgatcaaaaaagatccatctttcagaaatcagagcgaggggggtttaggctgaaggagaatgtccagtttcatctgtacatcagcacctctccctgtggagatgccagaatcttctcaccacatgagccaatcctggaagggtctcgctcttacacccaggctggagtgcagtggtgcaatcatggctcactgcagcctcgacctcctgggctcttaagcgatccttccacctcaaccttccaaggagctgggactacagaaccagcagatagacacccaaatcgtaaagcaagaggacagctacggaccaaaatagagtctggtgaggggacgattccagtgcgctccaatgcgagcatccaaacgtgggacggggtgctgcaaggggagcggctgctcaccatgtcctgcagtgacaagattgcacgctggaacgtggtgggcatccagggatccctgctcagcattttcgtggagcccatttacttctcgagcatcatcctgggcagcctttaccacggggaccacctttccagggccatgtaccagcggatctccaacatagaggacctgccacctctctacaccctcaacaagcctttgctcagtggcatcagcaatgcagaagcacggcagccagggaaggcccccaacttcagtgtcaactggacggtaggcgactccgctattgaggtcatcaacgccacgactgggaaggatgagctgggccgcgcgtcccgcctgtgtaagcacgcgttgtactgtcgctggatgcgtgtgcacggcaaggttccctcccacttactacgctccaagattaccaagcccaacgtgtaccatgagtccaagctggcggcaaaggagtaccaggccgccaaggtacactgaggaggggacggctccgtcttcacattgtgcacagatctgaggatgggattagcgaagctgtggagactgcacatccggacctgcccatgtctcaaaacaaacacatgtacagtggctctttttccttctcaaacactttaccccagaagcaggtggtctgccccaggcataaagaaggaaaattggccatctttcccacctctaaattctgtaaaattatagacttgctcaaaagattcctttttatcatccccacgctgtgtaagtggaaagggcattgtgttccgtgtgtgtccagtttacagcgtctctgccccctagcgtgttttgtgacaatctccctgggtgaggagtgggtgcacccagccccgaggccagtggttgctcggggccttccgtgtgagttctagtgttcacttgatgccggggaatagaattagagaaaactctgacctgccgggttccagggactggtggaggtggatggcaggtccgactcgaccatgacttagttgtaagggtgtgtcggctttttcagtctcatgtgaaaatcctcctgtctctggcagcactgtctgcactttcttgtttactgtttgaagggacgagtaccaagccacaagaacacttcttttggccacagcataagctgatggtatgtaaggaaccgatgggccattaaacatgaactgaacggttaaaagcacagtctatggaacgctaatggagtcagcccctaaagctgtttgctttttcaggctttggattacatgcttttaatttgattttagaatctggacactttctatgaatgtaattcggctgagaaacatgttgctgagatgcaatcctcagtgttctctgtatgtaaatctgtgtatacaccacacgttacaactgcatgagcttcctctcgcacaagaccagctggaactgagcatgagacgctgtcaaatacagacaaaggatttgagatgttctcaataaaaagaaaatgtttcacta

SEQ ID NO: 105154 - DNA, 704 bp, Homo sapiens
  Payload ID: 632
  Gene Symbol: ADARB1
  Gene Name: adenosine deaminase, RNA-specific, B1
  ENST ID: ENST00000449478
  CDS Start-End: 280-704
aaatgtcgctgttcagtgcgttgatcgattctcacatctgaagccagctgtgtattcttgagtggagcctttcaggctggcatggagagcttaaggggcaactgaaggagacacactggccaagcgcggagttctgcttacttcagtcctgctgagatactctctcagtccgctcgcaccgaaggaagctgccttgggatcagagcagacataaagctagaaaaatttcaagacagaaacagtctccgccagtcaagaaaccctcaaaagtattttgccatggatatagaagatgaagaaaacatgagttccagcagcactgatgtgaaggaaaaccgcaatctggacaacgtgtcccccaaggatggcagcacacctgggcctggcgagggctctcagctctccaatgggggtggtggtggccccggcagaaagcggcccctggaggagggcagcaatggccactccaagtaccgcctgaagaaaaggaggaaaacaccagggcccgtcctccccaagaacgccctgatgcagctgaatgagatcaagcctggtttgcagtacacactcctgtcccagactgggcccgtgcacgcgcctttgtttgtcatgtctgtggaggtgaatggccaggtttttgagggctctggtcccacaaagaaaaaggcaaaactccatgctgctgagaaggccttgaggtcttt

SEQ ID NO: 105155 - DNA, 5032 bp, Homo sapiens
  Payload ID: 632
  Gene Symbol: ADARB1
  Gene Name: adenosine deaminase, RNA-specific, B1
  Uniprot ID: P78563
  ENST ID: ENST00000437626
  CDS Start-End: 414-2639
gcggcggcggcggcggcggcggcagcggcggccaagcggccaggttggcggccggggctccgggccgcgcgaggccacggccacgccgcgccgctgcgcacaaccaacgaggcagagcgccgcccggcgcgagactgcggccgaagcgtggggcgcgcgtgcggaggaccaggcgcggcgcggctgcggctgagagtggagcctttcaggctggcatggagagcttaaggggcaactgaaggagacacactggccaagcgcggagttctgcttacttcagtcctgctgagatactctctcagtccgctcgcaccgaaggaagctgccttgggatcagagcagacataaagctagaaaaatttcaagacagaaacagtctccgccagtcaagaaaccctcaaaagtattttgccatggatatagaagatgaagaaaacatgagttccagcagcactgatgtgaaggaaaaccgcaatctggacaacgtgtcccccaaggatggcagcacacctgggcctggcgagggctctcagctctccaatgggggtggtggtggccccggcagaaagcggcccctggaggagggcagcaatggccactccaagtaccgcctgaagaaaaggaggaaaacaccagggcccgtcctccccaagaacgccctgatgcagctgaatgagatcaagcctggtttgcagtacacactcctgtcccagactgggcccgtgcacgcgcctttgtttgtcatgtctgtggaggtgaatggccaggtttttgagggctctggtcccacaaagaaaaaggcaaaactccatgctgctgagaaggccttgaggtctttcgttcagtttcctaatgcctctgaggcccacctggccatggggaggaccctgtctgtcaacacggacttcacatctgaccaggccgacttccctgacacgctcttcaatggttttgaaactcctgacaaggcggagcctcccttttacgtgggctccaatggggatgactccttcagttccagcggggacctcagcttgtctgcttccccggtgcctgccagcctagcccagcctcctctccctgtcttaccaccattcccacccccgagtgggaagaatcccgtgatgatcttgaacgaactgcgcccaggactcaagtatgacttcctctccgagagcggggagagccatgccaagagcttcgtcatgtctgtggtcgtggatggtcagttctttgaaggctcggggagaaacaagaagcttgccaaggcccgggctgcgcagtctgccctggccgccatttttaacttgcacttggatcagacgccatctcgccagcctattcccagtgagggtcttcagctgcatttaccgcaggttttagctgacgctgtctcacgcctggtcctgggtaagtttggtgacctgaccgacaacttctcctcccctcacgctcgcagaaaagtgctggctggagtcgtcatgacaacaggcacagatgttaaagatgccaaggtgataagtgtttctacaggaacaaaatgtattaatggtgaatacatgagtgatcgtggccttgcattaaatgactgccatgcagaaataatatctcggagatccttgctcagatttctttatacacaacttgagctttacttaaataacaaagatgatcaaaaaagatccatctttcagaaatcagagcgaggggggtttaggctgaaggagaatgtccagtttcatctgtacatcagcacctctccctgtggagatgccagaatcttctcaccacatgagccaatcctggaagggtctcgctcttacacccaggctggagtgcagtggtgcaatcatggctcactgcagcctcgacctcctgggctcttaagcgatccttccacctcaaccttccaaggagctgggactacagaaccagcagatagacacccaaatcgtaaagcaagaggacagctacggaccaaaatagagtctggtgaggggacgattccagtgcgctccaatgcgagcatccaaacgtgggacggggtgctgcaaggggagcggctgctcaccatgtcctgcagtgacaagattgcacgctggaacgtggtgggcatccagggatccctgctcagcattttcgtggagcccatttacttctcgagcatcatcctgggcagcctttaccacggggaccacctttccagggccatgtaccagcggatctccaacatagaggacctgccacctctctacaccctcaacaagcctttgctcagtggcatcagcaatgcagaagcacggcagccagggaaggcccccaacttcagtgtcaactggacggtaggcgactccgctattgaggtcatcaacgccacgactgggaaggatgagctgggccgcgcgtcccgcctgtgtaagcacgcgttgtactgtcgctggatgcgtgtgcacggcaaggttccctcccacttactacgctccaagattaccaagcccaacgtgtaccatgagtccaagctggcggcaaaggagtaccaggccgccaaggcgcgtctgttcacagccttcatcaaggcggggctgggggcctgggtggagaagcccaccgagcaggaccagttctcactcacgccctgacccgggcagacatgatggggggtgcagggggctgtgggcatccagcgtcatcctccagaacctcacatctgaactgggggcaggtgcataccttggggagggagtagggggacacgggggaccaccaggtgtccacggttgtccccagcatctcacatcagacctggggcaggtgcgcagtgtggggaggggatggggtgcgtcagggcccagcatcgccgcctggcatctctctgccgcagcatttccccttctgaaccgtccagtgactgctttcaatctcggtttacgtttagaaattgagttctactgagtagggcttccttaagtttaggaaaatagaaattactttgtgtgaaattcttgaataaataatttattcagagctaggaatgtggtttataaaataggaagtaattgtgtcaggtcacttttatgccacattattttaattgcaaaaaagcatctatatatggaggagggtgggaaaatagaggtaggaaatagtagcctaaaggaaatcgccacacgtctgtctaaacttaggtctcttttctccgtaggtacctccctgggtagttccacacactaggttgtaacagtctctccctgaggagcagactcccagcatggtgtagcgtggccctgtcatgcacatggggtcccgcagcagtgactgtgtgtcctgcagaggcgtgacccaggcccctgtagccctcagcctcctctagaagcttctgtactccttgtaggatcagatcatggaaaacttttctcagtttacttctaagtaatcacagataatacatggccagtaatcccaggctggccattcattcaggttttttaaaggatatttaacttttatggactagaaggaatcacgagggctactgcacaatacatggcctaagttccctctgttccttcctctgaatcgaatggatgtgggtgaccgcccgaaggccttcacaggatggaagtagaatgatttcagtagatactcattcttggaaaatgccatagttttaaattattgtttccagctttatcaaagacatgtttgaaaaataaaaagcatccaagtgagagctggtgagaccacgtgctgctggcgtagtgtaggccagacattgacagtcctgacgggagctcagggctgcccagcgcccagcgtgcacgggacggccccacgacagagggagtcagcccgggaggtcaggagcgcggcgggcgagggccctgtgtggaccacctccaccaagctcagagatttgcaccaggtgccttgttgcctccgctcaggatgaaagaggagctgagagaagtgctctgcctgccagtgcagtgcccagctccaaggctctagagggtgttcaggtacactgaggaggggacggctccgtcttcacattgtgcacagatctgaggatgggattagcgaagctgtggagactgcacatccggacctgcccatgtctcaaaacaaacacatgtacagtggctctttttccttctcaaacactttaccccagaagcaggtggtctgccccaggcataaagaaggaaaattggccatctttcccacctctaaattctgtaaaattatagacttgctcaaaagattcctttttatcatccccacgctgtgtaagtggaaagggcattgtgttccgtgtgtgtccagtttacagcgtctctgccccctagcgtgttttgtgacaatctccctgggtgaggagtgggtgcacccagccccgaggccagtggttgctcggggccttccgtgtgagttctagtgttcacttgatgccggggaatagaattagagaaaactctgacctgccgggttccagggactggtggaggtggatggcaggtccgactcgaccatgacttagttgtaagggtgtgtcggctttttcagtctcatgtgaaaatcctcctgtctctggcagcactgtctgcactttcttgtttactgtttgaagggacgagtaccaagccacaagaacacttcttttggccacagcataagctgatggtatgtaaggaaccgatgggccattaaacatgaactgaacggttaaaagcacagtctatggaacgctaatggagtcagcccctaaagctgtttgctttttcaggctttggattacatgcttttaatttgattttagaatctggacactttctatgaatgtaattcggctgagaaacatgttgctgagatgcaatcctcagtgttctctgtatgtaaatctgtgtatacaccacacgttacaactgcatgagcttcctctcgcacaagaccagctggaactgagcatgagacgctgtcaaatacagacaaaggatttgagatgttctcaataaaaagaaaatgtttcact

SEQ ID NO: 105156 - DNA, 5033 bp, Homo sapiens
  Payload ID: 632
  Gene Symbol: ADARB1
  Gene Name: adenosine deaminase, RNA-specific, B1
  Uniprot ID: P78563
  ENST ID: ENST00000496664
  CDS Start-End: 414-2639
gcggcggcggcggcggcggcggcagcggcggccaagcggccaggttggcggccggggctccgggccgcgcgaggccacggccacgccgcgccgctgcgcacaaccaacgaggcagagcgccgcccggcgcgagactgcggccgaagcgtggggcgcgcgtgcggaggaccaggcgcggcgcggctgcggctgagagtggagcctttcaggctggcatggagagcttaaggggcaactgaaggagacacactggccaagcgcggagttctgcttacttcagtcctgctgagatactctctcagtccgctcgcaccgaaggaagctgccttgggatcagagcagacataaagctagaaaaatttcaagacagaaacagtctccgccagtcaagaaaccctcaaaagtattttgccatggatatagaagatgaagaaaacatgagttccagcagcactgatgtgaaggaaaaccgcaatctggacaacgtgtcccccaaggatggcagcacacctgggcctggcgagggctctcagctctccaatgggggtggtggtggccccggcagaaagcggcccctggaggagggcagcaatggccactccaagtaccgcctgaagaaaaggaggaaaacaccagggcccgtcctccccaagaacgccctgatgcagctgaatgagatcaagcctggtttgcagtacacactcctgtcccagactgggcccgtgcacgcgcctttgtttgtcatgtctgtggaggtgaatggccaggtttttgagggctctggtcccacaaagaaaaaggcaaaactccatgctgctgagaaggccttgaggtctttcgttcagtttcctaatgcctctgaggcccacctggccatggggaggaccctgtctgtcaacacggacttcacatctgaccaggccgacttccctgacacgctcttcaatggttttgaaactcctgacaaggcggagcctcccttttacgtgggctccaatggggatgactccttcagttccagcggggacctcagcttgtctgcttccccggtgcctgccagcctagcccagcctcctctccctgtcttaccaccattcccacccccgagtgggaagaatcccgtgatgatcttgaacgaactgcgcccaggactcaagtatgacttcctctccgagagcggggagagccatgccaagagcttcgtcatgtctgtggtcgtggatggtcagttctttgaaggctcggggagaaacaagaagcttgccaaggcccgggctgcgcagtctgccctggccgccatttttaacttgcacttggatcagacgccatctcgccagcctattcccagtgagggtcttcagctgcatttaccgcaggttttagctgacgctgtctcacgcctggtcctgggtaagtttggtgacctgaccgacaacttctcctcccctcacgctcgcagaaaagtgctggctggagtcgtcatgacaacaggcacagatgttaaagatgccaaggtgataagtgtttctacaggaacaaaatgtattaatggtgaatacatgagtgatcgtggccttgcattaaatgactgccatgcagaaataatatctcggagatccttgctcagatttctttatacacaacttgagctttacttaaataacaaagatgatcaaaaaagatccatctttcagaaatcagagcgaggggggtttaggctgaaggagaatgtccagtttcatctgtacatcagcacctctccctgtggagatgccagaatcttctcaccacatgagccaatcctggaagggtctcgctcttacacccaggctggagtgcagtggtgcaatcatggctcactgcagcctcgacctcctgggctcttaagcgatccttccacctcaaccttccaaggagctgggactacagaaccagcagatagacacccaaatcgtaaagcaagaggacagctacggaccaaaatagagtctggtgaggggacgattccagtgcgctccaatgcgagcatccaaacgtgggacggggtgctgcaaggggagcggctgctcaccatgtcctgcagtgacaagattgcacgctggaacgtggtgggcatccagggatccctgctcagcattttcgtggagcccatttacttctcgagcatcatcctgggcagcctttaccacggggaccacctttccagggccatgtaccagcggatctccaacatagaggacctgccacctctctacaccctcaacaagcctttgctcagtggcatcagcaatgcagaagcacggcagccagggaaggcccccaacttcagtgtcaactggacggtaggcgactccgctattgaggtcatcaacgccacgactgggaaggatgagctgggccgcgcgtcccgcctgtgtaagcacgcgttgtactgtcgctggatgcgtgtgcacggcaaggttccctcccacttactacgctccaagattaccaagcccaacgtgtaccatgagtccaagctggcggcaaaggagtaccaggccgccaaggcgcgtctgttcacagccttcatcaaggcggggctgggggcctgggtggagaagcccaccgagcaggaccagttctcactcacgccctgacccgggcagacatgatggggggtgcagggggctgtgggcatccagcgtcatcctccagaacctcacatctgaactgggggcaggtgcataccttggggagggagtagggggacacgggggaccaccaggtgtccacggttgtccccagcatctcacatcagacctggggcaggtgcgcagtgtggggaggggatggggtgcgtcagggcccagcatcgccgcctggcatctctctgccgcagcatttccccttctgaaccgtccagtgactgctttcaatctcggtttacgtttagaaattgagttctactgagtagggcttccttaagtttaggaaaatagaaattactttgtgtgaaattcttgaataaataatttattcagagctaggaatgtggtttataaaataggaagtaattgtgtcaggtcacttttatgccacattattttaattgcaaaaaagcatctatatatggaggagggtgggaaaatagaggtaggaaatagtagcctaaaggaaatcgccacacgtctgtctaaacttaggtctcttttctccgtaggtacctccctgggtagttccacacactaggttgtaacagtctctccctgaggagcagactcccagcatggtgtagcgtggccctgtcatgcacatggggtcccgcagcagtgactgtgtgtcctgcagaggcgtgacccaggcccctgtagccctcagcctcctctagaagcttctgtactccttgtaggatcagatcatggaaaacttttctcagtttacttctaagtaatcacagataatacatggccagtaatcccaggctggccattcattcaggttttttaaaggatatttaacttttatggactagaaggaatcacgagggctactgcacaatacatggcctaagttccctctgttccttcctctgaatcgaatggatgtgggtgaccgcccgaaggccttcacaggatggaagtagaatgatttcagtagatactcattcttggaaaatgccatagttttaaattattgtttccagctttatcaaagacatgtttgaaaaataaaaagcatccaagtgagagctggtgagaccacgtgctgctggcgtagtgtaggccagacattgacagtcctgacgggagctcagggctgcccagcgcccagcgtgcacgggacggccccacgacagagggagtcagcccgggaggtcaggagcgcggcgggcgagggccctgtgtggaccacctccaccaagctcagagatttgcaccaggtgccttgttgcctccgctcaggatgaaagaggagctgagagaagtgctctgcctgccagtgcagtgcccagctccaaggctctagagggtgttcaggtacactgaggaggggacggctccgtcttcacattgtgcacagatctgaggatgggattagcgaagctgtggagactgcacatccggacctgcccatgtctcaaaacaaacacatgtacagtggctctttttccttctcaaacactttaccccagaagcaggtggtctgccccaggcataaagaaggaaaattggccatctttcccacctctaaattctgtaaaattatagacttgctcaaaagattcctttttatcatccccacgctgtgtaagtggaaagggcattgtgttccgtgtgtgtccagtttacagcgtctctgccccctagcgtgttttgtgacaatctccctgggtgaggagtgggtgcacccagccccgaggccagtggttgctcggggccttccgtgtgagttctagtgttcacttgatgccggggaatagaattagagaaaactctgacctgccgggttccagggactggtggaggtggatggcaggtccgactcgaccatgacttagttgtaagggtgtgtcggctttttcagtctcatgtgaaaatcctcctgtctctggcagcactgtctgcactttcttgtttactgtttgaagggacgagtaccaagccacaagaacacttcttttggccacagcataagctgatggtatgtaaggaaccgatgggccattaaacatgaactgaacggttaaaagcacagtctatggaacgctaatggagtcagcccctaaagctgtttgctttttcaggctttggattacatgcttttaatttgattttagaatctggacactttctatgaatgtaattcggctgagaaacatgttgctgagatgcaatcctcagtgttctctgtatgtaaatctgtgtatacaccacacgttacaactgcatgagcttcctctcgcacaagaccagctggaactgagcatgagacgctgtcaaatacagacaaaggatttgagatgttctcaataaaaagaaaatgtttcacta

SEQ ID NO: 105157 - DNA, 4913 bp, Homo sapiens
  Payload ID: 632
  Gene Symbol: ADARB1
  Gene Name: adenosine deaminase, RNA-specific, B1
  Uniprot ID: P78563
  ENST ID: ENST00000492414
  CDS Start-End: 414-2519
gcggcggcggcggcggcggcggcagcggcggccaagcggccaggttggcggccggggctccgggccgcgcgaggccacggccacgccgcgccgctgcgcacaaccaacgaggcagagcgccgcccggcgcgagactgcggccgaagcgtggggcgcgcgtgcggaggaccaggcgcggcgcggctgcggctgagagtggagcctttcaggctggcatggagagcttaaggggcaactgaaggagacacactggccaagcgcggagttctgcttacttcagtcctgctgagatactctctcagtccgctcgcaccgaaggaagctgccttgggatcagagcagacataaagctagaaaaatttcaagacagaaacagtctccgccagtcaagaaaccctcaaaagtattttgccatggatatagaagatgaagaaaacatgagttccagcagcactgatgtgaaggaaaaccgcaatctggacaacgtgtcccccaaggatggcagcacacctgggcctggcgagggctctcagctctccaatgggggtggtggtggccccggcagaaagcggcccctggaggagggcagcaatggccactccaagtaccgcctgaagaaaaggaggaaaacaccagggcccgtcctccccaagaacgccctgatgcagctgaatgagatcaagcctggtttgcagtacacactcctgtcccagactgggcccgtgcacgcgcctttgtttgtcatgtctgtggaggtgaatggccaggtttttgagggctctggtcccacaaagaaaaaggcaaaactccatgctgctgagaaggccttgaggtctttcgttcagtttcctaatgcctctgaggcccacctggccatggggaggaccctgtctgtcaacacggacttcacatctgaccaggccgacttccctgacacgctcttcaatggttttgaaactcctgacaaggcggagcctcccttttacgtgggctccaatggggatgactccttcagttccagcggggacctcagcttgtctgcttccccggtgcctgccagcctagcccagcctcctctccctgtcttaccaccattcccacccccgagtgggaagaatcccgtgatgatcttgaacgaactgcgcccaggactcaagtatgacttcctctccgagagcggggagagccatgccaagagcttcgtcatgtctgtggtcgtggatggtcagttctttgaaggctcggggagaaacaagaagcttgccaaggcccgggctgcgcagtctgccctggccgccatttttaacttgcacttggatcagacgccatctcgccagcctattcccagtgagggtcttcagctgcatttaccgcaggttttagctgacgctgtctcacgcctggtcctgggtaagtttggtgacctgaccgacaacttctcctcccctcacgctcgcagaaaagtgctggctggagtcgtcatgacaacaggcacagatgttaaagatgccaaggtgataagtgtttctacaggaacaaaatgtattaatggtgaatacatgagtgatcgtggccttgcattaaatgactgccatgcagaaataatatctcggagatccttgctcagatttctttatacacaacttgagctttacttaaataacaaagatgatcaaaaaagatccatctttcagaaatcagagcgaggggggtttaggctgaaggagaatgtccagtttcatctgtacatcagcacctctccctgtggagatgccagaatcttctcaccacatgagccaatcctggaagaaccagcagatagacacccaaatcgtaaagcaagaggacagctacggaccaaaatagagtctggtgaggggacgattccagtgcgctccaatgcgagcatccaaacgtgggacggggtgctgcaaggggagcggctgctcaccatgtcctgcagtgacaagattgcacgctggaacgtggtgggcatccagggatccctgctcagcattttcgtggagcccatttacttctcgagcatcatcctgggcagcctttaccacggggaccacctttccagggccatgtaccagcggatctccaacatagaggacctgccacctctctacaccctcaacaagcctttgctcagtggcatcagcaatgcagaagcacggcagccagggaaggcccccaacttcagtgtcaactggacggtaggcgactccgctattgaggtcatcaacgccacgactgggaaggatgagctgggccgcgcgtcccgcctgtgtaagcacgcgttgtactgtcgctggatgcgtgtgcacggcaaggttccctcccacttactacgctccaagattaccaagcccaacgtgtaccatgagtccaagctggcggcaaaggagtaccaggccgccaaggcgcgtctgttcacagccttcatcaaggcggggctgggggcctgggtggagaagcccaccgagcaggaccagttctcactcacgccctgacccgggcagacatgatggggggtgcagggggctgtgggcatccagcgtcatcctccagaacctcacatctgaactgggggcaggtgcataccttggggagggagtagggggacacgggggaccaccaggtgtccacggttgtccccagcatctcacatcagacctggggcaggtgcgcagtgtggggaggggatggggtgcgtcagggcccagcatcgccgcctggcatctctctgccgcagcatttccccttctgaaccgtccagtgactgctttcaatctcggtttacgtttagaaattgagttctactgagtagggcttccttaagtttaggaaaatagaaattactttgtgtgaaattcttgaataaataatttattcagagctaggaatgtggtttataaaataggaagtaattgtgtcaggtcacttttatgccacattattttaattgcaaaaaagcatctatatatggaggagggtgggaaaatagaggtaggaaatagtagcctaaaggaaatcgccacacgtctgtctaaacttaggtctcttttctccgtaggtacctccctgggtagttccacacactaggttgtaacagtctctccctgaggagcagactcccagcatggtgtagcgtggccctgtcatgcacatggggtcccgcagcagtgactgtgtgtcctgcagaggcgtgacccaggcccctgtagccctcagcctcctctagaagcttctgtactccttgtaggatcagatcatggaaaacttttctcagtttacttctaagtaatcacagataatacatggccagtaatcccaggctggccattcattcaggttttttaaaggatatttaacttttatggactagaaggaatcacgagggctactgcacaatacatggcctaagttccctctgttccttcctctgaatcgaatggatgtgggtgaccgcccgaaggccttcacaggatggaagtagaatgatttcagtagatactcattcttggaaaatgccatagttttaaattattgtttccagctttatcaaagacatgtttgaaaaataaaaagcatccaagtgagagctggtgagaccacgtgctgctggcgtagtgtaggccagacattgacagtcctgacgggagctcagggctgcccagcgcccagcgtgcacgggacggccccacgacagagggagtcagcccgggaggtcaggagcgcggcgggcgagggccctgtgtggaccacctccaccaagctcagagatttgcaccaggtgccttgttgcctccgctcaggatgaaagaggagctgagagaagtgctctgcctgccagtgcagtgcccagctccaaggctctagagggtgttcaggtacactgaggaggggacggctccgtcttcacattgtgcacagatctgaggatgggattagcgaagctgtggagactgcacatccggacctgcccatgtctcaaaacaaacacatgtacagtggctctttttccttctcaaacactttaccccagaagcaggtggtctgccccaggcataaagaaggaaaattggccatctttcccacctctaaattctgtaaaattatagacttgctcaaaagattcctttttatcatccccacgctgtgtaagtggaaagggcattgtgttccgtgtgtgtccagtttacagcgtctctgccccctagcgtgttttgtgacaatctccctgggtgaggagtgggtgcacccagccccgaggccagtggttgctcggggccttccgtgtgagttctagtgttcacttgatgccggggaatagaattagagaaaactctgacctgccgggttccagggactggtggaggtggatggcaggtccgactcgaccatgacttagttgtaagggtgtgtcggctttttcagtctcatgtgaaaatcctcctgtctctggcagcactgtctgcactttcttgtttactgtttgaagggacgagtaccaagccacaagaacacttcttttggccacagcataagctgatggtatgtaaggaaccgatgggccattaaacatgaactgaacggttaaaagcacagtctatggaacgctaatggagtcagcccctaaagctgtttgctttttcaggctttggattacatgcttttaatttgattttagaatctggacactttctatgaatgtaattcggctgagaaacatgttgctgagatgcaatcctcagtgttctctgtatgtaaatctgtgtatacaccacacgttacaactgcatgagcttcctctcgcacaagaccagctggaactgagcatgagacgctgtcaaatacagacaaaggatttgagatgttctcaataaaaagaaaatgtttcacta

SEQ ID NO: 105158 - DNA, 159 bp, Homo sapiens
  Payload ID: 632
  Gene Symbol: ADARB1
  Gene Name: adenosine deaminase, RNA-specific, B1
  ENST ID: ENST00000611195
  CDS Start-End: 1-159
atggccaatgagcacaccctcattcatccagcgagcattgaggaccccctagaggccaggcccatgagtgatgaagatcccgaggatgaagacgccttgccagccaggtggaagaaagaaatgggaagaaaaaggaagagaaccatagctacgttgtga

SEQ ID NO: 105159 - DNA, 4583 bp, Homo sapiens
  Payload ID: 632
  Gene Symbol: ADARB1
  Gene Name: adenosine deaminase, RNA-specific, B1
  Uniprot ID: P78563
  ENST ID: ENST00000629643
  CDS Start-End: 1-2190
atgaagatcccgaggatgaagacgccttgccagccagacagaaacagtctccgccagtcaagaaaccctcaaaagtattttgccatggatatagaagatgaagaaaacatgagttccagcagcactgatgtgaaggaaaaccgcaatctggacaacgtgtcccccaaggatggcagcacacctgggcctggcgagggctctcagctctccaatgggggtggtggtggccccggcagaaagcggcccctggaggagggcagcaatggccactccaagtaccgcctgaagaaaaggaggaaaacaccagggcccgtcctccccaagaacgccctgatgcagctgaatgagatcaagcctggtttgcagtacacactcctgtcccagactgggcccgtgcacgcgcctttgtttgtcatgtctgtggaggtgaatggccaggtttttgagggctctggtcccacaaagaaaaaggcaaaactccatgctgctgagaaggccttgaggtctttcgttcagtttcctaatgcctctgaggcccacctggccatggggaggaccctgtctgtcaacacggacttcacatctgaccaggccgacttccctgacacgctcttcaatggttttgaaactcctgacaaggcggagcctcccttttacgtgggctccaatggggatgactccttcagttccagcggggacctcagcttgtctgcttccccggtgcctgccagcctagcccagcctcctctccctgtcttaccaccattcccacccccgagtgggaagaatcccgtgatgatcttgaacgaactgcgcccaggactcaagtatgacttcctctccgagagcggggagagccatgccaagagcttcgtcatgtctgtggtcgtggatggtcagttctttgaaggctcggggagaaacaagaagcttgccaaggcccgggctgcgcagtctgccctggccgccatttttaacttgcacttggatcagacgccatctcgccagcctattcccagtgagggtcttcagctgcatttaccgcaggttttagctgacgctgtctcacgcctggtcctgggtaagtttggtgacctgaccgacaacttctcctcccctcacgctcgcagaaaagtgctggctggagtcgtcatgacaacaggcacagatgttaaagatgccaaggtgataagtgtttctacaggaacaaaatgtattaatggtgaatacatgagtgatcgtggccttgcattaaatgactgccatgcagaaataatatctcggagatccttgctcagatttctttatacacaacttgagctttacttaaataacaaagatgatcaaaaaagatccatctttcagaaatcagagcgaggggggtttaggctgaaggagaatgtccagtttcatctgtacatcagcacctctccctgtggagatgccagaatcttctcaccacatgagccaatcctggaagaaccagcagatagacacccaaatcgtaaagcaagaggacagctacggaccaaaatagagtctggtgaggggacgattccagtgcgctccaatgcgagcatccaaacgtgggacggggtgctgcaaggggagcggctgctcaccatgtcctgcagtgacaagattgcacgctggaacgtggtgggcatccagggatccctgctcagcattttcgtggagcccatttacttctcgagcatcatcctgggcagcctttaccacggggaccacctttccagggccatgtaccagcggatctccaacatagaggacctgccacctctctacaccctcaacaagcctttgctcagtggcatcagcaatgcagaagcacggcagccagggaaggcccccaacttcagtgtcaactggacggtaggcgactccgctattgaggtcatcaacgccacgactgggaaggatgagctgggccgcgcgtcccgcctgtgtaagcacgcgttgtactgtcgctggatgcgtgtgcacggcaaggttccctcccacttactacgctccaagattaccaagcccaacgtgtaccatgagtccaagctggcggcaaaggagtaccaggccgccaaggcgcgtctgttcacagccttcatcaaggcggggctgggggcctgggtggagaagcccaccgagcaggaccagttctcactcacgccctgacccgggcagacatgatggggggtgcagggggctgtgggcatccagcgtcatcctccagaacctcacatctgaactgggggcaggtgcataccttggggagggagtagggggacacgggggaccaccaggtgtccacggttgtccccagcatctcacatcagacctggggcaggtgcgcagtgtggggaggggatggggtgcgtcagggcccagcatcgccgcctggcatctctctgccgcagcatttccccttctgaaccgtccagtgactgctttcaatctcggtttacgtttagaaattgagttctactgagtagggcttccttaagtttaggaaaatagaaattactttgtgtgaaattcttgaataaataatttattcagagctaggaatgtggtttataaaataggaagtaattgtgtcaggtcacttttatgccacattattttaattgcaaaaaagcatctatatatggaggagggtgggaaaatagaggtaggaaatagtagcctaaaggaaatcgccacacgtctgtctaaacttaggtctcttttctccgtaggtacctccctgggtagttccacacactaggttgtaacagtctctccctgaggagcagactcccagcatggtgtagcgtggccctgtcatgcacatggggtcccgcagcagtgactgtgtgtcctgcagaggcgtgacccaggcccctgtagccctcagcctcctctagaagcttctgtactccttgtaggatcagatcatggaaaacttttctcagtttacttctaagtaatcacagataatacatggccagtaatcccaggctggccattcattcaggttttttaaaggatatttaacttttatggactagaaggaatcacgagggctactgcacaatacatggcctaagttccctctgttccttcctctgaatcgaatggatgtgggtgaccgcccgaaggccttcacaggatggaagtagaatgatttcagtagatactcattcttggaaaatgccatagttttaaattattgtttccagctttatcaaagacatgtttgaaaaataaaaagcatccaagtgagagctggtgagaccacgtgctgctggcgtagtgtaggccagacattgacagtcctgacgggagctcagggctgcccagcgcccagcgtgcacgggacggccccacgacagagggagtcagcccgggaggtcaggagcgcggcgggcgagggccctgtgtggaccacctccaccaagctcagagatttgcaccaggtgccttgttgcctccgctcaggatgaaagaggagctgagagaagtgctctgcctgccagtgcagtgcccagctccaaggctctagagggtgttcaggtacactgaggaggggacggctccgtcttcacattgtgcacagatctgaggatgggattagcgaagctgtggagactgcacatccggacctgcccatgtctcaaaacaaacacatgtacagtggctctttttccttctcaaacactttaccccagaagcaggtggtctgccccaggcataaagaaggaaaattggccatctttcccacctctaaattctgtaaaattatagacttgctcaaaagattcctttttatcatccccacgctgtgtaagtggaaagggcattgtgttccgtgtgtgtccagtttacagcgtctctgccccctagcgtgttttgtgacaatctccctgggtgaggagtgggtgcacccagccccgaggccagtggttgctcggggccttccgtgtgagttctagtgttcacttgatgccggggaatagaattagagaaaactctgacctgccgggttccagggactggtggaggtggatggcaggtccgactcgaccatgacttagttgtaagggtgtgtcggctttttcagtctcatgtgaaaatcctcctgtctctggcagcactgtctgcactttcttgtttactgtttgaagggacgagtaccaagccacaagaacacttcttttggccacagcataagctgatggtatgtaaggaaccgatgggccattaaacatgaactgaacggttaaaagcacagtctatggaacgctaatggagtcagcccctaaagctgtttgctttttcaggctttggattacatgcttttaatttgattttagaatctggacactttctatgaatgtaattcggctgagaaacatgttgctgagatgcaatcctcagtgttctctgtatgtaaatctgtgtatacaccacacgttacaactgcatgagcttcctctcgcacaagaccagctggaactgagcatgagacgctgtcaaatacagacaaaggatttgagatgttctcaataaaaagaaaatgtttcact

SEQ ID NO: 105160 - DNA, 703 bp, Homo sapiens
  Payload ID: 633
  Gene Symbol: ADARB2
  Gene Name: adenosine deaminase, RNA-specific, B2 (non-functional)
  ENST ID: ENST00000381305
  CDS Start-End: 236-661
agaaaagagagcagcatttgttagcacacatgggcctgtggagcccagtcccaggcaacagtgtccccagagccccagtgatggctgggttgggtctggggcactcccagggagctccccaaggtggaacgtcctggggctgcagggcgcgctcctgtcccacttcgtggagcccgtgtacctgcagagcatcgtggtgggcagcctgcaccacacgggccacctcgcacgcgtcatgagccaccgcatggagggtgtcggccagctgcccgcctcctaccggcacaaccggcctctcctcagcggcgtgagtgacgccgaggcgcgccagccggggaagtcgccccccttcagcatgaactgggtcgtgggcagcgcggacctggagattatcaacgccaccactgggcggaggagctgtgggggcccatcccggctctgcaagcacgtgctgtctgcacggtgggcgcggctgtatggcaggctgagcacacggacacccagccctggagacacgccctccatgtactgtgaggccaagctgggggcgcacacctaccagtctgtgaaacagcagctgttcaaggcctttcagaaggctggcctgggcacctgggtgaggaaaccaccggagcagcagcagtttctactgactctctaggctgcgggctcctggctgctggagctgagcgggacgctggag

SEQ ID NO: 105161 - DNA, 1810 bp, Homo sapiens
  Payload ID: 633
  Gene Symbol: ADARB2
  Gene Name: adenosine deaminase, RNA-specific, B2 (non-functional)
  Uniprot ID: Q9NS39
  ENST ID: ENST00000381310
  CDS Start-End: 5-751
acacatgggcctgtggagcccagtcccaggcaacagtgtccccagagccccagtgatggctgggttgggtctggggcactcccagggagctccccaaggtccgcacgatgggaagactgacaggtcctcaggaccaggccgcagacggacagagaggaccaggctccctgggctcctgggtggggctccgctgactgctggctctccccacaggtggaacgtcctggggctgcagggcgcgctcctgtcccacttcgtggagcccgtgtacctgcagagcatcgtggtgggcagcctgcaccacacgggccacctcgcacgcgtcatgagccaccgcatggagggtgtcggccagctgcccgcctcctaccggcacaaccggcctctcctcagcggcgtgagtgacgccgaggcgcgccagccggggaagtcgccccccttcagcatgaactgggtcgtgggcagcgcggacctggagattatcaacgccaccactgggcggaggagctgtgggggcccatcccggctctgcaagcacgtgctgtctgcacggtgggcgcggctgtatggcaggctgagcacacggacacccagccctggagacacgccctccatgtactgtgaggccaagctgggggcgcacacctaccagtctgtgaaacagcagctgttcaaggcctttcagaaggctggcctgggcacctgggtgaggaaaccaccggagcagcagcagtttctactgactctctaggctgcgggctcctggctgctggagctgagcgggacgctggagggatgggaccgtgtctggggggcgacgtggcgggtcggccggttccctgcattcgttttactttggtgtcccagaaacacgcgagtgtgcaatgtttggacgagcaacaacacaaattcagaacgtgcctctttccagatcgctggccccagaaccctgtcccccacacccaggggcacatgcactgttgagttagcgccgactcttcctgtggagtctgagggaggggctccattcaggcaaaggggttttagctgcagccttggaaggaggcaccgacacgacaccaggcaggagtgagcctcaggccccgtccctgcaccccacccctgcgtgcgcctcttggtgatgctggggtctcactagcttgagggggcacatgaagataagccacaaatgaagagaaaagccatgcccaccccagccccagagaaaccaataagaatcctctattattttcactattcatttaggtttttatactccacctcctttcaaaaaagatttaagatgtacgacattaccgaacacctaaaatagaaccagagaaacgaaagccattcccacaaagtgaaggaacagtttccaaaacccctgcgaggcagagttaagacctgtgacgtggggagcctggaaacacccggcccacgcgtgctgcagatgtggggagcctggaaacacccggcccacgcgtgctgcagatgtggggagcctggaaacacccggcccacgcgtgctgcagatgtggggagtctggaaacacccggcccacgcgtgctgcagatgtggggagcccggaaacacctggcccatgcctgttcagtccgtcatggcgtttggtttatggtggccgatactaagagccactgaggtctgggttgtgtaagggttagctaccaccctataacctccctaccaggtaataaggagaccaagtctttgatcaaattctgattttttaactaaattttcattagaaagcaagcacaaaataaaatcaaaacaacctttaccttc

SEQ ID NO: 105162 - DNA, 8421 bp, Homo sapiens
  Payload ID: 633
  Gene Symbol: ADARB2
  Gene Name: adenosine deaminase, RNA-specific, B2 (non-functional)
  Uniprot ID: Q9NS39
  ENST ID: ENST00000381312
  CDS Start-End: 327-2546
tgcgctgggagcccagagcaggaggcagagcccgcgggaagctcggagcactcaggacgccgcgcgcccttccccgccctccctgaccagggagcagctcgctccaggcgcccagccgaggcccccagcccagtgggagcaagtcatagagaacaattcgagagacagagagacggagcgcgctttcctgctcagtcctgaaaagtgagccgctcccgggtttgcaacctcaagcttcgcagcagcggcggcggcggctgccgggaaggaggcaggtgcaggtgcaggagggaggcggctctgggctccgcgcctgggtctcggccatggcctcggtcctggggagcggcagagggtctggagggctgagcagtcaactcaaatgcaagtccaagaggaggaggaggcggaggtccaagcggaaagataaagtaagcatattgtcaaccttcctcgctcctttcaagcacctgagtcctggcatcacaaacacggaggatgacgacaccctcagtaccagcagcgcggaggtgaaggagaaccgcaacgtgggcaacctggccgcgcggccaccgccctccggggaccgggcccggggcggcgcgcccggcgcgaagaggaagcggccgctggaggaggggaatgggggccacttgtgcaaactgcagctggtctggaagaagctgtcgtggtcggtggcgcccaagaacgcgctggtgcagctgcacgagctgaggccgggcctgcagtaccggacagtgtcgcagacgggcccggtgcatgccccggtcttcgcggtagcggtggaggtgaacgggctcacgttcgagggcacaggccccaccaagaagaaggccaagatgcgcgcggcggagctggcactcaggtccttcgtgcagttccccaacgcctgccaggcgcacctggccatgggcgggggcccgggccccggcacggacttcacctccgaccaggccgatttccccgacacgctcttccaggagttcgagcccccggcgccgcgccccggactcgcgggaggccgccccggggacgccgcgcttctgtccgcggcctacgggcgacggcggctgctgtgccgcgcgctggacctggtgggcccgacccccgccacccccgcggccccgggcgagcgcaaccccgtggtgctgctgaaccgcctgcgcgccgggctgcgctacgtgtgtctggcagaaccggccgagcggcgcgcgcggagcttcgtgatggccgtgagcgtggacggcaggacgttcgagggctcggggcgcagcaagaagctggcccggggtcaggccgcgcaggccgcactgcaggagctgttcgacatccagatgcccggccacgcgcccggcagggccaggaggacgccaatgccgcaggaattcgcagactccatatcccagctggtcacacagaagttccgcgaggtgacgacggacctcacgcccatgcacgcccgccataaagcgctggcaggaatcgtcatgaccaaaggcctggatgctcggcaggcgcaggtcgtggccctgtcctcggggaccaagtgcatcagcggcgagcacctcagtgaccaggggctggtggtgaatgactgccacgcggaggtcgtggcccggcgggcgttcctgcacttcctctacacgcagctggagctgcacctgagcaagcggcgcgaggactcagagcgatcgatattcgtgcggttaaaagaaggtggctaccggctgcgagagaacatcctcttccatctctacgtgagcacctccccctgtggagacgcaagactccactctccctacgagatcaccacagacctgcacagcagcaaacacctcgtcaggaagttccgcgggcacctgcgcaccaagatcgagtccggggaagggacggtccccgtgcgtggccccagcgcagtgcagacctgggacggcgtcctgctgggggagcagctgatcaccatgtcctgcacggacaagatcgccaggtggaacgtcctggggctgcagggcgcgctcctgtcccacttcgtggagcccgtgtacctgcagagcatcgtggtgggcagcctgcaccacacgggccacctcgcacgcgtcatgagccaccgcatggagggtgtcggccagctgcccgcctcctaccggcacaaccggcctctcctcagcggcgtgagtgacgccgaggcgcgccagccggggaagtcgccccccttcagcatgaactgggtcgtgggcagcgcggacctggagattatcaacgccaccactgggcggaggagctgtgggggcccatcccggctctgcaagcacgtgctgtctgcacggtgggcgcggctgtatggcaggctgagcacacggacacccagccctggagacacgccctccatgtactgtgaggccaagctgggggcgcacacctaccagtctgtgaaacagcagctgttcaaggcctttcagaaggctggcctgggcacctgggtgaggaaaccaccggagcagcagcagtttctactgactctctaggctgcgggctcctggctgctggagctgagcgggacgctggagggatgggaccgtgtctggggggcgacgtggcgggtcggccggttccctgcattcgttttactttggtgtcccagaaacacgcgagtgtgcaatgtttggacgagcaacaacacaaattcagaacgtgcctctttccagatcgctggccccagaaccctgtcccccacacccaggggcacatgcactgttgagttagcgccgactcttcctgtggagtctgagggaggggctccattcaggcaaaggggttttagctgcagccttggaaggaggcaccgacacgacaccaggcaggagtgagcctcaggccccgtccctgcaccccacccctgcgtgcgcctcttggtgatgctggggtctcactagcttgagggggcacatgaagataagccacaaatgaagagaaaagccatgcccaccccagccccagagaaaccaataagaatcctctattattttcactattcatttaggtttttatactccacctcctttcaaaaaagatttaagatgtacgacattaccgaacacctaaaatagaaccagagaaacgaaagccattcccacaaagtgaaggaacagtttccaaaacccctgcgaggcagagttaagacctgtgacgtggggagcctggaaacacccggcccacgcgtgctgcagatgtggggagcctggaaacacccggcccacgcgtgctgcagatgtggggagcctggaaacacccggcccacgcgtgctgcagatgtggggagtctggaaacacccggcccacgcgtgctgcagatgtggggagcccggaaacacctggcccatgcctgttcagtccgtcatggcgtttggtttatggtggccgatactaagagccactgaggtctgggttgtgtaagggttagctaccaccctataacctccctaccaggtaataaggagaccaagtctttgatcaaattctgattttttaactaaattttcattagaaagcaagcacaaaataaaatcaaaacaacctttaccttcagcttgagaggctaccagctctctattctttcagattctccaatcaacaccttgcaggacaagaccccaaaaaagttcagctgtcaaaaaatgtaagaggcaggattctgtgaccctcagagcaggcttccaacaccagagaccttcagctcacagtggagatgggacatgggggctttagcccacagcatcatccctgagagccaaggcgctgtattcatacggggtcaggctcttttccaagtatctttacgtaatccatgtacctcgagctgctgtcatctcacctccgagaactcatttctaacattcatcatgctagatagccagtctctcatttctccaacttaaaaaatccatctctgaaattcatgacagtgatggcagacggcaaagcatggtggtgtccacctctggggtgtgggcttcccggaaagaatcccagctgaccaccccagaaagtgcaagaataacattgtgctgtacatagtcaagtgctataaattacagttatcataatgagaaggcagaaatgaaactgagttgtagctatttgttacaagataataagaagtagagatattagtatggaaaaagaaacttttcctgggatttaaaatcaggccaaatttatcactcgagttcttttagaaaagaaaacaggtactggagtagacaacttcttccagataaagtttcaaaagatacgagaacattttttcaaataaaggactcacattaatcttttataaaaatcacaaaaataaatgaaatcttaattcagtgcaaaagctaagctcaaacgaccagtttctattaagttctggtaacttgacatcactaggatgaagcttagagaacttagagtcgagaggtgatgggtggctcagacattcgcagcagtcagaagtgagcgctcccctgaatgcgtgggagcacggccagctcctggctgaagtctcccacccaggcctcaaatcaccttcatctgagatgttggctagagaagcatataatgctttgtcccagtgggctccaaatcacgctgtttctgcagcgagggggcctgtgttgtaagcagatttcactgtcacagggaagacgcagggtctgattcacgggactcggaaagcgctcggccacccagtggccagcatcatgaagccacagctggggggttgggattcgttttgtctcaggcattgaccttccagaaacaactcagactttactgaaatatcaacatccacatctggagaaagccacacattaattccatgctacccattagtacaagtgtatggattcgtgtattaagtccacaggagactccatggaaggagagattaaagctcttcagagaaggccgatagcgacagaagagtttccaatgcagccagagtgaggttgaggtgccggagcctttccgtggagggatctgtcagaggggatgtgggctgcagaggggaccccacgtaaggaaaggagggtcccaggccctgggtagtgaaaggagaaggtagtcgaggcagtcaagggtgaccctacacgcaggaggcacgccacaccagatcacgccacacgcaggctgctcccaactggcagggcctgacccagccaggaagggccaggtcctaggattccacagtgccaggagtgcccgaaggggccaggtcccaggattcccacagccccaggtgtgcctggaagacccgggtcccaggattcccacagccccagctatgcttgggggggccgagtcccaggattcccacagccccaggtgtgcctggaagacccgggtcccaggattcccacagccccaagagttcccggaagagctgggtcccaggattcccacagccccagctatgcttgggggggccgggtcccaggattcccacagccccaggtgtgcctggaagacccaggtcccaggattcccacagccctggatgtgcctggaggggctgtgccacctctgcagagatggaagggctcgtgttgaagcctgaggatttcgccctcaggtccaggtcagaacatcccagcaccactttcaggccatgtctgccctgcagttttgaccactgaattggtcttaagagtggccacccattcccctccaagtgagggggcaagacacaagtaggggacgggtcactttctgtcaccctgaaaatacgctgggcacgacacaagtaggggatgggtcactttctgtcaccctgaaaatacgctgggcacgacacaaggggggctgatgaagtcaggcccgcccctccaagtccacctcgaaatcaccgtctggcttcctcgcacttcccaccacctgacaccgccaagccccttgcttcagattttctgtggtctgtattcatacccttgcttcagattttctgtagtctatattcatgcctgcttaggcccctacaaaagtcctcataaaaccagcaccacctttatctgcctccaaaacacacactgctttcccatcaggaagatcagcaatgtggtttccggcctggttcttagtcaaaaagttagtgtctggtggtttctggcctttttgcaggacggggcgcagggaacggctgcgcggccaggcagcctccgctgtccacctccagccccggttttgcagccgtgtgtgatatcaagggatagagttagggtttctgtgggttttgtttttgctgaggaaaggatgtgcaggtcgatagctattgtttcctttccattcctgtgattctctttacatctgtatatatctatcacaccatgctgactttgtgatgagtcctgttcctcagaaacatcaagctgggttccttttcaaagaaacacacagatcatatttctccatctcattttgttttcacagggagcttttcttatcaacaaagtcgcatgcttttttttttggatataatgtttatcacgtctggagagccataaacagtaaatacagaggatatcaatgcccagaatagttattttgatgaaatcctatttttagataataaatttcaagatgtgtctatagtgtattgtttaaaacaactgaagacatttgagacgtacataaagtagacatttttaatttagggaaacttatatgcccttttttaagaagccattctaataaaataatctgactaattggcccaaaatacaataagtatcactttctaacagagaccaaagggaagctgagaggctttccttttatgtactaccgttggatcgctgcagccgcctctcataacacccaacagaacccggtgaggctctgtgggcttcccgcggccctcagggaggctgcagagtcccctagtccatgtcagggagccgccatcccacatacctccaaagcctgtcctcgcctgcagtttttgcagagctcgcggttggaggtggaaatttagaagccctgtgttgcaggagaggcagtagcacccccaggcagctcttagcagggacagaccaccccccgcctcgctggtattttagggtcttttggtattttgccactgtgtggggctaggcgggtggctggaggacacggtgtaggccttgccgctgtctgggttcctcgccactgcaggagcagggctgtttctggaaacactgggctgctggtgacccgtcaaacttctcccacaaattctgaatccgagaaagtgaaggaaggatggtggggaagtgaggaggcaggagcagaggccacagggaccaaccagagatgcggtggagacagaggagcttccttctcaggctgtttctgggaagcctgagaggcggccagcaccaccctccgctcactctcccctcagcctcttcgcttcccttctcaaccctttctctcctcctcgcctcttccctttcttgctgtcttgttagtccctgtcccaaaactcctggctcctttgttctgctgccgtggcccccacccaggaggaggtctcaggcaccatccccccacgagggatccacacaacaggttcatgctggggctgggggagccccgctgggttcctgatgccttgtgcacagggagttgctgcagtcatttttggactctcctgaatgtgtccacatgttctgacctcccaccagaaggaacgctggtggccacatctctagagatctatttacttttttgagaccggcttatgagattggctaatttttgtatttttggtagagatggggtctcaccatgttgcccaggctagtctcgaactcctggcctcaagtgatctgcccacctcggcctcccagagtgctgggattacaggcatgagccaccgcgctggcctctagagattcacaccaaacaatatcactcctgcgggaaccgcagacagatcaaaccctggtgagaggaacactttatttcccaactcatcatcctaagccaaggttggagggatgagcattccctaaacaccaaggcgagatcacctggtcccagtgcctcttttcacacaggccctagatttctatctctctgcagtttatgcatcggtaaaaaaaaaaaaatctctcccagtgtgccccgttagttttcagcattttgtaagcaaaatgaacttaacacatagtaattctaattgaaggtatgtacataaaaagcatgatagaatggcaatattgtatcaatggatgtacatttgtaatatttgtaaaaaaaaatccaaaaccttaaaatatgaatttacatgttaatttgcctctaagttctataaattgcacttcagtgatatctaataagtgaatgtttctgttaagtaaataaaaatattcagtaaaa

SEQ ID NO: 105163 - DNA, 1869 bp, Homo sapiens
  Payload ID: 634
  Gene Symbol: ADAT1
  Gene Name: adenosine deaminase, tRNA-specific 1
  Uniprot ID: Q9BUB4
  ENST ID: ENST00000307921
  CDS Start-End: 147-1655
gtgacgtcacgtccgccttaccggcggattaagctcgctttcttctaggcgcgtttcctgaaggtcgatggccaggtggtcttcataaactatactgccttgtgatgcctccctagaaatgagaggtctcaataccagctcagaccatgtggaccgcggatgagattgctcagctatgctatgaacactatgggatcaggctgcccaagaaggggaagcctgagccaaaccatgagtggacattattggcagcggtggtgaagatacaatctccagctgacaaggcctgcgacacccctgataagccggtgcaagtgacaaaggaagttgtgtcaatgggaacaggaacaaaatgcataggacagtccaaaatgaggaagaacggagacatcctcaatgatagccatgctgaggtcatagccagaaggagtttccaaaggtaccttctccaccaactccagttggcagccaccctgaaagaggatagcatctttgtcccaggaactcaaaaaggagtgtggaaacttagacgagacctcatttttgtgtttttctccagccatacaccctgtggggatgcctccatcattccgatgcttgagtttgaagatcagccttgctgtcctgtcttcagaaattgggcccacaactcatcagtagaagccagtagtaacctggaagctcctggaaatgaaagaaaatgtgaagaccctgacagtcctgtaaccaaaaagatgaggcttgagcctgggactgcagccagggaggtcaccaacggagcagctcaccatcagagttttggcaagcagaaaagtggcccaatctcaccaggcatccacagctgtgatctcactgtagagggactggctactgtcaccagaatagcccctggtagtgccaaagtgatagacgtttatagaactggagccaagtgtgtacctggagaagctggagactccggaaagccgggtgctgcgtttcaccaggtggggctgctccgagtgaagccaggccgtggagacagaacacgctccatgtcctgtagtgacaagatggcccgatggaacgtcctcggatgccaaggggcactgttgatgcacttgctggaagagcccatctacctgtcagctgtggtcattgggaagtgcccatacagccaggaagccatgcagagagcactgattggaaggtgtcagaatgtgtctgctttaccaaaaggcttcggagttcaagaattaaaaatactgcagtcagatttactatttgaacagagccgcagtgcggtgcaggcaaaaagggctgatagcccaggtcgacttgttccttgtggggcagccatcagctggagtgcagttcctgagcagcctttggatgttactgccaatggctttccacagggaacaacaaagaaaacaattggaagccttcaggcaagatcccaaatcagcaaagtggaactcttcagatcattccagaagctgctaagcagaattgcaagggacaagtggccacactccctcagggtgcagaagctggatacctaccaggagtacaaggaggctgcgtcctcttaccaggaagcctggagcacactccggaagcaggtgtttggatcctggatcagaaacccaccggattatcaccagttcaagtgagaaggaaatgtttgctctggtagcaggacccttcatcctgaactgccttcctccacgcaggacaagtcttagcttttttggtagttaaatcagggaacattctttctgagctttgcatctctgttgtgtaatacagatggaatctggaacttagagcaagctatacttgattgaagtagctctctgctaaaatggcatctcactaatgacctca

SEQ ID NO: 105164 - DNA, 459 bp, Homo sapiens
  Payload ID: 634
  Gene Symbol: ADAT1
  Gene Name: adenosine deaminase, tRNA-specific 1
  ENST ID: ENST00000568510
  CDS Start-End: 1-57
cagaagctgctaagcagaattgcaagggacaagtggccacactccctcagcttctgatggctcctggcagtccttggcttgtggctgcatcacttcagtttctccctccgtcttcacatggccttctgtgtctgtgtctcgcatggccttcttccctgtgtctgtgtctttccatggcctacttataaggaccccagtaattggatttagggcctgccctaatccagtctgatttcatcttaactaactagatctgcaaagactctatttccaactaaagtcacattctgaggtttcaggtagacatgaagttttgggggacaccactcaacccattgcagaacccattagcagtcacttcccgttcctcaacgccccctaccccagggcaatcagtaatctactttctgtctgtttggatttgtctattctgaacatttcatataaatggaatcatag

SEQ ID NO: 105165 - DNA, 547 bp, Homo sapiens
  Payload ID: 634
  Gene Symbol: ADAT1
  Gene Name: adenosine deaminase, tRNA-specific 1
  ENST ID: ENST00000567281
  CDS Start-End: 66-547
accggcggattaagctcgctttcttctaggcgcgtttcctgaaggtctcaataccagctcagaccatgtggaccgcggatgagattgctcagctatgctatgaacactatgggatcaggctgcccaagaaggggaagcctgagccaaaccatgagtggacattattggcagcggtggtgaagatacaatctccagctgacaaggcctgcgacacccctgataagccggtgcaagtgacaaaggaagttgtgtcaatgggaacaggaacaaaatgcataggacagtccaaaatgaggaagaacggagacatcctcaatgatagccatgctgaggtcatagccagaaggagtttccaaaggtaccttctccaccaactccagttggcagccaccctgaaagaggatagcatctttgtcccaggaactcaaaaaggagtgtggaaacttagacgagacctcatttttgtgtttttctccagccatacaccctgtggggatgcctccatcattccgatgcttgagtttgaagatcagccttgctgtcctgt

SEQ ID NO: 105166 - DNA, 501 bp, Homo sapiens
  Payload ID: 634
  Gene Symbol: ADAT1
  Gene Name: adenosine deaminase, tRNA-specific 1
  ENST ID: ENST00000566450
  CDS Start-End: 1-363
ttcggagttcaagaattaaaaatactgcagtcagatttactatttgaacagagccgcagtgcggtgcaggcaaaaagggctgatagcccaggtcgacttgttccttgtggggcagccatcagctggagtgcagttcctgagcagcctttggatgttactgccaatggctttccacagggaacaacaaagaaaacaattggaagccttcaggcaagatcccaaatcagcaaagtggaactcttcagatcattccagaagctgctaagcagaattgcaagggacaagtggccacactccctcaggaggccgaggtgggcagatcacgacgtcaggagatcaagaccatcctggccaacatggtgaagcccctttctactaaaaatacaaaaattagccaggtgtattggcgcacgcctatagtcccaactactcaggaggctgaggcagaagaatctctcaaacccaggaggtggaggttgcagtgagccaggatcgtgccac

SEQ ID NO: 105167 - DNA, 582 bp, Homo sapiens
  Payload ID: 634
  Gene Symbol: ADAT1
  Gene Name: adenosine deaminase, tRNA-specific 1
  ENST ID: ENST00000562374
  CDS Start-End: 552-582
cttctaggcgcgtttcctgaaggtgggaggggagcgtccgcgaggcgctggggcgacggggcaggtttatccgggctaactttgccgagtctgtttttgagggaagaggttgtgaggatcgtatcttccgggacgcgtttcacgtgggaaggcgctccacgcctggaactgtcagcagccggcgcctgaagagctcctggcgcggggcctctggcctggcagccgcaggacccaatggatcaggcgctcacgctgttctcactgcatggcttcagtgccttgcctggcacctcctatcctgtaactggccgactcggggtcccacccaggcttctccagcggccgggaaggggctctgcttccggaagtgtttaggaagggagccagcgtaaaccagagtcccttcctccaagcatcgctgaagccttttctcccctggcagccgacttccttttctttggaaaggacgtcgatggccaggtggtcttcataaactatactgccttgtgatgcctccctagaaatgagaggtctcaataccagctcagaccatgtggaccgcggatgagattgctcagctat

SEQ ID NO: 105168 - DNA, 2768 bp, Homo sapiens
  Payload ID: 634
  Gene Symbol: ADAT1
  Gene Name: adenosine deaminase, tRNA-specific 1
  ENST ID: ENST00000566445
  CDS Start-End: 86-397
aggtcgatggccaggtggtcttcataaactatactgccttgtgatgcctccctagaaatgagaggtctcaataccagctcagaccatgtggaccgcggatgagattgctcagctatgctatgaacactatgggatcaggctgcccaagaaggggaagcctgagccaaaccatgagtggacattattggcagcggtggtgaagatacaatctccagctgacaaggcctgcgacacccctgataagccggtgcaagtgacaaaggaagttgtgtcaatgggaacaggaacaaaatgcataggacagtccaaaatgaggaagaacggaaccagaccctctccagcttccatatgtcttcacctggtgtcctatctttgccgcaggagacatcctcaatgatagccatgctgaggtcatagccagaaggagtttccaaaggtaccttctccaccaactccagttggcagccaccctgaaagaggatagcatctttgtcccaggaactcaaaaaggagtgtggaaacttagacgagacctcatttttgtgtttttctccagccatacaccctgtggggatgcctccatcattccgatgcttgagtttgaagatcagccttgctgtcctgtcttcagaaattgggcccacaactcatcagtagaagccagtagtaacctggaagctcctggaaatgaaagaaaatgtgaagaccctgacagtcctgtaaccaaaaagatgaggcttgagcctgggactgcagccagggaggtcaccaacggagcagctcaccatcagagttttggcaagcagaaaagtggcccaatctcaccaggcatccacagctgtgatctcactgtagagggactggctactgtcaccagaatagcccctggtagtgccaaagtgatagacgtttatagaactggagccaagtgtgtacctggagaagctggagactccggaaagccgggtgctgcgtttcaccaggtggggctgctccgagtgaagccaggccgtggagacagaacacgctccatgtcctgtagtgacaagatggcccgatggaacgtcctcggatgccaaggggcactgttgatgcacttgctggaagagcccatctacctgtcagctgtggtcattgggaagtgcccatacagccaggaagccatgcagagagcactgattggaaggtgtcagaatgtgtctgctttaccaaaaggcttcggagttcaagaattaaaaatactgcagtcagatttactatttgaacagagccgcagtgcggtgcaggcaaaaagggctgatagcccaggtcgacttgttccttgtggggcagccatcagctggagtgcagttcctgagcagcctttggatgttactgccaatggctttccacagggaacaacaaagaaaacaattggaagccttcaggcaagatcccaaatcagcaaagtggaactcttcagatcattccagaagctgctaagcagaattgcaagggacaagtggccacactccctcagggtgcagaagctggatacctaccaggagtacaaggaggctgcgtcctcttaccaggaagcctggagcacactccggaagcaggtgtttggatcctggatcagaaacccaccggattatcaccagttcaagtgagaaggaaatgtttgctctggtagcaggacccttcatcctgaactgccttcctccacgcaggacaagtcttagcttttttggtagttaaatcagggaacattctttctgagctttgcatctctgttgtgtaatacagatggaatctggaacttagagcaagctatacttgattgaagtagctctctgctaaaatggcatctcactaatgacctcactatctgacttccattgtgttttattgcttctctaaaatatgaaatcagagtttggaacatgatgctttgaaagtactctgcagcagctctgttttatgggttcctacattgattcagcaaatatttattgagctgaaatgatgtttgacgctctgcaagttttacagctttgcctagcatagcgaatatatattttgtattcccagcctttctttcttcagggagccattcttttcccattcttcagtgatcctgctctgtgcctcagacttggctgaagctaaccttactccctggctctaggaatagcctgtgagccagccctggactgccctggacttgttctcagaggtatcaggaaaggctttctgttttgatctggagctgtaagggtcacataatcatgggactgccggtggccatcttttcctactacctagagaaagccagcaaagaatgaaggcaacaaaggaaacagccaagagaatcaaagatctagtaacactgtttagatgtctcaattatgtgagacagattcctgttgttattttgattaagcctgtttgtgttggttttctgacttacaattgaaagagttctgtccaaaaagccaaaaggtggccaggcttggtggctcaggcctgtaatcccagcactttgggaagcccaggcaggcagatcacttgaggtcaggagttcaagaccagcctggccaacctggtgaaaccctgtctctactaaaaatgcaaaaactagccgggcatggtggcgcacacctgtaatcctagctactcgggaggctgaggcaggagaattgcttgaacccaggaggcggaggtagtggtgagcaaagatcgtaccgctgcactccagcctgggtgatagagcaagaccctatctc

SEQ ID NO: 105169 - DNA, 731 bp, Homo sapiens
  Payload ID: 634
  Gene Symbol: ADAT1
  Gene Name: adenosine deaminase, tRNA-specific 1
  ENST ID: ENST00000564657
  CDS Start-End: 403-731
ttttagcttgttgaaactgttcagagatgcggtcttgtgggcaaataaatgcctgtttagctgagctgttattttcagctaagaagttcttcaagttttcaagatctaggagggggtgtaggctcgaattataatggacccagtgtagcaaaacatttattcatttaaacaattgtgcatgctcattcagacgcactacctgagtgagatgatgccgttctgggctgcttcatcttaaagagagtcactgtttcttctggcaacttctacctgccttgcctatcgaggtttgtgaattgcacctctggtttaatttcaggtcgatggccaggtggtcttcataaactatactgccttgtgatgcctccctagaaatgagaggtctcaataccagctcagaccatgtggaccgcggatgagattgctcagctatgctatgaacactatgggatcaggctgcccaagaaggggaagcctgagccaaaccatgagtggacattattggcagcggtggtgaagatacaatctccagctgacaaggcctgcgacacccctgataagccggtgcaagtgacaaaggaagttgtgtcaatgggaacaggaacaaaatgcataggacagtccaaaatgaggaagaacggagacatcctcaatgatagccatgctgaggtcatagccagaaggagtttccaaaggtaccttctccaccaactccagttggcagccaccct

SEQ ID NO: 105170 - DNA, 570 bp, Homo sapiens
  Payload ID: 634
  Gene Symbol: ADAT1
  Gene Name: adenosine deaminase, tRNA-specific 1
  ENST ID: ENST00000568001
  CDS Start-End: 128-403
accggcggattaagctcgctttcttctaggcgcgtttcctgaaggtcgatggccaggtggtcttcataaactatactgccttgtgatgcctccctagaaatgagaggtctcaataccagctcagaccatgtggaccgcggatgagattgctcagctatgctatgaacactatgggatcaggctgcccaagaaggggaagcctgagccaaaccatgagtggacattattggcagcggtggtgaagatacaatctccagctgacaaggcctgcgacacccctgataagccggtgcaagtgacaaaggaagttgtgtcaatgggaacaggaacaaaatgcataggacagtccaaaatgaggaagaacggtaccttctccaccaactccagttggcagccaccctgaaagaggatagcatctttgtcccaggaactcaaaaaggagtgtggaaacttagacgagacctcatttttgtgtttttctccagccatacaccctgtggggatgcctccatcattccgatgcttgagtttgaagatcagccttgctgtcctgtcttcagaaattgggcc

SEQ ID NO: 105171 - DNA, 2065 bp, Homo sapiens
  Payload ID: 635
  Gene Symbol: ADAT2
  Gene Name: adenosine deaminase, tRNA-specific 2
  Uniprot ID: Q7Z6V5
  ENST ID: ENST00000237283
  CDS Start-End: 16-591
gagtggtggctgggtatggaggcgaaggcggcacccaagccagctgcaagcggcgcgtgctcggtgtcggcagaggagaccgaaaagtggatggaggaggcgatgcacatggccaaagaagccctcgaaaatactgaagttcctgttggctgtcttatggtctacaacaatgaagttgtagggaaggggagaaatgaagttaaccaaaccaaaaatgctactcgacatgcagaaatggtggccatcgatcaggtcctcgattggtgtcgtcaaagtggcaagagtccctctgaagtatttgaacacactgtgttgtatgtcactgtggagccgtgcattatgtgtgcagctgctctccgcctgatgaaaatcccgctggttgtatatggctgtcagaatgaacgatttggtggttgtggctctgttctaaatattgcctctgctgacctaccaaacactgggagaccatttcagtgtatccctggatatcgggctgaggaagcagtggaaatgttaaagaccttctacaaacaagaaaatccaaatgcaccaaaatcgaaagttcggaaaaaggaatgtcagaaatcttgaacatgttctgatgaaagaaccaagtgacccaaagtgacctggacaagattcatagactgaaagctgttgacatcgttgaatcatatgtttatatattgtttttaatctgcaggaaaatggtgtctctcatcatttgctctgttaagggaacaaattagcactttttagaagtctgacaattgtaaacagttattagcttttccagaagctgattcccattttaagatgggggaaaattaaggtttgaggttttagaaattagcaagtagtgcatacccttctagccacaagtgcccagtccaggcaagtgctgacttcttagagaatgtgtggccagacccagggacctggagtgtgtttggactgcagtttgccaccctgagaacaccttctccaggactggcatttcagaatcagattcttcattttttgcagctacgatgttcttccagggcactgggggctgtgacttctctctaaattgtatataagttgtgtatatagagaccataattatatggtccttagaaaagactttgcttttataaagcatttagaaaaaatgcatacttttaaaacaagtgcttgagttgtcacttaaaaattatagcatattgctataataaaaccttatttatgtcttatttgaagatgaatagtcttaaaagataaagacataaatgggacaattgttattgagcaaaaaaccaaattatcccaccctcatggagcttatattctagcaaggggagatggatatgatagattacacagtttattggaggacaataagagttatggcaaaaagcaaaaggaacacagggtaaaggggataggtgccatttggtggtgagaatgctgactgaaaaatagaatgatcaatttaatctgaaacaaatggttatttcttttataatccatataataaatttaaaatctaaaatgtaaaattttgaacacaacactggaaagggtatccacagcaggaagtccccagttcacctccatgactacagggcagctttgcacagccctctgggcgcactgtgtgcctctgcccagaagggggcctcgccgttccaccagaagctcagctccaggccctggaggggctgctgctcctcagttgcatttcttcagtagattcatttccttgatgcaaagcatctgtatttgttggttctgtcatttgagcgatgtctctgacttgtttgttttgaattacattacaggctggaatgtaattgtggtgaaagtatttttatattgctgagagtagcagctaatcacagttacatgcttcagaggacttataattgcttggttttgtgtgtgtgtgtgtgtgtgtgtgtgtgtgtgtgtgtgtttaactgcatttgaaaagttttatggagaatatgcatgattttaaatctgtgataatgttacatgcaccttcaatttcatccactttaaaaattatcttctcattgaa

SEQ ID NO: 105172 - DNA, 6651 bp, Homo sapiens
  Payload ID: 635
  Gene Symbol: ADAT2
  Gene Name: adenosine deaminase, tRNA-specific 2
  Uniprot ID: Q7Z6V5
  ENST ID: ENST00000606514
  CDS Start-End: 586-1020
agtgtggctgtaccattttatattccgaccagcagtatatgagtaatatcacttctccacagccttgccagcatttgatgttgtttttacgtttcactttagtcatgctgatgggtgtgtagtgatacctcattgtggttttagttgacatttctctaccggctaatgatgtgaaaacatcttttcgtgtacttatttgctatgtgtgttatcttctttggtgaaatgtctgtcttttgccttctcatatagtttggatatttgtcgcctccaaatttcatgttgaaattgaatccctggtattagtagcagggcctggtgggaagtttggatcatggggaggatacctcataaatcatttttatagtggcaagttctcactatattattatcatgagaatataccatcccctcctttctttcttcttctcttaccatgtgatgcctgctcccattgccttctgccatgagtggaagcttcctgaggccctcactggaagcagatgctgataccatacttcttgtacagtctggagaactgccaaagaagccctcgaaaatactgaagttcctgttggctgtcttatggtctacaacaatgaagttgtagggaaggggagaaatgaagttaaccaaaccaaaaatgctactcgacatgcagaaatggtggccatcgatcaggtcctcgattggtgtcgtcaaagtggcaagagtccctctgaagtatttgaacacactgtgttgtatgtcactgtggagccgtgcattatgtgtgcagctgctctccgcctgatgaaaatcccgctggttgtatatggctgtcagaatgaacgatttggtggttgtggctctgttctaaatattgcctctgctgacctaccaaacactgggagaccatttcagtgtatccctggatatcgggctgaggaagcagtggaaatgttaaagaccttctacaaacaagaaaatccaaatgcaccaaaatcgaaagttcggaaaaaggaatgtcagaaatcttgaacatgttctgatgaaagaaccaagtgacccaaagtgacctggacaagattcatagactgaaagctgttgacatcgttgaatcatatgtttatatattgtttttaatctgcaggaaaatggtgtctctcatcatttgctctgttaagggaacaaattagcactttttagaagtctgacaattgtaaacagttattagcttttccagaagctgattcccattttaagatgggggaaaattaaggtttgaggttttagaaattagcaagtagtgcatacccttctagccacaagtgcccagtccaggcaagtgctgacttcttagagaatgtgtggccagacccagggacctggagtgtgtttggactgcagtttgccaccctgagaacaccttctccaggactggcatttcagaatcagattcttcattttttgcagctacgatgttcttccagggcactgggggctgtgacttctctctaaattgtatataagttgtgtatatagagaccataattatatggtccttagaaaagactttgcttttataaagcatttagaaaaaatgcatacttttaaaacaagtgcttgagttgtcacttaaaaattatagcatattgctataataaaaccttatttatgtcttatttgaagatgaatagtcttaaaagataaagacataaatgggacaattgttattgagcaaaaaaccaaattatcccaccctcatggagcttatattctagcaaggggagatggatatgatagattacacagtttattggaggacaataagagttatggcaaaaagcaaaaggaacacagggtaaaggggataggtgccatttggtggtgagaatgctgactgaaaaatagaatgatcaatttaatctgaaacaaatggttatttcttttataatccatataataaatttaaaatctaaaatgtaaaattttgaacacaacactggaaagggtatccacagcaggaagtccccagttcacctccatgactacagggcagctttgcacagccctctgggcgcactgtgtgcctctgcccagaagggggcctcgccgttccaccagaagctcagctccaggccctggaggggctgctgctcctcagttgcatttcttcagtagattcatttccttgatgcaaagcatctgtatttgttggttctgtcatttgagcgatgtctctgacttgtttgttttgaattacattacaggctggaatgtaattgtggtgaaagtatttttatattgctgagagtagcagctaatcacagttacatgcttcagaggacttataattgcttggttttgtgtgtgtgtgtgtgtgtgtgtgtgtgtgtgtgtgtgtttaactgcatttgaaaagttttatggagaatatgcatgattttaaatctgtgataatgttacatgcaccttcaatttcatccactttaaaaattatcttctcattgaattttagtgcttctactagtttgttcctttttgcagttggtcgtaattcatttctggcttcttatgctttcctgcaagcagatttcattgcatttattgtgttcatatcattttcttggggattatttgtaggacaaccaacctggagttttgcctctctagagtaccacccagtaagtctggctgagcatcttatgtccagtaggttcttggtaaacatttgctaaatgaaattactgattgaaatttggggaaaagtgaataagaagactatctaggacaaaaagccaaagccgaaaatagtatatgagcattctagcccagagactgtcgctactaaaagaatgaaggaaataataaagtgatagacagggaaggatagaaaagacttaacaatatacatatgttccgtctttgctgttttggagaatgatggataagtagtgtttcctgattctgaagcatagctgaacaatttaattgtggtttaccatctttttggttccctcttcagtaattaacctatcgaaaatctgtcctaaatgtttggactggggcacagttccctccatcgctttgggagaaaatcattaatatggcatactgcagattggagggcaggaccactgagggtgtcatagacattagctctatggaattctgctagcaatttccaagtgacagtgaggaattatggatatatgttgaggtcattcagcttcctgagtaccacattccccagctacttagacacgggttaaaatattaagatgtcctagttcaacagcttgaattccattgattgatactgatagtgcctgtccaagacaccagctgaaagacttgttttgtgtacaaaatagttctgaaagtggtgagatacaaaaaggttttagaatcactgccctgttgagagaaattagggggaaatgattacatttagaagctgctagagttatccagtgtttgctggtctttgcaacaaactgtggagaatgggtggtatgtaatgctttggtaggcttcaatcactgataaaagatcatgttaaaatatctttgtgctttcttgttacttggcacaaccatctcttcctgtgttgtatttggagtatcatggagagaaaatagatggccaagagcttcagtgtaggcaagaactcttaatttttctttaaactttttactgggaaaagtatatatatataaaatacacacacacacacacacacacacacacacacacacacacacacaaacacaacacaccatggccctttaccccgaaatgcttcagtatagttattgacttaagtaaatttaacattgatatacttgaatctatcatttgtattacagttttgtcagctgacccaataatgtcctgtaaagaagttctcccactaccctataatcccaggtccagtctagggtccagcattacatttacttgtcttgaatccagctttttcttttttttttttttttttgagataggtctcactctgtcgtccagtggcatgatcacagctcactgcagcctcaacctggctcaagcaatccttcctcctcagcctcctgagtagctgggaccacagactcatgtcaccacacctaatttttttttttttttttttttgtagagacaaggtctcactatgttgcccaggctggtcttgaactcctaggctgaagcaatcctccttccttggcctcccaaagcactgggattatagacgtgagccactgcaccggtctgcctttagcttcttttagtctagaacattttcactggctttctttgtcttttatgacattgacatttttaaataatacagtcattttgcctcctttctgttttcttcttctttttttaaataatagaatggtccttgttttaaatttatttgatattttcttgtgattagattcaggtgctggttgatgttaagttcctcacaggatatcacatctggaggcacacaaaggccgtcacaccaaggtgatgtcaattttggtcatctggtcaaggtgttgtcctattccttcactatatagttaccttttttctctgttgcaatgaataagcagtctgtgggaagaggagctgttacattttaaacagaaaatgtatttgacactgatggaaaggagaggaggaaaattaatgacataaatttcaaagcaactattaaattatttgattgcattcttcctcttttactgtctgccaaaattgataaaaaaaatttttctaataagaatgttttaaatagtgatatcttaataagcatcaaaattaagcctgagaaataaattctttccttcctaatttcctcctcagcaaaagtaataattatataaatttcattatgcctgataagatagggttttggaaaatagacctaagatgtttctgatactgcagatgacctatggtgatccaatgggataaacactctaggtaggttgtcatttggtcataaaatatgagttatcttgggtttccatagagacatctagacttaaaatgttgtaagcactgctactttcaaaatgtcagtaaaaatagcaaaagccaaagctcttgaaaaaattacttaaatcttttttaaaagtagtatagcgccttgttaaaaatctgtggtgatgccaaagcttgtctttcccagtggtcctacgtgaactggccttatagccccagggaaaccagacaccaggaattggtttctctgccttttggcaaaggaataagactacattgacttcatctatgaagacaactgccaactatttcctttgtaaattgctaattttgtgtagtgaggaaaggagcgatgggcgacgtgatttttatggattagactggtgagttctgctgaaagtttgacatctttaggatcttacattttcttcaagttgagctaatgaaaacaggctcgtgactatttatcacctgatttctaagtggatattgggttgaacaccacatatccatgactattaaggaggcttcatggtgtagtttgacaaaggctctctccttgaccaaacttcagtcaggccctaagtcctctttttaaccaggcctccaccttggcccccattcttgatgggcctatacagcccagctttagcaagaatcctgctaagctagtttagagagaatcccacatccccaatatctatgaaatttctcatcccctacttttgatgtgtaagtccttggcctcccttcaacgagaagcctgttaagttcattttgcaagaactctactcttgatatctcctcttagtaatttcctaatcactgaccccctcactctgcccattagttataaacccccacatgttctggttgtattcagagctgagcctgatctcttcctcttgttgggatagttttaaaacctgcgatagttttaaaacctatcactgtagtcctgaattaagtcttccttaccttaacaagtgtcaaaataaatttttctttaacatgttgaagcatgaacttgagaatctagagcaggagtccacaaagtatggcccatgggccatatccagcccgctgccggtttcggtaccactcatgacttaaaaatgggtcttacaattctgagtgattgaaaaaaaatcaaaagaaggataatatttagtgacccatgaaccttatatggcaatcaaatttcagtgtccataaataaagttacattggatgacagccatgcccatttgtttctgtgttgtctgtggctgctcgtgtgctacaatggcagagttgagcagtggtgacaaaccatgcgactcacaaaggcctaaaatatttagcgtctggcccttcgagaaaatgttagctgcccctggtctagagtaggtaaaaggctgagattggaagctgcttgttcaaattctgtgattggaaccgaatgatgtggctcattgtacagctcatggtgaattgcttcagtaccatggttttgttttttccttttgaaaagttggtctataaatgtaaaggaaaaatctaagataccaaaatatgttttctggcttagaatgttttatttccttgtatacattttaagagagtggcaaggagaaaagataatgtatcattttatttgggtttagaataaataatacattttatttatgatca

SEQ ID NO: 105173 - DNA, 1620 bp, Homo sapiens
  Payload ID: 636
  Gene Symbol: ADAT3
  Gene Name: adenosine deaminase, tRNA-specific 3
  ENST ID: ENST00000329478
  CDS Start-End: 221-1324
ggttgggccgggccggttgctaagacttggcgaagcgctgcgctcgcgcccggatccctcaggggttagcaggacatgagggagtgtagctctgatgcggtgacctgggccggagccctcggactagcctcagctttggtggcagcacgccctgccttgtggagccacggcctcccgggacggactccccggctctcccccagccgcccgcagccgccggatgatcctctgctcccgtctctgtctcccacagtcggcctcgctgaggatggagcccgccccgggcctcgtggagcagcccaagtgcttggaggccgggagcccggagcctgagccggcgccgtggcaggccctccctgtcctgtccgagaagcagtcaggggacgtggagctggtgctggcctacgccgcgcccgtcctggacaagcgccagacctcacgcctcctgaaggaggtgtcggccctgcacccgctccccgcccagcctcacctcaagcgggtgcggcccagccgcgatgccggcagcccccacgccctggagatgctgctttgcctggctgggccggcctcgggcccgcgctcgctggctgagctcctgccacggccggctgtggacccccgcggcctggggcaacccttcctggtgcccgtgcccgcccggccgcctctgaccaggggccagttcgaggaggcccgggcccactggcccacgtccttccacgaggacaagcaggtgaccagcgccctggctgggcggctcttctccacgcaggagcgcgccgccatgcagagccacatggagcgggcggtgtgggcggcccggcgggcagcagcgcggggcttgcgggccgtgggggccgtggtagtggacccggcctcggaccgcgtgctggccaccggccacgactgcagctgcgcggacaaccccctcctgcacgccgtcatggtgtgcgtggacctcgtggcgcgcggccagggccgcggcacctacgacttcagacccttccccgcctgctccttcgccccggccgctgccccccaggccgtccgcgcaggcgccgtgcgtaaactggacgcagacgaggacggcctcccctacctgtgcactggctacgacctgtacgtgacccgcgagccctgcgccatgtgcgccatggccctggtgcacgcacgcatcctgcgcgtcttctacggtgcgccctcgcccgacggcgccctgggcacccgcttccgcatccacgcacggcccgacctcaaccaccgcttccaggtgttccgcggggtgctggaggagcagtgccgctggctggaccccgacacgtaggcgccgccctcctgcctccggacccttcccgctcccggccgtggggcgcccctcctggacttccgggcctcgatttcttccgcacaagcctgaccgtggatttcagggacacataccgcctccagcggggagcacgggtgctgccttccgtgcggatcgagctttcctggactcggtcattggggccaccccgtgccagcggtgcccttctgcggccgcccttgctgcgtttgtgtcccctctgtctcgcgggccgggaaactgctctgatgggaaaataaacagcccaaaaccaa

SEQ ID NO: 105174 - DNA, 983 bp, Homo sapiens
  Payload ID: 636
  Gene Symbol: ADAT3
  Gene Name: adenosine deaminase, tRNA-specific 3
  ENST ID: ENST00000454697
  CDS Start-End: 776-983
tttgtttttcatcagacagaggttgtactcttggagggacaagcgaggctgtgtttgtcttttaccctggagacagtggagtgtttgtggcctagcagggccgtgcgggcctctcggtcctggtcgcgcgtggtgtgcgttttgggagggcccagcgagtcggctgctatgggccccacctggcacggggcctcgggcagcggcagcacctggcgctgcctccgcgcttcctgctcccggctcccactgcatctccggttctgtgctttgttgaacgcgtgagcttcgggcagcgctggggccgcttcagcgtgacctccaaggccactggcctggagttccactggctgctggtcccccatctgtggggcgccccggcggctgaggcgtggaccaggcagtgcatgtcgaggagtagcacccacagctgcgcggctgcgaaatgatccagagacacatccctgtctgcgggaggagccgtccataccagcggggatgtgtagtccaggctggcagttcaggatcacccggctggagtcattttaagatcatctgcggcttagccccagcaccatctgaggcagtactgtctgctagaaataactgtgagcacacaggggttagcaggacatgagggagtgtagctctgatgcggtgacctgggccggagccctcggactagcctcagctttggtggcagcacgccctgccttgtggagccacggcctcccgggacggactccccggctctcccccagccgcccgcagccgccggatgatcctctgctcccgtctctgtctcccacagtcggcctcgctgaggatggagcccgccccgggcctcgtggagcagcccaagtgcttggaggccgggagcccggagcctgagccggcgccgtggcaggccctccctgtcctgtccgagaagcagtcaggggacgtggagctggtgctggcctacgccgcgcccgtcctggacaagc

SEQ ID NO: 105175 - DNA, 1559 bp, Homo sapiens
  Payload ID: 637
  Gene Symbol: ADAL
  Gene Name: adenosine deaminase-like
  Uniprot ID: Q6DHV7
  ENST ID: ENST00000389651
  CDS Start-End: 421-1224
catttgtcccagaatacggtccgctaccgctgtgacatgagtgttagggaaggcgggttgtcacgtttctacaagccttccagtcaaaagggaaaccttgcctaagtccttgtagttgagaaatctctaagaggaggctgaagtgggaggatcgcttgagtctggaagcttgagactgcagcaagctgtgatcgtgacactgcactccagcctgggcaacaaagtaagatcctgtctcaaaagaaaaaaaaaaaaaggtgaagctgaacccagatctacacatacagctaatcttaccaaaatgtgtggaagtaaagcaatctgaaggaaattcagtaccatacaatttactgactgaaatacatcatattgctcatactaagaataagagtggagaagaatcatttttttcctgctaaaatgatagaggcagaagagcaacagccttgcaagacagacttctattctgaattgccaaaagtggaacttcatgcccacttgaatggatccattagttctcataccatgaagaaattaatagcccagaagccagatcttaaaatccacgatcagatgactgtgattgacaagggaaagaaaagaactttggaagaatgtttccagatgtttcaaactattcatcagcttactagtagccctgaagatattctaatggtcacaaaagatgtcataaaagaatttgcagatgacggcgtcaagtacctggaactaaggagcacacccagaagagaaaatgctactggaatgactaaaaagacttatgtggaatctatacttgaaggtataaaacagtccaaacaagaaaacttggacattgatgttaggtatttgatagcagttgacagaagaggtggccctttagtagccaaggagactgtaaaacttgccgaggagttcttcctttctactgagggtacagttcttggccttgacctcagtggagaccctactgtaggacaagcaaaagacttcttggaacctcttttagaagctaagaaagcaggtctgaagttagcattgcatctttcagagattccaaaccaaaaaaaagaaacacaaatactcctggatctgcttcctgacagaatcgggcatggaacatttctcaactccggtgagggaggatccctggatctggtggactttgtgaggcaacatcggataccactgggtaaggcttggagtttcaggtcttccagatgactctctgtctctcccccaatccccaggttgcctggggattacagagaagtactgttctaaaagtacgaatgtcatctagctattaaaagatggagtgtgtgctttctgagccttatttaaaacagaaagctttagcttccattagaatataagctctatgagagcagggcccctgcttgtcttattcgttgttacattctccaatgcttggaactcaataagaattttttaaaggaataaagggtcatctagaattttaaaatgactttaacaaaattgacatgtgttatgaaaatatgtaacattatttaaaaattaaacatggaaaatcccaa

SEQ ID NO: 105176 - DNA, 3767 bp, Homo sapiens
  Payload ID: 637
  Gene Symbol: ADAL
  Gene Name: adenosine deaminase-like
  Uniprot ID: Q6DHV7
  ENST ID: ENST00000422466
  CDS Start-End: 171-1157
aaaataggtgaagctgaacccagatctacacatacagctaatcttaccaaaatgtgtggaagtaaagcaatctgaaggaaattcagtaccatacaatttactgactgaaatacatcatattgctcatactaagaataagagtggagaagaatcatttttttcctgctaaaatgatagaggcagaagagcaacagccttgcaagacagacttctattctgaattgccaaaagtggaacttcatgcccacttgaatggatccattagttctcataccatgaagaaattaatagcccagaagccagatcttaaaatccacgatcagatgactgtgattgacaagggaaagaaaagaactttggaagaatgtttccagatgtttcaaactattcatcagcttactagtagccctgaagatattctaatggtcacaaaagatgtcataaaagaatttgcagatgacggcgtcaagtacctggaactaaggagcacacccagaagagaaaatgctactggaatgactaaaaagacttatgtggaatctatacttgaaggtataaaacagtccaaacaagaaaacttggacattgatgttaggtatttgatagcagttgacagaagaggtggccctttagtagccaaggagactgtaaaacttgccgaggagttcttcctttctactgagggtacagttcttggccttgacctcagtggagaccctactattccaaaccaaaaaaaagaaacacaaatactcctggatctgcttcctgacagaatcgggcatggaacatttctcaactccggtgagggaggatccctggatctggtggactttgtgaggcaacatcggataccactggaactctgtttgacctcaaacgtcaaaagtcagacagttccatcttatgaccagcaccatttcggattctggtacagcattgcccatccttctgtgatctgtactgatgataagggtgtttttgcaacacacctttctcaagagtaccagctggcagctgaaacatttaatttgacccagtctcaggtgtgggatctgtcttatgaatccatcaactacatctttgcttctgacagcaccagatctgaactgaggaagaaatggaatcacctgaagcccagagtgttacatatttaagctataatgaggtgaactacttctgagtatgtgtttcaatcaagttcctgccatatcccacttagtaaaacagtccaccactcctttgaagcatagcaaccaagttccttgggctctatcaccagcaccttacacatggcaggtactcagtaaatacgtgtcttcaactgactcacaagctctcaggtgcttactgggtgggacttgactgttgttgctaattaaatccccattccaccagtgattattgtgactcagcagtccttccctattagtgatcataaaatttcagggaaatcgaagtttctcatcaggaaatgttttggaattactagtataaagttaggaaagtggggaaattaggttactgccgagacctttaagccttctaaacagctttatattttattgtgcatactttaatcagactcccttcactcgctttaagtttttaaaagtattccccagccggatgtgatggctcatgcctgtaatcccagcactttgggaagccaaagtgggcagattgcttgatcctaggagttcagtagcagcctaggcaacatggagaaaccctgtctctacaaaaacaaaaaaacaaaaaaccggaaattagtcaggcacggtggtacacacctgtagtcccagccaccagggaggctaaggtgggaggagacctgatcccagggatgtttgaggctgcagtgagctgtgatgctacagcactccagcctgggcaacagagtgaaaccctgtttcaagaaaaagaaaagtattctccaagatcccaagaccattgacaccaggccacattgtataccagggatttatgtgaatgcctagggatgaccgtagtgacagataaagctaggtgctgagatctggttttgccctctttatgattgtcccatcggtactagaaagtgaagtcattgctccaattttggaagaggagagaataactggctgaggggtgagaaagacagaaatagctgcagctctcttttttttttttttcaacaaaggctctcactctgttccccaggctggagtgcagtgacatgatcacagatcactgcagctttcagttttaaaacagcttttattacattttctttgtggaagctgtatttctaccttagtactcactttctgcttggtctgaaagatacctctagtagtggcaacattgtgttaagtagagttcattgggtctcttgtaaccctacccctacataatggaccactggtgcaggcttacataaacacacatactgtggccacttcagctgaagacaagggacaaactaagatagttctgaaaggtaaaaaaacaaacaaacaaacaaaaaacaaaaacaaaattattagataccaagttatgcttgaattgctttgctctttagaatgtgtgtttttccctggtatcagaagaagttaaggctgatgacacccctaatttaaattactaaggatttctgataggttttctgtctttctgtgatatcgtaaagtatttatttggtctttgaccctgtttcctggcatactgctcctaaaatccttagagtctccagagtgatggctttttgtatctaatgagttgactgctggctggcagcccctaggggctggtcactggaaagacaaatgcatgattagagttgggactttcagtcctcccccaaactcttgggagaagggctgaaggttaagttgatcaccagtgaccagtggtaatcataccttcataatgaagcctccataaaactccagaagaacagattttggagcatttccaggtaactgaacatatggaggtccctagagggtgctgtacctgaagagggtagagggtataggagctccctgtcccttcccacatgccttgctctatccatttcttcatctctatcctttgtactgtcctttataataaaccagtgaacctaagtgtttccctgagttctgtgagctttactagcaaattaaactcaaggaggggtcatgggaaccctgatttataggtttggtcagaagcacaggtaaaaccacctggggtttgaacttggcactggaagtgggcagcagtcttgtgggactgggccctcaatctgtgggatcaaatgccatctctaggggatagcatgggaaactggaggacacctagctggtatctgctgcaaaattgattgcttgcttgatggtggggaaaaaactccacacatttggtcagagaagttttctgtctttattgtggtgtgagagcagaggaaaaaagtttgttttttccgctcagactttgttttaaggaacaggggagagggaagttctgtggtttttgaagttcttagatacgtgtgtgtagctttgtgtggcattatatatagcattatattattttctacccttatctactcatacagaaattgcacagtaaaaacatcaaagtttattcataaaatgtggatctattgcagtcactaaaaatgttgcagaacagattttaatgactgaaagtgttcatgataatatattcaatgaaaatatggttataaagttttatagtcctttttttgtttaatatctatacaaaagctattgaagtgt

SEQ ID NO: 105177 - DNA, 3514 bp, Homo sapiens
  Payload ID: 637
  Gene Symbol: ADAL
  Gene Name: adenosine deaminase-like
  Uniprot ID: Q6DHV7
  ENST ID: ENST00000428046
  CDS Start-End: 575-1561
agccagtgctaagttcgcttgcggctgacctttctttggaatgtcgtgagttccatttgtcccagaatacggtccgctaccgctgtgacatgagtgttagggaaggcgggttgtcacgtttctacaagccttccagtcaaaagggaaaccttgcctaagtccttgtagttgagaaatctctaagaggtggaagcaaatactgcacatgcgtgttggtcctgtgagggaaaccagctagtggagagggagaggttgaaggaacagaaaaatgagaagacaactcactggaggctgaagtgggaggatcgcttgagtctggaagcttgagactgcagcaagctgtgatcgtgacactgcactccagcctgggcaacaaagtaagatcctgtctcaaaagaaaaaaaaaaaaaggtgaagctgaacccagatctacacatacagctaatcttaccaaaatgtgtggaagtaaagcaatctgaaggaaattcagtaccatacaatttactgactgaaatacatcatattgctcatactaagaataagagtggagaagaatcatttttttcctgctaaaatgatagaggcagaagagcaacagccttgcaagacagacttctattctgaattgccaaaagtggaacttcatgcccacttgaatggatccattagttctcataccatgaagaaattaatagcccagaagccagatcttaaaatccacgatcagatgactgtgattgacaagggaaagaaaagaactttggaagaatgtttccagatgtttcaaactattcatcagcttactagtagccctgaagatattctaatggtcacaaaagatgtcataaaagaatttgcagatgacggcgtcaagtacctggaactaaggagcacacccagaagagaaaatgctactggaatgactaaaaagacttatgtggaatctatacttgaaggtataaaacagtccaaacaagaaaacttggacattgatgttaggtatttgatagcagttgacagaagaggtggccctttagtagccaaggagactgtaaaacttgccgaggagttcttcctttctactgagggtacagttcttggccttgacctcagtggagaccctactattccaaaccaaaaaaaagaaacacaaatactcctggatctgcttcctgacagaatcgggcatggaacatttctcaactccggtgagggaggatccctggatctggtggactttgtgaggcaacatcggataccactggaactctgtttgacctcaaacgtcaaaagtcagacagttccatcttatgaccagcaccatttcggattctggtacagcattgcccatccttctgtgatctgtactgatgataagggtgtttttgcaacacacctttctcaagagtaccagctggcagctgaaacatttaatttgacccagtctcaggtgtgggatctgtcttatgaatccatcaactacatctttgcttctgacagcaccagatctgaactgaggaagaaatggaatcacctgaagcccagagtgttacatatttaagctataatgaggtgaactacttctgagtatgtgtttcaatcaagttcctgccatatcccacttagtaaaacagtccaccactcctttgaagcatagcaaccaagttccttgggctctatcaccagcaccttacacatggcaggtactcagtaaatacgtgtcttcaactgactcacaagctctcaggtgcttactgggtgggacttgactgttgttgctaattaaatccccattccaccagtgattattgtgactcagcagtccttccctattagtgatcataaaatttcagggaaatcgaagtttctcatcaggaaatgttttggaattactagtataaagttaggaaagtggggaaattaggttactgccgagacctttaagccttctaaacagctttatattttattgtgcatactttaatcagactcccttcactcgctttaagtttttaaaagtattccccagccggatgtgatggctcatgcctgtaatcccagcactttgggaagccaaagtgggcagattgcttgatcctaggagttcagtagcagcctaggcaacatggagaaaccctgtctctacaaaaacaaaaaaacaaaaaaccggaaattagtcaggcacggtggtacacacctgtagtcccagccaccagggaggctaaggtgggaggagacctgatcccagggatgtttgaggctgcagtgagctgtgatgctacagcactccagcctgggcaacagagtgaaaccctgtttcaagaaaaagaaaagtattctccaagatcccaagaccattgacaccaggccacattgtataccagggatttatgtgaatgcctagggatgaccgtagtgacagataaagctaggtgctgagatctggttttgccctctttatgattgtcccatcggtactagaaagtgaagtcattgctccaattttggaagaggagagaataactggctgaggggtgagaaagacagaaatagctgcagctctcttttttttttttttcaacaaaggctctcactctgttccccaggctggagtgcagtgacatgatcacagatcactgcagctttcagttttaaaacagcttttattacattttctttgtggaagctgtatttctaccttagtactcactttctgcttggtctgaaagatacctctagtagtggcaacattgtgttaagtagagttcattgggtctcttgtaaccctacccctacataatggaccactggtgcaggcttacataaacacacatactgtggccacttcagctgaagacaagggacaaactaagatagttctgaaaggtaaaaaaacaaacaaacaaacaaaaaacaaaaacaaaattattagataccaagttatgcttgaattgctttgctctttagaatgtgtgtttttccctggtatcagaagaagttaaggctgatgacacccctaatttaaattactaaggatttctgataggttttctgtctttctgtgatatcgtaaagtatttatttggtctttgaccctgtttcctggcatactgctcctaaaatccttagagtctccagagtgatggctttttgtatctaatgagttgactgctggctggcagcccctaggggctggtcactggaaagacaaatgcatgattagagttgggactttcagtcctcccccaaactcttgggagaagggctgaaggttaagttgatcaccagtgaccagtggtaatcataccttcataatgaagcctccataaaactccagaagaacagattttggagcatttccaggtaactgaacatatggaggtccctagagggtgctgtacctgaagagggtagagggtataggagctccctgtcccttcccacatgccttgctctatccatttcttcatctctatcctttgtactgtcctttataataaaccagtgaacctaa

SEQ ID NO: 105178 - DNA, 475 bp, Homo sapiens
  Payload ID: 637
  Gene Symbol: ADAL
  Gene Name: adenosine deaminase-like
  ENST ID: ENST00000563551
  CDS Start-End: 193-300
cagaaaaatgagaagacaactcactggaggctgaagtgggaggatcgcttgagtctggaagcttgagactgcagcaagctgtgatcgtgacactgcactccagcctgggcaacaaagtaagatcctgtctcaaaagaaaaaaaaaaaaaggaacttcatgcccacttgaatggatccattagttctcataccatgaagaaattaatagcccagaagccagatcttaaaatccacgatcagatgactgtgattgacaagggaaagaaaagaactttggaagagtcacaaaagatgtcataaaagaatttgcagatgacggcgtcaagtacctggaactaaggagcacacccagaagagaaaatgctactggaatgactaaaaagacttatgtggaatctatacttgaaggtataaaacagtccaaacaagaaaacttggacattgatgttaggtatttgatagcagttgacagaag

SEQ ID NO: 105179 - DNA, 1228 bp, Homo sapiens
  Payload ID: 637
  Gene Symbol: ADAL
  Gene Name: adenosine deaminase-like
  Uniprot ID: Q6DHV7
  ENST ID: ENST00000562188
  CDS Start-End: 17-1084
tttttttcctgctaaaatgatagaggcagaagagcaacagccttgcaagacagacttctattctgaattgccaaaagtggaacttcatgcccacttgaatggatccattagttctcataccatgaagaaattaatagcccagaagccagatcttaaaatccacgatcagatgactgtgattgacaagggaaagaaaagaactttggaagaatgtttccagatgtttcaaactattcatcagcttactagtagccctgaagatattctaatggtcacaaaagatgtcataaaagaatttgcagatgacggcgtcaagtacctggaactaaggagcacacccagaagagaaaatgctactggaatgactaaaaagacttatgtggaatctatacttgaaggtataaaacagtccaaacaagaaaacttggacattgatgttaggtatttgatagcagttgacagaagaggtggccctttagtagccaaggagactgtaaaacttgccgaggagttcttcctttctactgagggtacagttcttggccttgacctcagtggagaccctactgtaggacaagcaaaagacttcttggaacctcttttagaagctaagaaagcaggtctgaagttagcattgcatctttcagagattccaaaccaaaaaaaagaaacacaaatactcctggatctgcttcctgacagaatcgggcatggaacatttctcaactccggtgagggaggatccctggatctggtggactttgtgaggcaacatcggataccactggaactctgtttgacctcaaacgtcaaaagtcagacagttccatcttatgaccagcaccatttcggattctggtacagcattgcccatccttctgtgatctgtactgatgataagggtgtttttgcaacacacctttctcaagagtaccagctggcagctgaaacatttaatttgacccagtctcaggtgtgggatctgtcttatgaatccatcaactacatctttgcttctgacagcaccagatctgaactgaggaagaaatggaatcacctgaagcccagagtgttacatatttaagctataatgaggtgaactacttctgagtatgtgtttcaatcaagttcctgccatatcccacttagtaaaacagtccaccactcctttgaagcatagcaaccaagttccttgggctctatcaccagcaccttacacatggcaggt

SEQ ID NO: 105180 - DNA, 2582 bp, Homo sapiens
  Payload ID: 637
  Gene Symbol: ADAL
  Gene Name: adenosine deaminase-like
  ENST ID: ENST00000566154
  CDS Start-End: 1-332
taaaacttgccgaggagttcttcctttctactgagggtacagttcttggccttgacctcagtggagaccctactattccaaaccaaaaaaaagaaacacaaatactcctggatctgcttcctgacagaatcgggcatggaacatttctcaactccggtgagggaggatccctggatctggtggactttgtgaggcaacatcggataccactggaactctgtttgacctcaaacgtcaaaagtcagacagttccatcttatgaccagcaccatttcggattctggtacagcattgcccatccttctgtgatctgtgtaaggtgttccgtgtgaagtattttgctcctttttgctccctgagttgcattaattcagatgttcactatctagctgactgccttgcatgcctgaggataatgcccaagtagaggagttagaagggaccggggtgtggctgagtatggtggcgcacacctgtaatcccagctactcgggagactaaggcaggagaatcacttgaacccaggaggaggaggttgcagtgagcagagatcatgccattgcactccatcttgggcaacaagagtgaaactccatctcacaaagcaaaaaaaaaaagggactgggacatgagaggctacagagggccagggtgactctggtttggctctctagcaaaaggtacttgagaggacttaaaaacaaacaaaaaaactgatgctctgcacccatcccatgagattctgttttatttgatctggggtgagtcctgggcagagataggctttaaaagctccttaggtaattttaatatccagccagagttgaaacactgctctggtatcttttcttaagtataaataaatctgtttagttacagctatgcatagataaatttgtaggcccttgtttagactcttgaaagaagcatagtaaataggaaaatagactctaaacaaaaagatggttgtttttgaaaaatccttcctttttcattttgaaacattcttgtttacgttggcagactgatgataagggtgtttttgcaacacacctttctcaagagtaccagctggcagctgaaacatttaatttgacccagtctcaggtgtgggatctgtcttatgaatccatcaactacatctttgcttctgacagcaccagatctgaactgaggaagaaatggaatcacctgaagcccagagtgttacatatttaagctataatgaggtgaactacttctgagtatgtgtttcaatcaagttcctgccatatcccacttagtaaaacagtccaccactcctttgaagcatagcaaccaagttccttgggctctatcaccagcaccttacacatggcaggtactcagtaaatacgtgtcttcaactgactcacaagctctcaggtgcttactgggtgggacttgactgttgttgctaattaaatccccattccaccagtgattattgtgactcagcagtccttccctattagtgatcataaaatttcagggaaatcgaagtttctcatcaggaaatgttttggaattactagtataaagttaggaaagtggggaaattaggttactgccgagacctttaagccttctaaacagctttatattttattgtgcatactttaatcagactcccttcactcgctttaagtttttaaaagtattccccagccggatgtgatggctcatgcctgtaatcccagcactttgggaagccaaagtgggcagattgcttgatcctaggagttcagtagcagcctaggcaacatggagaaaccctgtctctacaaaaacaaaaaaacaaaaaaccggaaattagtcaggcacggtggtacacacctgtagtcccagccaccagggaggctaaggtgggaggagacctgatcccagggatgtttgaggctgcagtgagctgtgatgctacagcactccagcctgggcaacagagtgaaaccctgtttcaagaaaaagaaaagtattctccaagatcccaagaccattgacaccaggccacattgtataccagggatttatgtgaatgcctagggatgaccgtagtgacagataaagctaggtgctgagatctggttttgccctctttatgattgtcccatcggtactagaaagtgaagtcattgctccaattttggaagaggagagaataactggctgaggggtgagaaagacagaaatagctgcagctctcttttttttttttttcaacaaaggctctcactctgttccccaggctggagtgcagtgacatgatcacagatcactgcagctttcagttttaaaacagcttttattacattttctttgtggaagctgtatttctaccttagtactcactttctgcttggtctgaaagatacctctagtagtggcaacattgtgttaagtagagttcattgggtctcttgtaaccctacccctacataatggaccactggtgcaggcttacataaacacacatactgtggccacttcagctgaagacaagggacaaactaagatagttctgaaaggtaaaaaaacaaacaaacaaacaaaaaacaaaaacaaaa

SEQ ID NO: 105181 - DNA, 974 bp, Homo sapiens
  Payload ID: 637
  Gene Symbol: ADAL
  Gene Name: adenosine deaminase-like
  Uniprot ID: Q6DHV7
  ENST ID: ENST00000610420
  CDS Start-End: 171-974
aaaataggtgaagctgaacccagatctacacatacagctaatcttaccaaaatgtgtggaagtaaagcaatctgaaggaaattcagtaccatacaatttactgactgaaatacatcatattgctcatactaagaataagagtggagaagaatcatttttttcctgctaaaatgatagaggcagaagagcaacagccttgcaagacagacttctattctgaattgccaaaagtggaacttcatgcccacttgaatggatccattagttctcataccatgaagaaattaatagcccagaagccagatcttaaaatccacgatcagatgactgtgattgacaagggaaagaaaagaactttggaagaatgtttccagatgtttcaaactattcatcagcttactagtagccctgaagatattctaatggtcacaaaagatgtcataaaagaatttgcagatgacggcgtcaagtacctggaactaaggagcacacccagaagagaaaatgctactggaatgactaaaaagacttatgtggaatctatacttgaaggtataaaacagtccaaacaagaaaacttggacattgatgttaggtatttgatagcagttgacagaagaggtggccctttagtagccaaggagactgtaaaacttgccgaggagttcttcctttctactgagggtacagttcttggccttgacctcagtggagaccctactgtaggacaagcaaaagacttcttggaacctcttttagaagctaagaaagcaggtctgaagttagcattgcatctttcagagattccaaaccaaaaaaaagaaacacaaatactcctggatctgcttcctgacagaatcgggcatggaacatttctcaactccggtgagggaggatccctggatctggtggactttgtgaggcaacatcggataccactgggtaaggcttggagtttcaggtcttccagatga

SEQ ID NO: 105182 - DNA, 1169 bp, Homo sapiens
  Payload ID: 638
  Gene Symbol: ADK
  Gene Name: adenosine kinase
  Uniprot ID: P55263
  ENST ID: ENST00000286621
  CDS Start-End: 51-1139
gtggatggcagaggtgggctgtagagccaaagtggggtgggagcgcgaagatggcagctgctgaggaggagccgaagcccaaaaagctgaaggtggaggcgccgcaagcgctgagagaaaatattctctttggaatgggaaatcctctgcttgacatctctgctgtagtggacaaagatttccttgataagtattctctgaaaccaaatgaccaaatcttggctgaagacaaacacaaggaactgtttgatgaacttgtgaaaaaattcaaagtcgaatatcatgctggtggctctacccagaattcaattaaagtggctcagtggatgattcaacagccacacaaagcagcaacattttttggatgcattgggatagataaatttggggagatcctgaagagaaaagctgctgaagcccatgtggatgctcattactacgagcagaatgagcagccaacaggaacttgtgctgcatgcatcactggtgacaacaggtccctcatagctaatcttgctgctgccaattgttataaaaaggaaaaacatcttgatctggagaaaaactggatgttggtagaaaaagcaagagtttgttatatagcaggcttttttcttacagtttccccagagtcagtattaaaggtggctcaccatgcttctgaaaacaacaggattttcactttgaatctatctgcaccgtttattagccagttctacaaggaatcattgatgaaagttatgccttatgttgatatactttttggaaatgagacagaagctgccacttttgctagagagcaaggctttgagactaaagacattaaagagatagccaaaaagacacaagccctgccaaagatgaactcaaagaggcagcgaatcgtgatcttcacccaagggagagatgacactataatggctacagaaagtgaagtcactgcttttgctgtcttggatcaagaccagaaagaaattattgataccaatggagctggagatgcatttgttggaggttttctgtctcaactggtctctgacaagcctctgactgaatgtatccgtgctggccactatgcagcaagcatcataattagacggactggctgcacctttcctgagaagccagacttccactgatggaagagctgaaaacacaagcccaggagt

SEQ ID NO: 105183 - DNA, 2083 bp, Homo sapiens
  Payload ID: 638
  Gene Symbol: ADK
  Gene Name: adenosine kinase
  Uniprot ID: P55263
  ENST ID: ENST00000372734
  CDS Start-End: 188-1225
cgccttccctccaatcagcacgccgggccggctagccaggggccgcccgcgcgcggggtgtgtgaggacgcgctcccagtcgctgagtgcctgagccgggaagcagttgctgtggtacctgctgctgcccgagcggacgtagagcatcggacgcgggcgccgtggcgctgggcaggagggcgaagccatgacgtcagtcagagaaaatattctctttggaatgggaaatcctctgcttgacatctctgctgtagtggacaaagatttccttgataagtattctctgaaaccaaatgaccaaatcttggctgaagacaaacacaaggaactgtttgatgaacttgtgaaaaaattcaaagtcgaatatcatgctggtggctctacccagaattcaattaaagtggctcagtggatgattcaacagccacacaaagcagcaacattttttggatgcattgggatagataaatttggggagatcctgaagagaaaagctgctgaagcccatgtggatgctcattactacgagcagaatgagcagccaacaggaacttgtgctgcatgcatcactggtgacaacaggtccctcatagctaatcttgctgctgccaattgttataaaaaggaaaaacatcttgatctggagaaaaactggatgttggtagaaaaagcaagagtttgttatatagcaggcttttttcttacagtttccccagagtcagtattaaaggtggctcaccatgcttctgaaaacaacaggattttcactttgaatctatctgcaccgtttattagccagttctacaaggaatcattgatgaaagttatgccttatgttgatatactttttggaaatgagacagaagctgccacttttgctagagagcaaggctttgagactaaagacattaaagagatagccaaaaagacacaagccctgccaaagatgaactcaaagaggcagcgaatcgtgatcttcacccaagggagagatgacactataatggctacagaaagtgaagtcactgcttttgctgtcttggatcaagaccagaaagaaattattgataccaatggagctggagatgcatttgttggaggttttctgtctcaactggtctctgacaagcctctgactgaatgtatccgtgctggccactatgcagcaagcatcataattagacggactggctgcacctttcctgagaagccagacttccactgatggaagagctgaaaacacaagcccaggagtgcagacactgccctaattgcttcctgagaattcccatattaataaagaagaaaattatctgccattttttcctactataataatgctgaatcttaatttagagggtacaagggtatggtaatgcttgtagaatctttattatctcaacaatctaaaaaatgatgtttatttccatagtttgatagtgccacttaaatgccaattaaacaagaatataacatttcaatagaaatttttatttcattttcaattactttgtaaattcgtgtgtatttagtacactgatttgtttttttacatttctgctttgaatgcagatgcaatttaatataatagattttttaatgaattaatcttaacatagtaatctttagctttttatacaaatatatttaatttaggagtatatgtgtgtctatacacacacatacataaatataccacatatacacctgatagtcaaataaggtacagaaattttatcttgtcaattatgccaaataatctctttaatgtgcactcaaacatgtaataaactttggataattaaataatgtgccaaatttaagttgtaccacaatattcaaatcatagtcttatggaactctgtaattggacacaaacaaaaacttgtcatataggaatttttttctgtcttttccctgtgtacagcaaactgaggaagaaagatcattatttaatactgggccctgaaatgacacccaatttgttaatggaattatgaagaacagcaatataatacactgaagaataacttagtatcagagaccaataaatcacttttttaaggatgacaaaatggtataa

SEQ ID NO: 105184 - DNA, 2222 bp, Homo sapiens
  Payload ID: 638
  Gene Symbol: ADK
  Gene Name: adenosine kinase
  Uniprot ID: P55263
  ENST ID: ENST00000541550
  CDS Start-End: 385-1368
cggccatttttggggcgggcacccaatctctcgccctgtaaactgcggggtgacgggacgctgttactaggactcaagatggccaccgcgcccgctagtcatctcgctagcccgcgcgccagtgagctggcacgagacacgcggtggcccacggcgtctggggacgatctccagcccttcgcacggggcggagcgcccgccttccctccaatcagcacgccgggccggctagccaggggccgcccgcgcgcggggtgtgtgaggacgcgctcccagtcgctgagtgcctgagccgggaagcagttgctgtggtacctgctgctgcccgagcggacgtagagcatcggacgcgggcgccgtggcgctgggcaggagggcgaagccatgacgtcagtcagagaaaatattctctttggaatgggaaatcctctgcttgacatctctgctgtagtggacaaagatttccttgataagtttgatgaacttgtgaaaaaattcaaagtcgaatatcatgctggtggctctacccagaattcaattaaagtggctcagtggatgattcaacagccacacaaagcagcaacattttttggatgcattgggatagataaatttggggagatcctgaagagaaaagctgctgaagcccatgtggatgctcattactacgagcagaatgagcagccaacaggaacttgtgctgcatgcatcactggtgacaacaggtccctcatagctaatcttgctgctgccaattgttataaaaaggaaaaacatcttgatctggagaaaaactggatgttggtagaaaaagcaagagtttgttatatagcaggcttttttcttacagtttccccagagtcagtattaaaggtggctcaccatgcttctgaaaacaacaggattttcactttgaatctatctgcaccgtttattagccagttctacaaggaatcattgatgaaagttatgccttatgttgatatactttttggaaatgagacagaagctgccacttttgctagagagcaaggctttgagactaaagacattaaagagatagccaaaaagacacaagccctgccaaagatgaactcaaagaggcagcgaatcgtgatcttcacccaagggagagatgacactataatggctacagaaagtgaagtcactgcttttgctgtcttggatcaagaccagaaagaaattattgataccaatggagctggagatgcatttgttggaggttttctgtctcaactggtctctgacaagcctctgactgaatgtatccgtgctggccactatgcagcaagcatcataattagacggactggctgcacctttcctgagaagccagacttccactgatggaagagctgaaaacacaagcccaggagtgcagacactgccctaattgcttcctgagaattcccatattaataaagaagaaaattatctgccattttttcctactataataatgctgaatcttaatttagagggtacaagggtatggtaatgcttgtagaatctttattatctcaacaatctaaaaaatgatgtttatttccatagtttgatagtgccacttaaatgccaattaaacaagaatataacatttcaatagaaatttttatttcattttcaattactttgtaaattcgtgtgtatttagtacactgatttgtttttttacatttctgctttgaatgcagatgcaatttaatataatagattttttaatgaattaatcttaacatagtaatctttagctttttatacaaatatatttaatttaggagtatatgtgtgtctatacacacacatacataaatataccacatatacacctgatagtcaaataaggtacagaaattttatcttgtcaattatgccaaataatctctttaatgtgcactcaaacatgtaataaactttggataattaaataatgtgccaaatttaagttgtaccacaatattcaaatcatagtcttatggaactctgtaattggacacaaacaaaaacttgtcatataggaatttttttctgtcttttccctgtgtacagcaaactgaggaagaaagatcattatttaatactgggccctgaaatgacacccaatttgttaatggaattatgaagaacagcaatataatacactgaagaataacttagtatcagagaccaataaatcacttttttaaggatgacaaaatggt

SEQ ID NO: 105185 - DNA, 1866 bp, Homo sapiens
  Payload ID: 638
  Gene Symbol: ADK
  Gene Name: adenosine kinase
  Uniprot ID: P55263
  ENST ID: ENST00000539909
  CDS Start-End: 95-1012
ggagaagagaaagcggtgatgcgaagagggggcgggaccagagagtggatggcagaggtgggctgtagagccaaagtggggtgggagcgcgaagatggcagctgctgaggaggagccgaagcccaaaaagctgaaggtggaggcgccgcaagcgctgagagaaaatattctctttggaatgggaaatcctctgcttgacatctctgctgtagtggacaaagatttccttgataagtattctctgaaaccaaatgaccaaatcttggctgaagacaaacacaaggaactgtttgatgaacttgtgaaaaaattcaaagtcgaatatcatgctggtggctctacccagaattcaattaaagtggctcagtggatgattcaacagccacacaaagcagcaacattttttggatgcattgggatagataaatttggggagatcctgaagagaaaagctgctgaagcccatgtggatgctcattactacgagcagaatgagcagccaacaggaacttgtgctgcatgcatcactggtgacaacaggtccctcatagctaatcttgctgctgccaattgttataaaaaggaaaaacatcttgatctggagaaaaactggatgttggtagaaaaagcaagagtttgttatatagcagaagctgccacttttgctagagagcaaggctttgagactaaagacattaaagagatagccaaaaagacacaagccctgccaaagatgaactcaaagaggcagcgaatcgtgatcttcacccaagggagagatgacactataatggctacagaaagtgaagtcactgcttttgctgtcttggatcaagaccagaaagaaattattgataccaatggagctggagatgcatttgttggaggttttctgtctcaactggtctctgacaagcctctgactgaatgtatccgtgctggccactatgcagcaagcatcataattagacggactggctgcacctttcctgagaagccagacttccactgatggaagagctgaaaacacaagcccaggagtgcagacactgccctaattgcttcctgagaattcccatattaataaagaagaaaattatctgccattttttcctactataataatgctgaatcttaatttagagggtacaagggtatggtaatgcttgtagaatctttattatctcaacaatctaaaaaatgatgtttatttccatagtttgatagtgccacttaaatgccaattaaacaagaatataacatttcaatagaaatttttatttcattttcaattactttgtaaattcgtgtgtatttagtacactgatttgtttttttacatttctgctttgaatgcagatgcaatttaatataatagattttttaatgaattaatcttaacatagtaatctttagctttttatacaaatatatttaatttaggagtatatgtgtgtctatacacacacatacataaatataccacatatacacctgatagtcaaataaggtacagaaattttatcttgtcaattatgccaaataatctctttaatgtgcactcaaacatgtaataaactttggataattaaataatgtgccaaatttaagttgtaccacaatattcaaatcatagtcttatggaactctgtaattggacacaaacaaaaacttgtcatataggaatttttttctgtcttttccctgtgtacagcaaactgaggaagaaagatcattatttaatactgggccctgaaatgacacccaatttgttaatggaattatgaagaacagcaatataatacactgaagaataacttagtatcagagaccaataaatcacttttttaaggatgacaaaatggt

SEQ ID NO: 105186 - DNA, 2392 bp, Homo sapiens
  Payload ID: 639
  Gene Symbol: AMPD1
  Gene Name: adenosine monophosphate deaminase 1
  Uniprot ID: P23109
  ENST ID: ENST00000369538
  CDS Start-End: 49-2379
acttagcagagaagaatcaaatttccgggggcaaagcaaaataataaaatgaatgtcaggatattttatagtgtcagtcagtcaccccacagtctcctctctcttcttttctactgtgctatcctagaatcaaggatttcagcaacaatgcctctgttcaaactcccagaaattgatgatgcaatgcgcaactttgctgaaaaagtgtttgcctctgaagtcaaagatgaaggaggtcgtcaggagatttccccctttgatgtggatgagatctgtccgatttctcatcatgagatgcaagcacacatattccatctggagactctgtccacctccacagaagccaggagaaaaaagcgtttccaaggacggaagactgttaatttgtccattccactaagtgaaacatcttccaccaaactgtcccacattgatgaatacatttcctcatctccaacctaccagaccgtgcctgattttcagagagtgcagattactggtgactatgcctctggggttacagttgaagattttgaaattgtttgcaaaggtctgtatcgggcactatgcatacgtgagaaatacatgcagaagtcgtttcagaggttccctaaaaccccttccaaatacttgcggaacattgatggtgaggcttgggtagcaaatgagagcttctatccagtctttactcctcctgtgaagaagggagaggaccccttccgaacagacaaccttcctgaaaacctgggctatcacctcaaaatgaaggacggtgtagtttacgtctatcctaatgaagcagcagtcagcaaagatgagcctaagccacttccttacccaaatctggacaccttcttagacgatatgaattttttacttgctttaattgctcaaggacctgttaagacctatacccaccggcgcctgaagttcctctcctccaagttccaggtccatcagatgcttaacgagatggacgagttaaaggagctgaaaaacaacccccaccgagatttttataactgcaggaaggtggacacccatatccatgcagccgcttgcatgaaccagaaacatctgctgcgttttattaagaaatcttaccaaattgatgctgacagagtggtctatagcaccaaagagaagaatctgaccctaaaggaactttttgctaaattaaaaatgcatccttatgacctgactgttgattctctggatgttcatgctggacgccagaccttccagcgttttgataagttcaatgacaaatataatcctgtaggagcaagtgagctacgggacctctacttgaagacagacaattacattaatggggaatattttgccactatcatcaaggaggtaggtgcggacctggtggaggccaagtaccagcatgctgagccccgcctgtccatctatggccgcagtcctgatgagtggagcaaactctcctcctggttcgtctgcaatcgcatccactgccccaacatgacatggatgatccaggttcccaggatctatgatgtgttccgttccaagaatttccttccacattttggaaaaatgctggagaatattttcatgccagtgtttgaggccaccatcaacccccaggctgacccagaactcagtgtcttcctcaagcatatcactggctttgacagtgtggatgatgagtccaaacacagtggccacatgttctcctccaagagtcccaagccccaggagtggacattggaaaagaatccatcttacacttactatgcctactacatgtatgcaaacatcatggtgctcaacagcctgagaaaggaacgaggcatgaatacgtttctgttccgacctcactgtggagaagctggagccctcacccatctcatgacagcattcatgatagcagatgatatctctcatggcctaaatttaaaaaagagtcccgtgctacagtacttgtttttcttagcccaaattcccatcgccatgtcaccactaagtaacaatagcctatttctagagtatgccaaaaatccttttttggatttccttcagaaagggctaatgatctcactgtctacagatgacccaatgcaattccactttaccaaggagcccctaatggaagaatatgctattgctgcacaagtcttcaagctgagcacctgtgatatgtgcgaagtggcaaggaacagtgtcttgcagtgtggaatttctcatgaggagaaagtaaagtttctgggcgacaattaccttgaggaaggccctgctggaaatgatatccggaggacaaatgtagcccaaatccgcatggcctatcgctatgaaacctggtgttatgaactcaatttaattgctgagggtcttaaatcaacagaataaaaaaaagtaaacc

SEQ ID NO: 105187 - DNA, 2375 bp, Homo sapiens
  Payload ID: 639
  Gene Symbol: AMPD1
  Gene Name: adenosine monophosphate deaminase 1
  Uniprot ID: P23109
  ENST ID: ENST00000520113
  CDS Start-End: 17-2359
aaagcaaaataataaaatgaatgtcaggatattttatagtgtcagtcagtcaccccacagtctcctctctcttcttttctactgtgctatcctagaatcaaggatttcagcaacaatgcctctgttcaaactcccagctgaagagaaacaaattgatgatgcaatgcgcaactttgctgaaaaagtgtttgcctctgaagtcaaagatgaaggaggtcgtcaggagatttccccctttgatgtggatgagatctgtccgatttctcatcatgagatgcaagcacacatattccatctggagactctgtccacctccacagaagccaggagaaaaaagcgtttccaaggacggaagactgttaatttgtccattccactaagtgaaacatcttccaccaaactgtcccacattgatgaatacatttcctcatctccaacctaccagaccgtgcctgattttcagagagtgcagattactggtgactatgcctctggggttacagttgaagattttgaaattgtttgcaaaggtctgtatcgggcactatgcatacgtgagaaatacatgcagaagtcgtttcagaggttccctaaaaccccttccaaatacttgcggaacattgatggtgaggcttgggtagcaaatgagagcttctatccagtctttactcctcctgtgaagaagggagaggaccccttccgaacagacaaccttcctgaaaacctgggctatcacctcaaaatgaaggacggtgtagtttacgtctatcctaatgaagcagcagtcagcaaagatgagcctaagccacttccttacccaaatctggacaccttcttagacgatatgaattttttacttgctttaattgctcaaggacctgttaagacctatacccaccggcgcctgaagttcctctcctccaagttccaggtccatcagatgcttaacgagatggacgagttaaaggagctgaaaaacaacccccaccgagatttttataactgcaggaaggtggacacccatatccatgcagccgcttgcatgaaccagaaacatctgctgcgttttattaagaaatcttaccaaattgatgctgacagagtggtctatagcaccaaagagaagaatctgaccctaaaggaactttttgctaaattaaaaatgcatccttatgacctgactgttgattctctggatgttcatgctggacgccagaccttccagcgttttgataagttcaatgacaaatataatcctgtaggagcaagtgagctacgggacctctacttgaagacagacaattacattaatggggaatattttgccactatcatcaaggaggtaggtgcggacctggtggaggccaagtaccagcatgctgagccccgcctgtccatctatggccgcagtcctgatgagtggagcaaactctcctcctggttcgtctgcaatcgcatccactgccccaacatgacatggatgatccaggttcccaggatctatgatgtgttccgttccaagaatttccttccacattttggaaaaatgctggagaatattttcatgccagtgtttgaggccaccatcaacccccaggctgacccagaactcagtgtcttcctcaagcatatcactggctttgacagtgtggatgatgagtccaaacacagtggccacatgttctcctccaagagtcccaagccccaggagtggacattggaaaagaatccatcttacacttactatgcctactacatgtatgcaaacatcatggtgctcaacagcctgagaaaggaacgaggcatgaatacgtttctgttccgacctcactgtggagaagctggagccctcacccatctcatgacagcattcatgatagcagatgatatctctcatggcctaaatttaaaaaagagtcccgtgctacagtacttgtttttcttagcccaaattcccatcgccatgtcaccactaagtaacaatagcctatttctagagtatgccaaaaatccttttttggatttccttcagaaagggctaatgatctcactgtctacagatgacccaatgcaattccactttaccaaggagcccctaatggaagaatatgctattgctgcacaagtcttcaagctgagcacctgtgatatgtgcgaagtggcaaggaacagtgtcttgcagtgtggaatttctcatgaggagaaagtaaagtttctgggcgacaattaccttgaggaaggccctgctggaaatgatatccggaggacaaatgtagcccaaatccgcatggcctatcgctatgaaacctggtgttatgaactcaatttaattgctgagggtcttaaatcaacagaataaaaaaaagtaaaccaaa

SEQ ID NO: 105188 - DNA, 3899 bp, Homo sapiens
  Payload ID: 640
  Gene Symbol: AMPD2
  Gene Name: adenosine monophosphate deaminase 2
  Uniprot ID: Q01433
  ENST ID: ENST00000256578
  CDS Start-End: 361-3000
gggtgctgggttttcacggagtatgcctgccctgccccgggaggactgtgtttgagcttggactcgctcgctgctgaattcctgtttgttattcttttttcttccaggctagctggaaggaccagctagcctggactttggcttctttgcccgggagccctggcatgatggggtgagggctcttggtgggttagtggagagctgggggctggcccttccccatcttcttttctacccaccccctccccgccccccgccaggcccagccaccatcagtcacgtcactcctgggactgaggaggcaggggagggataaggggcagagatggaggccccactccccgaggttgcctagacaacatgagaaatcgtggccagggcctcttccgcctgcggagccgctgcttcctgcatcagtcactcccgctgggggcggggcggaggaaggggttggatgtggcagagccaggccccagccggtgccgctcagactcccccgctgtcgccgccgtggtcccagccatggcatcctatccatctggctctggcaagcccaaggccaaatatccctttaagaagcgggccagcctgcaggcctccactgcagctccagaggctcggggtggtctgggggcccctccgctgcagtctgcccgatccctgccgggccccgccccctgcctcaagcacttcccgctcgacctgcgcacgtctatggatggcaaatgcaaggagatcgccgaggagctgttcacccgctcactggctgagagcgagctccgtagtgccccgtatgagttccccgaggagagccccattgaacagctggaggagcggcggcagcggctggagcggcagatcagccaggatgtcaagctggagccagacatcctgcttcgggccaagcaagatttcctgaagacggacagtgactcggacctacagctctacaaggaacagggtgaggggcagggtgaccggagcctgcgggagcgtgatgtgctggaacgggagtttcagcgggtcaccatctctggggaggagaagtgtggggtgccgttcacagacctgctggatgcagccaagagtgtggtgcgggcgctcttcatccgggagaagtacatggccctgtccctgcagagcttctgccccaccacccgccgctacctgcagcagctggctgaaaagcctctggagacccggacctatgaacagggccccgacacccctgtgtctgctgatgccccggtgcacccccctgcgctggagcagcacccgtatgagcactgtgagccaagcaccatgcctggggacctgggcttgggtctgcgcatggtgcggggtgtggtgcacgtctacacccgcagggaacccgacgagcattgctcagaggtggagctgccataccctgacctgcaggaatttgtggctgacgtcaatgtgctgatggccctgattatcaatggccccataaagtcattctgctaccgccggctgcagtacctgagctccaagttccagatgcatgtgctactcaatgagatgaaggagctggccgcccagaagaaagtgccacaccgagatttctacaacatccgcaaggtggacacccacatccatgcctcgtcctgcatgaaccagaagcatctgctgcgcttcatcaagcgggcaatgaagcggcacctggaggagatcgtgcacgtggagcagggccgtgaacagacgctgcgggaggtctttgagagcatgaatctcacggcctacgacctgagtgtggacacgctggatgtgcatgcggacaggaacactttccatcgctttgacaagtttaatgccaaatacaaccctattggggagtccgtcctccgagagatcttcatcaagacggacaacagggtatctgggaagtactttgctcacatcatcaaggaggtgatgtcagacctggaggagagcaaataccagaatgcagagctgcggctctccatttacgggcgctcgagggatgagtgggacaagctggcgcgctgggccgtcatgcaccgcgtgcactcccccaacgtgcgctggctggtgcaggtgccccgcctctttgatgtgtaccgtaccaagggccagctggccaacttccaggagatgctggagaacatcttcctgccactgttcgaggccactgtgcaccctgccagccacccggaactgcatctcttcttagagcacgtggatggttttgacagcgtggatgatgagtccaagcctgaaaaccatgtcttcaacctggagagccccctgcctgaggcgtgggtggaggaggacaacccaccctatgcctactacctgtactacacctttgccaacatggccatgttgaaccacctgcgcaggcagaggggcttccacacgtttgtgctgaggccacactgtggggaggctgggcccatccaccacctggtgtcagccttcatgctggctgagaacatttcccacgggctccttctgcgcaaggcccccgtcctgcagtacctgtactacctggcccagatcggcatcgccatgtctccgctcagcaacaacagcctcttcctcagctatcaccggaatccgctaccggagtacctgtcccgcggcctcatggtctccctgtccactgatgatcccttgcagttccacttcaccaaggagccgctgatggaggagtacagcatcgccacccaggtgtggaagctcagctcctgcgatatgtgtgagctggcccgcaacagcgtgctcatgagcggcttctcgcacaaggtaaagagccactggctgggacccaactataccaaggaaggccctgaggggaatgacatccgccggaccaatgtgccagacatccgcgtgggctaccgctacgagaccctgtgccaggagctggcgctcatcacgcaggcagtccagagtgagatgctggagaccattccagaggaggcgggtatcaccatgagcccagggcctcaatgagcctggtccatgaagtgcccaccacatcgcagcacttttaccacgttttgtcctcagaccccgcccatgctgtgtggtctctgcatgtctccattcttctctgtctctgtcttgcatgtctcctaccatgtcactgtccctgggccacccagtgaaagcaaagcctgggaatctgctcattgttgtttgggctcaggtattgagcctgatggcccaggtattgagggcctcccctgctggtggccctgtcctgggatcctcagaagcctgactgtcctatgggcttctccagtgtccacaggggcttgggatggttgtggggggctggcccctctagcctttccggtccttcctgggcaaatctaagccttggccagggccgaagtttaggcccctgtcttgttcatgtagccgaggggcaggcgggggacctctacacctctgctgtgggcacggggctgctgagggtctgtggaactccagcagctctgcactgggtagagctgggcctagagctcagtcacaggcctgggcttcctggcctgagtgggtagacgcaggcggcagaggtgctggaccacatctccgccaagtcactgcccagcagccttctccgtcctgtccccagcccacgtgctccttgggtgtcagcttcctgtgcctctgtgggagagggcagctgccttgtgttatgtctggggccacagttgctgcaaagtcctggatctgccactcaaccccgggagtggtgttcccagtgtggctcccagagctttgaccagattgtgatcccagctggcccctatgttgtgttctggactgaggcctttgctgtgaactgcagtgtttcatacgaaccatctttcctagtgcatgagaaataaagattatttaagtaa

SEQ ID NO: 105189 - DNA, 3728 bp, Homo sapiens
  Payload ID: 640
  Gene Symbol: AMPD2
  Gene Name: adenosine monophosphate deaminase 2
  Uniprot ID: Q01433
  ENST ID: ENST00000342115
  CDS Start-End: 433-2829
aagggccgcagagcctggcgcggagccggcgagattttggtggggtctcacctgttgcgtgactcccccacagtccggccgcgggagtccgaccctgaatgcccagggagtgttgagagaaatctggacgagtttcgggtcccgctcccttgggagcacgtggcctaccagcctctcgattgcagggttgggtggtcgcgacaccggggtcgccttgaggccagtccggctgccgaggtctgcgggagtccacctccggccagctggcaattttgaaagactgccttactttccccatctcagtgccagggcaggggcccttggagtgacttggctggggtctgtggcccgatccccctgccgtccctcaggacccgggctttctgctgtacagacttctcgtgggcagcctcccctcggaactcgggcatcatggcctcagaggctcggggtggtctgggggcccctccgctgcagtctgcccgatccctgccgggccccgccccctgcctcaagcacttcccgctcgacctgcgcacgtctatggatggcaaatgcaaggagatcgccgaggagctgttcacccgctcactggctgagagcgagctccgtagtgccccgtatgagttccccgaggagagccccattgaacagctggaggagcggcggcagcggctggagcggcagatcagccaggatgtcaagctggagccagacatcctgcttcgggccaagcaagatttcctgaagacggacagtgactcggacctacagctctacaaggaacagggtgaggggcagggtgaccggagcctgcgggagcgtgatgtgctggaacgggagtttcagcgggtcaccatctctggggaggagaagtgtggggtgccgttcacagacctgctggatgcagccaagagtgtggtgcgggcgctcttcatccgggagaagtacatggccctgtccctgcagagcttctgccccaccacccgccgctacctgcagcagctggctgaaaagcctctggagacccggacctatgaacagggccccgacacccctgtgtctgctgatgccccggtgcacccccctgcgctggagcagcacccgtatgagcactgtgagccaagcaccatgcctggggacctgggcttgggtctgcgcatggtgcggggtgtggtgcacgtctacacccgcagggaacccgacgagcattgctcagaggtggagctgccataccctgacctgcaggaatttgtggctgacgtcaatgtgctgatggccctgattatcaatggccccataaagtcattctgctaccgccggctgcagtacctgagctccaagttccagatgcatgtgctactcaatgagatgaaggagctggccgcccagaagaaagtgccacaccgagatttctacaacatccgcaaggtggacacccacatccatgcctcgtcctgcatgaaccagaagcatctgctgcgcttcatcaagcgggcaatgaagcggcacctggaggagatcgtgcacgtggagcagggccgtgaacagacgctgcgggaggtctttgagagcatgaatctcacggcctacgacctgagtgtggacacgctggatgtgcatgcggacaggaacactttccatcgctttgacaagtttaatgccaaatacaaccctattggggagtccgtcctccgagagatcttcatcaagacggacaacagggtatctgggaagtactttgctcacatcatcaaggaggtgatgtcagacctggaggagagcaaataccagaatgcagagctgcggctctccatttacgggcgctcgagggatgagtgggacaagctggcgcgctgggccgtcatgcaccgcgtgcactcccccaacgtgcgctggctggtgcaggtgccccgcctctttgatgtgtaccgtaccaagggccagctggccaacttccaggagatgctggagaacatcttcctgccactgttcgaggccactgtgcaccctgccagccacccggaactgcatctcttcttagagcacgtggatggttttgacagcgtggatgatgagtccaagcctgaaaaccatgtcttcaacctggagagccccctgcctgaggcgtgggtggaggaggacaacccaccctatgcctactacctgtactacacctttgccaacatggccatgttgaaccacctgcgcaggcagaggggcttccacacgtttgtgctgaggccacactgtggggaggctgggcccatccaccacctggtgtcagccttcatgctggctgagaacatttcccacgggctccttctgcgcaaggcccccgtcctgcagtacctgtactacctggcccagatcggcatcgccatgtctccgctcagcaacaacagcctcttcctcagctatcaccggaatccgctaccggagtacctgtcccgcggcctcatggtctccctgtccactgatgatcccttgcagttccacttcaccaaggagccgctgatggaggagtacagcatcgccacccaggtgtggaagctcagctcctgcgatatgtgtgagctggcccgcaacagcgtgctcatgagcggcttctcgcacaaggtaaagagccactggctgggacccaactataccaaggaaggccctgaggggaatgacatccgccggaccaatgtgccagacatccgcgtgggctaccgctacgagaccctgtgccaggagctggcgctcatcacgcaggcagtccagagtgagatgctggagaccattccagaggaggcgggtatcaccatgagcccagggcctcaatgagcctggtccatgaagtgcccaccacatcgcagcacttttaccacgttttgtcctcagaccccgcccatgctgtgtggtctctgcatgtctccattcttctctgtctctgtcttgcatgtctcctaccatgtcactgtccctgggccacccagtgaaagcaaagcctgggaatctgctcattgttgtttgggctcaggtattgagcctgatggcccaggtattgagggcctcccctgctggtggccctgtcctgggatcctcagaagcctgactgtcctatgggcttctccagtgtccacaggggcttgggatggttgtggggggctggcccctctagcctttccggtccttcctgggcaaatctaagccttggccagggccgaagtttaggcccctgtcttgttcatgtagccgaggggcaggcgggggacctctacacctctgctgtgggcacggggctgctgagggtctgtggaactccagcagctctgcactgggtagagctgggcctagagctcagtcacaggcctgggcttcctggcctgagtgggtagacgcaggcggcagaggtgctggaccacatctccgccaagtcactgcccagcagccttctccgtcctgtccccagcccacgtgctccttgggtgtcagcttcctgtgcctctgtgggagagggcagctgccttgtgttatgtctggggccacagttgctgcaaagtcctggatctgccactcaaccccgggagtggtgttcccagtgtggctcccagagctttgaccagattgtgatcccagctggcccctatgttgtgttctggactgaggcctttgctgtgaactgcagtgtttcatacgaaccatctttcctagtgcatgagaaataaagattatttaagtaa

SEQ ID NO: 105190 - DNA, 2838 bp, Homo sapiens
  Payload ID: 640
  Gene Symbol: AMPD2
  Gene Name: adenosine monophosphate deaminase 2
  Uniprot ID: Q01433
  ENST ID: ENST00000358729
  CDS Start-End: 35-2449
ctcccgctgggggcggggcggaggaaggggttggatgtggcagagccaggccccagccggtgccgctcagactcccccgctgtcgccgccgtggtcccagccatggcatcctatccatctggctctggcaagcccaaggccaaatatccctttaagaagcgggccagcctgcaggcctccactgcagctccaggagctgttcacccgctcactggctgagagcgagctccgtagtgccccgtatgagttccccgaggagagccccattgaacagctggaggagcggcggcagcggctggagcggcagatcagccaggatgtcaagctggagccagacatcctgcttcgggccaagcaagatttcctgaagacggacagtgactcggacctacagctctacaaggaacagggtgaggggcagggtgaccggagcctgcgggagcgtgatgtgctggaacgggagtttcagcgggtcaccatctctggggaggagaagtgtggggtgccgttcacagacctgctggatgcagccaagagtgtggtgcgggcgctcttcatccgggagaagtacatggccctgtccctgcagagcttctgccccaccacccgccgctacctgcagcagctggctgaaaagcctctggagacccggacctatgaacagggccccgacacccctgtgtctgctgatgccccggtgcacccccctgcgctggagcagcacccgtatgagcactgtgagccaagcaccatgcctggggacctgggcttgggtctgcgcatggtgcggggtgtggtgcacgtctacacccgcagggaacccgacgagcattgctcagaggtggagctgccataccctgacctgcaggaatttgtggctgacgtcaatgtgctgatggccctgattatcaatggccccataaagtcattctgctaccgccggctgcagtacctgagctccaagttccagatgcatgtgctactcaatgagatgaaggagctggccgcccagaagaaagtgccacaccgagatttctacaacatccgcaaggtggacacccacatccatgcctcgtcctgcatgaaccagaagcatctgctgcgcttcatcaagcgggcaatgaagcggcacctggaggagatcgtgcacgtggagcagggccgtgaacagacgctgcgggaggtctttgagagcatgaatctcacggcctacgacctgagtgtggacacgctggatgtgcatgcggacaggaacactttccatcgctttgacaagtttaatgccaaatacaaccctattggggagtccgtcctccgagagatcttcatcaagacggacaacagggtatctgggaagtactttgctcacatcatcaaggaggtgatgtcagacctggaggagagcaaataccagaatgcagagctgcggctctccatttacgggcgctcgagggatgagtgggacaagctggcgcgctgggccgtcatgcaccgcgtgcactcccccaacgtgcgctggctggtgcaggtgccccgcctctttgatgtgtaccgtaccaagggccagctggccaacttccaggagatgctggagaacatcttcctgccactgttcgaggccactgtgcaccctgccagccacccggaactgcatctcttcttagagcacgtggatggttttgacagcgtggatgatgagtccaagcctgaaaaccatgtcttcaacctggagagccccctgcctgaggcgtgggtggaggaggacaacccaccctatgcctactacctgtactacacctttgccaacatggccatgttgaaccacctgcgcaggcagaggggcttccacacgtttgtgctgaggccacactgtggggaggctgggcccatccaccacctggtgtcagccttcatgctggctgagaacatttcccacgggctccttctgcgcaaggcccccgtcctgcagtacctgtactacctggcccagatcggcatcgccatgtctccgctcagcaacaacagcctcttcctcagctatcaccggaatccgctaccggagtacctgtcccgcggcctcatggtctccctgtccactgatgatcccttgcagttccacttcaccaaggagccgctgatggaggagtacagcatcgccacccaggtgtggaagctcagctcctgcgatatgtgtgagctggcccgcaacagcgtgctcatgagcggcttctcgcacaaggtaaagagccactggctgggacccaactataccaaggaaggccctgaggggaatgacatccgccggaccaatgtgccagacatccgcgtgggctaccgctacgagaccctgtgccaggagctggcgctcatcacgcaggcagtccagagtgagatgctggagaccattccagaggaggcgggtatcaccatgagcccagggcctcaatgagcctggtccatgaagtgcccaccacatcgcagcacttttaccacgttttgtcctcagaccccgcccatgctgtgtggtctctgcatgtctccattcttctctgtctctgtcttgcatgtctcctaccatgtcactgtccctgggccacccagtgaaagcaaagcctgggaatctgctcattgttgtttgggctcaggtattgagcctgatggcccaggtattgagggcctcccctgctggtggccctgtcctgggatcctcagaagcctgactgtcctatgggcttctccagtgtccacaggggcttgggatggttgtggggggctggcccctctagcctttccggtccttcctgggcaaatctaagccttggccagggccgaagttta

SEQ ID NO: 105191 - DNA, 3130 bp, Homo sapiens
  Payload ID: 640
  Gene Symbol: AMPD2
  Gene Name: adenosine monophosphate deaminase 2
  ENST ID: ENST00000369840
  CDS Start-End: 1-2584
gttggatgtggcagagccaggccccagccggtgccgctcagactcccccgctgtcgccgccgtggtcccagccatggcatcctatccatctggctctggcaagcccaaggccaaatatccctttaagaagcgggccagcctgcaggcctccactgcagctccagaggctcggggtggtctgggggcccctccgctgcagtctgcccgatccctgccgggccccgccccctgcctcaagcacttcccgctcgacctgcgcacgtctatggatggcaaatgcaaggagatcgccgaggagctgttcacccgctcactggctgagagcgagctccgtagtgccccgtatgagttccccgaggagagccccattgaacagctggaggagcggcggcagcggctggagcggcagatcagccaggatgtcaagctggagccagacatcctgcttcgggccaagcaagatttcctgaagacggacagtgactcggacctacagctctacaaggaacagggtgaggggcagggtgaccggagcctgcgggagcgtgatgtgctggaacgggagtttcagcgggtcaccatctctggggaggagaagtgtggggtgccgttcacagacctgctggatgcagccaagagtgtggtgcgggcgctcttcatccgggagaagtacatggccctgtccctgcagagcttctgccccaccacccgccgctacctgcagcagctggctgaaaagcctctggagacccggacctatgaacagggccccgacacccctgtgtctgctgatgccccggtgcacccccctgcgctggagcagcacccgtatgagcactgtgagccaagcaccatgcctggggacctgggcttgggtctgcgcatggtgcggggtgtggtgcacgtctacacccgcagggaacccgacgagcattgctcagaggtggagctgccataccctgacctgcaggaatttgtggctgacgtcaatgtgctgatggccctgattatcaatggccccataaagtcattctgctaccgccggctgcagtacctgagctccaagttccagatgcatgtgctactcaatgagatgaaggagctggccgcccagaagaaagtgccacaccgagatttctacaacatccgcaaggtggacacccacatccatgcctcgtcctgcatgaaccagaagcatctgctgcgcttcatcaagcgggcaatgaagcggcacctggaggagatcgtgcacgtggagcagggccgtgaacagacgctgcgggaggtctttgagagcatgaatctcacggcctacgacctgagtgtggacacgctggatgtgcatgcggacaggaacactttccatcgctttgacaagtttaatgccaaatacaaccctattggggagtccgtcctccgagagatcttcatcaagacggacaacagggtatctgggaagtactttgctcacatcatcaaggaggtgatgtcagacctggaggagagcaaataccagaatgcagagctgcggctctccatttacgggcgctcgagggatgagtgggacaagctggcgcgctgggccgtcatgcaccgcgtgcactcccccaacgtgcgctggctggtgcaggtgccccgcctctttgatgtgtaccgtaccaagggccagctggccaacttccaggagatgctggagaacatcttcctgccactgttcgaggccactgtgcaccctgccagccacccggaactgcatctcttcttagagcacgtggatggttttgacagcgtggatgatgagtccaagcctgaaaaccatgtcttcaacctggagagccccctgcctgaggcgtgggtggaggaggacaacccaccctatgcctactacctgtactacacctttgccaacatggccatgttgaaccacctgcgcaggcagaggggcttccacacgtttgtgctgaggccacactgtggggaggctgggcccatccaccacctggtgtcagccttcatgctggctgagaacatttcccacgggctccttctgcgcaaggcccccgtcctgcagtacctgtactacctggcccagatcggcatcgccatgtctccgctcagcaacaacagcctcttcctcagctatcaccggaatccgctaccggagtacctgtcccgcggcctcatggtctccctgtccactgatgatcccttgcagttccacttcaccaaggtcagagcccagcaggcagccaggcgggcgggcgagccgctgatggaggagtacagcatcgccacccaggtgtggaagctcagctcctgcgatatgtgtgagctggcccgcaacagcgtgctcatgagcggcttctcgcacaaggtaaagagccactggctgggacccaactataccaaggaaggccctgaggggaatgacatccgccggaccaatgtgccagacatccgcgtgggctaccgctacgagaccctgtgccaggagctggcgctcatcacgcaggcagtccagagtgagatgctggagaccattccagaggaggcgggtatcaccatgagcccagggcctcaatgagcctggtccatgaagtgcccaccacatcgcagcacttttaccacgttttgtcctcagaccccgcccatgctgtgtggtctctgcatgtctccattcttctctgtctctgtcttgcatgtctcctaccatgtcactgtccctgggccacccagtgaaagcaaagcctgggaatctgctcattgttgtttgggctcaggtattgagcctgatggcccaggtattgagggcctcccctgctggtggccctgtcctgggatcctcagaagcctgactgtcctatgggcttctccagtgtccacaggggcttgggatggttgtggggggctggcccctctagcctttccggtccttcctgggcaaatctaagccttggccagggccgaagtttaggcccctgtcttgttcatgtagccgaggggcaggcgggggacctctacacctctgctgtgggcacggggctgctgagggtctgtggaactccagcagctctgcactgggtagagctgggcctagagctcagtcacaggcctgggcttcctggcctga

SEQ ID NO: 105192 - DNA, 3217 bp, Homo sapiens
  Payload ID: 640
  Gene Symbol: AMPD2
  Gene Name: adenosine monophosphate deaminase 2
  Uniprot ID: Q01433
  ENST ID: ENST00000393688
  CDS Start-End: 38-2320
actctgtaggagagtgcccgagggcggagggccagccatgctgaccttccttccctccccccaggagctgttcacccgctcactggctgagagcgagctccgtagtgccccgtatgagttccccgaggagagccccattgaacagctggaggagcggcggcagcggctggagcggcagatcagccaggatgtcaagctggagccagacatcctgcttcgggccaagcaagatttcctgaagacggacagtgactcggacctacagctctacaaggaacagggtgaggggcagggtgaccggagcctgcgggagcgtgatgtgctggaacgggagtttcagcgggtcaccatctctggggaggagaagtgtggggtgccgttcacagacctgctggatgcagccaagagtgtggtgcgggcgctcttcatccgggagaagtacatggccctgtccctgcagagcttctgccccaccacccgccgctacctgcagcagctggctgaaaagcctctggagacccggacctatgaacagggccccgacacccctgtgtctgctgatgccccggtgcacccccctgcgctggagcagcacccgtatgagcactgtgagccaagcaccatgcctggggacctgggcttgggtctgcgcatggtgcggggtgtggtgcacgtctacacccgcagggaacccgacgagcattgctcagaggtggagctgccataccctgacctgcaggaatttgtggctgacgtcaatgtgctgatggccctgattatcaatggccccataaagtcattctgctaccgccggctgcagtacctgagctccaagttccagatgcatgtgctactcaatgagatgaaggagctggccgcccagaagaaagtgccacaccgagatttctacaacatccgcaaggtggacacccacatccatgcctcgtcctgcatgaaccagaagcatctgctgcgcttcatcaagcgggcaatgaagcggcacctggaggagatcgtgcacgtggagcagggccgtgaacagacgctgcgggaggtctttgagagcatgaatctcacggcctacgacctgagtgtggacacgctggatgtgcatgcggacaggaacactttccatcgctttgacaagtttaatgccaaatacaaccctattggggagtccgtcctccgagagatcttcatcaagacggacaacagggtatctgggaagtactttgctcacatcatcaaggaggtgatgtcagacctggaggagagcaaataccagaatgcagagctgcggctctccatttacgggcgctcgagggatgagtgggacaagctggcgcgctgggccgtcatgcaccgcgtgcactcccccaacgtgcgctggctggtgcaggtgccccgcctctttgatgtgtaccgtaccaagggccagctggccaacttccaggagatgctggagaacatcttcctgccactgttcgaggccactgtgcaccctgccagccacccggaactgcatctcttcttagagcacgtggatggttttgacagcgtggatgatgagtccaagcctgaaaaccatgtcttcaacctggagagccccctgcctgaggcgtgggtggaggaggacaacccaccctatgcctactacctgtactacacctttgccaacatggccatgttgaaccacctgcgcaggcagaggggcttccacacgtttgtgctgaggccacactgtggggaggctgggcccatccaccacctggtgtcagccttcatgctggctgagaacatttcccacgggctccttctgcgcaaggcccccgtcctgcagtacctgtactacctggcccagatcggcatcgccatgtctccgctcagcaacaacagcctcttcctcagctatcaccggaatccgctaccggagtacctgtcccgcggcctcatggtctccctgtccactgatgatcccttgcagttccacttcaccaaggagccgctgatggaggagtacagcatcgccacccaggtgtggaagctcagctcctgcgatatgtgtgagctggcccgcaacagcgtgctcatgagcggcttctcgcacaaggtaaagagccactggctgggacccaactataccaaggaaggccctgaggggaatgacatccgccggaccaatgtgccagacatccgcgtgggctaccgctacgagaccctgtgccaggagctggcgctcatcacgcaggcagtccagagtgagatgctggagaccattccagaggaggcgggtatcaccatgagcccagggcctcaatgagcctggtccatgaagtgcccaccacatcgcagcacttttaccacgttttgtcctcagaccccgcccatgctgtgtggtctctgcatgtctccattcttctctgtctctgtcttgcatgtctcctaccatgtcactgtccctgggccacccagtgaaagcaaagcctgggaatctgctcattgttgtttgggctcaggtattgagcctgatggcccaggtattgagggcctcccctgctggtggccctgtcctgggatcctcagaagcctgactgtcctatgggcttctccagtgtccacaggggcttgggatggttgtggggggctggcccctctagcctttccggtccttcctgggcaaatctaagccttggccagggccgaagtttaggcccctgtcttgttcatgtagccgaggggcaggcgggggacctctacacctctgctgtgggcacggggctgctgagggtctgtggaactccagcagctctgcactgggtagagctgggcctagagctcagtcacaggcctgggcttcctggcctgagtgggtagacgcaggcggcagaggtgctggaccacatctccgccaagtcactgcccagcagccttctccgtcctgtccccagcccacgtgctccttgggtgtcagcttcctgtgcctctgtgggagagggcagctgccttgtgttatgtctggggccacagttgctgcaaagtcctggatctgccactcaaccccgggagtggtgttcccagtgtggctcccagagctttgaccagattgtgatcccagctggcccctatgttgtgttctggactgaggcctttgctgtgaactgcagtgtttcatacgaaccatctttcctagtgcatgagaaataaagattatttaagt

SEQ ID NO: 105193 - DNA, 585 bp, Homo sapiens
  Payload ID: 640
  Gene Symbol: AMPD2
  Gene Name: adenosine monophosphate deaminase 2
  ENST ID: ENST00000527846
  CDS Start-End: 1-585
gagtgtgtgcttcctggcctcaggatagatgctgggctctgtcttgccacctctcgcccaaggtgctggtcccctcagagggggccacctcctccggcatcctctctgtggtggtgcccctcaacctcagtcccagggacagccggcttggaagaggctcggggtggtctgggggcccctccgctgcagtctgcccgatccctgccgggccccgccccctgcctcaagcacttcccgctcgacctgcgcacgtctatggatggcaaatgcaaggagatcgccgaggagctgttcacccgctcactggctgagagcgagctccgtagtgccccgtatgagttccccgaggagagccccattgaacagctggaggagcggcggcagcggctggagcggcagatcagccaggatgtcaagctggagccagacatcctgcttcgggccaagcaagatttcctgaagacggacagtgactcggacctacagctctacaaggaacagggtgaggggcagggtgaccggagcctgcgggagcgtgatgtgctggaacgggagtttcagcgggtcaccatctctggggaggag

SEQ ID NO: 105194 - DNA, 575 bp, Homo sapiens
  Payload ID: 640
  Gene Symbol: AMPD2
  Gene Name: adenosine monophosphate deaminase 2
  ENST ID: ENST00000531203
  CDS Start-End: 315-575
gagctgggctaccccgggagctgagggtcagatgtggaaggaaaatgactggtgcaaggtctctactgtcctgagggtgttctctgtgcccaggtctgtgccatccagaaagggtgtcccctgggtggggcccttcctggccctgtttggttcagcaatagggcaactgatacggatctagcccagagctggagacccttcggtggtcagatgaggctcggggtggtctgggggcccctccgctgcagtctgcccgatccctgccgggccccgccccctgcctcaagcacttcccgctcgacctgcgcacgtctatggatggcaaatgcaaggagatcgccgaggagctgttcacccgctcactggctgagagcgagctccgtagtgccccgtatgagttccccgaggagagccccattgaacagctggaggagcggcggcagcggctggagcggcagatcagccaggatgtcaagctggagccagacatcctgcttcgggccaagcaagatttcctgaagacggacagtgactcggacctacagctctacaaggaacagggtgaggggcagggt

SEQ ID NO: 105195 - DNA, 814 bp, Homo sapiens
  Payload ID: 640
  Gene Symbol: AMPD2
  Gene Name: adenosine monophosphate deaminase 2
  ENST ID: ENST00000474459
  CDS Start-End: 423-426
gagcctggcgcggagccggcgagattttggtggggtctcacctgttgcgtgactcccccacagtccggccgcgggagtccgaccctgaatgcccagggagtgttgagagaaatctggacgagtttcgggtcccgctcccttgggagcacgtggcctaccagcctctcgattgcagggttgggtggtcgcgacaccggggtcgccttgaggccagtccggctgccgaggtctgcgggagtccacctccggccagctggcaattttgaaagactgccttactttccccatctcagtgccagggcaggggcccttggagtgacttggctggggtctgtggcccgatccccctgccgtccctcaggacccgggctttctgctgtacagacttctcgtgggcagcctcccctcggaactcgggcatcatggcctcaggagctgttcacccgctcactggctgagagcgagctccgtagtgccccgtatgagttccccgaggagagccccattgaacagctggaggagcggcggcagcggctggagcggcagatcagccaggatgtcaagctggagccagacatcctgcttcgggccaagcaagatttcctgaagacggacagtgactcggacctacagctctacaaggaacagggtgaggggcagggtgaccggagcctgcgggagcgtgatgtgctggaacgggagtttcagcgggtcaccatctctggggaggagaagtgtggggtgccgttcacagacctgctggatgcagccaagagtgtggtgcgggcgctcttcatccgggagaagtacatgg

SEQ ID NO: 105196 - DNA, 572 bp, Homo sapiens
  Payload ID: 640
  Gene Symbol: AMPD2
  Gene Name: adenosine monophosphate deaminase 2
  ENST ID: ENST00000531734
  CDS Start-End: 262-572
attactgtgcatacatcatcctgatgtctgtgacctcctgcctctgcctctatcgtcagttcctgtgcctttcctgtggctgtcccactttatgatcacatttacgaacagtttcctgatgaagtaaataagtgccagggcaggggcccttggagtgacttggctggggtctgtggcccgatccccctgccgtccctcaggacccgggctttctgctgtacagacttctcgtgggcagcctcccctcggaactcgggcatcatggcctcagaggctcggggtggtctgggggcccctccgctgcagtctgcccgatccctgccgggccccgccccctgcctcaagcacttcccgctcgacctgcgcacgtctatggatggcaaatgcaaggagatcgccgaggagctgttcacccgctcactggctgagagcgagctccgtagtgccccgtatgagttccccgaggagagccccattgaacagctggaggagcggcggcagcggctggagcggcagatcagccaggatgtcaagctggagccagacatcctgcttcgggccaagcaagattt

SEQ ID NO: 105197 - DNA, 588 bp, Homo sapiens
  Payload ID: 640
  Gene Symbol: AMPD2
  Gene Name: adenosine monophosphate deaminase 2
  ENST ID: ENST00000528270
  CDS Start-End: 1-252
gctgtcgccgccgtggtcccagccatggcatcctatccatctggctctggcaagcccaaggccaaatatccctttaagaagcgggccagcctgcaggcctccactgcagctccagatgactggtgcaaggtctctactgtcctgagggtgttctctgtgcccaggtctgtgccatccagaaagggtgtcccctgggtggggcccttcctggccctgtttggttcagcaatagggcaactgatacggatctagcccagagctggagacccttcggtggtcagatgaggctcggggtggtctgggggcccctccgctgcagtctgcccgatccctgccgggccccgccccctgcctcaagcacttcccgctcgacctgcgcacgtctatggatggcaaatgcaaggagatcgccgaggagctgttcacccgctcactggctgagagcgagctccgtagtgccccgtatgagttccccgaggagagccccattgaacagctggaggagcggcggcagcggctggagcggcagatcagccaggatgtcaagctggagccagacatcctgcttcgggccaagcaagatttcct

SEQ ID NO: 105198 - DNA, 513 bp, Homo sapiens
  Payload ID: 640
  Gene Symbol: AMPD2
  Gene Name: adenosine monophosphate deaminase 2
  ENST ID: ENST00000469039
  CDS Start-End: 510-513
agagcctggcgcggagccggcgagattttggtggggtctcacctgttgcgtgactcccccacagtccggccgcgggagtccgaccctgaatgcccagggagtgttgagagaaatctggacgagtttcgggtcccgctcccttgggagcacgtggcctaccagcctctcgattgcagggttgggtggtcgcgacaccggggtcgccttgaggccagtccggctgccgaggtctgcgggagtccacctccggccagctggcaattttgaaagactgccttactttccccatctcagtgccagggcaggggcccttggagtgacttggctggggtctgtggcccgatccccctgccgtccctcaggacccgggctttctgctgtacagacttctcgtgggcagcctcccctcggaactcgggcatcatggcctcagggcctcttccgcctgcggagccgctgcttcctgcatcagtcactcccgctgggggcggggcggaggaaggggttggatgt

SEQ ID NO: 105199 - DNA, 3134 bp, Homo sapiens
  Payload ID: 640
  Gene Symbol: AMPD2
  Gene Name: adenosine monophosphate deaminase 2
  Uniprot ID: Q01433
  ENST ID: ENST00000528667
  CDS Start-End: 495-3134
cacctgttgcgtgactcccccacagtccggccgcgggagtccgaccctgaatgcccagggagtgttgagagaaatctggacgagtttcgggtcccgctcccttgggagcacgtggcctaccagcctctcgattgcagggttgggtggtcgcgacaccggggtcgccttgaggccagtccggctgccgaggtctgcgggagtccacctccggccagctggcaattttgaaagactgccttactttccccatctcagtgccagggcaggggcccttggagtgacttggctggggtctgtggcccgatccccctgccgtccctcaggacccgggctttctgctgtacagacttctcgtgggcagcctcccctcggaactcgggcatcatggcctcaggcccagccaccatcagtcacgtcactcctgggactgaggaggcaggggagggataaggggcagagatggaggccccactccccgaggttgcctagacaacatgagaaatcgtggccagggcctcttccgcctgcggagccgctgcttcctgcatcagtcactcccgctgggggcggggcggaggaaggggttggatgtggcagagccaggccccagccggtgccgctcagactcccccgctgtcgccgccgtggtcccagccatggcatcctatccatctggctctggcaagcccaaggccaaatatccctttaagaagcgggccagcctgcaggcctccactgcagctccagaggctcggggtggtctgggggcccctccgctgcagtctgcccgatccctgccgggccccgccccctgcctcaagcacttcccgctcgacctgcgcacgtctatggatggcaaatgcaaggagatcgccgaggagctgttcacccgctcactggctgagagcgagctccgtagtgccccgtatgagttccccgaggagagccccattgaacagctggaggagcggcggcagcggctggagcggcagatcagccaggatgtcaagctggagccagacatcctgcttcgggccaagcaagatttcctgaagacggacagtgactcggacctacagctctacaaggaacagggtgaggggcagggtgaccggagcctgcgggagcgtgatgtgctggaacgggagtttcagcgggtcaccatctctggggaggagaagtgtggggtgccgttcacagacctgctggatgcagccaagagtgtggtgcgggcgctcttcatccgggagaagtacatggccctgtccctgcagagcttctgccccaccacccgccgctacctgcagcagctggctgaaaagcctctggagacccggacctatgaacagggccccgacacccctgtgtctgctgatgccccggtgcacccccctgcgctggagcagcacccgtatgagcactgtgagccaagcaccatgcctggggacctgggcttgggtctgcgcatggtgcggggtgtggtgcacgtctacacccgcagggaacccgacgagcattgctcagaggtggagctgccataccctgacctgcaggaatttgtggctgacgtcaatgtgctgatggccctgattatcaatggccccataaagtcattctgctaccgccggctgcagtacctgagctccaagttccagatgcatgtgctactcaatgagatgaaggagctggccgcccagaagaaagtgccacaccgagatttctacaacatccgcaaggtggacacccacatccatgcctcgtcctgcatgaaccagaagcatctgctgcgcttcatcaagcgggcaatgaagcggcacctggaggagatcgtgcacgtggagcagggccgtgaacagacgctgcgggaggtctttgagagcatgaatctcacggcctacgacctgagtgtggacacgctggatgtgcatgcggacaggaacactttccatcgctttgacaagtttaatgccaaatacaaccctattggggagtccgtcctccgagagatcttcatcaagacggacaacagggtatctgggaagtactttgctcacatcatcaaggaggtgatgtcagacctggaggagagcaaataccagaatgcagagctgcggctctccatttacgggcgctcgagggatgagtgggacaagctggcgcgctgggccgtcatgcaccgcgtgcactcccccaacgtgcgctggctggtgcaggtgccccgcctctttgatgtgtaccgtaccaagggccagctggccaacttccaggagatgctggagaacatcttcctgccactgttcgaggccactgtgcaccctgccagccacccggaactgcatctcttcttagagcacgtggatggttttgacagcgtggatgatgagtccaagcctgaaaaccatgtcttcaacctggagagccccctgcctgaggcgtgggtggaggaggacaacccaccctatgcctactacctgtactacacctttgccaacatggccatgttgaaccacctgcgcaggcagaggggcttccacacgtttgtgctgaggccacactgtggggaggctgggcccatccaccacctggtgtcagccttcatgctggctgagaacatttcccacgggctccttctgcgcaaggcccccgtcctgcagtacctgtactacctggcccagatcggcatcgccatgtctccgctcagcaacaacagcctcttcctcagctatcaccggaatccgctaccggagtacctgtcccgcggcctcatggtctccctgtccactgatgatcccttgcagttccacttcaccaaggagccgctgatggaggagtacagcatcgccacccaggtgtggaagctcagctcctgcgatatgtgtgagctggcccgcaacagcgtgctcatgagcggcttctcgcacaaggtaaagagccactggctgggacccaactataccaaggaaggccctgaggggaatgacatccgccggaccaatgtgccagacatccgcgtgggctaccgctacgagaccctgtgccaggagctggcgctcatcacgcaggcagtccagagtgagatgctggagaccattccagaggaggcgggtatcaccatgagcccagggcctcaatga

SEQ ID NO: 105200 - DNA, 1111 bp, Homo sapiens
  Payload ID: 640
  Gene Symbol: AMPD2
  Gene Name: adenosine monophosphate deaminase 2
  ENST ID: ENST00000476688
  CDS Start-End: 1-695
cggaactgcatctcttcttagagcacgtggatggttttgacagcgtggatgatgagtccaagcctgaaaaccatgtcttcaacctggagagccccctgcctgaggcgtgggtggaggaggacaacccaccctatgcctactacctgtactacacctttgccaacatggccatgttgaaccacctgcgcaggcagaggggcttccacacgtttgtgctgaggccacactgtggggaggctgggcccatccaccacctggtgtcagccttcatgctggctgagaacatttcccacgggctccttctgcgcaaggcccccgtcctgcagtacctgtactacctggcccagatcggcatcgccatgtctccgctcagcaacaacagcctcttcctcagctatcaccggaatccgctaccggagtacctgtcccgcggcctcatggtctccctgtccactgatgatcccttgcagttccacttcaccaaggtaaagagccactggctgggacccaactataccaaggaaggccctgaggggaatgacatccgccggaccaatgtgccagacatccgcgtgggctaccgctacgagaccctgtgccaggagctggcgctcatcacgcaggcagtccagagtgagatgctggagaccattccagaggaggcgggtatcaccatgagcccagggcctcaatgagcctggtccatgaagtgcccaccacatcgcagcacttttaccacgttttgtcctcagaccccgcccatgctgtgtggtctctgcatgtctccattcttctctgtctctgtcttgcatgtctcctaccatgtcactgtccctgggccacccagtgaaagcaaagcctgggaatctgctcattgttgtttgggctcaggtattgagcctgatggcccaggtattgagggcctcccctgctggtggccctgtcctgggatcctcagaagcctgactgtcctatgggcttctccagtgtccacaggggcttgggatggttgtggggggctggcccctctagcctttccggtccttcctgggcaaatctaagccttggccagggccgaagtttaggcccctgtcttgttcatgtagccgag

SEQ ID NO: 105201 - DNA, 2728 bp, Homo sapiens
  Payload ID: 640
  Gene Symbol: AMPD2
  Gene Name: adenosine monophosphate deaminase 2
  Uniprot ID: Q01433
  ENST ID: ENST00000528454
  CDS Start-End: 378-2663
cacatctggctgggtcttccctggcactgtagaggtggaggccctcttcagttctggagttcgtcttatctcccaactctgatgctccttcccttggtttctgggctcccttgaactcccctagctccgtgctcacggccatctcagggtctcccctgcttgcagctgcacttggtacagcctgtgccagcccctgagggaccggctgcagcttcactggcaaacaggcgggcaaggggcacagggctgctggccggagctgcctgcactctgcagaggctcggggtggtctgggggcccctccgctgcagtctgcccgatccctgccgggccccgccccctgcctcaagcacttcccgctcgacctgcgcacgtctatggatggcaaatgcaaggagatcgccgaggagctgttcacccgctcactggctgagagcgagctccgtagtgccccgtatgagttccccgaggagagccccattgaacagctggaggagcggcggcagcggctggagcggcagatcagccaggatgtcaagctggagccagacatcctgcttcgggccaagcaagatttcctgaagacggacagtgactcggacctacagctctacaaggaacagggtgaggggcagggtgaccggagcctgcgggagcgtgatgtgctggaacgggagtttcagcgggtcaccatctctggggaggagaagtgtggggtgccgttcacagacctgctggatgcagccaagagtgtggtgcgggcgctcttcatccgggagaagtacatggccctgtccctgcagagcttctgccccaccacccgccgctacctgcagcagctggctgaaaagcctctggagacccggacctatgaacagggccccgacacccctgtgtctgctgatgccccggtgcacccccctgcgctggagcagcacccgtatgagcactgtgagccaagcaccatgcctggggacctgggcttgggtctgcgcatggtgcggggtgtggtgcacgtctacacccgcagggaacccgacgagcattgctcagaggtggagctgccataccctgacctgcaggaatttgtggctgacgtcaatgtgctgatggccctgattatcaatggccccataaagtcattctgctaccgccggctgcagtacctgagctccaagttccagatgcatgtgctactcaatgagatgaaggagctggccgcccagaagaaagtgccacaccgagatttctacaacatccgcaaggtggacacccacatccatgcctcgtcctgcatgaaccagaagcatctgctgcgcttcatcaagcgggcaatgaagcggcacctggaggagatcgtgcacgtggagcagggccgtgaacagacgctgcgggaggtctttgagagcatgaatctcacggcctacgacctgagtgtggacacgctggatgtgcatgcggacaggaacactttccatcgctttgacaagtttaatgccaaatacaaccctattggggagtccgtcctccgagagatcttcatcaagacggacaacagggtatctgggaagtactttgctcacatcatcaaggaggtgatgtcagacctggaggagagcaaataccagaatgcagagctgcggctctccatttacgggcgctcgagggatgagtgggacaagctggcgcgctgggccgtcatgcaccgcgtgcactcccccaacgtgcgctggctggtgcaggtgccccgcctctttgatgtgtaccgtaccaagggccagctggccaacttccaggagatgctggagaacatcttcctgccactgttcgaggccactgtgcaccctgccagccacccggaactgcatctcttcttagagcacgtggatggttttgacagcgtggatgatgagtccaagcctgaaaaccatgtcttcaacctggagagccccctgcctgaggcgtgggtggaggaggacaacccaccctatgcctactacctgtactacacctttgccaacatggccatgttgaaccacctgcgcaggcagaggggcttccacacgtttgtgctgaggccacactgtggggaggctgggcccatccaccacctggtgtcagccttcatgctggctgagaacatttcccacgggctccttctgcgcaaggcccccgtcctgcagtacctgtactacctggcccagatcggcatcgccatgtctccgctcagcaacaacagcctcttcctcagctatcaccggaatccgctaccggagtacctgtcccgcggcctcatggtctccctgtccactgatgatcccttgcagttccacttcaccaaggagccgctgatggaggagtacagcatcgccacccaggtgtggaagctcagctcctgcgatatgtgtgagctggcccgcaacagcgtgctcatgagcggcttctcgcacaaggtaaagagccactggctgggacccaactataccaaggaaggccctgaggggaatgacatccgccggaccaatgtgccagacatccgcgtgggctaccgctacgagaccctgtgccaggagctggcgctcatcacgcaggcagtccagagtgagatgctggagaccattccagaggaggcgggtatcaccatgagcccagggcctcaatgagcctggtccatgaagtgcccaccacatcgcagcacttttaccacgttttgtcctcagaccccgcc

SEQ ID NO: 105202 - DNA, 3680 bp, Homo sapiens
  Payload ID: 641
  Gene Symbol: AMPD3
  Gene Name: adenosine monophosphate deaminase 3
  Uniprot ID: Q01432
  ENST ID: ENST00000396553
  CDS Start-End: 135-2438
tcaaccctgcttggttttagaggattgctcctgtgggtcacttgaggcaggctccaccttccccaggaggagtggcagagtccagccagcgctcggagctggaggcccacgtgggagcagtgagcggctctgagatgccgcggcagtttcccaagctgaacatctctgaagtggatgagcaagtccggctcctggcggagaaggtgtttgctaaagtgctccgagaagaggacagcaaagatgccctgtccctgttcactgtcccagaggactgccccatcgggcaaaaggaagccaaggagagggagctgcagaaggagctggcagagcagaagtctgtggagaccgcaaaaagaaagaaaagtttcaagatgattcggtcccagtccctgtctctgcaaatgccgccacagcaagattggaagggccccccggcagccagtccggccatgtctcccacaacccctgtggtcactggagccacttccctgcccacgccagcaccctatgccatgcctgagttccagcgggtcaccatcagcggagattactgtgccgggatcactttggaggactatgagcaggcagccaagagtctggccaaggccctaatgatccgggagaagtatgcgcggctcgcctaccaccgcttcccgcggatcacatcccagtacctgggtcatccgcgggcggatactgcacctccggaagagggccttccagacttccaccctcctccactgccccaggaagacccctactgcctggatgatgcaccccccaacctggattacttggtccacatgcaggggggcatcctctttgtgtatgataacaagaagatgctggagcaccaggagccgcacagcctaccctaccccgacctggagacctacacggtggacatgagccacatcctggctctcatcaccgatggccccacgaaaacctattgtcaccggcgactgaactttctggaatccaagttcagccttcatgagatgttaaacgaaatgtccgagttcaaagagttgaagagtaacccccaccgggacttctataacgtgagaaaggtggacacacacatccatgcggccgcctgcatgaaccaaaagcatctgctgcgcttcatcaagcacacataccagacggagcctgacaggactgtggcagagaagcggggccggaagatcaccctgcggcaggtgtttgacggcctgcacatggacccctacgacctcactgtggactcactggatgtccacgcgggccggcagacattccaccgctttgacaagttcaactccaaatacaaccctgtgggggccagtgagctgcgtgacctgtatttgaaaactgaaaactatctgggaggagagtactttgctcggatggtcaaggaggttgcccgggagctggaggagagcaagtaccagtactcagagccacggctctccatctacggccgcagtcctgaggagtggcccaacctggcctactggttcatccagcacaaggtctactctcccaacatgcgctggatcatccaggtgccccggatttatgacatatttaggtcaaagaagctgctgccaaactttgggaagatgctggagaacatcttcctgccccttttcaaggccactatcaacccccaagatcatcgagagcttcacctcttccttaaatatgtgacggggtttgacagcgtggatgatgagtccaagcacagcgaccacatgttttccgacaagagcccaaacccggacgtctggaccagtgagcagaacccaccctacagctactacctgtactacatgtatgccaacatcatggtgctcaacaacctccgcagggagcgcggcctgagcacgttcctgttccggccgcactgtggggaagccggctccatcacccacctggtgtctgccttcctcactgctgacaacatttcccacgggctgctcctcaagaagagtccggtattgcagtatctctactaccttgctcagatccccattgccatgtctcctcttagcaacaacagtttgttcctcgaatattccaagaaccctctgagggaattcctacacaagggactgcatgtttctctttccaccgatgaccccatgcagttccactacacgaaggaagcacttatggaagaatatgccattgcagctcaagtgtggaagctgagcacctgcgacctgtgtgagatcgccaggaacagcgtgctgcagagcggcctctcgcatcaggaaaagcaaaagtttctgggacaaaattattataaagaaggacctgaaggaaatgatattcgaaagacaaatgtggctcagatccggatggcattccgatatgagaccttatgcaatgagctcagcttcctgtctgatgctatgaaatcagaagagatcaccgccttgaccaactaggtccagcatttgacatgcattttaactttttggttcaatttcaagtctgctgtggctaatagtggtcaagattccgaactaggactttcctctgtgaagaggatgcctctgaagaaattttaaactggtgattttggttgcactgctcactttaagagttaacatgctcacttgttagtatttctgagtaacaagatggtgacttctccttggggatctgggagctgagcacttgtctatacttgttcctaattttccaagtatttctcttgaaactgccagtgcctgaactgttggggccaggattttccctggtcagatgccaagtaacatgtggttttctgccatacttttctccattggcccaggtaggctaattggtagttgttcatttcagcctctggatggctggctgccttaaacacaatcaatttcaaagctccatttcataaaggggctactttgaaggagttaagatggaagacttccttcttgacaaattgtgtttttagtgaatttcttaaaccgttttatttagccctccttccctctttctagttggaagccaaatgtactcatgaaaacagccactcctattctgagtcttggtttcttcacctagaaagtgagggtttggactagatgagtggctttcagggtgttctgtgaatctcctcatgaatactttagggtaggggagggaagggagtgagtgatgctcaggggctgtcaaagtgactgcgttcatcagttttacactggggctgctacataatattttcatttgaacgaagaacttcaaaaagcacaggactagatgatctctgttccttttggctctaatatgctacaactgtaggccaattatcactttaccaattaagagttaggccagataagtgaaatttaacttaagggcacacagctaataagtaataggcctaaactggatttccttattccaaatcctgtcttttccccactattccattagaccccacaaatgttagttgtgtgtgtgtgtgtgtgtgtttttaatcactgtaaccggatgcatttttttaaggcaaaatttctcccttatctactatgatgacttcagaagatacaatggtcccaggggccaagtagaaagcatttttaaagattaatctgaattaagctttatcagtgtactctttatctgtgttactagtgcctggtatgtagtaggtgctcaataaatgcatattgaataactaa

SEQ ID NO: 105203 - DNA, 3806 bp, Homo sapiens
  Payload ID: 641
  Gene Symbol: AMPD3
  Gene Name: adenosine monophosphate deaminase 3
  Uniprot ID: Q01432
  ENST ID: ENST00000396554
  CDS Start-End: 342-2672
tgctgctctcaagtttcccgttggcggcgcggcccgggcgcttcaggtagcctctcggctctctctgctccgctccgcgcccaggtagggcaccgacgggggctgcacgcggctggccggcttcctccctgctgaggcggccctccctcctcccgcggggccctcctggccggggatccgcagcgctgcgccctctgaacgcccggcccccgcgcctgctgcggggcgcggcctggccgggccctggccccggctggcctcagtgcccagcagccccgctccgctctgcccagcgcgtcccctttgctccagccctgcggccgtccctttcggccggcggcatggccctgtcgtccgaacccgctgagatgccgcggcagtttcccaagctgaacatctctgaagtggatgagcaagtccggctcctggcggagaaggtgtttgctaaagtgctccgagaagaggacagcaaagatgccctgtccctgttcactgtcccagaggactgccccatcgggcaaaaggaagccaaggagagggagctgcagaaggagctggcagagcagaagtctgtggagaccgcaaaaagaaagaaaagtttcaagatgattcggtcccagtccctgtctctgcaaatgccgccacagcaagattggaagggccccccggcagccagtccggccatgtctcccacaacccctgtggtcactggagccacttccctgcccacgccagcaccctatgccatgcctgagttccagcgggtcaccatcagcggagattactgtgccgggatcactttggaggactatgagcaggcagccaagagtctggccaaggccctaatgatccgggagaagtatgcgcggctcgcctaccaccgcttcccgcggatcacatcccagtacctgggtcatccgcgggcggatactgcacctccggaagagggccttccagacttccaccctcctccactgccccaggaagacccctactgcctggatgatgcaccccccaacctggattacttggtccacatgcaggggggcatcctctttgtgtatgataacaagaagatgctggagcaccaggagccgcacagcctaccctaccccgacctggagacctacacggtggacatgagccacatcctggctctcatcaccgatggccccacgaaaacctattgtcaccggcgactgaactttctggaatccaagttcagccttcatgagatgttaaacgaaatgtccgagttcaaagagttgaagagtaacccccaccgggacttctataacgtgagaaaggtggacacacacatccatgcggccgcctgcatgaaccaaaagcatctgctgcgcttcatcaagcacacataccagacggagcctgacaggactgtggcagagaagcggggccggaagatcaccctgcggcaggtgtttgacggcctgcacatggacccctacgacctcactgtggactcactggatgtccacgcgggccggcagacattccaccgctttgacaagttcaactccaaatacaaccctgtgggggccagtgagctgcgtgacctgtatttgaaaactgaaaactatctgggaggagagtactttgctcggatggtcaaggaggttgcccgggagctggaggagagcaagtaccagtactcagagccacggctctccatctacggccgcagtcctgaggagtggcccaacctggcctactggttcatccagcacaaggtctactctcccaacatgcgctggatcatccaggtgccccggatttatgacatatttaggtcaaagaagctgctgccaaactttgggaagatgctggagaacatcttcctgccccttttcaaggccactatcaacccccaagatcatcgagagcttcacctcttccttaaatatgtgacggggtttgacagcgtggatgatgagtccaagcacagcgaccacatgttttccgacaagagcccaaacccggacgtctggaccagtgagcagaacccaccctacagctactacctgtactacatgtatgccaacatcatggtgctcaacaacctccgcagggagcgcggcctgagcacgttcctgttccggccgcactgtggggaagccggctccatcacccacctggtgtctgccttcctcactgctgacaacatttcccacgggctgctcctcaagaagagtccggtattgcagtatctctactaccttgctcagatccccattgccatgtctcctcttagcaacaacagtttgttcctcgaatattccaagaaccctctgagggaattcctacacaagggactgcatgtttctctttccaccgatgaccccatgcagttccactacacgaaggaagcacttatggaagaatatgccattgcagctcaagtgtggaagctgagcacctgcgacctgtgtgagatcgccaggaacagcgtgctgcagagcggcctctcgcatcaggaaaagcaaaagtttctgggacaaaattattataaagaaggacctgaaggaaatgatattcgaaagacaaatgtggctcagatccggatggcattccgatatgagaccttatgcaatgagctcagcttcctgtctgatgctatgaaatcagaagagatcaccgccttgaccaactaggtccagcatttgacatgcattttaactttttggttcaatttcaagtctgctgtggctaatagtggtcaagattccgaactaggactttcctctgtgaagaggatgcctctgaagaaattttaaactggtgattttggttgcactgctcactttaagagttaacatgctcacttgttagtatttctgagtaacaagatggtgacttctccttggggatctgggagctgagcacttgtctatacttgttcctaattttccaagtatttctcttgaaactgccagtgcctgaactgttggggccaggattttccctggtcagatgccaagtaacatgtggttttctgccatacttttctccattggcccaggtaggctaattggtagttgttcatttcagcctctggatggctggctgccttaaacacaatcaatttcaaagctccatttcataaaggggctactttgaaggagttaagatggaagacttccttcttgacaaattgtgtttttagtgaatttcttaaaccgttttatttagccctccttccctctttctagttggaagccaaatgtactcatgaaaacagccactcctattctgagtcttggtttcttcacctagaaagtgagggtttggactagatgagtggctttcagggtgttctgtgaatctcctcatgaatactttagggtaggggagggaagggagtgagtgatgctcaggggctgtcaaagtgactgcgttcatcagttttacactggggctgctacataatattttcatttgaacgaagaacttcaaaaagcacaggactagatgatctctgttccttttggctctaatatgctacaactgtaggccaattatcactttaccaattaagagttaggccagataagtgaaatttaacttaagggcacacagctaataagtaataggcctaaactggatttccttattccaaatcctgtcttttccccactattccattagaccccacaaatgttagttgtgtgtgtgtgtgtgtgtgtttttaatcactgtaaccggatgcatttttttaaggcaaaatttctcccttatctactatgatgacttcagaagatacaatggtcccaggggccaagtagaaa

SEQ ID NO: 105204 - DNA, 3994 bp, Homo sapiens
  Payload ID: 641
  Gene Symbol: AMPD3
  Gene Name: adenosine monophosphate deaminase 3
  Uniprot ID: Q01432
  ENST ID: ENST00000444303
  CDS Start-End: 473-2299
gtggacggttggcgagggagtgtgtgtgtgtgtgtgtgtgtgtgtgtgtgtgtgtatccaagtgaccagaaggacgcctggaagaaaccaatgcttgcgggttgctgcaactacagggagcaagtcacctgtgcggggccgagacccccagagtctcgcgctgggaaaagttgtgcggggaggggaggacgtcggctgagatgccgcggcagtttcccaagctgaacatctctgaagtggatgagcaagtccggctcctggcggagaaggtgtttgctaaagtgctccgagaagaggacagcaaagatgccctgtccctgttcactgtcccagaggactgccccatcgggcaaaaggaagccaaggagagggagctgcagaaggagctggcagagcagaagtctgtggagaccgcaaaaagatcactttggaggactatgagcaggcagccaagagtctggccaaggccctaatgatccgggagaagtatgcgcggctcgcctaccaccgcttcccgcggatcacatcccagtacctgggtcatccgcgggcggatactgcacctccggaagagggccttccagacttccaccctcctccactgccccaggaagacccctactgcctggatgatgcaccccccaacctggattacttggtccacatgcaggggggcatcctctttgtgtatgataacaagaagatgctggagcaccaggagccgcacagcctaccctaccccgacctggagacctacacggtggacatgagccacatcctggctctcatcaccgatggccccacgaaaacctattgtcaccggcgactgaactttctggaatccaagttcagccttcatgagatgttaaacgaaatgtccgagttcaaagagttgaagagtaacccccaccgggacttctataacgtgagaaaggtggacacacacatccatgcggccgcctgcatgaaccaaaagcatctgctgcgcttcatcaagcacacataccagacggagcctgacaggactgtggcagagaagcggggccggaagatcaccctgcggcaggtgtttgacggcctgcacatggacccctacgacctcactgtggactcactggatgtccacgcgggccggcagacattccaccgctttgacaagttcaactccaaatacaaccctgtgggggccagtgagctgcgtgacctgtatttgaaaactgaaaactatctgggaggagagtactttgctcggatggtcaaggaggttgcccgggagctggaggagagcaagtaccagtactcagagccacggctctccatctacggccgcagtcctgaggagtggcccaacctggcctactggttcatccagcacaaggtctactctcccaacatgcgctggatcatccaggtgccccggatttatgacatatttaggtcaaagaagctgctgccaaactttgggaagatgctggagaacatcttcctgccccttttcaaggccactatcaacccccaagatcatcgagagcttcacctcttccttaaatatgtgacggggtttgacagcgtggatgatgagtccaagcacagcgaccacatgttttccgacaagagcccaaacccggacgtctggaccagtgagcagaacccaccctacagctactacctgtactacatgtatgccaacatcatggtgctcaacaacctccgcagggagcgcggcctgagcacgttcctgttccggccgcactgtggggaagccggctccatcacccacctggtgtctgccttcctcactgctgacaacatttcccacgggctgctcctcaagaagagtccggtattgcagtatctctactaccttgctcagatccccattgccatgtctcctcttagcaacaacagtttgttcctcgaatattccaagaaccctctgagggaattcctacacaagggactgcatgtttctctttccaccgatgaccccatgcagttccactacacgaaggaagcacttatggaagaatatgccattgcagctcaagtgtggaagctgagcacctgcgacctgtgtgagatcgccaggaacagcgtgctgcagagcggcctctcgcatcaggaaaagcaaaagtttctgggacaaaattattataaagaaggacctgaaggaaatgatattcgaaagacaaatgtggctcagatccggatggcattccgatatgagaccttatgcaatgagctcagcttcctgtctgatgctatgaaatcagaagagatcaccgccttgaccaactaggtccagcatttgacatgcattttaactttttggttcaatttcaagtctgctgtggctaatagtggtcaagattccgaactaggactttcctctgtgaagaggatgcctctgaagaaattttaaactggtgattttggttgcactgctcactttaagagttaacatgctcacttgttagtatttctgagtaacaagatggtgacttctccttggggatctgggagctgagcacttgtctatacttgttcctaattttccaagtatttctcttgaaactgccagtgcctgaactgttggggccaggattttccctggtcagatgccaagtaacatgtggttttctgccatacttttctccattggcccaggtaggctaattggtagttgttcatttcagcctctggatggctggctgccttaaacacaatcaatttcaaagctccatttcataaaggggctactttgaaggagttaagatggaagacttccttcttgacaaattgtgtttttagtgaatttcttaaaccgttttatttagccctccttccctctttctagttggaagccaaatgtactcatgaaaacagccactcctattctgagtcttggtttcttcacctagaaagtgagggtttggactagatgagtggctttcagggtgttctgtgaatctcctcatgaatactttagggtaggggagggaagggagtgagtgatgctcaggggctgtcaaagtgactgcgttcatcagttttacactggggctgctacataatattttcatttgaacgaagaacttcaaaaagcacaggactagatgatctctgttccttttggctctaatatgctacaactgtaggccaattatcactttaccaattaagagttaggccagataagtgaaatttaacttaagggcacacagctaataagtaataggcctaaactggatttccttattccaaatcctgtcttttccccactattccattagaccccacaaatgttagttgtgtgtgtgtgtgtgtgtgtttttaatcactgtaaccggatgcatttttttaaggcaaaatttctcccttatctactatgatgacttcagaagatacaatggtcccaggggccaagtagaaagcatttttaaagattaatctgaattaagctttatcagtgtactctttatctgtgttactagtgcctggtatgtagtaggtgctcaataaatgcatattgaataactaagtgaatttcttttggcaactttttaaggacatgtgctcttagtacttaagaggctgctcaaggaccttcctatctatttctgtggtcaaattcagactacaggaggtctttttgaatcattatagttagaagaagaatccagtttctgcctgtgaacttatttgactttagattgtctcatcttgtgactttataatgcctgtcccctccactggtcaattcagcatatggaagtataaatgcagtctttttactaggcagatatatatgctatcttacagctaattatgaaattgaatgaaaatccattgttatcttagggattagttttgaaaagcccccgtttatatacatttgccctaacataggaagtattgtgtagtttctcattgtcattttatctgtatcaagtatctttttttaaattgttaaataaagtcagctaggactgtg

SEQ ID NO: 105205 - DNA, 3156 bp, Homo sapiens
  Payload ID: 641
  Gene Symbol: AMPD3
  Gene Name: adenosine monophosphate deaminase 3
  Uniprot ID: Q01432
  ENST ID: ENST00000529507
  CDS Start-End: 291-2594
atagtctggaggagggagagctgaactctctcttgtcccttctcaaacatgggaacaaagtcaggagggcagggctgccaggtgctgcagattccctgagtttgggaaaatggaagcccacctagttgaacagttcattctttgaattttgaacacttgctttctcctgacacctaagtggccctacatgcttcacatccagttacttattgagctaattttgaaattggcatgctgggtttggtctggggcattcctaagtagacagctgaccccaagtaccagctgagatgccgcggcagtttcccaagctgaacatctctgaagtggatgagcaagtccggctcctggcggagaaggtgtttgctaaagtgctccgagaagaggacagcaaagatgccctgtccctgttcactgtcccagaggactgccccatcgggcaaaaggaagccaaggagagggagctgcagaaggagctggcagagcagaagtctgtggagaccgcaaaaagaaagaaaagtttcaagatgattcggtcccagtccctgtctctgcaaatgccgccacagcaagattggaagggccccccggcagccagtccggccatgtctcccacaacccctgtggtcactggagccacttccctgcccacgccagcaccctatgccatgcctgagttccagcgggtcaccatcagcggagattactgtgccgggatcactttggaggactatgagcaggcagccaagagtctggccaaggccctaatgatccgggagaagtatgcgcggctcgcctaccaccgcttcccgcggatcacatcccagtacctgggtcatccgcgggcggatactgcacctccggaagagggccttccagacttccaccctcctccactgccccaggaagacccctactgcctggatgatgcaccccccaacctggattacttggtccacatgcaggggggcatcctctttgtgtatgataacaagaagatgctggagcaccaggagccgcacagcctaccctaccccgacctggagacctacacggtggacatgagccacatcctggctctcatcaccgatggccccacgaaaacctattgtcaccggcgactgaactttctggaatccaagttcagccttcatgagatgttaaacgaaatgtccgagttcaaagagttgaagagtaacccccaccgggacttctataacgtgagaaaggtggacacacacatccatgcggccgcctgcatgaaccaaaagcatctgctgcgcttcatcaagcacacataccagacggagcctgacaggactgtggcagagaagcggggccggaagatcaccctgcggcaggtgtttgacggcctgcacatggacccctacgacctcactgtggactcactggatgtccacgcgggccggcagacattccaccgctttgacaagttcaactccaaatacaaccctgtgggggccagtgagctgcgtgacctgtatttgaaaactgaaaactatctgggaggagagtactttgctcggatggtcaaggaggttgcccgggagctggaggagagcaagtaccagtactcagagccacggctctccatctacggccgcagtcctgaggagtggcccaacctggcctactggttcatccagcacaaggtctactctcccaacatgcgctggatcatccaggtgccccggatttatgacatatttaggtcaaagaagctgctgccaaactttgggaagatgctggagaacatcttcctgccccttttcaaggccactatcaacccccaagatcatcgagagcttcacctcttccttaaatatgtgacggggtttgacagcgtggatgatgagtccaagcacagcgaccacatgttttccgacaagagcccaaacccggacgtctggaccagtgagcagaacccaccctacagctactacctgtactacatgtatgccaacatcatggtgctcaacaacctccgcagggagcgcggcctgagcacgttcctgttccggccgcactgtggggaagccggctccatcacccacctggtgtctgccttcctcactgctgacaacatttcccacgggctgctcctcaagaagagtccggtattgcagtatctctactaccttgctcagatccccattgccatgtctcctcttagcaacaacagtttgttcctcgaatattccaagaaccctctgagggaattcctacacaagggactgcatgtttctctttccaccgatgaccccatgcagttccactacacgaaggaagcacttatggaagaatatgccattgcagctcaagtgtggaagctgagcacctgcgacctgtgtgagatcgccaggaacagcgtgctgcagagcggcctctcgcatcaggaaaagcaaaagtttctgggacaaaattattataaagaaggacctgaaggaaatgatattcgaaagacaaatgtggctcagatccggatggcattccgatatgagaccttatgcaatgagctcagcttcctgtctgatgctatgaaatcagaagagatcaccgccttgaccaactaggtccagcatttgacatgcattttaactttttggttcaatttcaagtctgctgtggctaatagtggtcaagattccgaactaggactttcctctgtgaagaggatgcctctgaagaaattttaaactggtgattttggttgcactgctcactttaagagttaacatgctcacttgttagtatttctgagtaacaagatggtgacttctccttggggatctgggagctgagcacttgtctatacttgttcctaattttccaagtatttctcttgaaactgccagtgcctgaactgttggggccaggattttccctggtcagatgccaagtaacatgtggttttctgccatacttttctccattggcccaggtaggctaattggtagttgttcatttcagcctctggatggctggctgccttaaacacaatcaatttcaaagctccatttcataaaggggctactttgaaggagttaagatggaagacttccttcttgacaaattgtgtttttagtgaatttcttaaaccgttttatttagccctccttccctctttctagttgg

SEQ ID NO: 105206 - DNA, 576 bp, Homo sapiens
  Payload ID: 641
  Gene Symbol: AMPD3
  Gene Name: adenosine monophosphate deaminase 3
  ENST ID: ENST00000532250
  CDS Start-End: 244-576
cacagagaggaggacatcagcatggagagactgcagatcagtcccagcaaacctgtggaggccagttaaatgcctggagctcatcccctgccattcaaacggggtcttgctctgttgcctggctggagtgcagtggtgctaacatgactcactgcacccttgacctcctggactcaagtgatcctcccacctcagcctcccaagtagctgggactccaagtgggtgccactacagccactgagatgccgcggcagtttcccaagctgaacatctctgaagtggatgagcaagtccggctcctggcggagaaggtgtttgctaaagtgctccgagaagaggacagcaaagatgccctgtccctgttcactgtcccagaggactgccccatcgggcaaaaggaagccaaggagagggagctgcagaaggagctggcagagcagaagtctgtggagaccgcaaaaagaaagaaaagtttcaagatgattcggtcccagtccctgtctctgcaaatgccgccacagcaagattggaagggccccccggcagccagtccggccatgtctcccacaacccct

SEQ ID NO: 105207 - DNA, 980 bp, Homo sapiens
  Payload ID: 641
  Gene Symbol: AMPD3
  Gene Name: adenosine monophosphate deaminase 3
  ENST ID: ENST00000524866
  CDS Start-End: 180-980
gttggcggcgcggcccgggcgcttcaggtagcctctcggctctctctgctccgctccgcgcccagaggattgctcctgtgggtcacttgaggcaggctccaccttccccaggaggagtggcagagtccagccagcgctcggagctggaggcccacgtgggagcagtgagcggctctgagatgccgcggcagtttcccaagctgaacatctctgaagtggatgagcaagtccggctcctggcggagaaggtgtttgctaaagtgctccgagaagaggacagcaaagatgccctgtccctgttcactgtcccagaggactgccccatcgggcaaaaggaagccaaggagagggagctgcagaaggagctggcagagcagaagtctgtggagaccgcaaaaagaaagaaaagtttcaagatgattcggtcccagtccctgtctctgcaaatgccgccacagcaagattggaagggccccccggcagccagtccggccatgtctcccacaacccctgtggtcactggagccacttccctgcccacgccagcaccctatgccatgcctgagttccagcgggtcaccatcagcggagattactgtgccgggatcactttggaggactatgagcaggcagccaagagtctggccaaggccctaatgatccgggagaagtatgcgcggctcgcctaccaccgcttcccgcggatcacatcccagtacctgggtcatccgcgggcggatactgcacctccggaagagggccttccagacttccaccctcctccactgccccaggaagacccctactgcctggatgatgcaccccccaacctggattacttggtccacatgcaggggggcatcctctttgtgtatgataacaagaagatgctggagcaccaggagccgcacagcctaccctaccccgacctggagacctacacggtggacatgagccacatcctggctctcatcaccgat

SEQ ID NO: 105208 - DNA, 531 bp, Homo sapiens
  Payload ID: 641
  Gene Symbol: AMPD3
  Gene Name: adenosine monophosphate deaminase 3
  ENST ID: ENST00000533116
  CDS Start-End: 1-333
gcggccgcctgcatgaaccaaaagcatctgctgcgcttcatcaagcacacataccagacggagcctgacaggactgtggcagagaagcggggccggaagatcaccctgcggcaggtgtttgacggcctgcacatggacccctacgacctcactgtggactcactggatgtccacgcggtgagtgagcttctgctccagtgccgccagcagacagcagccctggctggggactcagccccctggaaagccaccatgattgtgcttgccgggaggtgctacggaagcagctttctcttctatctgactgagaggtcatgcggcctcagagaataacagggccggcagacattccaccgctttgacaagttcaactccaaatacaaccctgtgggggccagtgagctgcgtgacctgtatttgaaaactgaaaactatctgggaggagagtactttgctcggatggtcaaggaggttgcccgggagctggaggagagcaagtaccagtactcagagccacggctctccatctac

SEQ ID NO: 105209 - DNA, 2376 bp, Homo sapiens
  Payload ID: 641
  Gene Symbol: AMPD3
  Gene Name: adenosine monophosphate deaminase 3
  ENST ID: ENST00000534047
  CDS Start-End: 81-719
agtgcccagcagccccgctccgctctgcccagcgcgtcccctttgctccagccctgcggccgtccctttcggccggcggcatggccctgtcgtccgaacccgctgagatgccgcggcagtttcccaagctgaacatctctgaagtggatgagcaagtccggctcctggcggagaaggtgtttgctaaagtgctccgagaagaggacagcaaagatgccctgtccctgttcactgtcccagaggactgccccatcgggcaaaaggaagccaaggagagggagctgcagaaggagctggcagagcagaagtctgtggagaccgcaaaaagaaagaaaagtttcaagatgattcggtcccagtccctgtctctgcaaatgccgccacagcaagattggaagggccccccggcagccagtccggccatgtctcccacaacccctgtggtcactggagccacttccctgcccacgccagcaccctatgccatgcctgagttccagcgggtcaccatcagcggagattactgtgccgggatcactttggaggactatgagcaggcagccaagagtctggccaaggccctaatgatccgggagaagtatgcgcggctcgcctaccaccgcttcccgcggatcacatcccagtacctgggtcatccgcgggcggatactgcacctccggaagagggccttccaggggggcatcctctttgtgtatgataacaagaagatgctggagcaccaggagccgcacagcctaccctaccccgacctggagacctacacggtggacatgagccacatcctggctctcatcaccgatggccccacgaaaacctattgtcaccggcgactgaactttctggaatccaagttcagccttcatgagatgttaaacgaaatgtccgagttcaaagagttgaagagtaacccccaccgggacttctataacgtgagaaaggtggacacacacatccatgcggccgcctgcatgaaccaaaagcatctgctgcgcttcatcaagcacacataccagacggagcctgacaggactgtggcagagaagcggggccggaagatcaccctgcggcaggtgtttgacggcctgcacatggacccctacgacctcactgtggactcactggatgtccacgcgggccggcagacattccaccgctttgacaagttcaactccaaatacaaccctgtgggggccagtgagctgcgtgacctgtatttgaaaactgaaaactatctgggaggagagtactttgctcggatggtcaaggaggttgcccgggagctggaggagagcaagtaccagtactcagagccacggctctccatctacggccgcagtcctgaggagtggcccaacctggcctactggttcatccagcacaaggtctactctcccaacatgcgctggatcatccaggtgccccggatttaggcagcaggctgttggatccacctgacaagcgagtctttgctgtcccccagtgacatatttaggtcaaagaagctgctgccaaactttgggaagatgctggagaacatcttcctgccccttttcaaggccactatcaacccccaagatcatcgagagcttcacctcttccttaaatatgtgacggggtttgacagcgtggatgatgagtccaagcacagcgaccacatgttttccgacaagagcccaaacccggacgtctggaccagtgagcagaacccaccctacagctactacctgtactacatgtatgccaacatcatggtgctcaacaacctccgcagggagcgcggcctgagcacgttcctgttccggccgcactgtggggaagccggctccatcacccacctggtgtctgccttcctcactgctgacaacatttcccacgggctgctcctcaagaagagtccggtattgcagtatctctactaccttgctcagatccccattgccatgtctcctcttagcaacaacagtttgttcctcgaatattccaagaaccctctgagggaattcctacacaagggactgcatgtttctctttccaccgatgaccccatgcagttccactacacgaaggaagcacttatggaagaatatgccattgcagctcaagtgtggaagctgagcacctgcgacctgtgtgagatcgccaggaacagcgtgctgcagagcggcctctcgcatcaggaaaagcaaaagtttctgggacaaaattattataaagaaggacctgaaggaaatgatattcgaaagacaaatgtggctcagatccggatggcattccgatatgagaccttatgcaatgagctcagcttcctgtctgatgctatgaaatcagaagagatcaccgccttgaccaactag

SEQ ID NO: 105210 - DNA, 593 bp, Homo sapiens
  Payload ID: 641
  Gene Symbol: AMPD3
  Gene Name: adenosine monophosphate deaminase 3
  ENST ID: ENST00000529744
  CDS Start-End: 1-273
ccaccctacagctactacctgtactacatgtatgccaacatcatggtgctcaacaacctccgcagggagcgcggcctgagcacgttcctgttccggccgcactgtggggaagccggctccatcacccacctggtgtctgccttcctcactgctgacaacatttcccacgggctgctcctcaagaagcaacaacagtttgttcctcgaatattccaagaaccctctgagggaattcctacacaagggactgcatgtttctctttccaccgatgaccccatgcagttccactacacgaaggaagcacttatggaagaatatgccattgcagctcaagtgtggaagctgagcacctgcgacctgtgtgagatcgccaggaacagcgtgctgcagagcggcctctcgcatcaggaaaagcaaaagtttctgggacaaaattattataaagaaggacctgaaggaaatgatattcgaaagacaaatgtggctcagatccggatggcattccgatatgagaccttatgcaatgagctcagcttcctgtctgatgctatgaaatcagaagagatcaccgccttgaccaactaggtccagc

SEQ ID NO: 105211 - DNA, 2248 bp, Homo sapiens
  Payload ID: 641
  Gene Symbol: AMPD3
  Gene Name: adenosine monophosphate deaminase 3
  ENST ID: ENST00000529834
  CDS Start-End: 48-2081
agcgctcggagctggaggcccacgtgggagcagtgagcggctctgagatgccgcggcagtttcccaagctgaacatctctgaagtggatgagcaagtccggctcctggcggagaaggtgtttgctaaagtgctccgagaagaggacagcaaagatgccctgtccctgttcactgtcccagaggactgccccatcgggcaaaaggaagccaaggagagggagctgcagaaggagctggcagagcagaagtctgtggagaccgcaaaaagaaagaaaagtttcaagatgattcggtcccagtccctgtctctgcaaatgccgccacagcaagattggaagggccccccggcagccagtccggccatgtctcccacaacccctgtggtcactggagccacttccctgcccacgccagcaccctatgccatgcctgagttccagcgggtcaccatcagcggagattactgtgccgggatcactttggaggactatgagcaggcagccaagagtctggccaaggccctaatgatccgggagaagtatgcgcggctcgcctaccaccgcttcccgcggatcacatcccagtacctgggtcatccgcgggcggatactgcacctccggaagagggccttccagacttccaccctcctccactgccccaggaagacccctactgcctggatgatgcaccccccaacctggattacttggtccacatgcaggggggcatcctctttgtgtatgataacaagaagatgctggagcaccaggagccgcacagcctaccctaccccgacctggagacctacacggtggacatgagccacatcctggctctcatcaccgatggccccacgaaaacctattgtcaccggcgactgaactttctggaatccaagttcagccttcatgagatgttaaacgaaatgtccgagttcaaagagttgaagagtaacccccaccgggacttctataacgtgagaaaggtggacacacacatccatgcggccgcctgcatgaaccaaaagcatctgctgcgcttcatcaagcacacataccagacggagcctgacaggactgtggcagagaagcggggccggaagatcaccctgcggcaggtgtttgacggcctgcacatggacccctacgacctcactgtggactcactggatgtccacgcgggccggcagacattccaccgctttgacaagttcaactccaaatacaaccctgtgggggccagtgagctgcgtgacctgtatttgaaaactgaaaactatctgggaggagagtactttgctcggatggtcaaggaggttgcccgggagctggaggagagcaagtaccagtactcagagccacggctctccatctacggccgcagtcctgaggagtggcccaacctggcctactggttcatccagcacaaggtctactctcccaacatgcgctggatcatccaggtgccccggatttatgacatatttaggtcaaagaagctgctgccaaactttgggaagatgctggagaacatcttcctgccccttttcaaggccactatcaacccccaagatcatcgagagcttcacctcttccttaaatatgtgacggggtttgacagcgtggatgatgagtccaagcacagcgaccacatgttttccgacaagagcccaaacccggacgtctggaccagtgagcagaacccaccctacagctactacctgtactacatgtatgccaacatcatggtgctcaacaacctccgcagggagcgcggcctgagcacgttcctgttccggccgcactgtggggaagccggctccatcacccacctggtgtctgccttcctcactgctgacaacatttcccacgggctgctcctcaagaagagtccggtattgcagtatctctactaccttgctcagatccccattgccatgtctcctcttagcaacaacagtttgttcctcgaatattccaagaaccctctgagggaattcctacacaagggactgcatgtttctctttccaccgatgaccccatgcagttccactacacgaagctcaagtgtggaagctgagcacctgcgacctgtgtgagatcgccaggaacagcgtgctgcagagcggcctctcgcatcaggaaaagcaaaagtttctgggacaaaattattataaagaaggacctgaaggaaatgatattcgaaagacaaatgtggctcagatccggatggcattccgatatgag

SEQ ID NO: 105212 - DNA, 2753 bp, Homo sapiens
  Payload ID: 641
  Gene Symbol: AMPD3
  Gene Name: adenosine monophosphate deaminase 3
  Uniprot ID: Q01432
  ENST ID: ENST00000528723
  CDS Start-End: 202-2526
attcacgagagaatttccagcccaggcttttcctgctctggctcactgctgctcacagatatgcaaaacagagacctcctactccagccggcagacaggacccagccagctgcacgcacgcactgactcagctgagcctcctgggtggcaggcagcacctcacccgggtgcatcacttgagtggcatcttcaggaccagtcatggagccaggctcagctgagatgccgcggcagtttcccaagctgaacatctctgaagtggatgagcaagtccggctcctggcggagaaggtgtttgctaaagtgctccgagaagaggacagcaaagatgccctgtccctgttcactgtcccagaggactgccccatcgggcaaaaggaagccaaggagagggagctgcagaaggagctggcagagcagaagtctgtggagaccgcaaaaagaaagaaaagtttcaagatgattcggtcccagtccctgtctctgcaaatgccgccacagcaagattggaagggccccccggcagccagtccggccatgtctcccacaacccctgtggtcactggagccacttccctgcccacgccagcaccctatgccatgcctgagttccagcgggtcaccatcagcggagattactgtgccgggatcactttggaggactatgagcaggcagccaagagtctggccaaggccctaatgatccgggagaagtatgcgcggctcgcctaccaccgcttcccgcggatcacatcccagtacctgggtcatccgcgggcggatactgcacctccggaagagggccttccagacttccaccctcctccactgccccaggaagacccctactgcctggatgatgcaccccccaacctggattacttggtccacatgcaggggggcatcctctttgtgtatgataacaagaagatgctggagcaccaggagccgcacagcctaccctaccccgacctggagacctacacggtggacatgagccacatcctggctctcatcaccgatggccccacgaaaacctattgtcaccggcgactgaactttctggaatccaagttcagccttcatgagatgttaaacgaaatgtccgagttcaaagagttgaagagtaacccccaccgggacttctataacgtgagaaaggtggacacacacatccatgcggccgcctgcatgaaccaaaagcatctgctgcgcttcatcaagcacacataccagacggagcctgacaggactgtggcagagaagcggggccggaagatcaccctgcggcaggtgtttgacggcctgcacatggacccctacgacctcactgtggactcactggatgtccacgcgggccggcagacattccaccgctttgacaagttcaactccaaatacaaccctgtgggggccagtgagctgcgtgacctgtatttgaaaactgaaaactatctgggaggagagtactttgctcggatggtcaaggaggttgcccgggagctggaggagagcaagtaccagtactcagagccacggctctccatctacggccgcagtcctgaggagtggcccaacctggcctactggttcatccagcacaaggtctactctcccaacatgcgctggatcatccaggtgccccggatttatgacatatttaggtcaaagaagctgctgccaaactttgggaagatgctggagaacatcttcctgccccttttcaaggccactatcaacccccaagatcatcgagagcttcacctcttccttaaatatgtgacggggtttgacagcgtggatgatgagtccaagcacagcgaccacatgttttccgacaagagcccaaacccggacgtctggaccagtgagcagaacccaccctacagctactacctgtactacatgtatgccaacatcatggtgctcaacaacctccgcagggagcgcggcctgagcacgttcctgttccggccgcactgtggggaagccggctccatcacccacctggtgtctgccttcctcactgctgacaacatttcccacgggctgctcctcaagaagagtccggtattgcagtatctctactaccttgctcagatccccattgccatgtctcctcttagcaacaacagtttgttcctcgaatattccaagaaccctctgagggaattcctacacaagggactgcatgtttctctttccaccgatgaccccatgcagttccactacacgaaggaagcacttatggaagaatatgccattgcagctcaagtgtggaagctgagcacctgcgacctgtgtgagatcgccaggaacagcgtgctgcagagcggcctctcgcatcaggaaaagcaaaagtttctgggacaaaattattataaagaaggacctgaaggaaatgatattcgaaagacaaatgtggctcagatccggatggcattccgatatgagaccttatgcaatgagctcagcttcctgtctgatgctatgaaatcagaagagatcaccgccttgaccaactaggtccagcatttgacatgcattttaactttttggttcaatttcaagtctgctgtggctaatagtggtcaagattccgaactaggactttcctctgtgaagaggatgcctctgaagaaattttaaactggtgattttggttgcactgctcactttaagagttaacatgctcacttgttagtatttctgagtaacaagatggtgacttctccttggggatctgggagctg

SEQ ID NO: 105213 - DNA, 2143 bp, Homo sapiens
  Payload ID: 642
  Gene Symbol: AHCY
  Gene Name: adenosylhomocysteinase
  Uniprot ID: P23526
  ENST ID: ENST00000217426
  CDS Start-End: 79-1377
cggcgctgcccgcccagttcctgttcccagactgaggcccagcccccttcgcccgtttccatcacgagtgccgccagcatgtctgacaaactgccctacaaagtcgccgacatcggcctggctgcctggggacgcaaggccctggacattgctgagaacgagatgccgggcctgatgcgtatgcgggagcggtactcggcctccaagccactgaagggcgcccgcatcgctggctgcctgcacatgaccgtggagacggccgtcctcattgagaccctcgtcaccctgggtgctgaggtgcagtggtccagctgcaacatcttctccacccaggaccatgcggcggctgccattgccaaggctggcattccggtgtatgcctggaagggcgaaacggacgaggagtacctgtggtgcattgagcagaccctgtacttcaaggacgggcccctcaacatgattctggacgacgggggcgacctcaccaacctcatccacaccaagtacccgcagcttctgccaggcatccgaggcatctctgaggagaccacgactggggtccacaacctctacaagatgatggccaatgggatcctcaaggtgcctgccatcaatgtcaatgactccgtcaccaagagcaagtttgacaacctctatggctgccgggagtccctcatagatggcatcaagcgggccacagatgtgatgattgccggcaaggtagcggtggtagcaggctatggtgatgtgggcaagggctgtgcccaggccctgcggggtttcggagcccgcgtcatcatcaccgagattgaccccatcaacgcactgcaggctgccatggagggctatgaggtgaccaccatggatgaggcctgtcaggagggcaacatctttgtcaccaccacaggctgtattgacatcatccttggccggcactttgagcagatgaaggatgatgccattgtgtgtaacattggacactttgacgtggagatcgatgtcaagtggctcaacgagaacgccgtggagaaggtgaacatcaagccgcaggtggaccggtatcggttgaagaatgggcgccgcatcatcctgctggccgagggtcggctggtcaacctgggttgtgccatgggccaccccagcttcgtgatgagtaactccttcaccaaccaggtgatggcgcagatcgagctgtggacccatccagacaagtaccccgttggggttcatttcctgcccaagaagctggatgaggcagtggctgaagcccacctgggcaagctgaatgtgaagttgaccaagctaactgagaagcaagcccagtacctgggcatgtcctgtgatggccccttcaagccggatcactaccgctactgagagccaggtctgcgtttcaccctccagctgctgtccttgcccaggccccacctctcctccctaagagctaatggcaccaactttgtgattggtttgtcagtgtcccccatcgactctctggggctgatcacttagtttttggcctctgctgcagccgtcatactgttccaaatgtggcagcgggaacagagtaccctcttcaagccccggtcatgatggaggtcccagccacagggaaccatgagctcagtggtcttggaacagctcactaagtcagtccttccttagcctggaagtcagtagtggagtcacaaagcccatgtgttttgccatctaggccttcacctggtctgtggacttatacctgtgtgcttggtttacaggtccagtggttcttcagcccatgacagatgagaaggggctatattgaagggcaaagaggaactgttgtttgaattttcctgagagcctggcttagtgctgggccttctcttaaacctcattacaatgaggttagtacttttagtccctgttttacaggggttagaatagactgttaaggggcaactgagaaagaacagagaagtgacagctaggggttgagaggggccagaaaaacatgaatgcaggcagatttcgtgaaatctgccaccactttataaccagatggttcctttcacaaccctgggtcaaaaagagaataatttggcctataatgttaaaagaaagcaggaaggtgggtaaataaaaatcttggtgcctggaa

SEQ ID NO: 105214 - DNA, 2366 bp, Homo sapiens
  Payload ID: 642
  Gene Symbol: AHCY
  Gene Name: adenosylhomocysteinase
  Uniprot ID: P23526
  ENST ID: ENST00000538132
  CDS Start-End: 388-1602
ctggagggaggggcgtggatacagcgggaaaggagagacccctagcggggtggacaagaagggaggaactccacagaactgcttaatccggctccatccccatcagcgggctttctcagcgcctgcacccctctctatcccatctcgaagcctccagttaatccagagtgagacgcaggaccgccgggaggcgagcggggatgctgaagctagggcaggctaaagccccgcggccaaagggcaggcttgtgcgccctccgccccctctccgccccctctccgcccctccgcgcccaggacctaattgtttgcaaaagcaaacacggaaaagccgacatcggcctggctgcctggggacgcaaggccctggacattgctgagaacgagatgccgggcctgatgcgtatgcgggagcggtactcggcctccaagccactgaagggcgcccgcatcgctggctgcctgcacatgaccgtggagacggccgtcctcattgagaccctcgtcaccctgggtgctgaggtgcagtggtccagctgcaacatcttctccacccaggaccatgcggcggctgccattgccaaggctggcattccggtgtatgcctggaagggcgaaacggacgaggagtacctgtggtgcattgagcagaccctgtacttcaaggacgggcccctcaacatgattctggacgacgggggcgacctcaccaacctcatccacaccaagtacccgcagcttctgccaggcatccgaggcatctctgaggagaccacgactggggtccacaacctctacaagatgatggccaatgggatcctcaaggtgcctgccatcaatgtcaatgactccgtcaccaagagcaagtttgacaacctctatggctgccgggagtccctcatagatggcatcaagcgggccacagatgtgatgattgccggcaaggtagcggtggtagcaggctatggtgatgtgggcaagggctgtgcccaggccctgcggggtttcggagcccgcgtcatcatcaccgagattgaccccatcaacgcactgcaggctgccatggagggctatgaggtgaccaccatggatgaggcctgtcaggagggcaacatctttgtcaccaccacaggctgtattgacatcatccttggccggcactttgagcagatgaaggatgatgccattgtgtgtaacattggacactttgacgtggagatcgatgtcaagtggctcaacgagaacgccgtggagaaggtgaacatcaagccgcaggtggaccggtatcggttgaagaatgggcgccgcatcatcctgctggccgagggtcggctggtcaacctgggttgtgccatgggccaccccagcttcgtgatgagtaactccttcaccaaccaggtgatggcgcagatcgagctgtggacccatccagacaagtaccccgttggggttcatttcctgcccaagaagctggatgaggcagtggctgaagcccacctgggcaagctgaatgtgaagttgaccaagctaactgagaagcaagcccagtacctgggcatgtcctgtgatggccccttcaagccggatcactaccgctactgagagccaggtctgcgtttcaccctccagctgctgtccttgcccaggccccacctctcctccctaagagctaatggcaccaactttgtgattggtttgtcagtgtcccccatcgactctctggggctgatcacttagtttttggcctctgctgcagccgtcatactgttccaaatgtggcagcgggaacagagtaccctcttcaagccccggtcatgatggaggtcccagccacagggaaccatgagctcagtggtcttggaacagctcactaagtcagtccttccttagcctggaagtcagtagtggagtcacaaagcccatgtgttttgccatctaggccttcacctggtctgtggacttatacctgtgtgcttggtttacaggtccagtggttcttcagcccatgacagatgagaaggggctatattgaagggcaaagaggaactgttgtttgaattttcctgagagcctggcttagtgctgggccttctcttaaacctcattacaatgaggttagtacttttagtccctgttttacaggggttagaatagactgttaaggggcaactgagaaagaacagagaagtgacagctaggggttgagaggggccagaaaaacatgaatgcaggcagatttcgtgaaatctgccaccactttataaccagatggttcctttcacaaccctgggtcaaaaagagaataatttggcctataatgttaaaagaaagcaggaaggtgggtaaataaaaatcttggtgcctgg

SEQ ID NO: 105215 - DNA, 2503 bp, Homo sapiens
  Payload ID: 643
  Gene Symbol: AHCYL1
  Gene Name: adenosylhomocysteinase-like 1
  Uniprot ID: O43865
  ENST ID: ENST00000359172
  CDS Start-End: 343-1794
gcttctgactgtggaattggattctagctgtgtgtgtgttatatcctgttactgttgagacacagaggcgggagtcggcgggggaagatatgtgctgagattagtcagcctgccctccctctcccccaagaaactcaggccccatctggggagagtgagaacttaagaaacttgagacagggaaggagagccgggagcagccaaaacctgctaagtctcagaagactggtttctgcacaagggaatggaagaagtgactggaggtggctgtggattcaactctggcctgagattgattcccttgagataagttgttttctgcaaatccagtttgctgatgacatgcaggagttcaccaaattccccaccaaaactggccgaagatctttgtctcgctcgatctcacagtcctccactgacagctacagttcagctgcatcctacacagatagctctgatgatgaggtttctccccgagagaagcagcaaaccaactccaagggcagcagcaatttctgtgtgaagaacatcaagcaggcagaatttggacgccgggagattgagattgcagagcaagacatgtctgctctgatttcactcaggaaacgtgctcagggggagaagcccttggctggtgctaaaatagtgggctgtacacacatcacagcccagacagcggtgttgattgagacactctgtgccctgggggctcagtgccgctggtctgcttgtaacatctactcaactcagaatgaagtagctgcagcactggctgaggctggagttgcagtgttcgcttggaagggcgagtcagaagatgacttctggtggtgtattgaccgctgtgtgaacatggatgggtggcaggccaacatgatcctggatgatgggggagacttaacccactgggtttataagaagtatccaaacgtgtttaagaagatccgaggcattgtggaagagagcgtgactggtgttcacaggctgtatcagctctccaaagctgggaagctctgtgttccggccatgaacgtcaatgattctgttaccaaacagaagtttgataacttgtactgctgccgagaatccattttggatggcctgaagaggaccacagatgtgatgtttggtgggaaacaagtggtggtgtgtggctatggtgaggtaggcaagggctgctgtgctgctctcaaagctcttggagcaattgtctacattaccgaaatcgaccccatctgtgctctgcaggcctgcatggatgggttcagggtggtaaagctaaatgaagtcatccggcaagtcgatgtcgtaataacttgcacaggaaataagaatgtagtgacacgggagcacttggatcgcatgaaaaacagttgtatcgtatgcaatatgggccactccaacacagaaatcgatgtgaccagcctccgcactccggagctgacgtgggagcgagtacgttctcaggtggaccatgtcatctggccagatggcaaacgagttgtcctcctggcagagggtcgtctactcaatttgagctgctccacagttcccacctttgttctgtccatcacagccacaacacaggctttggcactgatagaactctataatgcacccgaggggcgatacaagcaggatgtgtacttgcttcctaagaaaatggatgaatacgttgccagcttgcatctgccatcatttgatgcccaccttacagagctgacagatgaccaagcaaaatatctgggactcaacaaaaatgggccattcaaacctaattattacagatactaatggaccatactaccaaggaccagtccacctgaaccacacactctaaagaaatattttttaagataacttttattttcttcttactcctttcctcttgatttttttcctataatttcattcttgttttttcatctcattatccaagttctgcagaccacacaggaacttgcttcatggctctttagatgaaatagaagttcagggttcctcactctagtcactaaagaaggattttactctcccagcccagaaaggtgattctttctttaccatttctggggactttagtcttaattaggtaccttattaacaggaaatgctaaggtaccttctctgtggaacaatctgcaatgtctaaatcgccttaaaagagcccatttcttagctgctgaaatcagtgctctttcacttcttcagagaagcagggatggtacctacccggcaggtaggttagatgtgggtggtgcatgttaatttcccttagaagttccaagccctgtttcctgcgtaaaggtggtatgtccagttcagagatgtgtataatgagcatggcttgttaagatcaggaggcccacttggatttatagtatagcccttcctccactcccaccagacttgctcatttttcgagtttttaactagactacactctattgagtttaattttgtcctctaggatttatttctgttgtccaaaaaaaaaaaaaaa

SEQ ID NO: 105216 - DNA, 4015 bp, Homo sapiens
  Payload ID: 643
  Gene Symbol: AHCYL1
  Gene Name: adenosylhomocysteinase-like 1
  Uniprot ID: O43865
  ENST ID: ENST00000369799
  CDS Start-End: 368-1960
cagagtgccctttctccccgcctcttccccctcccgggagctgccagtacttgacgtggcgtcaccgccctctaccctcgctttgcgtgcgtgtttgcgtacagcggaggtggcggcgcgggcaggtcggagctcggagctgctgttctggttctcttgtggccgccgtcgctgtccggctgccttgggctgccgaacagacaaggcgtgggccacagcacctcagaagccgacgcagctcgacgcaggggccggcaggagggtgggcgatcgcgtgtcggagggcgccgcgcgggcaggcgggcgggcgccagagggggaaagaggcgggggcggcgggtcagccgctggccgggccggccggggaatgtcgatgcctgacgcgatgccgctgcccggggtcggggaggagctgaagcaggccaaggagatcgaggacgccgagaagtactccttcatggccaccgtcaccaaggcgcccaagaagcaaatccagtttgctgatgacatgcaggagttcaccaaattccccaccaaaactggccgaagatctttgtctcgctcgatctcacagtcctccactgacagctacagttcagctgcatcctacacagatagctctgatgatgaggtttctccccgagagaagcagcaaaccaactccaagggcagcagcaatttctgtgtgaagaacatcaagcaggcagaatttggacgccgggagattgagattgcagagcaagacatgtctgctctgatttcactcaggaaacgtgctcagggggagaagcccttggctggtgctaaaatagtgggctgtacacacatcacagcccagacagcggtgttgattgagacactctgtgccctgggggctcagtgccgctggtctgcttgtaacatctactcaactcagaatgaagtagctgcagcactggctgaggctggagttgcagtgttcgcttggaagggcgagtcagaagatgacttctggtggtgtattgaccgctgtgtgaacatggatgggtggcaggccaacatgatcctggatgatgggggagacttaacccactgggtttataagaagtatccaaacgtgtttaagaagatccgaggcattgtggaagagagcgtgactggtgttcacaggctgtatcagctctccaaagctgggaagctctgtgttccggccatgaacgtcaatgattctgttaccaaacagaagtttgataacttgtactgctgccgagaatccattttggatggcctgaagaggaccacagatgtgatgtttggtgggaaacaagtggtggtgtgtggctatggtgaggtaggcaagggctgctgtgctgctctcaaagctcttggagcaattgtctacattaccgaaatcgaccccatctgtgctctgcaggcctgcatggatgggttcagggtggtaaagctaaatgaagtcatccggcaagtcgatgtcgtaataacttgcacaggaaataagaatgtagtgacacgggagcacttggatcgcatgaaaaacagttgtatcgtatgcaatatgggccactccaacacagaaatcgatgtgaccagcctccgcactccggagctgacgtgggagcgagtacgttctcaggtggaccatgtcatctggccagatggcaaacgagttgtcctcctggcagagggtcgtctactcaatttgagctgctccacagttcccacctttgttctgtccatcacagccacaacacaggctttggcactgatagaactctataatgcacccgaggggcgatacaagcaggatgtgtacttgcttcctaagaaaatggatgaatacgttgccagcttgcatctgccatcatttgatgcccaccttacagagctgacagatgaccaagcaaaatatctgggactcaacaaaaatgggccattcaaacctaattattacagatactaatggaccatactaccaaggaccagtccacctgaaccacacactctaaagaaatattttttaagataacttttattttcttcttactcctttcctcttgatttttttcctataatttcattcttgttttttcatctcattatccaagttctgcagaccacacaggaacttgcttcatggctctttagatgaaatagaagttcagggttcctcactctagtcactaaagaaggattttactctcccagcccagaaaggtgattctttctttaccatttctggggactttagtcttaattaggtaccttattaacaggaaatgctaaggtaccttctctgtggaacaatctgcaatgtctaaatcgccttaaaagagcccatttcttagctgctgaaatcagtgctctttcacttcttcagagaagcagggatggtacctacccggcaggtaggttagatgtgggtggtgcatgttaatttcccttagaagttccaagccctgtttcctgcgtaaaggtggtatgtccagttcagagatgtgtataatgagcatggcttgttaagatcaggaggcccacttggatttatagtatagcccttcctccactcccaccagacttgctcatttttcgagtttttaactagactacactctattgagtttaattttgtcctctaggatttatttctgttgtccaaaaaaaaaaaaaaagaaaagaaaaattaaggagaatttttggtgttaatgctgaggaattgcttgagtggttagttgttaccaatttctcttttgaacctttggagctaaggatgctgagtctagagaaatgctagtctcaagccctgttaagtccctctgtttctagcccgtagttcatagcatcagtgaactggagccacaacagcaaattctatcagctgtgtaccatacagcttgtgctgaaggcgaatttcttgagccattactcagtataaagcactgagttctatctttaggatttatctttaagagcaaatttctggtcagctgtgcttctgcaacctaaaatatttaaagggaggtaggtgtgggcaggaggaggaatgataaattgggccagggcaagaaaaatctagcttcatataatttgtctgggactatacaccctatataatgttagttttacagaagtaatatgacttttgattgctacataccacaaagagtttatgaactgagatcataaagggcaactgatgtgtgaagaaagtagtcagtacatcctggctcatgctctgaaagaatatccagagaggctctctcaaagatcagggagatgtattcccatgccatgcaccctgcttcccagcatttctgcatggtcaagtgagctttatgctcatgagctttaagtatataattatccaggattttaaatcctcaacttgttctagcttgtgatccctcaaagttgggtcatacgttagtgctagatactagaaattttcacttttccactgatcagagagacagacattaaaaacaaaaatagaagaaaggaaagctttcaccctgcagcttcttagcagggaacaattgtcttgccaaaacttttttcccttttctctcccattttcttttacccaatcccttcttactccttgccagtgtgaccatgctttcttctctgtagatgttaacagttaaggcctattttcctcgggcacttaaccaaccaatcagaacaccacatctgttaggggaggtaacctggccaacagtgtatccatcacgttagccctgctggagggaagggacccacattcacctgccctctgacctgccccttgatcccatatctattaccgtgtccataggaataataggtaagggctctgtctctgtcaagccatgtaacaaaggacactgttaaaaaaaaaaaaaagtctggcatcagagggagcatgtggagagcaacttgggaagaacaagttcattttgtattgaatgatttttaatgaatgcaatattaatccttgcagatgagcaataatcattaaaatcgattaaaatgataa

SEQ ID NO: 105217 - DNA, 4313 bp, Homo sapiens
  Payload ID: 643
  Gene Symbol: AHCYL1
  Gene Name: adenosylhomocysteinase-like 1
  Uniprot ID: O43865
  ENST ID: ENST00000393614
  CDS Start-End: 801-2252
gctttgcgtgcgtgtttgcgtacagcggaggtggcggcgcgggcaggtcggagctcggagctgctgttctggttctcttgtggccgccgtcgctgtccggctgccttgggctgccgaacagacaaggcgtgggccacagcacctcagaagccgacgcagctcgacgcaggggccggcaggagggtgggcgatcgcgtgtcggagggcgccgcgcgggcaggcgggcgggcgccagagggggaaagaggcgggggcggcgggtcagccgctggccgggccggccggggaatgtcgatgcctgacgcgatgccgctgcccggggtcggggaggagctgaagcaggccaaggagatcgaggacgccgagaagtactccttcatggccaccgtcaccaaggcgcccaagaaggtgcgggggctctgggtggcggcgggggctcgggctccggcctcgcggaagggacgcgagcaagcccgggctctggctagtttgggacttctgggggtgactggggacggcggaggtgatgtagggggtggcggctgtgcggccccaggcctctcccgggctgaaaggccgcctctgacctcgctttcctttgtccctcggcccaagtcctccgggatcgttttgaaacccgacagggccaggccttaaatttgcgactgacttttcctggatgaagggcctcgaagacgagagtgggagggggtgaaccaactcagctgacccttgtgaccagtccgggggcatggggtgtacagaaaatctcccttcagcaaatccagtttgctgatgacatgcaggagttcaccaaattccccaccaaaactggccgaagatctttgtctcgctcgatctcacagtcctccactgacagctacagttcagctgcatcctacacagatagctctgatgatgaggtttctccccgagagaagcagcaaaccaactccaagggcagcagcaatttctgtgtgaagaacatcaagcaggcagaatttggacgccgggagattgagattgcagagcaagacatgtctgctctgatttcactcaggaaacgtgctcagggggagaagcccttggctggtgctaaaatagtgggctgtacacacatcacagcccagacagcggtgttgattgagacactctgtgccctgggggctcagtgccgctggtctgcttgtaacatctactcaactcagaatgaagtagctgcagcactggctgaggctggagttgcagtgttcgcttggaagggcgagtcagaagatgacttctggtggtgtattgaccgctgtgtgaacatggatgggtggcaggccaacatgatcctggatgatgggggagacttaacccactgggtttataagaagtatccaaacgtgtttaagaagatccgaggcattgtggaagagagcgtgactggtgttcacaggctgtatcagctctccaaagctgggaagctctgtgttccggccatgaacgtcaatgattctgttaccaaacagaagtttgataacttgtactgctgccgagaatccattttggatggcctgaagaggaccacagatgtgatgtttggtgggaaacaagtggtggtgtgtggctatggtgaggtaggcaagggctgctgtgctgctctcaaagctcttggagcaattgtctacattaccgaaatcgaccccatctgtgctctgcaggcctgcatggatgggttcagggtggtaaagctaaatgaagtcatccggcaagtcgatgtcgtaataacttgcacaggaaataagaatgtagtgacacgggagcacttggatcgcatgaaaaacagttgtatcgtatgcaatatgggccactccaacacagaaatcgatgtgaccagcctccgcactccggagctgacgtgggagcgagtacgttctcaggtggaccatgtcatctggccagatggcaaacgagttgtcctcctggcagagggtcgtctactcaatttgagctgctccacagttcccacctttgttctgtccatcacagccacaacacaggctttggcactgatagaactctataatgcacccgaggggcgatacaagcaggatgtgtacttgcttcctaagaaaatggatgaatacgttgccagcttgcatctgccatcatttgatgcccaccttacagagctgacagatgaccaagcaaaatatctgggactcaacaaaaatgggccattcaaacctaattattacagatactaatggaccatactaccaaggaccagtccacctgaaccacacactctaaagaaatattttttaagataacttttattttcttcttactcctttcctcttgatttttttcctataatttcattcttgttttttcatctcattatccaagttctgcagaccacacaggaacttgcttcatggctctttagatgaaatagaagttcagggttcctcactctagtcactaaagaaggattttactctcccagcccagaaaggtgattctttctttaccatttctggggactttagtcttaattaggtaccttattaacaggaaatgctaaggtaccttctctgtggaacaatctgcaatgtctaaatcgccttaaaagagcccatttcttagctgctgaaatcagtgctctttcacttcttcagagaagcagggatggtacctacccggcaggtaggttagatgtgggtggtgcatgttaatttcccttagaagttccaagccctgtttcctgcgtaaaggtggtatgtccagttcagagatgtgtataatgagcatggcttgttaagatcaggaggcccacttggatttatagtatagcccttcctccactcccaccagacttgctcatttttcgagtttttaactagactacactctattgagtttaattttgtcctctaggatttatttctgttgtccaaaaaaaaaaaaaaagaaaagaaaaattaaggagaatttttggtgttaatgctgaggaattgcttgagtggttagttgttaccaatttctcttttgaacctttggagctaaggatgctgagtctagagaaatgctagtctcaagccctgttaagtccctctgtttctagcccgtagttcatagcatcagtgaactggagccacaacagcaaattctatcagctgtgtaccatacagcttgtgctgaaggcgaatttcttgagccattactcagtataaagcactgagttctatctttaggatttatctttaagagcaaatttctggtcagctgtgcttctgcaacctaaaatatttaaagggaggtaggtgtgggcaggaggaggaatgataaattgggccagggcaagaaaaatctagcttcatataatttgtctgggactatacaccctatataatgttagttttacagaagtaatatgacttttgattgctacataccacaaagagtttatgaactgagatcataaagggcaactgatgtgtgaagaaagtagtcagtacatcctggctcatgctctgaaagaatatccagagaggctctctcaaagatcagggagatgtattcccatgccatgcaccctgcttcccagcatttctgcatggtcaagtgagctttatgctcatgagctttaagtatataattatccaggattttaaatcctcaacttgttctagcttgtgatccctcaaagttgggtcatacgttagtgctagatactagaaattttcacttttccactgatcagagagacagacattaaaaacaaaaatagaagaaaggaaagctttcaccctgcagcttcttagcagggaacaattgtcttgccaaaacttttttcccttttctctcccattttcttttacccaatcccttcttactccttgccagtgtgaccatgctttcttctctgtagatgttaacagttaaggcctattttcctcgggcacttaaccaaccaatcagaacaccacatctgttaggggaggtaacctggccaacagtgtatccatcacgttagccctgctggagggaagggacccacattcacctgccctctgacctgccccttgatcccatatctattaccgtgtccataggaataataggtaagggctctgtctctgtcaagccatgtaacaaaggacactgttaaaaaaaaaaaaaagtctggcatcagagggagcatgtggagagcaacttgggaagaacaagttcattttgtattgaatgatttttaatgaatgcaatattaatccttgcagatgagcaataatcattaaaatcgattaaaatgataagacctt

SEQ ID NO: 105218 - DNA, 5056 bp, Homo sapiens
  Payload ID: 644
  Gene Symbol: AHCYL2
  Gene Name: adenosylhomocysteinase-like 2
  Uniprot ID: Q96HN2
  ENST ID: ENST00000325006
  CDS Start-End: 55-1890
gccgaccaagagcaggagctggagtctgagccggtggttgcagcggaggcggtgatgtcggtgcaggttgtgtcagccgcggctgccgccaaggtgcctgaggtggagctgaaggacctgagcccctccgaggcggagtcgcaactaggactgagcacggccgccgtgggcgccatggcccccccggcgggcggtggagaccctgaggctccagctcccgccgcggagcggcccccggtccccggcccgggctcggggcccgccgccgctctcagccccgccgccgggaaggtgcctcaggcgtcggccatgaagcggagcgacccacatcaccagcaccagcggcaccgcgacggcggcgaggccctggtcagccccgacggcaccgtcaccgaggcgccgcgcacagtcaagaagcagatccagtttgctgaccagaagcaagaattcaacaaacgtcccaccaaaattggacgtcgctctttgtctcgttccatttctcagtcatctactgacagctacagctcagcggcttcatatacagatagctctgatgatgagacatcgcccagggacaagcagcaaaagaactctaagggaagcagtgacttctgtgttaagaacatcaaacaggcagagtttggacgaagagaaattgaaattgctgaacaagaaatgcctgcattgatggctttgaggaagagagctcaaggagaaaagcctttggctggagccaaaatcgtgggttgcacacacatcactgctcagactgctgtgcttatggaaactctgggtgctctgggggcccagtgccgatgggctgcctgcaacatctattccactctcaatgaagtggctgctgctctagcagaaagtggatttcctgtttttgcctggaagggagagtcagaagatgacttttggtggtgtatcgatagatgtgtgaatgtggagggctggcagccaaacatgatcttggatgatggaggggatcttacccactggatttataaaaagtatcccaacatgtttaagaaaatcaagggcatagtagaggagagtgttactggagttcacaggctgtaccaactgtccaaagctgggaagctgtgtgttccagccatgaatgtcaatgactcagtcaccaaacagaaatttgacaacctctactgttgccgtgaatcaattcttgatggacttaaaaggacaacagacatgatgtttggtggaaagcaagtggtagtctgtggctatggagaggtggggaaagggtgctgtgctgccctgaaagccatgggctccattgtgtatgtaactgaaattgaccccatctgtgccctgcaagcctgtatggatggatttcgactggtgaaattaaatgaggtcatccgacaagtggacattgttattacctgtacaggtaacaagaatgtggtaaccagagagcacttggaccgtatgaagaatagctgcatcgtttgtaacatgggacattccaacacagagattgacgtggcgagtctgcggacaccagaactgacctgggagcgagtgagatctcaagttgaccatgtgatatggcctgatggcaagaggatagtactgctggcagagggccgcctgctgaaccttagctgctccacagtgcctacatttgtgctctcaatcactgctactactcaggctcttgccttgatagagctttacaatgctcctgagggtcgctataagcaggatgtctacctgttgcccaagaagatggatgagtatgtggccagcctacacctgcctacctttgatgcccacttgacagagctgacagatgaacaggccaagtatctgggactcaacaagaatgggcccttcaagcctaattactacaggtattaagttcctgtaactcaaaccagaatttttaaggaatagaactccaagccttttctccactactatacaagaaagaattcagcaagctgcttctccaatcaaagctgcctgccgtgctcaccctgtgtgttaggttatttatttattaaaatcaagaatcctgtgcctgtagtgttggcccagagtgtggttactgccctgagggccatgaaagccacagaggatgggctgaggaaggaaagaaatggggttactgctcccagtgcatcatttgcatcattccccattgactgaatcctcagcagtggccgtttttcctcttgtccaggctcacgagttagtccagggattccatactccctattccctggagttttctggaataaattttcagcacctgcttttctcagcttggcccttccccgggtgaggccgtttggaattaacatggccagtgtttcacacaagattgggttcccaatcttgaccatcactatcactgccttctttatataaaggctaataaggaaggagtgttatttatggctttgccaagctacatcaagaactcagctgtgctgtgcctaccaggggtctcctttcttacccaggactcctttcttctccttgaatatttatgtccattttaacacttcctggttgcaagagggatgtgcctccattatttcctccacagttttggtatttgtcagacatttgttctgctgtctttctaatccagccaacgtctgctcaggaagtggggccagctccactgggacccatagttttacttccttgtcatttgattggatagtttccaaggaagcccctccagattggcactatctcagaaaaggagagcttgttgtgaaacactgcttcctgaaacttcctgctattgcctaaagctacgtctgaaactgagtagggaaaggcatacttttccagggacttagggggataggctttggaaatgggacaggtctttcagactcacagcttgataccctaacaaagcagagtatatttatttgtttcccaggaaggccattgcagtttgactggctgagggatacagagatgaaattgtaaactgtatccagattatcaaagctaatttgactagtttgaacctcgtcagacattcattcctttggccattgccatggatgaaaccgagatctgcagtctgatctgtggacttctctgctggcatatcttttatgatttaacctcttccatttgatgattctgtatttcagagtcagtttcttgagtaactccagtgctacaaaaagaattagtaatgtggtgtgggcagcgtgacattttatgtcccacccaaaaattggattccttttggagactgatctgttggtctcaggcatttcattaggaccagattggttctaagagttagtctggactggccctaggaaacttgaattaaataagcctcttccccttaccgatcctttttaacactctcaggtttgtttgtttcccacttttttcctatgctggtctgcctcaaagtctcaagaccaaggtgactcaagataacaccagaccacgcatgatcaccaaaaccttcccatcctgattctcttcttctacctctaccctctccaacttctcctggtcttcacatatactctcaaagctagtctgaaagtgaccttactttcggaagtagggaagtggaactttggtaaatgactgtttgcctcatttaatagtatacaggctcagcccatagactacagttcttcagaggccatatgtctcagcaagtactggttatattctttttttgtaaggaagatcataaatgctaaaaattccactaagccattcagttcttccttttgcctacctagtcctgatttttgtattaattggttccctttagcaagggattcagatctttgtaccttatcttatatccagagcagattccatttggcagatagatggtctctagcctattgtattcttagaccaaaaatcataacctgctgtttctcagcaaagccttgctctctggagcttactatgtgctggtacttaaagagtacattctgccttgctgtagtgaagagacccactccaaataaaaaaggggccacacggggcttctaagttaggttgccagtgttgctgcccatgatgagttatttgcctctgagtttcagatgacctctctgtagggacactgtgttatcaaccattaagaagaaagaaccacaagcctcccaagtatttgggttctatcttagggttgaaatctggtcattattccctctacccttggaatcagagcaatgtgtcttctttcctccaacctcttaccttagatgcatcctggttatctggaagcatgggaaagaaggctacttatctctttgtatgtggctccagtctgtgaggatacataacattttctctacaatgaatctgtgctaatattttgccttctttctttcttttcttttcacccttagagacagggtttcactatgttgcccaggctggtctcaaactcctgggctcaagcaatcctcctgcctcagcttcctgagtagctggaaccacaggtgtgtgctaccgtgcctggcacttttttgccttcttaatggagatattcagttttctttttttcatttaaacaaagaaaaaaaatgtatctactctaccttccctctgctctcctccctccctatcctacttgcccatatgagcacggctccccatggccacatactcctgcaaagcttttatgctgcttcgcttttctctaaacagatctgatattgctgctcctgtggttttctcaaaattaactttgccgtggtttttaaaaaggaatcaaaatgcattgttgcattaagctttttcaataaaggaaaattacggaaggaaaataggcaacaccagcaaattatatgtggacaggttctaaactctatatatacatatatatatatatatctatatatctatatacgtaatcatctagttctgtcatcttactgaaaggaataacacttctaaagatcaccatttctgagaagttcttggaaatctttatgtctaagtgattgtattagatcagcaataatgactatgtaatctcaaaaaacaaataaaatattcttaacatgga

SEQ ID NO: 105219 - DNA, 5026 bp, Homo sapiens
  Payload ID: 644
  Gene Symbol: AHCYL2
  Gene Name: adenosylhomocysteinase-like 2
  Uniprot ID: Q96HN2
  ENST ID: ENST00000446544
  CDS Start-End: 28-1860
gagccggtggttgcagcggaggcggtgatgtcggtgcaggttgtgtcagccgcggctgccgccaaggtgcctgaggtggagctgaaggacctgagcccctccgaggcggagtcgcaactaggactgagcacggccgccgtgggcgccatggcccccccggcgggcggtggagaccctgaggctccagctcccgccgcggagcggcccccggtccccggcccgggctcggggcccgccgccgctctcagccccgccgccgggaaggtgcctcaggcgtcggccatgaagcggagcgacccacatcaccagcaccagcggcaccgcgacggcggcgaggccctggtcagccccgacggcaccgtcaccgaggcgccgcgcacagtcaagaagatccagtttgctgaccagaagcaagaattcaacaaacgtcccaccaaaattggacgtcgctctttgtctcgttccatttctcagtcatctactgacagctacagctcagcggcttcatatacagatagctctgatgatgagacatcgcccagggacaagcagcaaaagaactctaagggaagcagtgacttctgtgttaagaacatcaaacaggcagagtttggacgaagagaaattgaaattgctgaacaagaaatgcctgcattgatggctttgaggaagagagctcaaggagaaaagcctttggctggagccaaaatcgtgggttgcacacacatcactgctcagactgctgtgcttatggaaactctgggtgctctgggggcccagtgccgatgggctgcctgcaacatctattccactctcaatgaagtggctgctgctctagcagaaagtggatttcctgtttttgcctggaagggagagtcagaagatgacttttggtggtgtatcgatagatgtgtgaatgtggagggctggcagccaaacatgatcttggatgatggaggggatcttacccactggatttataaaaagtatcccaacatgtttaagaaaatcaagggcatagtagaggagagtgttactggagttcacaggctgtaccaactgtccaaagctgggaagctgtgtgttccagccatgaatgtcaatgactcagtcaccaaacagaaatttgacaacctctactgttgccgtgaatcaattcttgatggacttaaaaggacaacagacatgatgtttggtggaaagcaagtggtagtctgtggctatggagaggtggggaaagggtgctgtgctgccctgaaagccatgggctccattgtgtatgtaactgaaattgaccccatctgtgccctgcaagcctgtatggatggatttcgactggtgaaattaaatgaggtcatccgacaagtggacattgttattacctgtacaggtaacaagaatgtggtaaccagagagcacttggaccgtatgaagaatagctgcatcgtttgtaacatgggacattccaacacagagattgacgtggcgagtctgcggacaccagaactgacctgggagcgagtgagatctcaagttgaccatgtgatatggcctgatggcaagaggatagtactgctggcagagggccgcctgctgaaccttagctgctccacagtgcctacatttgtgctctcaatcactgctactactcaggctcttgccttgatagagctttacaatgctcctgagggtcgctataagcaggatgtctacctgttgcccaagaagatggatgagtatgtggccagcctacacctgcctacctttgatgcccacttgacagagctgacagatgaacaggccaagtatctgggactcaacaagaatgggcccttcaagcctaattactacaggtattaagttcctgtaactcaaaccagaatttttaaggaatagaactccaagccttttctccactactatacaagaaagaattcagcaagctgcttctccaatcaaagctgcctgccgtgctcaccctgtgtgttaggttatttatttattaaaatcaagaatcctgtgcctgtagtgttggcccagagtgtggttactgccctgagggccatgaaagccacagaggatgggctgaggaaggaaagaaatggggttactgctcccagtgcatcatttgcatcattccccattgactgaatcctcagcagtggccgtttttcctcttgtccaggctcacgagttagtccagggattccatactccctattccctggagttttctggaataaattttcagcacctgcttttctcagcttggcccttccccgggtgaggccgtttggaattaacatggccagtgtttcacacaagattgggttcccaatcttgaccatcactatcactgccttctttatataaaggctaataaggaaggagtgttatttatggctttgccaagctacatcaagaactcagctgtgctgtgcctaccaggggtctcctttcttacccaggactcctttcttctccttgaatatttatgtccattttaacacttcctggttgcaagagggatgtgcctccattatttcctccacagttttggtatttgtcagacatttgttctgctgtctttctaatccagccaacgtctgctcaggaagtggggccagctccactgggacccatagttttacttccttgtcatttgattggatagtttccaaggaagcccctccagattggcactatctcagaaaaggagagcttgttgtgaaacactgcttcctgaaacttcctgctattgcctaaagctacgtctgaaactgagtagggaaaggcatacttttccagggacttagggggataggctttggaaatgggacaggtctttcagactcacagcttgataccctaacaaagcagagtatatttatttgtttcccaggaaggccattgcagtttgactggctgagggatacagagatgaaattgtaaactgtatccagattatcaaagctaatttgactagtttgaacctcgtcagacattcattcctttggccattgccatggatgaaaccgagatctgcagtctgatctgtggacttctctgctggcatatcttttatgatttaacctcttccatttgatgattctgtatttcagagtcagtttcttgagtaactccagtgctacaaaaagaattagtaatgtggtgtgggcagcgtgacattttatgtcccacccaaaaattggattccttttggagactgatctgttggtctcaggcatttcattaggaccagattggttctaagagttagtctggactggccctaggaaacttgaattaaataagcctcttccccttaccgatcctttttaacactctcaggtttgtttgtttcccacttttttcctatgctggtctgcctcaaagtctcaagaccaaggtgactcaagataacaccagaccacgcatgatcaccaaaaccttcccatcctgattctcttcttctacctctaccctctccaacttctcctggtcttcacatatactctcaaagctagtctgaaagtgaccttactttcggaagtagggaagtggaactttggtaaatgactgtttgcctcatttaatagtatacaggctcagcccatagactacagttcttcagaggccatatgtctcagcaagtactggttatattctttttttgtaaggaagatcataaatgctaaaaattccactaagccattcagttcttccttttgcctacctagtcctgatttttgtattaattggttccctttagcaagggattcagatctttgtaccttatcttatatccagagcagattccatttggcagatagatggtctctagcctattgtattcttagaccaaaaatcataacctgctgtttctcagcaaagccttgctctctggagcttactatgtgctggtacttaaagagtacattctgccttgctgtagtgaagagacccactccaaataaaaaaggggccacacggggcttctaagttaggttgccagtgttgctgcccatgatgagttatttgcctctgagtttcagatgacctctctgtagggacactgtgttatcaaccattaagaagaaagaaccacaagcctcccaagtatttgggttctatcttagggttgaaatctggtcattattccctctacccttggaatcagagcaatgtgtcttctttcctccaacctcttaccttagatgcatcctggttatctggaagcatgggaaagaaggctacttatctctttgtatgtggctccagtctgtgaggatacataacattttctctacaatgaatctgtgctaatattttgccttctttctttcttttcttttcacccttagagacagggtttcactatgttgcccaggctggtctcaaactcctgggctcaagcaatcctcctgcctcagcttcctgagtagctggaaccacaggtgtgtgctaccgtgcctggcacttttttgccttcttaatggagatattcagttttctttttttcatttaaacaaagaaaaaaaatgtatctactctaccttccctctgctctcctccctccctatcctacttgcccatatgagcacggctccccatggccacatactcctgcaaagcttttatgctgcttcgcttttctctaaacagatctgatattgctgctcctgtggttttctcaaaattaactttgccgtggtttttaaaaaggaatcaaaatgcattgttgcattaagctttttcaataaaggaaaattacggaaggaaaataggcaacaccagcaaattatatgtggacaggttctaaactctatatatacatatatatatatatatctatatatctatatacgtaatcatctagttctgtcatcttactgaaaggaataacacttctaaagatcaccatttctgagaagttcttggaaatctttatgtctaagtgattgtattagatcagcaataatgactatgtaatctcaaaaaacaaataaaatattcttaacatgga

SEQ ID NO: 105220 - DNA, 1723 bp, Homo sapiens
  Payload ID: 644
  Gene Symbol: AHCYL2
  Gene Name: adenosylhomocysteinase-like 2
  ENST ID: ENST00000466924
  CDS Start-End: 1-1556
gcaggaagtggagccgtcagttcctgctttcattctggtgtactgtatgttctgcccatcaaggaaccatctttttatcattaaagatccagtttgctgaccagaagcaagaattcaacaaacgtcccaccaaaattggacgtcgctctttgtctcgttccatttctcagtcatctactgacagctacagctcagcggcttcatatacagatagctctgatgatgagacatcgcccagggacaagcagcaaaagaactctaagggaagcagtgacttctgtgttaagaacatcaaacaggcagagtttggacgaagagaaattgaaattgctgaacaagaaatgcctgcattgatggctttgaggaagagagctcaaggagaaaagcctttggctggagccaaaatcgtgggttgcacacacatcactgctcagactgctgtgcttatggaaactctgggtgctctgggggcccagtgccgatgggctgcctgcaacatctattccactctcaatgaagtggctgctgctctagcagaaagtggatttcctgtttttgcctggaagggagagtcagaagatgacttttggtggtgtatcgatagatgtgtgaatgtggagggctggcagccaaacatgatcttggatgatggaggggatcttacccactggatttataaaaagtatcccaacatgtttaagaaaatcaagggcatagtagaggagagtgttactggagttcacaggctgtaccaactgtccaaagctgggaagctgtgtgttccagccatgaatgtcaatgactcagtcaccaaacagaaatttgacaacctctactgttgccgtgaatcaattcttgatggacttaaaaggacaacagacatgatgtttggtggaaagcaagtggtagtctgtggctatggagaggtggggaaagggtgctgtgctgccctgaaagccatgggctccattgtgtatgtaactgaaattgaccccatctgtgccctgcaagcctgtatggatggatttcgactggtgaaattaaatgaggtcatccgacaagtggacattgttattacctgtacaggtaacaagaatgtggtaaccagagagcacttggaccgtatgaagaatagctgcatcgtttgtaacatgggacattccaacacagagattgacgtggcgagtctgcggacaccagaactgacctgggagcgagtgagatctcaagttgaccatgtgatatggcctgatggcaagaggatagtactgctggcagagggccgcctgctgaaccttagctgctccacagtgcctacatttgtgctctcaatcactgctactactcaggctcttgccttgatagagctttacaatgctcctgagggtcgctataagcaggatgtctacctgttgcccaagaagatggatgagtatgtggccagcctacacctgcctacctttgatgcccacttgacagagctgacagatgaacaggccaagtatctgggactcaacaagaatgggcccttcaagcctaattactacaggtattaagttcctgtaactcaaaccagaatttttaaggaatagaactccaagccttttctccactactatacaagaaagaattcagcaagctgcttctccaatcaaagctgcctgccgtgctcaccctgtgtgttaggttatttatttattaaaatcaagaatcctgtgcctgt

SEQ ID NO: 105221 - DNA, 581 bp, Homo sapiens
  Payload ID: 644
  Gene Symbol: AHCYL2
  Gene Name: adenosylhomocysteinase-like 2
  ENST ID: ENST00000466993
  CDS Start-End: 34-581
cacagaggtggcagtggggctggtaatgtcactatgctgggcagcaagaagaaatacattgttaatggcaactctgggattaaggcccagcagatccagtttgctgaccagaagcaagaattcaacaaacgtcccaccaaaattggacgtcgctctttgtctcgttccatttctcagtcatctactgacagctacagctcagcggcttcatatacagatagctctgatgatgagacatcgcccagggacaagcagcaaaagaactctaagggaagcagtgacttctgtgttaagaacatcaaacaggcagagtttggacgaagagaaattgaaattgctgaacaagaaatgcctgcattgatggctttgaggaagagagctcaaggagaaaagcctttggctggagccaaaatcgtgggttgcacacacatcactgctcagactgctgtgcttatggaaactctgggtgctctgggggcccagtgccgatgggctgcctgcaacatctattccactctcaatgaagtggctgctgctctagcagaaagtggatttcctgtttttgcctggaagggagagtc

SEQ ID NO: 105222 - DNA, 599 bp, Homo sapiens
  Payload ID: 644
  Gene Symbol: AHCYL2
  Gene Name: adenosylhomocysteinase-like 2
  ENST ID: ENST00000460109
  CDS Start-End: 373-599
aaagaaggaagtccaactattgctgcagaaagtccccactggggaggtgcgggtagagtgtttgggtagcattaaaacagtgagtgccctgtgagaagcacagtgcctgggtgcagcactttgcatcagctctgattttgaaatcagacacagaaggctttgaagccggccagtaaggggttgtcaggcagttgactaatgctcttgatttgaatcggaggctgctgtgaaaagggatgcagcttctgctagccactgtgaacttctgaatctcactagggttgggtctgctttggggcactcagataaccccagtatttccaaaccagctttcccttttgcttcaggacatatcttacccaagcctgcactatggagaagtgggacggtaatgagggcacctcagcttttcacatgcctgagtggatgcagatccagtttgctgaccagaagcaagaattcaacaaacgtcccaccaaaattggacgtcgctctttgtctcgttccatttctcagtcatctactgacagctacagctcagcggcttcatatacagatagctctgatgatgagacatcgcccagggacaagcagcaaaa

SEQ ID NO: 105223 - DNA, 2047 bp, Homo sapiens
  Payload ID: 644
  Gene Symbol: AHCYL2
  Gene Name: adenosylhomocysteinase-like 2
  Uniprot ID: Q96HN2
  ENST ID: ENST00000474594
  CDS Start-End: 355-1881
attgctgcagaaagtccccactggggaggtgcgggtagagtgtttgggtagcattaaaacagtgagtgccctgtgagaagcacagtgcctgggtgcagcactttgcatcagctctgattttgaaatcagacacagaaggctttgaagccggccagtaaggggttgtcaggcagttgactaatgctcttgatttgaatcggaggctgctgtgaaaagggatgcagcttctgctagccactgtgaacttctgaatctcactagggttgggtctgctttggggcactcagataaccccagtatttccaaaccagctttcccttttgcttcaggacatatcttacccaagcctgcactatggagaagtgggacggtaatgagggcacctcagcttttcacatgcctgagtggatgatccagtttgctgaccagaagcaagaattcaacaaacgtcccaccaaaattggacgtcgctctttgtctcgttccatttctcagtcatctactgacagctacagctcagcggcttcatatacagatagctctgatgatgagacatcgcccagggacaagcagcaaaagaactctaagggaagcagtgacttctgtgttaagaacatcaaacaggcagagtttggacgaagagaaattgaaattgctgaacaagaaatgcctgcattgatggctttgaggaagagagctcaaggagaaaagcctttggctggagccaaaatcgtgggttgcacacacatcactgctcagactgctgtgcttatggaaactctgggtgctctgggggcccagtgccgatgggctgcctgcaacatctattccactctcaatgaagtggctgctgctctagcagaaagtggatttcctgtttttgcctggaagggagagtcagaagatgacttttggtggtgtatcgatagatgtgtgaatgtggagggctggcagccaaacatgatcttggatgatggaggggatcttacccactggatttataaaaagtatcccaacatgtttaagaaaatcaagggcatagtagaggagagtgttactggagttcacaggctgtaccaactgtccaaagctgggaagctgtgtgttccagccatgaatgtcaatgactcagtcaccaaacagaaatttgacaacctctactgttgccgtgaatcaattcttgatggacttaaaaggacaacagacatgatgtttggtggaaagcaagtggtagtctgtggctatggagaggtggggaaagggtgctgtgctgccctgaaagccatgggctccattgtgtatgtaactgaaattgaccccatctgtgccctgcaagcctgtatggatggatttcgactggtgaaattaaatgaggtcatccgacaagtggacattgttattacctgtacaggtaacaagaatgtggtaaccagagagcacttggaccgtatgaagaatagctgcatcgtttgtaacatgggacattccaacacagagattgacgtggcgagtctgcggacaccagaactgacctgggagcgagtgagatctcaagttgaccatgtgatatggcctgatggcaagaggatagtactgctggcagagggccgcctgctgaaccttagctgctccacagtgcctacatttgtgctctcaatcactgctactactcaggctcttgccttgatagagctttacaatgctcctgagggtcgctataagcaggatgtctacctgttgcccaagaagatggatgagtatgtggccagcctacacctgcctacctttgatgcccacttgacagagctgacagatgaacaggccaagtatctgggactcaacaagaatgggcccttcaagcctaattactacaggtattaagttcctgtaactcaaaccagaatttttaaggaatagaactccaagccttttctccactactatacaagaaagaattcagcaagctgcttctccaatcaaagctgcctgccgtgctcaccctgtgtgttaggttatttatttattaaaatcaagaatcctgtgcctg

SEQ ID NO: 105224 - DNA, 1884 bp, Homo sapiens
  Payload ID: 644
  Gene Symbol: AHCYL2
  Gene Name: adenosylhomocysteinase-like 2
  Uniprot ID: Q96HN2
  ENST ID: ENST00000490911
  CDS Start-End: 228-1754
aatggctgttgagccactaacagaaatgccttattaaattggggctgtactgctgaaggggttgttggagctgcttcagggattccaaggaagagtagtcccccactccccagcccaaaaagctggctggaaccagagccaacagaattgctgatgaggaaagtttaaaggcctgatcacaagggtccctggaccacagaggtggcagtggggctggtaatgtcactatgctgggcagcaagaagaaatacattgttaatggcaactctgggattaaggcccagatccagtttgctgaccagaagcaagaattcaacaaacgtcccaccaaaattggacgtcgctctttgtctcgttccatttctcagtcatctactgacagctacagctcagcggcttcatatacagatagctctgatgatgagacatcgcccagggacaagcagcaaaagaactctaagggaagcagtgacttctgtgttaagaacatcaaacaggcagagtttggacgaagagaaattgaaattgctgaacaagaaatgcctgcattgatggctttgaggaagagagctcaaggagaaaagcctttggctggagccaaaatcgtgggttgcacacacatcactgctcagactgctgtgcttatggaaactctgggtgctctgggggcccagtgccgatgggctgcctgcaacatctattccactctcaatgaagtggctgctgctctagcagaaagtggatttcctgtttttgcctggaagggagagtcagaagatgacttttggtggtgtatcgatagatgtgtgaatgtggagggctggcagccaaacatgatcttggatgatggaggggatcttacccactggatttataaaaagtatcccaacatgtttaagaaaatcaagggcatagtagaggagagtgttactggagttcacaggctgtaccaactgtccaaagctgggaagctgtgtgttccagccatgaatgtcaatgactcagtcaccaaacagaaatttgacaacctctactgttgccgtgaatcaattcttgatggacttaaaaggacaacagacatgatgtttggtggaaagcaagtggtagtctgtggctatggagaggtggggaaagggtgctgtgctgccctgaaagccatgggctccattgtgtatgtaactgaaattgaccccatctgtgccctgcaagcctgtatggatggatttcgactggtgaaattaaatgaggtcatccgacaagtggacattgttattacctgtacaggtaacaagaatgtggtaaccagagagcacttggaccgtatgaagaatagctgcatcgtttgtaacatgggacattccaacacagagattgacgtggcgagtctgcggacaccagaactgacctgggagcgagtgagatctcaagttgaccatgtgatatggcctgatggcaagaggatagtactgctggcagagggccgcctgctgaaccttagctgctccacagtgcctacatttgtgctctcaatcactgctactactcaggctcttgccttgatagagctttacaatgctcctgagggtcgctataagcaggatgtctacctgttgcccaagaagatggatgagtatgtggccagcctacacctgcctacctttgatgcccacttgacagagctgacagatgaacaggccaagtatctgggactcaacaagaatgggcccttcaagcctaattactacaggtattaagttcctgtaactcaaaccagaatttttaaggaatagaactccaagccttttctccactactatacaagaaagaattcagcaagctgcttctccaatcaaagctgcctgccgtgctcaccctgtgtgttag

SEQ ID NO: 105225 - DNA, 3040 bp, Homo sapiens
  Payload ID: 645
  Gene Symbol: AMD1
  Gene Name: adenosylmethionine decarboxylase 1
  ENST ID: ENST00000368876
  CDS Start-End: 146-943
gggccccaggtgggggtcgggggcgcctgcgcgggttgcctccggcagatctgagtgggacatacttttgaaggatgtgcaatgttcaatcataagtgtgacaaaaactgacaagcaggaagcttatgtactcagtgagagtagcatgtttgtctccaagagacgtttcattttgaagacatgtggtaccaccctcttgctgaaagcactggttcccctgttgaagcttgctagggattacagtgggtttgactcaattcaaagcttcttttattctcgtaagaatttcatgaagccttctcaccaagggtacccacaccggaatttccaggaagaaatagagtttcttaatgcaattttcccaaatggagcagcatattgtatgggacgtatgaattctgactgttggtacttatatactctggatttcccagagagtcgggtaatcagtcagccagatcaaaccttggaaattctgatgagtgagcttgacccagcagttatggaccagttctacatgaaagatggtgttactgcaaaggatgtcactcgtgagagtggaattcgtgacctgataccaggttctgtcattgatgccacaatgttcaatccttgtgggtattcgatgaatggaatgaaatcggatggaacttattggactattcacatcactccagaaccagaattttcttatgttagctttgaaacaaacttaagtcagacctcctatgatgacctgatcaggaaagttgtagaagtcttcaagccaggaaaatttgtgaccaccttgtttgttaatcagagttctaaatgtcgcacagtgcttgcttcgccccagaagattgaaggttttaagcgtcttgattgccagagtgctatgttcaatgattacaattttgtttttaccagttttgctaagaagcagcaacaacagcagagttgattaagaaaaatgaagaaaaaacgcaaaaagagaacacatgtagaaggtggtggatgctttctagatgtcgatgctgggggcagtgctttccataaccaccactgtgtagttgcagaaagccctagatgtaatgatagtgtaatcattttgaattgtatgcattattatatcaaggagttagatatcttgcatgaatgctctcttctgtgtttaggtattctctgccactcttgctgtgaaattgaagtgcatgtagaaaaaaccttttactatatgaaactttacaacacttgtgaaagcaactcaatttggtttatgcacagtgtaatatttctccaagtatcatccaaaattccccacagacaaggctttcgtcctcattaggtgttggcctcagcctaaccctctaggactgttctattaaattgctgccagaattttacatccagttacctccactttctagaacatattctttactaatgttattgaaaccaatttctacttcatactgatgtttttggaaacagcaattaaagtttttcttccatgagttgagtccttaagaaaatgattccagttactcattttgcatatttgctattttaacattattggaccctgcatttatagtcctttgatttcttccctctccctggtgtctcccccaagaccccaaataaagcaatacactgttaacactgtgggtttatatactaattctataccccagatggggaatgggggagatggtccctgggcttaatattctttaaagggcatgggaatttagcctctcttttattgtaatgtgctcttttggaaaatagttggttagcagggaagacccagagttgtagattgagattagggtgtactggctgaactgtggaaaacatacaattctgtgttcctcagtaaatgagattagcgtctaatgagtagcacccctttactaacttagtagtagtataaaatcatttttatttagttaattaccagagagatttagcataattttgttctggattcagtaaatcaagtcagcttggatcattcaccttaacttttcctttagcagccatttccactagtttccattaagtagtgttctataaactttgatccaaagcagaatcaatgtcttttccatctcgtgacttaaagttctgtgactgtgatgcatgtgagtgttccgacttcatctgttcctcttaactacggtgtttcccttaccatggcattcataggatgaaatgaatgactgcccagaatgagaatttgtccagattattcagataaacatcataaagcagaatacattataaataagtagaatatgaataaatagaataataaaattccaaaatactcaatgggaaatgactagtaatataggctttcaagagttggtaccttttagctatatttgcagattctctgggattttaaggaactgagaaaacagcaaagttgactaaattttatatttcttgtcctctaaatattttgataatttctggattgatgcagtgatgtttttgttccttccgtatttataaatgaaacacctttttttagtgtttctaaacctaaaatctacttggtttgaaatcaagtggttggaacactgtttgacttttatttgaagcatgttgttgattgaaaatttcattgaggaagttttcaatcagtgtgatcagtttgattctgtaatgagcacagcacctaatattttgaggagctctgttttgaggaccaatgcttaaggtggactttgttcgtaaacaatatcccaatagatttgttgacttgaggtctggtttggttttgtttttgttttgttttgttttgttttgtttccaatagaattaagaattctaatgttgaaaaactgcacaaatttttatgggacaaagcctagaaaagagaaatgtagtttgaatcataatctaaatcatcgtatgatagaagagggaaagttttggtgccataatttctcctttcactggtgttggacttaaatcagttgaaatgtatttctgtaccacaatttacgcttcaataaaagtttaattgtctagtgacattcagaaa

SEQ ID NO: 105226 - DNA, 1605 bp, Homo sapiens
  Payload ID: 645
  Gene Symbol: AMD1
  Gene Name: adenosylmethionine decarboxylase 1
  ENST ID: ENST00000368877
  CDS Start-End: 442-1239
gcttacacagtatggccggcgacattagctagcgctcgctctactctctctaacgggaaagcagcggaatacaagagactgaactgtatctgcctctatttccaaaagactcacgttcaactttcgctcacacaaagccgggaaaattttattagtcctttttttaaaaaaagttaatataaaattatagcaaaaaaaaaaaggaacctgaactttagtaacacagctggaacaatccgcagcggcggcggcagcggcgggagaagaggtttaatttagttgattttctgtggttgttggttgttcgctagtctcacggtgatggaagctgcacattttttcgaagggaccgagaagctgctggaggtttggttctcccggcagcagcccgacgcaaaccaaggatctggggatcttcgcactatcccaagtgagagtagcatgtttgtctccaagagacgtttcattttgaagacatgtggtaccaccctcttgctgaaagcactggttcccctgttgaagcttgctagggattacagtgggtttgactcaattcaaagcttcttttattctcgtaagaatttcatgaagccttctcaccaagggtacccacaccggaatttccaggaagaaatagagtttcttaatgcaattttcccaaatggagcagcatattgtatgggacgtatgaattctgactgttggtacttatatactctggatttcccagagagtcgggtaatcagtcagccagatcaaaccttggaaattctgatgagtgagcttgacccagcagttatggaccagttctacatgaaagatggtgttactgcaaaggatgtcactcgtgagagtggaattcgtgacctgataccaggttctgtcattgatgccacaatgttcaatccttgtgggtattcgatgaatggaatgaaatcggatggaacttattggactattcacatcactccagaaccagaattttcttatgttagctttgaaacaaacttaagtcagacctcctatgatgacctgatcaggaaagttgtagaagtcttcaagccaggaaaatttgtgaccaccttgtttgttaatcagagttctaaatgtcgcacagtgcttgcttcgccccagaagattgaaggttttaagcgtcttgattgccagagtgctatgttcaatgattacaattttgtttttaccagttttgctaagaagcagcaacaacagcagagttgattaagaaaaatgaagaaaaaacgcaaaaagagaacacatgtagaaggtggtggatgctttctagatgtcgatgctgggggcagtgctttccataaccaccactgtgtagttgcagaaagccctagatgtaatgatagtgtaatcattttgaattgtatgcattattatatcaaggagttagatatcttgcatgaatgctctcttctgtgtttaggtattctctgccactcttgctgtgaaattgaagtgcatgtagaaaaaaccttttactatatgaaactttacaacacttgtgaaagcaactcaatttggtttatgcacagtgtaatatttctccaagtatcatccaaaattccccacagacaa

SEQ ID NO: 105227 - DNA, 3059 bp, Homo sapiens
  Payload ID: 645
  Gene Symbol: AMD1
  Gene Name: adenosylmethionine decarboxylase 1
  ENST ID: ENST00000368882
  CDS Start-End: 323-967
cgcttacacagtatggccggcgacattagctagcgctcgctctactctctctaacgggaaagcagcggaatacaagagactgaactgtatctgcctctatttccaaaagactcacgttcaactttcgctcacacaaagccgggaaaattttattagtcctttttttaaaaaaagttaatataaaattatagcaaaaaaaaaaaggaacctgaactttagtaacacagctggaacaatccgcagcggcggcggcagcggcgggagaagaggtttaatttagttgattttctgtggttgttggttgttcgctagtctcacggtgatggaagctgcacattttttcgaagggaccgagaagctgctggaggtttggttctcccggcagcagcccgacgcaaaccaaggatctggggatcttcgcactatcccaaggtacttatatactctggatttcccagagagtcgggtaatcagtcagccagatcaaaccttggaaattctgatgagtgagcttgacccagcagttatggaccagttctacatgaaagatggtgttactgcaaaggatgtcactcgtgagagtggaattcgtgacctgataccaggttctgtcattgatgccacaatgttcaatccttgtgggtattcgatgaatggaatgaaatcggatggaacttattggactattcacatcactccagaaccagaattttcttatgttagctttgaaacaaacttaagtcagacctcctatgatgacctgatcaggaaagttgtagaagtcttcaagccaggaaaatttgtgaccaccttgtttgttaatcagagttctaaatgtcgcacagtgcttgcttcgccccagaagattgaaggttttaagcgtcttgattgccagagtgctatgttcaatgattacaattttgtttttaccagttttgctaagaagcagcaacaacagcagagttgattaagaaaaatgaagaaaaaacgcaaaaagagaacacatgtagaaggtggtggatgctttctagatgtcgatgctgggggcagtgctttccataaccaccactgtgtagttgcagaaagccctagatgtaatgatagtgtaatcattttgaattgtatgcattattatatcaaggagttagatatcttgcatgaatgctctcttctgtgtttaggtattctctgccactcttgctgtgaaattgaagtgcatgtagaaaaaaccttttactatatgaaactttacaacacttgtgaaagcaactcaatttggtttatgcacagtgtaatatttctccaagtatcatccaaaattccccacagacaaggctttcgtcctcattaggtgttggcctcagcctaaccctctaggactgttctattaaattgctgccagaattttacatccagttacctccactttctagaacatattctttactaatgttattgaaaccaatttctacttcatactgatgtttttggaaacagcaattaaagtttttcttccatgagttgagtccttaagaaaatgattccagttactcattttgcatatttgctattttaacattattggaccctgcatttatagtcctttgatttcttccctctccctggtgtctcccccaagaccccaaataaagcaatacactgttaacactgtgggtttatatactaattctataccccagatggggaatgggggagatggtccctgggcttaatattctttaaagggcatgggaatttagcctctcttttattgtaatgtgctcttttggaaaatagttggttagcagggaagacccagagttgtagattgagattagggtgtactggctgaactgtggaaaacatacaattctgtgttcctcagtaaatgagattagcgtctaatgagtagcacccctttactaacttagtagtagtataaaatcatttttatttagttaattaccagagagatttagcataattttgttctggattcagtaaatcaagtcagcttggatcattcaccttaacttttcctttagcagccatttccactagtttccattaagtagtgttctataaactttgatccaaagcagaatcaatgtcttttccatctcgtgacttaaagttctgtgactgtgatgcatgtgagtgttccgacttcatctgttcctcttaactacggtgtttcccttaccatggcattcataggatgaaatgaatgactgcccagaatgagaatttgtccagattattcagataaacatcataaagcagaatacattataaataagtagaatatgaataaatagaataataaaattccaaaatactcaatgggaaatgactagtaatataggctttcaagagttggtaccttttagctatatttgcagattctctgggattttaaggaactgagaaaacagcaaagttgactaaattttatatttcttgtcctctaaatattttgataatttctggattgatgcagtgatgtttttgttccttccgtatttataaatgaaacacctttttttagtgtttctaaacctaaaatctacttggtttgaaatcaagtggttggaacactgtttgacttttatttgaagcatgttgttgattgaaaatttcattgaggaagttttcaatcagtgtgatcagtttgattctgtaatgagcacagcacctaatattttgaggagctctgttttgaggaccaatgcttaaggtggactttgttcgtaaacaatatcccaatagatttgttgacttgaggtctggtttggttttgtttttgttttgttttgttttgttttgtttccaatagaattaagaattctaatgttgaaaaactgcacaaatttttatgggacaaagcctagaaaagagaaatgtagtttgaatcataatctaaatcatcgtatgatagaagagggaaagttttggtgccataatttctcctttcactggtgttggacttaaatcagttgaaatgtatttctgtaccacaatttacgcttcaataaaagtttaattgtctagtgacattc

SEQ ID NO: 105228 - DNA, 3438 bp, Homo sapiens
  Payload ID: 645
  Gene Symbol: AMD1
  Gene Name: adenosylmethionine decarboxylase 1
  Uniprot ID: P17707
  ENST ID: ENST00000368885
  CDS Start-End: 337-1341
tcacgcagcgctctcgcttacacagtatggccggcgacattagctagcgctcgctctactctctctaacgggaaagcagcggaatacaagagactgaactgtatctgcctctatttccaaaagactcacgttcaactttcgctcacacaaagccgggaaaattttattagtcctttttttaaaaaaagttaatataaaattatagcaaaaaaaaaaaggaacctgaactttagtaacacagctggaacaatccgcagcggcggcggcagcggcgggagaagaggtttaatttagttgattttctgtggttgttggttgttcgctagtctcacggtgatggaagctgcacattttttcgaagggaccgagaagctgctggaggtttggttctcccggcagcagcccgacgcaaaccaaggatctggggatcttcgcactatcccaagatctgagtgggacatacttttgaaggatgtgcaatgttcaatcataagtgtgacaaaaactgacaagcaggaagcttatgtactcagtgagagtagcatgtttgtctccaagagacgtttcattttgaagacatgtggtaccaccctcttgctgaaagcactggttcccctgttgaagcttgctagggattacagtgggtttgactcaattcaaagcttcttttattctcgtaagaatttcatgaagccttctcaccaagggtacccacaccggaatttccaggaagaaatagagtttcttaatgcaattttcccaaatggagcagcatattgtatgggacgtatgaattctgactgttggtacttatatactctggatttcccagagagtcgggtaatcagtcagccagatcaaaccttggaaattctgatgagtgagcttgacccagcagttatggaccagttctacatgaaagatggtgttactgcaaaggatgtcactcgtgagagtggaattcgtgacctgataccaggttctgtcattgatgccacaatgttcaatccttgtgggtattcgatgaatggaatgaaatcggatggaacttattggactattcacatcactccagaaccagaattttcttatgttagctttgaaacaaacttaagtcagacctcctatgatgacctgatcaggaaagttgtagaagtcttcaagccaggaaaatttgtgaccaccttgtttgttaatcagagttctaaatgtcgcacagtgcttgcttcgccccagaagattgaaggttttaagcgtcttgattgccagagtgctatgttcaatgattacaattttgtttttaccagttttgctaagaagcagcaacaacagcagagttgattaagaaaaatgaagaaaaaacgcaaaaagagaacacatgtagaaggtggtggatgctttctagatgtcgatgctgggggcagtgctttccataaccaccactgtgtagttgcagaaagccctagatgtaatgatagtgtaatcattttgaattgtatgcattattatatcaaggagttagatatcttgcatgaatgctctcttctgtgtttaggtattctctgccactcttgctgtgaaattgaagtgcatgtagaaaaaaccttttactatatgaaactttacaacacttgtgaaagcaactcaatttggtttatgcacagtgtaatatttctccaagtatcatccaaaattccccacagacaaggctttcgtcctcattaggtgttggcctcagcctaaccctctaggactgttctattaaattgctgccagaattttacatccagttacctccactttctagaacatattctttactaatgttattgaaaccaatttctacttcatactgatgtttttggaaacagcaattaaagtttttcttccatgagttgagtccttaagaaaatgattccagttactcattttgcatatttgctattttaacattattggaccctgcatttatagtcctttgatttcttccctctccctggtgtctcccccaagaccccaaataaagcaatacactgttaacactgtgggtttatatactaattctataccccagatggggaatgggggagatggtccctgggcttaatattctttaaagggcatgggaatttagcctctcttttattgtaatgtgctcttttggaaaatagttggttagcagggaagacccagagttgtagattgagattagggtgtactggctgaactgtggaaaacatacaattctgtgttcctcagtaaatgagattagcgtctaatgagtagcacccctttactaacttagtagtagtataaaatcatttttatttagttaattaccagagagatttagcataattttgttctggattcagtaaatcaagtcagcttggatcattcaccttaacttttcctttagcagccatttccactagtttccattaagtagtgttctataaactttgatccaaagcagaatcaatgtcttttccatctcgtgacttaaagttctgtgactgtgatgcatgtgagtgttccgacttcatctgttcctcttaactacggtgtttcccttaccatggcattcataggatgaaatgaatgactgcccagaatgagaatttgtccagattattcagataaacatcataaagcagaatacattataaataagtagaatatgaataaatagaataataaaattccaaaatactcaatgggaaatgactagtaatataggctttcaagagttggtaccttttagctatatttgcagattctctgggattttaaggaactgagaaaacagcaaagttgactaaattttatatttcttgtcctctaaatattttgataatttctggattgatgcagtgatgtttttgttccttccgtatttataaatgaaacacctttttttagtgtttctaaacctaaaatctacttggtttgaaatcaagtggttggaacactgtttgacttttatttgaagcatgttgttgattgaaaatttcattgaggaagttttcaatcagtgtgatcagtttgattctgtaatgagcacagcacctaatattttgaggagctctgttttgaggaccaatgcttaaggtggactttgttcgtaaacaatatcccaatagatttgttgacttgaggtctggtttggttttgtttttgttttgttttgttttgttttgtttccaatagaattaagaattctaatgttgaaaaactgcacaaatttttatgggacaaagcctagaaaagagaaatgtagtttgaatcataatctaaatcatcgtatgatagaagagggaaagttttggtgccataatttctcctttcactggtgttggacttaaatcagttgaaatgtatttctgtaccacaatttacgcttcaataaaagtttaattgtctagtgacattcagaaa

SEQ ID NO: 105229 - DNA, 3121 bp, Homo sapiens
  Payload ID: 645
  Gene Symbol: AMD1
  Gene Name: adenosylmethionine decarboxylase 1
  ENST ID: ENST00000451850
  CDS Start-End: 337-483
tcacgcagcgctctcgcttacacagtatggccggcgacattagctagcgctcgctctactctctctaacgggaaagcagcggaatacaagagactgaactgtatctgcctctatttccaaaagactcacgttcaactttcgctcacacaaagccgggaaaattttattagtcctttttttaaaaaaagttaatataaaattatagcaaaaaaaaaaaggaacctgaactttagtaacacagctggaacaatccgcagcggcggcggcagcggcgggagaagaggtttaatttagttgattttctgtggttgttggttgttcgctagtctcacggtgatggaagctgcacattttttcgaagggaccgagaagctgctggaggtttggttctcccggcagcagcccgacgcaaaccaaggatctggggatcttcgcactatcccaagatggagcagcatattgtatgggacgtatgaattctgactgttggtacttatatactctggatttcccagagagtcgggtaatcagtcagccagatcaaaccttggaaattctgatgagtgagcttgacccagcagttatggaccagttctacatgaaagatggtgttactgcaaaggatgtcactcgtgagagtggaattcgtgacctgataccaggttctgtcattgatgccacaatgttcaatccttgtgggtattcgatgaatggaatgaaatcggatggaacttattggactattcacatcactccagaaccagaattttcttatgttagctttgaaacaaacttaagtcagacctcctatgatgacctgatcaggaaagttgtagaagtcttcaagccaggaaaatttgtgaccaccttgtttgttaatcagagttctaaatgtcgcacagtgcttgcttcgccccagaagattgaaggttttaagcgtcttgattgccagagtgctatgttcaatgattacaattttgtttttaccagttttgctaagaagcagcaacaacagcagagttgattaagaaaaatgaagaaaaaacgcaaaaagagaacacatgtagaaggtggtggatgctttctagatgtcgatgctgggggcagtgctttccataaccaccactgtgtagttgcagaaagccctagatgtaatgatagtgtaatcattttgaattgtatgcattattatatcaaggagttagatatcttgcatgaatgctctcttctgtgtttaggtattctctgccactcttgctgtgaaattgaagtgcatgtagaaaaaaccttttactatatgaaactttacaacacttgtgaaagcaactcaatttggtttatgcacagtgtaatatttctccaagtatcatccaaaattccccacagacaaggctttcgtcctcattaggtgttggcctcagcctaaccctctaggactgttctattaaattgctgccagaattttacatccagttacctccactttctagaacatattctttactaatgttattgaaaccaatttctacttcatactgatgtttttggaaacagcaattaaagtttttcttccatgagttgagtccttaagaaaatgattccagttactcattttgcatatttgctattttaacattattggaccctgcatttatagtcctttgatttcttccctctccctggtgtctcccccaagaccccaaataaagcaatacactgttaacactgtgggtttatatactaattctataccccagatggggaatgggggagatggtccctgggcttaatattctttaaagggcatgggaatttagcctctcttttattgtaatgtgctcttttggaaaatagttggttagcagggaagacccagagttgtagattgagattagggtgtactggctgaactgtggaaaacatacaattctgtgttcctcagtaaatgagattagcgtctaatgagtagcacccctttactaacttagtagtagtataaaatcatttttatttagttaattaccagagagatttagcataattttgttctggattcagtaaatcaagtcagcttggatcattcaccttaacttttcctttagcagccatttccactagtttccattaagtagtgttctataaactttgatccaaagcagaatcaatgtcttttccatctcgtgacttaaagttctgtgactgtgatgcatgtgagtgttccgacttcatctgttcctcttaactacggtgtttcccttaccatggcattcataggatgaaatgaatgactgcccagaatgagaatttgtccagattattcagataaacatcataaagcagaatacattataaataagtagaatatgaataaatagaataataaaattccaaaatactcaatgggaaatgactagtaatataggctttcaagagttggtaccttttagctatatttgcagattctctgggattttaaggaactgagaaaacagcaaagttgactaaattttatatttcttgtcctctaaatattttgataatttctggattgatgcagtgatgtttttgttccttccgtatttataaatgaaacacctttttttagtgtttctaaacctaaaatctacttggtttgaaatcaagtggttggaacactgtttgacttttatttgaagcatgttgttgattgaaaatttcattgaggaagttttcaatcagtgtgatcagtttgattctgtaatgagcacagcacctaatattttgaggagctctgttttgaggaccaatgcttaaggtggactttgttcgtaaacaatatcccaatagatttgttgacttgaggtctggtttggttttgtttttgttttgttttgttttgttttgtttccaatagaattaagaattctaatgttgaaaaactgcacaaatttttatgggacaaagcctagaaaagagaaatgtagtttgaatcataatctaaatcatcgtatgatagaagagggaaagttttggtgccataatttctcctttcactggtgttggacttaaatcagttgaaatgtatttctgtaccacaatttacgcttcaataaaagtttaattgtctagtgacattcagaaa

SEQ ID NO: 105230 - DNA, 782 bp, Homo sapiens
  Payload ID: 645
  Gene Symbol: AMD1
  Gene Name: adenosylmethionine decarboxylase 1
  ENST ID: ENST00000465404
  CDS Start-End: 1-18
gattctttccattcttaacactgtgaactttttctctcagggaacttattggactattcacatcactccagaaccagaattttcttatgttagctttgaaacaaacttaagtcagacctcctatgatgacctgatcaggaaagttgtagaagtcttcaagccaggaaaatttgtgaccaccttgtttgttaatcagagttctaaatgtcgcacagtgcttgcttcgccccagaagattgaaggttttaagcgtcttgattgccagagtgctatgttcaatgattacaattttgtttttaccagttttgctaagaagcagcaacaacagcagagttgattaagaaaaatgaagaaaaaacgcaaaaagagaacacatgtagaaggtggtggatgctttctagatgtcgatgctgggggcagtgctttccataaccaccactgtgtagttgcagaaagccctagatgtaatgatagtgtaatcattttgaattgtatgcattattatatcaaggagttagatatcttgcatgaatgctctcttctgtgtttaggtattctctgccactcttgctgtgaaattgaagtgcatgtagaaaaaaccttttactatatgaaactttacaacacttgtgaaagcaactcaatttggtttatgcacagtgtaatatttctccaagtatcatccaaaattccccacagacaaggctttcgtcctcattaggtgttggcctcagcctaaccctctaggactgttctattaaattgctgccagaattttacat

SEQ ID NO: 105231 - DNA, 3182 bp, Homo sapiens
  Payload ID: 645
  Gene Symbol: AMD1
  Gene Name: adenosylmethionine decarboxylase 1
  ENST ID: ENST00000610605
  CDS Start-End: 293-1090
ctacccagggccggagcggcaactccgcagcggagctctgcctgcccgctgcgttcccccaagagactagaccccacaaactcctcctccaccgcggtcccaactcgagtccccccgccgtctccgagcactcggagggcgcccctctgggacgggaccgacgcctcggaccgggctgcgccgcgggagttcgagatctgagtgggacatacttttgaaggatgtgcaatgttcaatcataagtgtgacaaaaactgacaagcaggaagcttatgtactcagtgagagtagcatgtttgtctccaagagacgtttcattttgaagacatgtggtaccaccctcttgctgaaagcactggttcccctgttgaagcttgctagggattacagtgggtttgactcaattcaaagcttcttttattctcgtaagaatttcatgaagccttctcaccaagggtacccacaccggaatttccaggaagaaatagagtttcttaatgcaattttcccaaatggagcagcatattgtatgggacgtatgaattctgactgttggtacttatatactctggatttcccagagagtcgggtaatcagtcagccagatcaaaccttggaaattctgatgagtgagcttgacccagcagttatggaccagttctacatgaaagatggtgttactgcaaaggatgtcactcgtgagagtggaattcgtgacctgataccaggttctgtcattgatgccacaatgttcaatccttgtgggtattcgatgaatggaatgaaatcggatggaacttattggactattcacatcactccagaaccagaattttcttatgttagctttgaaacaaacttaagtcagacctcctatgatgacctgatcaggaaagttgtagaagtcttcaagccaggaaaatttgtgaccaccttgtttgttaatcagagttctaaatgtcgcacagtgcttgcttcgccccagaagattgaaggttttaagcgtcttgattgccagagtgctatgttcaatgattacaattttgtttttaccagttttgctaagaagcagcaacaacagcagagttgattaagaaaaatgaagaaaaaacgcaaaaagagaacacatgtagaaggtggtggatgctttctagatgtcgatgctgggggcagtgctttccataaccaccactgtgtagttgcagaaagccctagatgtaatgatagtgtaatcattttgaattgtatgcattattatatcaaggagttagatatcttgcatgaatgctctcttctgtgtttaggtattctctgccactcttgctgtgaaattgaagtgcatgtagaaaaaaccttttactatatgaaactttacaacacttgtgaaagcaactcaatttggtttatgcacagtgtaatatttctccaagtatcatccaaaattccccacagacaaggctttcgtcctcattaggtgttggcctcagcctaaccctctaggactgttctattaaattgctgccagaattttacatccagttacctccactttctagaacatattctttactaatgttattgaaaccaatttctacttcatactgatgtttttggaaacagcaattaaagtttttcttccatgagttgagtccttaagaaaatgattccagttactcattttgcatatttgctattttaacattattggaccctgcatttatagtcctttgatttcttccctctccctggtgtctcccccaagaccccaaataaagcaatacactgttaacactgtgggtttatatactaattctataccccagatggggaatgggggagatggtccctgggcttaatattctttaaagggcatgggaatttagcctctcttttattgtaatgtgctcttttggaaaatagttggttagcagggaagacccagagttgtagattgagattagggtgtactggctgaactgtggaaaacatacaattctgtgttcctcagtaaatgagattagcgtctaatgagtagcacccctttactaacttagtagtagtataaaatcatttttatttagttaattaccagagagatttagcataattttgttctggattcagtaaatcaagtcagcttggatcattcaccttaacttttcctttagcagccatttccactagtttccattaagtagtgttctataaactttgatccaaagcagaatcaatgtcttttccatctcgtgacttaaagttctgtgactgtgatgcatgtgagtgttccgacttcatctgttcctcttaactacggtgtttcccttaccatggcattcataggatgaaatgaatgactgcccagaatgagaatttgtccagattattcagataaacatcataaagcagaatacattataaataagtagaatatgaataaatagaataataaaattccaaaatactcaatgggaaatgactagtaatataggctttcaagagttggtaccttttagctatatttgcagattctctgggattttaaggaactgagaaaacagcaaagttgactaaattttatatttcttgtcctctaaatattttgataatttctggattgatgcagtgatgtttttgttccttccgtatttataaatgaaacacctttttttagtgtttctaaacctaaaatctacttggtttgaaatcaagtggttggaacactgtttgacttttatttgaagcatgttgttgattgaaaatttcattgaggaagttttcaatcagtgtgatcagtttgattctgtaatgagcacagcacctaatattttgaggagctctgttttgaggaccaatgcttaaggtggactttgttcgtaaacaatatcccaatagatttgttgacttgaggtctggtttggttttgtttttgttttgttttgttttgttttgtttccaatagaattaagaattctaatgttgaaaaactgcacaaatttttatgggacaaagcctagaaaagagaaatgtagtttgaatcataatctaaatcatcgtatgatagaagagggaaagttttggtgccataatttctcctttcactggtgttggacttaaatcagttgaaatgtatttctgtaccacaatttacgcttcaataaaagtttaattgtctagtgacattc

SEQ ID NO: 105232 - DNA, 12503 bp, Homo sapiens
  Payload ID: 646
  Gene Symbol: ADCY1
  Gene Name: adenylate cyclase 1 (brain)
  Uniprot ID: Q08828
  ENST ID: ENST00000297323
  CDS Start-End: 23-3382
gcggccgctgcatggcgctgagatggcgggggcgccgcgcggcggaggcggcggcggaggcggcgcgggcgagcccgggggcgccgagcgggcggccgggacaagccgccggcgcgggctccgggcgtgcgacgaggagttcgcttgcccagagctggaggcgctgttccgcggctacacgctgcggctggagcaggcggccacgctgaaggcgctggccgttctcagcctgctggcgggcgcgctggcgctggccgagctgctgggcgcgccggggcccgcgcccggcctggccaagggctcacacccggtgcactgcgtcctcttcctggcgctgctcgtggtaaccaacgtccggtccctgcaggtgccccagctgcagcaggtcggccagctggcgctgctcttcagcctcaccttcgcgctgctctgctgtcctttcgcgctgggcggccccgcccggggttccgccggggccgctggggggccagcgaccgccgaacaaggggtttggcagctccttttggtcaccttcgtgtcctatgccttgctgcccgtgcgcagcctgctggccataggctttgggctcgtggtggctgcgtcgcacttgctggtcacagccaccttggtccccgccaagcgcccacgtctctggaggacgctcggtgccaatgccttgctcttcgtcggtgtgaacatgtatggggtctttgtgcggattctgactgagcgttcacagaggaaggcgttcctgcaggcccggagctgcattgaggaccgactgaggctggaggatgagaacgagaagcaggagcggctcctcatgagcctcctgccccggaacgttgccatggagatgaaggaggacttcctgaagccccctgagaggattttccacaagatttacatccagaggcacgacaatgtgagcatcctgtttgctgacatcgtgggtttcacgggcttggcatcccagtgcacagcccaggagctggtgaaactcctcaatgagctcttcggcaagttcgatgaattagccacggagaaccactgtcgccgcatcaagattctcggggactgctactactgcgtgtcgggcctcacccagcccaagactgaccatgcccactgctgtgtggagatgggactcgacatgattgataccatcacatctgtggctgaagccaccgaggtggatctgaacatgcgtgtgggtctgcacacgggcagggtcctctgtggtgtcctgggcttgcgcaagtggcagtacgacgtgtggtccaatgatgtgaccttggccaatgtcatggaagccgctggcctgccagggaaggttcatatcacaaagacgaccctagcgtgcttgaatggggactacgaggtagaaccgggttacggacatgagaggaacagtttcttgaaaactcataacatcgaaaccttttttattgtgccatcccatcgccgaaagatatttccaggcctgattctctcagatataaaaccggccaaaaggatgaagttcaagactgtctgctacctgctggtgcagctcatgcactgccggaaaatgttcaaggccgagatccccttctccaatgtcatgacctgcgaggacgatgacaagcggagggcattaagaacagcctcggaaaaactcagaaaccgctcatctttttctaccaacgttgtctacaccaccccgggcactcgcgtcaacaggtacatcagccgcctcttagaagcccgccagacagagctggagatggcagacctgaacttctttaccctgaagtacaaacatgtcgaacgggagcaaaagtaccaccagcttcaggacgagtatttcaccagcgccgttgtcctcaccctcatcctggctgccttatttggccttgtctaccttctaatattcccacagagtgtggtcgtcctgctcctgctagtattctgcatctgcttcctggtggcctgtgtcctgtacctgcacatcacccgggtccagtgttttccagggtgcctgacgattcagattcgcactgtcctgtgtattttcatagtggtcttaatctactcagtagcccaaggttgtgtggtgggctgcctgccttgggcctggagctccaagcccaacagttccctggtggtcctttcgtctgggggccagcgcacagccctgcccaccctgccctgcgagtctacacaccatgccctgctctgctgcctggtgggcaccctcccgctagccatatttttccgggtgtcctccttgccaaaaatgatcctgctctccgggctcaccacgtcctacatcctcgttctggagctcagcggatacaccaggactgggggtggtgccgtctccgggcgcagctacgagccgattgtggccatcctgctcttctcctgtgcgctggccctgcatgccaggcaggtggacatcaggctgaggctggactacctctgggccgcacaggcagaggaggagcgagaggacatggagaaggtgaagctggacaacaggcgcatcctcttcaacctcctgccggcccacgtcgcccagcacttcctcatgtccaaccctcggaacatggacctctactaccagtcctactcccaggtgggcgtcatgtttgcctccatccccaacttcaatgacttctacatcgagctggacggcaacaacatgggggtggagtgtctgcggcttctcaacgagatcatcgccgactttgacgagctcatggaaaaagacttttacaaggacatagagaagatcaagaccatcgggagcacctacatggccgctgtggggctagcgcccacctcggggaccaaggctaagaagtccatctcctcccacctgagcacgctggcggactttgccattgagatgtttgacgttctggatgaaatcaactaccagtcttacaacgactttgtcctccgagttggcatcaatgttggccctgtggtggctggagtgattggcgctcgcaggccccagtacgacatctggggaaacacagtcaacgtggccagtcggatggatagcacaggggtccagggcagaatccaggtgactgaggaagtccaccggctgctgagaaggtgcccctaccactttgtgtgccgaggcaaagtcagtgtcaagggcaaaggcgagatgttgacatactttctagaaggcaggactgatggaaacggctcccaaatcaggtccctgggcttggatcggaaaatgtgtccatttgggagagctggccttcagggcagacgtccccccgtgtgccccatgcctggcgtctcagtcagggctgggctccctccacactccccaggccagtacctgccctctgcagcagctgggaaggaggcttagtggagcccacgtgggcctctggggtgcacatggggtgggaatgctccgggggtgacacaggccacggtggctccagccaggaccagccagaccagcagagcagggagccacttgccagggtggaggaggagcattgtccaggcatggcctgtggcccgagggccaaccaccgagcaggcacagcacagcagtgactcggtgaggggaggacacccgactgtgcacacttccaggcctccctggagaggtgtccactccatccttccctccgtggcgtagggagcactgtttctttccagcaagcctgttcaggtttggccaggtcggcatcaatgtaaggaccttcagagcatcccagggttacagcaagagccactgaggtgtggctggcagagcaactgaggagctctgcgagagtgtgccctctgagacagccctgtccgccccgcccaggtgggacctgacatacaggcggctccagccctgggcagcggcttcaagagccagagtgggaagtcaggcctctctgggaaggtcacaaggcctggggttgttcacaccacaggcacaatacagagctgtccactcttgaactggaccgtctggggagaattgagaagctgcctctcactgcatggatagtggtggctgctggctttcaagcgtggttttttgctaagagccagaggcaggtcttctggagttctcaggggggccctgtgaccccctctccacaaccatggccagcatcggcttcttgctgcacctgtgcattctccacccctccgccaatggcttccagctcctaaaacacctggacattccccatcctgcaccggcactgtgtttgttcagagaaaacgaagggtgtcatttcttcttttccctgtggcatcgtggatcctttacatttagcaacaacagtgtgaggctccacttctgttgaatatgagcggctgtcacacccatgagcaagtttccttgatggaagatgctgtttctccggcagaaccaaccctccaggacgaagtttcagaattggctgatggtcgtgagtgcaggtgtccctgttgtaatttgcagggaaattgactgcaggtgatagtgttgacgtctgacgtctgacaacctcctatgtgcatgtctaaatagtcacaatgaagatgaaaataaggatgatggggacggggtccaggagggccactgggaaggcactatccagaaatagtggacagaggtctggcatgtggaaaccttggatctcggtcacagggaggaaggcagctagaaatgggagggaagcttctgggtaggcaccatagtaggggaatgtctaaagacccactgctctgagatgtggtcagagaggtttctgtggactgcagatgaggcctgagccctgcctatgctcaaagccagcagggttgggggtccgcctcctcactgctcctcaacagctgtaaccctttcctgagggccccgacttttcagaataggagcagagagaagcccagacttccttccctggagtgtagacctgtgtgtgggacctgctccaggctgatccctgtccgcacaggtgggtgatgtccttggctgctgccgtcagaggcagccccctgcacagggaggggctgatcctgcctcagctgtgtggccatgtgggggcagcaggggcctgggccatagctgggggaggccagaccctgagggctttgcagggcggccagtgcagtgatgcctggcgcttccagctgagacaggagtccggacagaggtgggcagggtggatggcttcgggcagggaaggcgggtagaggctgcatgtgggggcccctgtctgcctgtccttagggtgtggattaggctctggcttctgtgatggtgcaagaggcaggatggtctccagacaccttcttgcagagtgattttgaccaatgcctttccagcaccttcccctggttatgacagggagctcccaggccaggccacatgaccccacaggtaggctgaccccatggacccactggagactttgagggcagagctcgggcacctttcatcttccttgggtggtcctcatgtcgctgtccgctcatgttcctggtgttctggcatcaccttgtgccggtgggggctgggctcccgtgaggtcctagggcagaaggaggtgcttgcagggcctctcgctgctactgggacatccacaggacctaatgtttatgtggaatctccaggctgccatcgagggctcctgagctcatcctgaggacccagggtccatctgagctggctgtgggctgagatcctggctggggccctgctgtcaacctctcctccaggccctgccttgtccctgctcctgtgctttcctctcttcaggacaaatggtttgtccttatggtcccctttccactaggattttctcatcctcatctgtctatcccagccggatttaaagcagtcacttcagacaggagccacagggagcctgtgagggagtagtgcggtggtggtgagtgtggctgccctggctcccccagctcaccgtggtgctgtccttgacccacgagctgttgagaagggtgcagagcccctggcacagccaaccctgttgcccccagtgccgctgcccagcttcggccatccaggtggtgggtagacagaggagtgaaccccaaaggtgtccatgccccagttctaagccctgtggccaggtgctgtcacacagcaaaggggactttgcaggtggaattagggttagggatctaaggatgggaggggaacttggtttatctgggtgggctcagtgaccccttggaatggctgagggaggcaggagagcctggaaagattcgaagtgtcacagagatggtgccgtcattgctggcttaaagacaaggggccaggagccaacaccagaggccactccacaaccccagcgccagtcagcaaggaagccgggtgtcgctcacacaaccagaaggagctgagtttggcaacaacccaagtgagcctgaagcagattcgccccagagcctccaggcgtgagtggagcccagtccagcgacaccttggtttggcctgtgagactgagaagagagccagccacgccatgctgtgcctggggtccacagagccgggaggtcacacatgtacatcctggaagctgcccaaggtgtggccacttgtagggcagtgagaggaagccgtcgcggggaccatgctgccttctctgggctcacgactgttctggaaaggaccccatggcagacttggcaaggtctccacttcaggggcaaacatctccatcatcagcaactccaaaccccagccacttcctgggagttcaggaactgtgtttagccataatgtcccttggggtttggtgaaaaacaacttcctttttatttgtgggaaaactgtattatattgccttatttatttttaatcatgtacaatattcatgtacaaatgttagagccattcgggtaggattctctctaaattatttattgaagaggctttgtaaatagtgcaccagtgacaggtgctgcctgtttactcgtaccaaaaatgaagacaagccccacacccacctcagcccttgcttggccatgctgtggccctttggaaatgaccctgtgtgctcccctcgcgacccttgcatgcctttcatgcctgatgccgtagagtagaacacagccccggaatgcttccagttgcttgcaagggaccatgccggcccgggtggtccatgcctgcggggtgtctgtatcctgcaggaggacgcccctacagacccagcaacccaagttgccagcccgtgtttctcagactttaaagccaccagggcttctggaacacctgtcatagaagcaataactctaactctatactgtagagatgagtctggtccgaagcagattagtaatttagagataagccatgcatacaagtttgccccattctctggcttggggtggtgggaggcggggagctgccactcccaaagcctccaccccttcctgaagacccagctatgaaaccgcagttcctgtgggttgggctgcccaggctggtcagagctcagcaccccaggtctggtgagcagacagagccggcgttaaaccccgatcaggtcattgtcaccacacccttgcttggatgaggaaggaaggaggcaaaggcacccactccatccaagatccgttccaattgatgagcctcagtactggcctcacactgaccaacggtggtatgctgcagtttgttggtttggtgcagagtctaaaggataacatatcaaggcttacctgtgataggccattttaaggaaatggtggcactctgaaggctgtccccattcaccttccacaatgctggtaccatcctggtagaagagccctctgaacaggacacctgttcaggcctgggggccccatgctaggcttgcctgggtgtgagaaggtcgaactgggtggcttaggccttcaaattgagcttgggggtgtccaagagaggggtcttattcgaggaactcacataccccaaataaccatcagtgcacaaatcattccatgctctttggcaccaggcaggagatgctgcaggcaggtgtccgtagttggcaaaaatgggcagtaggggaaatggagttgcttcaacctttctcagtcccggccctcactgcacccaccaagtcaagcagagctgggtgggctgagaccagcatcccagctggactgagcctggggggaggggctggagccaaggagcccccctgggtgggggcatcaggagcaggggcagggcctgaggactgctccccctgcatggagggcaggccaggatggagcccagggtagactttgaggaaggctcagtgggctcagcagaaggaaggctcttctcatagttgtggtttttcacagatggatttgggtgatctgagtgtggtcaggccctgccgttggggaatgaatgccacacggggtttgtctgtaagctgcagtgtctgtgattctgtgtgaactgacagcagggagctgaaggacaggccccggccttgggagaggacacgggcatgggctgctggatgcagggctcccagggctgtgaaggcagaggggtctctggaggcagacagggtgggctgggggccagcagcagggggcagagccccagccagggcagctgcttcctgcacatagacattcctcctgcgcagggccaagtgcccatgagcacagccccagacagacacggtggggagcttggagccctccgctcacctagaggagccctgggacacgcactggaaagtattctaggggcttcctgccttatccttctgtttgttcatacacttagtgaaagcagatcctgtactaggatgtgaggatatctgtcacctgcgtggtccattccataaacaccagattccatttcagttgccacacattttggggctagacttccctaaacaacatgccattgtgaaataatgcatatatttgtatttttaaatttccctgaaaatttaatctattctgttccatatgaagtctgtttcactaccttaaaaaatagatactccactagaggctgtgcttaattcaaatccatgtgtgtgcctgcattacatgtgtgaacacgtgtttctgtcgtgtgtgtcatgcacatctgtgtgttgcatagcataagccaaatgaaaatcatttgttcatgggattcatatgaggaacaaaattaaatttgaatacagtcagataactgccacgcagggcatttggggaaccatccccgaatgccctgatgtgatttccctcagaaaatccttgttattagaggagaaggtctgggcaggggcagcagcatctcagacatcaagtcaactttatcatctactacatcagcactgaagtccaggggcattgaggcactaactaggttccattttctttggtttggttacttattttttctttttgggttctcggtgtgcagaggctgtagagagagcctcagggcggtgaccgctgcaggaattcggccctccagctcccctccagttaccaggagccgatttggaggccaggccttcccagctgagtgtctgtcagcttcattctctctcagctgtgcagtggaagagcaacaacagacaggtgaccttcttgggttgtgcttcacaatggactgggaaaaacatctttgaaatcaggaaatcaggccgggcgcagtggctcatgcctgtaagcccagcactttgggaggcggaggcgggtggatccattgaggtcaggagctcaagaccagcctggtcaacatggtgaaaccccgtctctactaaaaatacaaaaaaaaaattagctgggcgtgttggcgggagcctgtagtcccagctacacgggaggctaaggtgggagaattgcttgaacccgggaggcggaggttgcagtgagctgagattgcaccattgcactccagcctgggcgacagagcaagactctctcaaaaaaaaaaaaaaaagaaagaaagaaatcagaaaatcgaccacagtggtagccacctggcctaatgctgtgtttttgtacctgacaggggtcactcattttaggcacaactccttcattctttgtgaaattagtgagtttccttctacccgtcaccagattcaatatgttctattaatacaccgataaccacaggggaagggcacttgtcgctctcccacctggttaccacagtctccatgggtcttttgccgtgaccacaaataaaggaaacactcatcactagtatctaagtcgggctttacagtaactatgcaccttctgtgtgcttcacctcactctctacttcaaacagcccatggagggaggtattattatactccttatgttgacagtgaagaatctgaggcccagagaggttggggacttgagtaaagtcacacagccctgagaggcaggaccagggttccattcctgctctatccagttccaagcccttgtgttttccattatgtttagtgcctctttgctaacagcaacatctgcaagatttgtgttggttttgatggagaactctagctcatccacatgctagtgcccaagtggtggaggggccacctcagcaggtgggttctgaatgcagccaaggctgtccccgcaatgggtgagactcgctccaactgcccgccctcagagcaggtgcctaagtcctccctggcactggcaggccttacctcacattgctaaattaaagcaatgcaattcctcttgggtaagaggaattcctccttctttactaactgatccccagcaaggaaataaaatgttaggctttaaaaatccctactttgtcatatcagactatattctaaaactatatttgagcgaaacctgtcattgcgtctaatttcaaatatacagaatctccttaagagctgttgccttatttttttgtaaagcctctctgacatcaaatggggagaaatggtggcacctccagacaccctgaaactacacaccatttcttccctgctcagcttctgctcaggagttctgtgagctatgggaaggccattggttgtatttgctacttttactttcatcttcctctgctgtagagccatttaatgttattgtcatatgctgctggtgaggtaaaggtgggtccgggtgccttcccaggggttagaggatgttcaaagggccgatttcagcaggagttcagagggcttatgatggatggtgagagatttgacaaccaccagagcacatgtgctctgaccctctcctgggcattggttcctgctggtaccgggcggttcagaccttcaaataggttgctttcaaaagagctttcaggcacttattgagaattaatgtttaaacagacataatagcctagatgaactcccaagagatctattaaatcttgtgggctgaataaatatctcgtgcaggactgtgcaacagtagcccagagcatcctgcctgtgggcatccacctcccaggtgagggcagtgggaagctggcccgacggcagccagaacttgtttctcacctcccaccagcaaccccccacccaactctgggccccaggcacacgaagcacaagtctcaggggaccattcccacattgggggatcctgagggagcccatcaccgcctcttgcatacaactgtccactaggaggcacgcccagtgtgggagagatgtatggtcttgccttccacctgtaaaaactgcacatatgcaagccatttgcactctggaactgcatgccgtgaaaactcctaatggtgtggaacttagtttgaatttgaaatcacgccgcatgcacaaagggacaggcccaggcccgacctcaggtcatccgcccgctggctgcagagcatccctgggagccaaggcgaggcccgtggagcctgagctttgtgtagctcgagctttgtgtagctcgtgcacttattatgcaccacctcccttcagtcaccactcctcttcctccgccatcctcatttatactgattgcacaccccccgctcaaacaacaatgtccttattatgatgaccatctcgtagtggtacattccattcctatttaaggtaagcccaaagcccacttttggattttctcgactgtccgagaaaagttgtgtaagcgcctgcgttcttctgggtttggctagatagggttgtgtccctctatggaatggagagtgatgtgggcaagggtgtcattttctcgcacaatacaactcactgaggatgcttctgtagaagtgagaaacacgatgagtacattcagaattacaataactcactctcactgggtaacttctcatgatagatttgtatgatcaatacgggtctatttttatgtcaactgaacactgtagggtaccttccagtctttttcaagattgttaaattgagacaagtaattgaataatttgtcctatttttattttaaaaaaagtgaatggactgaaatgttaaatgtgaatgtacatttcttaattgcaacttttctactgagtgtttgcactatactttctggaatcttatttaacaaaaataaagggaaaaaattgcttgactaaa

SEQ ID NO: 105233 - DNA, 1693 bp, Homo sapiens
  Payload ID: 646
  Gene Symbol: ADCY1
  Gene Name: adenylate cyclase 1 (brain)
  ENST ID: ENST00000432715
  CDS Start-End: 380-1396
gttccactgtgcacggtggggaaactgaggctcggaggggacaaggaaggtgccccagctgcagcaggtcggccagctggcgctgctcttcagcctcaccttcgcgctgctctgctgtcctttcgcgctgggcggccccgcccggggttccgccggggccgctggggggccagcgaccgccgaacaaggggtttggcagctccttttggtcaccttcgtgtcctatgccttgctgcccgtgcgcagcctgctggccataggctttgggctcgtggtggctgcgtcgcacttgctggtcacagccaccttggtccccgccaagcgcccacgtctctggaggacgctcggtgccaatgccttgctcttcgtcggtgtgaacatgtatggggtctttgtgcggattctgactgagcgttcacagaggaaggcgttcctgcaggcccggagctgcattgaggaccgactgaggctggaggatgagaacgagaagcaggagcggctcctcatgagcctcctgccccggaacgttgccatggagatgaaggaggacttcctgaagccccctgagaggattttccacaagatttacatccagaggcacgacaatgtgagcatcctgtttgctgacatcgtgggtttcacgggcttggcatcccagtgcacagcccaggagctggtgaaactcctcaatgagctcttcggcaagttcgatgaattagccacggagaaccactgtcgccgcatcaagattctcggggactgctactactgcgtgtcgggcctcacccagcccaagactgaccatgcccactgctgtgtggagatgggactcgacatgattgataccatcacatctgtggctgaagccaccgaggtggatctgaacatgcgtgtgggtctgcacacgggcagggtcctctgtggtgtcctgggcttgcgcaagtggcagtacgacgtgtggtccaatgatgtgaccttggccaatgtcatggaagccgctggcctgccagggaaggttcatatcacaaagacgaccctagcgtgcttgaatggggactacgaggtagaaccgggttacggacatgagaggaacagtttcttgaaaactcataacatcgaaaccttttttattgtgccatcccatcgccgaaagatatttccaggcctgattctctcagatataaaaccggccaaaaggatgaagttcaagactgtctgctacctgctggtgcagctcatgcactgccggaaaatgttcaaggccgagatccccttctccaatgtcatgacctgcgaggacgatgacaaggttcagatccatccctcactgagtggcctggatgtcctcctggggttttggtctcccaccctgcaacggggacgactgtgcacgtagcttcaggtcctgcccaacagccactgtcaccagtgctgcaaggatgagctcctgccatcagcccttatcccccagggcattcacgccagctctgttcttctctcagcactctctcctgatcgtaaacataattgattatggaaaatatggagaacacaaagatgcacaagggagaaaatgaaaagcatttatctggaatcctaccatctcacaaaaaagctatcatgaacattttgttccttccagtttcttaagtttgtgtgtctgtatttttttaataaacttgactggatggta

SEQ ID NO: 105234 - DNA, 1647 bp, Homo sapiens
  Payload ID: 646
  Gene Symbol: ADCY1
  Gene Name: adenylate cyclase 1 (brain)
  ENST ID: ENST00000621543
  CDS Start-End: 335-1351
gcaggtgccccagctgcagcaggtcggccagctggcgctgctcttcagcctcaccttcgcgctgctctgctgtcctttcgcgctgggcggccccgcccggggttccgccggggccgctggggggccagcgaccgccgaacaaggggtttggcagctccttttggtcaccttcgtgtcctatgccttgctgcccgtgcgcagcctgctggccataggctttgggctcgtggtggctgcgtcgcacttgctggtcacagccaccttggtccccgccaagcgcccacgtctctggaggacgctcggtgccaatgccttgctcttcgtcggtgtgaacatgtatggggtctttgtgcggattctgactgagcgttcacagaggaaggcgttcctgcaggcccggagctgcattgaggaccgactgaggctggaggatgagaacgagaagcaggagcggctcctcatgagcctcctgccccggaacgttgccatggagatgaaggaggacttcctgaagccccctgagaggattttccacaagatttacatccagaggcacgacaatgtgagcatcctgtttgctgacatcgtgggtttcacgggcttggcatcccagtgcacagcccaggagctggtgaaactcctcaatgagctcttcggcaagttcgatgaattagccacggagaaccactgtcgccgcatcaagattctcggggactgctactactgcgtgtcgggcctcacccagcccaagactgaccatgcccactgctgtgtggagatgggactcgacatgattgataccatcacatctgtggctgaagccaccgaggtggatctgaacatgcgtgtgggtctgcacacgggcagggtcctctgtggtgtcctgggcttgcgcaagtggcagtacgacgtgtggtccaatgatgtgaccttggccaatgtcatggaagccgctggcctgccagggaaggttcatatcacaaagacgaccctagcgtgcttgaatggggactacgaggtagaaccgggttacggacatgagaggaacagtttcttgaaaactcataacatcgaaaccttttttattgtgccatcccatcgccgaaagatatttccaggcctgattctctcagatataaaaccggccaaaaggatgaagttcaagactgtctgctacctgctggtgcagctcatgcactgccggaaaatgttcaaggccgagatccccttctccaatgtcatgacctgcgaggacgatgacaaggttcagatccatccctcactgagtggcctggatgtcctcctggggttttggtctcccaccctgcaacggggacgactgtgcacgtagcttcaggtcctgcccaacagccactgtcaccagtgctgcaaggatgagctcctgccatcagcccttatcccccagggcattcacgccagctctgttcttctctcagcactctctcctgatcgtaaacataattgattatggaaaatatggagaacacaaagatgcacaagggagaaaatgaaaagcatttatctggaatcctaccatctcacaaaaaagctatcatgaacattttgttccttccagtttcttaagtttgtgtgtctgtatttttttaataaacttgactggatggt

SEQ ID NO: 105235 - DNA, 5055 bp, Homo sapiens
  Payload ID: 647
  Gene Symbol: ADCY10
  Gene Name: adenylate cyclase 10 (soluble)
  Uniprot ID: Q96PN6
  ENST ID: ENST00000367848
  CDS Start-End: 499-5055
gacagacatggcgcttcagctgtcttcagaataatgtcacccggcctcctctcctgtcttctgcagtcttaaaagacctagtccctaactgaggtctggcttttcctcagccctggatgaagtggagaagacctatttggagactgcttcctgtcaccataaaatcctgaacatttgtcttgaacatgaacactccaaaagaagaattccaggactggcccatagtcagaatagcagctcatttaccagacctcattgtctatggacatttctccccagagcgaccctttatggattattttgacggagtcctgatgtttgttgatatttcaggttttactgcaatgactgagaagttcagcagtgccatgtacatggacagaggggctgagcagttggtggagatcctcaactaccacataagtgcaatagtggagaaagtgttgatttttggaggagacatcctgaaatttgcagggcaggtcaaaagcccgcggcatgtctctctctgaaggtgatgcactgctagccctgtggagggtggagcgaaagcagctgaaaaacattatcacagtggtaattaaatgtagcctggagatccatggattgtttgagacccaggagtgggaagaaggcctagacatccgagtcaagataggactggctgctggccacatcagcatgttggtctttggagatgaaacacacagccactttctggtgattggtcaggcagtggacgatgtgcgccttgcccagaacatggctcagatgaatgatgttattctgtcaccaaactgctggcagctctgtgaccggagcatgattgaaattgagagtgttccagatcagagagcagttaaggttaacttcttaaaaccaccccccaattttaattttgatgaatttttcacaaagtgtacgaccttcatgcattattatccttctggtgagcacaaaaacctcctgaggcttgcatgcacgctgaagcctgatcctgaactggagatgtccctacaaaagtatgtgatggaaagcattttgaagcagattgataacaaacagcttcagggctatttatctgagcttcgcccagtgacgattgtgtttgtgaacctgatgtttgaagaccaagacaaagcagaagagataggcccagccatccaggatgcctatatgcacatcacttctgtcctgaagatcttccaaggccaaatcaataaagtcttcatgtttgacaagggctgctctttcctctgtgtctttggcttccctggggaaaaggtacctgacgagctcactcatgctctggaatgtgctatggatatatttgacttctgctctcaagtccacaaaatccaaactgtatccatcggtgttgccagtgggattgtcttctgtgggatcgttggacacactgtgagacacgagtacacagtcattggtcaaaaagtcaacttagctgccaggatgatgatgtactacccaggaattgtgacctgcgactctgtcacctacaatgggagcaacctaccagcgtacttttttaaagagcttccaaagaaagttatgaaaggtgttgcagattctggaccattgtatcagtattggggccgtactgagaaagtcatgtttggtatggcgtgcctcatctgcaacagaaaggaggattaccctttgctgggacgtaataaagagatcaactacttcatgtatactatgaagaaatttttgatatctaacagcagccaagtcttaatgtatgagggattaccaggatatggaaaaagccagatacttatgaaaattgagtacctggcccaaggtaagaatcacaggattattgccatttcattgaataagatcagcttccatcaaactttctataccatccagatgttcatggccaatgtcctaggcctagacacttgtaaacattataaagaacgacagaccaaccttcgaaataaagtcatgacactgttggatgaaaagttctactgtcttcttaatgacattttccatgttcagttccctatttctcgggagatttccaggatgagcaccttgaaaaagcaaaaacaattggaaatattgtttatgaagatcttgaagctgatagtgaaagaggaaaggattatttttatcattgatgaggcccagtttgtggattcgacctcctggagatttatggagaagcttatccggactcttcctatcttcatcattatgtccctgtgtcccttcgttaacattccctgtgcagctgccagggccgtaataaagaacaggaacaccacctacattgtcattggtgcagtacagcctaacgacatctccaacaagatctgtcttgacctcaatgtgagctgcatctccaaagaactggactcgtacctgggggagggaagctgtgggattccattttactgtgaagaattgcttaaaaacctggaacatcatgaggtactcgttttccaacaaacggagtctgaggaaaagacaaataggacctggaataacctgttcaagtattccattaagctaacagagaagttaaacatggttactctccatagtgataaggaaagtgaagaagtctgtcacctcacaagtggtgtcagactgaaaaacctgtcacctccaacgtcattaaaagaaatctctctgatccagctggatagcatgagactttcccaccaaatgctggtgagatgtgctgccatcattggcctgaccttcaccactgagttgttgtttgagattctcccctgttggaatatgaagatgatgatcaagaccctggcaaccctagtggaatctaacattttttattgtttccggaatggcaaggagcttcaaaaggccctgaaacagaatgatccctcatttgaggtgcactatcgttccttgtctctgaagcccagtgaagggatggatcacggtgaagaggaacagcttcgtgaactggagaatgaggtgatcgagtgccacaggattcgattctgtaaccctatgatgcagaaaacagcctacgagctgtggctcaaggaccagagaaaagccatgcacttgaaatgtgcccgctttttagaagaagatgcccacagatgtgaccactgccgaggcagggacttcattccctatcatcacttcacagtgaatattcggctcaacgctttagacatggatgccattaaaaagatggctatgtctcatggatttaaaactgaagaaaagcttatcttgtccaactcagagattcctgagacatctgcattttttcctgaaaatcgcagtcctgaagaaataagagaaaagatcttgaatttctttgaccacgttttaacaaaaatgaagacatctgacgaagacattatccctctggaatcttgccagtgtgaagaaatcctagagattgtcatcttgcctctggcccaccattttctggctttgggagaaaatgacaaagccttatattacttcttagaaattgcatctgcttatctcatcttttgtgataactacatggcatacatgtatttgaatgaaggacagaagttgctaaaaactctcaagaaggacaaatcttggagccagacatttgagtctgccaccttttacagcctcaaaggtgaggtctgtttcaatatgggccagatagtgcttgccaagaaaatgctgaggaaggcactgaagctcctcaaccgaatctttccttacaacttaatctccttgtttctccatatccatgtcgagaaaaacagacactttcattatgtgaatcggcaggcccaagagagcccacctccagggaagaagaggctggcacaactttaccggcaaactgtctgcctttccttgctgtggcgcatctatagctacagttatctttttcactgcaagtattatgcccacctggcagttatgatgcaaatgaatactgcactggaaactcaaaattgtttccagatcattaaggcttacctagactattcgctataccaccacctggctggctacaaaggtgtgtggttcaaatatgaagtcatggccatggagcacatcttcaacctccccctgaaaggcgagggcattgaaatcgtggcatacgtggctgagacactggtcttcaacaagctcataatgggacacctggatttggccattgagttaggctcccgagcccttcagatgtgggcactgctccagaatcccaaccgacattatcagtccctctgcagacttagcagatgtctccttctgaacagcagatacccgcaattgatccaggtgctggggcggctgtgggagctttctgtaacacaggaacacatcttcagcaaggcatttttctattttgtctgcttggacatcctgctttattctggttttgtttatagaacatttgaagaatgtttggaattcatacaccaatacgaaaacaacagaatcctcaagttccacagtggactcctcctgggactttattcctctgtagctatctggtatgccagacttcaggaatgggacaacttttacaaattttccaatagagctaaaaatcttttgccaagaagaaccatgacacttacttactatgacggaatatctaggtacatggaggggcaagttcttcaccttcaaaaacaaatcaaagaacagtcagagaatgcccaagccagtggggaggagctactcaagaacttggagaatctggtggctcaaaataccactggccctgtcttttgcccaaggctctaccacctgatggcttacgtctgtatattaatgggagatgggcagaaatgtggcctcttcctgaacacagccttgcggctctctgaaacacaggggaatatactggagaaatgctggctgaacatgaacaaagaatcatggtactcaacctctgagttaaaagaagaccaatggcttcagacgatcttgagtctcccatcatgggaaaaaattgtagcaggcagggtaaacattcaggatcttcaaaaaaacaaattcctgatgagagctaataccgtggacaatcatttctaa

SEQ ID NO: 105236 - DNA, 5051 bp, Homo sapiens
  Payload ID: 647
  Gene Symbol: ADCY10
  Gene Name: adenylate cyclase 10 (soluble)
  Uniprot ID: Q96PN6
  ENST ID: ENST00000367851
  CDS Start-End: 186-5018
gacagacatggcgcttcagctgtcttcagaataatgtcacccggcctcctctcctgtcttctgcagtcttaaaagacctagtccctaactgaggtctggcttttcctcagccctggatgaagtggagaagacctatttggagactgcttcctgtcaccataaaatcctgaacatttgtcttgaacatgaacactccaaaagaagaattccaggactggcccatagtcagaatagcagctcatttaccagacctcattgtctatggacatttctccccagagcgaccctttatggattattttgacggagtcctgatgtttgttgatatttcaggttttactgcaatgactgagaagttcagcagtgccatgtacatggacagaggggctgagcagttggtggagatcctcaactaccacataagtgcaatagtggagaaagtgttgatttttggaggagacatcctgaaatttgcaggtgatgcactgctagccctgtggagggtggagcgaaagcagctgaaaaacattatcacagtggtaattaaatgtagcctggagatccatggattgtttgagacccaggagtgggaagaaggcctagacatccgagtcaagataggactggctgctggccacatcagcatgttggtctttggagatgaaacacacagccactttctggtgattggtcaggcagtggacgatgtgcgccttgcccagaacatggctcagatgaatgatgttattctgtcaccaaactgctggcagctctgtgaccggagcatgattgaaattgagagtgttccagatcagagagcagttaaggttaacttcttaaaaccaccccccaattttaattttgatgaatttttcacaaagtgtacgaccttcatgcattattatccttctggtgagcacaaaaacctcctgaggcttgcatgcacgctgaagcctgatcctgaactggagatgtccctacaaaagtatgtgatggaaagcattttgaagcagattgataacaaacagcttcagggctatttatctgagcttcgcccagtgacgattgtgtttgtgaacctgatgtttgaagaccaagacaaagcagaagagataggcccagccatccaggatgcctatatgcacatcacttctgtcctgaagatcttccaaggccaaatcaataaagtcttcatgtttgacaagggctgctctttcctctgtgtctttggcttccctggggaaaaggtacctgacgagctcactcatgctctggaatgtgctatggatatatttgacttctgctctcaagtccacaaaatccaaactgtatccatcggtgttgccagtgggattgtcttctgtgggatcgttggacacactgtgagacacgagtacacagtcattggtcaaaaagtcaacttagctgccaggatgatgatgtactacccaggaattgtgacctgcgactctgtcacctacaatgggagcaacctaccagcgtacttttttaaagagcttccaaagaaagttatgaaaggtgttgcagattctggaccattgtatcagtattggggccgtactgagaaagtcatgtttggtatggcgtgcctcatctgcaacagaaaggaggattaccctttgctgggacgtaataaagagatcaactacttcatgtatactatgaagaaatttttgatatctaacagcagccaagtcttaatgtatgagggattaccaggatatggaaaaagccagatacttatgaaaattgagtacctggcccaaggtaagaatcacaggattattgccatttcattgaataagatcagcttccatcaaactttctataccatccagatgttcatggccaatgtcctaggcctagacacttgtaaacattataaagaacgacagaccaaccttcgaaataaagtcatgacactgttggatgaaaagttctactgtcttcttaatgacattttccatgttcagttccctatttctcgggagatttccaggatgagcaccttgaaaaagcaaaaacaattggaaatattgtttatgaagatcttgaagctgatagtgaaagaggaaaggattatttttatcattgatgaggcccagtttgtggattcgacctcctggagatttatggagaagcttatccggactcttcctatcttcatcattatgtccctgtgtcccttcgttaacattccctgtgcagctgccagggccgtaataaagaacaggaacaccacctacattgtcattggtgcagtacagcctaacgacatctccaacaagatctgtcttgacctcaatgtgagctgcatctccaaagaactggactcgtacctgggggagggaagctgtgggattccattttactgtgaagaattgcttaaaaacctggaacatcatgaggtactcgttttccaacaaacggagtctgaggaaaagacaaataggacctggaataacctgttcaagtattccattaagctaacagagaagttaaacatggttactctccatagtgataaggaaagtgaagaagtctgtcacctcacaagtggtgtcagactgaaaaacctgtcacctccaacgtcattaaaagaaatctctctgatccagctggatagcatgagactttcccaccaaatgctggtgagatgtgctgccatcattggcctgaccttcaccactgagttgttgtttgagattctcccctgttggaatatgaagatgatgatcaagaccctggcaaccctagtggaatctaacattttttattgtttccggaatggcaaggagcttcaaaaggccctgaaacagaatgatccctcatttgaggtgcactatcgttccttgtctctgaagcccagtgaagggatggatcacggtgaagaggaacagcttcgtgaactggagaatgaggtgatcgagtgccacaggattcgattctgtaaccctatgatgcagaaaacagcctacgagctgtggctcaaggaccagagaaaagccatgcacttgaaatgtgcccgctttttagaagaagatgcccacagatgtgaccactgccgaggcagggacttcattccctatcatcacttcacagtgaatattcggctcaacgctttagacatggatgccattaaaaagatggctatgtctcatggatttaaaactgaagaaaagcttatcttgtccaactcagagattcctgagacatctgcattttttcctgaaaatcgcagtcctgaagaaataagagaaaagatcttgaatttctttgaccacgttttaacaaaaatgaagacatctgacgaagacattatccctctggaatcttgccagtgtgaagaaatcctagagattgtcatcttgcctctggcccaccattttctggctttgggagaaaatgacaaagccttatattacttcttagaaattgcatctgcttatctcatcttttgtgataactacatggcatacatgtatttgaatgaaggacagaagttgctaaaaactctcaagaaggacaaatcttggagccagacatttgagtctgccaccttttacagcctcaaaggtgaggtctgtttcaatatgggccagatagtgcttgccaagaaaatgctgaggaaggcactgaagctcctcaaccgaatctttccttacaacttaatctccttgtttctccatatccatgtcgagaaaaacagacactttcattatgtgaatcggcaggcccaagagagcccacctccagggaagaagaggctggcacaactttaccggcaaactgtctgcctttccttgctgtggcgcatctatagctacagttatctttttcactgcaagtattatgcccacctggcagttatgatgcaaatgaatactgcactggaaactcaaaattgtttccagatcattaaggcttacctagactattcgctataccaccacctggctggctacaaaggtgtgtggttcaaatatgaagtcatggccatggagcacatcttcaacctccccctgaaaggcgagggcattgaaatcgtggcatacgtggctgagacactggtcttcaacaagctcataatgggacacctggatttggccattgagttaggctcccgagcccttcagatgtgggcactgctccagaatcccaaccgacattatcagtccctctgcagacttagcagatgtctccttctgaacagcagatacccgcaattgatccaggtgctggggcggctgtgggagctttctgtaacacaggaacacatcttcagcaaggcatttttctattttgtctgcttggacatcctgctttattctggttttgtttatagaacatttgaagaatgtttggaattcatacaccaatacgaaaacaacagaatcctcaagttccacagtggactcctcctgggactttattcctctgtagctatctggtatgccagacttcaggaatgggacaacttttacaaattttccaatagagctaaaaatcttttgccaagaagaaccatgacacttacttactatgacggaatatctaggtacatggaggggcaagttcttcaccttcaaaaacaaatcaaagaacagtcagagaatgcccaagccagtggggaggagctactcaagaacttggagaatctggtggctcaaaataccactggccctgtcttttgcccaaggctctaccacctgatggcttacgtctgtatattaatgggagatgggcagaaatgtggcctcttcctgaacacagccttgcggctctctgaaacacaggggaatatactggagaaatgctggctgaacatgaacaaagaatcatggtactcaacctctgagttaaaagaagaccaatggcttcagacgatcttgagtctcccatcatgggaaaaaattgtagcaggcagggtaaacattcaggatcttcaaaaaaacaaattcctgatgagagctaataccgtggacaatcatttctaacatgtcaaagaaaaaagattttaataagcacta

SEQ ID NO: 105237 - DNA, 4966 bp, Homo sapiens
  Payload ID: 647
  Gene Symbol: ADCY10
  Gene Name: adenylate cyclase 10 (soluble)
  Uniprot ID: Q96PN6
  ENST ID: ENST00000545172
  CDS Start-End: 303-4676
agtgccacccaatcagaaacatggtcggtgcccgtggaacaatgagctactgatgagggtgtggcctggaaaacggcttttagacaaaactgtcattttatgggtcagctatagacagacatggcgcttcagctgtcttcagaataatgtcacccggcctcctctcctgtcttctgcagtcttaaaagacctagtccctaactgaggtctggcttttcctcagccctggatgaagtggagaagtgttgatttttggaggagacatcctgaaatttgcaggactggctgctggccacatcagcatgttggtctttggagatgaaacacacagccactttctggtgattggtcaggcagtggacgatgtgcgccttgcccagaacatggctcagatgaatgatgttattctgtcaccaaactgctggcagctctgtgaccggagcatgattgaaattgagagtgttccagatcagagagcagttaaggttaacttcttaaaaccaccccccaattttaattttgatgaatttttcacaaagtgtacgaccttcatgcattattatccttctggtgagcacaaaaacctcctgaggcttgcatgcacgctgaagcctgatcctgaactggagatgtccctacaaaagtatgtgatggaaagcattttgaagcagattgataacaaacagcttcagggctatttatctgagcttcgcccagtgacgattgtgtttgtgaacctgatgtttgaagaccaagacaaagcagaagagataggcccagccatccaggatgcctatatgcacatcacttctgtcctgaagatcttccaaggccaaatcaataaagtcttcatgtttgacaagggctgctctttcctctgtgtctttggcttccctggggaaaaggtacctgacgagctcactcatgctctggaatgtgctatggatatatttgacttctgctctcaagtccacaaaatccaaactgtatccatcggtgttgccagtgggattgtcttctgtgggatcgttggacacactgtgagacacgagtacacagtcattggtcaaaaagtcaacttagctgccaggatgatgatgtactacccaggaattgtgacctgcgactctgtcacctacaatgggagcaacctaccagcgtacttttttaaagagcttccaaagaaagttatgaaaggtgttgcagattctggaccattgtatcagtattggggccgtactgagaaagtcatgtttggtatggcgtgcctcatctgcaacagaaaggaggattaccctttgctgggacgtaataaagagatcaactacttcatgtatactatgaagaaatttttgatatctaacagcagccaagtcttaatgtatgagggattaccaggatatggaaaaagccagatacttatgaaaattgagtacctggcccaaggtaagaatcacaggattattgccatttcattgaataagatcagcttccatcaaactttctataccatccagatgttcatggccaatgtcctaggcctagacacttgtaaacattataaagaacgacagaccaaccttcgaaataaagtcatgacactgttggatgaaaagttctactgtcttcttaatgacattttccatgttcagttccctatttctcgggagatttccaggatgagcaccttgaaaaagcaaaaacaattggaaatattgtttatgaagatcttgaagctgatagtgaaagaggaaaggattatttttatcattgatgaggcccagtttgtggattcgacctcctggagatttatggagaagcttatccggactcttcctatcttcatcattatgtccctgtgtcccttcgttaacattccctgtgcagctgccagggccgtaataaagaacaggaacaccacctacattgtcattggtgcagtacagcctaacgacatctccaacaagatctgtcttgacctcaatgtgagctgcatctccaaagaactggactcgtacctgggggagggaagctgtgggattccattttactgtgaagaattgcttaaaaacctggaacatcatgaggtactcgttttccaacaaacggagtctgaggaaaagacaaataggacctggaataacctgttcaagtattccattaagctaacagagaagttaaacatggttactctccatagtgataaggaaagtgaagaagtctgtcacctcacaagtggtgtcagactgaaaaacctgtcacctccaacgtcattaaaagaaatctctctgatccagctggatagcatgagactttcccaccaaatgctggtgagatgtgctgccatcattggcctgaccttcaccactgagttgttgtttgagattctcccctgttggaatatgaagatgatgatcaagaccctggcaaccctagtggaatctaacattttttattgtttccggaatggcaaggagcttcaaaaggccctgaaacagaatgatccctcatttgaggtgcactatcgttccttgtctctgaagcccagtgaagggatggatcacggtgaagaggaacagcttcgtgaactggagaatgaggtgatcgagtgccacaggattcgattctgtaaccctatgatgcagaaaacagcctacgagctgtggctcaaggaccagagaaaagccatgcacttgaaatgtgcccgctttttagaagaagatgcccacagatgtgaccactgccgaggcagggacttcattccctatcatcacttcacagtgaatattcggctcaacgctttagacatggatgccattaaaaagatggctatgtctcatggatttaaaactgaagaaaagcttatcttgtccaactcagagattcctgagacatctgcattttttcctgaaaatcgcagtcctgaagaaataagagaaaagatcttgaatttctttgaccacgttttaacaaaaatgaagacatctgacgaagacattatccctctggaatcttgccagtgtgaagaaatcctagagattgtcatcttgcctctggcccaccattttctggctttgggagaaaatgacaaagccttatattacttcttagaaattgcatctgcttatctcatcttttgtgataactacatggcatacatgtatttgaatgaaggacagaagttgctaaaaactctcaagaaggacaaatcttggagccagacatttgagtctgccaccttttacagcctcaaaggtgaggtctgtttcaatatgggccagatagtgcttgccaagaaaatgctgaggaaggcactgaagctcctcaaccgaatctttccttacaacttaatctccttgtttctccatatccatgtcgagaaaaacagacactttcattatgtgaatcggcaggcccaagagagcccacctccagggaagaagaggctggcacaactttaccggcaaactgtctgcctttccttgctgtggcgcatctatagctacagttatctttttcactgcaagtattatgcccacctggcagttatgatgcaaatgaatactgcactggaaactcaaaattgtttccagatcattaaggcttacctagactattcgctataccaccacctggctggctacaaaggtgtgtggttcaaatatgaagtcatggccatggagcacatcttcaacctccccctgaaaggcgagggcattgaaatcgtggcatacgtggctgagacactggtcttcaacaagctcataatgggacacctggatttggccattgagttaggctcccgagcccttcagatgtgggcactgctccagaatcccaaccgacattatcagtccctctgcagacttagcagatgtctccttctgaacagcagatacccgcaattgatccaggtgctggggcggctgtgggagctttctgtaacacaggaacacatcttcagcaaggcatttttctattttgtctgcttggacatcctgctttattctggttttgtttatagaacatttgaagaatgtttggaattcatacaccaatacgaaaacaacagaatcctcaagttccacagtggactcctcctgggactttattcctctgtagctatctggtatgccagacttcaggaatgggacaacttttacaaattttccaatagagctaaaaatcttttgccaagaagaaccatgacacttacttactatgacggaatatctaggtacatggaggggcaagttcttcaccttcaaaaacaaatcaaagaacagtcagagaatgcccaagccagtggggaggagctactcaagaacttggagaatctggtggctcaaaataccactggccctgtcttttgcccaaggctctaccacctgatggcttacgtctgtatattaatgggagatgggcagaaatgtggcctcttcctgaacacagccttgcggctctctgaaacacaggggaatatactggagaaatgctggctgaacatgaacaaagaatcatggtactcaacctctgagttaaaagaagaccaatggcttcagacgatcttgagtctcccatcatgggaaaaaattgtagcaggcagggtaaacattcaggatcttcaaaaaaacaaattcctgatgagagctaataccgtggacaatcatttctaacatgtcaaagaaaaaagattttaataagcactatgtccttgtgattatctattattgacctttctccgtggctggcccactccaggttcctacataatctcttctgttccagacacagaaacagacatgttgatttcttctctttctggagggcctacaagggtcaggagtgtcatggtttacttcttcctaatgttacaaaaaattgcttttaccattcatgttgttttagcttgacctgtttatttcagcccatgcaaaactgtatcatattacaaattattaatctc

SEQ ID NO: 105238 - DNA, 703 bp, Homo sapiens
  Payload ID: 647
  Gene Symbol: ADCY10
  Gene Name: adenylate cyclase 10 (soluble)
  ENST ID: ENST00000476818
  CDS Start-End: 173-394
cttcagctgtcttcagaataatgtcacccggcctcctctcctgtcttctgcagtcttaaaagacctagtccctaactgaggtctggcttttcctcagccctggatgaagtggagaagacctatttggagactgcttcctgtcaccataaaatcctgaacatttgtcttgaacatgaacactccaaaagaagaattccaggactggcccatagtcagaatagcagctcatttaccagacctcattgtctatggacatttctccccagagcgaccctttatggattattttgacggagtcctgatgtttgttgatatttcaggcaagtgcaaaagggatgtttgtttaatgtggatgagcaacaggctcgcgtgggaattcacatgcagagcttgattgcagagtagggaggccattctggagcccttgggctgtcacagcagatgtgctccactgagaacacaagagggaggaaatagcttgtggccctggctctctctcatcctcccttactcaggactgccagtcataggcatatctttaacatgctcaagtcccattctttgctccagtatctctgccccaacttcactgactcatcctctccagccccaagccccatacacatcccagtcaaaattgacctcaggaaatgatctccctagatgatgtttacatcttactaataaacttgccacctcttca

SEQ ID NO: 105239 - DNA, 2553 bp, Homo sapiens
  Payload ID: 647
  Gene Symbol: ADCY10
  Gene Name: adenylate cyclase 10 (soluble)
  ENST ID: ENST00000485964
  CDS Start-End: 1-752
agtattccattaagctaacagagaagttaaacatggttactctccatagtgataaggaaagtgaagaagtctgtcacctcacaagtggtgtcagactgaaaaacctgtcacctccaacgtcattaaaagaaatctctctgatccagctggatagcatgagactttcccaccaaatgctggtgagatgtgctgccatcattggcctgaccttcaccactgagttgttgtttgagattctcccctgttggaatatgaagatgatgatcaagaccctggcaaccctagtggaatctaacattttttattgtttccggaatggcaaggagcttcaaaaggccctgaaacagaatgatccctcatttgaggtgcactatcgttccttgtctctgaagcccagtgaagggatggatcacggtgaagaggaacagcttcgtgaactggagaatgaggtgatcgagtgccacaggattcgattctgtaaccctatgatgcagaaaacagcctacgagctgtggctcaaggaccagagaaaagccatgcacttgaaatgtgcccgctttttagaagaagatgcccacagatgtgaccactgccgaggcagggacttcattccctatcatcacttcacagtgaatattcggctcaacgctttagacatggatgccattaaaaagatggctatgtctcatggatttaaaagatgcatgagactgggagatactgcctcaccttattatattcttcaagtctgatcttaccttggtgtgcacacgtgctaagatttgcctaatgatgttgggaggtgaagctgaagtgatgagagttgtgcagggacttacttcctcatccacctcccaaaatgaccctggcaaaggaagtgggggtgattcataattcatttaaaaactgaagaccaacttctcacagatgtggggatgctgttcaaggcatacatgtatttgaatgaaggacagaagttgctaaaaactctcaagaaggacaaatcttggagccagacatttgagtctgccaccttttacagcctcaaaggtgaggtctgtttcaatatgggccagatagtgcttgccaagaaaatgctgaggaaggcactgaagctcctcaaccgaatctttccttacaacttaatctccttgtttctccatatccatgtcgagaaaaacagacactttcattatgtgaatcggcaggcccaagagagcccacctccagggaagaagaggctggcacaactttaccggcaaactgtctgcctttccttgctgtggcgcatctatagctacagttatctttttcactgcaagtattatgcccacctggcagttatgatgcaaatgaatactgcactggaaactcaaaattgtttccagatcattaaggcttacctagactattcgctataccaccacctggctggctacaaaggtgtgtggttcaaatatgaagtcatggccatggagcacatcttcaacctccccctgaaaggcgagggcattgaaatcgtggcatacgtggctgagacactggtcttcaacaagctcataatgggacacctggatttggccattgagttaggctcccgagcccttcagatgtgggcactgctccagaatcccaaccgacattatcagtccctctgcagacttagcagatgtctccttctgaacagcagatacccgcaattgatccaggtgctggggcggctgtgggagctttctgtaacacaggaacacatcttcagcaaggcatttttctattttgtctgcttggacatcctgctttattctggttttgtttatagaacatttgaagaatgtttggaattcatacaccaatacgaaaacaacagaatcctcaagttccacagtggactcctcctgggactttattcctctgtagctatctgggagtgtgaagcaggggtaggcaggagactacacacttccagagacccaggtatgccagacttcaggaatgggacaacttttacaaattttccaatagagctaaaaatcttttgccaagaagaaccatgacacttacttactatgacggaatatctaggtacatggaggggcaagttcttcaccttcaaaaacaaatcaaagaacagtcagagaatgcccaagccagtggggaggagctactcaagaacttggagaatctggtggctcaaaataccactggccctgtcttttgcccaaggctctaccacctgatggcttacgtctgtatattaatgggagatgggcagaaatgtggcctcttcctgaacacagccttgcggctctctgaaacacaggggaatatactggagaaatgctggctgaacatgaacaaagaatcatggtactcaacctctgagttaaaagaagaccaatggcttcagacgatcttgagtctcccatcatgggaaaaaattgtagcaggcagggtaaacattcaggatcttcaaaaaaacaaattcctgatgagagctaataccgtggacaatcatttctaacatgtcaaagaaaaaagattttaataagcact

SEQ ID NO: 105240 - DNA, 6575 bp, Homo sapiens
  Payload ID: 648
  Gene Symbol: ADCY2
  Gene Name: adenylate cyclase 2 (brain)
  Uniprot ID: Q08462
  ENST ID: ENST00000338316
  CDS Start-End: 90-3365
aggcggcgcgggggtgggacgcgggcggccgcggcgagcggcgctgcccgggccgggcgcgcacggcgggcgccctgtgagcggccccgatgtggcaggaggcgatgcggcgccgccgctacctgcgggaccgctccgaggaggcggcgggcggcggagacgggctgccgcggtcccgggactggctctacgagtcctactactgcatgagccagcagcacccgctcatcgtcttcctgctgctcatcgtcatgggctcctgcctcgccctgctcgccgtcttcttcgcgctcgggctggaagttgaagaccatgtggcgtttctaataacagttccaactgccctggcgattttctttgcgatatttatcctggtctgcatcgagtctgtgtttaagaagctgctgcgcctcttctcgttggtgatatggatatgccttgttgccatgggatacctgttcatgtgttttggaggcaccgtctctccctgggaccaggtatcgttcttcctcttcatcatcttcgtggtgtacaccatgctgcccttcaacatgcgagacgccatcattgccagcgtcctcacctcctcctcccacaccatcgtgcttagcgtctgcctgtctgcaacaccgggaggcaaggagcacctggtctggcagatcctggccaatgtgatcattttcatctgtgggaacctggcgggagcctaccataagcacctcatggaactcgctcttcagcaaacatatcaggacacctgtaattgcatcaagtcgcggatcaagttggaatttgaaaaacgtcaacaggagcggcttctgctctccctgctgccggcccacatcgccatggagatgaaagcggagatcatccagaggctgcagggccccaaggcgggccagatggagaacacaaataacttccacaacctgtatgtgaagcggcatacaaacgtgagcatcttatacgctgacatcgttggctttacccggctggcaagtgactgctccccgggagaactagtccacatgctgaatgagctctttggaaagtttgatcaaattgcaaaggagaatgaatgcatgagaattaaaattttaggagactgctactactgtgtatctggactccctatatctctccctaaccatgccaagaactgtgtgaaaatggggctggacatgtgtgaagccataaagaaagtgagggatgctactggagttgatatcaacatgcgcgtgggcgtgcattctgggaatgtcctgtgtggcgtgattggtctgcagaagtggcaatatgatgtgtggtcacatgatgtgaccttggccaaccacatggaagctggaggggtccctggacgtgttcacatttcttctgtcaccctggagcacttgaatggcgcttataaagtggaggagggagatggtgacattagggacccatatttaaaacagcacctggtgaaaacctactttgtgatcaaccccaagggagaacgacggagcccccagcatctcttcagacctcgccacacccttgatggagccaaaatgagggcctcggtccgcatgacccggtacttggagtcctggggggcagccaagccctttgcacacctacatcacagggacagcatgaccacagagaacggcaagatcagcaccacggatgtacccatgggtcagcataattttcaaaatcgcaccttaagaaccaagtcacaaaagaagagatttgaagaagaattgaatgaaaggatgattcaagcaattgatgggattaatgcacagaagcaatggctcaagtctgaagacattcagagaatctcactgcttttctataacaaagtactagaaaaagagtaccgggccacggcactgccagcgttcaagtattatgtgacttgtgcctgtctcatattcttctgcatcttcattgtgcagattctcgtgctgccaaaaacgtccgtcctgggcatctcctttggggctgcgtttctcttgctggccttcatcctcttcgtctgctttgctggacagcttctgcaatgcagcaaaaaagcctctcccctgctcatgtggcttttgaagtcctcgggcatcattgccaaccgcccctggccacggatctctctcacgatcatcaccacagccatcatattaatgatggccgtgttcaacatgtttttcctgagtgactcagaggaaacaatccctccaactgccaacacaacaaacacaagcttttcagcctcaaataatcaggtggcgattctgcgtgcgcagaatttatttttcctcccgtactttatctacagctgcattctgggactgatatcctgttccgtgttcctgcgggtaaactatgagctgaagatgttgatcatgatggtggccttggtgggctacaacaccatcctactccacacccacgcccacgtcctgggcgactacagccaggtcttatttgagagaccaggcatttggaaagacctgaagaccatgggctctgtgtctctctctatattcttcatcacactgcttgttctgggtagacagaatgaatattactgtaggttagacttcttatggaagaacaaattcaaaaaagagcgggaggagatagagaccatggagaacctgaaccgcgtgctgctggagaacgtgcttcccgcgcacgtggctgagcacttcctggccaggagcctgaagaatgaggagctataccaccagtcctatgactgcgtctgcgtcatgtttgcctccattccggatttcaaagaattttatacagaatccgacgtgaacaaggagggcttggaatgccttcggctcctgaacgagatcatcgctgactttgatgatcttctttccaagccaaaattcagtggagttgaaaagattaagaccattggcagcacatacatggcagcaacaggtctgagcgctgtgcccagccaggagcactcccaggagcccgagcggcagtacatgcacattggcaccatggtggagtttgcttttgccctggtagggaagctggatgccatcaacaagcactccttcaacgacttcaaattgcgagtgggtattaaccatggacctgtgatagctggtgtgattggagctcagaagccacaatatgatatctggggcaacactgtcaatgtggccagtaggatggacagcaccggagtcctggacaaaatacaggttaccgaggagacgagcctcgtcctgcagaccctcggatacacgtgcacctgtcgaggaataatcaacgtgaaaggaaagggggacctgaagacgtactttgtaaacacagaaatgtcaaggtccctttcccagagcaacgtggcatcctgaagagtcaccttcattttggcaagaagactgtattttcaggaaggtatcacacactttctgactgcaacttctgtcccttgtttttgatgtgcgtgctgtctgtcctatggagcctctgcagactcgttctcgtgacccagtggcataccgtttggtgtctgatgtgtgcccagatcgttctgccacttgcactgtgcttgctcctaagcaaaagggaaaaggagcgcgcgtgatagaagaaaagcactgggagaactaacagaggagaaaggtgaaacacacacacattcttaaggcaataaaactagggggtgtatattatcttctggtgcatgttcttttctggaaaatatggtagctcgccaaccgcatctgctcatctgatattcaaacacacagtattcgtgaataagttgattctgtcccccacgtggactctgtgctcacccattgtctcattgccagtggtgtccaagggcccccgttgggacccacggctctcgtccctctgctccgtgtgtctcatgccagcagcacgtcgccatccgtcaccagaattagtcctcacagcctaggaccagttttgtatcaaactcgtctgatgttttgatgccatttgtcttttgtaaagttaattcattaaaagttttatgtactttgatttacagtgcctgtatcttttattttcctgtcttctttctcctgtggtttgctccagaattaaggtttgttttccatccattctcccttttgacacagttgtttcagaaagagctctccagaagccaatattgagatgtaattcagattaggacacagtgtgtgacgcagataactggttactcagctccctggaaagcaggcaagcatgttgaatgtatctagtggtctgattttaatttgggcatctctagagaacgctttcagggaaaaatactttaatagtaaaaagattctctgcgagcaacagtgccccctccgtccactacgctcctgtctccaagaatgttttgctagagctaacagacatagactgcaaaagaataatttggaatcagctatgcaaatcagtctcacaatagcgtgagctaactgagagaagtactaagacccacaaactgcctgttaagtctgagaaggctaaagaagacacacagccaacgttcatgcatttttaaagacagaaggccttgaagaatttgttcttgtaaatccaacacaagttgtttggtacttttaacataaagaaatcatactttgccaaatagtgaaaagtagagcaatcgtgtataagctaatgtttaaaagcaaaactgcaaattgtagcccagttggtcaaacttgttttctttttataactcatggcaggcatctgtaagaagtagagaacccagatgatctcttaggaagccttttattcgtgggaactcgaacttgaagcacaagttcctggtttgaatcctggctctgattttttactggctgtgtgactttgaacacatctcttagtccctcttaggagtactttccttattggcaacttatggactcgctagtgattaaacgaggcaatgactgtgagcgagcctggcaggtgccccgtggtacattcacagcacgggcacagctgctgtgccaggactgtgactcattcccagtaaaaggcacttatcgaagctgataaccgtccttcatcaccgaagtgtgagtagagcatgacttatttagtattctgcctcaatggggaattttttgatcctgtaatcacaactcagcattggccttaatatacctaaatctccaaaaacagtgattaaagcaagagaattattacaagggcttttctctttcctctaactcattcttcacggatgccgtagcgtttccgtgagctcaaactggccttggtgtaaaatgtgtaaggatgagcagcaggcgtgcctcgtgggttcttcctctgttacatcctgctacactcatccgcaggtcaccttagttcacctaccctgagtgaacacccccagctgggtggtccaccaagttctcataaacagagtccctcccattcccccacggggtgcaccgaacttgggtttgcgctaaaaagaactcaaaaggagaactgtgctctcccaaagccatatcaccagtcttaccaaacaataggcttttaaaagcattgagtcattgtcagaatccactatgggaagctctgtgtgtacctggtcccttctaggtgtggtcccataggagcagccttagcatcccctgtgaacttatcaaaaatgcaaattctcaggccccaacctgaaggaggaccctgaatttgagatccccggggctggggcccagcacaactgctgtttagtgaacaggttctccaggtgattctgatccctgatcaagcttcagacctccctccctccccagtgtttttgcaggtgaggaaacaggggcagagtaattcaggcacatgtgttcagagttccacagttgattagcagttgaggccaggctagaatggaaaactgcctgttccttgaatctgaaagagcattattcctggtcaaagctccttaaagttctgggcagctaaaagcatccctgtgagcaaaaatgccaggcagaaaactggcagtgcacctctcatcagcccaggtcccagtgccattggcttcaagaaaaaaaaaaaatctctccccaatgctctccttaacctttaagtcttacaggaagcctctcatagaaattgcctccagtccagtttcccaaaaaccccagtgttttacatatctgtttaggagtgtctaagttttgtcatcaatccaggatgttattcttccttcccaactcactgtgctcctaaaggcagcaaccattcatctttcctttgctctggatacaccgaatgaccaggtaacatcatcaggccgggtgcagtggctcctataatcccaatattttgggaggccgaggagagaggatcacttaagcccaggagtctgagaccagcctgggcaacatagcaagacccccatctctgcaaaaaaataagaaaattagcttggcatggtggcacgtgcctgtagtcccagctacatgggaggctgaggtgggaggatcacttgagcccaggaagtccagaacgtagtgagccttgattataccactgcactccagcctgggtgacagagcgagactctgtctcag

SEQ ID NO: 105241 - DNA, 431 bp, Homo sapiens
  Payload ID: 648
  Gene Symbol: ADCY2
  Gene Name: adenylate cyclase 2 (brain)
  ENST ID: ENST00000515681
  CDS Start-End: 131-431
gcattctgtatctctcctctttccagtataaagatgagttatgaggacactctctctcctttaaactatcctggccaatgtgatcattttcatctgtgggaacctggcgggagcctaccataagcacctcatggaactcgctcttcagcaaacatatcaggacacctgtaattgcatcaagtcgcggatcaagttggaatttgaaaaacgtcaacaggagcggcttctgctctccctgctgccggcccacatcgccatggagatgaaagcggagatcatccagaggctgcagggccccaaggcgggccagatggagaacacaaataacttccacaacctgtatgtgaagcggcatacaaacgtgagcatcttatacgctgacatcgttggctttacccggctggcaagtgactgctccccgggagaactag

SEQ ID NO: 105242 - DNA, 756 bp, Homo sapiens
  Payload ID: 648
  Gene Symbol: ADCY2
  Gene Name: adenylate cyclase 2 (brain)
  ENST ID: ENST00000493243
  CDS Start-End: 1-230
tcctgggcgactacagccaggtcttatttgagagaccaggcatttggaaagacctgaagaccatgggctctgtgtctctctctatattcttcatcacactgcttgttctgggtagacaggttagacttcttatggaagaacaaattcaaaaaagagcgggaggagatagagaccatggagaacctgaaccgcgtgctgctggagaacgtgcttcccgcgcacgtggctgagcacttcctggccaggagcctgaagaatgaggagctataccaccagtcctatgactgcgtctgcgtcatgtttgcctccattccggatttcaaagaattttatacagaatccgacgtgaacaaggagggcttggaatgccttcggctcctgaacgagatcatcgctgactttgatgatcttctttccaagccaaaattcagtggagttgaaaagattaagaccattggcagcacatacatggcagcaacaggtctgagcgctgtgcccagccaggagcactcccaggagcccgagcggcagtacatgcacattggcaccatggtggagtttgcttttgccctggtagggaagctggatgccatcaacaagcactccttcaacgacttcaaattgcgagtgggtattaaccatggacctgtgatagctggtgtgattggagctcagaagccacaatatgatatctggggcaacactgtcaatgtggccagtaggatggacagcaccggagtcctggacaaaatacag

SEQ ID NO: 105243 - DNA, 3956 bp, Homo sapiens
  Payload ID: 648
  Gene Symbol: ADCY2
  Gene Name: adenylate cyclase 2 (brain)
  ENST ID: ENST00000537121
  CDS Start-End: 27-3296
cggcgggcgccctgtgagcggccccgatgtggcaggaggcgatgcggcgccgccgctacctgcgggaccgctccgaggaggcggcgggcggcggagacgggctgccgcggtcccgggactggctctacgagtcctactactgcatgagccagcagcacccgctcatcgtcttcctgctgctcatcgtcatgggctcctgcctcgccctgctcgccgtcttcttcgcgctcgggctggaagttgaagaccatgtggcgtttctaataacagttccaactgccctggcgattttctttgcgatatttatcctggtctgcatcgagtctgtgtttaagaagctgctgcgcctcttctcgttggtgatatggatatgccttgttgccatgggatacctgttcatgtgttttggaggcaccgtctctccctgggaccaggtatcgttcttcctcttcatcatcttcgtggtgtacaccatgctgcccttcaacatgcgagacgccatcattgccagcgtcctcacctcctcctcccacaccatcgtgcttagcgtctgcctgtctgcaacaccgggaggcaaggagcacctggcagatcctggccaatgtgatcattttcatctgtgggaacctggcggggcctaccataagcacctcatggaactcgctcttcagcaaacatatcaggacacctgtaattgcatcaagtcgcggatcaagttggaatttgaaaaacgtcaacaggagcggcttctgctctccctgctgccggcccacatcgccatggagatgaaagcggagatcatccagaggctgcagggccccaaggcgggccagatggagaacacaaataacttccacaacctgtatgtgaagcggcatacaaacgtgagcatcttatacgctgacatcgttggctttacccggctggcaagtgactgctccccgggagaactagtccacatgctgaatgagctctttggaaagtttgatcaaattgcaaaggagaatgaatgcatgagaattaaaattttaggagactgctactactgtgtatctggactccctatatctctccctaaccatgccaagaactgtgtgaaaatggggctggacatgtgtgaagccataaagaaagtgagggatgctactggagttgatatcaacatgcgcgtgggcgtgcattctgggaatgtcctgtgtggcgtgattggtctgcagaagtggcaatatgatgtgtggtcacatgatgtgaccttggccaaccacatggaagctggaggggtccctggacgtgttcacatttcttctgtcaccctggagcacttgaatggcgcttataaagtggaggagggagatggtgacattagggacccatatttaaaacagcacctggtgaaaacctactttgtgatcaaccccaagggagaacgacggagcccccagcatctcttcagacctcgccacacccttgatggagccaaaatgagggcctcggtccgcatgacccggtacttggagtcctggggggcagccaagccctttgcacacctacatcacagggacagcatgaccacagagaacggcaagatcagcaccacggatgtacccatgggtcagcataattttcaaaatcgcaccttaagaaccaagtcacaaaagaagagatttgaagaagaattgaatgaaaggatgattcaagcaattgatgggattaatgcacagaagcaatggctcaagtctgaagacattcagagaatctcactgcttttctataacaaagtactagaaaaagagtaccgggccacggcactgccagcgttcaagtattatgtgacttgtgcctgtctcatattcttctgcatcttcattgtgcagattctcgtgctgccaaaaacgtccgtcctgggcatctcctttggggctgcgtttctcttgctggccttcatcctcttcgtctgctttgctggacagcttctgcaatgcagcaaaaaagcctctcccctgctcatgtggcttttgaagtcctcgggcatcattgccaaccgcccctggccacggatctctctcacgatcatcaccacagccatcatattaatgatggccgtgttcaacatgtttttcctgagtgactcagaggaaacaatccctccaactgccaacacaacaaacacaagcttttcagcctcaaataatcaggtggcgattctgcgtgcgcagaatttatttttcctcccgtactttatctacagctgcattctgggactgatatcctgttccgtgttcctgcgggtaaactatgagctgaagatgttgatcatgatggtggccttggtgggctacaacaccatcctactccacacccacgcccacgtcctgggcgactacagccaggtcttatttgagagaccaggcatttggaaagacctgaagaccatgggctctgtgtctctctctatattcttcatcacactgcttgttctgggtagacagaatgaatattactgtaggttagacttcttatggaagaacaaattcaaaaaagagcgggaggagatagagaccatggagaacctgaaccgcgtgctgctggagaacgtgcttcccgcgcacgtggctgagcacttcctggccaggagcctgaagaatgaggagctataccaccagtcctatgactgcgtctgcgtcatgtttgcctccattccggatttcaaagaattttatacagaatccgacgtgaacaaggagggcttggaatgccttcggctcctgaacgagatcatcgctgactttgatgatcttctttccaagccaaaattcagtggagttgaaaagattaagaccattggcagcacatacatggcagcaacaggtctgagcgctgtgcccagccaggagcactcccaggagcccgagcggcagtacatgcacattggcaccatggtggagtttgcttttgccctggtagggaagctggatgccatcaacaagcactccttcaacgacttcaaattgcgagtgggtattaaccatggacctgtgatagctggtgtgattggagctcagaagccacaatatgatatctggggcaacactgtcaatgtggccagtaggatggacagcaccggagtcctggacaaaatacaggttaccgaggagacgagcctcgtcctgcagaccctcggatacacgtgcacctgtcgaggaataatcaacgtgaaaggaaagggggacctgaagacgtactttgtaaacacagaaatgtcaaggtccctttcccagagcaacgtggcatcctgaagagtcaccttcattttggcaagaagactgtattttcaggaaggtatcacacactttctgactgcaacttctgtcccttgtttttgatgtgcgtgctgtctgtcctatggagcctctgcagactcgttctcgtgacccagtggcataccgtttggtgtctgatgtgtgcccagatcgttctgccacttgcactgtgcttgctcctaagcaaaagggaaaaggagcgcgcgtgatagaagaaaagcactgggagaactaacagaggagaaaggtgaaacacacacacattcttaaggcaataaaactagggggtgtatattatcttctggtgcatgttcttttctggaaaatatggtagctcgccaaccgcatctgctcatctgatattcaaacacacagtattcgtgaataagttgattctgtcccccacgtggactctgtgctcacccattgtctcattgccagtggtgtccaagggcccccgttgggacccacggctctcgtccctctgctccgtgtgtctcatgccagcagcacgtcgccatccgtcaccagaattagtcctcacagcctaggaccagttttgtatcaaactcgtctgatgttttgatgccatttgtcttttgtaaagttaattcattaaaagttttatgtactttg

SEQ ID NO: 105244 - DNA, 5050 bp, Homo sapiens
  Payload ID: 649
  Gene Symbol: ADCY3
  Gene Name: adenylate cyclase 3
  Uniprot ID: O60266
  ENST ID: ENST00000260600
  CDS Start-End: 853-4287
cgggcctgacggcgggagatcgcgctccggccgggccccgaggcgctgccggggcggcgcggctctgcggggagcagccctcgggcgcgccgagctctcccgccccagcccgcgcggggaccgtcccggagcacgcggtggccgagttcccgcacaggtaaacgcaggggcagggccaggcttccgggggggaagacagcgccccgagcgtgggaagggggccggatcggagcccgagcctccaagggtttggtggaaaaaggaagtaaacagaaggaaggctcaggaatcccccacgatggtcctgatttctttccggcacattttatttacagcttctaaggactgggcctggagggaatttaggtgaggaagtcggggactgagaaagaagagatgacagagagaaaccggttaccagggatggaaaggcggctaggcccttccacaagccagggacaggaaattgagtgtctggcgtggacaggactaagtgtgcctgcggtgggcggtggtgtgagccgggggtggcagggaaggccctgggttgggaggctcttgcagcagagatccttttatgagggttagggcgggtcatggggaaaccgcaaggtaggagggaagaggtgcttctactcagcaatgcccttttcagttctagctgatcagtgctacctgtgctctggaaacccgctctgcgttcctgctggaggtggcctcccctccgccccagacaagaagaggccctcagccctcccccggtctcagagagccctgagaggaggcccagtccagagctcttcctccgttcccagtccacttctctagggccagtagcagacaccagccagtatgccgaggaaccagggcttctccgagcccgaatactcggccgagtactcagccgagtactccgtcagcctgccctccgaccctgaccgcggggtgggccggacccatgaaatctcggtccggaactcgggctcctgcctgtgcctgcctcgcttcatgcggctgactttcgtgccggagtccttggagaacctctaccagacctacttcaaaaggcagcgccacgagaccctgctggtgctggtggtctttgcagccctctttgactgctacgtggtggtcatgtgtgctgtggtcttctccagcgacaagctggcttccctcgccgtggctggaattggactggtgttggacatcatcctcttcgtgctctgcaaaaaggggctgctcccggaccgggtcacccgcagagtgctgccctacgtgctgtggctgctcataaccgcccagatcttctcctacctgggcctgaacttcgcgcgtgcccacgcggctagtgacacggtgggctggcaggtcttctttgtcttctccttcttcatcacgctgcccctcagcctcagccccatcgtgatcatctccgtggtctcctgtgtggtgcacacgttggtcctgggggtcaccgtggcccagcagcagcaggaggagctcaaggggatgcagctgctgcgggagatcctggccaacgtcttcctctacctgtgcgccatcgctgtgggcatcatgtcctactacatggctgaccgcaagcaccgcaaggccttcctggaggcccgccagtcgctggaggtgaagatgaacctggaagagcagagccagcagcaggagaacctcatgctttccatcctgcccaagcacgtggctgacgagatgctgaaagacatgaagaaagacgagagccagaaggaccagcagcagttcaacaccatgtacatgtaccgtcacgagaacgtcagcatcctctttgccgacatcgtgggctttacccagctgtcttctgcctgcagtgcccaggagcttgtgaagctgctcaacgagctctttgcccgctttgacaagctggcagctaaataccaccagctgcggattaagatcctgggcgactgctactactgcatctgcggcttgcccgactaccgggaggaccacgccgtctgctccatcctcatggggctggccatggtggaggccatctcgtatgtgcgggagaagaccaagactggggtggacatgcgtgtgggggtgcacacgggcaccgtgctggggggcgtcctgggccagaagcgctggcagtacgacgtgtggtcgactgatgtcactgtagccaacaagatggaggccggcggcatccctgggcgcgtgcacatctcccagagcaccatggactgcctgaaaggggagtttgatgtggagccaggcgatgggggcagccgctgtgattacctagaagagaagggtattgaaacctacctcatcattgcctccaagccagaggtgaagaaaacagccacccagaatggcctcaatggctcggccctgcccaatggagcaccagcttcctcaaagtccagctcccctgccctcattgagaccaaggagcccaacgggagtgcccacagcagtgggtccacgtcggagaagcccgaggagcaggatgcccaggccgacaacccctcattccccaacccacgccggaggctgcgcctgcaggacctggctgaccgagtggtggatgcctctgaagatgagcacgagctcaaccagctgctcaacgaggccctgcttgagcgagagtccgcccaagtagtaaagaagagaaacaccttcctcttgtccatgcggttcatggaccccgagatggaaacccgctactcggtggagaaggagaagcagagtggggctgccttcagctgctcctgcgtcgtcctgctctgcacggccctggtcgagatactcatcgacccctggctaatgacaaactatgtgaccttcatggtgggggagattctgctcctcatcctgaccatctgctccctggctgccatctttccccgggcctttcctaagaagcttgtggccttctcaacttggattgaccggacccgctgggccaggaacacctgggccatgctcgccatcttcatcctggtgatggcaaatgtcgtggacatgctcagctgtctccagtactacacgggacccagcaatgcaacggcagggatggaaacggagggcagctgcctggagaaccccaagtattacaactatgtggccgtgctgtccctcatcgccaccatcatgctggtgcaggtcagccacatggtgaagctcacgctcatgctgctcgtcgcaggcgccgtggccaccatcaacctctatgcctggcgtcccgtctttgatgaatacgaccacaagcgttttcgggagcacgacttacctatggtggccttagagcagatgcaaggattcaaccctgggctcaatggcactgacaggctgcccctggtgccttccaagtactctatgacggtgatggtgttcctcatgatgctcagcttctactacttctcccgccacgtagaaaaactggcacggacacttttcttgtggaagattgaggtccacgaccagaaggaacgtgtctatgagatgcgacgctggaacgaggccttggtcaccaacatgttgcctgagcacgtggcacgccatttcctggggtccaagaagagagatgaggagctgtatagccagacgtatgatgagattggagtcatgtttgcctccctgcccaactttgctgacttctacacagaggagagcatcaacaatggtggtattgagtgtctgcgtttcctcaatgaaatcatctcagattttgactctctcctggacaatcccaagttccgggtgatcaccaagatcaaaaccattggcagcacgtatatggcggcttcaggagtcacccccgatgtcaacaccaatggctttgccagctccaacaaggaagacaagtccgagagagagcgctggcagcacctggctgacctggccgacttcgcgctggccatgaaggatacgctcaccaacatcaacaaccagtccttcaataacttcatgctgcgcataggcatgaacaaaggcggggttctggctggggtcatcggagcccggaaaccacactacgacatctggggcaatacagtcaatgtagccagcaggatggagtccacgggggtcatgggcaacattcaggtggtagaagaaacccaagtcatcctccgagagtacggcttccgctttgtgaggcgaggccccatctttgtgaaggggaagggggagctgctgaccttcttcttgaaggggcgggataagctagccaccttccccaatggcccctctgtcacactgccccaccaggtggtggacaactcctgaatggcctcgagcctgcaacagtccaaaccggaagggagaatttattttttgaaactgaaggaagtcccgaccttcctggattgaagtgcacactcatggactttaggtttagaaacctcctcagccttcatttgttcgtggatgtgtgagctctgagggtggccctgctattcctgtgtgtgcctgtagtgtccccagcataggggtcttaggcatagggctgaacagtccttccagagccctcgttccaatccctgccgtccttgcccctgaggggccctgaccactgtgagcaggagggtggcagagctgggacaaagctgcctttgccgctgggctttccgggactgtggagggagcacaggcggggaagctccacttcagacagggcttggtggggcaggacatggctcccattttgaagggaggtctccatgtggtccgagtgaggtgagacggccctcgtcctggtgttcctgatcatcttgaaaggttcttctggaactcctgtccccttagtcatgagaacagaaagtgcaatatttcctttcacctggcaggggaggggggatttatttctgaaagaaaaatatataaacagatcttctacatttatatttttaatcttctgttaaatacactttccgatattgccttgccttttgagctcttgctacagtcgcctttgctactgctttaagagaatttacaggtattgataaagaacaagactgttttattaaaagctttattcaacttgaaa

SEQ ID NO: 105245 - DNA, 4397 bp, Homo sapiens
  Payload ID: 649
  Gene Symbol: ADCY3
  Gene Name: adenylate cyclase 3
  ENST ID: ENST00000405392
  CDS Start-End: 200-3637
agttctagctgatcagtgctacctgtgctctggaaacccgctctgcgttcctgctggaggtggcctcccctccgccccagacaagaagaggccctcagccctcccccggtctcagagagccctgagaggaggcccagtccagagctcttcctccgttcccagtccacttctctagggccagtagcagacaccagccagtatgccgaggaaccagggcttctccgagcccgaatactcggccgagtactcagccgagtactccgtcagcctgccctccgaccctgaccgcggggtgggccggacccatgaaatctcggtccggaactcgggctcctgcctgtgcctgcctcgcttcatgcggctgactttcgtgccggagtccttggagaacctctaccagacctacttcaaaaggcagcgccacgagaccctgctggtgctggtggtctttgcagccctctttgactgctacgtggtggtcatgtgtgctgtggtcttctccagcgacaagctggcttccctcgccgtggctggaattggactggtgttggacatcatcctcttcgtgctctgcaaaaaggggctgctcccggaccgggtcacccgcagagtgctgccctacgtgctgtggctgctcataaccgcccagatcttctcctacctgggcctgaacttcgcgcgtgcccacgcggctagtgacacggtgggctggcaggtcttctttgtcttctccttcttcatcacgctgcccctcagcctcagccccatcgtgatcatctccgtggtctcctgtgtggtgcacacgttggtcctgggggtcaccgtggcccagcagcagcaggaggagctcaaggggatgcagctgctgcgggagatcctggccaacgtcttcctctacctgtgcgccatcgctgtgggcatcatgtcctactacatggctgaccgcaagcaccgcaaggccttcctggaggcccgccagtcgctggaggtgaagatgaacctggaagagcagagccagcagcaggagaacctcatgctttccatcctgcccaagcacgtggctgacgagatgctgaaagacatgaagaaagacgagagccagaaggaccagcagcagttcaacaccatgtacatgtaccgtcacgagaacgtcagcatcctctttgccgacatcgtgggctttacccagctgtcttctgcctgcagtgcccaggagcttgtgaagctgctcaacgagctctttgcccgctttgacaagctggcagctaaataccaccagctgcggattaagatcctgggcgactgctactactgcatctgcggcttgcccgactaccgggaggaccacgccgtctgctccatcctcatggggctggccatggtggaggccatctcgtatgtgcgggagaagaccaagactggggtggacatgcgtgtgggggtgcacacgggcaccgtgctggggggcgtcctgggccagaagcgctggcagtacgacgtgtggtcgactgatgtcactgtagccaacaagatggaggccggcggcatccctgggcgcgtgcacatctcccagagcaccatggactgcctgaaaggggagtttgatgtggagccaggcgatgggggcagccgctgtgattacctagaagagaagggtattgaaacctacctcatcattgcctccaagccagaggtgaagaaaacagccacccagaatggcctcaatggctcggccctgcccaatggagcaccagcttcctcaaagtccagctcccctgccctcattgagaccaaggagcccaacgggagtgcccacagcagtgggtccacgtcggagaagcccgaggagcaggatgcccaggccgacaacccctcattccccaacccacgccggaggctgcgcctgcaggacctggctgaccgagtggtggatgcctctgaagatgagcacgagctcaaccagctgctcaacgaggccctgcttgagcgagagtccgcccaagtagtaaagaagagaaacaccttcctcttgtccatgcggttcatggaccccgagatggaaacccgctactcggtggagaaggagaagcagagtggggctgccttcagctgctcctgcgtcgtcctgctctgcacggccctggtcgagatactcatcgacccctggctaatgacaaactatgtgaccttcatggtgggggagattctgctcctcatcctgaccatctgctccctggctgccatctttccccgggcctttcctaagaagcttgtggccttctcaacttggattgaccggacccgctgggccaggaacacctgggccatgctcgccatcttcatcctggtgatggcaaatgtcgtggacatgctcagctgtctccagtactacacgggacccagcaatgcaacggcagggatggaaacggagggcagctgcctggagaaccccaagtattacaactatgtggccgtgctgtccctcatcgccaccatcatgctggtgcaggtcagccacatggtgaagctcacgctcatgctgctcgtcgcaggcgccgtggccaccatcaacctctatgcctggcgtcccgtctttgatgaatacgaccacaagcgttttcgggagcacgacttacctatggtggccttagagcagatgcaaggattcaaccctgggctcaatggcactgacagcaggctgcccctggtgccttccaagtactctatgacggtgatggtgttcctcatgatgctcagcttctactacttctcccgccacgtagaaaaactggcacggacacttttcttgtggaagattgaggtccacgaccagaaggaacgtgtctatgagatgcgacgctggaacgaggccttggtcaccaacatgttgcctgagcacgtggcacgccatttcctggggtccaagaagagagatgaggagctgtatagccagacgtatgatgagattggagtcatgtttgcctccctgcccaactttgctgacttctacacagaggagagcatcaacaatggtggtattgagtgtctgcgtttcctcaatgaaatcatctcagattttgactctctcctggacaatcccaagttccgggtgatcaccaagatcaaaaccattggcagcacgtatatggcggcttcaggagtcacccccgatgtcaacaccaatggctttgccagctccaacaaggaagacaagtccgagagagagcgctggcagcacctggctgacctggccgacttcgcgctggccatgaaggatacgctcaccaacatcaacaaccagtccttcaataacttcatgctgcgcataggcatgaacaaaggcggggttctggctggggtcatcggagcccggaaaccacactacgacatctggggcaatacagtcaatgtagccagcaggatggagtccacgggggtcatgggcaacattcaggtggtagaagaaacccaagtcatcctccgagagtacggcttccgctttgtgaggcgaggccccatctttgtgaaggggaagggggagctgctgaccttcttcttgaaggggcgggataagctagccaccttccccaatggcccctctgtcacactgccccaccaggtggtggacaactcctgaatggcctcgagcctgcaacagtccaaaccggaagggagaatttattttttgaaactgaaggaagtcccgaccttcctggattgaagtgcacactcatggactttaggtttagaaacctcctcagccttcatttgttcgtggatgtgtgagctctgagggtggccctgctattcctgtgtgtgcctgtagtgtccccagcataggggtcttaggcatagggctgaacagtccttccagagccctcgttccaatccctgccgtccttgcccctgaggggccctgaccactgtgagcaggagggtggcagagctgggacaaagctgcctttgccgctgggctttccgggactgtggagggagcacaggcggggaagctccacttcagacagggcttggtggggcaggacatggctcccattttgaagggaggtctccatgtggtccgagtgaggtgagacggccctcgtcctggtgttcctgatcatcttgaaaggttcttctggaactcctgtccccttagtcatgagaacagaaagtgcaatatttcctttcacctggcaggggaggggggatttatttctgaaagaaaaatatataaacagatcttctacatttatatttttaatcttctgttaaatacactttccgatattgccttgccttttgagctcttgctacagtcgcctttgctactgctttaagagaatttacaggtattgataaagaacaagactgttttattaaaagctttattcaacttg

SEQ ID NO: 105246 - DNA, 1801 bp, Homo sapiens
  Payload ID: 649
  Gene Symbol: ADCY3
  Gene Name: adenylate cyclase 3
  ENST ID: ENST00000435135
  CDS Start-End: 355-1801
cgggcctgacggcgggagatcgcgctccggccgggccccgaggcgctgccggggcggcgcggctctgcggggagcagccctcgggcgcgccgagctctcccgccccagcccgcgcggggaccgtcccggagcacgcggtggccgagttcccgcacagttctagctgatcagtgctacctgtgctctggaaacccgctctgcgttcctgctggaggtggcctcccctccgccccagacaagaagaggccctcagccctcccccggtctcagagagccctgagaggaggcccagtccagagctcttcctccgttcccagtccacttctctagggccagtagcagacaccagccagtatgccgaggaaccagggcttctccgagcccgaatactcggccgagtactcagccgagtactccgtcagcctgccctccgaccctgaccgcggggtgggccggacccatgaaatctcggtccggaactcgggctcctgcctgtgcctgcctcgcttcatgcggctgactttcgtgccggagtccttggagaacctctaccagacctacttcaaaaggcagcgccacgagaccctgctggtgctggtggtctttgcagccctctttgactgctacgtggtggtcatgtgtgctgtggtcttctccagcgacaagctggcttccctcgccgtggctggaattggactggtgttggacatcatcctcttcgtgctctgcaaaaaggggctgctcccggaccgggtcacccgcagagtgctgccctacgtgctgtggctgctcataaccgcccagatcttctcctacctgggcctgaacttcgcgcgtgcccacgcggctagtgacacggtgggctggcaggtcttctttgtcttctccttcttcatcacgctgcccctcagcctcagccccatcgtgatcatctccgtggtctcctgtgtggtgcacacgttggtcctgggggtcaccgtggcccagcagcagcaggaggagctcaaggggatgcagctgctgcgggaggagaacctcatgctttccatcctgcccaagcacgtggctgacgagatgctgaaagacatgaagaaagacgagagccagaaggaccagcagcagttcaacaccatgtacatgtaccgtcacgagaacgtcagcatcctctttgccgacatcgtgggctttacccagctgtcttctgcctgcagtgcccaggagcttgtgaagctgctcaacgagctctttgcccgctttgacaagctggcagctaaataccaccagctgcggattaagatcctgggcgactgctactactgcatctgcggcttgcccgactaccgggaggaccacgccgtctgctccatcctcatggggctggccatggtggaggccatctcgtatgtgcgggagaagaccaagactggggtggacatgcgtgtgggggtgcacacgggcaccgtgctggggggcgtcctgggccagaagcgctggcagtacgacgtgtggtcgactgatgtcactgtagccaacaagatggaggccggcggcatccctgggcgcgtgcacatctcccagagcaccatggactgcctgaaaggggagtttgatgtggagccaggcgatgggggcagccgctgtgattacctagaagagaagggtattgaaacctacctcatcattgcctccaagccagaggtgaagaaaacagccacccagaatggcctcaatggctcggccctgcccaatggagcaccagcttcctcaaagtccagctcccctgccctcattgagaccaagg

SEQ ID NO: 105247 - DNA, 894 bp, Homo sapiens
  Payload ID: 649
  Gene Symbol: ADCY3
  Gene Name: adenylate cyclase 3
  ENST ID: ENST00000427849
  CDS Start-End: 1-894
tgcgccatcgctgtgggcatcatgtcctactacatggctgaccgcaagcaccgcaaggccttcctggaggcccgccagtcgctggaggtgaagatgaacctggaagagcagagccagcagcagcacgtggctgacgagatgctgaaagacatgaagaaagacgagagccagaaggaccagcagcagttcaacaccatgtacatgtaccgtcacgagaacgtcagcatcctctttgccgacatcgtgggctttacccagctgtcttctgcctgcagtgcccaggagcttgtgaagctgctcaacgagctctttgcccgctttgacaagctggcagctaaataccaccagctgcggattaagatcctgggcgactgctactactgcatctgcggcttgcccgactaccgggaggaccacgccgtctgctccatcctcatggggctggccatggtggaggccatctcgtatgtgcgggagaagaccaagactggggtggacatgcgtgtgggggtgcacacgggcaccgtgctggggggcgtcctgggccagaagcgctggcagtacgacgtgtggtcgactgatgtcactgtagccaacaagatggaggccggcggcatccctgggcgcgtgcacatctcccagagcaccatggactgcctgaaaggggagtttgatgtggagccaggcgatgggggcagccgctgtgattacctagaagagaagggtattgaaacctacctcatcattgcctccaagccagaggtgaagaaaacagccacccagaatggcctcaatggctcggccctgcccaatggagcaccagcttcctcaaagtccagctcccctgccctcattgagaccaaggagcccaacgggagtgcccacagcagtggg

SEQ ID NO: 105248 - DNA, 561 bp, Homo sapiens
  Payload ID: 649
  Gene Symbol: ADCY3
  Gene Name: adenylate cyclase 3
  ENST ID: ENST00000433852
  CDS Start-End: 98-561
tgtcaccacagagcctgatcgtgctgtgcagtctaaaggggaccacggggcaagaagaggtgactttggtggtgtccagagcaggcttctcaacctcatgggtttgatcctggccaacgtcttcctctacctgtgcgccatcgctgtgggcatcatgtcctactacatggctgaccgcaagcaccgcaaggccttcctggaggcccgccagtcgctggaggtgaagatgaacctggaagagcagagccagcagcaggagaacctcatgctttccatcctgcccaagcacgtggctgacgagatgctgaaagacatgaagaaagacgagagccagaaggaccagcagcagttcaacaccatgtacatgtaccgtcacgagaacgtcagcatcctctttgccgacatcgtgggctttacccagctgtcttctgcctgcagtgcccaggagcttgtgaagctgctcaacgagctctttgcccgctttgacaagctggcagctaaataccaccagctgcggattaagatcctgggcgactgctactactgcatctgcggcttgcc

SEQ ID NO: 105249 - DNA, 595 bp, Homo sapiens
  Payload ID: 649
  Gene Symbol: ADCY3
  Gene Name: adenylate cyclase 3
  ENST ID: ENST00000455323
  CDS Start-End: 1-595
gtgaccttcatggtgggggagattctgctcctcatcctgaccatctgctccctggctgccatctttccccgggcctttcctaagaagcttgtggccttctcaacttggattgaccggacccgctgggccaggaacacctgggccatgctcgccatcttcatcctggtgatggcaaatgtcgtggacatgctcagctgtctccagtactacacgggacccagcaatgcaacggcagggatggaaacggagggcagctgcctggagaaccccaagtattacaactatgtggccgtgctgtccctcatcgccaccatcatgctggtgcaggtcagccacatggtgaagctcacgctcatgctgctcgtcgcaggcgccgtggccaccatcaacctctatgcctggcgtcccgtctttgatgaatacgaccacaagcgttttcgggagcacgacttacctatggtggccttagagcagatgcaaggattcaaccctgggctcaatggcactgacagcaggctgcccctggtgccttccaagtactctatgacggtgatggtgttcctcatgatgctcagcttctactacttctcccgcc

SEQ ID NO: 105250 - DNA, 572 bp, Homo sapiens
  Payload ID: 649
  Gene Symbol: ADCY3
  Gene Name: adenylate cyclase 3
  ENST ID: ENST00000438445
  CDS Start-End: 237-572
atttacagcttctaaggactgggcctggagggaatttagttctagctgatcagtgctacctgtgctctggaaacccgctctgcgttcctgctggaggtggcctcccctccgccccagacaagaagaggccctcagccctcccccggtctcagagagccctgagaggaggcccagtccagagctcttcctccgttcccagtccacttctctagggccagtagcagacaccagccagtatgccgaggaaccagggcttctccgagcccgaatactcggccgagtactcagccgagtactccgtcagcctgccctccgaccctgaccgcggggtgggccggacccatgaaatctcggtccggaactcgggctcctgcctgtgcctgcctcgcttcatgcggctgactttcgtgccggagtccttggagaacctctaccagacctacttcaaaaggcagcgccacgagaccctgctggtgctggtggtctttgcagccctctttgactgctacgtggtggtcatgtgtgctgtggtcttctccagcgacaagctggcttccctcgccgtggctgga

SEQ ID NO: 105251 - DNA, 3136 bp, Homo sapiens
  Payload ID: 649
  Gene Symbol: ADCY3
  Gene Name: adenylate cyclase 3
  ENST ID: ENST00000606682
  CDS Start-End: 1-2376
cagctgtcttctgcctgcagtgcccaggagcttgtgaagctgctcaacgagctctttgcccgctttgacaagctggcagctaaataccaccagctgcggattaagatcctgggcgactgctactactgcatctgcggcttgcccgactaccgggaggaccacgccgtctgctccatcctcatggggctggccatggtggaggccatctcgtatgtgcgggagaagaccaagactggggtggacatgcgtgtgggggtgcacacgggcaccgtgctggggggcgtcctgggccagaagcgctggcagtacgacgtgtggtcgactgatgtcactgtagccaacaagatggaggccggcggcatccctggcggatcaaagattgaagaaagattgtactcctgtgtcgtggctccaacactgaggctgagatgggagcgcgtgcacatctcccagagcaccatggactgcctgaaaggggagtttgatgtggagccaggcgatgggggcagccgctgtgattacctagaagagaagggtattgaaacctacctcatcattgcctccaagccagaggtgaagaaaacagccacccagaatggcctcaatggctcggccctgcccaatggagcaccagcttcctcaaagtccagctcccctgccctcattgagaccaaggagcccaacgggagtgcccacagcagtgggtccacgtcggagaagcccgaggagcaggatgcccaggccgacaacccctcattccccaacccacgccggaggctgcgcctgcaggacctggctgaccgagtggtggatgcctctgaagatgagcacgagctcaaccagctgctcaacgaggccctgcttgagcgagagtccgcccaagtagtaaagaagagaaacaccttcctcttgtccatgcggttcatggaccccgagatggaaacccgctactcggtggagaaggagaagcagagtggggctgccttcagctgctcctgcgtcgtcctgctctgcacggccctggtcgagatactcatcgacccctggctaatgacaaactatgtgaccttcatggtgggggagattctgctcctcatcctgaccatctgctccctggctgccatctttccccgggcctttcctaagaagcttgtggccttctcaacttggattgaccggacccgctgggccaggaacacctgggccatgctcgccatcttcatcctggtgatggcaaatgtcgtggacatggtcagccacatggtgaagctcacgctcatgctgctcgtcgcaggcgccgtggccaccatcaacctctatgcctggcgtcccgtctttgatgaatacgaccacaagcgttttcgggagcacgacttacctatggtggccttagagcagatgcaaggattcaaccctgggctcaatggcactgacaggctgcccctggtgccttccaagtactctatgacggtgatggtgttcctcatgatgctcagcttctactacttctcccgccacgtagaaaaactggcacggacacttttcttgtggaagattgaggtccacgaccagaaggaacgtgtctatgagatgcgacgctggaacgaggccttggtcaccaacatgttgcctgagcacgtggcacgccatttcctggggtccaagaagagagatgaggagctgtatagccagacgtatgatgagattggagtcatgtttgcctccctgcccaactttgctgacttctacacagaggagagcatcaacaatggtggtattgagtgtctgcgtttcctcaatgaaatcatctcagattttgactctctcctggacaatcccaagttccgggtgatcaccaagatcaaaaccattggcagcacgtatatggcggcttcaggagtcacccccgatgtcaacaccaatggctttgccagctccaacaaggaagacaagtccgagagagagcgctggcagcacctggctgacctggccgacttcgcgctggccatgaaggatacgctcaccaacatcaacaaccagtccttcaataacttcatgctgcgcataggcatgaacaaaggcggggttctggctggggtcatcggagcccggaaaccacactacgacatctggggcaatacagtcaatgtagccagcaggatggagtccacgggggtcatgggcaacattcaggtggtagaagaaacccaagtcatcctccgagagtacggcttccgctttgtgaggcgaggccccatctttgtgaaggggaagggggagctgctgaccttcttcttgaaggggcgggataagctagccaccttccccaatggcccctctgtcacactgccccaccaggtggtggacaactcctgaatggcctcgagcctgcaacagtccaaaccggaagggagaatttattttttgaaactgaaggaagtcccgaccttcctggattgaagtgcacactcatggactttaggtttagaaacctcctcagccttcatttgttcgtggatgtgtgagctctgagggtggccctgctattcctgtgtgtgcctgtagtgtccccagcataggggtcttaggcatagggctgaacagtccttccagagccctcgttccaatccctgccgtccttgcccctgaggggccctgaccactgtgagcaggagggtggcagagctgggacaaagctgcctttgccgctgggctttccgggactgtggagggagcacaggcggggaagctccacttcagacagggcttggtggggcaggacatggctcccattttgaagggaggtctccatgtggtccgagtgaggtgagacggccctcgtcctggtgttcctgatcatcttgaaaggttcttctggaactcctgtccccttagtcatgagaacagaaagtgcaatatttcctttcacctggcaggggaggggggatttatttctgaaagaaaaatatataaacagatcttctacatttatatttttaatcttctgttaaatacactttccgatattgccttgccttttgagctcttgctacagtcgcctttgctactgctttaagagaatttacaggtattgataaagaacaagactgttttattaaaagctttattcaacttg

SEQ ID NO: 105252 - DNA, 887 bp, Homo sapiens
  Payload ID: 649
  Gene Symbol: ADCY3
  Gene Name: adenylate cyclase 3
  ENST ID: ENST00000498288
  CDS Start-End: 1-148
ctacgacatctggggcaatacagtcaatgtagccagcaggatggagtccacgggggtcatgggcaacattcagtggcgtctggcagaaaagctccacgaaaggggcaaagggacagaagagcaggcagtggcagtttccaggtggtagaagaaacccaagtcatcctccgagagtacggcttccgctttgtgaggcgaggccccatctttgtgaaggggaagggggagctgctgaccttcttcttgaaggggcgggataagctagccaccttccccaatggcccctctgtcacactgccccaccaggtggtggacaactcctgaatggcctcgagcctgcaacagtccaaaccggaagggagaatttattttttgaaactgaaggaagtcccgaccttcctggattgaagtgcacactcatggactttaggtttagaaacctcctcagccttcatttgttcgtggatgtgtgagctctgagggtggccctgctattcctgtgtgtgcctgtagtgtccccagcataggggtcttaggcatagggctgaacagtccttccagagccctcgttccaatccctgccgtccttgcccctgaggggccctgaccactgtgagcaggagggtggcagagctgggacaaagctgcctttgccgctgggctttccgggactgtggagggagcacaggcggggaagctccacttcagacagggcttggtggggcaggacatggctcccattttgaagggaggtctccatgtggtccgagtgaggtgagacggccctcgtcctggtgttcctgatcatcttgaaaggttcttctggaactcctgtccccttagtcatgagaacagaaagtgcaatatttcctttcacctggcagggg

SEQ ID NO: 105253 - DNA, 3415 bp, Homo sapiens
  Payload ID: 650
  Gene Symbol: ADCY4
  Gene Name: adenylate cyclase 4
  Uniprot ID: Q8NFM4
  ENST ID: ENST00000310677
  CDS Start-End: 115-3348
agagcgcagcggcgagcgtgactccgccatcaggtccccggctccctccccggacctagcccactccgctgcgccagcgccgcgggcaccccggggctcggggctggggagatcatggcccgcctcttcagcccccggccgccccccagcgaagacctcttctacgagacctactacagcctgagccagcagtacccgctgctgctgctgctgctggggatcgtgctctgtgcgctcgcggcgctgctcgcagtggcctgggccagcggcagggagctgacctcagacccgagcttcctgaccactgtgctgtgcgcgctgggcggcttctcgctgctgctgggcctcgcttcccgggagcagcgactgcagcgctggacgcgtcccctgtccggcttggtatgggtcgcgctgctagcgctaggccacgccttcctgttcaccgggggcgtggtgagcgcctgggaccaggtgtcctattttctcttcgtcatcttcacggcgtatgccatgctgcccttgggcatgcgggacgccgccgtcgcgggcctcgcctcctcactctcgcatctgctggtcctcgggctgtatcttgggccacagccggactcacggcctgcactgctgccgcagttggcagcaaacgcagtgctgttcctgtgcgggaacgtggcaggagtgtaccacaaggcgctgatggagcgcgccctgcgggccacgttccgggaggcactcagctccctgcactcacgccggcggctggacaccgagaagaagcaccaggaacaccttctcttgtccatccttcctgcctacctggcccgagagatgaaggcagagatcatggcacggctgcaggcaggacaggggtcacggccagagagcactaacaatttccacagcctctatgtcaagaggcaccagggagtcagcgtgctgtatgctgacatcgtgggcttcacgcggctggccagcgagtgttcccctaaggagctggtgctcatgctcaatgagctctttggcaagttcgaccagattgccaaggagcatgaatgcatgcggatcaagatcctgggggactgttactactgtgtctctgggctgccactctcactgccagaccatgccatcaactgcgtgcgcatgggcctggacatgtgccgggccatcaggaaactgcgggcagccactggcgtggacatcaacatgcgtgtgggcgtgcactcaggcagcgtactgtgtggagtcatcgggctgcagaagtggcagtacgacgtttggtcacatgatgtcacactggctaaccacatggaggcaggcggtgtaccagggcgagtgcacatcacaggggctaccctggccctgctggcaggggcttatgctgtggaggacgcaggcatggagcatcgggacccctaccttcgggagctaggggagcctacctatctggtcatcgatccacgggcagaggaggaggatgagaagggcactgcaggaggcttgctgtcctcgcttgagggcctcaagatgcgtccatcactgctgatgacccgttacctggagtcctggggcgcagccaagccttttgcccacctgagccacggagacagccctgtgtccacctccacccctctcccggagaagaccctggcttccttcagcacccagtggagcctggatcggagccgtaccccccggggactagatgatgaactggacaccggggatgccaagttcttccaggtcattgagcagctcaactcgcagaaacagtggaagcagtcgaaggacttcaacccactgacactgtacttcagagagaaggagatggagaaagagtaccgactctctgcaatccccgccttcaaatactatgaagcctgcaccttcctggtttttctctccaacttcatcatccagatgctagtgacaaacaggcccccagctctggccatcacgtatagcatcaccttcctcctcttcctcctcatcctttttgtctgcttctcagaggacctgatgaggtgtgtcctgaaaggccccaagatgctgcactggctgcctgcactgtctggcctggtggccacacgaccaggactgagaatagccttgggcaccgccaccatcctccttgtctttgccatggccattaccagcctgttcttcttcccaacatcatcagactgccctttccaagctcccaatgtgtcctccatgatttccaacctctcctgggagctccctgggtctctgcctctcatcagtgtcccatactccatgcactgctgcacgctgggcttcctctcctgctccctctttctgcacatgagcttcgagctgaagctgctgctgctcctgctgtggctggcggcatcctgctccctcttcctgcactcccatgcctggctgtcggaatgcctcatcgtccgcctctatctgggccccttggactccaggcccggagtgctgaaggagcccaaactgatgggtgctatctccttcttcatcttcttcttcaccctccttgtcctggctcgccagaatgagtactactgccgcctggacttcctgtggaagaagaagctgaggcaggagagggaggagacagagacgatggagaacctgactcggctgctcttggagaacgtgctccctgcacacgtggccccccagttcattggccagaaccggcgcaacgaggatctctaccaccagtcctatgaatgcgtttgtgtcctcttcgcctcagtcccagacttcaaggagttctactctgaatccaacatcaatcatgagggcctagagtgtctgaggctgctcaatgagataattgctgattttgatgagctgctctccaagcccaagttcagtggggtggagaagatcaagaccatcggcagcacctacatggcagccacaggcttaaatgccacctctggacaggatgcacaacaggatgctgaacggagctgcagccaccttggcactatggtggaatttgccgtggccctggggtctaagctggacgtcatcaacaagcattcattcaacaacttccgcctgcgagtggggttgaaccatggacccgtagtagctggagttattggggcccagaagccgcaatatgacatttggggcaacacagtgaacgtggccagccgcatggagagtacaggagtccttggcaaaatccaagtgactgaggagacagcatgggccctacagtccctgggctacacctgctacagccggggtgtcatcaaggtgaaaggcaaagggcagctctgcacctacttcctgaacacagacttgacacgaactggacctccttcagctaccctaggctgagattgcactcgccttctaagaacctcaataaagagactctggggtgtctggagcccattgatgtctg

SEQ ID NO: 105254 - DNA, 3353 bp, Homo sapiens
  Payload ID: 650
  Gene Symbol: ADCY4
  Gene Name: adenylate cyclase 4
  Uniprot ID: Q8NFM4
  ENST ID: ENST00000418030
  CDS Start-End: 96-3329
gcgggtgagaaaagctcaggtggggcccgccgggccgaaggaggtaacccggcgcccggccctagccagccccggggctcggggctggggagatcatggcccgcctcttcagcccccggccgccccccagcgaagacctcttctacgagacctactacagcctgagccagcagtacccgctgctgctgctgctgctggggatcgtgctctgtgcgctcgcggcgctgctcgcagtggcctgggccagcggcagggagctgacctcagacccgagcttcctgaccactgtgctgtgcgcgctgggcggcttctcgctgctgctgggcctcgcttcccgggagcagcgactgcagcgctggacgcgtcccctgtccggcttggtatgggtcgcgctgctagcgctaggccacgccttcctgttcaccgggggcgtggtgagcgcctgggaccaggtgtcctattttctcttcgtcatcttcacggcgtatgccatgctgcccttgggcatgcgggacgccgccgtcgcgggcctcgcctcctcactctcgcatctgctggtcctcgggctgtatcttgggccacagccggactcacggcctgcactgctgccgcagttggcagcaaacgcagtgctgttcctgtgcgggaacgtggcaggagtgtaccacaaggcgctgatggagcgcgccctgcgggccacgttccgggaggcactcagctccctgcactcacgccggcggctggacaccgagaagaagcaccaggaacaccttctcttgtccatccttcctgcctacctggcccgagagatgaaggcagagatcatggcacggctgcaggcaggacaggggtcacggccagagagcactaacaatttccacagcctctatgtcaagaggcaccagggagtcagcgtgctgtatgctgacatcgtgggcttcacgcggctggccagcgagtgttcccctaaggagctggtgctcatgctcaatgagctctttggcaagttcgaccagattgccaaggagcatgaatgcatgcggatcaagatcctgggggactgttactactgtgtctctgggctgccactctcactgccagaccatgccatcaactgcgtgcgcatgggcctggacatgtgccgggccatcaggaaactgcgggcagccactggcgtggacatcaacatgcgtgtgggcgtgcactcaggcagcgtactgtgtggagtcatcgggctgcagaagtggcagtacgacgtttggtcacatgatgtcacactggctaaccacatggaggcaggcggtgtaccagggcgagtgcacatcacaggggctaccctggccctgctggcaggggcttatgctgtggaggacgcaggcatggagcatcgggacccctaccttcgggagctaggggagcctacctatctggtcatcgatccacgggcagaggaggaggatgagaagggcactgcaggaggcttgctgtcctcgcttgagggcctcaagatgcgtccatcactgctgatgacccgttacctggagtcctggggcgcagccaagccttttgcccacctgagccacggagacagccctgtgtccacctccacccctctcccggagaagaccctggcttccttcagcacccagtggagcctggatcggagccgtaccccccggggactagatgatgaactggacaccggggatgccaagttcttccaggtcattgagcagctcaactcgcagaaacagtggaagcagtcgaaggacttcaacccactgacactgtacttcagagagaaggagatggagaaagagtaccgactctctgcaatccccgccttcaaatactatgaagcctgcaccttcctggtttttctctccaacttcatcatccagatgctagtgacaaacaggcccccagctctggccatcacgtatagcatcaccttcctcctcttcctcctcatcctttttgtctgcttctcagaggacctgatgaggtgtgtcctgaaaggccccaagatgctgcactggctgcctgcactgtctggcctggtggccacacgaccaggactgagaatagccttgggcaccgccaccatcctccttgtctttgccatggccattaccagcctgttcttcttcccaacatcatcagactgccctttccaagctcccaatgtgtcctccatgatttccaacctctcctgggagctccctgggtctctgcctctcatcagtgtcccatactccatgcactgctgcacgctgggcttcctctcctgctccctctttctgcacatgagcttcgagctgaagctgctgctgctcctgctgtggctggcggcatcctgctccctcttcctgcactcccatgcctggctgtcggaatgcctcatcgtccgcctctatctgggccccttggactccaggcccggagtgctgaaggagcccaaactgatgggtgctatctccttcttcatcttcttcttcaccctccttgtcctggctcgccagaatgagtactactgccgcctggacttcctgtggaagaagaagctgaggcaggagagggaggagacagagacgatggagaacctgactcggctgctcttggagaacgtgctccctgcacacgtggccccccagttcattggccagaaccggcgcaacgaggatctctaccaccagtcctatgaatgcgtttgtgtcctcttcgcctcagtcccagacttcaaggagttctactctgaatccaacatcaatcatgagggcctagagtgtctgaggctgctcaatgagataattgctgattttgatgagctgctctccaagcccaagttcagtggggtggagaagatcaagaccatcggcagcacctacatggcagccacaggcttaaatgccacctctggacaggatgcacaacaggatgctgaacggagctgcagccaccttggcactatggtggaatttgccgtggccctggggtctaagctggacgtcatcaacaagcattcattcaacaacttccgcctgcgagtggggttgaaccatggacccgtagtagctggagttattggggcccagaagccgcaatatgacatttggggcaacacagtgaacgtggccagccgcatggagagtacaggagtccttggcaaaatccaagtgactgaggagacagcatgggccctacagtccctgggctacacctgctacagccggggtgtcatcaaggtgaaaggcaaagggcagctctgcacctacttcctgaacacagacttgacacgaactggacctccttcagctaccctaggctgagattgcactcgccttctaagaacc

SEQ ID NO: 105255 - DNA, 3385 bp, Homo sapiens
  Payload ID: 650
  Gene Symbol: ADCY4
  Gene Name: adenylate cyclase 4
  ENST ID: ENST00000554781
  CDS Start-End: 96-1445
gcgggtgagaaaagctcaggtggggcccgccgggccgaaggaggtaacccggcgcccggccctagccagccccggggctcggggctggggagatcatggcccgcctcttcagcccccggccgccccccagcgaagacctcttctacgagacctactacagcctgagccagcagtacccgctgctgctgctgctgctggggatcgtgctctgtgcgctcgcggcgctgctcgcagtggcctgggccagcggcagggagctgacctcagacccgagcttcctgaccactgtgctgtgcgcgctgggcggcttctcgctgctgctgggcctcgcttcccgggagcagcgactgcagcgctggacgcgtcccctgtccggcttggtatgggtcgcgctgctagcgctaggccacgccttcctgttcaccgggggcgtggtgagcgcctgggaccaggtgtcctattttctcttcgtcatcttcacggcgtatgccatgctgcccttgggcatgcgggacgccgccgtcgcgggcctcgcctcctcactctcgcatctgctggtcctcgggctgtatcttgggccacagccggactcacggcctgcactgctgccgcagttggcagcaaacgcagtgctgttcctgtgcgggaacgtggcaggagtgtaccacaaggcgctgatggagcgcgccctgcgggccacgttccgggaggcactcagctccctgcactcacgccggcggctggacaccgagaagaagcaccaggaacaccttctcttgtccatccttcctgcctacctggcccgagagatgaaggcagagatcatggcacggctgcaggcaggacaggggtcacggccagagagcactaacaatttccacagcctctatgtcaagaggcaccagggagtcagcgtgctgtatgctgacatcgtgggcttcacgcggctggccagcgagtgttcccctaaggagctggtgctcatgctcaatgagctctttggcaagttcgaccagattgccaaggttcctctgcacacccacatacacactcccaggagcatgaatgcatgcggatcaagatcctgggggactgttactactgtgtctctgggctgccactctcactgccagaccatgccatcaactgcgtgcgcatgggcctggacatgtgccgggccatcaggaaactgcgggcagccactggcgtggacatcaacatgcgtgtgggcgtgcactcaggcagcgtactgtgtggagtcatcgggctgcagaagtggcagtacgacgtttggtcacatgatgtcacactggctaaccacatggaggcaggcggtgtaccagggcgagtgcacatcacaggggctaccctggccctgctggcaggggcttatgctgtggaggacgcaggcatggagcatcgggacccctaccttcgggagctaggggagcctacctatctggtcatcgatccacgggcagaggaggaggatgagaagggcactgcaggaggcttgctgtcctcgcttgagggcctcaagatgcgtccatcactgctgatgacccgttacctggagtcctggggcgcagccaagccttttgcccacctgagccacggagacagccctgtgtccacctccacccctctcccggagaagaccctggcttccttcagcacccagtggagcctggatcggagccgtaccccccggggactagatgatgaactggacaccggggatgccaagttcttccaggtcattgagcagctcaactcgcagaaacagtggaagcagtcgaaggacttcaacccactgacactgtacttcagagagaaggagatggagaaagagtaccgactctctgcaatccccgccttcaaatactatgaagcctgcaccttcctggtttttctctccaacttcatcatccagatgctagtgacaaacaggcccccagctctggccatcacgtatagcatcaccttcctcctcttcctcctcatcctttttgtctgcttctcagaggacctgatgaggtgtgtcctgaaaggccccaagatgctgcactggctgcctgcactgtctggcctggtggccacacgaccaggactgagaatagccttgggcaccgccaccatcctccttgtctttgccatggccattaccagcctgttcttcttcccaacatcatcagactgccctttccaagctcccaatgtgtcctccatgatttccaacctctcctgggagctccctgggtctctgcctctcatcagtgtcccatactccatgcactgctgcacgctgggcttcctctcctgctccctctttctgcacatgagcttcgagctgaagctgctgctgctcctgctgtggctggcggcatcctgctccctcttcctgcactcccatgcctggctgtcggaatgcctcatcgtccgcctctatctgggccccttggactccaggcccggagtgctgaaggagcccaaactgatgggtgctatctccttcttcatcttcttcttcaccctccttgtcctggctcgccagaatgagtactactgccgcctggacttcctgtggaagaagaagctgaggcaggagagggaggagacagagacgatggagaacctgactcggctgctcttggagaacgtgctccctgcacacgtggccccccagttcattggccagaaccggcgcaacgaggatctctaccaccagtcctatgaatgcgtttgtgtcctcttcgcctcagtcccagacttcaaggagttctactctgaatccaacatcaatcatgagggcctagagtgtctgaggctgctcaatgagataattgctgattttgatgagctgctctccaagcccaagttcagtggggtggagaagatcaagaccatcggcagcacctacatggcagccacaggcttaaatgccacctctggacaggatgcacaacaggatgctgaacggagctgcagccaccttggcactatggtggaatttgccgtggccctggggtctaagctggacgtcatcaacaagcattcattcaacaacttccgcctgcgagtggggttgaaccatggacccgtagtagctggagttattggggcccagaagccgcaatatgacatttggggcaacacagtgaacgtggccagccgcatggagagtacaggagtccttggcaaaatccaagtgactgaggagacagcatgggccctacagtccctgggctacacctgctacagccggggtgtcatcaaggtgaaaggcaaagggcagctctgcacctacttcctgaacacagacttgacacgaactggacctccttcagctaccctaggctgagattgcactcgccttctaagaacc

SEQ ID NO: 105256 - DNA, 3990 bp, Homo sapiens
  Payload ID: 650
  Gene Symbol: ADCY4
  Gene Name: adenylate cyclase 4
  ENST ID: ENST00000557056
  CDS Start-End: 365-1015
agagcgcagcggcgagcgtgactccgccatcaggtccccggctccctccccggacctagcccactccgctgcgccagcgccgcgggcagagctgacctcagacccgagcttcctgaccactgtgctgtgcgcgctgggcggcttctcgctgctgctgggcctcgcttcccgggagcagcgactgcagcgctggacgcgtcccctgtccggcttggtatgggtcgcgctgctagcgctaggccacgccttcctgttcaccgggggcgtggtgagcgcctgggaccagccccacttgggccttcggcttcccgcgccccgcccccaggtgtcctattttctcttcgtcatcttcacggcgtatgccatgctgcccttgggcatgcgggacgccgccgtcgcgggcctcgcctcctcactctcgcatctgctggtcctcgggctgtatcttgggccacagccggactcacggcctgcactgctgccgcagttggcagcaaacgcagtgctgttcctgtgcgggaacgtggcaggagtgtaccacaaggcgctgatggagcgcgccctgcgggccacgttccgggaggcactcagctccctgcactcacgccggcggctggacaccgagaagaagcaccaggaacaccttctcttgtccatccttcctgcctacctggcccgagagatgaaggcagagatcatggcacggctgcaggcaggacaggggtcacggccagagagcactaacaatttccacagcctctatgtcaagaggcaccagggagtcagcgtgctgtatgctgacatcgtgggcttcacgcggctggccagcgagtgttcccctaaggagctggtgctcatgctcaatgagctctttggcaagttcgaccagattgccaaggaaactgcgggcagccactggcgtggacatcaacatgcgtgtgggcgtgcactcaggcagcgtactgtgtggagtcatcgggctgcagaagtggcagtacgacgtttggtcacatgatgtcacactggctaaccacatggaggcaggcggtgtaccagggcgagtgcacatcacaggggctaccctggccctgctggcaggggcttatgctgtggaggacgcaggcatggagcatcgggacccctaccttcgggagctaggggagcctacctatctggtcatcgatccacgggcagaggaggaggatgagaagggcactgcaggaggcttgctgtcctcgcttgagggcctcaagatgcgtccatcactgctgatgacccgttacctggagtcctggggcgcagccaagccttttgcccacctgagccacggagacagccctgtgtccacctccacccctctcccggagaagaccctggcttccttcagcacccagtggagcctggatcggagccgtaccccccggggactagatgatgaactggacaccggggatgccaagttcttccaggtcattgagcagctcaactcgcagaaacagtggaagcagtcgaaggacttcaacccactgacactgtacttcagagagaaggagatggagaaagagtaccgactctctgcaatccccgccttcaaatactatgaagcctgcaccttcctggtttttctctccaacttcatcatccagatgctagtgacaaacaggcccccagctctggccatcacgtatagcatcaccttcctcctcttcctcctcatcctttttgtctgcttctcagaggacctgatgaggtgtgtcctgaaaggccccaagatgctgcactggctgcctgcactgtctggcctggtggccacacgaccaggactgagaatagccttgggcaccgccaccatcctccttgtctttgccatggccattaccagcctgttcttcttcccaacatcatcagactgccctttccaagctcccaatgtgtcctccatgatttccaacctctcctgggagctccctgggtctctgcctctcatcagtgtcccagtgagtgttcccacatgcccttaatctccttctgcacacccttcctcagcccaagcccacagccccctgagtggaggaacgctccattctgtggattagaacagacataagtcacacccagtgtgtatcagtgtgtatgatgccccctgtctcccagataggacctgggcctgggagggacaggaagggagccctcaggtgtcccccctctgcctatgggacatgcccactcctgacccctgcctggccccacagtactccatgcactgctgcacgctgggcttcctctcctgctccctctttctgcacatgagcttcgagctgaagctgctgctgctcctgctgtggctggcggcatcctgctccctcttcctgcactcccatgcctggctgtcggaatgcctcatcgtccgcctctatctgggccccttggactccaggtgtgcacagctgctggacagaggtgccgggccccctgggatggggtgagatgggatacagcagagctgtcctggcctcaccgacctgaatcacccacagggcaaagtgggagggaagcggaggcctacatgggggcagggagaaggccaggaagggggaaagcaaggggtcaccctgatccatggccccttcaggcccggagtgctgaaggagcccaaactgatgggtgctatctccttcttcatcttcttcttcaccctccttgtcctggctcgccaggtaagtcacccagctcagccccaccagggcccacctatgagtggcccccatatctgtgacttgatctttctaatctccagggttgaatgcccattggaagcttctaagcgagccttcctgcttcctttcttctccttcactccctgcccctcctttctcccacacccctatctgggaaagcccatgctttagaaaaagtctgctgccaattctctatccctagtctgaatctaatttcaaggatagtctctctccaagtatacttacaccttaagctctacttctaaactgggggtggggtgggggtggtttcaggcatcatggagttggggctgaacactcaggagctgggcttcccctgctctgtgtctccccatggccccgggtgaccctccccagaatgagtactactgccgcctggacttcctgtggaagaagaagctgaggcaggagagggaggagacagagacgatggagaacctgactcggctgctcttggagaacgtgctccctgcacacgtggccccccagttcattggccagaaccggcgcaacgaggatctctaccaccagtcctatgaatgcgtttgtgtcctcttcgcctcagtcccagacttcaaggagttctactctgaatccaacatcaatcatgagggcctagagtgtctgaggctgctcaatgagataattgctgattttgatgagctgctctccaagcccaagttcagtggggtggagaagatcaagaccatcggcagcacctacatggcagccacaggcttaaatgccacctctggacaggatgcacaacaggatgctgaacggagctgcagccaccttggcactatggtggaatttgccgtggccctggggtctaagctggacgtcatcaacaagcattcattcaacaacttccgcctgcgagtggggttgaaccatggacccgtagtagctggagttattggggcccagaagccgcaatatgacatttggggcaacacagtgaacgtggccagccgcatggagagtacaggagtccttggcaaaatccaagtgactgaggagacagcatgggccctacagtccctgggctacacctgctacagccggggtgtcatcaaggtgaaaggcaaagggcagctctgcacctacttcctgaacacagacttgacacgaactggacctccttcagctaccctaggctgagattgcactcgccttctaagaacctcaataaagagactctggggtgtctggagcccattgatgtctg

SEQ ID NO: 105257 - DNA, 411 bp, Homo sapiens
  Payload ID: 650
  Gene Symbol: ADCY4
  Gene Name: adenylate cyclase 4
  ENST ID: ENST00000556932
  CDS Start-End: 1-411
gcatggagcatcgggacccctaccttcgggagctaggggagcctacctatctggtcatcgatccacgggcagaggaggaggatgagaagggcactgcaggaggcttgctgtcctcgcttgagggcctcaagatgcgtccatcactgctgatgacccgttacctggagtcctggggcgcagccaagccttttgcccacctgagccacggagacagccctgtgtccacctccacccctctcccggagaagaccctggcttccttcagcacccagtggagcctggatcggagccgtaccccccggggactagatgatgaactggacaccggggatgccaagttcttccagacagtggaagcagtcgaaggacttcaacccactgacactgtacttcagagagaaggagatggag

SEQ ID NO: 105258 - DNA, 3404 bp, Homo sapiens
  Payload ID: 650
  Gene Symbol: ADCY4
  Gene Name: adenylate cyclase 4
  Uniprot ID: Q8NFM4
  ENST ID: ENST00000554068
  CDS Start-End: 119-3352
agagcgcagcggcgagcgtgactccgccatcaggtccccggctccctccccggacctagcccactccgctgcgccagcgccgcgggcaccagccccggggctcggggctggggagatcatggcccgcctcttcagcccccggccgccccccagcgaagacctcttctacgagacctactacagcctgagccagcagtacccgctgctgctgctgctgctggggatcgtgctctgtgcgctcgcggcgctgctcgcagtggcctgggccagcggcagggagctgacctcagacccgagcttcctgaccactgtgctgtgcgcgctgggcggcttctcgctgctgctgggcctcgcttcccgggagcagcgactgcagcgctggacgcgtcccctgtccggcttggtatgggtcgcgctgctagcgctaggccacgccttcctgttcaccgggggcgtggtgagcgcctgggaccaggtgtcctattttctcttcgtcatcttcacggcgtatgccatgctgcccttgggcatgcgggacgccgccgtcgcgggcctcgcctcctcactctcgcatctgctggtcctcgggctgtatcttgggccacagccggactcacggcctgcactgctgccgcagttggcagcaaacgcagtgctgttcctgtgcgggaacgtggcaggagtgtaccacaaggcgctgatggagcgcgccctgcgggccacgttccgggaggcactcagctccctgcactcacgccggcggctggacaccgagaagaagcaccaggaacaccttctcttgtccatccttcctgcctacctggcccgagagatgaaggcagagatcatggcacggctgcaggcaggacaggggtcacggccagagagcactaacaatttccacagcctctatgtcaagaggcaccagggagtcagcgtgctgtatgctgacatcgtgggcttcacgcggctggccagcgagtgttcccctaaggagctggtgctcatgctcaatgagctctttggcaagttcgaccagattgccaaggagcatgaatgcatgcggatcaagatcctgggggactgttactactgtgtctctgggctgccactctcactgccagaccatgccatcaactgcgtgcgcatgggcctggacatgtgccgggccatcaggaaactgcgggcagccactggcgtggacatcaacatgcgtgtgggcgtgcactcaggcagcgtactgtgtggagtcatcgggctgcagaagtggcagtacgacgtttggtcacatgatgtcacactggctaaccacatggaggcaggcggtgtaccagggcgagtgcacatcacaggggctaccctggccctgctggcaggggcttatgctgtggaggacgcaggcatggagcatcgggacccctaccttcgggagctaggggagcctacctatctggtcatcgatccacgggcagaggaggaggatgagaagggcactgcaggaggcttgctgtcctcgcttgagggcctcaagatgcgtccatcactgctgatgacccgttacctggagtcctggggcgcagccaagccttttgcccacctgagccacggagacagccctgtgtccacctccacccctctcccggagaagaccctggcttccttcagcacccagtggagcctggatcggagccgtaccccccggggactagatgatgaactggacaccggggatgccaagttcttccaggtcattgagcagctcaactcgcagaaacagtggaagcagtcgaaggacttcaacccactgacactgtacttcagagagaaggagatggagaaagagtaccgactctctgcaatccccgccttcaaatactatgaagcctgcaccttcctggtttttctctccaacttcatcatccagatgctagtgacaaacaggcccccagctctggccatcacgtatagcatcaccttcctcctcttcctcctcatcctttttgtctgcttctcagaggacctgatgaggtgtgtcctgaaaggccccaagatgctgcactggctgcctgcactgtctggcctggtggccacacgaccaggactgagaatagccttgggcaccgccaccatcctccttgtctttgccatggccattaccagcctgttcttcttcccaacatcatcagactgccctttccaagctcccaatgtgtcctccatgatttccaacctctcctgggagctccctgggtctctgcctctcatcagtgtcccatactccatgcactgctgcacgctgggcttcctctcctgctccctctttctgcacatgagcttcgagctgaagctgctgctgctcctgctgtggctggcggcatcctgctccctcttcctgcactcccatgcctggctgtcggaatgcctcatcgtccgcctctatctgggccccttggactccaggcccggagtgctgaaggagcccaaactgatgggtgctatctccttcttcatcttcttcttcaccctccttgtcctggctcgccagaatgagtactactgccgcctggacttcctgtggaagaagaagctgaggcaggagagggaggagacagagacgatggagaacctgactcggctgctcttggagaacgtgctccctgcacacgtggccccccagttcattggccagaaccggcgcaacgaggatctctaccaccagtcctatgaatgcgtttgtgtcctcttcgcctcagtcccagacttcaaggagttctactctgaatccaacatcaatcatgagggcctagagtgtctgaggctgctcaatgagataattgctgattttgatgagctgctctccaagcccaagttcagtggggtggagaagatcaagaccatcggcagcacctacatggcagccacaggcttaaatgccacctctggacaggatgcacaacaggatgctgaacggagctgcagccaccttggcactatggtggaatttgccgtggccctggggtctaagctggacgtcatcaacaagcattcattcaacaacttccgcctgcgagtggggttgaaccatggacccgtagtagctggagttattggggcccagaagccgcaatatgacatttggggcaacacagtgaacgtggccagccgcatggagagtacaggagtccttggcaaaatccaagtgactgaggagacagcatgggccctacagtccctgggctacacctgctacagccggggtgtcatcaaggtgaaaggcaaagggcagctctgcacctacttcctgaacacagacttgacacgaactggacctccttcagctaccctaggctgagattgcactcgccttctaagaacctcaataaagagactctggggtgtctgga

SEQ ID NO: 105259 - DNA, 575 bp, Homo sapiens
  Payload ID: 650
  Gene Symbol: ADCY4
  Gene Name: adenylate cyclase 4
  ENST ID: ENST00000559167
  CDS Start-End: 468-575
agagcgcagcggcgagcgtgactccgccatcaggtccccggctccctccccggacctagcccactccgctgcgccagcgccgcgggcacccccggccgccccccagcgaagacctcttctacgagacctactacagcctgagccagcagtacccgctgctgctgctgctgctggggatcgtgctctgtgcgctcgcggcgctgctcgcagtggcctgggccagcggcagggagctgacctcagacccgagcttcctgaccactgtgctgtgcgcgctgggcggcttctcgctgctgctgggcctcgcttcccgggagcagcgactgcagcgctggacgcgtcccctgtccggcttggtatgggtcgcgctgctagcgctaggccacgccttcctgttcaccgggggcgtggtgagcgcctgggaccaggtgtcctattttctcttcgtcatcttcacggcgtatgccatgctgcccttgggcatgcgggacgccgccgtcgcgggcctcgcctcctcactctcgcatctgctggtcctcgggctgtatcttgggccacagccggactcacggcct

SEQ ID NO: 105260 - DNA, 559 bp, Homo sapiens
  Payload ID: 650
  Gene Symbol: ADCY4
  Gene Name: adenylate cyclase 4
  ENST ID: ENST00000561138
  CDS Start-End: 214-559
agagcgcagcggcgagcgtgactccgccatcaggtccccggctccctccccggacctagcccactccgctgcgccagcgccgcgggcagtgagttcggggatcaggggaacccggggctccctcgcaccaaccccaaatcctgccctcctggcgatgaggcttttctagggcacctctacaatccggccccggggctcggggctggggagatcatggcccgcctcttcagcccccggccgccccccagcgaagacctcttctacgagacctactacagcctgagccagcagtacccgctgctgctgctgctgctggggatcgtgctctgtgcgctcgcggcgctgctcgcagtggcctgggccagcggcagggagctgacctcagacccgagcttcctgaccactgtgctgtgcgcgctgggcggcttctcgctgctgctgggcctcgcttcccgggagcagcgactgcagcgctggacgcgtcccctgtccggcttggtatgggtcgcgctgctagcgctaggccacgccttcctgttcaccgggggcgtggtgagcg

SEQ ID NO: 105261 - DNA, 2841 bp, Homo sapiens
  Payload ID: 651
  Gene Symbol: ADCY5
  Gene Name: adenylate cyclase 5
  Uniprot ID: O95622
  ENST ID: ENST00000309879
  CDS Start-End: 76-2811
tataaatgtcctagggaaggaggttattgcctttagcccctttttggggaagcgtctggaagtaagtcctgaggaatgaagtctcagaaagagggctgttgcagcagaggtgacctgtccattcagacaggtcctggaggagaatgggccccacggaggcttgtctccaatgttctcattttctcctgcaccaacatcgtgggtgtctgcacccactatccggctgaggtctcccagagacaggctttccaggagacccgagagtgcatccaggcgcggctccactcgcagcgggagaaccagcagcaggaacggctcctgctgtctgtccttccccgtcatgttgccatggagatgaaagcagacatcaacgccaagcaggaggatatgatgttccataagatttacatccagaaacatgacaacgtgagcatcctgtttgctgacatcgagggcttcaccagcctggcgtcccagtgcactgcacaggaactggtcatgaccctcaacgagctcttcgcccgctttgacaagctggccgcagagaatcactgtttacgtattaagatccttggggattgttattactgcgtctcggggctgcctgaagcaagggctgaccacgcccactgctgtgtggagatgggcatggacatgatcgaggccatctcgttggtccgggaggtgacaggggtgaacgtgaacatgcgtgtgggaattcacagcgggcgagtacactgcggtgtccttggtctcaggaagtggcagttcgacgtctggtctaacgatgtcacgctagccaaccacatggaggctggcggcaaggcaggacgcatccacatcaccaaggctacactcaactacctgaatggggactacgaggtggagccaggctgtgggggcgagcgcaacgcctacctcaaggagcacagtatcgagaccttcctcatcctgcgctgcacccagaagcggaaagaagagaaggccatgatcgccaagatgaaccgccagagaaccaactccatcgggcacaacccaccacactggggggctgagcgccccttctacaaccacctgggtggcaaccaggtgtccaaggagatgaagcggatgggctttgaagaccccaaggacaagaacgcccaggagagtgcgaaccctgaggatgaagtggatgagtttctgggccgtgccattgacgccaggagcattgataggcttcggtctgagcacgtccgcaagttcctcctgaccttcagggagcctgacttagagaagaagtactccaagcaggtagacgaccgatttggtgcctatgtggcgtgtgcctcgctcgtcttcctcttcatctgctttgtccagatcaccatcgtgccccactccatattcatgctcagcttctacctgacctgttccctgctgctgaccttggtggtgtttgtgtctgtgatctactcctgcgtaaagctcttcccctccccactgcagaccctctccaggaagatcgtgcggtccaagatgaacagcaccctggttggggtgttcaccatcaccctggtgttcctggcggcttttgtcaacatgttcacgtgcaactccagggacctgctgggctgcttggcacaggagcacaacatcagcgcgagccaggtcaacgcgtgtcacgtggcggagtcggccgtcaactacagcctgggcgatgagcagggcttctgtggcagcccctggcccaactgcaacttccccgagtacttcacctacagcgtgctgctcagcctgctggcctgctccgtgttcctgcagatcagctgcatcgggaagctggtgctcatgctggccatcgagctcatctacgtgctcatcgtggaggtgccaggtgtcacgctcttcgacaacgccgacctgctggtcaccgccaacgccatagacttcttcaacaacgggacctcccagtgccctgagcatgcaaccaaggtggcattgaaggtggtgacgcccatcatcatctcagtctttgtgctggccctgtacctgcacgcccagcaggtggagtccactgcccgcctcgacttcctctggaaactgcaggccacagaggagaaagaggagatggaggagctgcaggcctacaaccggcggctgctgcacaacatcctgcccaaggacgtggccgctcacttcctggcccgcgagcggcgcaatgatgagctctactatcagtcctgtgagtgtgtggcggtcatgttcgcctccatcgccaacttctccgagttctacgttgagctggaggccaacaacgagggtgtcgagtgcctgcggctactcaatgagatcatcgctgactttgatgagatcatcagcgaggatcggttccggcagctggagaagatcaagaccatcggcagcacctacatggctgcctccggcctcaacgactctacctacgacaaggtgggcaagacccacatcaaggcactggccgactttgccatgaagctgatggaccagatgaagtacatcaatgagcactccttcaacaacttccagatgaagatcgggctcaacatcggccccgtggtggccggggtgataggggcacgaaagcctcagtacgacatctggggcaataccgtgaacgtggccagccgcatggacagcaccggtgtacccgaccgcatccaggtcaccacagacatgtaccaggtgctggctgccaacacgtaccagctggagtgccggggcgtggtcaaggtcaagggcaaaggcgagatgatgacctacttcctcaatggagggcccccgctcagttagcagctgttggccaatggtgccaggcagcct

SEQ ID NO: 105262 - DNA, 580 bp, Homo sapiens
  Payload ID: 651
  Gene Symbol: ADCY5
  Gene Name: adenylate cyclase 5
  ENST ID: ENST00000476455
  CDS Start-End: 190-426
gtcttatgttctcagcactcggggtgcttgtcaaccagccttttggtctgcatttgaaagtccccttccagagcctcgaggcaatctctggggcccctggatccctgctgaggtgcccatggtcccctccatccccacagggcagcctgtgtagtgctgggtagggcccaggcctgtcccacggaagacatggccccatctaggttccgcactcagttggaggtaagcttgtctccaatgttctcattttctcctgcaccaacatcgtgggtgtctgcacccactatccggctgaggtctcccagagacaggctttccaggagacccgagagtgcatccaggcgcggctccactcgcagcgggagaaccagcagcaggaacggctcctgctgtctgtccttccccgtcatgttgccatggagatgaaagcagacatcaacgccaagcaggaggatatgatgttccataagatttacatccagaaacatgacaacgtgagcatcctgtttgctgacatcgagggcttcaccagcctggcgtcccagtgcactgcacaggaactggtcatgaccctcaacga

SEQ ID NO: 105263 - DNA, 3962 bp, Homo sapiens
  Payload ID: 651
  Gene Symbol: ADCY5
  Gene Name: adenylate cyclase 5
  ENST ID: ENST00000491190
  CDS Start-End: 539-3298
agatgcatggagggcctggaatcatgatgaggggaggggatgcggtgctctctcgggcaccggctgcactatcagcgttccctggagaaacagaacccttaggatttatatagacatatagaaagatttactgtgggggattggctcatgccgttacggagactgagaagacccatgagctgttgtctgtaagctggaggaccagaaaagccagtgacgtggtttcagtccaagcctgaaggcctgaaacccaggagagacaatgttgtaagtcccagcctaagtcagaggcctgagaaccaggagcccgctttccaagggcaggggaagatggatgtctcagctcaagaagagagtgaattctcccctcctctacctttttgctctattcaagccttcagtggatttgataacgcccacctgaatttggcaatctctggggcccctggatccctgctgaggtgcccatggtcccctccatccccacagggcagcctgtgtagtgctgggtagggcccaggcctgtcccacggaagacatggccccatctaggttccgcactcagttggagcttgtctccaatgttctcattttctcctgcaccaacatcgtgggtgtctgcacccactatccggctgaggtctcccagagacaggctttccaggagacccgagagtgcatccaggcgcggctccactcgcagcgggagaaccagcagcaggaacggctcctgctgtctgtccttccccgtcatgttgccatggagatgaaagcagacatcaacgccaagcaggaggatatgatgttccataagatttacatccagaaacatgacaacgtgagcatcctgtttgctgacatcgagggcttcaccagcctggcgtcccagtgcactgcacaggaactggtcatgaccctcaacgagctcttcgcccgctttgacaagctggccgcagagaatcactgtttacgtattaagatccttggggattgttattactgcgtctcggggctgcctgaagcaagggctgaccacgcccactgctgtgtggagatgggcatggacatgatcgaggccatctcgttggtccgggaggtgacaggggtgaacgtgaacatgcgtgtgggaattcacagcgggcgagtacactgcggtgtccttggtctcaggaagtggcagttcgacgtctggtctaacgatgtcacgctagccaaccacatggaggctggcggcaaggcaggacgcatccacatcaccaaggctacactcaactacctgaatggggactacgaggtggagccaggctgtgggggcgagcgcaacgcctacctcaaggagcacagtatcgagaccttcctcatcctgcgctgcacccagaagcggaaagaagagaaggccatgatcgccaagatgaaccgccagagaaccaactccatcgggcacaacccaccacactggggggctgagcgccccttctacaaccacctgggtggcaaccaggtgtccaaggagatgaagcggatgggctttgaagaccccaaggacaagaacgcccaggagagtgcgaaccctgaggatgaagtggatgagtttctgggccgtgccattgacgccaggagcattgataggcttcggtctgagcacgtccgcaagttcctcctgaccttcagggagcctgacttagagaagaagtactccaagcaggtagacgaccgatttggtgcctatgtggcgtgtgcctcgctcgtcttcctcttcatctgctttgtccagatcaccatcgtgccccactccatattcatgctcagcttctacctgacctgttccctgctgctgaccttggtggtgtttgtgtctgtgatctactcctgcgtaaagctcttcccctccccactgcagaccctctccaggaagatcgtgcggtccaagatgaacagcaccctggttggggtgttcaccatcaccctggtgttcctggcggcttttgtcaacatgttcacgtgcaactccagggacctgctgggctgcttggcacaggagcacaacatcagcgcgagccaggtcaacgcgtgtcacgtggcggagtcggccgtcaactacagcctgggcgatgagcagggcttctgtggcagcccctggcccaactgcaacttccccgagtacttcacctacagcgtgctgctcagcctgctggcctgctccgtgttcctgcagatcagctgcatcgggaagctggtgctcatgctggccatcgagctcatctacgtgctcatcgtggaggtgccaggtgtcacgctcttcgacaacgccgacctgctggtcaccgccaacgccatagacttcttcaacaacgggacctcccagtggagcctgtgtgagaacctcagacacaggagaatggaagctggtacctactttccctctggagtcaaggaacaaagccctgagcatgcaaccaaggtggcattgaaggtggtgacgcccatcatcatctcagtctttgtgctggccctgtacctgcacgcccagcaggtggagtccactgcccgcctcgacttcctctggaaactgcaggccacagaggagaaagaggagatggaggagctgcaggcctacaaccggcggctgctgcacaacatcctgcccaaggacgtggccgctcacttcctggcccgcgagcggcgcaatgatgagctctactatcagtcctgtgagtgtgtggcggtcatgttcgcctccatcgccaacttctccgagttctacgttgagctggaggccaacaacgagggtgtcgagtgcctgcggctactcaatgagatcatcgctgactttgatgagatcatcagcgaggatcggttccggcagctggagaagatcaagaccatcggcagcacctacatggctgcctccggcctcaacgactctacctacgacaaggtgggcaagacccacatcaaggcactggccgactttgccatgaagctgatggaccagatgaagtacatcaatgagcactccttcaacaacttccagatgaagatcgggctcaacatcggccccgtggtggccggggtgataggggcacgaaagcctcagtacgacatctggggcaataccgtgaacgtggccagccgcatggacagcaccggtgtacccgaccgcatccaggtcaccacagacatgtaccaggtgctggctgccaacacgtaccagctggagtgccggggcgtggtcaaggtcaagggcaaaggcgagatgatgacctacttcctcaatggagggcccccgctcagttagcagctgttggccaatggtgccaggcagcctggcctccagaggcatggaagcagcttctctgtgtgccgggggtggcggggaagccatgctccagcccgcagggctgcgctgctgagattttccacttggactccagagcagcttctgcctttgctggtgggcagcggcctctgtcccaggccccggggtgccagcgtcctgcgagcacccagctgaccaaagatgtttccctctgtagaagactctgctagactgggtctgaagcttgagttttctaacaggtgctgctgcacaggtggaaaggagccgtgggaatgtgtgtgtggcacggcccagacaagggcagggctgaggggcctccgactcagctgggggtagacgggctcgaatgtggcctgggagagcctagggggccccaggggtctgcttttctatgtgagcctttaaacttcagacaggccaccaccctgcacctgcaggggctttggcacaggagtgctggctttggagggactgtggccttcatcgtggtcctctgcccacacctccacgcacacagacagtgccctaggagggaaacagaactaattacgagggggaggcaagaggacgccaagcaaggagtggtgattctgagaaaaatatttattaaataaaacaaaac

SEQ ID NO: 105264 - DNA, 7311 bp, Homo sapiens
  Payload ID: 651
  Gene Symbol: ADCY5
  Gene Name: adenylate cyclase 5
  Uniprot ID: O95622
  ENST ID: ENST00000462833
  CDS Start-End: 1214-4999
gggcgagaagggaggagcggcgcgagcggccggagcggcgcagggcccgaagcgtgcatggcgcgccctgagccgggctcccgcgggcccccccggagcgcctctcgggcgccgcggctctcaggcgggcccctctgggccggctgcttctgagccccggcgctggatctctggatgccttactccccgggagaagcctgcctgcgtcggggcagaaccgcggcagcgctgcgccggattccgtcctccgcctagtcgttccgcgccggccgcggtgggcccgcagccggcgacgaggagcttggggcttgcgaagcgggcgcgacagctctccgggccggcaggtcccggccggccccgctccgtttgcgggaaagggagaggcgagaggggaagggccgcaccgcaggagccggtccctgacccggaccccgccccctgcgcggacgcgccgaaggctcggctcggctttcgccggggccacgcatccactctcgccgcgagaggtgggggatgcgggcaacggcccccccgggctccaggaccctcccccccggggctccggagctgttgctccgcccgtcgccccctcccccgtcctctccacctcccatcccacctccccacccctcgtaagaaaataatgctggctggcgcccgcacctcccagtcgctcccagtccgctgcgaggaaagcgcacccgcagtgtctcttcgccgggacccccgccgagccgccctcgccgccgccgagccccgagagcagctgggctccgcttaggcggaatcagcgagcgccgcgcccgggcactgccggcccgaggaggcaccgcccgcaaggacaccactccgtcccgtctcgtccgcaactccggccctcgtcgagctcgacgcgagccaggatcccggacgtctctccgcgtgcggcgcagcagcagccagaccagtccctgcgaccccacctcggaggcaactccatttcggacctgggacttctgacgcggatcctcagctacttctcacctcggggctgtgccctcctcctccgctcaggacgggggtgccaagatgccccgctgcagcgcagggccccgggccgcccccgacgtgtgaccctagcctggtccccctgctcggccgtccgccctccccttggagacccccggcccggcttccgggggaggaggaaggagacgacgaggccgagggggggatgtccggctccaaaagcgtgagccccccgggctacgcggcgcagaagactgcggcgccggcgccccggggaggccccgaacaccgctctgcgtggggcgaggccgattcccgcgcgaatggctacccccatgcccccgggggctctgcccgcggctccaccaagaaacccgggggggcggtgaccccgcagcagcagcagcgcctggccagccgctggcgcagcgacgacgacgacgatcctccgctgagcggtgacgaccccctggccgggggcttcggcttcagcttccgctccaagtccgcctggcaggagcgcggcggcgacgactgcggtcgcggcagccgccggcagcggcggggcgcggccagcgggggcagcacccgggcgccccctgcgggcggcggcggcggctcggcggcggcggctgcctcggcgggcgggacggaggtgcgccctcgctcggtggaggtgggtctggaggagcggcggggcaaggggcgcgcggccgacgagctggaggccggcgccgtcgagggcggcgaggggtccggggatggcggcagctcggcggactcgggctcgggcgcggggcccggcgcggtgctgtccctgggcgcctgctgcctggcgttgctgcagatattccgctccaagaagttcccgtcggacaaactggagcggctgtaccagcgctacttcttccgcctgaaccagagcagcctcaccatgctcatggccgtgctggtgctcgtgtgcctggtcatgttggccttccacgcggcgcggcccccgctccagctgccctacctggccgtgctggcggccgccgtcggcgtgatcctcatcatggctgtgctttgcaaccgcgccgccttccaccaggaccacatgggcctggcctgctatgcgctcatcgccgtggtgctggccgtccaggtggtgggcctgctgctgccgcagccacgcagcgcctctgagggcatctggtggaccgtgttcttcatctacaccatctacacgctgctgcccgtgcgcatgcgggccgcagtgctcagcggggtgctcctgtccgccctccacctggccatcgccctgcgcaccaacgcccaggaccagttcctgctgaagcagcttgtctccaatgttctcattttctcctgcaccaacatcgtgggtgtctgcacccactatccggctgaggtctcccagagacaggctttccaggagacccgagagtgcatccaggcgcggctccactcgcagcgggagaaccagcagcaggaacggctcctgctgtctgtccttccccgtcatgttgccatggagatgaaagcagacatcaacgccaagcaggaggatatgatgttccataagatttacatccagaaacatgacaacgtgagcatcctgtttgctgacatcgagggcttcaccagcctggcgtcccagtgcactgcacaggaactggtcatgaccctcaacgagctcttcgcccgctttgacaagctggccgcagagaatcactgtttacgtattaagatccttggggattgttattactgcgtctcggggctgcctgaagcaagggctgaccacgcccactgctgtgtggagatgggcatggacatgatcgaggccatctcgttggtccgggaggtgacaggggtgaacgtgaacatgcgtgtgggaattcacagcgggcgagtacactgcggtgtccttggtctcaggaagtggcagttcgacgtctggtctaacgatgtcacgctagccaaccacatggaggctggcggcaaggcaggacgcatccacatcaccaaggctacactcaactacctgaatggggactacgaggtggagccaggctgtgggggcgagcgcaacgcctacctcaaggagcacagtatcgagaccttcctcatcctgcgctgcacccagaagcggaaagaagagaaggccatgatcgccaagatgaaccgccagagaaccaactccatcgggcacaacccaccacactggggggctgagcgccccttctacaaccacctgggtggcaaccaggtgtccaaggagatgaagcggatgggctttgaagaccccaaggacaagaacgcccaggagagtgcgaaccctgaggatgaagtggatgagtttctgggccgtgccattgacgccaggagcattgataggcttcggtctgagcacgtccgcaagttcctcctgaccttcagggagcctgacttagagaagaagtactccaagcaggtagacgaccgatttggtgcctatgtggcgtgtgcctcgctcgtcttcctcttcatctgctttgtccagatcaccatcgtgccccactccatattcatgctcagcttctacctgacctgttccctgctgctgaccttggtggtgtttgtgtctgtgatctactcctgcgtaaagctcttcccctccccactgcagaccctctccaggaagatcgtgcggtccaagatgaacagcaccctggttggggtgttcaccatcaccctggtgttcctggcggcttttgtcaacatgttcacgtgcaactccagggacctgctgggctgcttggcacaggagcacaacatcagcgcgagccaggtcaacgcgtgtcacgtggcggagtcggccgtcaactacagcctgggcgatgagcagggcttctgtggcagcccctggcccaactgcaacttccccgagtacttcacctacagcgtgctgctcagcctgctggcctgctccgtgttcctgcagatcagctgcatcgggaagctggtgctcatgctggccatcgagctcatctacgtgctcatcgtggaggtgccaggtgtcacgctcttcgacaacgccgacctgctggtcaccgccaacgccatagacttcttcaacaacgggacctcccagtgccctgagcatgcaaccaaggtggcattgaaggtggtgacgcccatcatcatctcagtctttgtgctggccctgtacctgcacgcccagcaggtggagtccactgcccgcctcgacttcctctggaaactgcaggccacagaggagaaagaggagatggaggagctgcaggcctacaaccggcggctgctgcacaacatcctgcccaaggacgtggccgctcacttcctggcccgcgagcggcgcaatgatgagctctactatcagtcctgtgagtgtgtggcggtcatgttcgcctccatcgccaacttctccgagttctacgttgagctggaggccaacaacgagggtgtcgagtgcctgcggctactcaatgagatcatcgctgactttgatgagatcatcagcgaggatcggttccggcagctggagaagatcaagaccatcggcagcacctacatggctgcctccggcctcaacgactctacctacgacaaggtgggcaagacccacatcaaggcactggccgactttgccatgaagctgatggaccagatgaagtacatcaatgagcactccttcaacaacttccagatgaagatcgggctcaacatcggccccgtggtggccggggtgataggggcacgaaagcctcagtacgacatctggggcaataccgtgaacgtggccagccgcatggacagcaccggtgtacccgaccgcatccaggtcaccacagacatgtaccaggtgctggctgccaacacgtaccagctggagtgccggggcgtggtcaaggtcaagggcaaaggcgagatgatgacctacttcctcaatggagggcccccgctcagttagcagctgttggccaatggtgccaggcagcctggcctccagaggcatggaagcagcttctctgtgtgccgggggtggcggggaagccatgctccagcccgcagggctgcgctgctgagattttccacttggactccagagcagcttctgcctttgctggtgggcagcggcctctgtcccaggccccggggtgccagcgtcctgcgagcacccagctgaccaaagatgtttccctctgtagaagactctgctagactgggtctgaagcttgagttttctaacaggtgctgctgcacaggtggaaaggagccgtgggaatgtgtgtgtggcacggcccagacaagggcagggctgaggggcctccgactcagctgggggtagacgggctcgaatgtggcctgggagagcctagggggccccaggggtctgcttttctatgtgagcctttaaacttcagacaggccaccaccctgcacctgcaggggctttggcacaggagtgctggctttggagggactgtggccttcatcgtggtcctctgcccacacctccacgcacacagacagtgccctaggagggaaacagaactaattacgagggggaggcaagaggacgccaagcaaggagtggtgattctgagaaaaatatttattaaataaaacaaaacaagttctccgtgcccttctttagactatgctagttgtatgcgtgtaagagacacacaagcaaacgaggacgccactcggggggagggcggggatccccacttgtcttttttgtattttttattttgtattattgaaagccttggagatctcacagatagatatgccaaattctatattttgtaaattctctatattagaaaacagctgtgcacagcagggcgggtgtgctcatttgtactgtgtgtatgtcggtgtatgtactggtgtatatgtgtgtgtgttcatgctgtggaactggtctcacacaggatgtgtttccctcatttcagatttggcagttttgggttttccaaggtaccaccagagcagtgggtgtgtgcttttggggtaccatatgctcagattaagtaggaggatgcatggacacactgccccatcttttctgacacacgcacacgtatgtacacacatgcacacaccctccttcccctaagcaaaacgcagatggaataagaaaacaaaaagctgctttcccatcccaggccgagctggaaccaagggaagcaatctcatcctgcgacaggcagtgtggtgccctccacaccctgagatttcagacgtttgcggcttacagaggcagcgcccacagattccagagtgcttacagaaggccaggtgctttgcaggctgggacgaggaagccaagcctccctggcctactcagttggccaaggtgcaggtggctcttcctggagatgttcactcagactgggggatgcaatgtgcagccttcaggtttgcggaaagggagtggccttgacctccaccggcaaaccaggcagaggaatgggtagagcccagctttagagtccacagggaaagctagcaggaattttgttttagtgggagggggcagttaaacataccaagaaaaaaatactatttttataacctatgaggaagacatttggaaaatgatactctagcacagaattcagtggaatccttagggcccatgcccaaatctttccattgcttctcaggttagaatgatcttcacctccaacatgagcttggaggtgatgaggcagtggctctgtgccagctgccacaatgtgactttgatgtccacctgtaccacctctcactgggctctagcaccaccctcccctccccgcacaccaactgaacacagctctgagaagcaaagtgtgtggacccaaaactgccaagcctgagtctgtcccgtgcttctgctgctccatcctttgagttctgcattgccatcctgacgtcggccacaggaggcctgctttcttccagctgttgttctcaagttccctgcccctccacatcgcccgccagtggtgttgggttttcgttctgcttccaacctgagtaaagtgtgtgtgctgagttcatcccatgttctcccatggtcatggcttcccggccccatggggacccctctcccatcccagcagtgactggtgacagtgtgcaggtgcagtgctagctcttcgttccctctaaagggtgtgcactctttttattcctactcttgcaaaaacagatacgattatgatttcccatggaaattgaaaagtctatttaaataatttaactattaaacactttcactggtaa

SEQ ID NO: 105265 - DNA, 1789 bp, Homo sapiens
  Payload ID: 651
  Gene Symbol: ADCY5
  Gene Name: adenylate cyclase 5
  ENST ID: ENST00000466617
  CDS Start-End: 313-1789
agctggaaagatggggcaaggcagaagctgggcctcagacacaggcaggggacatgggccgactgcccacctcctggcccctgaccatggtggagtgggaggtctggatggagcagtgagaagcttgtctccaatgttctcattttctcctgcaccaacatcgtgggtgtctgcacccactatccggctgaggtctcccagagacaggctttccaggagacccgagagtgcatccaggcgcggctccactcgcagcgggagaaccagcagcaggaacggctcctgctgtctgtccttccccgtcatgttgccatggagatgaaagcagacatcaacgccaagcaggaggatatgatgttccataagatttacatccagaaacatgacaacgtgagcatcctgtttgctgacatcgagggcttcaccagcctggcgtcccagtgcactgcacaggaactggtcatgaccctcaacgagctcttcgcccgctttgacaagctggccgcagagaatcactgtttacgtattaagatccttggggattgttattactgcgtctcggggctgcctgaagcaagggctgaccacgcccactgctgtgtggagatgggcatggacatgatcgaggccatctcgttggtccgggaggtgacaggggtgaacgtgaacatgcgtgtgggaattcacagcgggcgagtacactgcggtgtccttggtctcaggaagtggcagttcgacgtctggtctaacgatgtcacgctagccaaccacatggaggctggcggcaaggcaggacgcatccacatcaccaaggctacactcaactacctgaatggggactacgaggtggagccaggctgtgggggcgagcgcaacgcctacctcaaggagcacagtatcgagaccttcctcatcctgcgctgcacccagaagcggaaagaagagaaggccatgatcgccaagatgaaccgccagagaaccaactccatcgggcacaacccaccacactggggggctgagcgccccttctacaaccacctgggtggcaaccaggtgtccaaggagatgaagcggatgggctttgaagaccccaaggacaagaacgcccaggagagtgcgaaccctgaggatgaagtggatgagtttctgggccgtgccattgacgccaggagcattgataggcttcggtctgagcacgtccgcaagttcctcctgaccttcagggagcctgacttagagaagaagtactccaagcaggtagacgaccgatttggtgcctatgtggcgtgtgcctcgctcgtcttcctcttcatctgctttgtccagatcaccatcgtgccccactccatattcatgctcagcttctacctgacctgttccctgctgctgaccttggtggtgtttgtgtctgtgatctactcctgcgtaaagctcttcccctccccactgcagaccctctccaggaagatcgtgcggtccaagatgaacagcaccctggttggggtgttcaccatcaccctggtgttcctggcggcttttgtcaacatgttcacgtgcaactccagggacctgctgggctgcttggcacaggagcacaacatcagcgcgagccaggtcaacgcgtgtcacgtggcggagtcggccgtcaactacagcctgggcgatgagcagggcttctgtggcagcccctggcccaactgcaacttccccgagtacttcacctacagcgtgctgctcagcctgctggcctgctccgtgttcctgcagatcagctgcatcgggaagctgg

SEQ ID NO: 105266 - DNA, 577 bp, Homo sapiens
  Payload ID: 651
  Gene Symbol: ADCY5
  Gene Name: adenylate cyclase 5
  ENST ID: ENST00000483566
  CDS Start-End: 306-577
gtgcatgcatgtgagtgtggatagagaatgtccttcattaagctgctgtggcctcatgaccatgactcataaacttacaatcaagctctgctggacagaggagacctgtccccaggcttgtctccaatgttctcattttctcctgcaccaacatcgtgggtgtctgcacccactatccggctgaggtctcccagagacaggctttccaggagacccgagagtgcatccaggcgcggctccactcgcagcgggagaaccagcagcaggaacggctcctgctgtctgtccttccccgtcatgttgccatggagatgaaagcagacatcaacgccaagcaggaggatatgatgttccataagatttacatccagaaacatgacaacgtgagcatcctgtttgctgacatcgagggcttcaccagcctggcgtcccagtgcactgcacaggaactggtcatgaccctcaacgagctcttcgcccgctttgacaagctggccgcagagaatcactgtttacgtattaagatccttggggattgttattactgcgtctcggggctgcctgaagcaagggctga

SEQ ID NO: 105267 - DNA, 6464 bp, Homo sapiens
  Payload ID: 652
  Gene Symbol: ADCY6
  Gene Name: adenylate cyclase 6
  Uniprot ID: O43306
  ENST ID: ENST00000307885
  CDS Start-End: 696-4202
ccggtctataggtgcataccaccacaccaggctaatttttttttttttgagacggagtctcactctgtcacccaggctggagtgcaatggcgcgatctttgctcactgcaacctctgccacccgggttcaagcaattctcctgcctcagctcctgagtagctgggattacaggcgcccgccaccacgcccggctaatttttgtatttttagtagagacgaggtttcaccatcttggccaggctggtcttgaactcctgaccttgtgatctacctgccagggccttccaaagtgctgggattacggacgtgagccaccacgcctggcccaggctaattttttgaaattttaatagaggcagggtcttgctgtattgcccaggttgctctcacattcctagccttaagccatcctcctatctcggcctcacaaagtgctgggattacaggtgtaagccactgtgcctggttttgggcaagtttcttgtcctgactgtgtcttgggttctcacctgttgattggggatacccttgttgcctacctccaagtaattttatgaggatgaaactcatagcttgtcagtgggaagtgcttaggtaatgagctactagtggtggcagtggctgtgatggtggtattaataccactcctactggatggtctctaatactatctccttccttccctaccagcaacatgtcatggtttagtggcctcctggtccctaaagtggatgaacggaaaacagcctggggtgaacgcaatgggcagaagcgttcgcggcgccgtggcactcgggcaggtggcttctgcacgccccgctatatgagctgcctccgggatgcagagccacccagccccacccctgcgggcccccctcggtgcccctggcaggatgacgccttcatccggaggggcggcccaggcaagggcaaggagctggggctgcgggcagtggccctgggcttcgaggataccgaggtgacaacgacagcgggcgggacggctgaggtggcgcccgacgcggtgcccaggagtgggcgatcctgctggcgccgtctggtgcaggtgttccagtcgaagcagttccgttcggccaagctggagcgcctgtaccagcggtacttcttccagatgaaccagagcagcctgacgctgctgatggcggtgctggtgctgctcacagcggtgctgctggctttccacgccgcacccgcccgccctcagcctgcctatgtggcactgttggcctgtgccgccgccctgttcgtggggctcatggtggtgtgtaaccggcatagcttccgccaggactccatgtgggtggtgagctacgtggtgctgggcatcctggcggcagtgcaggtcgggggcgctctcgcagcagacccgcgcagcccctctgcgggcctctggtgccctgtgttctttgtctacatcgcctacacgctcctccccatccgcatgcgggctgccgtcctcagcggcctgggcctctccaccttgcatttgatcttggcctggcaacttaaccgtggtgatgccttcctctggaagcagctcggtgccaatgtgctgctgttcctctgcaccaacgtcattggcatctgcacacactatccagcagaggtgtctcagcgccaggcctttcaggagacccgcggttacatccaggcccggctccacctgcagcatgagaatcggcagcaggagcggctgctgctgtcggtattgccccagcacgttgccatggagatgaaagaagacatcaacacaaaaaaagaagacatgatgttccacaagatctacatacagaagcatgacaatgtcagcatcctgtttgcagacattgagggcttcaccagcctggcatcccagtgcactgcgcaggagctggtcatgaccctgaatgagctctttgcccggtttgacaagctggctgcggagaatcactgcctgaggatcaagatcttgggggactgttactactgtgtgtcagggctgccggaggcccgggccgaccatgcccactgctgtgtggagatgggggtagacatgattgaggccatctcgctggtacgtgaggtgacaggtgtgaatgtgaacatgcgcgtgggcatccacagcgggcgcgtgcactgcggcgtccttggcttgcggaaatggcagttcgatgtgtggtccaatgatgtgaccctggccaaccacatggaggcaggaggccgggctggccgcatccacatcactcgggcaacactgcagtacctgaacggggactacgaggtggagccaggccgtggtggcgagcgcaacgcgtacctcaaggagcagcacattgagactttcctcatcctgggcgccagccagaaacggaaagaggagaaggccatgctggccaagctgcagcggactcgggccaactccatggaagggctgatgccgcgctgggttcctgatcgtgccttctcccggaccaaggactccaaggccttccgccagatgggcattgatgattccagcaaagacaaccggggcacccaagatgccctgaaccctgaggatgaggtggatgagttcctgagccgtgccatcgatgcccgcagcattgatcagctgcggaaggaccatgtgcgccggtttctgctcaccttccagagagaggatcttgagaagaagtactcccggaaggtggatccccgcttcggagcctacgttgcctgtgccctgttggtcttctgcttcatctgcttcatccagcttctcatcttcccacactccaccctgatgcttgggatctatgccagcatcttcctgctgctgctaatcaccgtgctgatctgtgctgtgtactcctgtggttctctgttccctaaggccctgcaacgtctgtcccgcagcattgtccgctcacgggcacatagcaccgcagttggcatcttttccgtcctgcttgtgtttacttctgccattgccaacatgttcacctgtaaccacacccccatacggagctgtgcagcccggatgctgaatttaacacctgctgacatcactgcctgccacctgcagcagctcaattactctctgggcctggatgctcccctgtgtgagggcaccatgcccacctgcagctttcctgagtacttcatcgggaacatgctgctgagtctcttggccagctctgtcttcctgcacatcagcagcatcgggaagttggccatgatctttgtcttggggctcatctatttggtgctgcttctgctgggtcccccagccaccatctttgacaactatgacctactgcttggcgtccatggcttggcttcttccaatgagacctttgatgggctggactgtccagctgcagggagggtggccctcaaatatatgacccctgtgattctgctggtgtttgcgctggcgctgtatctgcatgctcagcaggtggagtcgactgcccgcctagacttcctctggaaactacaggcaacaggggagaaggaggagatggaggagctacaggcatacaaccggaggctgctgcataacattctgcccaaggacgtggcggcccacttcctggcccgggagcgccgcaatgatgaactctactatcagtcgtgtgagtgtgtggctgttatgtttgcctccattgccaacttctctgagttctatgtggagctggaggcaaacaatgagggtgtcgagtgcctgcggctgctcaacgagatcatcgctgactttgatgagattatcagcgaggagcggttccggcagctggaaaagatcaagacgattggtagcacctacatggctgcctcagggctgaacgccagcacctacgatcaggtgggccgctcccacatcactgccctggctgactacgccatgcggctcatggagcagatgaagcacatcaatgagcactccttcaacaatttccagatgaagattgggctgaacatgggcccagtcgtggcaggtgtcatcggggctcggaagccacagtatgacatctgggggaacacagtgaatgtctctagtcgtatggacagcacgggggtccccgaccgaatccaggtgaccacggacctgtaccaggttctagctgccaagggctaccagctggagtgtcgaggggtggtcaaggtgaagggcaagggggagatgaccacctacttcctcaatgggggccccagcagttaacagggcccagccacaaattcagctgaagggaccaaggtgggcattgagtggactctgtgctcactgggtggagctgtggcagggggcactgagcctccagaccctgctaaccacaaaagggaacatcccagcaggctgtgcttggatcatgctcgtctgccctcaagctggaaaacaaggggctacctaccgagaggattatgcaagtgactttctttcttacttggggtagggctgttccctctccaatcttccagcctttgggagcaggggaggggtcagtagcagaagcagagggaggcctcttgcctgagggattaaaatggcagcttgccatgcctacccttccctgtctgtctgggcagcaggttcagggctgagcccttcttttccctcttttttcctgggaatattttgtacaatattttgtacaaagacaggcatgaggagtgcctattccatgcttgcctttgcaatacctgcatccccagcactggtcctgggcacttccccaccccagccaggtgtccctcctatgcacagagcagaggagggagaagctctggggagccagctttggccatatttcaggagaatgtttccatgtgccaaatcttagtcccatgatctgtccccaaaggggaacaaagggacctctgacagcttagatttagccccagttcctgcacgctccagggaacggggtgtctggcctcactggtactgtgaaaaatgctcagagagcaagcctgtgtgtggggatgtcaggtcaggagctggaagttcacctgcaggtgccaaagagcaggccggccagggctggggcagtgccagactctgatctgaggaccccgtcggggtccagatcaggtcactctgccccagtgctctcttgctgtctgctgacaagggggcatggagcatctcttcctcttctgttgccaaatagaaaagggtcagggcatggagaaaggtgaccctgatcccaaacctgccctcccaagtctctggtgttggggagggcccgtgtgtttgtgtaactgtgtgtgcatgttggtctttgtgtgcatatctgttttccaggtctatgtgagtccttgtgctcctgctcctcagctctccaccccaggttgcctctctcctgtgggcctctgtcttctgggaataaagcagggtttcctacttcaggggatgtagagagatgcccaggttgcacaggagtgggatggggtgtggtagcaaaaggagggagaggagtcctttttgtgccaaatccctaagtgccgttcgggggccatgtgtgcagcatgactctccctgtctgtggcagggacccaagcgcttgcttaagccccagtgctccatgccagcacttgaactgtctggggtttgatggacagaggctgaggaatttcctggcttccccagatagtgtcctgggacatggtatgctttggggctggggtagcatggaatccctctgaggacctggatactggtactacggggtggggaagaggaaccttaaacttggctttccccagccttcagcctgagtctagcatgtttctagctccccagtcccttgtgaagccttgagggctggcagaagggttaggaggttgaactctagattcccttcctgtctttgccttccttttacccctttccctgcaacctccttgactctggcctgaatttgttggtgcctcagtttctctgtctgtacctatttaagccaaaggcactagcctgaattttgcttgaagatcactttgtcttggaaatgactagagaggcagaggagaagggtttccagagttgctaggtttgggagtggaaggggcaggcagtgcacttgcccctcctcatgccccttctgacaccagctccctgtggaggcctggtttctgggtaatgcctcccttgggcatcttcatgcatcaaccaaatgggccatcaggtacttcattagtcatggcagaaggaggggaaaagacttgttttccagacagaaaatctactcccctgtccccagccatatccctggataggaagggataggaagagactacttggtgccatggggtaggggtgagggtataagtagatcagagtgggaagacctcagccttgggtggcttgtctctgcttcttgccaggtgggagggcctgtccacaccctggatccccgtaccacagtgccagccatgcccttcccctgggctaccattgtccctttcctcacccagttggtagagg

SEQ ID NO: 105268 - DNA, 5748 bp, Homo sapiens
  Payload ID: 652
  Gene Symbol: ADCY6
  Gene Name: adenylate cyclase 6
  Uniprot ID: O43306
  ENST ID: ENST00000357869
  CDS Start-End: 8-3355
cagcaacatgtcatggtttagtggcctcctggtccctaaagtggatgaacggaaaacagcctggggtgaacgcaatgggcagaagcgttcgcggcgccgtggcactcgggcaggtggcttctgcacgccccgctatatgagctgcctccgggatgcagagccacccagccccacccctgcgggcccccctcggtgcccctggcaggatgacgccttcatccggaggggcggcccaggcaagggcaaggagctggggctgcgggcagtggccctgggcttcgaggataccgaggtgacaacgacagcgggcgggacggctgaggtggcgcccgacgcggtgcccaggagtgggcgatcctgctggcgccgtctggtgcaggtgttccagtcgaagcagttccgttcggccaagctggagcgcctgtaccagcggtacttcttccagatgaaccagagcagcctgacgctgctgatggcggtgctggtgctgctcacagcggtgctgctggctttccacgccgcacccgcccgccctcagcctgcctatgtggcactgttggcctgtgccgccgccctgttcgtggggctcatggtggtgtgtaaccggcatagcttccgccaggactccatgtgggtggtgagctacgtggtgctgggcatcctggcggcagtgcaggtcgggggcgctctcgcagcagacccgcgcagcccctctgcgggcctctggtgccctgtgttctttgtctacatcgcctacacgctcctccccatccgcatgcgggctgccgtcctcagcggcctgggcctctccaccttgcatttgatcttggcctggcaacttaaccgtggtgatgccttcctctggaagcagctcggtgccaatgtgctgctgttcctctgcaccaacgtcattggcatctgcacacactatccagcagaggtgtctcagcgccaggcctttcaggagacccgcggttacatccaggcccggctccacctgcagcatgagaatcggcagcaggagcggctgctgctgtcggtattgccccagcacgttgccatggagatgaaagaagacatcaacacaaaaaaagaagacatgatgttccacaagatctacatacagaagcatgacaatgtcagcatcctgtttgcagacattgagggcttcaccagcctggcatcccagtgcactgcgcaggagctggtcatgaccctgaatgagctctttgcccggtttgacaagctggctgcggagaatcactgcctgaggatcaagatcttgggggactgttactactgtgtgtcagggctgccggaggcccgggccgaccatgcccactgctgtgtggagatgggggtagacatgattgaggccatctcgctggtacgtgaggtgacaggtgtgaatgtgaacatgcgcgtgggcatccacagcgggcgcgtgcactgcggcgtccttggcttgcggaaatggcagttcgatgtgtggtccaatgatgtgaccctggccaaccacatggaggcaggaggccgggctggccgcatccacatcactcgggcaacactgcagtacctgaacggggactacgaggtggagccaggccgtggtggcgagcgcaacgcgtacctcaaggagcagcacattgagactttcctcatcctgggcgccagccagaaacggaaagaggagaaggccatgctggccaagctgcagcggactcgggccaactccatggaagggctgatgccgcgctgggttcctgatcgtgccttctcccggaccaaggactccaaggccttccgccagatgggcattgatgattccagcaaagacaaccggggcacccaagatgccctgaaccctgaggatgaggtggatgagttcctgagccgtgccatcgatgcccgcagcattgatcagctgcggaaggaccatgtgcgccggtttctgctcaccttccagagagaggatcttgagaagaagtactcccggaaggtggatccccgcttcggagcctacgttgcctgtgccctgttggtcttctgcttcatctgcttcatccagcttctcatcttcccacactccaccctgatgcttgggatctatgccagcatcttcctgctgctgctaatcaccgtgctgatctgtgctgtgtactcctgtggttctctgttccctaaggccctgcaacgtctgtcccgcagcattgtccgctcacgggcacatagcaccgcagttggcatcttttccgtcctgcttgtgtttacttctgccattgccaacatgtacttcatcgggaacatgctgctgagtctcttggccagctctgtcttcctgcacatcagcagcatcgggaagttggccatgatctttgtcttggggctcatctatttggtgctgcttctgctgggtcccccagccaccatctttgacaactatgacctactgcttggcgtccatggcttggcttcttccaatgagacctttgatgggctggactgtccagctgcagggagggtggccctcaaatatatgacccctgtgattctgctggtgtttgcgctggcgctgtatctgcatgctcagcaggtggagtcgactgcccgcctagacttcctctggaaactacaggcaacaggggagaaggaggagatggaggagctacaggcatacaaccggaggctgctgcataacattctgcccaaggacgtggcggcccacttcctggcccgggagcgccgcaatgatgaactctactatcagtcgtgtgagtgtgtggctgttatgtttgcctccattgccaacttctctgagttctatgtggagctggaggcaaacaatgagggtgtcgagtgcctgcggctgctcaacgagatcatcgctgactttgatgagattatcagcgaggagcggttccggcagctggaaaagatcaagacgattggtagcacctacatggctgcctcagggctgaacgccagcacctacgatcaggtgggccgctcccacatcactgccctggctgactacgccatgcggctcatggagcagatgaagcacatcaatgagcactccttcaacaatttccagatgaagattgggctgaacatgggcccagtcgtggcaggtgtcatcggggctcggaagccacagtatgacatctgggggaacacagtgaatgtctctagtcgtatggacagcacgggggtccccgaccgaatccaggtgaccacggacctgtaccaggttctagctgccaagggctaccagctggagtgtcgaggggtggtcaaggtgaagggcaagggggagatgaccacctacttcctcaatgggggccccagcagttaacagggcccagccacaaattcagctgaagggaccaaggtgggcattgagtggactctgtgctcactgggtggagctgtggcagggggcactgagcctccagaccctgctaaccacaaaagggaacatcccagcaggctgtgcttggatcatgctcgtctgccctcaagctggaaaacaaggggctacctaccgagaggattatgcaagtgactttctttcttacttggggtagggctgttccctctccaatcttccagcctttgggagcaggggaggggtcagtagcagaagcagagggaggcctcttgcctgagggattaaaatggcagcttgccatgcctacccttccctgtctgtctgggcagcaggttcagggctgagcccttcttttccctcttttttcctgggaatattttgtacaatattttgtacaaagacaggcatgaggagtgcctattccatgcttgcctttgcaatacctgcatccccagcactggtcctgggcacttccccaccccagccaggtgtccctcctatgcacagagcagaggagggagaagctctggggagccagctttggccatatttcaggagaatgtttccatgtgccaaatcttagtcccatgatctgtccccaaaggggaacaaagggacctctgacagcttagatttagccccagttcctgcacgctccagggaacggggtgtctggcctcactggtactgtgaaaaatgctcagagagcaagcctgtgtgtggggatgtcaggtcaggagctggaagttcacctgcaggtgccaaagagcaggccggccagggctggggcagtgccagactctgatctgaggaccccgtcggggtccagatcaggtcactctgccccagtgctctcttgctgtctgctgacaagggggcatggagcatctcttcctcttctgttgccaaatagaaaagggtcagggcatggagaaaggtgaccctgatcccaaacctgccctcccaagtctctggtgttggggagggcccgtgtgtttgtgtaactgtgtgtgcatgttggtctttgtgtgcatatctgttttccaggtctatgtgagtccttgtgctcctgctcctcagctctccaccccaggttgcctctctcctgtgggcctctgtcttctgggaataaagcagggtttcctacttcaggggatgtagagagatgcccaggttgcacaggagtgggatggggtgtggtagcaaaaggagggagaggagtcctttttgtgccaaatccctaagtgccgttcgggggccatgtgtgcagcatgactctccctgtctgtggcagggacccaagcgcttgcttaagccccagtgctccatgccagcacttgaactgtctggggtttgatggacagaggctgaggaatttcctggcttccccagatagtgtcctgggacatggtatgctttggggctggggtagcatggaatccctctgaggacctggatactggtactacggggtggggaagaggaaccttaaacttggctttccccagccttcagcctgagtctagcatgtttctagctccccagtcccttgtgaagccttgagggctggcagaagggttaggaggttgaactctagattcccttcctgtctttgccttccttttacccctttccctgcaacctccttgactctggcctgaatttgttggtgcctcagtttctctgtctgtacctatttaagccaaaggcactagcctgaattttgcttgaagatcactttgtcttggaaatgactagagaggcagaggagaagggtttccagagttgctaggtttgggagtggaaggggcaggcagtgcacttgcccctcctcatgccccttctgacaccagctccctgtggaggcctggtttctgggtaatgcctcccttgggcatcttcatgcatcaaccaaatgggccatcaggtacttcattagtcatggcagaaggaggggaaaagacttgttttccagacagaaaatctactcccctgtccccagccatatccctggataggaagggataggaagagactacttggtgccatggggtaggggtgagggtataagtagatcagagtgggaagacctcagccttgggtggcttgtctctgcttcttgccaggtgggagggcctgtccacaccctggatccccgtaccacagtgccagccatgcccttcccctgggctaccattgtccctttcctcacccagttggtagaggagtcaggaggtgggaggccgtgggctttggttttataatgtaaccactgtgggggtgggggaggatggtgaaccatgtatttcagtgaaatatttaatatatttaaatatcaataaaatcaaactctttgt

SEQ ID NO: 105269 - DNA, 5877 bp, Homo sapiens
  Payload ID: 652
  Gene Symbol: ADCY6
  Gene Name: adenylate cyclase 6
  Uniprot ID: O43306
  ENST ID: ENST00000550422
  CDS Start-End: 137-3484
cggacggcggacggcgggcgggacggccaggacgcgcgggctcggaggaccgcgggacggccggccggccggccggagcccgcgggggcggcggggcgggggcccagggcaggcgcggagccgggccggcagcaacatgtcatggtttagtggcctcctggtccctaaagtggatgaacggaaaacagcctggggtgaacgcaatgggcagaagcgttcgcggcgccgtggcactcgggcaggtggcttctgcacgccccgctatatgagctgcctccgggatgcagagccacccagccccacccctgcgggcccccctcggtgcccctggcaggatgacgccttcatccggaggggcggcccaggcaagggcaaggagctggggctgcgggcagtggccctgggcttcgaggataccgaggtgacaacgacagcgggcgggacggctgaggtggcgcccgacgcggtgcccaggagtgggcgatcctgctggcgccgtctggtgcaggtgttccagtcgaagcagttccgttcggccaagctggagcgcctgtaccagcggtacttcttccagatgaaccagagcagcctgacgctgctgatggcggtgctggtgctgctcacagcggtgctgctggctttccacgccgcacccgcccgccctcagcctgcctatgtggcactgttggcctgtgccgccgccctgttcgtggggctcatggtggtgtgtaaccggcatagcttccgccaggactccatgtgggtggtgagctacgtggtgctgggcatcctggcggcagtgcaggtcgggggcgctctcgcagcagacccgcgcagcccctctgcgggcctctggtgccctgtgttctttgtctacatcgcctacacgctcctccccatccgcatgcgggctgccgtcctcagcggcctgggcctctccaccttgcatttgatcttggcctggcaacttaaccgtggtgatgccttcctctggaagcagctcggtgccaatgtgctgctgttcctctgcaccaacgtcattggcatctgcacacactatccagcagaggtgtctcagcgccaggcctttcaggagacccgcggttacatccaggcccggctccacctgcagcatgagaatcggcagcaggagcggctgctgctgtcggtattgccccagcacgttgccatggagatgaaagaagacatcaacacaaaaaaagaagacatgatgttccacaagatctacatacagaagcatgacaatgtcagcatcctgtttgcagacattgagggcttcaccagcctggcatcccagtgcactgcgcaggagctggtcatgaccctgaatgagctctttgcccggtttgacaagctggctgcggagaatcactgcctgaggatcaagatcttgggggactgttactactgtgtgtcagggctgccggaggcccgggccgaccatgcccactgctgtgtggagatgggggtagacatgattgaggccatctcgctggtacgtgaggtgacaggtgtgaatgtgaacatgcgcgtgggcatccacagcgggcgcgtgcactgcggcgtccttggcttgcggaaatggcagttcgatgtgtggtccaatgatgtgaccctggccaaccacatggaggcaggaggccgggctggccgcatccacatcactcgggcaacactgcagtacctgaacggggactacgaggtggagccaggccgtggtggcgagcgcaacgcgtacctcaaggagcagcacattgagactttcctcatcctgggcgccagccagaaacggaaagaggagaaggccatgctggccaagctgcagcggactcgggccaactccatggaagggctgatgccgcgctgggttcctgatcgtgccttctcccggaccaaggactccaaggccttccgccagatgggcattgatgattccagcaaagacaaccggggcacccaagatgccctgaaccctgaggatgaggtggatgagttcctgagccgtgccatcgatgcccgcagcattgatcagctgcggaaggaccatgtgcgccggtttctgctcaccttccagagagaggatcttgagaagaagtactcccggaaggtggatccccgcttcggagcctacgttgcctgtgccctgttggtcttctgcttcatctgcttcatccagcttctcatcttcccacactccaccctgatgcttgggatctatgccagcatcttcctgctgctgctaatcaccgtgctgatctgtgctgtgtactcctgtggttctctgttccctaaggccctgcaacgtctgtcccgcagcattgtccgctcacgggcacatagcaccgcagttggcatcttttccgtcctgcttgtgtttacttctgccattgccaacatgtacttcatcgggaacatgctgctgagtctcttggccagctctgtcttcctgcacatcagcagcatcgggaagttggccatgatctttgtcttggggctcatctatttggtgctgcttctgctgggtcccccagccaccatctttgacaactatgacctactgcttggcgtccatggcttggcttcttccaatgagacctttgatgggctggactgtccagctgcagggagggtggccctcaaatatatgacccctgtgattctgctggtgtttgcgctggcgctgtatctgcatgctcagcaggtggagtcgactgcccgcctagacttcctctggaaactacaggcaacaggggagaaggaggagatggaggagctacaggcatacaaccggaggctgctgcataacattctgcccaaggacgtggcggcccacttcctggcccgggagcgccgcaatgatgaactctactatcagtcgtgtgagtgtgtggctgttatgtttgcctccattgccaacttctctgagttctatgtggagctggaggcaaacaatgagggtgtcgagtgcctgcggctgctcaacgagatcatcgctgactttgatgagattatcagcgaggagcggttccggcagctggaaaagatcaagacgattggtagcacctacatggctgcctcagggctgaacgccagcacctacgatcaggtgggccgctcccacatcactgccctggctgactacgccatgcggctcatggagcagatgaagcacatcaatgagcactccttcaacaatttccagatgaagattgggctgaacatgggcccagtcgtggcaggtgtcatcggggctcggaagccacagtatgacatctgggggaacacagtgaatgtctctagtcgtatggacagcacgggggtccccgaccgaatccaggtgaccacggacctgtaccaggttctagctgccaagggctaccagctggagtgtcgaggggtggtcaaggtgaagggcaagggggagatgaccacctacttcctcaatgggggccccagcagttaacagggcccagccacaaattcagctgaagggaccaaggtgggcattgagtggactctgtgctcactgggtggagctgtggcagggggcactgagcctccagaccctgctaaccacaaaagggaacatcccagcaggctgtgcttggatcatgctcgtctgccctcaagctggaaaacaaggggctacctaccgagaggattatgcaagtgactttctttcttacttggggtagggctgttccctctccaatcttccagcctttgggagcaggggaggggtcagtagcagaagcagagggaggcctcttgcctgagggattaaaatggcagcttgccatgcctacccttccctgtctgtctgggcagcaggttcagggctgagcccttcttttccctcttttttcctgggaatattttgtacaatattttgtacaaagacaggcatgaggagtgcctattccatgcttgcctttgcaatacctgcatccccagcactggtcctgggcacttccccaccccagccaggtgtccctcctatgcacagagcagaggagggagaagctctggggagccagctttggccatatttcaggagaatgtttccatgtgccaaatcttagtcccatgatctgtccccaaaggggaacaaagggacctctgacagcttagatttagccccagttcctgcacgctccagggaacggggtgtctggcctcactggtactgtgaaaaatgctcagagagcaagcctgtgtgtggggatgtcaggtcaggagctggaagttcacctgcaggtgccaaagagcaggccggccagggctggggcagtgccagactctgatctgaggaccccgtcggggtccagatcaggtcactctgccccagtgctctcttgctgtctgctgacaagggggcatggagcatctcttcctcttctgttgccaaatagaaaagggtcagggcatggagaaaggtgaccctgatcccaaacctgccctcccaagtctctggtgttggggagggcccgtgtgtttgtgtaactgtgtgtgcatgttggtctttgtgtgcatatctgttttccaggtctatgtgagtccttgtgctcctgctcctcagctctccaccccaggttgcctctctcctgtgggcctctgtcttctgggaataaagcagggtttcctacttcaggggatgtagagagatgcccaggttgcacaggagtgggatggggtgtggtagcaaaaggagggagaggagtcctttttgtgccaaatccctaagtgccgttcgggggccatgtgtgcagcatgactctccctgtctgtggcagggacccaagcgcttgcttaagccccagtgctccatgccagcacttgaactgtctggggtttgatggacagaggctgaggaatttcctggcttccccagatagtgtcctgggacatggtatgctttggggctggggtagcatggaatccctctgaggacctggatactggtactacggggtggggaagaggaaccttaaacttggctttccccagccttcagcctgagtctagcatgtttctagctccccagtcccttgtgaagccttgagggctggcagaagggttaggaggttgaactctagattcccttcctgtctttgccttccttttacccctttccctgcaacctccttgactctggcctgaatttgttggtgcctcagtttctctgtctgtacctatttaagccaaaggcactagcctgaattttgcttgaagatcactttgtcttggaaatgactagagaggcagaggagaagggtttccagagttgctaggtttgggagtggaaggggcaggcagtgcacttgcccctcctcatgccccttctgacaccagctccctgtggaggcctggtttctgggtaatgcctcccttgggcatcttcatgcatcaaccaaatgggccatcaggtacttcattagtcatggcagaaggaggggaaaagacttgttttccagacagaaaatctactcccctgtccccagccatatccctggataggaagggataggaagagactacttggtgccatggggtaggggtgagggtataagtagatcagagtgggaagacctcagccttgggtggcttgtctctgcttcttgccaggtgggagggcctgtccacaccctggatccccgtaccacagtgccagccatgcccttcccctgggctaccattgtccctttcctcacccagttggtagaggagtcaggaggtgggaggccgtgggctttggttttataatgtaaccactgtgggggtgggggaggatggtgaaccatgtatttcagtgaaatatttaatatatttaaatatcaataaaatcaaactctttgt

SEQ ID NO: 105270 - DNA, 382 bp, Homo sapiens
  Payload ID: 652
  Gene Symbol: ADCY6
  Gene Name: adenylate cyclase 6
  ENST ID: ENST00000548820
  CDS Start-End: 135-382
gtaatgggagagatatattgcaggggtggcagtggcttggggacagacagggtgcaggaccctggcttccttcctcagagaacctagcaagttgtgtgaatgtgtgtgtgtgtttaggggggcaggcagaggagatggtcactgtctgcctctgccacctcctgcagctcggtgccaatgtgctgctgttcctctgcaccaacgtcattggcatctgcacacactatccagcagaggtgtctcagcgccaggcctttcaggagacccgcggttacatccaggcccggctccacctgcagcatgagaatcggcagcaggagcggctgctgctgtcggtattgccccagcacgttgccatggagatgaaagaagacatcaacac

SEQ ID NO: 105271 - DNA, 6138 bp, Homo sapiens
  Payload ID: 653
  Gene Symbol: ADCY7
  Gene Name: adenylate cyclase 7
  Uniprot ID: P51828
  ENST ID: ENST00000254235
  CDS Start-End: 269-3511
agctgaggaactgcgtgtggagtcagcccagtctggatgcacaggaggatgctggcggcacagtgagtgaggcctggtgccagagctgtgcggaccccttgttggccatggagcagcaggcccagaggccctctccccagccctgcttgcctgcctcggagaggacagaggcctaggcccacgggggagggtgttggcagacagatgccctccaggccctggggcctccttaacggccccttaacgacacgcgtgccaagggtggaggatgccagccaaggggcgctacttcctcaacgagggcgaggagggccctgaccaagatgcgctctacgagaagtaccagctcaccagccagcatgggccgctgctgctcacgctcctgctggtggccgccactgcctgcgtggccctcatcatcattgccttcagccagggggacccctccagacaccaggccattctgggcatggcgttcctggtgctggcggtgtttgcggccctctctgtgctgatgtacgtcgagtgtctcctgcggcgctggctcagggccttggcgctgctcacctgggcctgcttggtggcgctgggctatgtgctggtgttcgacgcatggacaaaggcggcctgtgcgtgggagcaggtgcccttcttcctgttcattgtcttcgtggtgtacacactactgcccttcagcatgcggggcgctgtcgccgttggggccgtctccactgcctcccacctcctggtgctcggttctttgatgggaggcttcacgacacccagtgtccgggtggggctgcagctgctggccaacgcagtcatcttcctgtgtgggaacctgacaggcgccttccacaagcaccaaatgcaggatgcatcccgggacctcttcacctacactgtgaagtgcatccagatccgccggaagctgcgcatcgagaagcgccagcaggagaacctgctgctgtcagtgcttccggcccacatctccatgggcatgaagctggccatcatcgaacggctcaaggagcatggtgaccgtcgctgcatgcctgacaacaacttccacagcctctacgtcaagaggcaccagaatgtcagcatcctctatgcggacatcgtgggcttcacgcagctggccagcgactgttctcccaaggagctggtggtggtgctgaatgagctctttggcaagttcgaccagatcgccaaggccaacgagtgcatgcgaatcaagatcctcggcgactgctactactgtgtatcgggcctgcccgtgtcgctgcctacccacgcccggaactgcgtgaagatggggctggacatgtgccaggccatcaagcaggtgcgggaggccacgggcgtggacatcaacatgcgtgtgggcatacactcggggaatgtgctgtgcggggtcatcgggctgcgcaagtggcagtatgacgtgtggtcccacgacgtgtccctggccaaccggatggaggcagccggagtacccggccgggtgcacatcacggaggccacgctaaagcacctggacaaggcgtacgaggtggaggatgggcacgggcagcagcgggacccctacctcaaggagatgaacatccgcacctacctggtcatcgacccccggagccagcagccacccccgcccagccaacacctccccaggcccaagggggacgcggccctgaagatgcgggcgtcagtgcgcatgacccggtacctcgagtcctggggggcggcacggccctttgcacatctcaaccaccgtgagagcgtgagcagtggtgagacccacgtccccaacgggcggaggcctaagagcgttccccagcgccaccgccggaccccagacagaagcatgtcccccaaggggcggtcggaggatgactcgtacgatgacgagatgctgtcagccattgaggggctcagctccacgaggccctgctgctccaagtccgatgacttctacacctttgggtccatcttcctggagaagggctttgagcgcgagtaccgcctggcacccatcccccgggcccgccacgactttgcctgcgccagcctgatcttcgtctgcatcctgctcgtccatgtcctgctcatgcccaggacggcggcactgggtgtgtccttcgggctggtggcctgtgtactggggctggtgctgggcctgtgctttgccaccaagttctcgaggtgctgcccagctcgggggacgctctgcactatctctgagagggtggagacacagcccctgctgaggctgaccctggccgtcctgaccatcggcagcctgctcactgtggccatcatcaacctgcccctgatgcctttccaagttccagagctgcctgttggcaatgagacaggcctactggccgcgagcagcaagacaagagccctgtgtgagcccctcccgtactacacctgcagctgtgtcctgggcttcatcgcctgctcggtcttcctgaggatgagcctggagccaaaggttgtgctgctgacagtggccctggtggcctacctggtgctcttcaacctctccccatgctggcagtgggactgctgcggccaaggcctgggcaacctcaccaagcccaacggcaccaccagtggcacccctagctgttcctggaaggacctgaagaccatgaccaatttctacctggtcctgttctacatcaccctgcttacactctccagacagattgactattactgccgcttggactgcctatggaagaagaagttcaagaaggagcacgaggagtttgagaccatggagaacgtgaaccgccttcttctggagaacgtcctgccagcccacgtggctgcccactttatcggtgacaagttaaacgaggactggtaccatcagtcctatgactgcgtctgtgtcatgtttgcctccgtgccggacttcaaagtgttctacacagagtgcgatgtcaacaaagaagggctggagtgcctacgcctgctcaatgagatcattgccgacttcgacgagctcctactgaagcccaagttcagcggcgtggagaagatcaagaccatcggcagcacgtacatggcagctgcagggctcagcgtcgcctcagggcacgagaaccaggagctggagcggcagcatgcccacattggtgtcatggtggagttcagcatcgccctgatgagtaagctggacggcatcaacaggcactccttcaactccttccgcctccgcgtcggcataaaccatgggcctgtgattgctggagtgattggggcccgaaaacctcagtatgacatctggggaaacactgtcaatgtggccagccgaatggaaagcactggagaacttgggaaaatccaggttaccgaggagacctgcaccatcctccagggcctcgggtactcttgtgaatgccgtggcctgatcaacgtcaaaggcaaaggcgagctgaggacttactttgtctgtacggacactgccaagtttcaggggctggggctgaactgagggctcctgctggattccgaaaaggccgggaagccagtctccttccctgaagcaagcccaggagaagactctccgccccacgccaatcccaaaggcatgcagatggctgtgcatgttggcttctttggacctgcactggaggatttctcagacacatgcaccagattctggctcgaagcagccactgagccataatgcgcaggggaggccagaagctctgtgcctggtctgtaacagtttccaggccagctggagaatgttcactggttcggggctgactttgagatctttgttccctgaggtgccaggcaggcaactttagcacatgatgaaaacagacttccacctcagtggcctgtgggcacgcacaagtgaggtctgtttttctagacaccaagggggagtaagctgagctgtctagcacggattggagactccctctccctggtgggcctggcaatgacagcatttctcacagaggcattctggtaaatgaagctgaaaggggtgttttacatctgtaaacggtttcaaacaggtagagagaaaaacaccacaattaacactgttactttttgccttgtctggcatgtttgttttaaatgaatacattaatggggtttttatccttttgaatgacttttcagacactagacataaatctcttccctccagtgtatgctctgcctttttaaccactgacatgtaaggaggactactgtctagcatcagcttatggggtcagctggctgtggggatagagtcctgaggaatgtggtcacagcaagaaggcggggagcagcagagccttgcctttgaatgaggcagcttgtgaggcaagcattctggagagaggtgctttgaaagtaaggtgcggcctttcacctcttccttgattactcacacatctttgcgttctcccctgccgtccttcaactgtatcttacttttcttaccagaaaggaatggagtctgtttagagacaacttggacaacctgtgagtgcatctcttctttcctttagtcttcacagctaactctggagagcttcaaaactagaaggatctactccgcatgggtgcatgcagaggctcctggatctgggaagcccgccccctcacaaatgctgagccgttcttgctctgaaactgcgtgagtcaaggcaaatgcaaaaagccaggttttggggatgtgtcttactgtgcttcaacttcccaaggaattgaaagtcaacctaactgtaacaacagggtgagaaatgaccaaactgcccgtgactttttctgaatggacttcataaccggaagacttaaccggtggcctcatcaccagagcatcgccaggatttctaatgcactcagtttccctacatagcagggattcttagctaggtgtccccatgaaccccgtaaagttctacacaaagtcttgcatacaggagcctttacaagatgattatacagggttgcagattgggtgactgaccagacttgttggggtcctgggatgagttgccccgggctgcaaattaagagtacagctaagtgcgggggtggcggtggagggaacgaaaattgaacctgtctgcctgtgctgtgtcgtgtggctttatcagcccgaggaagggcaggtgtattctaatttgcacaaaggtgctgggtagactagtggcagctctcatgtgctgcacataagtggaatcagtatgaatagaagaacttgctgtataaaggaatttcatggcaacaatgctggtaagggcaattagcctcgcttaagttgccttttttacacaccaaaactttttacatgaagggctggtttcacatgaatactatactgaaatctgtgctctcaagatctagcagtgaccagggctgcccggcgggggctctcctggcaagtcaggaaggtttctgttgctaatataacatagaaacacattagtgcactgggcctctctgaggtcagcatatttgtactcttggaatatttgtttttttcttcagtaacaacagaaaccccagttgggagtttaacaaataactgactaccactcactcatgcatttttatttccaattaaagcaaagcactgtgctgtgctcagataataatagtttgtaagtaaaagtttttagttttcagtgttcaggttatagaatataactgaccataaaaattacctgcaggtattttctttttatgaacttgtttttaaattaccaagtaattactggtgtcattttgttttatgacagacacacgtatctaacaaacaaacaaacagtgaccttctccatgggtcaaggacttccttacaatttctcctgagttaacttttgtgaaaataatacctaaggttttctggcttattgaggaaatttcctaacaaacaaacaaacaaacaaacagaagagaagatcattaaccactgtatactttgtgtatataataggtcagtgtaaagaaatatgatttgaggtggtgcatgcaagtaactagggtttattctatataatgaatatttatagatctgtaacatttgtttcaaaatgctgtttcatttttataaagtaccagtgtttagctgctttttatacattaaattagcaatttgaaaaactc

SEQ ID NO: 105272 - DNA, 6213 bp, Homo sapiens
  Payload ID: 653
  Gene Symbol: ADCY7
  Gene Name: adenylate cyclase 7
  Uniprot ID: P51828
  ENST ID: ENST00000394697
  CDS Start-End: 341-3583
ccggagcaggaagtggtgggtcccagatgtgactcactctcattaggtagcgtggaaggagccttcggatggagctgaggaactgcgtgtggagtcagcccagtctggatgcacaggaggatgctggcggcacagtgagtgaggcctggtgccagagctgtgcggaccccttgttggccatggagcagcaggcccagaggccctctccccagccctgcttgcctgcctcggagaggacagaggcctaggcccacgggggagggtgttggcagacagatgccctccaggccctggggcctccttaacggccccttaacgacacgcgtgccaagggtggaggatgccagccaaggggcgctacttcctcaacgagggcgaggagggccctgaccaagatgcgctctacgagaagtaccagctcaccagccagcatgggccgctgctgctcacgctcctgctggtggccgccactgcctgcgtggccctcatcatcattgccttcagccagggggacccctccagacaccaggccattctgggcatggcgttcctggtgctggcggtgtttgcggccctctctgtgctgatgtacgtcgagtgtctcctgcggcgctggctcagggccttggcgctgctcacctgggcctgcttggtggcgctgggctatgtgctggtgttcgacgcatggacaaaggcggcctgtgcgtgggagcaggtgcccttcttcctgttcattgtcttcgtggtgtacacactactgcccttcagcatgcggggcgctgtcgccgttggggccgtctccactgcctcccacctcctggtgctcggttctttgatgggaggcttcacgacacccagtgtccgggtggggctgcagctgctggccaacgcagtcatcttcctgtgtgggaacctgacaggcgccttccacaagcaccaaatgcaggatgcatcccgggacctcttcacctacactgtgaagtgcatccagatccgccggaagctgcgcatcgagaagcgccagcaggagaacctgctgctgtcagtgcttccggcccacatctccatgggcatgaagctggccatcatcgaacggctcaaggagcatggtgaccgtcgctgcatgcctgacaacaacttccacagcctctacgtcaagaggcaccagaatgtcagcatcctctatgcggacatcgtgggcttcacgcagctggccagcgactgttctcccaaggagctggtggtggtgctgaatgagctctttggcaagttcgaccagatcgccaaggccaacgagtgcatgcgaatcaagatcctcggcgactgctactactgtgtatcgggcctgcccgtgtcgctgcctacccacgcccggaactgcgtgaagatggggctggacatgtgccaggccatcaagcaggtgcgggaggccacgggcgtggacatcaacatgcgtgtgggcatacactcggggaatgtgctgtgcggggtcatcgggctgcgcaagtggcagtatgacgtgtggtcccacgacgtgtccctggccaaccggatggaggcagccggagtacccggccgggtgcacatcacggaggccacgctaaagcacctggacaaggcgtacgaggtggaggatgggcacgggcagcagcgggacccctacctcaaggagatgaacatccgcacctacctggtcatcgacccccggagccagcagccacccccgcccagccaacacctccccaggcccaagggggacgcggccctgaagatgcgggcgtcagtgcgcatgacccggtacctcgagtcctggggggcggcacggccctttgcacatctcaaccaccgtgagagcgtgagcagtggtgagacccacgtccccaacgggcggaggcctaagagcgttccccagcgccaccgccggaccccagacagaagcatgtcccccaaggggcggtcggaggatgactcgtacgatgacgagatgctgtcagccattgaggggctcagctccacgaggccctgctgctccaagtccgatgacttctacacctttgggtccatcttcctggagaagggctttgagcgcgagtaccgcctggcacccatcccccgggcccgccacgactttgcctgcgccagcctgatcttcgtctgcatcctgctcgtccatgtcctgctcatgcccaggacggcggcactgggtgtgtccttcgggctggtggcctgtgtactggggctggtgctgggcctgtgctttgccaccaagttctcgaggtgctgcccagctcgggggacgctctgcactatctctgagagggtggagacacagcccctgctgaggctgaccctggccgtcctgaccatcggcagcctgctcactgtggccatcatcaacctgcccctgatgcctttccaagttccagagctgcctgttggcaatgagacaggcctactggccgcgagcagcaagacaagagccctgtgtgagcccctcccgtactacacctgcagctgtgtcctgggcttcatcgcctgctcggtcttcctgaggatgagcctggagccaaaggttgtgctgctgacagtggccctggtggcctacctggtgctcttcaacctctccccatgctggcagtgggactgctgcggccaaggcctgggcaacctcaccaagcccaacggcaccaccagtggcacccctagctgttcctggaaggacctgaagaccatgaccaatttctacctggtcctgttctacatcaccctgcttacactctccagacagattgactattactgccgcttggactgcctatggaagaagaagttcaagaaggagcacgaggagtttgagaccatggagaacgtgaaccgccttcttctggagaacgtcctgccagcccacgtggctgcccactttatcggtgacaagttaaacgaggactggtaccatcagtcctatgactgcgtctgtgtcatgtttgcctccgtgccggacttcaaagtgttctacacagagtgcgatgtcaacaaagaagggctggagtgcctacgcctgctcaatgagatcattgccgacttcgacgagctcctactgaagcccaagttcagcggcgtggagaagatcaagaccatcggcagcacgtacatggcagctgcagggctcagcgtcgcctcagggcacgagaaccaggagctggagcggcagcatgcccacattggtgtcatggtggagttcagcatcgccctgatgagtaagctggacggcatcaacaggcactccttcaactccttccgcctccgcgtcggcataaaccatgggcctgtgattgctggagtgattggggcccgaaaacctcagtatgacatctggggaaacactgtcaatgtggccagccgaatggaaagcactggagaacttgggaaaatccaggttaccgaggagacctgcaccatcctccagggcctcgggtactcttgtgaatgccgtggcctgatcaacgtcaaaggcaaaggcgagctgaggacttactttgtctgtacggacactgccaagtttcaggggctggggctgaactgagggctcctgctggattccgaaaaggccgggaagccagtctccttccctgaagcaagcccaggagaagactctccgccccacgccaatcccaaaggcatgcagatggctgtgcatgttggcttctttggacctgcactggaggatttctcagacacatgcaccagattctggctcgaagcagccactgagccataatgcgcaggggaggccagaagctctgtgcctggtctgtaacagtttccaggccagctggagaatgttcactggttcggggctgactttgagatctttgttccctgaggtgccaggcaggcaactttagcacatgatgaaaacagacttccacctcagtggcctgtgggcacgcacaagtgaggtctgtttttctagacaccaagggggagtaagctgagctgtctagcacggattggagactccctctccctggtgggcctggcaatgacagcatttctcacagaggcattctggtaaatgaagctgaaaggggtgttttacatctgtaaacggtttcaaacaggtagagagaaaaacaccacaattaacactgttactttttgccttgtctggcatgtttgttttaaatgaatacattaatggggtttttatccttttgaatgacttttcagacactagacataaatctcttccctccagtgtatgctctgcctttttaaccactgacatgtaaggaggactactgtctagcatcagcttatggggtcagctggctgtggggatagagtcctgaggaatgtggtcacagcaagaaggcggggagcagcagagccttgcctttgaatgaggcagcttgtgaggcaagcattctggagagaggtgctttgaaagtaaggtgcggcctttcacctcttccttgattactcacacatctttgcgttctcccctgccgtccttcaactgtatcttacttttcttaccagaaaggaatggagtctgtttagagacaacttggacaacctgtgagtgcatctcttctttcctttagtcttcacagctaactctggagagcttcaaaactagaaggatctactccgcatgggtgcatgcagaggctcctggatctgggaagcccgccccctcacaaatgctgagccgttcttgctctgaaactgcgtgagtcaaggcaaatgcaaaaagccaggttttggggatgtgtcttactgtgcttcaacttcccaaggaattgaaagtcaacctaactgtaacaacagggtgagaaatgaccaaactgcccgtgactttttctgaatggacttcataaccggaagacttaaccggtggcctcatcaccagagcatcgccaggatttctaatgcactcagtttccctacatagcagggattcttagctaggtgtccccatgaaccccgtaaagttctacacaaagtcttgcatacaggagcctttacaagatgattatacagggttgcagattgggtgactgaccagacttgttggggtcctgggatgagttgccccgggctgcaaattaagagtacagctaagtgcgggggtggcggtggagggaacgaaaattgaacctgtctgcctgtgctgtgtcgtgtggctttatcagcccgaggaagggcaggtgtattctaatttgcacaaaggtgctgggtagactagtggcagctctcatgtgctgcacataagtggaatcagtatgaatagaagaacttgctgtataaaggaatttcatggcaacaatgctggtaagggcaattagcctcgcttaagttgccttttttacacaccaaaactttttacatgaagggctggtttcacatgaatactatactgaaatctgtgctctcaagatctagcagtgaccagggctgcccggcgggggctctcctggcaagtcaggaaggtttctgttgctaatataacatagaaacacattagtgcactgggcctctctgaggtcagcatatttgtactcttggaatatttgtttttttcttcagtaacaacagaaaccccagttgggagtttaacaaataactgactaccactcactcatgcatttttatttccaattaaagcaaagcactgtgctgtgctcagataataatagtttgtaagtaaaagtttttagttttcagtgttcaggttatagaatataactgaccataaaaattacctgcaggtattttctttttatgaacttgtttttaaattaccaagtaattactggtgtcattttgttttatgacagacacacgtatctaacaaacaaacaaacagtgaccttctccatgggtcaaggacttccttacaatttctcctgagttaacttttgtgaaaataatacctaaggttttctggcttattgaggaaatttcctaacaaacaaacaaacaaacaaacagaagagaagatcattaaccactgtatactttgtgtatataataggtcagtgtaaagaaatatgatttgaggtggtgcatgcaagtaactagggtttattctatataatgaatatttatagatctgtaacatttgtttcaaaatgctgtttcatttttataaagtaccagtgtttagctgctttttatacattaaattagcaatttgaaaaactcaaa

SEQ ID NO: 105273 - DNA, 2090 bp, Homo sapiens
  Payload ID: 653
  Gene Symbol: ADCY7
  Gene Name: adenylate cyclase 7
  ENST ID: ENST00000537579
  CDS Start-End: 270-1571
gagctgaggaactgcgtgtggagtcagcccagtctggatgcacaggaggatgctggcggcacagtgagtgaggcctggtgccagagctgtgcggaccccttgttggccatggagcagcaggcccagaggccctctccccagccctgcttgcctgcctcggagaggacagaggcctaggcccacgggggagggtgttggcagacagatgccctccaggccctggggcctccttaacggccccttaacgacacgcgtgccaagggtggaggatgccagccaaggggcgctacttcctcaacgagggcgaggagggccctgaccaagatgcgctctacgagaagtaccagctcaccagccagcatgggccgctgctgctcacgctcctgctggtggccgccactgcctgcgtggccctcatcatcattgccttcagccagggggacccctccagacaccaggccattctgggcatggcgttcctggtgctggcggtgtttgcggccctctctgtgctgatgtacgtcgagtgtctcctgcggcgctggctcagggccttggcgctgctcacctgggcctgcttggtggcgctgggctatgtgctggtgttcgacgcatggacaaaggcggcctgtgcgtgggagcaggtgcccttcttcctgttcattgtcttcgtggtgtacacactactgcccttcagcatgcggggcgctgtcgccgttggggccgtctccactgcctcccacctcctggtgctcggttctttgatgggaggcttcacgacacccagtgtccgggtggggctgcagctgctggccaacgcagtcatcttcctgtgtgggaacctgacaggcgccttccacaagcaccaaatgcaggatgcatcccgggacctcttcacctacactgtgaagtgcatccagatccgccggaagctgcgcatcgagaagcgccagcaggagaacctgctgctgtcagtgcttccggcccacatctccatgggcatgaagctggccatcatcgaacggctcaaggagcatggtgaccgtcgctgcatgcctgacaacaacttccacagcctctacgtcaagaggcaccagaatgtcagcatcctctatgcggacatcgtgggcttcacgcagctggccagcgactgttctcccaaggagctggtggtggtgctgaatgagctctttggcaagttcgaccagatcgccaaggccaacgagtgcatgcgaatcaagatcctcggcgactgctactactgtgtatcgggcctgcccgtgtcgctgcctacccacgcccggaactgcgtgaagatggggctggacatgtgccaggccatcaagcaggtgcgggaggccacgggcgtggacatcaacatgcgtgtgggcatacactcggggaatgtgctgtgcggggtcatcgggctgcgcaagtggcagtatgacgtgtggtcccacgacgtgtccctggccaaccggatggaggcagccggagtacccggccgggtgcacatcacggaggccacgctaaagcacctggacaaggccctgctgctccaagtccgatgacttctacacctttgggtccatcttcctggagaagggctttgagcgcgagtaccgcctggcacccatcccccgggcccgccacgactttgcctgcgccagcctgatcttcgtctgcatcctgctcgtccatgtcctgctcatgcccaggacggcggcactgggtgtgtccttcgggctggtggcctgtgtactggggctggtgctgggcctgtgctttgccaccaagttctcgaggtgctgcccagctcgggggacgctctgcactatctctgagagggtggagacacagcccctgctgaggctgaccctggccgtcctgaccatcggcagcctgctcactgtggccatcatcaacctgcccctgatgcctttccaagttccagagctgcctgttggcaatgagacaggcctactggccgcgagcagcaagacaagagccctgtgtgagcccctcccgcacctgcatactgttttttcccgtttaaatgagctcacttcataagaaataaaactacagtg

SEQ ID NO: 105274 - DNA, 670 bp, Homo sapiens
  Payload ID: 653
  Gene Symbol: ADCY7
  Gene Name: adenylate cyclase 7
  ENST ID: ENST00000566761
  CDS Start-End: 345-670
cacagaggaggccagggaagctctagaggcgttttttggccaaggggtcaagttcctgtctgcttcgtctccgcagagctgaggaactgcgtgtggagtcagcccagtctggatgcacaggaggatgctggcggcacagtgagtgaggcctggtgccagagctgtgcggaccccttgttggccatggagcagcaggcccagaggccctctccccagccctgcttgcctgcctcggagaggacagaggcctaggcccacgggggagggtgttggcagacagatgccctccaggccctggggcctccttaacggccccttaacgacacgcgtgccaagggtggaggatgccagccaaggggcgctacttcctcaacgagggcgaggagggccctgaccaagatgcgctctacgagaagtaccagctcaccagccagcatgggccgctgctgctcacgctcctgctggtggccgccactgcctgcgtggccctcatcatcattgccttcagccaggggagacatggcctcgctatgttgcccaggctggtcttgaactcctggcctcaagtaatcctcctgccttggcctcccaaagtgttgggattacaggacccctccagacaccaggccattctgggcatggcgttcctggtgctggcggtgtttgcggc

SEQ ID NO: 105275 - DNA, 2304 bp, Homo sapiens
  Payload ID: 653
  Gene Symbol: ADCY7
  Gene Name: adenylate cyclase 7
  ENST ID: ENST00000567277
  CDS Start-End: 104-1696
cagaggcctaggcccacgggggagggtgttggcagacagatgccctccaggccctggggcctccttaacggccccttaacgacacgcgtgccaagggtggaggatgccagccaaggggcgctacttcctcaacgagggcgaggagggccctgaccaagatgcgctctacgagaagtaccagctcaccagccagcatgggccgctgctgctcacgctcctgctggtggccgccactgcctgcgtggccctcatcatcattgccttcagccagggggacccctccagacaccaggccattctgggcatggcgttcctggtgctggcggtgtttgcggccctctctgtgctgatgtacgtcgagtgtctcctgcggcgctggctcagggccttggcgctgctcacctgggcctgcttggtggcgctgggctatgtgctggtgttcgacgcatggacaaaggcggcctgtgcgtgggagcaggtgcccttcttcctgttcattgtcttcgtggtgtacacactactgcccttcagcatgcggggcgctgtcgccgttggggccgtctccactgcctcccacctcctggtgctcggttctttgatgggaggcttcacgacacccagtgtccgggtggggctgcagctgctggccaacgcagtcatcttcctgtgtgggaacctgacaggcgccttccacaagcaccaaatgcaggatgcatcccgggacctcttcacctacactgtgaagtgcatccagatccgccggaagctgcgcatcgagaagcgccagcaggagaacctgctgctgtcagtgcttccggcccacatctccatgggcatgaagctggccatcatcgaacggctcaaggagcatggtgaccgtcgctgcatgcctgacaacaacttccacagcctctacgtcaagaggcaccagaatgtcagcatcctctatgcggacatcgtgggcttcacgcagctggccagcgactgttctcccaaggagctggtggtggtgctgaatgagctctttggcaagttcgaccagatcgccaaggccaacgagtgcatgcgaatcaagatcctcggcgactgctactactgtgtatcgggcctgcccgtgtcgctgcctacccacgcccggaactgcgtgaagatggggctggacatgtgccaggccatcaagcaggtgcgggaggccacgggcgtggacatcaacatgcgtgtgggcatacactcggggaatgtgctgtgcggggtcatcgggctgcgcaagtggcagtatgacgtgtggtcccacgacgtgtccctggccaaccggatggaggcagccggagtacccggccgggtgcacatcacggaggccacgctaaagcacctggacaaggcgtacgaggtggaggatgggcacgggcagcagcgggacccctacctcaaggagatgaacatccgcacctacctggtcatcgacccccggagccagcagccacccccgcccagccaacacctccccaggcccaagggggacgcggccctgaagatgcgggcgtcagtgcgcatgacccggtacctcgagtcctggggggcggcacggccctttgcacatctcaaccaccgtgagagcgtgagcagtgagcgttccccagcgccaccgccggaccccagacagaagcatgtcccccaaggggcggtcggaggatgactcgtacgatgacgagatgctgtcagccattgaggggctcagctccacgaggccctgctgctccaagtccgatgacttctacacctttgggtccatcttcctggagaagggctttgagcgcgagtaccgcctggcacccatcccccgggcccgccacgactttgcctgcgccagcctgatcttcgtctgcatcctgctcgtccatgtcctgctcatgcccaggacggcggcactgggtgtgtccttcgggctggtggcctgtgtactggggctggtgctgggcctgtgctttgccaccaagttctcgaggtgctgcccagctcgggggacgctctgcactatctctgagagggtggagacacagcccctgctgaggctgaccctggccgtcctgaccatcggcagcctgctcactgtggccatcatcaacctgcccctgatgcctttccaagttccagagctgcctgttggcaatgagacaggcctactggccgcgagcagcaagacaagagccctgtgtgagcccctcccgcacctgcatactgttttttcccgtttaaatgagctcacttcataagaaataaaactacagtgaaaacaacactgga

SEQ ID NO: 105276 - DNA, 2535 bp, Homo sapiens
  Payload ID: 653
  Gene Symbol: ADCY7
  Gene Name: adenylate cyclase 7
  ENST ID: ENST00000566433
  CDS Start-End: 306-2510
actctcattaggtagcgtggaaggagccttcggatggagctgaggaactgcgtgtggagtcagcccagtctggatgcacaggaggatgctggcggcacagtgagtgaggcctggtgccagagctgtgcggaccccttgttggccatggagcagcaggcccagaggccctctccccagccctgcttgcctgcctcggagaggacagaggcctaggcccacgggggagggtgttggcagacagatgccctccaggccctggggcctccttaacggccccttaacgacacgcgtgccaagggtggaggatgccagccaaggggcgctacttcctcaacgagggcgaggagggccctgaccaagatgcgctctacgagaagtaccagctcaccagccagcatgggccgctgctgctcacgctcctgctggtggccgccactgcctgcgtggccctcatcatcattgccttcagccagggggacccctccagacaccaggccattctgggcatggcgttcctggtgctggcggtgtttgcggccctctctgtgctgatgtacgtcgagtgtctcctgcggcgctggctcagggccttggcgctgctcacctgggcctgcttggtggcgctgggctatgtgctggtgttcgacgcatggacaaaggcggcctgtgcgtgggagcaggtgcccttcttcctgttcattgtcttcgtggtgtacacactactgcccttcagcatgcggggcgctgtcgccgttggggccgtctccactgcctcccacctcctggtgctcggttctttgatgggaggcttcacgacacccagtgtccgggtggggctgcagctgctggccaacgcagtcatcttcctgtgtgggaacctgacaggcgccttccacaagcaccaaatgcaggatgcatcccgggacctcttcacctacactgtgaagtgcatccagatccgccggaagctgcgcatcgagaagcgccagcaggagaacctgctgctgtcagtgcttccggcccacatctccatgggcatgaagctggccatcatcgaacggctcaaggagcatggtgaccgtcgctgcatgcctgacaacaacttccacagcctctacgtcaagaggcaccagaatgtcagcatcctctatgcggacatcgtgggcttcacgcagctggccagcgactgttctcccaaggagctggtggtggtgctgaatgagctctttggcaagttcgaccagatcgccaaggccaacgagtgcatgcgaatcaagatcctcggcgactgctactactgtgtatcgggcctgcccgtgtcgctgcctacccacgcccggaactgcgtgaagatggggctggacatgtgccaggccatcaagcaggtgcgggaggccacgggcgtggacatcaacatgcgtgtgggcatacactcggggaatgtgctgtgcggggtcatcgggctgcgcaagtggcagtatgacgtgtggtcccacgacgtgtccctggccaaccggatggaggcagccggagtacccggccgggtgcacatcacggaggccacgctaaagcacctggacaaggcgtacgaggtggaggatgggcacgggcagcagcgggacccctacctcaaggagatgaacatccgcacctacctggtcatcgacccccggagccagcagccacccccgcccagccaacacctccccaggcccaagggggacgcggccctgaagatgcgggcgtcagtgcgcatgacccggtacctcgagtcctggggggcggcacggccctttgcacatctcaaccaccgtgagagcgtgagcagtggtgagacccacgtccccaacgggcggaggcctaagagcgttccccagcgccaccgccggaccccagacagaagcatgtcccccaaggggcggtcggaggatgactcgtacgatgacgagatgctgtcagccattgaggggctcagctccacgaggccctgctgctccaagtccgatgacttctacacctttgggtccatcttcctggagaagggctttgagcgcgagtaccgcctggcacccatcccccgggcccgccacgactttgcctgcgccagcctgatcttcgtctgcatcctgctcgtccatgtcctgctcatgcccaggacggcggcactgggtgtgtccttcgggctggtggcctgtgtactggggctggtgctgggcctgtgctttgccaccaagttctcgaggtgctgcccagctcgggggacgctctgcactatctctgagagggtggagacacagcccctgctgaggctgaccctggccgtcctgaccatcggcagcctgctcactgtggccatcatcaacctgcccctgatgcctttccaagttccagagctgcctgttggcaatgagacaggcctactggccgcgagcagcaagacaagagccctgtgtgagcccctcccgcacctgcatactgttttttcccgtttaaatgagctcacttcataagaaataaaactacagtgaaaacaac

SEQ ID NO: 105277 - DNA, 497 bp, Homo sapiens
  Payload ID: 653
  Gene Symbol: ADCY7
  Gene Name: adenylate cyclase 7
  ENST ID: ENST00000569265
  CDS Start-End: 447-497
gtcagttgataaacactgttgcctgaacacccgctgtgtgcagagacctagcagataccctggttggggcagtgctaaggattctgccttctgggagctcatttcctgagcagaattccctcttggtacctggcctggcacctggtgcacagaaggcatgagtgcacatctgctgaagagctgaggaactgcgtgtggagtcagcccagtctggatgcacaggaggatgctggcggcacagtgagtgaggcctggtgccagagctgtgcggaccccttgttggccatggagcagcaggcccagaggccctctccccagccctgcttgcctgcctcggagaggacagaggcctaggcccacgggggagggtgttggcagacagatgccctccaggccctggggcctccttaacggccccttaacgacacgcgtgccaagggtggaggatgccagccaaggggcgctacttcctcaacgagggcgaggagggccctgac

SEQ ID NO: 105278 - DNA, 578 bp, Homo sapiens
  Payload ID: 653
  Gene Symbol: ADCY7
  Gene Name: adenylate cyclase 7
  ENST ID: ENST00000564965
  CDS Start-End: 336-578
gtgccgggccagcccgctgccactggggcggccactcgggcggcggtggagcgggagcgcgcagcagagctgaggaactgcgtgtggagtcagcccagtctggatgcacaggaggatgctggcggcacagtgagtgaggcctggtgccagagctgtgcggaccccttgttggccatggagcagcaggcccagaggccctctccccagccctgcttgcctgcctcggagaggacagaggcctaggcccacgggggagggtgttggcagacagatgccctccaggccctggggcctccttaacggccccttaacgacacgcgtgccaagggtggaggatgccagccaaggggcgctacttcctcaacgagggcgaggagggccctgaccaagatgcgctctacgagaagtaccagctcaccagccagcatgggccgctgctgctcacgctcctgctggtggccgccactgcctgcgtggccctcatcatcattgccttcagccagggggacccctccagacaccaggccattctgggcatggcgttcctggtgctggcggtgtttgcggccctctctgtg

SEQ ID NO: 105279 - DNA, 5938 bp, Homo sapiens
  Payload ID: 654
  Gene Symbol: ADCY8
  Gene Name: adenylate cyclase 8 (brain)
  Uniprot ID: P40145
  ENST ID: ENST00000286355
  CDS Start-End: 2094-5849
actggctgcagccgcagtcttggtggaggaggtggtgaccaccaccgctcctccacctgcatccggctgcgggactgcggcggccgcgtttgccctgcagaccctgcaccccgggacgcggctcatctgtcattagcaccggcactaagctcccaccgctcagcgacttggtccgccgcaagctccgccgcaggctttgtccgctagcgctcggctgagtctgggcgggcgggaaacctgggctagggcgaggcggggcccctggacatgcctttctccacgtccgcctcctcgaccctattgtaagcggagaaacttagtgtgcgaggcaggcaggggacgtccccattttgatgtcccgtaccctccacccccttcggatcgaggtagtaaagaggctcctgtaggaaactgactgcctctatgattgcggcctcttgggggattttgcgtttagcccgaaagttggctttgccaaaagacgcacgggtaggaagggcgaaaaggaaaccctgtattccgtcgcgctgggctctccgagtccgtgcgcaaagcggcctacgagtcctggctccgcacctgcagaggacaagagccaatgcctaaaaaagaacagcggaggaaccggctggcgcggccagctggaacgctggatcgcagtgcgcccagggaaggccgggggcgcccgccggccctagccctcagtggtcctctcccacgccggcccgcgcgtgcctctgcctacaagacctggggcgtcctggccagatctggatggcaggtccctccgccacccccggcccggttccgggggcgtggcttggcgcgggggcgggtttaagtcaccgcgggtgtctgaccactctgacaggtctccaaatttctcccagtcgcctggcgcccgcggtgcgtttcagagctccagggtggcacgcggcggcgcttccctagatccagaggcgtctctgtcgacttccacgcggcctcgggcctcccttctcctccaaaccttcgcctcatccgccaagcttcggttctcagcctcagatatccgcaccggcggcttctcttcgttctcggagctcttggctttggagccctcaccactttttccttcccccgcctctcctgatcctcctagctccgagccaaatggactccaaagaacgaaataaaggggatgagaactgtgtgctgcgacccttcgaaagcacagctgaaagcgttgacctcgtcttatagctcaggctgggaccctggagcgagagtccccacaccccctccgggagggatgcttctggccagagccagcgctgcgctgtcagtccttgctcccgaactaggaaagagcctaggagggagcctcagcataccccttcctccaaattaactatttggtgaattgttagcgccgaggctaccacctctccaaccctgtcgcggggcgccccgccacctcaccgtgaccccctcctcctccttctttgcccccgcccccagctccgcccctgctccccatcccggcgcaatggagttctccgaagggcgatgattccagccacatctgctaacttcgcacccatcgctgccgccggtcaccgccggccaggccccctgcagccgcggagcagtgggcgtccaaagcccagtgcagcagccaggacccgcccgacgcgcagcagaagcacggcgcccaggcgcttaggcgtctcttggagagcaaaggctgcgccaaaacgctgagcctagaatcaaccaaggagcctgagcccaggaaggggctgcgtggctcacagcgctgcggctcctgaggacaaatagccactgccgctgcgtacccaagctgcgccggctggcgggagagcagcacgcaaggacgccgaggtccgccgcgatcttccaggtgccctttgcccctgggcacagtatgacccgacctacagggagccctagcgcagggctcctgcaacggggcagcctaggataaaaaggatccttgccaagctcctaccaggccgcctttgagtctttaggaacccctcctccggctgcctccccaaggttctgggcctccttccctgcggcccagagccatggagctctccgatgtgcgctgccttacaggcagcgaggaactctacaccatccacccgacgcccccggccggcgacggcaggagcgcctcccggccgcagcggctgctgtggcagacggcggtgcgacacatcacggagcagcgcttcattcacgggcaccggggaggcagcggcagcgggagtggaggctcgggcaaagcctcggaccctgcgggcggcggccccaaccaccacgcgccgcagctgtcaggcgactcggcgctgcccctctactcgctgggcccgggagagcgagcgcacagcacctgcggcaccaaagtcttcccggaacgcagcgggagcggcagtgccagcggcagcggaggcgggggcgacctgggcttcctgcaccttgactgtgcccctagcaactcggatttctttcttaatgggggctatagctaccgaggggtcattttccccaccctgcgcaactccttcaaatctcgggatttggaacgcctctaccagcgctatttcttgggccaaaggcgcaaatcggaagtggtgatgaacgtgctggacgtgctgaccaaactcactctcttggtcctacacttgagcctggcctcggcccccatggacccgctcaagggcatcctgctgggcttcttcaccggcattgaggtagtgatctgcgccctggtggtggtcaggaaggacaccacctcccacacgtacctgcagtacagcggcgtggtcacctgggtggccatgaccacccagatcctggcagcaggcctcggctacgggctcctgggcgacggcataggctacgtgctcttcacgctcttcgccacctacagtatgctgccgctgccgctcacctgggccatcctggccggcctgggcacctcgctgctgcaggtcatcctccaagtggtcataccccggctggcggtcatttccatcaaccaggttgtggcccaggcagtgctattcatgtgtatgaacacagctggaatcttcatcagttacctgtcagaccgggcccagcgccaagctttcctggagactcggaggtgtgtggaggccaggctgcgcctggagacagagaaccaaagacaggagcggctcgtgctttctgtgctcccccggtttgttgtcctggaaatgatcaacgacatgaccaatgtggaagatgagcacctgcagcaccagttccatcggatctacatccatcgctatgagaacgtcagtattctttttgcagatgttaaaggatttaccaacctctccacgaccttgtctgctcaggagctggtcaggatgctcaacgagctctttgccagatttgatcgactggcccatgagcatcactgccttcgtattaaaatcctgggggactgctactactgcgtgtctggacttcctgagccccgccaggaccatgcccactgctgtgttgaaatgggtctcagcatgatcaaaaccatcaggtatgtgcggtcaaggacaaaacacgatgttgacatgaggattggaatccactccggctcggtgctgtgcggtgttttgggactaaggaagtggcagtttgatgtctggtcttgggatgtggatattgcaaacaaactcgaatctggaggaatccctgggaggattcacatttccaaagccacgctggactgtctcaacggtgactataacgtggaagagggccatggtaaagagaggaatgaattcctgaggaagcataatatcgaaacttacttaattaagcagcctgaggacagtctgctgtccttgcctgaagatatcgtcaaggagtcagtgagctcctcagaccggagaaacagtggggccacattcactgaaggatcctggagccctgaactgccctttgataatatcgtggggaaacagaatactctggctgccctaacaagaaattcaataaatctgcttccaaaccatcttgcacaagctttgcatgtccagtctgggcctgaggaaattaacaagagaatagaacataccatcgacttgcggagtggcgataaattgagaagagagcatatcaagccattctcactgatgtttaaagactccagcctggagcacaagtattctcaaatgagggatgaagtgttcaagtcaaacttggtctgtgcatttatcgttcttctatttatcacggcaatacaaagtttgcttccttcttcaagagtgatgccaatgaccatccagttctccattctgattatgctgcactcggctctggtcctcatcaccacagcagaggattataaatgtttgcccctcatcctccggaaaacttgctgttggattaatgagacctatttggcccggaacgtcatcatctttgcatccattttgattaatttcctgggtgccatcttaaatatcctgtggtgtgattttgacaagtcgatacccttgaagaacctgactttcaattcctcagctgtgtttacagatatctgctcctacccagagtactttgtcttcacgggggtgttggccatggtgacctgtgcagttttcctccggctgaactccgtcctgaagctggcagtgctgctgatcatgattgccatctatgccctgctcactgagaccgtctacgcaggcctctttctgcgttatgacaacctcaaccacagtggagaagatttcctggggaccaaggaggtatcactgctactgatggccatgttcctcctggctgtgttctaccatggacagcagctggagtacacagcccgcctggacttcctttggcgagtacaggccaaagaggagatcaatgagatgaaggagctgagggaacacaatgagaacatgctccggaatatcttacccagccatgtggcccgccatttcctagagaaggaccgagacaatgaggagctgtattctcaatcctatgatgctgttggggtgatgtttgcctccatcccaggatttgcggacttttactctcagactgaaatgaataaccagggagtggaatgcctgcgcttgctcaatgagatcattgctgacttcgatgagttgcttggtgaagaccgatttcaagacattgaaaagattaagaccattggcagcacctacatggccgtgtcaggcctgtcacctgaaaaacagcaatgtgaagacaagtggggacatttgtgtgctctggctgacttctcactcgccctgacagaaagcatacaggagatcaacaagcattcattcaacaattttgaactccggattggcatcagccacggctcagtggtagctggcgttatcggcgctaagaaaccacagtatgacatttggggcaaaactgtgaacctggcaagccgaatggacagcacgggggttagtggccggatccaagtcccagaggagacctatctcatcctgaaggaccagggctttgcctttgattaccgaggggagatctatgtgaagggtatcagtgaacaggaaggaaaaatcaaaacgtactttcttctgggaagagtccaacccaacccattcatcttgcccccaagaagactgcctgggcagtactccctggccgcggttgtcctgggacttgtccagtccctcaataggcaaaggcagaagcagctactcaatgagaacaacaacacaggaatcatcaagggtcattacaaccggcggactttgttgtcacccagcggcacagagcctggagcccaggctgaaggcaccgacaaatctgatttgccataaaagcattttctttctgttttttttttttgtatttcttttatatataaaataaatatactaataaaaaggtttaattttttttagaacaa

SEQ ID NO: 105280 - DNA, 3363 bp, Homo sapiens
  Payload ID: 654
  Gene Symbol: ADCY8
  Gene Name: adenylate cyclase 8 (brain)
  ENST ID: ENST00000377928
  CDS Start-End: 1-3363
atggagctctccgatgtgcgctgccttacaggcagcgaggaactctacaccatccacccgacgcccccggccggcgacggcaggagcgcctcccggccgcagcggctgctgtggcagacggcggtgcgacacatcacggagcagcgcttcattcacgggcaccggggaggcagcggcagcgggagtggaggctcgggcaaagcctcggaccctgcgggcggcggccccaaccaccacgcgccgcagctgtcaggcgactcggcgctgcccctctactcgctgggcccgggagagcgagcgcacagcacctgcggcaccaaagtcttcccggaacgcagcgggagcggcagtgccagcggcagcggaggcgggggcgacctgggcttcctgcaccttgactgtgcccctagcaactcggatttctttcttaatgggggctatagctaccgaggggtcattttccccaccctgcgcaactccttcaaatctcgggatttggaacgcctctaccagcgctatttcttgggccaaaggcgcaaatcggaagtggtgatgaacgtgctggacgtgctgaccaaactcactctcttggtcctacacttgagcctggcctcggcccccatggacccgctcaagggcatcctgctgggcttcttcaccggcattgaggtagtgatctgcgccctggtggtggtcaggaaggacaccacctcccacacgtacctgcagtacagcggcgtggtcacctgggtggccatgaccacccagatcctggcagcaggcctcggctacgggctcctgggcgacggcataggctacgtgctcttcacgctcttcgccacctacagtatgctgccgctgccgctcacctgggccatcctggccggcctgggcacctcgctgctgcaggtcatcctccaagtggtcataccccggctggcggtcatttccatcaaccaggttgtggcccaggcagtgctattcatgtgtatgaacacagctggaatcttcatcagttacctgtcagaccgggcccagcgccaagctttcctggagactcggaggtgtgtggaggccaggctgcgcctggagacagagaaccaaagacaggagcggctcgtgctttctgtgctcccccggtttgttgtcctggaaatgatcaacgacatgaccaatgtggaagatgagcacctgcagcaccagttccatcggatctacatccatcgctatgagaacgtcagtattctttttgcagatgttaaaggatttaccaacctctccacgaccttgtctgctcaggagctggtcaggatgctcaacgagctctttgccagatttgatcgactggcccatgagcatcactgccttcgtattaaaatcctgggggactgctactactgcgtgtctggacttcctgagccccgccaggaccatgcccactgctgtgttgaaatgggtctcagcatgatcaaaaccatcaggtatgtgcggtcaaggacaaaacacgatgttgacatgaggattggaatccactccggctcggtgctgtgcggtgttttgggactaaggaagtggcagtttgatgtctggtcttgggatgtggatattgcaaacaaactcgaatctggaggaatccctgggaggattcacatttccaaagccacgctggactgtctcaacggtgactataacgtggaagagggccatggtaaagagaggaatgaattcctgaggaagcataatatcgaaacttacttaattaagcagcctgaggacagtctgctgtccttgcctgaagatatcgtcaaggagtcagtgagctcctcagaccggagaaacagtggggccacattcactgaaggatcctggagccctgaactgccctttgataatatcgtggggaaacagaatactctggctgccctaacaagaaattcaataaatctgcttccaaaccatcttgcacaagctttgcatgtccagtctgggcctgaggaaattaacaagagaatagaacataccatcgacttgcggagtggcgataaattgagaagagagcatatcaagccattctcactgatgtttaaagactccagcctggagcacaagtactttgtcttcacgggggtgttggccatggtgacctgtgcagttttcctccggctgaactccgtcctgaagctggcagtgctgctgatcatgattgccatctatgccctgctcactgagaccgtctacgcaggcctctttctgcgttatgacaacctcaaccacagtggagaagatttcctggggaccaaggaggtatcactgctactgatggccatgttcctcctggctgtgttctaccatggacagcagctggagtacacagcccgcctggacttcctttggcgagtacaggccaaagaggagatcaatgagatgaaggagctgagggaacacaatgagaacatgctccggaatatcttacccagccatgtggcccgccatttcctagagaaggaccgagacaatgaggagctgtattctcaatcctatgatgctgttggggtgatgtttgcctccatcccaggatttgcggacttttactctcagactgaaatgaataaccagggagtggaatgcctgcgcttgctcaatgagatcattgctgacttcgatgagttgcttggtgaagaccgatttcaagacattgaaaagattaagaccattggcagcacctacatggccgtgtcaggcctgtcacctgaaaaacagcaatgtgaagacaagtggggacatttgtgtgctctggctgacttctcactcgccctgacagaaagcatacaggagatcaacaagcattcattcaacaattttgaactccggattggcatcagccacggctcagtggtagctggcgttatcggcgctaagaaaccacagtatgacatttggggcaaaactgtgaacctggcaagccgaatggacagcacgggggttagtggccggatccaagtcccagaggagacctatctcatcctgaaggaccagggctttgcctttgattaccgaggggagatctatgtgaagggtatcagtgaacaggaaggaaaaatcaaaacgtactttcttctgggaagagtccaacccaacccattcatcttgcccccaagaagactgcctgggcagtactccctggccgcggttgtcctgggacttgtccagtccctcaataggcaaaggcagaagcagctactcaatgagaacaacaacacaggaatcatcaagggtcattacaaccggcggactttgttgtcacccagcggcacagagcctggagcccaggctgaaggcaccgacaaatctgatttgccataa

SEQ ID NO: 105281 - DNA, 928 bp, Homo sapiens
  Payload ID: 654
  Gene Symbol: ADCY8
  Gene Name: adenylate cyclase 8 (brain)
  ENST ID: ENST00000522949
  CDS Start-End: 173-928
ctggtgaaggggagacagataaggttgtggcccaggcagtgctattcatgtgtatgaacacagctggaatcttcatcagttacctgtcagaccgggcccagcgccaagctttcctggagactcggaggagcggctcgtgctttctgtgctcccccggtttgttgtcctggaaatgatcaacgacatgaccaatgtggaagatgagcacctgcagcaccagttccatcggatctacatccatcgctatgagaacgtcagtattctttttgcagatgttaaaggatttaccaacctctccacgaccttgtctgctcaggagctggtcaggatgctcaacgagctctttgccagatttgatcgactggcccatgagcatcactgccttcgtattaaaatcctgggggactgctactactgcgtgtctggacttcctgagccccgccaggaccatgcccactgctgtgttgaaatgggtctcagcatgatcaaaaccatcaggtatgtgcggtcaaggacaaaacacgatgttgacatgaggattggaatccactccggctcggtgctgtgcggtgttttgggactaaggaagtggcagtttgatgtctggtcttgggatgtggatattgcaaacaaactcgaatctggaggaatccctgggaggattcacatttccaaagccacgctggactgtctcaacggtgactataacgtggaagagggccatggtaaagagaggaatgaattcctgaggaagcataatatcgaaacttacttaattaagcagcctgaggacagtctgctgtccttgcctgaagatatcgtcaaggagtcagtgagctcctcagaccggagaaacagtggggccacattcactgaaggatcctggagccctgaactgccctttgataatatcgtggggaaacagaat

SEQ ID NO: 105282 - DNA, 7725 bp, Homo sapiens
  Payload ID: 655
  Gene Symbol: ADCY9
  Gene Name: adenylate cyclase 9
  Uniprot ID: O60503
  ENST ID: ENST00000294016
  CDS Start-End: 540-4601
gcggccgcggcgggagcggcggcgcactcggggggaagcaggccccactagacgggccgcgccgacgggctccgcgcactcgcagcccggggcgcccccacccccagcgcccgccgccgcgggcagggccggcccggagcgcggggggcggccggggagcgcgagccgggggcgcccgccgaagctcgctgctccgggtcggggtccgggcccggggccggccgcgcgccgcctttgacgcatcggagcgcggctcctgcaggatggagggctccgcgccgccagcggagttgtttgtgcgcaggcggctcgcggggctgggagcgctcaaggtctgaacttccctccggagccgcagctggaggaggcgagcgcgcgaggaggagaagccgcgcggcgcggaggccaccctcggggcgagaggcgcggaaggcgagcgagcaaagcggtcccggagccacggcggccacgcggcggggacccccgggcgttctaggtactggtgaccccggccggggcaggccccgggactcgacaacatggcttccccaccccaccagcagctgctgcatcaccacagcaccgaggtgagctgcgactccagcggggacagcaacagcgtgcgcgtcaagatcaaccccaagcagctgtcctccaacagccaccccaagcactgcaaatacagcatctcctctagctgcagcagctctggggactccgggggcgtcccccggcgagtgggcggcggaggccggctgcgcaggcagaagaagctgccccagctgttcgagagggcctccagccgctggtgggaccccaagttcgactcggtgaacctggaggaggcctgcctggagcgctgcttcccgcagacccagcgccggttccggtatgcgctcttctacatcggcttcgcctgccttctgtggagcatctattttgcggtccacatgagatccagactgatcgtcatggtcgcccccgcgctgtgcttcctcctggtgtgtgtgggcttctttctgtttaccttcaccaagctgtacgcccggcattacgcgtggacctcgctggctctcaccctgctggtgttcgccctgaccctggctgcgcagttccaggtcttgacgcctgtctcaggacgcggcgacagctccaaccttacggccacagcccggcccacagatacttgcttatctcaagtggggagcttctccatgtgcatcgaagtgctctttttgctctataccgtcatgcacttacctttgtacctgagtttgtgtctgggggtggcctactctgtccttttcgagacctttggctaccatttccgggatgaagcctgcttcccctcgcccggagccggggccctgcactgggagctgctgagcagggggctgctccacggctgcatccacgccatcggggtccacctgttcgtcatgtcccaggtgaggtccaggagcaccttcctcaaggtggggcaatccattatgcacgggaaggacctggaagtggaaaaagccctcaaagagaggatgattcattccgtgatgccaagaatcatagccgatgacttaatgaagcagggagatgaggagagtgagaattctgtcaagaggcatgccacctcgagccccaagaacaggaagaaaaagtcttccatccaaaaagctcctatagccttccgcccttttaagatgcagcagatcgaagaagtcagtattttatttgcagatatcgtgggcttcaccaagatgagtgccaacaagtctgcccacgccctggtgggtctcctgaacgatctgttcggtcgcttcgaccgcctgtgtgaggagaccaagtgtgagaaaatcagcaccctgggagactgttactactgcgtggcgggctgtcccgagccccgggccgaccatgcctactgctgcatcgagatgggcctgggcatgatcaaggccatcgagcagttctgccaggagaagaaggagatggtgaacatgagagtcggggtgcacacgggcaccgtcctttgcggcatcctgggcatgaggaggtttaaatttgacgtgtggtccaacgatgtgaacctggccaatctcatggagcagctgggagtggccggcaaagttcacatttctgaggccaccgcaaaatacttagatgaccggtacgaaatggaagatgggaaagttattgaacggctgggccagagcgtggttgctgaccagttgaaaggtttgaagacatacctgatatcgggtcagagagccaaggagtctcgctgcagctgtgcagaggccttgctttctggctttgaggtcattgacggctcacaggtgtcctcaggccctaggggacaggggacagcgtcatcagggaatgtcagtgacttggcgcagactgtcaaaacctttgataaccttaagacctgcccttcgtgcggaatcacatttgctcccaaatctgaagccggcgccgagggaggagcacctcaaaacggctgccaagacgagcataaaaacagcaccaaggcttctggaggacctaatcccaaaactcagaacgggctcctcagccctccccaagaggagaagctcaccaacagtcagacttctctgtgtgagatcttgcaggagaagggaaggtgggcaggggtgagcctggaccagtcggctctccttccgctgaggttcaagaacatccgggagaaaacggacgcccactttgtggacgttatcaaagaagacagcctgatgaaagattacttttttaagccgcccattaatcagttcagcctgaacttcctggatcaggagctggagcgatcctacaggaccagctatcaggaagaggtcataaagaactcccccgtgaagacgtttgctagtcccaccttcagctccctcctggatgtgtttctgtcgaccacagtgtttctgacgctgtccaccacctgcttcctgaagtacgaggcggccaccgtgcctcccccgcccgccgccctggcggtcttcagtgcagccctgctgctggaggtgctgtccctcgcggtgtccatcaggatggtgttcttcctggaggacgtcatggcctgcaccaagcgcctgctggagtggatcgccggctggctaccacgtcactgcatcggggccatcctggtgtcgcttcccgcactggccgtctactcccatgtcacctccgaatatgagaccaacatacacttcccagtgttcacaggctcggccgcgctgattgccgtcgtgcactactgtaacttctgccagctcagctcctggatgaggtcctccctcgccaccgtcgtgggggccgggccgctgctcctgctctacgtctccctgtgcccagacagttctgtattaacttcgccccttgacgcagtacagaatttcagttccgagaggaacccgtgcaatagttcggtgccgcgtgacctccggcggcccgccagcctcatcggccaggaggtggttctcgtcttctttctcctgctcttgttggtctggttcctgaatcgcgaatttgaagtcagctaccgcctccactaccacggagacgtggaagcggatcttcaccgcaccaagatccagagcatgcgggaccaggcagactggctgctgaggaacatcatcccctaccacgtggctgagcagctgaaggtgtcccagacctactccaagaaccatgacagcggaggggtgatcttcgccagcatcgtcaacttcagcgagttctacgaggagaactacgagggcggcaaggagtgctaccgggtcctcaacgagctcatcggggactttgacgagctcctaagcaagccggactacagcagcatcgagaagatcaagaccatcggagccacgtacatggcggcgtcagggctgaacaccgcgcaggcccaggacggcagccacccgcaggagcacctgcagatcctgttcgagttcgccaaggagatgatgcgcgtggtggacgacttcaacaacaacatgctgtggttcaacttcaagctccgcgtcggcttcaaccatgggcccctcacggccggggtcatcggcaccaccaagctgctgtacgacatctggggagacaccgtcaacatcgccagcaggatggacaccaccggcgtggagtgccgcatccaggtgagcgaagagagctaccgcgtcttgagcaagatgggctatgacttcgactacagagggaccgtgaatgtcaaggggaaaggccagatgaagacctacctgtacccaaagtgcacggatcacagggtcatcccacagcaccagctgtccatctccccagacatccgcgtccaggtggatggcagcatcggacggtctcccacagacgagattgccaacctggtgccttctgtccagtatgtggacaagacatctctgggttctgacagcagcacgcaggccaaggatgcccacctgtcccccaagagaccgtggaaggagcccgtcaaagccgaagaaaggggtcgatttggcaaagccatagagaaagacgactgtgacgaaacaggaatagaagaagccaacgaactcaccaagctcaacgtttcaaagagtgtgtgaggcggcgcccacccgctgcccgaggtgctctgtttgtcgaaacacagtaatatttgtatttggctgttgtgctttccaagcgccacagttgccctccccggacgtggtgttatgtggtcatttcagccctaacttctgtgtggatcacagttattcagggttcattttcatccattcttccctttcgctcccttccctggaaaccccgctgcctctgggtcatccgttcagcacgtggtggagaacaagtgccttcagggctggcctcggcctcgagtctcgggacagaggccgccagtggagatcatggctttgggtattatttgacttttagaacaaaagctgtggttaagatctcatttttattgctttttcccacgtcccacgagacactattttcggttctctggctaataccctgtttttgagtttattttgtttctgtctatgtcacagtgttcctctacgacccgacctctctatgtaagcacacatgcgcacacacacttgcattcatgaatctgatataaagtgccagtaatccgccaagagggggtgcgaagggggcatgtcacgacagctccgccaccccccattgcccacccgcactttcccgagcaccgcgccccgtgggctgtgggtgagccgcgctccctgcactgagcgggtttaggggctcgcccacatgcatgcaggccaagacagcaaatgccagccgggcacgacgcccgtgtgcccaggcctcgggggtctcagagccgcctctcacccccgaccctccacccaggggtctccccatcgggagtggaggtgttggtcctggaagctgactcatcggagagggaaataccaaataaacatccgaggttgcatttatttatttatttatttacccggaagcatgtgcgctcccgggaggggtgctgggtcctcagggtggggggtcatagccacaggggagggcagttcccaggaaggtaaccagatgtctcttttgtgttttggccacctggggccgcccccaacctccccaccccaagaggggtctgagtgggacctcaaagcatggccagtgcaattctgaggctaggggaataggagaagcccaccagctgcccctgccacccacgggggctcctccctgccggggtccagctcagaaccacgggggtctgtgccggcagcaccggtgccatcttggcttccacaaattccagaagtttcttggctgcctcccgctctcagatggcacagggcctatcagtggcaggatttaatctggggagcaaattccagctctgaaatggagttctcacaccgtatctagggacagaggcatctggatgcaaacgcggggtttgttaggggcggaatcccgagggtggtgtgggggagctccgtccgggcagttggctgctggtcctgtctgattatgttttgccatattgagtctgaagtttgtgtggaagtgagctcgcccgagttgtccggtcggagttgtagccagtctttcaggggaccccgggacgctgatgaggcccagggtgcactccttgtcagtcttgcccgttgtccctgtgcattttgctttccgctgtcaaatctcactgtctcgttttcacaccgcatcagtccccatcatcactactcctccccagagacatacagattgccctccccggcatgaagaagtcacaattctgacccgccacctctccaggggcggtgcctgggatggccacccatcaggacagccagagccagggtcccggcgtcctgagagtccagggcacctccccccattagctgtaaggtttcctgtcaggtgtgactgtcagtttgctggtcttccaataccgaagaaagggtggttgtgacaatacctcttgcttctaaagaatgtattataaaacaccgcagatttttttttttccttaaaaaacactacctgatgctttccttgttcgtggggattgtggtcacatgaagctctttctgcatcagtattaaggtgtatatttgaatgtcctcccctcccctttcccctccaggctgtgtagctttgaggggctgggcgtttgctcacgaccttgctgtctcgctcagaacatgctccgcaaagttctccgcacacacttcttccccatcaagcccatttccttccccaaccacaaaggtgtttgtgattcctcaccccgggaaaccaaggagctgcaaagtggagtctggttcagccccgtgcagactcacccagagcttaacgttgtctttcaaacaccctgagccttcctaaacagccagtgcagacgttctctctgggccacgaagcccctcgggtcctccccgtcccctgctccgatgcatacctcagtgcagaaccacagaatctctgcagcggaaacgccgtgcatctcttgtctgttggcagcgagcacatcgtgctggagacacgagtttctaagcagctggcacgagggctgctgacggcatgggtcgtgcttcagggtggcaatacctcttaggaacttagggcaggaagcaatacttcagcattgaatgtgtgtaaatagttgctttgagttgcaattgctattttcttctcagtcccagctcagatcgaattatatatccatatatatatatatatatatatatatatatatatatatatatatatggtaaacaagcacacacaattttatccaatgcaaacaaatgtagagcatcagttacaaaaccctcgaatagcttgagagccccacaggctctgccacacccgtgacttcatccacactgacgtcacccgcgggggctccccctgcacatttgcacacgatccggagagccgaaggccgcgtgcttcctgtcacatgggctgtaatcatttgtagtttccaaagacacgtctgcatttgaatttctagattttcgaggtaaggagttttttttaattggttgtttggaaaatcacatcatgcctagaatctgaaattgaattagcaagaaccgactgtttgcattttccatatatccttttatctgctctttttaaattgttaattctaataatttcaaaatgcattcactgaagaaatggacattaaaatattctaaaatttaaata

SEQ ID NO: 105283 - DNA, 697 bp, Homo sapiens
  Payload ID: 655
  Gene Symbol: ADCY9
  Gene Name: adenylate cyclase 9
  ENST ID: ENST00000576936
  CDS Start-End: 1-646
ggaagaggtcataaagaactcccccgtgaagacgtttgctagtcccaccttcagctccctcctggatgtgtttctgtcgaccacagtgtttctgacgctgtccaccacctgcttcctgaagtacgaggcggccaccgtgcctcccccgcccgccgccctggcggtcttcagtgcagccctgctgctggaggtgctgtccctcgcggtgtccatcaggatggtgttcttcctggaggacgtcatggcctgcaccaagcgcctgctggagtggatcgccggctggctaccacgtcactgcatcggggccatcctggtgtcgcttcccgcactggccgtctactcccatgtcacctccgaatatgagaccaacatacacttcccagtgttcacaggctcggccgcgctgattgccgtcgtgcactactgtaacttctgccagctcagctcctggatgaggtcctccctcgccaccgtcgtgggggccgggccgctgctcctgctctacgtctccctgtgcccagacagttctgtattaacttcgccccttgacgcagtacagaatttcagaagacgagaaccctgtggagagggagactccaagtttcccttcagttcacaggaagagagttgccgtgcaggagcctaattgtaaatttgaaaaaattaaaaactgcttatgctctgtcaattaccaaaa

SEQ ID NO: 105284 - DNA, 569 bp, Homo sapiens
  Payload ID: 655
  Gene Symbol: ADCY9
  Gene Name: adenylate cyclase 9
  ENST ID: ENST00000571467
  CDS Start-End: 1-217
atttgacgtgtggtccaacgatgtgaacctggccaatctcatggagcagctgggagtggccggcaaagttcacatttctgaggccaccgcaaaatacttagatgaccggtacgaaatggaagatgggaaagttattgaacggctgggccagagcgtggttgctgaccagttgaaagacctgcccttcgtgcggaatcacatttgctcccaaatctgaagccggcgccgagggaggagcacctcaaaacggctgccaagacgagcataaaaacagcaccaaggtaacaagctcatggctgttgttcctgtcagttcctctcctggcgcatccacccaaggcttctggaggacctaatcccaaaactcagaacgggctcctcagccctccccaagaggagaagctcaccaacagtcagacttctctgtgtgagatcttgcaggagaagggaaggtgggcaggggtgagcctggaccagtcggctctccttccgctgaggttcaagaacatccgggagaaaacggacgcccactttgtggacgttatcaaagaagacagcctgatgaaagat

SEQ ID NO: 105285 - DNA, 772 bp, Homo sapiens
  Payload ID: 655
  Gene Symbol: ADCY9
  Gene Name: adenylate cyclase 9
  ENST ID: ENST00000572288
  CDS Start-End: 1-772
atcgagcagttctgccaggagaagaaggagatggtgaacatgagagtcggggtgcacacgggcaccgtcctttgcggcatcctgggcatgaggaggtttaaatttgacgtgtggtccaacgatgtgaacctggccaatctcatggagcagctgggagtggccggcaaagttcacatttctgaggccaccgcaaaatacttagatgaccggtacgaaatggaagatgggaaagttattgaacggctgggccagagcgtggttgctgaccagttgaaaggtttgaagacatacctgatatcgggtcagagagccaaggagtctcgctgcagctgtgcagaggccttgctttctggctttgaggtcattgacggctcacaggtgtcctcaggccctaggggacaggggacagcgtcatcagggaatgtcagtgacttggcgcagactgtcaaaacctttgataaccttaagacctgcccttcgtgcggaatcacatttgctcccaaatctgaagccggcgccgagggaggagcacctcaaaacggctgccaagacgagcataaaaacagcaccaaggtaacaagctcatggctgttgttcctgtcagttcctctcctggcgcatccacccaaggcttctggaggacctaatcccaaaactcagaacgggctcctcagccctccccaagaggagaagctcaccaacagtcagacttctctgtgtgagatcttgcaggagaagggaaggtgggcaggggtgagcctggaccagtcgg

SEQ ID NO: 105286 - DNA, 918 bp, Homo sapiens
  Payload ID: 656
  Gene Symbol: ADCYAP1
  Gene Name: adenylate cyclase activating polypeptide 1 (pituitary)
  Uniprot ID: P18509
  ENST ID: ENST00000450565
  CDS Start-End: 120-650
agacaccaacgccagacggcgatgcctctcgggtggtgactccagcgcaggaacttgaagaagcgctttgcccgccgtcctacctggcagctctcctggcagcgggaggagttgaaggaatgaccatgtgtagcggagcgaggctggccctgctggtctatgggataatcatgcacagcagcgtctacagctcacctgccgccgccggactccggttccccgggatcaggccagaggaagaggcgtacggcgaggacggaaacccgctgccagacttcgatggctcggagccgccgggcgcagggagccccgcctccgcgccgcgcgccgccgccgcctggtaccgcccggccgggagaagagatgtcgcccacgggatccttaacgaggcctaccgcaaagtgctggaccagctgtccgccgggaagcacctgcagtcgctcgtggcccggggcgtgggtgggagcctcggcggcggcgcgggggacgacgcggagccgctctccaagcgccactcggacgggatcttcacggacagctacagccgctaccggaaacaaatggctgtcaagaaatacttggcggccgtcctagggaagaggtataaacaaagggttaaaaacaaaggacgccgaatagcttatttgtagcgatgggttaccagctaccctgtgtatacagccctgacgcaatgaaaagtcgttttccaaactgactcaacagtcatcgctcgtgtgttctatccaaacatgtatttatgtaatgaagtaaagccattaaatgaatattttgataataatattgtttttctttctacaaagcactagagaatgcacagatatactttgtggaccaattattgatatatattataaatatatataaagaatatatatatatatatatatatatatatat

SEQ ID NO: 105287 - DNA, 3346 bp, Homo sapiens
  Payload ID: 656
  Gene Symbol: ADCYAP1
  Gene Name: adenylate cyclase activating polypeptide 1 (pituitary)
  Uniprot ID: P18509
  ENST ID: ENST00000579794
  CDS Start-End: 279-809
attctttcgcttggcatcgcgtcaggggagttagctttccttcagccgggtctggctagttattgggcgccgggtagatgcatatatatatatttttttctaactatagcaagcaagaagtggcagggcgcgcaccggctgtcgccaagtgctgttcaactcagggagccggggcttcgctccgtccctcccccggcttccagagctttttggggttggagggtgggaggccaggggcgttctcacagctgtgtgtcctctttcccatcctgcgcagaatgaccatgtgtagcggagcgaggctggccctgctggtctatgggataatcatgcacagcagcgtctacagctcacctgccgccgccggactccggttccccgggatcaggccagaggaagaggcgtacggcgaggacggaaacccgctgccagacttcgatggctcggagccgccgggcgcagggagccccgcctccgcgccgcgcgccgccgccgcctggtaccgcccggccgggagaagagatgtcgcccacgggatccttaacgaggcctaccgcaaagtgctggaccagctgtccgccgggaagcacctgcagtcgctcgtggcccggggcgtgggtgggagcctcggcggcggcgcgggggacgacgcggagccgctctccaagcgccactcggacgggatcttcacggacagctacagccgctaccggaaacaaatggctgtcaagaaatacttggcggccgtcctagggaagaggtataaacaaagggttaaaaacaaaggacgccgaatagcttatttgtagcgatgggttaccagctaccctgtgtatacagccctgacgcaatgaaaagtcgttttccaaactgactcaacagtcatcgctcgtgtgttctatccaaacatgtatttatgtaatgaagtaaagccattaaatgaatattttgataataatattgtttttctttctacaaagcactagagaatgcacagatatactttgtggaccaattattgatatatattataaatatatataaagaatatatatatatatatatatatatatatatataaagtatagagagaagttcatacaaagcgtgcacaaggattgaaaattcgcccgagctgtttatgtttttataaaaataaatagaaaagtagacaatcattgttttgaatattactcctatttttgtaaactggaattaaaaggatagtatttttatccatgacaggcctgaagatattactacttaccatttgctactgtacataaacaatgatgccctgctccagggagattttgaggtaaagatatggagaattgctgaagggcattctttcccagtgagtctctggggcaggctgcttcaatcccagcctaactcaactgggctctgtccccctggttgggtggcaattccaatatttctgctttctttgattctccttttatgtgtagttgtctctcttcagactctcagcccagaagaaaattctcctgataaaacaacagctcgatccaaattgtgcttctccccagaattcacgcctctccctaggagaagagttgaggaactgtacagaaaagggcggcttcgttagaccgctctcttttctgtacttcctgagtggccagggaatctaatatccccaaattagggcaattggaacaaagtgaaggacatagaggtatattggaagaggcagagcctgaggtggtaggaggaggaccctggaaatggactggtttgagattgccccaggtctgggaagctgagggcaaatccagtcccaatggtcctgactttgggcgctgggtattggaaatggatgcaaagtacaatgtgtttttctccagtgctgtccatgcttctcatcttgtgaaatggccaggatcctctcctttgaaacctgctctgtaggagctacccttttcctttgtggttttatggagacctctccttcctaccctcctgcactgtttaagtactgtttaccatttttcattcacttctcttaaacttgtgaatgcttctcactttttttttttgtttgatgcaggcacttattgtaaattttagaaacccctctgtagccactagtaagtaattatgcactaaatatgaaccctttgtttcttgtttattgagtttgtaggtaaaatgtatttttctacattattgcttattgcttagtaaaatttatttcataaaaccaacctttgtcatattagaatgtgtagtgttcacatgttgctcagttttgctaactgataaatcatttaatcctcttcttcatatgtatgagtactatcttatatctgtggtcaagagtgaggtaagcaagctccaacagaccctgagaacctacgcttgtatcctttctttggctaaagaaagcatgtctgtttcctgtcaattctttgaacatacagagtaatctttataaacaaaagaaccttcacccagcaatcagatcgagcagcaacagacaaaccagccagccaatctcccaaatttcaggcacaagtttatttatttatttttttatgttttgaaaaaagaagatgaagaagaagaaaaaaaaaagaacaaggaaagattaaacgttagcttgtaaagtttaaaggacctttccttttcctttacggatttgatcagtatgaagtcataaatcaaagaaaacagaattggatttgcattcccaggcgggatggatgctgccaggagatcacattgcaaatagtgaaaacagaggcattcggtctatgcctgagtcctgtgtataggatcaatcttcctttaattccgcagtctcctcaggcaatgtgacacgggatgcagtttgcagctttagtgcctttcttcgccttttaaattgccacgaatcacagatggctatttagtggccctacaatgctgcaacacatcagcttgcattttagtcttaattatttgtttcttggataatgggcagagttttctgtatttgtatcagctgttagtggtgaaatagggctctagttaaccttttatttatgaagtctaatttagtgttcccgtggctagttgcaagcattttacagtgatcacccagtttaatcttttgtatactttttagaaatgccaagagccttactaaactgaagcagatttatgatatagtgataatttaggtagatgttagtcttgaagctcttattttgtgtgcaactgattataaaaacaccttaaccaagtattattacacacatgatatctataactaggactttgataactgttatataaagtgtgtaaaatttgtatgaataaatttttgtaaacaatgcaa

SEQ ID NO: 105288 - DNA, 6487 bp, Homo sapiens
  Payload ID: 657
  Gene Symbol: ADCYAP1R1
  Gene Name: adenylate cyclase activating polypeptide 1 (pituitary) receptor type I
  Uniprot ID: P41586
  ENST ID: ENST00000304166
  CDS Start-End: 290-1696
gcgagcgtggtccccgcgtgcgcacacgcacacgccgccgcgcagggacacacggaccccggccgccagccggccacacaggcgcggagacccggctcggcgcgcgctcctcggcgcacacgctccccatccccgcgccgcgcgggccgcggacttgcaggctgcgcgtcctttgcggagtctgccccggccccacggacaggccccgcagtgagcagcccagagacacattggggctgacctgccgctgctgtcagtgggaggccagtggtgctggccaagaagtgtcatggctggtgtcgtgcacgtttccctggctgctctcctcctgctgcctatggcccctgccatgcattctgactgcatcttcaagaaggagcaagccatgtgcctggagaagatccagagggccaatgagctgatgggcttcaatgattcctctccaggctgtcctgggatgtgggacaacatcacgtgttggaagcccgcccatgtgggtgagatggtcctggtcagctgccctgagctcttccgaatcttcaacccagaccaagtctgggagaccgaaaccattggagagtctgattttggtgacagtaactccttagatctctcagacatgggagtggtgagccggaactgcacggaggatggctggtcggaacccttccctcattactttgatgcctgtgggtttgatgaatatgaatctgagactggggaccaggattattactacctgtcagtgaaggccctctacacggttggctacagcacatccctcgtcaccctcaccactgccatggtcatcctttgtcgcttccggaagctgcactgcacacgcaacttcatccacatgaacctgtttgtgtcgttcatgctgagggcgatctccgtcttcatcaaagactggattctgtatgcggagcaggacagcaaccactgcttcatctccactgtggaatgtaaggccgtcatggttttcttccactactgtgttgtgtccaactacttctggctgttcatcgagggcctgtacctcttcactctgctggtggagaccttcttccctgaaaggagatacttctactggtacaccatcattggctgggggaccccaactgtgtgtgtgacagtgtgggctacgctgagactctactttgatgacacaggctgctgggatatgaatgacagcacagctctgtggtgggtgatcaaaggccctgtggttggctctatcatggttaactttgtgctttttattggcattatcgtcatccttgtgcagaaacttcagtctccagacatgggaggcaatgagtccagcatctacttgcgactggcccggtccaccctgctgctcatcccactattcggaatccactacacagtatttgccttctccccagagaatgtcagcaaaagggaaagactcgtgtttgagctggggctgggctccttccagggctttgtggtggctgttctctactgttttctgaatggtgaggtacaagcggagatcaagcgaaaatggcgaagctggaaggtgaaccgttacttcgctgtggacttcaagcaccgacacccgtctctggccagcagtggggtgaatgggggcacccagctctccatcctgagcaagagcagctcccaaatccgcatgtctggcctccctgctgacaatctggccacctgagccatgctcccctcctcctcctctcctccatccacaggctgggaccgcaggcaggtgccagcccacgcatgtttgcgcctcttccctccccttgggcaggccctgggctggaagcttggctcctgaggggggagaaggaggcagggcacagactggaattgtcccctccttgttttggtactggtcccacccactgtggtcccctgggccctgaccccagacatgtaaatactcctcaaatttggaaaagttgtcccatcccttccccctttgccccagtgtccctgctcacttccagtcaggtctcagctccaccccactgtttcttggtcagcctcagtgatggcctgaccccagctgtgaggccttgtgagctaaggctgaagagaccttgcctgtgggagctggggtggtacctgccccaacagccccccatcatctgattttgggtgtgacccctcgagtgtgcatgccaccctggggctcttctcagtcctgggcccaagtccctgaagcctagcagagggccagctcgggtggccagaacaccccttggtgcaggcctcctggcactcgcctggcatcttggtgtccgggtgctcagctcctgggtcccagggcagtgggacagctcccaggctcttctcatcagagacttcagtttgggtggggagtctgcaggtcagggaaggttctggtgcttttcgtttgatccaaaaggagctgagagccagaaatgtggctgtgattgcgaaagagacggagtttgggagacccatggaagaaaaccttcgccatctccattgttttacccccagctcaagatggacagggttcttctggtcatctcccttccacctcttccaccctcatggatgccttccagaagctgtctccaaccatgcacaccacagagagcccttaagccctcccctccccatttcccctaagtcaaagccatgactaggatgtaccagccacctgcctctgatgtcggcgaatcctgaagcacctgcacccgaatctggggcccagggctgcccgacccccactcccatggatgatgaggagccccagacaccagctcctctggcctggactcaactattgaaatctctctgagacctctgcaaagatgtcccttttatgcccttgaccttgactcaccatgggctgctggggtgtcgggagaagccacacccaacatgcccattagcagaggctgctgctgatgtggcagctgctccctaccacccgccctggctccccagctgcaggttgcacaccctcagcctgagaatgtaaaatagggcagtgcccagctggggaggtagaggaaagtgctagagtacatggtccgtgtgtggcctagctcattccatgtcagcatttggtgttactcctgtccaaattctgtttgcagacttgtttcatgatgatgctctggaatgcttggggactttgggtggaggaggatgttacttcattttataaagaggaaggggcctgggagacttgggaaaatgtttctggagaggctttcagagtggctggaaaaggctcttgttgctgtaatttagagaggagctctgtgtccttggccagtcaagtaagttcctggatctttggcaaagccagaggaagaaaggagctacctgccctttcctgggcatgcttggtgactcagattgatcttggagtgtgcagtggcccttctaccctgcacctgacctcatgatcccctccacctgcactggtgtgcattactgaagcaagggtcctgtggacatcttgcattttgggcactgctagggggtctgggctgcttggaaggagccatggcctagggttcagggaactagactctatcccagttgggttcagactgctgtgactgtggacacgatgctccttgttctgggctccagttttcccatttgtgagatgaggcaacttccaatgcttctctaggccctgcacgtaagtgatttttccagttcaaagtcaagacaggtaaaagggcattcatcattgtgcctcatatcaggttttgatgaatatatgtgtgtgtgtgtgtgtgtgtgtgtgtgtgtgtgtagagggatggacaggatgctgtttattttccctttcttggaaatggaccttctgtcccttccatttggacaccacagtggaagctggtggcctggaaggaaggattaggtcatggacatttgaacaggtgccttgggcatgatgtatagatgcagtcatatataccttgctggggtggggtgccacctccagtggccagctccagatccaaggagcagccccctggggatggaccccattcattcatcatgactcccaacagttttcattgtggaagaagaaactttggcattatagagacatcatcacaaaacagtaaaaacaaaatcaaccctgaaccccatgcactgtgctgcttcctgagcctggccctgcatcctcatagaggtgccgggttcctattggttagttggttgtttttccgtctgagtgaatttttgccagtcttgtgagcagatgtacctgatgtattctcaatgttccaagaggttctggccttcagggtcacaggcagtagggggacagcataaggtctatgtaaaacccttccctctctgaccctctgttttcaaatctgtaaaatgggcaataagactagatgatttgtatatagcccaatgcatctctggaactctgtctaaacaccagccatctacttggaatgggccccaggactgtggtatttgcctgggccaggaaaggataagaaatcctgtcatgtgaagacagcttgagaggcttgagaaaagtggggctggggagaagcaggcttgtcagactccacccctgttgatgatcattcctgggaaggggtttctcgttctatgcaatcctaaaggacgaaactcacccatgggaggccgaattctccttgggatgaagaaatttctctttccctgtcatgagtgtccagccagggagcagggaggcagtgtcagggagggactctcatcctggaggaaatgggattccaagtcaaggatgctgaggctgtcagggagccagagaggggggtccaagtgcgggatgtgggtggctctgtggttcagtggctctgtggtagttcctagcactgcagacttcatgactccccacttaagtccaagtcacattgtctatcccagtgtgtagctctgtcaccctgcttgacacatccagtggcctacagcgactcttctctaaccccaccccctccaagctgggttctttgtggaagaaggacagggagctagagccaagccctaggcttgagagacacctgcatctataatccccgccaaggatgcccactcacctctctcatctgatcctcactctttgtggaagggaaagctcaaagggactctctctctctctctctttttttttttttttgagtagtacccttgccctcttcatggccacttcaaagtgaagccagcaaagtgataatactttatcatttagtattatcataaagtattaatactttgtcataaagtcctccttgagcccagggaccatggaagtcagctagaagagccctgagcaaggagcaaggacttgggcttctccacgctttgctcctggcttgtttgaccttgactcattccccatatgtctttgaggaggctcacaaaatactaaagctgggaggaaacttggagatctataggtcaaacctccccattgggctgatgagaaaatacacgcaggcctagcatggtgcctgccaccatggtgggatccagtatgttttataaatctgaatgagtaaatggctcaccaatttatgcatagccctgcacatgagcagaatgtgacactcaaagcatccatgcagtacgcatgtaaccttgcacaggagtggggctctggtgaccgaaggttgtccaggactcttgcaggagaagcaatggagtcagtgtggtgtggggagacctactttttaacctgggcttagccacctgctctgtgatccagggcttaccttctttgggcctcggcctcctaatctgggtaatggggaggacttcattggcattgttagtcccacaggccaaggataaggttgaaatgagacggcttgtgtgtgaaaagattttggaaattacacagatgtgggcttgttattgggatgaagactgctggaagggactccttgctgtttatctactgctttgagccctcctaagttaacctgtgcctcatttgtaaaaccaccagcatcaggagtaagggggaggccagagggctcagatggacacagaattctagctttacctgcatccgctgattcagttttctgttgggatcagagtgaggatacttccatatgggtgatagcagccatgcccctgggagtcaacttcaaggatctgggacattttggtgtgcccattccttcttttcctgaactcacagtcttggggtgtttctgcacttggctatgtgtgtcttgtctgatgtctgtcttctgtagctttgcctctatcagggctggagtggtgcagcccctggcatctcagacatggttcctgcctcacttgtgggagctggaccagcctgggtttcatctcccacagtaaagctaagtaagccccacagaccttactgctactgctgctgccattaatgctgtgctcactatcttgtccaggattttaaggatgtcagactgctgtagatgactcaataaatgttttgccatttttc

SEQ ID NO: 105289 - DNA, 1587 bp, Homo sapiens
  Payload ID: 657
  Gene Symbol: ADCYAP1R1
  Gene Name: adenylate cyclase activating polypeptide 1 (pituitary) receptor type I
  Uniprot ID: P41586
  ENST ID: ENST00000396211
  CDS Start-End: 72-1562
cccagagacacattggggctgacctgccgctgctgtcagtgggaggccagtggtgctggccaagaagtgtcatggctggtgtcgtgcacgtttccctggctgctctcctcctgctgcctatggcccctgccatgcattctgactgcatcttcaagaaggagcaagccatgtgcctggagaagatccagagggccaatgagctgatgggcttcaatgattcctctccaggctgtcctgggatgtgggacaacatcacgtgttggaagcccgcccatgtgggtgagatggtcctggtcagctgccctgagctcttccgaatcttcaacccagaccaagtctgggagaccgaaaccattggagagtctgattttggtgacagtaactccttagatctctcagacatgggagtggtgagccggaactgcacggaggatggctggtcggaacccttccctcattactttgatgcctgtgggtttgatgaatatgaatctgagactggggaccaggattattactacctgtcagtgaaggccctctacacggttggctacagcacatccctcgtcaccctcaccactgccatggtcatcctttgtcgcttccggaagctgcactgcacacgcaacttcatccacatgaacctgtttgtgtcgttcatgctgagggcgatctccgtcttcatcaaagactggattctgtatgcggagcaggacagcaaccactgcttcatctccactgtggaatgtaaggccgtcatggttttcttccactactgtgttgtgtccaactacttctggctgttcatcgagggcctgtacctcttcactctgctggtggagaccttcttccctgaaaggagatacttctactggtacaccatcattggctgggggaccccaactgtgtgtgtgacagtgtgggctacgctgagactctactttgatgacacaggctgctgggatatgaatgacagcacagctctgtggtgggtgatcaaaggccctgtggttggctctatcatggttaactttgtgctttttattggcattatcgtcatccttgtgcagaaacttcagtctccagacatgggaggcaatgagtccagcatctacttcagctgcgtgcagaaatgctactgcaagccacagcgggctcagcagcactcttgcaagatgtcagaactgtccaccattactctgcgactggcccggtccaccctgctgctcatcccactattcggaatccactacacagtatttgccttctccccagagaatgtcagcaaaagggaaagactcgtgtttgagctggggctgggctccttccagggctttgtggtggctgttctctactgttttctgaatggtgaggtacaagcggagatcaagcgaaaatggcgaagctggaaggtgaaccgttacttcgctgtggacttcaagcaccgacacccgtctctggccagcagtggggtgaatgggggcacccagctctccatcctgagcaagagcagctcccaaatccgcatgtctggcctccctgctgacaatctggccacctgagccatgctcccctcctcctcctctc

SEQ ID NO: 105290 - DNA, 1761 bp, Homo sapiens
  Payload ID: 657
  Gene Symbol: ADCYAP1R1
  Gene Name: adenylate cyclase activating polypeptide 1 (pituitary) receptor type I
  ENST ID: ENST00000409489
  CDS Start-End: 27-1601
gccagtggtgctggccaagaagtgtcatggctggtgtcgtgcacgtttccctggctgctctcctcctgctgcctatggcccctgccatgcattctgactgcatcttcaagaaggagcaagccatgtgcctggagaagatccagagggccaatgagctgatgggcttcaatgattcctctccaggctgtcctgggatgtgggacaacatcacgtgttggaagcccgcccatgtgggtgagatggtcctggtcagctgccctgagctcttccgaatcttcaacccagaccaagtctgggagaccgaaaccattggagagtctgattttggtgacagtaactccttagatctctcagacatgggagtggtgagccggaactgcacggaggatggctggtcggaacccttccctcattactttgatgcctgtgggtttgatgaatatgaatctgagactggggaccaggattattactacctgtcagtgaaggccctctacacggttggctacagcacatccctcgtcaccctcaccactgccatggtcatcctttgtcgcttccggaagctgcactgcacacgcaacttcatccacatgaacctgtttgtgtcgttcatgctgagggcgatctccgtcttcatcaaagactggattctgtatgcggagcaggacagcaaccactgcttcatctccactgtggaatgtaaggccgtcatggttttcttccactactgtgttgtgtccaactacttctggctgttcatcgagggcctgtacctcttcactctgctggtggagaccttcttccctgaaaggagatacttctactggtacaccatcattggctgggggaccccaactgtgtgtgtgacagtgtgggctacgctgagactctactttgatgacacaggctgctgggatatgaatgacagcacagctctgtggtgggtgatcaaaggccctgtggttggctctatcatggttaactttgtgctttttattggcattatcgtcatccttgtgcagaaacttcagtctccagacatgggaggcaatgagtccagcatctacttaacaaatttaagcccgcgagtccccaagaaagcccgagaggaccccctgcctgtgccctcagaccagcattcactccctttcctcagctgcgtgcagaaatgctactgcaagccacagcgggctcagcagcactcttgcaagatgtcagaactgtccaccattactctgcgactggcccggtccaccctgctgctcatcccactattcggaatccactacacagtatttgccttctccccagagaatgtcagcaaaagggaaagactcgtgtttgagctggggctgggctccttccagggctttgtggtggctgttctctactgttttctgaatggtgaggtacaagcggagatcaagcgaaaatggcgaagctggaaggtgaaccgttacttcgctgtggacttcaagcaccgacacccgtctctggccagcagtggggtgaatgggggcacccagctctccatcctgagcaagagcagctcccaaatccgcatgtctggcctccctgctgacaatctggccacctgagccatgctcccctcctcctcctctcctccatccacaggctgggaccgcaggcaggtgccagcccacgcatgtttgcgcctcttccctccccttgggcaggccctgggctggaagcttggctcctgaggggggagaaggaggcagggcacagactggaatt

SEQ ID NO: 105291 - DNA, 1889 bp, Homo sapiens
  Payload ID: 657
  Gene Symbol: ADCYAP1R1
  Gene Name: adenylate cyclase activating polypeptide 1 (pituitary) receptor type I
  Uniprot ID: P41586
  ENST ID: ENST00000409363
  CDS Start-End: 224-1567
cagccggccacacaggcgcggagacccggctcggcgcgcgctcctcggcgcacacgctccccatccccgcgccgcgcgggccgcggacttgcaggctgcgcgtcctttgcggagtctgccccggccccacggacaggccccgcagtgagcagcccagagacacattggggctgacctgccgctgctgtcagtgggaggccagtggtgctggccaagaagtgtcatggctggtgtcgtgcacgtttccctggctgctctcctcctgctgcctatggcccctgccatgcattctgactgcatcttcaagaaggagcaagccatgtgcctggagaagatccagagggccaatgagctgatgggcttcaatgattcctctccaggctgtcctgggatgtgggacaacatcacgtgttggaagcccgcccatgtgggtgagatggtcctggtcagctgccctgagctcttccgaatcttcaacccagaccaagacatgggagtggtgagccggaactgcacggaggatggctggtcggaacccttccctcattactttgatgcctgtgggtttgatgaatatgaatctgagactggggaccaggattattactacctgtcagtgaaggccctctacacggttggctacagcacatccctcgtcaccctcaccactgccatggtcatcctttgtcgcttccggaagctgcactgcacacgcaacttcatccacatgaacctgtttgtgtcgttcatgctgagggcgatctccgtcttcatcaaagactggattctgtatgcggagcaggacagcaaccactgcttcatctccactgtggaatgtaaggccgtcatggttttcttccactactgtgttgtgtccaactacttctggctgttcatcgagggcctgtacctcttcactctgctggtggagaccttcttccctgaaaggagatacttctactggtacaccatcattggctgggggaccccaactgtgtgtgtgacagtgtgggctacgctgagactctactttgatgacacaggctgctgggatatgaatgacagcacagctctgtggtgggtgatcaaaggccctgtggttggctctatcatggttaactttgtgctttttattggcattatcgtcatccttgtgcagaaacttcagtctccagacatgggaggcaatgagtccagcatctacttgcgactggcccggtccaccctgctgctcatcccactattcggaatccactacacagtatttgccttctccccagagaatgtcagcaaaagggaaagactcgtgtttgagctggggctgggctccttccagggctttgtggtggctgttctctactgttttctgaatggtgaggtacaagcggagatcaagcgaaaatggcgaagctggaaggtgaaccgttacttcgctgtggacttcaagcaccgacacccgtctctggccagcagtggggtgaatgggggcacccagctctccatcctgagcaagagcagctcccaaatccgcatgtctggcctccctgctgacaatctggccacctgagccatgctcccctcctcctcctctcctccatccacaggctgggaccgcaggcaggtgccagcccacgcatgtttgcgcctcttccctccccttgggcaggccctgggctggaagcttggctcctgaggggggagaaggaggcagggcacagactggaattgtcccctccttgttttggtactggtcccacccactgtggtcccctgggccctgaccccagacatgtaaatactcctcaaatttggaaaagttgtcccatcccttccccctttgccccagtgtccctgctcacttccagtcaggtctcagctccaccccactg

SEQ ID NO: 105292 - DNA, 466 bp, Homo sapiens
  Payload ID: 657
  Gene Symbol: ADCYAP1R1
  Gene Name: adenylate cyclase activating polypeptide 1 (pituitary) receptor type I
  ENST ID: ENST00000431811
  CDS Start-End: 245-466
atccaggttttctgggcactcgtgtgtcttgcctgtgccaggtgctgtgggcacacgcacgtcagagctgggctcatgctcacttaggagaggctgaagcttaaccagcgtctgcacaaagggaaaggcgctcagtgcagagctactcctctccacaccacaccccctgccggcccagagacacattggggctgacctgccgctgctgtcagtgggaggccagtggtgctggccaagaagtgtcatggctggtgtcgtgcacgtttccctggctgctctcctcctgctgcctatggcccctgccatgcattctgactgcatcttcaagaaggagcaagccatgtgcctggagaagatccagagggccaatgagctgatgggcttcaatgattcctctccaggctgtcctgggatgtgggacaacatcacgtgttggaagcccgcccatgtgggtgagatggtcctg

SEQ ID NO: 105293 - DNA, 441 bp, Homo sapiens
  Payload ID: 657
  Gene Symbol: ADCYAP1R1
  Gene Name: adenylate cyclase activating polypeptide 1 (pituitary) receptor type I
  ENST ID: ENST00000436116
  CDS Start-End: 1-441
ggctacgctgagactctactttgatgacacaggctgctgggatatgaatgacagcacagctctgtggtgggtgatcaaaggccctgtggttggctctatcatggttaactttgtgctttttattggcattatcgtcatccttgtgcagaaacttcagtctccagacatgggaggcaatgagtccagcatctacttaacaaatttaagcccgcgagtccccaagaaagcccgagaggaccccctgcctgtgccctcagaccagcattcactccctttcctgcgactggcccggtccaccctgctgctcatcccactattcggaatccactacacagtatttgccttctccccagagaatgtcagcaaaagggaaagactcgtgtttgagctggggctgggctccttccagggctttgtggtggctgttctctactgttttct

SEQ ID NO: 105294 - DNA, 6575 bp, Homo sapiens
  Payload ID: 657
  Gene Symbol: ADCYAP1R1
  Gene Name: adenylate cyclase activating polypeptide 1 (pituitary) receptor type I
  Uniprot ID: P41586
  ENST ID: ENST00000614107
  CDS Start-End: 290-1780
gcgagcgtggtccccgcgtgcgcacacgcacacgccgccgcgcagggacacacggaccccggccgccagccggccacacaggcgcggagacccggctcggcgcgcgctcctcggcgcacacgctccccatccccgcgccgcgcgggccgcggacttgcaggctgcgcgtcctttgcggagtctgccccggccccacggacaggccccgcagtgagcagcccagagacacattggggctgacctgccgctgctgtcagtgggaggccagtggtgctggccaagaagtgtcatggctggtgtcgtgcacgtttccctggctgctctcctcctgctgcctatggcccctgccatgcattctgactgcatcttcaagaaggagcaagccatgtgcctggagaagatccagagggccaatgagctgatgggcttcaatgattcctctccaggctgtcctgggatgtgggacaacatcacgtgttggaagcccgcccatgtgggtgagatggtcctggtcagctgccctgagctcttccgaatcttcaacccagaccaagtctgggagaccgaaaccattggagagtctgattttggtgacagtaactccttagatctctcagacatgggagtggtgagccggaactgcacggaggatggctggtcggaacccttccctcattactttgatgcctgtgggtttgatgaatatgaatctgagactggggaccaggattattactacctgtcagtgaaggccctctacacggttggctacagcacatccctcgtcaccctcaccactgccatggtcatcctttgtcgcttccggaagctgcactgcacacgcaacttcatccacatgaacctgtttgtgtcgttcatgctgagggcgatctccgtcttcatcaaagactggattctgtatgcggagcaggacagcaaccactgcttcatctccactgtggaatgtaaggccgtcatggttttcttccactactgtgttgtgtccaactacttctggctgttcatcgagggcctgtacctcttcactctgctggtggagaccttcttccctgaaaggagatacttctactggtacaccatcattggctgggggaccccaactgtgtgtgtgacagtgtgggctacgctgagactctactttgatgacacaggctgctgggatatgaatgacagcacagctctgtggtgggtgatcaaaggccctgtggttggctctatcatggttaactttgtgctttttattggcattatcgtcatccttgtgcagaaacttcagtctccagacatgggaggcaatgagtccagcatctacttcagctgcgtgcagaaatgctactgcaagccacagcgggctcagcagcactcttgcaagatgtcagaactgtccaccattactctgcgactggcccggtccaccctgctgctcatcccactattcggaatccactacacagtatttgccttctccccagagaatgtcagcaaaagggaaagactcgtgtttgagctggggctgggctccttccagggctttgtggtggctgttctctactgttttctgaatggtgaggtacaagcggagatcaagcgaaaatggcgaagctggaaggtgaaccgttacttcgctgtggacttcaagcaccgacacccgtctctggccagcagtggggtgaatgggggcacccagctctccatcctgagcaagagcagctcccaaatccgcatgtctggcctccctgctgacaatctggccacctgagccatgctcccctcctcctcctctcctccatccacaggctgggaccgcaggcaggtgccagcccacgcatgtttgcgcctcttccctccccttgggcaggccctgggctggaagcttggctcctgaggggggagaaggaggcagggcacagactggaattgtcccctccttgttttggtactggtcccacccactgtggtcccctgggccctgaccccagacatgtaaatactcctcaaatttggaaaagttgtcccatcccttccccctttgccccagtgtccctgctcacttccagtcaggtctcagctccaccccactgtttcttggtcagcctcagtgatggcctgaccccagctgtgaggccttgtgagctaaggctgaagagaccttgcctgtgggagctggggtggtacctgccccaacagccccccatcatctgattttgggtgtgacccctcgagtgtgcatgccaccctggggctcttctcagtcctgggcccaagtccctgaagcctagcagagggccagctcgggtggccagaacaccccttggtgcaggcctcctggcactcgcctggcatcttggtgtccgggtgctcagctcctgggtcccagggcagtgggacagctcccaggctcttctcatcagagacttcagtttgggtggggagtctgcaggtcagggaaggttctggtgcttttcgtttgatccaaaaggagctgagagccagaaatgtggctgtgattgcgaaagagacggagtttgggagacccatggaagaaaaccttcgccatctccattgttttacccccagctcaagatggacagggttcttctggtcatctcccttccacctcttccaccctcatggatgccttccagaagctgtctccaaccatgcacaccacagagagcccttaagccctcccctccccatttcccctaagtcaaagccatgactaggatgtaccagccacctgcctctgatgtcggcgaatcctgaagcacctgcacccgaatctggggcccagggctgcccgacccccactcccatggatgatgaggagccccagacaccagctcctctggcctggactcaactattgaaatctctctgagacctctgcaaagatgtcccttttatgcccttgaccttgactcaccatgggctgctggggtgtcgggagaagccacacccaacatgcccattagcagaggctgctgctgatgtggcagctgctccctaccacccgccctggctccccagctgcaggttgcacaccctcagcctgagaatgtaaaatagggcagtgcccagctggggaggtagaggaaagtgctagagtacatggtccgtgtgtggcctagctcattccatgtcagcatttggtgttactcctgtccaaattctgtttgcagacttgtttcatgatgatgctctggaatgcttggggactttgggtggaggaggatgttacttcattttataaagaggaaggggcctgggagacttgggaaaatgtttctggagaggctttcagagtggctggaaaaggctcttgttgctgtaatttagagaggagctctgtgtccttggccagtcaagtaagttcctggatctttggcaaagccagaggaagaaaggagctacctgccctttcctgggcatgcttggtgactcagattgatcttggagtgtgcagtggcccttctaccctgcacctgacctcatgatcccctccacctgcactggtgtgcattactgaagcaagggtcctgtggacatcttgcattttgggcactgctagggggtctgggctgcttggaaggagccatggcctagggttcagggaactagactctatcccagttgggttcagactgctgtgactgtggacacgatgctccttgttctgggctccagttttcccatttgtgagatgaggcaacttccaatgcttctctaggccctgcacgtaagtgatttttccagttcaaagtcaagacaggtaaaagggcattcatcattgtgcctcatatcaggttttgatgaatatatgtgtgtgtgtgtgtgtgtgtgtgtgtgtgtgtgtagagggatggacaggatgctgtttattttccctttcttggaaatggaccttctgtcccttccatttggacaccacagtggaagctggtggcctggaaggaaggattaggtcatggacatttgaacaggtgccttgggcatgatgtatagatgcagtcatatataccttgctggggtggggtgccacctccagtggccagctccagatccaaggagcagccccctggggatggaccccattcattcatcatgactcccaacagttttcattgtggaagaagaaactttggcattatagagacatcatcacaaaacagtaaaaacaaaatcaaccctgaaccccatgcactgtgctgcttcctgagcctggccctgcatcctcatagaggtgccgggttcctattggttagttggttgtttttccgtctgagtgaatttttgccagtcttgtgagcagatgtacctgatgtattctcaatgttccaagaggttctggccttcagggtcacaggcagtagggggacagcataaggtctatgtaaaacccttccctctctgaccctctgttttcaaatctgtaaaatgggcaataagactagatgatttgtatatagcccaatgcatctctggaactctgtctaaacaccagccatctacttggaatgggccccaggactgtggtatttgcctgggccaggaaaggataagaaatcctgtcatgtgaagacagcttgagaggcttgagaaaagtggggctggggagaagcaggcttgtcagactccacccctgttgatgatcattcctgggaaggggtttctcgttctatgcaatcctaaaggacgaaactcacccatgggaggccgaattctccttgggatgaagaaatttctctttccctgtcatgagtgtccagccagggagcagggaggcagtgtcagggagggactctcatcctggaggaaatgggattccaagtcaaggatgctgaggctgtcagggagccagagaggggggtccaagtgcgggatgtgggtggctctgtggttcagtggctctgtggtagttcctagcactgcagacttcatgactccccacttaagtccaagtcacattgtctatcccagtgtgtagctctgtcaccctgcttgacacatccagtggcctacagcgactcttctctaaccccaccccctccaagctgggttctttgtggaagaaggacagggagctagagccaagccctaggcttgagagacacctgcatctataatccccgccaaggatgcccactcacctctctcatctgatcctcactctttgtggaagggaaagctcaaagggactctctctctctctctctttttttttttttttgagtagtacccttgccctcttcatggccacttcaaagtgaagccagcaaagtgataatactttatcatttagtattatcataaagtattaatactttgtcataaagtcctccttgagcccagggaccatggaagtcagctagaagagccctgagcaaggagcaaggacttgggcttctccacgctttgctcctggcttgtttgaccttgactcattccccatatgtctttgaggaggctcacaaaatactaaagctgggaggaaacttggagatctataggtcaaacctccccattgggctgatgagaaaatacacgcaggcctagcatggtgcctgccaccatggtgggatccagtatgttttataaatctgaatgagtaaatggctcaccaatttatgcatagccctgcacatgagcagaatgtgacactcaaagcatccatgcagtacgcatgtaaccttgcacaggagtggggctctggtgaccgaaggttgtccaggactcttgcaggagaagcaatggagtcagtgtggtgtggggagacctactttttaacctgggcttagccacctgctctgtgatccagggcttaccttctttgggcctcggcctcctaatctgggtaatggggaggacttcattggcattgttagtcccacaggccaaggataaggttgaaatgagacggcttgtgtgtgaaaagattttggaaattacacagatgtgggcttgttattgggatgaagactgctggaagggactccttgctgtttatctactgctttgagccctcctaagttaacctgtgcctcatttgtaaaaccaccagcatcaggagtaagggggaggccagagggctcagatggacacagaattctagctttacctgcatccgctgattcagttttctgttgggatcagagtgaggatacttccatatgggtgatagcagccatgcccctgggagtcaacttcaaggatctgggacattttggtgtgcccattccttcttttcctgaactcacagtcttggggtgtttctgcacttggctatgtgtgtcttgtctgatgtctgtcttctgtagctttgcctctatcagggctggagtggtgcagcccctggcatctcagacatggttcctgcctcacttgtgggagctggaccagcctgggtttcatctcccacagtaaagctaagtaagccccacagaccttactgctactgctgctgccattaatgctgtgctcactatcttgtccaggattttaaggatgtcagactgctgtagatgactcaataaatgttttgccatttttcctgg

SEQ ID NO: 105295 - DNA, 736 bp, Homo sapiens
  Payload ID: 658
  Gene Symbol: AK1
  Gene Name: adenylate kinase 1
  ENST ID: ENST00000223836
  CDS Start-End: 97-729
gctaagcccccactgccgggggaggcgggtgatgggccggcccagggcctgagaggggaagggcagggtgcacaggagacacggcaggacgggaccatgggctgctgctcctcgagtgacccccgcagagaagacgatctgagagccagagagaagctgaagaaaaccaagatcatctttgtggtgggtgggcctggctcagggaagggcacccagtgtgagaagatcgtgcagaagtatggctacacccacctctccaccggggacctcctgcggtccgaggtcagctcaggctcggccaggggcaagaagctgtcggaaatcatggagaaggggcagctggttccactggagacagtgttggacatgctccgggatgccatggtggccaaagtcaatacttccaaaggcttcctgattgatggctacccgcgggaggtgcagcaaggagaagagtttgagcgacggattggacagcccacactgctgctgtatgtggacgcaggccctgagaccatgacccagcggctcttgaaacgtggagagaccagcgggcgtgtggacgacaatgaggagaccatcaaaaagcggctggagacctattacaaggccacagaacctgtcatcgccttctatgagaaacgtggcattgtgcgcaaggtcaacgctgagggctccgtggacagtgtcttctcccaggtctgcacccacctggacgccctaaagtagcaacgct

SEQ ID NO: 105296 - DNA, 757 bp, Homo sapiens
  Payload ID: 658
  Gene Symbol: AK1
  Gene Name: adenylate kinase 1
  Uniprot ID: P00568
  ENST ID: ENST00000373156
  CDS Start-End: 164-748
gggagtttcgaggggagcagctctgcagttgtgtggccgctgtttatgtccctcggtgccatcctcactgtcccagcccctccagcgggaacccaggtggatgggagggggctactgcccttctgtgacagagcactgacacggctcccgggacctcggcaggatggaagagaagctgaagaaaaccaagatcatctttgtggtgggtgggcctggctcagggaagggcacccagtgtgagaagatcgtgcagaagtatggctacacccacctctccaccggggacctcctgcggtccgaggtcagctcaggctcggccaggggcaagaagctgtcggaaatcatggagaaggggcagctggttccactggagacagtgttggacatgctccgggatgccatggtggccaaagtcaatacttccaaaggcttcctgattgatggctacccgcgggaggtgcagcaaggagaagagtttgagcgacggattggacagcccacactgctgctgtatgtggacgcaggccctgagaccatgacccagcggctcttgaaacgtggagagaccagcgggcgtgtggacgacaatgaggagaccatcaaaaagcggctggagacctattacaaggccacagaacctgtcatcgccttctatgagaaacgtggcattgtgcgcaaggtcaacgctgagggctccgtggacagtgtcttctcccaggtctgcacccacctggacgccctaaagtagcaacgctgg

SEQ ID NO: 105297 - DNA, 2266 bp, Homo sapiens
  Payload ID: 658
  Gene Symbol: AK1
  Gene Name: adenylate kinase 1
  Uniprot ID: P00568
  ENST ID: ENST00000373176
  CDS Start-End: 154-738
gggaacgccggctcccggcatgccgcgcgctgacagccttataaatagtcgcctttgccggccgccgcgaggacgggcagggcacgcactggccccggcgcccacccgcacccctccccagagcactgacacggctcccgggacctcggcaggatggaagagaagctgaagaaaaccaagatcatctttgtggtgggtgggcctggctcagggaagggcacccagtgtgagaagatcgtgcagaagtatggctacacccacctctccaccggggacctcctgcggtccgaggtcagctcaggctcggccaggggcaagaagctgtcggaaatcatggagaaggggcagctggttccactggagacagtgttggacatgctccgggatgccatggtggccaaagtcaatacttccaaaggcttcctgattgatggctacccgcgggaggtgcagcaaggagaagagtttgagcgacggattggacagcccacactgctgctgtatgtggacgcaggccctgagaccatgacccagcggctcttgaaacgtggagagaccagcgggcgtgtggacgacaatgaggagaccatcaaaaagcggctggagacctattacaaggccacagaacctgtcatcgccttctatgagaaacgtggcattgtgcgcaaggtcaacgctgagggctccgtggacagtgtcttctcccaggtctgcacccacctggacgccctaaagtagcaacgctggagccgcttccccagctcagagccccgccccaccccgtcctgattcgaggtcctcctggcctgagcgcagcgcctccaccctgccctgctgagcacagacggaggaagccgcttatcctgttttcatggacagctgagcactaaaggaatttctaaggacatttggttttactgctttttctctgcttccagttggagttgattcatgtgcttgtgcctacctggccgcaagtccccagcccctcaaccctccgttcctcctcagcctccctttgccagccacccctcctctagctctggtgggaggcccggggcccttcctcgcacagggcatgcctggcctgaggacccggcgctgagtggcggggcccctgctccgaggggctcatgttcaggcagaaccggtcccagcctgggctcctctgcatcttgctctgtggccttggccctgacccccatcgctctgagcatatgttccatgcctggcccttgccggggcctggactgcacaggcagcaaggtcatggtctgagtggggcttcctgggcagttggggcggcccacgccagctggcccagtgggtagtgaattggcttccttgacgcgagaggctctgagggtctgaaaagggcatctcaatggcatgggtgggtggggagtcagtcatgtcactgaaattgaatgggggaggcccaatgaggtggctcatgcctgtaatcccagcactttgggaagctgaggcaggaggatcccctgaggtcaggagttcgagagcagcctggccaacatggcaaaaccccttatttactaaaaatacaaaaattagccgggcatggtggcatgtgcctgtattcccagctactcatgaggctgaggcaggagaatggcgtgaacccgggaggtggagcttgcaatgagccaagattgcgccactgcactccagcctgggtgacagagcaagactccgtctcaaaaaaaaaaaaaaaaaaaaagaaattgaattgggggagtcatggtcaggggtgagacctgaaggacctccccctgtgtggccctggacacagcccaccctctgtgagccgtttccaattctaaaacagactcaatgtccccctcacccccacctcaaggtcaggatgagaacacactgagtgaggagtggacgctgtccattgccacggccatgagggctggagaccagaacagcatggcccgaagcgtgcggggccccggatgacttggggacaccccagaatcccctggggagaacccttcctgcgcgctttcattttttgacctcatcactgagaaaggctcaatttggtgctcacgtgtccttaacacctgatctggcccaagctgggctccctttaagccaagagagcctcttgtggaccccgcctgcccgaatgaaatccgaacagttggggctgttcatggcaagtggggctggtttttcatttccattggttatttaaagtttcctttaaaataaacgattttaagttataaaaggtgaa

SEQ ID NO: 105298 - DNA, 525 bp, Homo sapiens
  Payload ID: 658
  Gene Symbol: AK1
  Gene Name: adenylate kinase 1
  ENST ID: ENST00000413016
  CDS Start-End: 1-407
gaagaaaaccaagatcatctttgtggtgggagacagtgttggacatgctccgggatgccatggtggccaaagtcaatacttccaaaggcttcctgattgatggctacccgcgggaggtgcagcaaggagaagagtttgagcgacggattggacagcccacactgctgctgtatgtggacgcaggccctgagaccatgacccagcggctcttgaaacgtggagagaccagcgggcgtgtggacgacaatgaggagaccatcaaaaagcggctggagacctattacaaggccacagaacctgtcatcgccttctatgagaaacgtggcattgtgcgcaaggtcaacgctgagggctccgtggacagtgtcttctcccaggtctgcacccacctggacgccctaaagtagcaacgctggagccgcttccccagctcagagccccgccccaccccgtcctgattcgaggtcctcctggcctgagcgcagcgcctccaccctgccctgctgagcacagacggaggaagcc

SEQ ID NO: 105299 - DNA, 574 bp, Homo sapiens
  Payload ID: 658
  Gene Symbol: AK1
  Gene Name: adenylate kinase 1
  ENST ID: ENST00000550992
  CDS Start-End: 82-180
acgggcagggcacgcactggccccggcgcccacccgcacccctccccagagcactgacacggctcccgggacctcggcaggatggaaggagcgccagcggtgtctgtccctccgcctggggcccagcacaggcctgggactccagaggtgcctctggctgtgggtccagcgagtgactgagccctgctccccttttctctcccgcagagaagctgaagaaaaccaagatcatctttgtggtgggtgggcctggctcagggaagggcacccagtgtgagaagatcgtgcagaagtatggctacacccacctctccaccggggacctcctgcggtccgaggtcagctcaggctcggccaggggcaagaagctgtcggaaatcatggagaaggggcagctggttccactggagacagtgttggacatgctccgggatgccatggtggccaaagtcaatacttccaaaggcttcctgattgatggctacccgcgggaggtgcagcaaggagaagagtttgagcgacggattggacagcccacactgctgctgtatgtggacgcaggccctgagaccat

SEQ ID NO: 105300 - DNA, 532 bp, Homo sapiens
  Payload ID: 658
  Gene Symbol: AK1
  Gene Name: adenylate kinase 1
  ENST ID: ENST00000550143
  CDS Start-End: 1-156
gagaaggggcagctggttccactggagacagtgttggacatgctccgggatgccatggtggccaaagtcaatacttccaaaggcttcctgattgatggctacccgcgggaggtgcagcaaggagaagagtttgagcgacgggccctgagaccatgacccagcggctcttgaaacgtggagagaccagcgggcgtgtggacgacaatgaggagaccatcaaaaagcggctggagacctattacaaggccacagaacctgtcatcgccttctatgagaaacgtggcattgtgcgcaaggtcaacgctgagggctccgtggacagtgtcttctcccaggtctgcacccacctggacgccctaaagtagcaacgctggagccgcttccccagctcagagccccgccccaccccgtcctgattcgaggtcctcctggcctgagcgcagcgcctccaccctgccctgctgagcacagacggaggaagccgcttatcctgttttcatggacagctgagcactaaaggaatttctaagga

SEQ ID NO: 105301 - DNA, 1021 bp, Homo sapiens
  Payload ID: 659
  Gene Symbol: AK2
  Gene Name: adenylate kinase 2
  Uniprot ID: P54819
  ENST ID: ENST00000354858
  CDS Start-End: 165-884
gtgaagagtccgtcgtgctcaggggcgggcggaacgggctgacggacgcggctatgggccagtgtgagcggcgagtgggacgtgcgtggcgtgcgtgcgttgacctgggaagcactggacctgtgaggcgtgcgaactggtggcagtgagagacttcggcggacatggctcccagcgtgccagcggcagaacccgagtatcctaaaggcatccgggccgtgctgctggggcctcccggggccggtaaagggacccaggcacccagattggctgaaaacttctgtgtctgccatttagctactggggacatgctgagggccatggtggcttctggctcagagctaggaaaaaagctgaaggcaactatggatgctgggaaactggtgagtgatgaaatggtagtggagctcattgagaagaatttggagacccccttgtgcaaaaatggttttcttctggatggcttccctcggactgtgaggcaggcagaaatgctcgatgacctcatggagaagaggaaagagaagcttgattctgtgattgaattcagcatcccagactctctgctgatccgaagaatcacaggaaggctgattcaccccaagagtggccgttcctaccacgaggagttcaaccctccaaaagagcccatgaaagatgacatcaccggggaacccttgatccgtcgatcagatgataatgaaaaggccttgaaaatccgcctgcaagcctaccacactcaaaccaccccactcatagagtactacaggaaacgggggatccactccgccatcgatgcatcccagacccccgatgtcgtgttcgcaagcatcctagcagccttctccaaagccacatgtaaagacttggttatgtttatctaatgttgggtccaagaaggaatttctttccatccctgtgaggcaatgggtgggaatgataggacaggcaaagagaagcttcctcaggctagcaaaaatatcatttgatgtattgattaaaaaagcacttgcttgatgta

SEQ ID NO: 105302 - DNA, 3586 bp, Homo sapiens
  Payload ID: 659
  Gene Symbol: AK2
  Gene Name: adenylate kinase 2
  Uniprot ID: P54819
  ENST ID: ENST00000373449
  CDS Start-End: 43-741
gtgaggcgtgcgaactggtggcagtgagagacttcggcggacatggctcccagcgtgccagcggcagaacccgagtatcctaaaggcatccgggccgtgctgctggggcctcccggggccggtaaagggacccaggcacccagattggctgaaaacttctgtgtctgccatttagctactggggacatgctgagggccatggtggcttctggctcagagctaggaaaaaagctgaaggcaactatggatgctgggaaactggtgagtgatgaaatggtagtggagctcattgagaagaatttggagacccccttgtgcaaaaatggttttcttctggatggcttccctcggactgtgaggcaggcagaaatgctcgatgacctcatggagaagaggaaagagaagcttgattctgtgattgaattcagcatcccagactctctgctgatccgaagaatcacaggaaggctgattcaccccaagagtggccgttcctaccacgaggagttcaaccctccaaaagagcccatgaaagatgacatcaccggggaacccttgatccgtcgatcagatgataatgaaaaggccttgaaaatccgcctgcaagcctaccacactcaaaccaccccactcatagagtactacaggaaacgggggatccactccgccatcgatgcatcccagacccccgatgtcgtgttcgcaagcatcctagcagccttctccaaagccacatcctagtatcagaaggccaggcgagactgcaacactgctcatcaccccgcggcgtgatccctgctcttaggtgctgggcagaggggaagggtggtcagggtgaggatggtgagggagggctggtgaggggctcagaggaatacttggaacaacagcagtgttattgtagtgtggcagtttcttttatacataggtgagagtttttaaagtgtaagggaaaaattaattttttaaaaaacaccatgcttggagggtgggggtagaaatagacacaatattatttctaaggaatcgggttttcatttactctggactggtgaaaatattttttaaagccagtgctctaagacctcagcttttatctcagaaccccatgggttccagaccaagagtacaggaaatcaaattgttgtcctgtctgtctatagcttggaacagggagctttgattactgactccggttccacacactgtaagatcaaaaaaccatctccacatttgaaagagatgtaaggtgtattcatagggatggtggctcaacaaatcaagcaaactggaatcaaggggagggggaagggaatgaaatggaaagggaggctgattcccttcccctgacttaccactaatttactaggctacctactttcatgagtaacctctcacagctacccagcacatgccacaatcctatgctcttgccttcttttatctgcactgtgtgaagggactcttttaaataaatgagcaagtgtcctaagctatgtcatccaaagattgtcctttccattctcaaatcctgtgactgggatcactcaacagcactgtgatgtattattttcaatgaggtgcctttcttaactgaccaaatgctgccttgtttggcccctaaatcaataaaatatgttaaaatttgtatcccctgttgtggcattttttttagataatctaagctagaaaaatgacattgaattctggacctggctggaaggaaaagaagccctttcttgtcgctggcagctgtgtggtagggaggtccaagtatgtgcatatgagataagcctgcaacctcttgaccttcagctcctatgcaggcttctcttgagcccagagacaaggcagcttggtctagtggagatagcactgtgcttggagttcaggggacctaggacaaatcccagccagttagttattcactgtgctcctgtttcctcagctgaaaaaggaagttggttatgccaccttcttggccttaatggcattaaatgaaatttataggaagaaggtttttgctcagtacctggcatgcaacagacattggataaatgttagttggatccagatatacacagaaagatatctgcttcctgccaggctggataactgttgaatggacacttgtccatagtctagaaagccagtgcttctaatccttaagccagatctttgactaccttttcagttgcttctttaacactctttgttgcttctctgtgtgtcctagtttaaattcatttcctctccagcaaaagtgagcttaaataatttctccaaactaaagctctcatgtttttggaagggctgcctttgcaagtgaggtttctgagaaatgactgttgttcccaaaacaagagggagctgggctggaagcaccactattcttctttaggcatcttgttacagagagaggcagggtcttcactgacatattaaatcctgttccctgaaccagcccctccctcttctgctccacttcctcacctgtgcagagtcattttcaggtgttagccttactgatttgcactgatctgtttgttccctgagctttttaaataccctgtgaaaattttctttcctcccttggtcatcatgcatctaattgtggggaaatgtttgtcaaaccaacctgcaaagcagcatggtgtagttgagaagaataaacagagaagactgggtgagctattgtttgtttgcttctttgggcctgggtttcctcatctaatctgcaaaccaagaatgcagactagtcctaccactcccggaagactgacgttgtgccaggtattatgcaaaggcttcatgtaaccctcgacttcacgtaaccctcacacagcaccctgtggagtcagaactgtccttcacttttataggtgaggaaaccagactcagagaggtgaagtggcattcctgaggtcatgcataagaggcagtcaggactgaaacacagtctctaacacttatccgtccccttgatcttgttgctgaagtgatttaattacttgcgtagctctgcacacaggaagggctgctctgaataagagctcttttccatggacactcagcgctgccggaactgattttgaagaagtcactgccggctctgagggcctagggtatgtgtcttaggatctcctgtgtgcacaaagtgtcactgacagaacacagcaggatggagagcagcctcctcagaagcctcacaagtctttcctcagatgaagacagagcaacgagtcagaagacagatttcaacagcgacttcaccatgcgaccttggacaagttatctcacctcatcagtagaataggaatgatccctacccctcaaaggtgctgatgacactagtgaccaagatactcatgtgggttggactgcccaggacacagcagatgcttagtaaacacagatggaattcagagggaaaatgtaggcattgaagaaagttgtcttactgaccatccggaaccaggctaaggatcccctagaaatcatagacctctgaaattatatgcagaattctttatgtgttttcataattaataatagtctaacatattaaattcttagctgtgtgaga

SEQ ID NO: 105303 - DNA, 920 bp, Homo sapiens
  Payload ID: 659
  Gene Symbol: AK2
  Gene Name: adenylate kinase 2
  ENST ID: ENST00000487289
  CDS Start-End: 17-505
agagacttcggcggacatggctcccagcgtgccagcggcagaacccgagtatcctaaaggcatccgggccgtgctgctggggcctcccggggccggtaaagggacccaggcacccagattggctgaaaacttctgtgtctgccatttagctactggggacatgctgagggccatggtggcttctggctcagagctaggaaaaaagctgaaggcaactatggatgctgggaaactggtgagtgatgaaatggtagtggagctcattgagaagaatttggagacccccttgtgcaaaaatggttttcttctggatggcttccctcggactgtgaggcaggcagaaatgctcgatgacctcatggagaagaggaaagagaagcttgattctgtgattgaattcagcatcccagactctctgctgatccgaagaatcacaggaagcattgaacacagaaatgcctctgcttctggacacgtttgttctgacagaccaacactgctttagcctacagttgtctctaccctgtttcactaatcactgccatctgctttgtgccttccagaagtatgacagaagctttcaactgcaaatggaccctccattcccttctttattgtgggctgtagcttttttatgtctttgtcattttaatggtgtctcaggaaagtggtcagccaaccatcttgaaccagacatccatgaccattacttttaattgctgtgtaatatttcacagtaggttaaccattgtttacttatttccttattgttgtacatttatgtttcttccagttagccactgttaaaatgatactatggccatcataatgcatgtaaatttttggattagggaaaaaatgttttcttatttcagacattattactttgatttcctaatgaggttgaacatcttttccat

SEQ ID NO: 105304 - DNA, 880 bp, Homo sapiens
  Payload ID: 659
  Gene Symbol: AK2
  Gene Name: adenylate kinase 2
  ENST ID: ENST00000467905
  CDS Start-End: 59-757
gggaagcactggacctgtgaggcgtgcgaactggtggcagtgagagacttcggcggacatggctcccagcgtgccagcggcagaacccgagtatcctaaaggcatccgggccgtgctgctggggcctcccggggccggtaaagggacccaggcacccagattggctgaaaacttctgtgtctgccatttagctactggggacatgctgagggccatggtggcttctggctcagagctaggaaaaaagctgaaggcaactatggatgctgggaaactggtgagtgatgaaatggtagtggagctcattgagaagaatttggagacccccttgtgcaaaaatggttttcttctggatggcttccctcggactgtgaggcaggcagaaatgctcgatgacctcatggagaagaggaaagagaagcttgattctgtgattgaattcagcatcccagactctctgctgatccgaagaatcacaggaaggctgattcaccccaagagtggccgttcctaccacgaggagttcaaccctccaaaagagcccatgaaagatgacatcaccggggaacccttgatccgtcgatcagatgataatgaaaaggccttgaaaatccgcctgcaagcctaccacactcaaaccaccccactcatagagtactacaggaaacgggggatccactccgccatcgatgcatcccagacccccgatgtcgtgttcgcaagcatcctagcagccttctccaaagccacatgctgatcatctgagagcagtcaaatctacttccccaaaaagagaccaggcctagtatcagaaggccaggcgagactgcaacactgctcatcaccccgcggcgtgatccctgctcttaggtgctgggca

SEQ ID NO: 105305 - DNA, 936 bp, Homo sapiens
  Payload ID: 659
  Gene Symbol: AK2
  Gene Name: adenylate kinase 2
  ENST ID: ENST00000548033
  CDS Start-End: 13-585
acttcggcggacatggctcccagcgtgccagcggcagaacccgagtatcctaaaggcatccgggccgtgctgctggggcctcccggggccggtaaagggacccaggtgagtgatgaaatggtagtggagctcattgagaagaatttggagacccccttgtgcaaaaatggttttcttctggatggcttccctcggactgtgaggcaggcagaaatgctcgatgacctcatggagaagaggaaagagaagcttgattctgtgattgaattcagcatcccagactctctgctgatccgaagaatcacaggaaggctgattcaccccaagagtggccgttcctaccacgaggagttcaaccctccaaaagagcccatgaaagatgacatcaccggggaacccttgatccgtcgatcagatgataatgaaaaggccttgaaaatccgcctgcaagcctaccacactcaaaccaccccactcatagagtactacaggaaacgggggatccactccgccatcgatgcatcccagacccccgatgtcgtgttcgcaagcatcctagcagccttctccaaagccacatcctagtatcagaaggccaggcgagactgcaacactgctcatcaccccgcggcgtgatccctgctcttaggtgctgggcagaggggaagggtggtcagggtgaggatggtgagggagggctggtgaggggctcagaggaatacttggaacaacagcagtgttattgtagtgtggcagtttcttttatacataggtgagagtttttaaagtgtaagggaaaaattaattttttaaaaaacaccatgcttggagggtgggggtagaaatagacacaatattatttctaaggaatcgggttttcatttactctggactggtgaaaatattttttaaagccagtgctctaagacctcagct

SEQ ID NO: 105306 - DNA, 886 bp, Homo sapiens
  Payload ID: 659
  Gene Symbol: AK2
  Gene Name: adenylate kinase 2
  ENST ID: ENST00000550338
  CDS Start-End: 75-203
gtgcgtgcgttgacctgggaagcactggacctgtgaggcgtgcgaactggtggcagtgagagacttcggcggacatggctcccagcgtgccagcggcagaacccgagtatcctaaaggcatccgggccgtgctgctggggcctcccggggccggtaaagggacccagttggagaaactgaagtttgaatggcttgttctctaggctacatagcaagtaatttacagagcttgcatctgaatgactccaaagctcctgctctttctgctgctatctactgccccaggcacccagattggctgaaaacttctgtgtctgccatttagctactggggacatgctgagggccatggtggcttctggctcagagctaggaaaaaagctgaaggcaactatggatgctgggaaactggtgagtgatgaaatggtagtggagctcattgagaagaatttggagacccccttgtgcaaaaatggttttcttctggatggcttccctcggactgtgaggcaggcagaaatgctcgatgacctcatggagaagaggaaagagaagcttgattctgtgattgaattcagcatcccagactctctgctgatccgaagaatcacaggaaggctgattcaccccaagagtggccgttcctaccacgaggagttcaaccctccaaaagagcccatgaaagatgacatcaccggggaacccttgatccgtcgatcagatgataatgaaaaggccttgaaaatccgcctgcaagcctaccacactcaaaccaccccactcatagagtactacaggaaacgggggatccactccgccatcgatgcatcccagacccccgatgtcgtgttcgcaagcatcctagcagccttctccaaagccacat

SEQ ID NO: 105307 - DNA, 811 bp, Homo sapiens
  Payload ID: 659
  Gene Symbol: AK2
  Gene Name: adenylate kinase 2
  ENST ID: ENST00000480134
  CDS Start-End: 50-451
tggacctgtgaggcgtgcgaactggtggcagtgagagacttcggcggacatggctcccagcgtgccagcggcagaacccgagtatcctaaaggcatccgggccgtgctgctggggcctcccggggccggtaaagggacccaggcacccagattggctgaaaacttctgtgtctgccatttagctactggggacatgctgagggccatggtggcttctggctcagagctaggaaaaaagctgaaggcaactatggatgctgggaaactggtgagtgatgaaatggtagtggagctcattgagaagaatttggagacccccttgtgcaaaaatggttttcttctggatggcttccctcggactgtgaggcaggcagaaatggctgattcaccccaagagtggccgttcctaccacgaggagttcaaccctccaaaagagcccatgaaagatgacatcaccggggaacccttgatccgtcgatcagatgataatgaaaaggccttgaaaatccgcctgcaagcctaccacactcaaaccaccccactcatagagtactacaggaaacgggggatccactccgccatcgatgcatcccagacccccgatgtcgtgttcgcaagcatcctagcagccttctccaaagccacatgtaaagacttggttatgtttatctaatgttgggtccaagaaggaatttctttccatccctgtgaggcaatgggtgggaatgataggacaggcaaagagaagcttcctcaggctagcaaaaatatcatttgatgtattgattaaaaaagcacttgcttgatgta

SEQ ID NO: 105308 - DNA, 160 bp, Homo sapiens
  Payload ID: 659
  Gene Symbol: AK2
  Gene Name: adenylate kinase 2
  ENST ID: ENST00000626911
  CDS Start-End: 32-160
gaactggtggcagtgagagacttcggcggacatggctcccagcgtgccagcggcagaacccgagtatcctaaaggcatccgggccgtgctgctggggcctcccggggccggtaaagggacccagttggagaaactgaagtttgaatggcttgttctctag

SEQ ID NO: 105309 - DNA, 3576 bp, Homo sapiens
  Payload ID: 659
  Gene Symbol: AK2
  Gene Name: adenylate kinase 2
  ENST ID: ENST00000629371
  CDS Start-End: 84-485
gtgcgtggcgtgcgtgcgttgacctgggaagcactggacctgtgaggcgtgcgaactggtggcagtgagagacttcggcggacatggctcccagcgtgccagcggcagaacccgagtatcctaaaggcatccgggccgtgctgctggggcctcccggggccggtaaagggacccaggcacccagattggctgaaaacttctgtgtctgccatttagctactggggacatgctgagggccatggtggcttctggctcagagctaggaaaaaagctgaaggcaactatggatgctgggaaactggtgagtgatgaaatggtagtggagctcattgagaagaatttggagacccccttgtgcaaaaatggttttcttctggatggcttccctcggactgtgaggcaggcagaaatggctgattcaccccaagagtggccgttcctaccacgaggagttcaaccctccaaaagagcccatgaaagatgacatcaccggggaacccttgatccgtcgatcagatgataatgaaaaggccttgaaaatccgcctgcaagcctaccacactcaaaccaccccactcatagagtactacaggaaacgggggatccactccgccatcgatgcatcccagacccccgatgtcgtgttcgcaagcatcctagcagccttctccaaagccacatcctagtatcagaaggccaggcgagactgcaacactgctcatcaccccgcggcgtgatccctgctcttaggtgctgggcagaggggaagggtggtcagggtgaggatggtgagggagggctggtgaggggctcagaggaatacttggaacaacagcagtgttattgtagtgtggcagtttcttttatacataggtgagagtttttaaagtgtaagggaaaaattaattttttaaaaaacaccatgcttggagggtgggggtagaaatagacacaatattatttctaaggaatcgggttttcatttactctggactggtgaaaatattttttaaagccagtgctctaagacctcagcttttatctcagaaccccatgggttccagaccaagagtacaggaaatcaaattgttgtcctgtctgtctatagcttggaacagggagctttgattactgactccggttccacacactgtaagatcaaaaaaccatctccacatttgaaagagatgtaaggtgtattcatagggatggtggctcaacaaatcaagcaaactggaatcaaggggagggggaagggaatgaaatggaaagggaggctgattcccttcccctgacttaccactaatttactaggctacctactttcatgagtaacctctcacagctacccagcacatgccacaatcctatgctcttgccttcttttatctgcactgtgtgaagggactcttttaaataaatgagcaagtgtcctaagctatgtcatccaaagattgtcctttccattctcaaatcctgtgactgggatcactcaacagcactgtgatgtattattttcaatgaggtgcctttcttaactgaccaaatgctgccttgtttggcccctaaatcaataaaatatgttaaaatttgtatcccctgttgtggcattttttttagataatctaagctagaaaaatgacattgaattctggacctggctggaaggaaaagaagccctttcttgtcgctggcagctgtgtggtagggaggtccaagtatgtgcatatgagataagcctgcaacctcttgaccttcagctcctatgcaggcttctcttgagcccagagacaaggcagcttggtctagtggagatagcactgtgcttggagttcaggggacctaggacaaatcccagccagttagttattcactgtgctcctgtttcctcagctgaaaaaggaagttggttatgccaccttcttggccttaatggcattaaatgaaatttataggaagaaggtttttgctcagtacctggcatgcaacagacattggataaatgttagttggatccagatatacacagaaagatatctgcttcctgccaggctggataactgttgaatggacacttgtccatagtctagaaagccagtgcttctaatccttaagccagatctttgactaccttttcagttgcttctttaacactctttgttgcttctctgtgtgtcctagtttaaattcatttcctctccagcaaaagtgagcttaaataatttctccaaactaaagctctcatgtttttggaagggctgcctttgcaagtgaggtttctgagaaatgactgttgttcccaaaacaagagggagctgggctggaagcaccactattcttctttaggcatcttgttacagagagaggcagggtcttcactgacatattaaatcctgttccctgaaccagcccctccctcttctgctccacttcctcacctgtgcagagtcattttcaggtgttagccttactgatttgcactgatctgtttgttccctgagctttttaaataccctgtgaaaattttctttcctcccttggtcatcatgcatctaattgtggggaaatgtttgtcaaaccaacctgcaaagcagcatggtgtagttgagaagaataaacagagaagactgggtgagctattgtttgtttgcttctttgggcctgggtttcctcatctaatctgcaaaccaagaatgcagactagtcctaccactcccggaagactgacgttgtgccaggtattatgcaaaggcttcatgtaaccctcgacttcacgtaaccctcacacagcaccctgtggagtcagaactgtccttcacttttataggtgaggaaaccagactcagagaggtgaagtggcattcctgaggtcatgcataagaggcagtcaggactgaaacacagtctctaacacttatccgtccccttgatcttgttgctgaagtgatttaattacttgcgtagctctgcacacaggaagggctgctctgaataagagctcttttccatggacactcagcgctgccggaactgattttgaagaagtcactgccggctctgagggcctagggtatgtgtcttaggatctcctgtgtgcacaaagtgtcactgacagaacacagcaggatggagagcagcctcctcagaagcctcacaagtctttcctcagatgaagacagagcaacgagtcagaagacagatttcaacagcgacttcaccatgcgaccttggacaagttatctcacctcatcagtagaataggaatgatccctacccctcaaaggtgctgatgacactagtgaccaagatactcatgtgggttggactgcccaggacacagcagatgcttagtaaacacagatggaattcagagggaaaatgtaggcattgaagaaagttgtcttactgaccatccggaaccaggctaaggatcccctagaaatcatagacctctgaaattatatgcagaattctttatgtgttttcataattaataatagtctaacatattaaattcttagctgtgtgagaggttctgcatgcattatctcatttattctcctcgataaccctgt

SEQ ID NO: 105310 - DNA, 1536 bp, Homo sapiens
  Payload ID: 660
  Gene Symbol: AK3
  Gene Name: adenylate kinase 3
  Uniprot ID: Q9UIJ7
  ENST ID: ENST00000359883
  CDS Start-End: 132-605
acacactcttttacgttatttataaaagagtctcactcaatggaagctggatttcctctcctgtaaaatgagaaattggcgtgttagccaaggctttcattgaccaagggaaactcatcccagatgatgtcatgactcggctggcccttcatgagctgaaaaatctcacccagtatagctggctgttggatggttttccaaggacacttccacaggcagaagccctagatagagcttatcagatcgacacagtgattaacctgaatgtgccctttgaggtcattaaacaacgccttactgctcgctggattcatcccgccagtggccgagtctataacattgaattcaaccctcccaaaactgtgggcattgatgacctgactggggagcctctcattcagcgtgaggatgataaaccagagacggttatcaagagactaaaggcttatgaagaccaaacaaagccagtcctggaatattaccagaaaaaaggggtgctggaaacattctccggaacagaaaccaacaagatttggccctatgtatatgctttcctacaaactaaagttccacaaagaagccagaaagcttcagttactccatgaggagaaatgtgtgtaactattaatagtaagatgggcaaacctcctagtccttgcatttagaagctgcttttcctaagacttctagtatgtatgaattctttgaaaattatattacttttatttctactgattttattttggatactaaggatgtgccaaatgattcggatactaagatgcatcgtttgaaatcatctagtgtgttgtatgcagttatcctcaaaaacatcagcgatgtctgaacctttaaaacatctgttagagcaaaattaaaagagcatttggtagtaatctaactttttgttcagttaataagtggttgataaagtttccatatttttctggaaaagttaaaaaaagttacatgtcatttggagaaaatacgtaatcagaaatttgtgcatagattgatgccaaaaaagacatttccagcattgtggaacatggtgagacactatataaaattccagaaagaaagcaactggatttacagatttattgtgagacacaaattcactgctgcctttacactaagaaatgtatatgttaaccatatatgctgtatttattttgtcgttaagcatactttcagtttactcagaattttcaatttgctataaagatgtatcaattagcatatagaaaaatattactttaagatgacttgtttcctttgaaaatacctgtgtactgagggttatgatttgtgtcaaaaattgacataagtgcttttacaagcaccaaagttgaatgaattttcaacaaaatgtaattaaagtctatgttttcagttatgactcaggttaagaaatgtgttttaggatctacttgctggtttttctttttgatccaaatgtgtgatctgccctgataaataacaagttatagtaccatctcccccgccaataaaaaagagaagaaaaaagagaaa

SEQ ID NO: 105311 - DNA, 2736 bp, Homo sapiens
  Payload ID: 660
  Gene Symbol: AK3
  Gene Name: adenylate kinase 3
  Uniprot ID: Q9UIJ7
  ENST ID: ENST00000381809
  CDS Start-End: 232-915
gtcgggggcggggggtgcgccggggtagccgagaggcggacgcaacagcggggtcccgcgctgtctgggcggccccaggggctgtcggctcacttccgggaacgccggggaaccgcagtagccgcctgctagtggcgctgctagccggccggcgcaggctgccgagcgggtgagcgcgcaggccaggccaaagccctggtacccgcgcggtgcgggcctcagtctgcggccatgggggcgtccgcgcggctgctgcgagcggtgatcatgggggccccgggctcgggcaagggcaccgtgtcgtcgcgcatcactacacacttcgagctgaagcacctctccagcggggacctgctccgggacaacatgctgcggggcacagaaattggcgtgttagccaaggctttcattgaccaagggaaactcatcccagatgatgtcatgactcggctggcccttcatgagctgaaaaatctcacccagtatagctggctgttggatggttttccaaggacacttccacaggcagaagccctagatagagcttatcagatcgacacagtgattaacctgaatgtgccctttgaggtcattaaacaacgccttactgctcgctggattcatcccgccagtggccgagtctataacattgaattcaaccctcccaaaactgtgggcattgatgacctgactggggagcctctcattcagcgtgaggatgataaaccagagacggttatcaagagactaaaggcttatgaagaccaaacaaagccagtcctggaatattaccagaaaaaaggggtgctggaaacattctccggaacagaaaccaacaagatttggccctatgtatatgctttcctacaaactaaagttccacaaagaagccagaaagcttcagttactccatgaggagaaatgtgtgtaactattaatagtaagatgggcaaacctcctagtccttgcatttagaagctgcttttcctaagacttctagtatgtatgaattctttgaaaattatattacttttatttctactgattttattttggatactaaggatgtgccaaatgattcggatactaagatgcatcgtttgaaatcatctagtgtgttgtatgcagttatcctcaaaaacatcagcgatgtctgaacctttaaaacatctgttagagcaaaattaaaagagcatttggtagtaatctaactttttgttcagttaataagtggttgataaagtttccatatttttctggaaaagttaaaaaaagttacatgtcatttggagaaaatacgtaatcagaaatttgtgcatagattgatgccaaaaaagacatttccagcattgtggaacatggtgagacactatataaaattccagaaagaaagcaactggatttacagatttattgtgagacacaaattcactgctgcctttacactaagaaatgtatatgttaaccatatatgctgtatttattttgtcgttaagcatactttcagtttactcagaattttcaatttgctataaagatgtatcaattagcatatagaaaaatattactttaagatgacttgtttcctttgaaaatacctgtgtactgagggttatgatttgtgtcaaaaattgacataagtgcttttacaagcaccaaagttgaatgaattttcaacaaaatgtaattaaagtctatgttttcagttatgactcaggttaagaaatgtgttttaggatctacttgctggtttttctttttgatccaaatgtgtgatctgccctgataaataacaagttatagtaccatctcccccgccaataaaaaagagaagaaaaaagagaaacccgtggcactatgtaaataaagtaagcatactttgttgttagtaaatagatgaggcatgcctgggaaatgctcccttggcataaatagcaatcaatcataattagtaaacaggtgtaccaataaaaagaatttacatgataggttaacaaggaccaggaaagtgagtttcctgaaggagttctttgttcctgatcaaagaaattgatacctgttagcattcactgccaccatattttaaggagaaagaactctattggtgtcgtctgagcagccatttaaaaattggaatctaaaggatggttgctgatgtactgtgtggtctggtagaagtggggaaatatgagagatggaggaaaaacttgattatgtcttccatggcatatttactcttactttacttcgtgccaaatcaaatgaaacaagccgtcttacaagtcgttattgcctttaaaaatctgttccgtttttttcccaggtacttaaaatacaagtgccagtaagtggttcttatgtgttttggggggaaaattttatttcccttttcttctgatatttaaaaaattcatcgatctttcaagatgaaccaaggttttttaaaagaaatataggaaacacttcattctttataaaactttctataatgccttatttgaatgttaatcttatgtgctttctaaaaaatgttgtgaaataccaaacttatggattatcactaggttatcaagcatatattagtctttatcagaataaaatgaaatttcataactgtggctattactttgttcttggtccttcacagggcctgctccatcccaccttcctttctgctgcctgatgtctcaatggcttctgaatgactgttctaataaatgatcttaaaacagtcca

SEQ ID NO: 105312 - DNA, 705 bp, Homo sapiens
  Payload ID: 660
  Gene Symbol: AK3
  Gene Name: adenylate kinase 3
  Uniprot ID: Q9UIJ7
  ENST ID: ENST00000447596
  CDS Start-End: 141-704
acttccgggaacgccggggaaccgcagtagccgcctgctagtggcgctgctagccggccggcgcaggctgccgagcgggtgagcgcgcaggccaggccaaagccctggtacccgcgcggtgcgggcctcagtctgcggccatgggggcgtccgcgcggctgctgcgagcggtgatcatgggggccccgggctcgggcaagggcaccgtgtcgtcgcgcatcactacacacttcgagctgaagcacctctccagcggggacctgctccgggacaacatgctgcggggcacaggttttccaaggacacttccacaggcagaagccctagatagagcttatcagatcgacacagtgattaacctgaatgtgccctttgaggtcattaaacaacgccttactgctcgctggattcatcccgccagtggccgagtctataacattgaattcaaccctcccaaaactgtgggcattgatgacctgactggggagcctctcattcagcgtgaggatgataaaccagagacggttatcaagagactaaaggcttatgaagaccaaacaaagccagtcctggaatattaccagaaaaaaggggtgctggaaacattctccggaacagaaaccaacaagatttggccctatgtatatgctttcctacaaactaaagttccacaaagaagccagaaagcttcagttactccatgag

SEQ ID NO: 105313 - DNA, 4029 bp, Homo sapiens
  Payload ID: 660
  Gene Symbol: AK3
  Gene Name: adenylate kinase 3
  Uniprot ID: Q9UIJ7
  ENST ID: ENST00000611749
  CDS Start-End: 139-612
gagtgggcgccaggtggaggtggggccagggttgtcaagggagcacgaaaggggtcgcggtgtgtccggcaaggactggaaattggcgtgttagccaaggctttcattgaccaagggaaactcatcccagatgatgtcatgactcggctggcccttcatgagctgaaaaatctcacccagtatagctggctgttggatggttttccaaggacacttccacaggcagaagccctagatagagcttatcagatcgacacagtgattaacctgaatgtgccctttgaggtcattaaacaacgccttactgctcgctggattcatcccgccagtggccgagtctataacattgaattcaaccctcccaaaactgtgggcattgatgacctgactggggagcctctcattcagcgtgaggatgataaaccagagacggttatcaagagactaaaggcttatgaagaccaaacaaagccagtcctggaatattaccagaaaaaaggggtgctggaaacattctccggaacagaaaccaacaagatttggccctatgtatatgctttcctacaaactaaagttccacaaagaagccagaaagcttcagttactccatgaggagaaatgtgtgtaactattaatagtaagatgggcaaacctcctagtccttgcatttagaagctgcttttcctaagacttctagtatgtatgaattctttgaaaattatattacttttatttctactgattttattttggatactaaggatgtgccaaatgattcggatactaagatgcatcgtttgaaatcatctagtgtgttgtatgcagttatcctcaaaaacatcagcgatgtctgaacctttaaaacatctgttagagcaaaattaaaagagcatttggtagtaatctaactttttgttcagttaataagtggttgataaagtttccatatttttctggaaaagttaaaaaaagttacatgtcatttggagaaaatacgtaatcagaaatttgtgcatagattgatgccaaaaaagacatttccagcattgtggaacatggtgagacactatataaaattccagaaagaaagcaactggatttacagatttattgtgagacacaaattcactgctgcctttacactaagaaatgtatatgttaaccatatatgctgtatttattttgtcgttaagcatactttcagtttactcagaattttcaatttgctataaagatgtatcaattagcatatagaaaaatattactttaagatgacttgtttcctttgaaaatacctgtgtactgagggttatgatttgtgtcaaaaattgacataagtgcttttacaagcaccaaagttgaatgaattttcaacaaaatgtaattaaagtctatgttttcagttatgactcaggttaagaaatgtgttttaggatctacttgctggtttttctttttgatccaaatgtgtgatctgccctgataaataacaagttatagtaccatctcccccgccaataaaaaagagaagaaaaaagagaaacccgtggcactatgtaaataaagtaagcatactttgttgttagtaaatagatgaggcatgcctgggaaatgctcccttggcataaatagcaatcaatcataattagtaaacaggtgtaccaataaaaagaatttacatgataggttaacaaggaccaggaaagtgagtttcctgaaggagttctttgttcctgatcaaagaaattgatacctgttagcattcactgccaccatattttaaggagaaagaactctattggtgtcgtctgagcagccatttaaaaattggaatctaaaggatggttgctgatgtactgtgtggtctggtagaagtggggaaatatgagagatggaggaaaaacttgattatgtcttccatggcatatttactcttactttacttcgtgccaaatcaaatgaaacaagccgtcttacaagtcgttattgcctttaaaaatctgttccgtttttttcccaggtacttaaaatacaagtgccagtaagtggttcttatgtgttttggggggaaaattttatttcccttttcttctgatatttaaaaaattcatcgatctttcaagatgaaccaaggttttttaaaagaaatataggaaacacttcattctttataaaactttctataatgccttatttgaatgttaatcttatgtgctttctaaaaaatgttgtgaaataccaaacttatggattatcactaggttatcaagcatatattagtctttatcagaataaaatgaaatttcataactgtggctattactttgttcttggtccttcacagggcctgctccatcccaccttcctttctgctgcctgatgtctcaatggcttctgaatgactgttctaataaatgatcttaaaacagtccataggctggtttcagtttatgcaatacttcatctcctgctatggtagccataccggccttcataatacccttaggggatttggaaatcaaagtgagcagtggaagaacatggctatgagaattaagactcttatttcctgtgaccattccctccccacccgcaaacacttagcccaaagttttgcacatacattcattactttaggaatgaatatgactgtaatacaacttttttctttatttttttttagacagggcctcactctgttgcccagactagagtgcagtggcataattgggtcactgtaacgttgaactcctgggctcacgcaattcttctacctcagcctcccaagtagctgaaactacaggtatgtaccaccatgcctggctaattttatttttttgtagagacggcgtctcgatatgttgcccaggctagtctcctggcctcaaacagtcttcctgattcagcttcccaagtgctgagattacaggtgtaagccactgcccccacccaaaaaaataattctgtaatgaccatcattaagatttatgtaccacatggaaatacatgtatggagctgaatgccatggctaggagaaactactatacttttgttaaaagccaatgagaggccgggcgcggtggctcacgcctgtaatcccagcactttgggaggccgaggcgggcggatcacgaggtcaggagatcgagaccatcctggctaacacggtgaaaccccgtctctactaaaaatacaaaaaaaaaaaaaaaaaattagccgggcatggtggcgggcgcctgtagtcccagctactcgggaggttgaggcaggagaatggtgtgaatccgggaggcggaggttgcagtgagctgagatcgtgccactgcactccagcctgggcgacagagggagactccgtctcaaaaaaaaaagccagggagaacagcacctcaactgatttattttatagagtaaaagttattttgctataccttttgtaagcagcgtgtactgtgggaaatgcaaactagcagttgttagcaccatccagaaatttctgtcagttccatttcaaatagtttaaatactggctcaaatctctaaaccccaccctatggctacttttcccccagctatatataatggcattctagcaagatattttggatcctcataacttgtgacaaaactgccctatactaacaacaaatcattgtaattatagatctcaaattatgttaaattgctatagttgcaaccaacagcaagaatttgtattttagaatatgttgtgtcttctcattgaccaaaaaataaaaataaaaataaaaataaatcctcaggccctgataaactgtagaaatagcttttctatctttgcagttaaagattttcatcttggaagttatggttaaaaaatttttaaacagttaaaatagtgtagctgtgcttaaagcttctggtaaaagccagtatgctttgtagagcccttatccccctcctgctttttatttgtttttagctcactaaataatataaacactgatttttccatatatagcactgaataaactgtcatgcctaagtgt

SEQ ID NO: 105314 - DNA, 6836 bp, Homo sapiens
  Payload ID: 661
  Gene Symbol: AK4
  Gene Name: adenylate kinase 4
  Uniprot ID: P27144
  ENST ID: ENST00000327299
  CDS Start-End: 206-877
agtccgcctgctactcggtcccggcgctgggctgaggggaggggttgtcttaaaagtctctccttccccctgtaggggcggccggcgagtcccagtgagagcggagggtgccagaggtagggggccgagaaacaaagttcccggggcttcctccggggccgcggtcggggctgcgcgtttgaccgcccccctcctcgcgaaggcaatggcttccaaactcctgcgcgcggtcatcctcgggccgcccggctcgggcaagggcaccgtgtgccagaggatcgcccagaactttggtctccagcatctctccagcggccacttcttgcgggagaacatcaaggccagcaccgaagttggtgagatggcaaagcagtatatagagaaaagtcttttggttccagaccatgtgatcacacgcctaatgatgtccgagttggagaacaggcgtggccagcactggctccttgatggttttcctaggacattaggacaagccgaagccctggacaaaatctgtgaagtggatctagtgatcagtttgaatattccatttgaaacacttaaagatcgtctcagccgccgttggattcaccctcctagcggaagggtatataacctggacttcaatccacctcatgtacatggtattgatgacgtcactggtgaaccgttagtccagcaggaggatgataaacccgaagcagttgctgccaggctaagacagtacaaagacgtggcaaagccagtcattgaattatacaagagccgaggagtgctccaccaattttccggaacggagacgaacaaaatctggccctacgtttacacacttttctcaaacaagatcacacctattcagtccaaagaagcatattgaccctgcccaatggaagaaccaggaagatgtggtcattcattcaatagtgtgtgtagtattggtgctgtgtccaaattagaagctagctgaggtagcttgcagcatcttttctagttgaaatggtgaactgataggaaaacaaatgagtagaaagagttcatgaagaggccctcctctgcctttcaaaaggctggtcacctacacatgtttaaggtgtctctgcacatgtctcaagcccatcacaagaaagcaagtacagtgtggatttcaaatggtgtgtaacttcagctccagctggtttttgacagctgttgctgtggtaatatttttgacatgtgatggtgatagtctctggttctccccatccccacaaaggctgttgaaccacagcaccaggaagcctgagaatgaatcctgagggctctagcccaggctttgtcccaggctttctggtgtgtgccctcctggtaacagtgaaattgaagctacttactcatagtggttgtttctctggtcttgagtgactgtgtccacagttcatttttttccggtaggaataactccttttctacatccacgctccatagagtctctccttttcagacatcctgggatgaaagaatttggcttttttttttctttttttttttggacatctgttttcactcttaggcttttaaacaatagttattgcttttatccctctcagattctaataactgagagcgatggggctatattgaatctctgtatgcactgagaactgagctatgaagaggatcttattaaactgctggtctgactttatggattgacactgttcctttcttttattgtgaaaaaaaaaaaaaaccctgaaagtcttgggaaccccctaaagtcttttgggaatcctcaaaaagcatgggaagttaagtatttagctacataaatgttgtaagatcatatcttatgtatagaagtaataagaccatttggaattactggactaattgaatagttaaggtttctattcgggacaataaaatgtattttgaaagtgctgctaactattgatgctgacagtgtttcactcctatgagtgacccaaacatattataaatatgtggtaaagggaatggagcctgtggggttgagcagaatgttgtactagctgtgcctggactgagtataacagctttatgattatgagaaaacaaattctttattttttttttctgttccaaagattcatcctatggggtggccataaagtctagaattagatactaatattttgtcattcattataacatatcaataaaccatttgttaaaagatttgcctggtttccagacttggtggccaccttgaataattcttgctgtcttctgggaaggatgatgaaatttattcctgctgccttaaaaatatgtatcccttcttcacccatcatgactgtccccagtgagtgtcctttactattcttgggagtgactcctgtctaacttttcatactggcgagaagaaaagaagcctattttaacactttagtggtgttgaaacacattacttactttctgaagatgtcccagtgaatcctctgtcaattcactgccatatgtaatctatatgataaggaatgcatcttccttctaagtactgcccaaactcttgccagctcctctcccattgtcccttcatgtgaatatttcttggctaccttagtggaaatatagatcagttttctccccatccatcctctcaaacataatgagattgtttactttttagatttatgcagtgaaaatgcccagtcaggtctgaatcgtcagtgcattatattgactctgagcactttagaatttagagttgcaattgaatgccagctgtggagatggggtgcatatcagatatataaataaagctcaggtttgctagggaaccaggtatagagaaaaataagtctgatatgaggaaaattgcacaatttagagtagttatgccgtagagaaaatttccacaaactaggaaatgtagagagttattctatagaatactcaaaagaggaaagtatgtgatttttggaaacaggaaaatcttcaaacttctttcttcacttccctttgtgtttagctgaccctccaatgtgatcattgcctttggagtttgggagaggtacgggaagtggcctgatccctgcttccatacttcactcctccatccatccttccctccctcttcccctccagctaaatggacaattctagccaacattgagtcactcaataagtctcaacagtgggtgtgtttgctgagattgtccagcggttgagcagtttggtctcacctccctcgctagttgagaccaaaaagagacaaataactttttcatggtctttgaaacataatgcttatttcgtggtcaatggctttaaaaaaatctgtttcttgttttcttcaacaaactcactagttttcccttaaatgatattgtaaaaattaaagtaatcttgaaaatgttttgacaaaagtaaaattaaagggacatcttttcttgttttgttttttttttttctattgccacacatgaccgttccttcacctttaagcaaagagagtggttcagatggtttctaagatgccaacctgacctcgcattctgtcattctacccagctcttaattcaatttgcttccattatcctaacaggcttctttcttacttagaacttggaaaggctgctgtatttaataccctccaacactaacgcagacttaagataggtactgtttattgaaaacctactgagtgaaatgtgcggttttaggaccttcataaacatctcatttaatctttctagcatcctgtgaaacagccatgatttcacgttgataaacaaagaagacaggggtcccagggatgtgaagcatcttgcccaggcttctgctgctggtgaccagtgtagccaggactccagcccaggttttcctgactcagaagactgagctttttcctggatgttattaatagctaattgtgtccaagcaaccaagggccttgagtctgcttggttctgcttatggcctcacatcaagaaatggagctagtccatgtctgtagtcccaatgctttgggaagccatgatgggaaggttgtcggaggccaaaagttcaagaccaggctgggcaatatcacaagactccatctctacggaaaagtaaaaaattagccagtcatggtggtgtacacttatggtcctagttactcaggagacttaggcaggaggattgcttgatcctaggaattcgaggctgcagtgagctatgattgcacctctgcacccaagcctgggcgacacagcgagaccctctctcttaaaaaaaaaaaatagcagagctcaccaaagtgatgttcacctttttatgacattcctttttcttagcttaagaaaagaaagctgctagatgagagtcttagttttcctgcataagacctcctttatgaatagaataaaagactgtcaaagtaggctgggcttgggcccaggctaatctatgaaggaagcaagctcgtgttccttacctatccttttggtgtccattggattgtgccccgaagtggcctttacccttgagccgtccccagccatggtgctcacacataggcttttgagctccttggagctatccagatcctgctcacttttccttcctgagatcagaacaaatcacccccttactcccactccaaacaaggccttgatgataaactaatccttcctaaaatgctggtaggtaaacaagcaatgatgaagcattgaacacaggttaactcctgacttttgtaccattgtctattccattacacattaacatgactctgaatgccagatccaaacctttgcccaccatctgcttgtcgtgcaacagttgaggcagtaaccaggggagattcacttcctgtcttgtccttccccagggatcacccccctgctgccctctagcagccaaactcagatgagttccattgttaccctaggtgtgcccatctctttggtagggaaggagaaaggtaagaatagccatcagtgaggaaggattcttggagcgaggagccactgtggtttttcctgctatttaagatgttgagaccggataactttagaaagatacctgcacaaacccataaatagtgcttttataaagtttagttcaccggaacctgagttcagtatttgacattagctttttgtccaaagagttgaagcctgctggaggtctttgctcaaataataaataccacatatttccaagtgtgttcaggtataggcactaggtactgtctgtttacttcatgttaggcacattacatgcattggctaatcaaatcctcatcaattacatatgtaataatctaaacttgcctccttgtattataaatggaaataatcctgtttatttaaacgggttttcatgtacctgtagggattaggaaactcaaatggcctttttaatacctttccctagtttgagctccctgttctctttaacagataaaacaacatatttgcttcagcctggaatctgtttttggtgctttggtgcagagacaggaaatgggcactcagagtcacactggtagttgcacactgtatctacagagggcgtgtctcatctgtactctgctgggttacaggatttcagtaggtatttgtgtccacctgagaattctgtttattacctttcatttgacagtgtctttcctttctgcagttgattttgctagagaggcaattcataaggtgaggtcctgttcatagtatgacttgctttctcaatatctccttcaatttttagtaactcttggtctatttggtgtctttaaaaaaaataacctagtaataaagacttcttttaatgtggaaatgtggtctggtagtaagttatttctttccacatgtaactgacccaatctggtttccaaatgagaagtgtgcaggccccagaggttgagaagccatatttcaactgtgaaaaaaatctgcttcctgcatctgttgaaatatagttgttcatacttgccatcccttatctttcttgtaacaatttgcacagttcttgccagaataaatgccattatctgtatgtttcagggagttccccaatttgatcatttttgtgtgtgtgtggtgtgtgtgtgagagagagagatactgcagtaaaacatttctaaaggatgaaagctcttgtatggcatagatatgaattccttcctctggtaataattaggttattcccagaagcacagtgtcattctttaaataaaagctttcctgtttaaagcttttcaaaggagcagaccaccttgaagattccccctagggttgatatgtgtctaattcattttataaaaattattcttgtcttcattttaaagctttggctatatagtcagaaatgtcctaaataacaaactattttgtatttaatttagggaagactaaagggaagaaaaatgaaaactcagtctttatgtaagctccaaggatattagggcttaaagggcttttctagttttatgagaatttgtactactgatttttatatattcctgtttttgagatgaacagatctctggggaaattgttgagttacaatggcatttcactgtgatccctctcaagctcagatcagttctataacccaatgacaacctgtctctttggtttactgtcctgtgaaatgtcagctcaagtttcccagaagtcgtgtgtttatgatgagtcagagtgcttttcctcggtgggacagttgctggccctcttaattttggtgtatgtgcttccaagtatctaaacctccagtctgatctgtatatgctatcctaactgttaattgtattattgattatgttgattatcttgcttgaaggttcatacttttcaatttgatagaaataaagtttttttctgcttata

SEQ ID NO: 105315 - DNA, 6998 bp, Homo sapiens
  Payload ID: 661
  Gene Symbol: AK4
  Gene Name: adenylate kinase 4
  Uniprot ID: P27144
  ENST ID: ENST00000395334
  CDS Start-End: 359-1030
agccgccggggaggggacgagacgcagaccacacgttgcccacgtgcgaggaccgggcaggggctcagcccctaggccgcccggtgcgtggggcggcgggggctggctttgagtcacccccgcttgtgccagcttccccggctcggcggagactggcttggggatgcctggccgcccggcccccttctcggacgcggcgtggggagcgagctggagttaaggatgaaggggcggccggcgagtcccagtgagagcggagggtgccagaggtagggggccgagaaacaaagttcccggggcttcctccggggccgcggtcggggctgcgcgtttgaccgcccccctcctcgcgaaggcaatggcttccaaactcctgcgcgcggtcatcctcgggccgcccggctcgggcaagggcaccgtgtgccagaggatcgcccagaactttggtctccagcatctctccagcggccacttcttgcgggagaacatcaaggccagcaccgaagttggtgagatggcaaagcagtatatagagaaaagtcttttggttccagaccatgtgatcacacgcctaatgatgtccgagttggagaacaggcgtggccagcactggctccttgatggttttcctaggacattaggacaagccgaagccctggacaaaatctgtgaagtggatctagtgatcagtttgaatattccatttgaaacacttaaagatcgtctcagccgccgttggattcaccctcctagcggaagggtatataacctggacttcaatccacctcatgtacatggtattgatgacgtcactggtgaaccgttagtccagcaggaggatgataaacccgaagcagttgctgccaggctaagacagtacaaagacgtggcaaagccagtcattgaattatacaagagccgaggagtgctccaccaattttccggaacggagacgaacaaaatctggccctacgtttacacacttttctcaaacaagatcacacctattcagtccaaagaagcatattgaccctgcccaatggaagaaccaggaagatgtggtcattcattcaatagtgtgtgtagtattggtgctgtgtccaaattagaagctagctgaggtagcttgcagcatcttttctagttgaaatggtgaactgataggaaaacaaatgagtagaaagagttcatgaagaggccctcctctgcctttcaaaaggctggtcacctacacatgtttaaggtgtctctgcacatgtctcaagcccatcacaagaaagcaagtacagtgtggatttcaaatggtgtgtaacttcagctccagctggtttttgacagctgttgctgtggtaatatttttgacatgtgatggtgatagtctctggttctccccatccccacaaaggctgttgaaccacagcaccaggaagcctgagaatgaatcctgagggctctagcccaggctttgtcccaggctttctggtgtgtgccctcctggtaacagtgaaattgaagctacttactcatagtggttgtttctctggtcttgagtgactgtgtccacagttcatttttttccggtaggaataactccttttctacatccacgctccatagagtctctccttttcagacatcctgggatgaaagaatttggcttttttttttctttttttttttggacatctgttttcactcttaggcttttaaacaatagttattgcttttatccctctcagattctaataactgagagcgatggggctatattgaatctctgtatgcactgagaactgagctatgaagaggatcttattaaactgctggtctgactttatggattgacactgttcctttcttttattgtgaaaaaaaaaaaaaaccctgaaagtcttgggaaccccctaaagtcttttgggaatcctcaaaaagcatgggaagttaagtatttagctacataaatgttgtaagatcatatcttatgtatagaagtaataagaccatttggaattactggactaattgaatagttaaggtttctattcgggacaataaaatgtattttgaaagtgctgctaactattgatgctgacagtgtttcactcctatgagtgacccaaacatattataaatatgtggtaaagggaatggagcctgtggggttgagcagaatgttgtactagctgtgcctggactgagtataacagctttatgattatgagaaaacaaattctttattttttttttctgttccaaagattcatcctatggggtggccataaagtctagaattagatactaatattttgtcattcattataacatatcaataaaccatttgttaaaagatttgcctggtttccagacttggtggccaccttgaataattcttgctgtcttctgggaaggatgatgaaatttattcctgctgccttaaaaatatgtatcccttcttcacccatcatgactgtccccagtgagtgtcctttactattcttgggagtgactcctgtctaacttttcatactggcgagaagaaaagaagcctattttaacactttagtggtgttgaaacacattacttactttctgaagatgtcccagtgaatcctctgtcaattcactgccatatgtaatctatatgataaggaatgcatcttccttctaagtactgcccaaactcttgccagctcctctcccattgtcccttcatgtgaatatttcttggctaccttagtggaaatatagatcagttttctccccatccatcctctcaaacataatgagattgtttactttttagatttatgcagtgaaaatgcccagtcaggtctgaatcgtcagtgcattatattgactctgagcactttagaatttagagttgcaattgaatgccagctgtggagatggggtgcatatcagatatataaataaagctcaggtttgctagggaaccaggtatagagaaaaataagtctgatatgaggaaaattgcacaatttagagtagttatgccgtagagaaaatttccacaaactaggaaatgtagagagttattctatagaatactcaaaagaggaaagtatgtgatttttggaaacaggaaaatcttcaaacttctttcttcacttccctttgtgtttagctgaccctccaatgtgatcattgcctttggagtttgggagaggtacgggaagtggcctgatccctgcttccatacttcactcctccatccatccttccctccctcttcccctccagctaaatggacaattctagccaacattgagtcactcaataagtctcaacagtgggtgtgtttgctgagattgtccagcggttgagcagtttggtctcacctccctcgctagttgagaccaaaaagagacaaataactttttcatggtctttgaaacataatgcttatttcgtggtcaatggctttaaaaaaatctgtttcttgttttcttcaacaaactcactagttttcccttaaatgatattgtaaaaattaaagtaatcttgaaaatgttttgacaaaagtaaaattaaagggacatcttttcttgttttgttttttttttttctattgccacacatgaccgttccttcacctttaagcaaagagagtggttcagatggtttctaagatgccaacctgacctcgcattctgtcattctacccagctcttaattcaatttgcttccattatcctaacaggcttctttcttacttagaacttggaaaggctgctgtatttaataccctccaacactaacgcagacttaagataggtactgtttattgaaaacctactgagtgaaatgtgcggttttaggaccttcataaacatctcatttaatctttctagcatcctgtgaaacagccatgatttcacgttgataaacaaagaagacaggggtcccagggatgtgaagcatcttgcccaggcttctgctgctggtgaccagtgtagccaggactccagcccaggttttcctgactcagaagactgagctttttcctggatgttattaatagctaattgtgtccaagcaaccaagggccttgagtctgcttggttctgcttatggcctcacatcaagaaatggagctagtccatgtctgtagtcccaatgctttgggaagccatgatgggaaggttgtcggaggccaaaagttcaagaccaggctgggcaatatcacaagactccatctctacggaaaagtaaaaaattagccagtcatggtggtgtacacttatggtcctagttactcaggagacttaggcaggaggattgcttgatcctaggaattcgaggctgcagtgagctatgattgcacctctgcacccaagcctgggcgacacagcgagaccctctctcttaaaaaaaaaaaatagcagagctcaccaaagtgatgttcacctttttatgacattcctttttcttagcttaagaaaagaaagctgctagatgagagtcttagttttcctgcataagacctcctttatgaatagaataaaagactgtcaaagtaggctgggcttgggcccaggctaatctatgaaggaagcaagctcgtgttccttacctatccttttggtgtccattggattgtgccccgaagtggcctttacccttgagccgtccccagccatggtgctcacacataggcttttgagctccttggagctatccagatcctgctcacttttccttcctgagatcagaacaaatcacccccttactcccactccaaacaaggccttgatgataaactaatccttcctaaaatgctggtaggtaaacaagcaatgatgaagcattgaacacaggttaactcctgacttttgtaccattgtctattccattacacattaacatgactctgaatgccagatccaaacctttgcccaccatctgcttgtcgtgcaacagttgaggcagtaaccaggggagattcacttcctgtcttgtccttccccagggatcacccccctgctgccctctagcagccaaactcagatgagttccattgttaccctaggtgtgcccatctctttggtagggaaggagaaaggtaagaatagccatcagtgaggaaggattcttggagcgaggagccactgtggtttttcctgctatttaagatgttgagaccggataactttagaaagatacctgcacaaacccataaatagtgcttttataaagtttagttcaccggaacctgagttcagtatttgacattagctttttgtccaaagagttgaagcctgctggaggtctttgctcaaataataaataccacatatttccaagtgtgttcaggtataggcactaggtactgtctgtttacttcatgttaggcacattacatgcattggctaatcaaatcctcatcaattacatatgtaataatctaaacttgcctccttgtattataaatggaaataatcctgtttatttaaacgggttttcatgtacctgtagggattaggaaactcaaatggcctttttaatacctttccctagtttgagctccctgttctctttaacagataaaacaacatatttgcttcagcctggaatctgtttttggtgctttggtgcagagacaggaaatgggcactcagagtcacactggtagttgcacactgtatctacagagggcgtgtctcatctgtactctgctgggttacaggatttcagtaggtatttgtgtccacctgagaattctgtttattacctttcatttgacagtgtctttcctttctgcagttgattttgctagagaggcaattcataaggtgaggtcctgttcatagtatgacttgctttctcaatatctccttcaatttttagtaactcttggtctatttggtgtctttaaaaaaaataacctagtaataaagacttcttttaatgtggaaatgtggtctggtagtaagttatttctttccacatgtaactgacccaatctggtttccaaatgagaagtgtgcaggccccagaggttgagaagccatatttcaactgtgaaaaaaatctgcttcctgcatctgttgaaatatagttgttcatacttgccatcccttatctttcttgtaacaatttgcacagttcttgccagaataaatgccattatctgtatgtttcagggagttccccaatttgatcatttttgtgtgtgtgtggtgtgtgtgtgagagagagagatactgcagtaaaacatttctaaaggatgaaagctcttgtatggcatagatatgaattccttcctctggtaataattaggttattcccagaagcacagtgtcattctttaaataaaagctttcctgtttaaagcttttcaaaggagcagaccaccttgaagattccccctagggttgatatgtgtctaattcattttataaaaattattcttgtcttcattttaaagctttggctatatagtcagaaatgtcctaaataacaaactattttgtatttaatttagggaagactaaagggaagaaaaatgaaaactcagtctttatgtaagctccaaggatattagggcttaaagggcttttctagttttatgagaatttgtactactgatttttatatattcctgtttttgagatgaacagatctctggggaaattgttgagttacaatggcatttcactgtgatccctctcaagctcagatcagttctataacccaatgacaacctgtctctttggtttactgtcctgtgaaatgtcagctcaagtttcccagaagtcgtgtgtttatgatgagtcagagtgcttttcctcggtgggacagttgctggccctcttaattttggtgtatgtgcttccaagtatctaaacctccagtctgatctgtatatgctatcctaactgttaattgtattattgattatgttgattatcttgcttgaaggttcatacttttcaatttgatagaaataaagtttttttctgcttatagctagcgaa

SEQ ID NO: 105316 - DNA, 6887 bp, Homo sapiens
  Payload ID: 661
  Gene Symbol: AK4
  Gene Name: adenylate kinase 4
  Uniprot ID: P27144
  ENST ID: ENST00000545314
  CDS Start-End: 248-919
ttacgtaaggcgcgagtcccgcgcggccggccggggctccgcgactgggcgggcggaggcggcgccgccctgcaggatccgggctggaagcctctcggagtgctgcctccagccaaggggcggccggcgagtcccagtgagagcggagggtgccagaggtagggggccgagaaacaaagttcccggggcttcctccggggccgcggtcggggctgcgcgtttgaccgcccccctcctcgcgaaggcaatggcttccaaactcctgcgcgcggtcatcctcgggccgcccggctcgggcaagggcaccgtgtgccagaggatcgcccagaactttggtctccagcatctctccagcggccacttcttgcgggagaacatcaaggccagcaccgaagttggtgagatggcaaagcagtatatagagaaaagtcttttggttccagaccatgtgatcacacgcctaatgatgtccgagttggagaacaggcgtggccagcactggctccttgatggttttcctaggacattaggacaagccgaagccctggacaaaatctgtgaagtggatctagtgatcagtttgaatattccatttgaaacacttaaagatcgtctcagccgccgttggattcaccctcctagcggaagggtatataacctggacttcaatccacctcatgtacatggtattgatgacgtcactggtgaaccgttagtccagcaggaggatgataaacccgaagcagttgctgccaggctaagacagtacaaagacgtggcaaagccagtcattgaattatacaagagccgaggagtgctccaccaattttccggaacggagacgaacaaaatctggccctacgtttacacacttttctcaaacaagatcacacctattcagtccaaagaagcatattgaccctgcccaatggaagaaccaggaagatgtggtcattcattcaatagtgtgtgtagtattggtgctgtgtccaaattagaagctagctgaggtagcttgcagcatcttttctagttgaaatggtgaactgataggaaaacaaatgagtagaaagagttcatgaagaggccctcctctgcctttcaaaaggctggtcacctacacatgtttaaggtgtctctgcacatgtctcaagcccatcacaagaaagcaagtacagtgtggatttcaaatggtgtgtaacttcagctccagctggtttttgacagctgttgctgtggtaatatttttgacatgtgatggtgatagtctctggttctccccatccccacaaaggctgttgaaccacagcaccaggaagcctgagaatgaatcctgagggctctagcccaggctttgtcccaggctttctggtgtgtgccctcctggtaacagtgaaattgaagctacttactcatagtggttgtttctctggtcttgagtgactgtgtccacagttcatttttttccggtaggaataactccttttctacatccacgctccatagagtctctccttttcagacatcctgggatgaaagaatttggcttttttttttctttttttttttggacatctgttttcactcttaggcttttaaacaatagttattgcttttatccctctcagattctaataactgagagcgatggggctatattgaatctctgtatgcactgagaactgagctatgaagaggatcttattaaactgctggtctgactttatggattgacactgttcctttcttttattgtgaaaaaaaaaaaaaaccctgaaagtcttgggaaccccctaaagtcttttgggaatcctcaaaaagcatgggaagttaagtatttagctacataaatgttgtaagatcatatcttatgtatagaagtaataagaccatttggaattactggactaattgaatagttaaggtttctattcgggacaataaaatgtattttgaaagtgctgctaactattgatgctgacagtgtttcactcctatgagtgacccaaacatattataaatatgtggtaaagggaatggagcctgtggggttgagcagaatgttgtactagctgtgcctggactgagtataacagctttatgattatgagaaaacaaattctttattttttttttctgttccaaagattcatcctatggggtggccataaagtctagaattagatactaatattttgtcattcattataacatatcaataaaccatttgttaaaagatttgcctggtttccagacttggtggccaccttgaataattcttgctgtcttctgggaaggatgatgaaatttattcctgctgccttaaaaatatgtatcccttcttcacccatcatgactgtccccagtgagtgtcctttactattcttgggagtgactcctgtctaacttttcatactggcgagaagaaaagaagcctattttaacactttagtggtgttgaaacacattacttactttctgaagatgtcccagtgaatcctctgtcaattcactgccatatgtaatctatatgataaggaatgcatcttccttctaagtactgcccaaactcttgccagctcctctcccattgtcccttcatgtgaatatttcttggctaccttagtggaaatatagatcagttttctccccatccatcctctcaaacataatgagattgtttactttttagatttatgcagtgaaaatgcccagtcaggtctgaatcgtcagtgcattatattgactctgagcactttagaatttagagttgcaattgaatgccagctgtggagatggggtgcatatcagatatataaataaagctcaggtttgctagggaaccaggtatagagaaaaataagtctgatatgaggaaaattgcacaatttagagtagttatgccgtagagaaaatttccacaaactaggaaatgtagagagttattctatagaatactcaaaagaggaaagtatgtgatttttggaaacaggaaaatcttcaaacttctttcttcacttccctttgtgtttagctgaccctccaatgtgatcattgcctttggagtttgggagaggtacgggaagtggcctgatccctgcttccatacttcactcctccatccatccttccctccctcttcccctccagctaaatggacaattctagccaacattgagtcactcaataagtctcaacagtgggtgtgtttgctgagattgtccagcggttgagcagtttggtctcacctccctcgctagttgagaccaaaaagagacaaataactttttcatggtctttgaaacataatgcttatttcgtggtcaatggctttaaaaaaatctgtttcttgttttcttcaacaaactcactagttttcccttaaatgatattgtaaaaattaaagtaatcttgaaaatgttttgacaaaagtaaaattaaagggacatcttttcttgttttgttttttttttttctattgccacacatgaccgttccttcacctttaagcaaagagagtggttcagatggtttctaagatgccaacctgacctcgcattctgtcattctacccagctcttaattcaatttgcttccattatcctaacaggcttctttcttacttagaacttggaaaggctgctgtatttaataccctccaacactaacgcagacttaagataggtactgtttattgaaaacctactgagtgaaatgtgcggttttaggaccttcataaacatctcatttaatctttctagcatcctgtgaaacagccatgatttcacgttgataaacaaagaagacaggggtcccagggatgtgaagcatcttgcccaggcttctgctgctggtgaccagtgtagccaggactccagcccaggttttcctgactcagaagactgagctttttcctggatgttattaatagctaattgtgtccaagcaaccaagggccttgagtctgcttggttctgcttatggcctcacatcaagaaatggagctagtccatgtctgtagtcccaatgctttgggaagccatgatgggaaggttgtcggaggccaaaagttcaagaccaggctgggcaatatcacaagactccatctctacggaaaagtaaaaaattagccagtcatggtggtgtacacttatggtcctagttactcaggagacttaggcaggaggattgcttgatcctaggaattcgaggctgcagtgagctatgattgcacctctgcacccaagcctgggcgacacagcgagaccctctctcttaaaaaaaaaaaatagcagagctcaccaaagtgatgttcacctttttatgacattcctttttcttagcttaagaaaagaaagctgctagatgagagtcttagttttcctgcataagacctcctttatgaatagaataaaagactgtcaaagtaggctgggcttgggcccaggctaatctatgaaggaagcaagctcgtgttccttacctatccttttggtgtccattggattgtgccccgaagtggcctttacccttgagccgtccccagccatggtgctcacacataggcttttgagctccttggagctatccagatcctgctcacttttccttcctgagatcagaacaaatcacccccttactcccactccaaacaaggccttgatgataaactaatccttcctaaaatgctggtaggtaaacaagcaatgatgaagcattgaacacaggttaactcctgacttttgtaccattgtctattccattacacattaacatgactctgaatgccagatccaaacctttgcccaccatctgcttgtcgtgcaacagttgaggcagtaaccaggggagattcacttcctgtcttgtccttccccagggatcacccccctgctgccctctagcagccaaactcagatgagttccattgttaccctaggtgtgcccatctctttggtagggaaggagaaaggtaagaatagccatcagtgaggaaggattcttggagcgaggagccactgtggtttttcctgctatttaagatgttgagaccggataactttagaaagatacctgcacaaacccataaatagtgcttttataaagtttagttcaccggaacctgagttcagtatttgacattagctttttgtccaaagagttgaagcctgctggaggtctttgctcaaataataaataccacatatttccaagtgtgttcaggtataggcactaggtactgtctgtttacttcatgttaggcacattacatgcattggctaatcaaatcctcatcaattacatatgtaataatctaaacttgcctccttgtattataaatggaaataatcctgtttatttaaacgggttttcatgtacctgtagggattaggaaactcaaatggcctttttaatacctttccctagtttgagctccctgttctctttaacagataaaacaacatatttgcttcagcctggaatctgtttttggtgctttggtgcagagacaggaaatgggcactcagagtcacactggtagttgcacactgtatctacagagggcgtgtctcatctgtactctgctgggttacaggatttcagtaggtatttgtgtccacctgagaattctgtttattacctttcatttgacagtgtctttcctttctgcagttgattttgctagagaggcaattcataaggtgaggtcctgttcatagtatgacttgctttctcaatatctccttcaatttttagtaactcttggtctatttggtgtctttaaaaaaaataacctagtaataaagacttcttttaatgtggaaatgtggtctggtagtaagttatttctttccacatgtaactgacccaatctggtttccaaatgagaagtgtgcaggccccagaggttgagaagccatatttcaactgtgaaaaaaatctgcttcctgcatctgttgaaatatagttgttcatacttgccatcccttatctttcttgtaacaatttgcacagttcttgccagaataaatgccattatctgtatgtttcagggagttccccaatttgatcatttttgtgtgtgtgtggtgtgtgtgtgagagagagagatactgcagtaaaacatttctaaaggatgaaagctcttgtatggcatagatatgaattccttcctctggtaataattaggttattcccagaagcacagtgtcattctttaaataaaagctttcctgtttaaagcttttcaaaggagcagaccaccttgaagattccccctagggttgatatgtgtctaattcattttataaaaattattcttgtcttcattttaaagctttggctatatagtcagaaatgtcctaaataacaaactattttgtatttaatttagggaagactaaagggaagaaaaatgaaaactcagtctttatgtaagctccaaggatattagggcttaaagggcttttctagttttatgagaatttgtactactgatttttatatattcctgtttttgagatgaacagatctctggggaaattgttgagttacaatggcatttcactgtgatccctctcaagctcagatcagttctataacccaatgacaacctgtctctttggtttactgtcctgtgaaatgtcagctcaagtttcccagaagtcgtgtgtttatgatgagtcagagtgcttttcctcggtgggacagttgctggccctcttaattttggtgtatgtgcttccaagtatctaaacctccagtctgatctgtatatgctatcctaactgttaattgtattattgattatgttgattatcttgcttgaaggttcatacttttcaatttgatagaaataaagtttttttctgcttatagctagcgaa

SEQ ID NO: 105317 - DNA, 1335 bp, Homo sapiens
  Payload ID: 661
  Gene Symbol: AK4
  Gene Name: adenylate kinase 4
  ENST ID: ENST00000546702
  CDS Start-End: 106-621
gtgtttatttgattgcttttggtggcgaggcgcggggctcgggctcgtcgcgcgccccatggccggggagcgcatccgccaaccccgggcggagaagttggtgagatggcaaagcagtatatagagaaaagtcttttggttccagaccatgtgatcacacgcctaatgatgtccgagttggagaacaggcgtggccagcactggctccttgatggttttcctaggacattaggacaagccgaagccctggacaaaatctgtgaagtggatctagtgatcagtttgaatattccatttgaaacacttaaagatcgtctcagccgccgttggattcaccctcctagcggaagggtatataacctggacttcaatccacctcatgtacatggtattgatgacgtcactggtgaaccgttagtccagcaggaggatgataaacccgaagcagttgctgccaggctaagacagtacaaagacgtggcaaagccagtcattgaattatacaagagccgaggagtgctccaccaattttccggaacggagacgaacaaaatctggccctacgtttacacacttttctcaaacaagatcacacctattcagtccaaagaagcatattgaccctgcccaatggaagaaccaggaagatgtggtcattcattcaatagtgtgtgtagtattggtgctgtgtccaaattagaagctagctgaggtagcttgcagcatcttttctagttgaaatggtgaactgataggaaaacaaatgagtagaaagagttcatgaagaggccctcctctgcctttcaaaaggctggtcacctacacatgtttaaggtgtctctgcacatgtctcaagcccatcacaagaaagcaagtacagtgtggatttcaaatggtgtgtaacttcagctccagctggtttttgacagctgttgctgtggtaatatttttgacatgtgatggtgatagtctctggttctccccatccccacaaaggctgttgaaccacagcaccaggaagcctgagaatgaatcctgagggctctagcccaggctttgtcccaggctttctggtgtgtgccctcctggtaacagtgaaattgaagctacttactcatagtggttgtttctctggtcttgagtgactgtgtccacagttcatttttttccggtaggaataactccttttctacatccacgctccatagagtctctccttttcagacatcctgggatgaaagaatttggcttttttttttctttttttttttggacatctgttttcactcttaggcttttaaacaatagttattgcttttatccctctcagattct

SEQ ID NO: 105318 - DNA, 3929 bp, Homo sapiens
  Payload ID: 662
  Gene Symbol: AK5
  Gene Name: adenylate kinase 5
  Uniprot ID: Q9Y6K8
  ENST ID: ENST00000344720
  CDS Start-End: 1027-2637
agtcttccagcagggttctgaaagcagcctgctcccatcgcgcccctcggatgtggacacccagggtgggctgcagaccgcggccgggccgcactctctgggggcgagggccaggtcaggtggctgcactgtcgcccagcagcgagtaaagactcgaaactgagggagccagagccctagtcactctgctggtcgagggtcggaacccctgggggaaagaggaaatgtggacgaaggcagcccttcctggagacagcttggaagagagggatgaagatgcaaaaagcaaaacccaacctatcaagtgccacctccccggtgacaggcccccagccttgctctgcgctttcgctgaatgaactcctgagcacgtttttcccgttgcctaggaagggttgggccgcaggtttcgccagtgctcgacaacccacctggagatagcgggtcggggagggagctgcgaggggggcggactcctgttgctcagtcttcagaccgcagcacagcatcatctgcaccgggacccgggaatggggggacacttggagactgagagagaggaggctcgaggaatgaaccttggtctgttctaagccacaacccctgtctcaggtcgtttggcttcctttccttctctttgtatttgaatttaaaaacattcctgaatctcaagtgcttttgcttgaagtaggggggaggaggagaaaagaatagaagcaagccaggcttcctaagcgagctctgaaaggagaaatccattcactgcaaacctcgttccccatttctgaaaacggatagactgatatcgtaaactaaaggtcatgagggtttttccccccggtttgggggatttgttctgttaaaaggaattttaaagcaccacttgagaaaataattttgcctcagtttccctaaactatctttaaaatgggttgccataattacaggtcttcttttctctcacctctataagccaccgttttcaggtcatctgaagtcaagatttccagccttttgaatggactgatgtgttctaagcccgaagatccagtagaatacttggaaagttgtttacaaaaagtaaaggaactgggtggctgtgacaaggtgaaatgggatacatttgtaagccaggaaaagaagaccttacctccactaaatggaggacagtcacggagatcctttctaagaaatgtaatgcctgaaaactcaaactttccatatcggcggtatgaccggctccctccaatccatcaattctccatagaaagtgacacggatctctctgagactgcagagttgattgaggagtatgaggtttttgatcctaccagacctcgaccaaaaatcattcttgttataggtggtccaggaagtggaaagggtactcagagtttgaaaattgcagaacgatatggattccaatacatttctgtgggagaattattaagaaagaagatccacagtaccagcagcaataggaaatggagtcttattgccaagataattacaactggagaattggccccacaggaaacaacaattacagagataaaacaaaaattgatgcaaatacctgatgaagagggcattgttattgatggatttccaagagatgttgcccaggctctatcttttgaggaccaaatctgtacccccgatttggtggtattcctggcttgtgctaatcagagactcaaagaaagattactgaagcgtgcagaacagcagggccgaccagacgacaatgtaaaagctacccaaaggagactaatgaacttcaagcagaatgctgctccattggttaaatacttccaggaaaaggggctcatcatgacatttgatgccgaccgcgatgaggatgaggtgttctatgacatcagcatggcagttgacaacaagttatttccaaacaaagaggctgcagcaggttcaagtgaccttgatccttcgatgatattggacactggagagatcattgatacaggatctgattatgaagatcagggtgatgaccagttaaatgtatttggagaggacactatgggaggtttcatggaagatttgagaaagtgtaaaattattttcataattggtggtcctggctctggcaaaggcacacagtgtgaaaagctggtggaaaaatatggatttacacatctctcaactggcgagctcctgcgtgaggaactggcatcagaatctgaaagaagcaaattgatcagagacattatggaacgtggagacctggtgccctcaggcatcgttttggagctcctgaaggaggccatggtggccagcctcggggacaccaggggcttcctgattgacggctatcctcgggaggtgaagcaaggggaagagttcggacgcaggattggagacccacagttggtgatctgtatggactgctcggcagacaccatgaccaaccgccttctccaaaggagccggagcagcctgcctgtggacgacaccaccaagaccatcgccaagcgcctagaagcctactaccgagcgtccatccccgtgatcgcctactacgagacaaaaacacagctacacaagataaatgcagagggaacaccagaggacgtttttcttcaactctgcacagctattgactctattttctgaaggcaaaaatgcatgtttgttagaatggaaacagaaaaacattaaaaagttcattccttaacacaatgtttcaagttaaaccttttgtgtcaccgcccccaccaaccaccacctcctaaatcctgacagcactgtttgcttcccagctagacctgtgtgagaggtgtctggaaatcatgcatggtgtatttgggactatatcaacctattctccacacttcagacaactgtctgcactcacggcacacacactttgtatcatgcaggccacactcagagctagtcagtacatgaacagtggtgcggtgccagtctgtgtccgttgtgatcacaggccttgctagaccctgatcatctggttctcctctcattaagcatccctaacccccagtcacaccttcctcttacatactgttccccaatggaggcccctggcataggggacagccctgggcatcttcctttggtgtctggctgttttgtcaactctcatccactggtggctcagagccataaggtgggttgattacacaatgccttgtacatgatatagaggcatcaagcaagtaaaatttgacagaaattttaaaatatgaagatgtatagctttcccaagatgatggtaaaacccaggttagtcatcagtaaccttctctattattattattttttagaaacttggaatactgtcgtcatggctaagagaacaaatctgataaattgtgtaacctagtctcttctctacatggtgatgcatttcagcaattataaattaatataaatgaccaaaagtaacttaaaagcatgagatatttgctatttcattcattgggcacatatcaaattataattttgattttaaatggtcacccatgtatttatttgttgccaagcaagtaaaaaaataccctaacaaacctgatgtgggtgggaggggcatgtcagtaagtggtgtgttcaatgtgtttgtttcatatgggccctttccaggagtttgcaaaccttgtcatacccatatgcaaaactgtgtttccttgcattaaaccagtgaagtttgggttctcttttgtgctatcaatcagttgtaaaatcagagctgcttatatattctactggaataactgcatcttccactcagtcactacaaaaaagcatagtttcagtttgcatgaatttttttttttttcttcaatggctgtgcagataaggatccatttctgggatagaattgtattttttaagtcatttttttttcttgaaatggatatgtacaaataaaataaatggaagac

SEQ ID NO: 105319 - DNA, 3251 bp, Homo sapiens
  Payload ID: 662
  Gene Symbol: AK5
  Gene Name: adenylate kinase 5
  Uniprot ID: Q9Y6K8
  ENST ID: ENST00000354567
  CDS Start-End: 264-1952
gcggcacagctgctcggcgcctgcagctccggctcgggggctggaaccgaagcgggggcggcgggagcgcggagaccacagcccccggggagaggcggagggggtccctggcctgggcggagaggctgagctgagtgcgcgtgagaaagagggctgcaccgctgctcggcgcggactctgccagccccagcttcagccccggctcaggtcgccgcagcccgggagcctccccgcttgcgccccaaggcacgcgcggcacagccatgaacaccaacgatgccaaggagtatctggcccggagggaaatccctcagctttttgagagccttttgaatggactgatgtgttctaagcccgaagatccagtagaatacttggaaagttgtttacaaaaagtaaaggaactgggtggctgtgacaaggtgaaatgggatacatttgtaagccaggaaaagaagaccttacctccactaaatggaggacagtcacggagatcctttctaagaaatgtaatgcctgaaaactcaaactttccatatcggcggtatgaccggctccctccaatccatcaattctccatagaaagtgacacggatctctctgagactgcagagttgattgaggagtatgaggtttttgatcctaccagacctcgaccaaaaatcattcttgttataggtggtccaggaagtggaaagggtactcagagtttgaaaattgcagaacgatatggattccaatacatttctgtgggagaattattaagaaagaagatccacagtaccagcagcaataggaaatggagtcttattgccaagataattacaactggagaattggccccacaggaaacaacaattacagagataaaacaaaaattgatgcaaatacctgatgaagagggcattgttattgatggatttccaagagatgttgcccaggctctatcttttgaggaccaaatctgtacccccgatttggtggtattcctggcttgtgctaatcagagactcaaagaaagattactgaagcgtgcagaacagcagggccgaccagacgacaatgtaaaagctacccaaaggagactaatgaacttcaagcagaatgctgctccattggttaaatacttccaggaaaaggggctcatcatgacatttgatgccgaccgcgatgaggatgaggtgttctatgacatcagcatggcagttgacaacaagttatttccaaacaaagaggctgcagcaggttcaagtgaccttgatccttcgatgatattggacactggagagatcattgatacaggatctgattatgaagatcagggtgatgaccagttaaatgtatttggagaggacactatgggaggtttcatggaagatttgagaaagtgtaaaattattttcataattggtggtcctggctctggcaaaggcacacagtgtgaaaagctggtggaaaaatatggatttacacatctctcaactggcgagctcctgcgtgaggaactggcatcagaatctgaaagaagcaaattgatcagagacattatggaacgtggagacctggtgccctcaggcatcgttttggagctcctgaaggaggccatggtggccagcctcggggacaccaggggcttcctgattgacggctatcctcgggaggtgaagcaaggggaagagttcggacgcaggattggagacccacagttggtgatctgtatggactgctcggcagacaccatgaccaaccgccttctccaaaggagccggagcagcctgcctgtggacgacaccaccaagaccatcgccaagcgcctagaagcctactaccgagcgtccatccccgtgatcgcctactacgagacaaaaacacagctacacaagataaatgcagagggaacaccagaggacgtttttcttcaactctgcacagctattgactctattttctgaaggcaaaaatgcatgtttgttagaatggaaacagaaaaacattaaaaagttcattccttaacacaatgtttcaagttaaaccttttgtgtcaccgcccccaccaaccaccacctcctaaatcctgacagcactgtttgcttcccagctagacctgtgtgagaggtgtctggaaatcatgcatggtgtatttgggactatatcaacctattctccacacttcagacaactgtctgcactcacggcacacacactttgtatcatgcaggccacactcagagctagtcagtacatgaacagtggtgcggtgccagtctgtgtccgttgtgatcacaggccttgctagaccctgatcatctggttctcctctcattaagcatccctaacccccagtcacaccttcctcttacatactgttccccaatggaggcccctggcataggggacagccctgggcatcttcctttggtgtctggctgttttgtcaactctcatccactggtggctcagagccataaggtgggttgattacacaatgccttgtacatgatatagaggcatcaagcaagtaaaatttgacagaaattttaaaatatgaagatgtatagctttcccaagatgatggtaaaacccaggttagtcatcagtaaccttctctattattattattttttagaaacttggaatactgtcgtcatggctaagagaacaaatctgataaattgtgtaacctagtctcttctctacatggtgatgcatttcagcaattataaattaatataaatgaccaaaagtaacttaaaagcatgagatatttgctatttcattcattgggcacatatcaaattataattttgattttaaatggtcacccatgtatttatttgttgccaagcaagtaaaaaaataccctaacaaacctgatgtgggtgggaggggcatgtcagtaagtggtgtgttcaatgtgtttgtttcatatgggccctttccaggagtttgcaaaccttgtcatacccatatgcaaaactgtgtttccttgcattaaaccagtgaagtttgggttctcttttgtgctatcaatcagttgtaaaatcagagctgcttatatattctactggaataactgcatcttccactcagtcactacaaaaaagcatagtttcagtttgcatgaatttttttttttttcttcaatggctgtgcagataaggatccatttctgggatagaattgtattttttaagtcatttttttttcttgaaatggatatgtacaaataaaataaatggaagacaggataa

SEQ ID NO: 105320 - DNA, 556 bp, Homo sapiens
  Payload ID: 662
  Gene Symbol: AK5
  Gene Name: adenylate kinase 5
  ENST ID: ENST00000478255
  CDS Start-End: 262-495
ctccacacctccctgcaagctaaggaagccggctccggccttgggcagcccagaaaggggctcccacagtgcagcggcgggctgaagggctcctcaagcgcggccagagtgggcgccaaggcggaggaggcgctgacatcgagcgggggctgtgagggctgccagcatgctgtcacctctcagtcccactagatcccaagaggcagcagaggcagcttctgaaaaataaaataaattggagacccacagttggtgatctgtatggactgctcggcagacaccatgaccaaccgccttctccaaaggagccggagcagcctgcctgtggacgacaccaccaagaccatcgccaagcgcctagaagcctactaccgagcgtccatccccgtgatcgcctactacgagacaaaaacacagctacacaagataaatgcagagggaacaccagaggacgtttttcttcaactctgcacagctattgactctattttctgaaggcaaaaatgcatgtttgttagaatggaaacagaaaaacattaaaaagttcattccttaa

SEQ ID NO: 105321 - DNA, 653 bp, Homo sapiens
  Payload ID: 662
  Gene Symbol: AK5
  Gene Name: adenylate kinase 5
  ENST ID: ENST00000478407
  CDS Start-End: 124-653
tgttgctcagtcttcagaccgcagcacagcatcatctgcaccgggacccgggaatggggggacacttggagactgagagagaggaggctcgaggaatgaaccttgagccttttgaatggactgatgtgttctaagcccgaagatccagtagaatacttggaaagttgtttacaaaaagtaaaggaactgggtggctgtgacaaggtgaaatgggatacatttgtaagccaggaaaagaagaccttacctccactaaatggaggacagtcacggagatcctttctaagaaatgtaatgcctgaaaactcaaactttccatatcggcggtatgaccggctccctccaatccatcaattctccatagaaagtgacacggatctctctgagactgcagagttgattgaggagtatgaggtttttgatcctaccagacctcgaccaaaaatcattcttgttataggtggtccaggaagtggaaagggtactcagagtttgaaaattgcagaacgatatggattccaatacatttctgtgggagaattattaagaaagaagatccacagtaccagcagcaataggaaatggagtcttattgccaagataattacaactggagaattggccccacaggaaacaacaattacagagataaa

SEQ ID NO: 105322 - DNA, 381 bp, Homo sapiens
  Payload ID: 662
  Gene Symbol: AK5
  Gene Name: adenylate kinase 5
  ENST ID: ENST00000527263
  CDS Start-End: 1-188
caggatctgattatgaagatcagggtgatgaccagttaaatgtatttggagaggacactatgggaggtttcatggaagatttgagaaagtgtaaaattattttcataattggtggtcctggctctggcaaaggagccggagcagcctgcctgtggacgacaccaccaagaccatcgccaagcgcctagaagcctactaccgagcgtccatccccgtgatcgcctactacgagacaaaaacacagctacacaagataaatgcagagggaacaccagaggacgtttttcttcaactctgcacagctattgactctattttctgaaggcaaaaatgcatgtttgttagaatggaaacagaaaaacattaaaaagttcattcctt

SEQ ID NO: 105323 - DNA, 1183 bp, Homo sapiens
  Payload ID: 663
  Gene Symbol: AK6
  Gene Name: adenylate kinase 6
  Uniprot ID: Q9Y3D8
  ENST ID: ENST00000380818
  CDS Start-End: 339-848
cccaggaaagcttgaaggcagagatagactcacgtctctaagacatatacataatatagccgcaaccgcggcggccttactttcccggagctgcatccccttttaggcgaagagcggaggcgaccagggactaccctaggtgaaagggcagccacctggccctacccgggctcaacgccgagcctctcggaggtacggcctcccggggaccttccagactggtcggcgcaagcgaagggcggggaccaccgaaggagtgtgtgacttaggcatccagcgcactgcctgacccgaagtaccgacccgagttatgcccaccctccaactttgcgacggaaatgtgtcatcgaaagccaggtacaccaggggttggaaaaaccacactaggcaaagaacttgcgtcaaaatcaggactgaaatacattaatgtgggtgatttagctcgagaagagcaattgtatgatggctatgatgaagagtatgactgtcccattttagatgaagacagagtagttgatgagttagataaccaaatgagagaaggtggagttattgttgattaccatggttgtgatttcttccctgaacgctggtttcatatagtttttgtgctgagaacagataccaatgtattgtacgaaagacttgaaacaaggggttataatgagaagaaactaacagacaatattcagtgtgagatttttcaagttctttatgaagaagccacagcatcctacaaggaagaaatcgtgcatcagctgcccagtaataaaccagaagagctagaaaataatgtagatcagatcttgaaatggattgagcagtggatcaaagatcataactcttgacttataaggctagctacttaataatcactcttgttgatatctctgccgacatcatagaaattgttcaagtgtcagtaacactttattaaaatcatgttgcagaaccagcaggtggatagtatataggtttatgcctgtgtttctttttctccatgagaaagctaaacatgaaatataatgaatatagtattattaaggattgagacaaaaactgtgattttaatacttaaattgctaaagaataaataaatctgacaaaatgggtggatatcttttaagtttattacagaaaaaaatgcagatgatctcttaaaataaaactaaagataaagcaa

SEQ ID NO: 105324 - DNA, 1648 bp, Homo sapiens
  Payload ID: 663
  Gene Symbol: AK6
  Gene Name: adenylate kinase 6
  Uniprot ID: Q9Y3D8
  ENST ID: ENST00000380822
  CDS Start-End: 53-571
gtagagcaaagggcacgtgagcgaggcgcccgaagccgtcgcggcggggaccatgttgcttccgaacatcctgctcaccggtacaccaggggttggaaaaaccacactaggcaaagaacttgcgtcaaaatcaggactgaaatacattaatgtgggtgatttagctcgagaagagcaattgtatgatggctatgatgaagagtatgactgtcccattttagatgaagacagagtagttgatgagttagataaccaaatgagagaaggtggagttattgttgattaccatggttgtgatttcttccctgaacgctggtttcatatagtttttgtgctgagaacagataccaatgtattgtacgaaagacttgaaacaaggggttataatgagaagaaactaacagacaatattcagtgtgagatttttcaagttctttatgaagaagccacagcatcctacaaggaagaaatcgtgcatcagctgcccagtaataaaccagaagagctagaaaataatgtagatcagatcttgaaatggattgagcagtggatcaaagatcataactcttgacttataaggctagctacttaataatcactcttgttgatatctctgccgacatcatagaaattgttcaagtgtcagtaacactttattaaaatcatgttgcagaaccagcaggtggatagtatataggtttatgcctgtgtttctttttctccatgagaaagctaaacatgaaatataatgaatatagtattattaaggattgagacaaaaactgtgattttaatacttaaattgctaaagaataaataaatctgacaaaatgggtggatatcttttaagtttattacagaaaaaaatgcagatgatctcttaaaataaaactaaagataaagcaacagagtattccttttttctttctttaaattagaaaaaaagttaagtgttgtactcgatacaaagttcaaaaggtacaaaagagcatgttgaaaagttaggtctcccttccagaccaccctatccccaggcaccccaggttccttccctttaggaaataatgttactggtttcctatatgtctttttagaggttttatgcctgcacagtgtatatgtacatgtgtacattttttaaagaatataacagtatattatgcacactattctgtacctttcttttttcacttactatatttgaagattatatcatctcagtacagacctccctgttcttttttttagttgagatagatatacatatcatacaataaaatttaccattttgaagtgtataatcagaaccgggtatggtggcttatgcctgtaatcccagcaaatggggaggctgaggtggagaatcgcttgaggcaggagttcaagaccagcctgggcaacatagtgagaccttagactctaaaaataaacataaataaaatttataatccgttggtttttagcttattaacaaggttatgtaactgtcaccactgtggaggaagcagtgatgataaagggaactcctataccctttagcagtcactctctattctttcctcctcatccccttgcagtcactagtctactttctgtctctatggatttgcatattctggatatttcatataaatgggattatacagta

SEQ ID NO: 105325 - DNA, 587 bp, Homo sapiens
  Payload ID: 663
  Gene Symbol: AK6
  Gene Name: adenylate kinase 6
  ENST ID: ENST00000512561
  CDS Start-End: 31-456
gaggcgcccgaagccgtcgcggcggggaccatgttgcttccgaacatcctgctcaccgagcaattgtatgatggctatgatgaagagtatgactgtcccattttagatgaagacagagtagttgatgagttagataaccaaatgagagaaggtggagttattgttgattaccatggttgtgatttcttccctgaacgctggtttcatatagtttttgtgctgagaacagataccaatgtattgtacgaaagacttgaaacaaggggttataatgagaagaaactaacagacaatattcagtgtgagatttttcaagttctttatgaagaagccacagcatcctacaaggaagaaatcgtgcatcagctgcccagtaataaaccagaagagctagaaaataatgtagatcagatcttgaaatggattgagcagtggatcaaagatcataactcttgacttataaggctagctacttaataatcactcttgttgatatctctgccgacatcatagaaattgttcaagtgtcagtaacactttattaaaatcatgttgcagaaccagcaggtggatagtatataggttta

SEQ ID NO: 105326 - DNA, 1283 bp, Homo sapiens
  Payload ID: 663
  Gene Symbol: AK6
  Gene Name: adenylate kinase 6
  ENST ID: ENST00000617893
  CDS Start-End: 291-1085
gcggctgggccgccggggcaggctaggggcgccgcggtgggcttcggggcctttggggccgtgggcttttgctgccgcccgccccttccggctcctccctgtagagcaaagggcacgtgagcgaggcgcccgaagccgtcgcggcggggaccatgttgcttccgaacatcctgctcaccggtacaccaggggttggaaaaaccacactaggcaaagaacttgcgtcaaaatcaggactgaaatacattaatgtgggtgatttagctcgagaagtctgatcatcggatatcatggagtctggcaagacggcttctcccaagagcatgccgaaagatgcacagatgatggcacaaatcctgaaggatatggggattacagaatatgagccaagagttataaatcagatgttggagtttgccttccgatatgtgaccacaattctagatgatgcaaaaatttattcaagccatgctaagaaagctactgttgatgcagatgatgtgcgattggcaatccagtgccgcgctgatcagtcttttacctctcctcccccaagagattttttattagatattgcaaggcaaagaaatcaaacccctttgccattgatcaagccatattcaggtcctaggttgccacctgatagatactgcttaacagctccaaactataggctgaaatctttacagaaaaaggcatcaacttctgcgggaagaataacagtcccgcggttaagtgttggttcagttactagcagaccaagtactcccacactaggcacaccaaccccacagaccatgtctgtttcaactaaagtagggactcccatgtccctcacaggtcaaaggtttacagtacagatgcctacttctcagtctccagctgtaaaagcttcaattcctgcaacctcagcagttcagaatgttctgattaatccatcattaatcgggtccaaaaacattcttattaccactaatatgatgtcatcacaaaatactgccaatgaatcatcaaatgcattgaaaagaaaacgtgaagatgatgatgatgacgatgatgatgatgatgactatgataatctgtaatctagccttgctgaatgtaacatgtatacttggtcttgaattcattgtactgatattaaacatgcatgctggatgttttcaagttgtgttttagaaaactaataataatgagtaaacacagttaccatacttttcaattgaaatgaaggtttttcatcagccttaaaagtgtaagaaaaataaagttgtcattcattc

SEQ ID NO: 105327 - DNA, 1331 bp, Homo sapiens
  Payload ID: 663
  Gene Symbol: AK6
  Gene Name: adenylate kinase 6
  ENST ID: ENST00000616867
  CDS Start-End: 337-1131
gtgccactgcactccagcctgggcgacaagagtgaaactctgtctcaaaaaaaaaattttacatatgattgctaattaggaaatttttcatttcagtcgtcaagaacttttaagggcagaggccaggtgagactctgtctcaaaaataaaaggaaaggcagaaggtggaccgcagtgtgataagtagtatttcacaaacagtatttttctgtggcttgtcttacaggtacaccaggggttggaaaaaccacactaggcaaagaacttgcgtcaaaatcaggactgaaatacattaatgtgggtgatttagctcgagaagtctgatcatcggatatcatggagtctggcaagacggcttctcccaagagcatgccgaaagatgcacagatgatggcacaaatcctgaaggatatggggattacagaatatgagccaagagttataaatcagatgttggagtttgccttccgatatgtgaccacaattctagatgatgcaaaaatttattcaagccatgctaagaaagctactgttgatgcagatgatgtgcgattggcaatccagtgccgcgctgatcagtcttttacctctcctcccccaagagattttttattagatattgcaaggcaaagaaatcaaacccctttgccattgatcaagccatattcaggtcctaggttgccacctgatagatactgcttaacagctccaaactataggctgaaatctttacagaaaaaggcatcaacttctgcgggaagaataacagtcccgcggttaagtgttggttcagttactagcagaccaagtactcccacactaggcacaccaaccccacagaccatgtctgtttcaactaaagtagggactcccatgtccctcacaggtcaaaggtttacagtacagatgcctacttctcagtctccagctgtaaaagcttcaattcctgcaacctcagcagttcagaatgttctgattaatccatcattaatcgggtccaaaaacattcttattaccactaatatgatgtcatcacaaaatactgccaatgaatcatcaaatgcattgaaaagaaaacgtgaagatgatgatgatgacgatgatgatgatgatgactatgataatctgtaatctagccttgctgaatgtaacatgtatacttggtcttgaattcattgtactgatattaaacatgcatgctggatgttttcaagttgtgttttagaaaactaataataatgagtaaacacagttaccatacttttcaattgaaatgaaggtttttcatcagccttaaaagtgtaagaaaaataaagttgtcattcattcga

SEQ ID NO: 105328 - DNA, 754 bp, Homo sapiens
  Payload ID: 663
  Gene Symbol: AK6
  Gene Name: adenylate kinase 6
  ENST ID: ENST00000622801
  CDS Start-End: 449-754
atttcgtttgtaaaatgggttgttgattctttggcagggttggccttgggatttttagcgaaataacgtaaggccatatctgcttcccggtagagtcattaatggtggatgcctcactccttaggcctccgtgggccgtattttattttttctttgcttctgataaacgcctcagattagatttcggtaaacgagttcagatgtttgtgacgtgacgaaattgctgtatgcttttgttgagttacatcaaaggatccccccgccccttaaaaggaaggcatatagagcatttcgggtcgtttctcgcgtaggagtgggtctttgaagccatactcagggtacaccaggggttggaaaaaccacactaggcaaagaacttgcgtcaaaatcaggactgaaatacattaatgtgggtgatttagctcgagaagtctgatcatcggatatcatggagtctggcaagacggcttctcccaagagcatgccgaaagatgcacagatgatggcacaaatcctgaaggatatggggattacagaatatgagccaagagttataaatcagatgttggagtttgccttccgatatgtgaccacaattctagatgatgcaaaaatttattcaagccatgctaagaaagctactgttgatgcagatgatgtgcgattggcaatccagtgccgcgctgatcagtcttttacctctcctcccccaagagattttttattagatattgcaaggcaaagaaatcaaacc

SEQ ID NO: 105329 - DNA, 1461 bp, Homo sapiens
  Payload ID: 663
  Gene Symbol: AK6
  Gene Name: adenylate kinase 6
  ENST ID: ENST00000615404
  CDS Start-End: 468-1262
cccaggaaagcttgaaggcagagatagactcgcgtctctaagacatatacataatatagccgcaaccgcggcggccttactttcccggagctgcatccccttttgggcgaagagcggaggcgaccagggactaccctaggtgaaagggcagccacctggccctacccgggctcaacgccgagcctctcggaggtacggcctcccggggaccttccagactggtcggcgcaagcgaagggcggggaccaccgaaggagtgtgtgacttaggcatccagcgcactgcctgacccgaagtaccgacccgagttatgcccaccctccaactttgcgacggaaatgtgtcatcgaaagccaggtacaccaggggttggaaaaaccacactaggcaaagaacttgcgtcaaaatcaggactgaaatacattaatgtgggtgatttagctcgagaagtctgatcatcggatatcatggagtctggcaagacggcttctcccaagagcatgccgaaagatgcacagatgatggcacaaatcctgaaggatatggggattacagaatatgagccaagagttataaatcagatgttggagtttgccttccgatatgtgaccacaattctagatgatgcaaaaatttattcaagccatgctaagaaagctactgttgatgcagatgatgtgcgattggcaatccagtgccgcgctgatcagtcttttacctctcctcccccaagagattttttattagatattgcaaggcaaagaaatcaaacccctttgccattgatcaagccatattcaggtcctaggttgccacctgatagatactgcttaacagctccaaactataggctgaaatctttacagaaaaaggcatcaacttctgcgggaagaataacagtcccgcggttaagtgttggttcagttactagcagaccaagtactcccacactaggcacaccaaccccacagaccatgtctgtttcaactaaagtagggactcccatgtccctcacaggtcaaaggtttacagtacagatgcctacttctcagtctccagctgtaaaagcttcaattcctgcaacctcagcagttcagaatgttctgattaatccatcattaatcgggtccaaaaacattcttattaccactaatatgatgtcatcacaaaatactgccaatgaatcatcaaatgcattgaaaagaaaacgtgaagatgatgatgatgacgatgatgatgatgatgactatgataatctgtaatctagccttgctgaatgtaacatgtatacttggtcttgaattcattgtactgatattaaacatgcatgctggatgttttcaagttgtgttttagaaaactaataataatgagtaaacacagttaccatacttttcaattgaaatgaaggtttttcatcagccttaaaagtgtaagaaaaataaagttgtcattcattcg

SEQ ID NO: 105330 - DNA, 483 bp, Homo sapiens
  Payload ID: 663
  Gene Symbol: AK6
  Gene Name: adenylate kinase 6
  ENST ID: ENST00000618980
  CDS Start-End: 1-330
atgttgcttccgaacatcctgctcaccggtacaccaggggttggaaaaaccacactaggcaaagaacttgcgtcaaaatcaggactgaaatacattaatgtgggtgatttagctcgagaagagcaattgtatgatggctatgatgaagagtatgactgtcccattttagatgaagacagagtagttgatgagttagataaccaaatgagagaaggtggagttattgttgattaccatggttgtgatttcttccctgaacgctggtttcatatagtttttgtgctgagaacagataccaatgtattgtacgaaagacttgaaacaaggtaagaaaggaaaaacattagattcttaaagcataatgttaacttttattcagatttctgaaattggccatgataaaagattgttgttgtttgttttgttttgttttgttttgtttttttgagatagagtctcgctgtcacccaggctggagggcag

SEQ ID NO: 105331 - DNA, 582 bp, Homo sapiens
  Payload ID: 663
  Gene Symbol: AK6
  Gene Name: adenylate kinase 6
  ENST ID: ENST00000620800
  CDS Start-End: 202-582
acatcctgctcaccggtcagggcgcgcggccgggagggactgggctggggcaggctgggggcgcagagtgctctgggcatcgggcgcccaggtacaccaggggttggaaaaaccacactaggcaaagaacttgcgtcaaaatcaggactgaaatacattaatgtgggtgatttagctcgagaagtctgatcatcggatatcatggagtctggcaagacggcttctcccaagagcatgccgaaagatgcacagatgatggcacaaatcctgaaggatatggggattacagaatatgagccaagagttataaatcagatgttggagtttgccttccgatatgtgaccacaattctagatgatgcaaaaatttattcaagccatgctaagaaagctactgttgatgcagatgatgtgcgattggcaatccagtgccgcgctgatcagtcttttacctctcctcccccaagagattttttattagatattgcaaggcaaagaaatcaaacccctttgccattgatcaagccatattcaggtcctaggttgccacctgatagatactgcttaacagctccaaactat

SEQ ID NO: 105332 - DNA, 966 bp, Homo sapiens
  Payload ID: 663
  Gene Symbol: AK6
  Gene Name: adenylate kinase 6
  ENST ID: ENST00000622236
  CDS Start-End: 374-966
atgttgcttccgaacatcctgctcaccggtcagggcgcgcggccgggagggactgggctggggcaggctgggggcgcagagtgctctgggcatcgggcgcccaggtgggggcccctcactgccctcttcagaggccggccgagggccacgaggcggttgtcagcgccccgggagccgaccctcgcgggcgttgcgggaggcgagggaggggacgcggaacgttaattccgttggcctgaggctccgggggggggcgggggggggtacaccaggggttggaaaaaccacactaggcaaagaacttgcgtcaaaatcaggactgaaatacattaatgtgggtgatttagctcgagaagtctgatcatcggatatcatggagtctggcaagacggcttctcccaagagcatgccgaaagatgcacagatgatggcacaaatcctgaaggatatggggattacagaatatgagccaagagttataaatcagatgttggagtttgccttccgatatgtgaccacaattctagatgatgcaaaaatttattcaagccatgctaagaaagctactgttgatgcagatgatgtgcgattggcaatccagtgccgcgctgatcagtcttttacctctcctcccccaagagattttttattagatattgcaaggcaaagaaatcaaacccctttgccattgatcaagccatattcaggtcctaggttgccacctgatagatactgcttaacagctccaaactataggctgaaatctttacagaaaaaggcatcaacttctgcgggaagaataacagtcccgcggttaagtgttggttcagttactagcagaccaagtactcccacactaggcacaccaaccccacagaccatgtctgtttcaactaaagtagggactcccatgtccctcacaggtcaaaggtttacagtacagatgcctacttctcagtctccagc

SEQ ID NO: 105333 - DNA, 743 bp, Homo sapiens
  Payload ID: 663
  Gene Symbol: AK6
  Gene Name: adenylate kinase 6
  ENST ID: ENST00000502819
  CDS Start-End: 14-157
cgcggcggggaccatgttgcttccgaacatcctgctcaccggtacaccaggggttggaaaaaccacactaggcaaagaacttgcgtcaaaatcaggactgaaatacattaatgtgggtgatttagctcgagaaggggttataatgagaagaaactaacagacaatattcagtgtgagatttttcaagttctttatgaagaagccacagcatcctacaaggaagaaatcgtgcatcagctgcccagtaataaaccagaagagctagaaaataatgtagatcagatcttgaaatggattgagcagtggatcaaagatcataactcttgacttataaggctagctacttaataatcactcttgttgatatctctgccgacatcatagaaattgttcaagtgtcagtaacactttattaaaatcatgttgcagaaccagcaggtggatagtatataggtttatgcctgtgtttctttttctccatgagaaagctaaacatgaaatataatgaatatagtattattaaggattgagacaaaaactgtgattttaatacttaaattgctaaagaataaataaatctgacaaaatgggtggatatcttttaagtttattacagaaaaaaatgcagatgatctcttaaaataaaactaaagataaagcaacagagtattccttttttctttctttaaattagaaaaaaagttaagtgttgtactcgatacaaagttcaaaaggtacaaaag

SEQ ID NO: 105334 - DNA, 588 bp, Homo sapiens
  Payload ID: 663
  Gene Symbol: AK6
  Gene Name: adenylate kinase 6
  ENST ID: ENST00000616112
  CDS Start-End: 182-588
tacacgcgcgagccaccacacgtggccatgaacagtttttaaatctttataagttaaagcaaataggccaggtacaccaggggttggaaaaaccacactaggcaaagaacttgcgtcaaaatcaggactgaaatacattaatgtgggtgatttagctcgagaagtctgatcatcggatatcatggagtctggcaagacggcttctcccaagagcatgccgaaagatgcacagatgatggcacaaatcctgaaggatatggggattacagaatatgagccaagagttataaatcagatgttggagtttgccttccgatatgtgaccacaattctagatgatgcaaaaatttattcaagccatgctaagaaagctactgttgatgcagatgatgtgcgattggcaatccagtgccgcgctgatcagtcttttacctctcctcccccaagagattttttattagatattgcaaggcaaagaaatcaaacccctttgccattgatcaagccatattcaggtcctaggttgccacctgatagatactgcttaacagctccaaactataggctgaaatctttacagaaaaaggc

SEQ ID NO: 105335 - DNA, 761 bp, Homo sapiens
  Payload ID: 663
  Gene Symbol: AK6
  Gene Name: adenylate kinase 6
  ENST ID: ENST00000617775
  CDS Start-End: 263-761
ccgaccctcgcgggcgttgcgggaggcgagggaggggacgcggaacgttaattccgttggcctgaggctccgggggggggcgggggggggtggagagaggtcggcagatccagctctccagcttggcaacctgcttagtctttctgaatctggtacaccaggggttggaaaaaccacactaggcaaagaacttgcgtcaaaatcaggactgaaatacattaatgtgggtgatttagctcgagaagtctgatcatcggatatcatggagtctggcaagacggcttctcccaagagcatgccgaaagatgcacagatgatggcacaaatcctgaaggatatggggattacagaatatgagccaagagttataaatcagatgttggagtttgccttccgatatgtgaccacaattctagatgatgcaaaaatttattcaagccatgctaagaaagctactgttgatgcagatgatgtgcgattggcaatccagtgccgcgctgatcagtcttttacctctcctcccccaagagattttttattagatattgcaaggcaaagaaatcaaacccctttgccattgatcaagccatattcaggtcctaggttgccacctgatagatactgcttaacagctccaaactataggctgaaatctttacagaaaaaggcatcaacttctgcgggaagaataacagtcccgcggttaagtgttggttcagttactagcagaccaagtactcccacactaggcacaccaaccc

SEQ ID NO: 105336 - DNA, 3300 bp, Homo sapiens
  Payload ID: 664
  Gene Symbol: AK7
  Gene Name: adenylate kinase 7
  Uniprot ID: Q96M32
  ENST ID: ENST00000267584
  CDS Start-End: 45-2216
aagcgagtggcgctttcaccttagcaaccagcgcggctcccaccatggctgaagaagaggaaactgctgctctcacggagaaggttatccggacccagagggtgtttataaacctgttggattcctacagcagcggaaacatcgggaagtttctatctaactgtgtagttggggcttcgcttgaagaaattacagaggaagaggaagaggaagatgaaaataagtcagctatgctggaagcttcctcaaccaaagtgaaggaaggcacattccagattgtgggcacgctgtccaagcctgacagcccgcggcctgactttgcggtggagacgtactctgccatctctcgagaagaccttctcatgcgcctgctggagtgtgatgttattatttataacatcactgagagctcacagcaaatggaggaagccatctgggcagtctctgcactcagtgaagaagtcagccactttgaaaagcgaaagctatttattttactgtcgacggtgatgacttgggcgcgctccaaagccctggaccccgaggattctgaggttccattcactgaagaagattatcgaagaagaaagtctcatcctaattttctggaccacataaatgctgaaaaaatggttctcaaatttggaaaaaaggccagaaaatttgcagcatacgtagttgctgctggactccagtatggagcggaaggaggcatgttacacacattttttaagatggcttggttgggcgagattcctgcattaccagtttttggcgatggaacaaatgtaattccaacaatccatgttcttgatctagcaggagtgatacaaaacgtcatagatcacgtgccaaagcctcactacctggttgctgtggatgagtctgttcataccctggaagacatagtcaagtgtatcagtaaaaatactggccctgggaaaatccagaaaatacccagagaaaatgcatacctaaccaaggacttaacgcaagattgtcttgaccatttactggtcaacttaagaatggaagcgctctttgtgaaggagaattttaatattcgatgggctgcccaaacaggatttgtggaaaatatcaacactatcctcaaggagtacaagcaaagcagaggattgatgccaatcaagatctgcattcttggtccccctgctgtgggaaaatccagtattgctaaagaattggccaactactacaaactgcatcacatccaactgaaggatgtcatttctgaagccatagcaaaactggaggcgattgttgcccctaacgatgtaggggaaggagaagaagaagtcgaagaggaagaggaggaggagaatgtggaagatgcacaggagctcctagatggcatcaaggagagcatggagcagaatgcaggtcaactagacgatcaatatataattagatttatgaaagaaaagctaaaatcaatgccttgcaggaatcaaggttatattttggatggattcccaaagacctatgatcaagcaaaagacctgttcaatcaggaagatgaggaggaggaagatgatgtcagaggcagaatgtttccctttgataaattaattatacctgaattcgtttgtgcactggatgcttcggatgagtttctgaaggagcgtgtgataaaccttcctgagagcatcgtggcggggacccactacagccaagaccgattcctccgggctctgagcaactaccgggacatcaatatcgacgatgagactgtcttcaactattttgatgaacttgaaattcacccgatacatattgatgtaggaaaacttgaagatgctcagaatagacttgctatcaaacagctcatcaaagagattggggagcctcgaaattatggtttaacagacgaagaaaaggcagaagaggagcggaaggctgcggaggagcggctggccagggaggctgctgaggaagcagaacgcgagcaccaggaggccgtggagatggcagagaagatagctcgctgggaggagtggaataaacgactggaggaagtgaaaagagaagaaagagaattactggaggctcagtcaattcccctgagaaactatttaatgacctatgtgatgccaactcttattcagggcctgaatgaatgttgcaacgtccgacccgaagaccctgttgattttctggcagaatatctcttcaagaacaatcctgaagcacagtgaaacttgaaagatctggtattatctacctttacagaaccacagatcacttattatactttgaaaaattgctttgaaaaatgcttttccagttcttagaaaattctttttttgtagacaaatattctataaactagaatctctattaaaagctatatgacatgactatgtcattaaaactatatttgaaatgtaaattgataaagacatttgtgcatagctcatgagacaaatactgatttaatattttattctttagtcagatctaaatataccgcttctgtacactaatgtttataggtatttatagcatgaagaaaatcagactatatattgtagactatgtattattctaacatgtaggctaatttacatgacttgttatcgccccaataacaatgttattagaaatggaaataaattgaagtgatttatgcctgttgactcacagtaaatcagacaagattggtgcctgtaaggtggctttttttttttttttttttaaatgaagcaatggttagggaaaggttgctttgagttcagggtcaggatcccagacaatgaatcggagagaactgtaaacctttaggcggagaaatctgcataacaggataattccaatctttgtgataagtgagaagttgctaaatattttcaacacactttataacataggcataagttatcaatcctatagtcttttccagttctaaaaatcccataagattcctagaattaccctaaatgagaaattagtttaggtttaatggcatatgtattttatctctttaaataatgtaacctaatataactgcccgactttttatttgtgctaaaatacatgtaacataaaattgaccactgtaaccattttaaagtgtataattcagtggcactaagttcattcacaatgatctgcagccaccactatctagtccagaactttctcatcaccccaaatggaaacccagcacctattaggcagtcacgctccattattccctccccccagttccaggcaaccacgaatctgctttctgtctctatggatttacctattataaataaaaccatataatgggtggtc

SEQ ID NO: 105337 - DNA, 715 bp, Homo sapiens
  Payload ID: 664
  Gene Symbol: AK7
  Gene Name: adenylate kinase 7
  ENST ID: ENST00000554706
  CDS Start-End: 1-457
tctcctggtatttaaagatgtaggaaaacttgaagatgctcagaatagacttgctatcaaacagctcatcaaagagattggggagcctcgaaattatggtttaacagacgaagaaaaggcagaagaggagcggaaggctgcggaggagcggctggccagggaggctgctgaggaagcagaacgcgagcaccaggaggccgtggagatggcagagaagatagctcgctgggaggagtggaataaacgactggaggaagtgaaaagagaagaaagagaattactggaggctcagtcaattcccctgagaaactatttaatgacctatgtgatgccaactcttattcagggcctgaatgaatgttgcaacgtccgacccgaagaccctgttgattttctggttggaatgcaatggcacaatctcggcttactgcaacctccacctcccgggttcaagtgattctcctgccttagcctcccaagtagctgggattacaggcgcctgccaccacactcagctaatgttttgtattttagtagagaggaagtttcaccatgttgaccaggctggtctcgaactcctgacctcaagtgatccacccgcctcagcctcccaaagtgctgggattacaggcatgagccaccaagcttggcccaggatgatttttaaattgtaaacattactaatacaaatacatgactaataataacttgtaaa

SEQ ID NO: 105338 - DNA, 1345 bp, Homo sapiens
  Payload ID: 664
  Gene Symbol: AK7
  Gene Name: adenylate kinase 7
  ENST ID: ENST00000555570
  CDS Start-End: 23-346
agcaaccagcgcggctcccaccatggctgaagaagaggaaactgctgctctcacggagaaggttatccggacccagagggtgtttataaacctgttggattcctacagcagcggaaacatcgggaagtttctatctaactgtgtagttggggcttcgcttgaagaaattacagaggaagaggaagaggaagatgaaaataagtcagctatgctggaagcttcctcaaccaaagtgaaggaaggcacattccagattgtgggcacgctgtccaagcctgacagcccgcggcctgactttgcggtggagacgtactctgtaagtcccggaggctctggccaggagtagacagagggaagagtcaccttccgctccaacgccttgacaacttgttttactgtttgcctcccctcccctctcttccacagacatggccaggttgagggaatggctttctcctgtaatggagatttacctcacagaccccacttttaattttcggccaaagcaaagagtttaaattagatagtgttggaaaggatggatctaagttggactttcagactcatacagttctcctcttcagcatattctgccttgcattatccaagacgagtctgtgccatgatgggtgccatctgtgaaggagaaataggccaggcgcggtggcttacgcctgtaatcccagcactttgggaggctgaggagggaggatcgcttaaggccaggggttcgagaccagcctgggcaacatagcaagatcctgtctcttatatttatgaaaataattttttaagagaaacatcctttggtaatgcaccactcaggaataatataccactgctgtctccagaaacaatgctgtctccacgtgacaaattcaacacagtcctagtcctgagacatttaaatgtctgagaagaagtggccctcttcttctcctgggccaactcctcccttaccctgcctgctactctctggagcctaccatacagctttccacatgctgtaccctggagtggccttctctctttttttttttattcatccttcaagagttgtgtctcttcctccaggaagccgttcatgattcctacttctccctcactcccagtttggattctgagctcttttctgagctcccatatcatcctttgcctgcctagatcatagtgcttttcacactcgttgttatcacctgtctatcgtgggggtccatggacactgactgtcagctccttgagggtggagaccgtgacttgtttatccctgtgtttatccatgtatctgtggcacctaacacagccactgccacaaagtggcctcaataaacacttgtggaatgga

SEQ ID NO: 105339 - DNA, 2072 bp, Homo sapiens
  Payload ID: 665
  Gene Symbol: AK8
  Gene Name: adenylate kinase 8
  Uniprot ID: Q96MA6
  ENST ID: ENST00000298545
  CDS Start-End: 523-1962
cggggctcgactctaggagttgggctgaggatttccacccgatcctcgaacctccggcccatctcatggacgcccctcccccttcaaacaccctcccccacatttattcccgcgtctgttttaaagatgggtaaactgaggcacagggagccgggccggggagcactgacagaaccagaagcaggttctgcctcccgtcccctcggagggccgacttgccccttctgggtttcgtcgggggtctcagatacgaggaggcccagctggaagccacctgagggtgtcccccgctaagatgcgcaaatgggaaaagcgaggccggggttggggaaagaacttgcccgagccgcagagcgcgtcagccggggaggtcggggcgggggcgacccgcgcgaccgaggatcgggtatctgggcccggcgcggagcctgcagggcggggccgcggcgcgtgctgatgacgcagtcggcgcggcggccctagcgacgcggttactagggagcggcgagccgagacggctacatggacgccactatcgccccgcaccgtatcccccccgagatgccccagtacggggaggagaaccacatcttcgagttgatgcagaacatgctggagcaactcctgatccaccagcccgaagatcccatccccttcatgatccagcacttgcatagagacaacgacaatgtgcccaggattgtaatattaggtccacccgcctcagggaaaacaacaatagcaatgtggctctgcaaacatctgaacagcagtctcctcaccctggagaacctgatcttaaatgagttttcctatacggccaccgaagccagaaggctttatctgcaaaggaagacagttcccagcgcgctgctcgtccagctgattcaggaacgcctggctgaagaggattgcatcaagcagggctggattctggatggcatccctgagacgcgtgagcaggctctgaggatccagaccctggggatcacacccagacacgtcattgtgctgagtgctccagacacggtcctgatcgagagaaacttggggaagagaatcgaccctcaaactggagagatttatcacaccacctttgactggccacccgaatctgaaatccagaaccgtctcatggtgccagaggacatctcagagctggagacggctcagaaactgctggagtatcataggaacatcgtcagggtcattccctcctaccccaaaatcctcaaagtcatcagtgctgaccagccatgtgtggacgtcttctaccaggctctgacctatgtccaaagcaaccatcgtactaatgccccgttcaccccgagggtgctgctgctcgggcctgtgggcagtgggaaaagtctgcaggccgccctcctggcccagaaatacaggcttgtcaatgtctgctgtgggcaactgctgaaagaggctgtggcagataggaccacgtttggcgagctcatccagcccttctttgaaaaggagatggcagttcctgacagcctcctcatgaaggtgctgagccagcgcctggaccagcaggactgcatccagaaaggctgggtgctacacggcgtcccgcgggacctcgaccaggcacacctgctgaaccgcctgggctacaatcccaacagggtgtttttcctgaatgtgccatttgattccatcatggagcggctgactctgagaagaattgatccagtcactggggaaaggtaccacctcatgtacaagccacctcccaccatggagatccaggctcgcctcctgcagaacccaaaggatgctgaagagcaggtcaagctgaaaatggacctgttctacaggaactcagctgacttggagcagttgtatgggtcggccatcaccctcaatggggaccaggacccatacacagtcttcgaatacatcgagagtgggatcattaatcccctgcccaagaaaatcccctgatgggttcagagccaggagcgctgccccagggaaagagttaatcccctgcccccagccccccagcctcggcacagctcccctaaaaagccaataaagcctgctggatacag

SEQ ID NO: 105340 - DNA, 2566 bp, Homo sapiens
  Payload ID: 666
  Gene Symbol: AK9
  Gene Name: adenylate kinase 9
  Uniprot ID: Q5TCS8
  ENST ID: ENST00000285397
  CDS Start-End: 83-1348
atagagaggtcgggtagaggctcccgggacctgcgtgctgccgagagaggaagcgaagggcaccatctttgtattttgtgtcatgacttctcaagagaagacagaagagtatccttttgcagatatatttgatgaagatgaaactgaaaggaattttttgttgtccaaacctgtttgctttgttgtatttgggaaaccaggtgttgggaaaacaacattagcccgttacataacacaggcatggaaatgtattcgtgttgaagctttgccaattttagaagaacagattgctgctgaaaccgaatcaggagttatgttgcaatcaatgttgatcagcggtcaaagcattccagatgaacttgtcataaagctaatgttggagaagctcaactccccagaagtctgtcactttggttatattatcactgaaataccatcactttcacaggatgccatgactaccttacagcaaatagaattaattaaaaacttaaacctgaaacctgatgttataatcaatataaagtgtcctgactatgatttgtgccagagaatttctgggcaaagacagcacaataatacgggatacatatacagtagagaccagtgggatcctgaagtcattgagaatcataggaaaaagaagaaagaagcccaaaaggacggaaaaggagaagaggaagaagaggaagaagagcaagaagaagaagaggcatttattgccgaaatgcagatggtggctgaaattcttcatcatctagttcagaggcctgaagattatttggaaaatgttgaaaacattgttaagctttataaggaaacaattctccaaactttagaagaagtaatggctgaacacaatccccagtatctcattgagctaaatggaaataaaccagcagaggagctctttatgattgttatggatcgacttaaatatctgaacctaaaaagagcagctattctaaccaaacttcagggtgcagaggaagaaattaatgacacaatggaaaatgatgagctatttcgtactcttgcatcttataaacttattgcaccaagatacagatggcaaagaagtaaatggggacgtacatgtcctgtgaatttaaaagatggtaacatttattcaggattaccagattattctgtgagttttctaggtaaaatctactgtctttcatcagaagaagcattaaaaccatttttgttgaacccacgtccctatctgcttccacctatgccaggaccaccatgtaaagtattcatacttggacctcaatattcagggaaaacaacactttgcaatatgcttgcagaaaattacaaaggaaaggtgactaactaactatctgtctatctatctatctatctatctatctatctatctatctatgtctatctgtcatgtatctatactcgattataatttgtaggattttatttgtactcagtttttaaaatttcatgttttaattgaataattgttccactgggcttggggtagggtaggcattctttttgttgtttattgctgcttccagaccagagtccctccctgcttcccaaaagctcccacatgtgaatatcgtgtcattcagactctgccacctattagctttcttggttctactcatcttctgtcccctgggtttcacttctcctggctcactctcactctccccatataatcactcctgtcctaattcttggtgatttcagtattacaaagatgatcctcccaacaccttgacacctccctcagtaatcttgttctccactctcagtaaatgaaattatttttagcttagacaagagtgatagcagtaaaagtggtatgaaacaagcatatttgggatataatttgaagacaaagctgaaagatttgatgagggattggaatgtggaggaattctagaaggggcaatgtggcttgaggattgcctatgcaagaaggaatggcacaagatcatggctaaagacagagcaattcaggccacagaaaggtgttagaagttgttcaaagtgctgttgcattcttttaagcgccggagtatcattttctatttgcttttaactttttcattgtgaaacatgacaaacatacagaaaagtgaagcccactgagttaccgcaaaatgaacccccatgtaaccaccaaccaggtcaaatctggaatgttgccagcacccagacgccctctcatgtttcttctcaataccagtctcctcactctccacacaaaggtaaccactgcccagaattttatggcattcacttccatacttctcctatggttttgccgtggaagcatacatccaaataccataggctagttttgcatggtttttttgaattttatagacctaaacaatttatcttctttgtgcctggcttctttcacttaacattataattatgatatttgtccagactattgaatgtagctgtagtttattcatttttattgttttattgtattctgttgattgacttataccataatgtatttatccacatttgagcactaataaaacttggattgattccagattggagtaaataa

SEQ ID NO: 105341 - DNA, 2499 bp, Homo sapiens
  Payload ID: 666
  Gene Symbol: AK9
  Gene Name: adenylate kinase 9
  Uniprot ID: Q5TCS8
  ENST ID: ENST00000355283
  CDS Start-End: 248-1258
attctcagtgctgctttattttcctcatgaaaataaagaaacttagaatgtgcacttagagtaatatatgagaaactgatttttaattaattaaaataatataaggactggctttttgtggatagttttcaagttgctacagattaaatattattcaagaagcattttaaaaaattatctgcatcaaaatacttttttagtttaatgttctccaaactttgaataccgtttctagggtgaagataaaatgaaggagagaaagaggcatttgggagacacaaaacacttttgtccggtggtcctcaaagaaaacttcatcctgcaaccaggaaacacagaagaagcagccaagtatcgagaaaagatctactacttttcaagtgctgaggctaaagaaaagtttttggagcatcctgaggattatgtggctcatgaagaaccattgaaggctcctccattaagaatatgccttgtcggcccccagggctctggcaaaactatgtgtggaagacagttggcagaaaaattaaacatttttcacattcagtttgaagaagttcttcaagaaaaactactactcaaaactgaaaagaaagtgggacctgaatttgaggaagattctgagaacgagcaagctgccaaacaagaacttgaagagcttgcaattcaggccaatgtcaaagttgaggaagaaaatacaaaaaagcagcttccagaagtacaacttacagaagaagaagaagtaatcaaatcaagtctaatggaaaatgagcccttgcctcctgaaattcttgaagtaattctttctgagtggtggcttaaggaaccaatacgttccacaggttttatattagatggtttcccacgatatccagaagaggcccagtttttgggagatcgtggatttttcccagatgcagctgtttttatacaagttgatgatcaagatatttttgatcgcctccttcctgcccaaattgaaaagtggaaactaaaacaaaagaagaaattagaaaggaagaaactgatcaaagacatgaaggcaaaaatcagggttgatacgattgctaaaagaagggctgaacttatattagagagagataaaaaaaggagggaggtaagtagttttgttttttttttcaaaacagggtctcactctgttgcccagggcagggtacagtggcacaatcatagctcactgcaacctcgaactcctgggctcaagggatcctcccacctcagcctctcaaagtgctaggattacaggcatgagccatcacacccagcctttgccttctggcttaagacactcttgtaacagcttttcaaggctgaccctcttgtaacctgatttccatctgtataaaaatgtccagccaaacaaggagaagagaaaaagaggaatatcagaaaatacaacttgctacaagtgcaaccacatgtcaccctggtgtgaatatgctggacttccgtacagaggactgctgatattgtacagtgcaactgcaactgcaactgcaggcacaaagcattgcagaagcggggccaaagtaattgttgctttgtcaaaacaaaatattcacaaccaaaagtagataagaaaaaaccattggactgagaaaattatggcaccatgtaagaataagaaccctcctcttaattatttgcctcgattttcattcatttattcattcagtccatcagcaaacattaattgagctttgtgtctgacactgtttcaaatactggcaaatcagccatgagcaaaacttacagaaatcgtagcctcattataatgctcatttctctcatcaaacatgttctgaaagtttgctctgtttaaggtgtcatgctaatgtttaggatcaaaaagatgtcctaacctggaattaagtacagttaactactttaagcccttgggagtccctagtggtccccttctgaatcacttcaaatgtttcagcagtgaaggagtccaggctttgcagttaaacacacctacgcagtatcccttctccagttctcactgactttgttcactgctctccagtgcctggtggagtgctgacacatgtgacattcaacttcagttgtttcgctgaggttgtataacattgagtaagtcacttagcctctgtaaacctagggctttttattgtaaaatgggaaaaattaatacatttagtttccctaattaataataatttaatttccctttgctactcttcagttaaatcttcttttcttaagaattaattttcaggataaactttaaatgttctttataattttttcatttgttaacattagaatggtgtgatttcttctgatttttcattcggaaattcaatattctatgtagaggttaaataggattttgtaagtcagctctcctgagacttcatgtttgtaaaactgtctgtgtatcccacaaaactgatacaaacaaactcgcagcacaactcctgagatgtttgatgaataaaaaattaaaactgt

SEQ ID NO: 105342 - DNA, 2478 bp, Homo sapiens
  Payload ID: 666
  Gene Symbol: AK9
  Gene Name: adenylate kinase 9
  ENST ID: ENST00000368948
  CDS Start-End: 83-2293
atagagaggtcgggtagaggctcccgggacctgcgtgctgccgagagaggaagcgaagggcaccatctttgtattttgtgtcatgacttctcaagagaagacagaagagtatccttttgcagatatatttgatgaagatgaaactgaaaggaattttttgttgtccaaacctgtttgctttgttgtatttgggaaaccaggtgttgggaaaacaacattagcccgttacataacacaggcatggaaatgtattcgtgttgaagctttgccaattttagaagaacagattgctgctgaaaccgaatcaggagttatgttgcaatcaatgttgatcagcggtcaaagcattccagatgaacttgtcataaagctaatgttggagaagctcaactccccagaagtctgtcactttggttatattatcactgaaataccatcactttcacaggatgccatgactaccttacagcaaatagaattaattaaaaacttaaacctgaaacctgatgttataatcaatataaagtgtcctgactatgatttgtgccagagaatttctgggcaaagacagcacaataatacgggatacatatacagtagagaccagtgggatcctgaagtcattgagaatcataggaaaaagaagaaagaagcccaaaaggacggaaaaggagaagaggaagaagaggaagaagagcaagaagaagaagaggcatttattgccgaaatgcagatggtggctgaaattcttcatcatctagttcagaggcctgaagattatttggaaaatgttgaaaacattgttaagctttataaggaaacaattctccaaactttagaagaagtaatggctgaacacaatccccagtatctcattgagctaaatggaaataaaccagcagaggagctctttatgattgttatggatcgacttaaatatctgaacctaaaaagagcagctattctaaccaaacttcagggtgcagaggaagaaattaatgacacaatggaaaatgatgagctatttcgtactcttgcatcttataaacttattgcaccaagatacagatggcaaagaagtaaatggggacgtacatgtcctgtgaatttaaaagatggtaacatttattcaggattaccagattattctgtgagttttctaggtaaaatctactgtctttcatcagaagaagcattaaaaccatttttgttgaacccacgtccctatctgcttccacctatgccaggaccaccatgtaaagtattcatacttggacctcaatattcagggaaaacaacactttgcaatatgcttgcagaaaattacaaaggaaaggtagtcgactatgcccaacttgttcagccacgttttgataaagcccgtgaaacattagtagaaaataccatagctgaggccactgcagcagcaattaaagttgtgaaagaaaagcttctcagggaactgcaagctagaaaacaagctgaaacagctttaagagaatttcaaaggcaatatgaaaaaatggagtttggagtattcccaatggaggcaacacactcatcaattgatgaagaagggtacattcaaggctcccaaagggacagaggcagctctttagtggacaccgaagaagccaaaacaaagtcagaaaatgtcctccatgatcaagctgctaaagttgataaagatgatggaaaagaaactggtgaaacattcacatttaaaaggcattctcaagatgctagtcaagatgtaaagttgtattcagatacagccccaacagaagacttgatagaagaggtaactgcagatcatccagaggttgtgaccatgattgaagagactataaaaatgtcacaggatataaactttgaacagccatatgaaaaacatgctgaaatcttacaggaagtccttggagaggtaatggaagaaaacaaggataggtttcctggtgccccaaaatatggaggctggattgtggacaactgccctattgtaaaagaattgtggatggccttaatcaagaaaggaattatacctgatttggtcatctatttatcagatacagaaaacaatggaaaatgtttatttaatagaatatatttacagaagaaatctgaaattgactctaagattttagaaagattattagaagaactacaaaagaaaaaaaaagaagaagaagaagcaagaaaagccacagaagaggaattgagactcgaagaagaaaatcgaaggctactggaacttatgaaagtgaaggcaaaaggcaagcacagattgctatgactgatgatgtgtcatggtattgttactgcaagcaattgcagtatttcaagtgaattatagactgggtgatcacatttcccaatttgtccatgagagcccaggtttatgcctatattcttgaagtctttatagtaccttttattcttaaagtgttccagtttgtatactaaataatattgttactg

SEQ ID NO: 105343 - DNA, 831 bp, Homo sapiens
  Payload ID: 666
  Gene Symbol: AK9
  Gene Name: adenylate kinase 9
  ENST ID: ENST00000448084
  CDS Start-End: 150-831
agttgcttccctgaggagggtccggctgcggccagggtgttgggaaaacaacattagcccgttacataacacaggcatggaaatgtattcgtgttgaagctttgccaattttagaagaacagattgctgctgaaaccgaatcaggagttatgttgcaatcaatgttgatcagcggtcaaagcattccagatgaacttgtcataaagctaatgttggagaagctcaactccccagaagtctgtcactttggttatattatcactgaaataccatcactttcacaggatgccatgactaccttacagcaaatagaattaattaaaaacttaaacctgaaacctgatgttataatcaatataaagtgtcctgactatgatttgtgccagagaatttctgggcaaagacagcacaataatacgggatacatatacagtagagaccagtgggatcctgaagtcattgagaatcataggaaaaagaagaaagaagcccaaaaggacggaaaaggagaagaggaagaagaggaagaagagcaagaagaagaagaggcatttattgccgaaatgcagatggtggctgaaattcttcatcatctagttcagaggcctgaagattatttggaaaatgttgaaaacattgttaagctttataaggaaacaattctccaaactttagaagaagtaatggctgaacacaatccccagtatctcattgagctaaatggaaataaaccagcagaggagctctttatgattgttatggatcgacttaaatatctgaacctaaaaagagcagctattctaaccaaacttcagggtgcagaggaagaaa

SEQ ID NO: 105344 - DNA, 6326 bp, Homo sapiens
  Payload ID: 666
  Gene Symbol: AK9
  Gene Name: adenylate kinase 9
  Uniprot ID: Q5TCS8
  ENST ID: ENST00000424296
  CDS Start-End: 78-5813
gaggtcgggtagaggctcccgggacctgcgtgctgccgagagaggaagcgaagggcaccatctttgtattttgtgtcatgacttctcaagagaagacagaagagtatccttttgcagatatatttgatgaagatgaaactgaaaggaattttttgttgtccaaacctgtttgctttgttgtatttgggaaaccaggtgttgggaaaacaacattagcccgttacataacacaggcatggaaatgtattcgtgttgaagctttgccaattttagaagaacagattgctgctgaaaccgaatcaggagttatgttgcaatcaatgttgatcagcggtcaaagcattccagatgaacttgtcataaagctaatgttggagaagctcaactccccagaagtctgtcactttggttatattatcactgaaataccatcactttcacaggatgccatgactaccttacagcaaatagaattaattaaaaacttaaacctgaaacctgatgttataatcaatataaagtgtcctgactatgatttgtgccagagaatttctgggcaaagacagcacaataatacgggatacatatacagtagagaccagtgggatcctgaagtcattgagaatcataggaaaaagaagaaagaagcccaaaaggacggaaaaggagaagaggaagaagaggaagaagagcaagaagaagaagaggcatttattgccgaaatgcagatggtggctgaaattcttcatcatctagttcagaggcctgaagattatttggaaaatgttgaaaacattgttaagctttataaggaaacaattctccaaactttagaagaagtaatggctgaacacaatccccagtatctcattgagctaaatggaaataaaccagcagaggagctctttatgattgttatggatcgacttaaatatctgaacctaaaaagagcagctattctaaccaaacttcagggtgcagaggaagaaattaatgacacaatggaaaatgatgagctatttcgtactcttgcatcttataaacttattgcaccaagatacagatggcaaagaagtaaatggggacgtacatgtcctgtgaatttaaaagatggtaacatttattcaggattaccagattattctgtgagttttctaggtaaaatctactgtctttcatcagaagaagcattaaaaccatttttgttgaacccacgtccctatctgcttccacctatgccaggaccaccatgtaaagtattcatacttggacctcaatattcagggaaaacaacactttgcaatatgcttgcagaaaattacaaaggaaaggtagtcgactatgcccaacttgttcagccacgttttgataaagcccgtgaaacattagtagaaaataccatagctgaggccactgcagcagcaattaaagttgtgaaagaaaagcttctcagggaactgcaagctagaaaacaagctgaaacagctttaagagaatttcaaaggcaatatgaaaaaatggagtttggagtattcccaatggaggcaacacactcatcaattgatgaagaagggtacattcaaggctcccaaagggacagaggcagctctttagtggacaccgaagaagccaaaacaaagtcagaaaatgtcctccatgatcaagctgctaaagttgataaagatgatggaaaagaaactggtgaaacattcacatttaaaaggcattctcaagatgctagtcaagatgtaaagttgtattcagatacagccccaacagaagacttgatagaagaggtaactgcagatcatccagaggttgtgaccatgattgaagagactataaaaatgtcacaggatataaactttgaacagccatatgaaaaacatgctgaaatcttacaggaagtccttggagaggtaatggaagaaaacaaggataggtttcctggtgccccaaaatatggaggctggattgtggacaactgccctattgtaaaagaattgtggatggccttaatcaagaaaggaattatacctgatttggtcatctatttatcagatacagaaaacaatggaaaatgtttatttaatagaatatatttacagaagaaatctgaaattgactctaagattttagaaagattattagaagaactacaaaagaaaaaaaaagaagaagaagaagcaagaaaagccacagaagaggaattgagactcgaagaagaaaatcgaaggctactggaacttatgaaagtgaaggcaaaagaagctgaagagactgataatgaggatgaagaggagattgaaggtgatgagttggaagttcacgaagagcctgaggcatctcacgatacccgagggtcatggttacctgaggagtttgaagcatctgaggtccctgaaactgagcctgaagcagtatctgagcctatcgaggaaactacagtggaaacagaaatcccaaaaggatccaaagagggcctggaaattgaaaaattatctgaaacagttgtactacctgagtttccagaagactcttatcctgatgttcccgaaatggagccatttaaagagaagattggttctttcatcatcctctggaaacagctagaagcaacaattagtgaggcttacattaaaattttaaacttggagattgctgacagaactccacaggaattacttcaaaaagtagttgagactatggaaaaaccatttcaatatactgcatgggagttaactggggaagattatgaggaagaaacagaagactaccagactgaagcagaggttgatgaggagctagaggaagaggaagaggaagagggtgaagataaaatgaaggagagaaagaggcatttgggagacacaaaacacttttgtccggtggtcctcaaagaaaacttcatcctgcaaccaggaaacacagaagaagcagccaagtatcgagaaaagatctactacttttcaagtgctgaggctaaagaaaagtttttggagcatcctgaggattatgtggctcatgaagaaccattgaaggctcctccattaagaatatgccttgtcggcccccagggctctggcaaaactatgtgtggaagacagttggcagaaaaattaaacatttttcacattcagtttgaagaagttcttcaagaaaaactactactcaaaactgaaaagaaagtgggacctgaatttgaggaagattctgagaacgagcaagctgccaaacaagaacttgaagagcttgcaattcaggccaatgtcaaagttgaggaagaaaatacaaaaaagcagcttccagaagtacaacttacagaagaagaagaagtaatcaaatcaagtctaatggaaaatgagcccttgcctcctgaaattcttgaagtaattctttctgagtggtggcttaaggaaccaatacgttccacaggttttatattagatggtttcccacgatatccagaagaggcccagtttttgggagatcgtggatttttcccagatgcagctgtttttatacaagttgatgatcaagatatttttgatcgcctccttcctgcccaaattgaaaagtggaaactaaaacaaaagaagaaattagaaaggaagaaactgatcaaagacatgaaggcaaaaatcagggttgatacgattgctaaaagaagggctgaacttatattagagagagataaaaaaaggagggagaatgttgttagagatgatgaagagattagtgaggaagaacttgaagaagacaatgatgatattgaaaacatccttgaagatgagtttccaaaagatgaggaagagatgagtggcgaggaagatgaagaacaggaaactgatgcaattgagcgcctgagaggtgaactaggagaaaaatttgaagcagatacacataatttacaaataatacaggatgaacttgagaggtatttgataccaataatttccattaatggagctcggagaaatcacattgtacaatatacattgaatatgaaactgaaaccactggtggaaaatcgtgcaagcatttttgagaaatgtcatccaataccagcaccccttgcccagaaaatgctcacctttacctacaagtatataagctcattcggctattgggaccctgtaaagctaagtgaaggagagacaatcaagccagttgaaaatgcagagaatccaatttatcctgtaatccatcgtcagtatatttattttttatctagtaaagaaacaaaagaaaaatttatgaagaacccaatcaaatatatccgccaacccaaacctaagcctactgtgcccattaggattataattgtggggcctccaaaatctgggaaaactacagttgccaaaaaaattacaagtgaatatgggttaaagcatttatcaataggaggagctttgcgttatgtactaaacaatcacccggaaacagagctggcacttatgttaaattggcatcttcataaaggaatgacagcacctgatgaactggctattcaagccttagaactttctctgatggaaagtgtgtgcaatactgcaggtgttgtcatcgatggatatcctgtaactaaacatcaaatgaatctcttggaagctaggtcaatcattcccatggtcatctttgaattgagtgtgccttccaaggagattttcaaaagattgctcctagaaaaagaaaatgaacaaagattgccttatccattgcacaatagtgcacaaattgtagctgtcaataatgtaaagtatcgcaaaaatattggtgagattaggcaatattatcaagaacagcatcagaactggtatgtgattgatggatttcacagcaaatggtgggtatggaatgaagtcattaagaatgttcaaatggtgaataaatacatgcagacatacctggaaagaataaaagcaggaaaagctgcctgcattgacaagttatgtatcacacctcaagagctgctttctcgcctgggagaatttgaacagttctgccctgtcagcctggcagaatcccaggaattatttgattgctctgcaactgactccttggaatttgcagcagagttcagggggcactactataaaatgagttctcaggaaaaactgaataaattcttggagaacccagaattgtacgtgcctcccttagcacctcatccactcccatctgctgacatgatccccaaaagactgacactgtcagagctgaagagtcgattccctaagtgtgcggagctccagggctactgtccagtgacctataaggatggaaaccaaagatatgaagctctagtacctggtagcattaactatgctttagaatatcataatcgtatatatatttgtgagaacaaagaaaaactccagaaatttttgaggtcgccactgaaatactgggaacagaagcttccacacaagcttcccccattaagggaaccgatacttcttactagtcttcctttgcctggatatctggaacagggtattgcaacttctctaattaaagcaatgaatgcagcgggatgcttaaagcccaagttcccctttttaagtataaggagatctgcactgctatatatagcacttcatctcaaagcatttaatcccaaaggttccgaatacacaagaaaaaagtataagaagaagatggagcagtttatggagagttgtgaactcataacatacttgggtgccaagatgaccagaaaatacaaggaacctcagttcagagccattgactttgatcataagttaaagacctttctctctctcagaaatatagacccaattaatgggtagtttacttaggtgatagcagcctgaatctcaagagttatctgaaagtgatagagggaaactgagagaagtagattgaaaatctgggcctcttggaagtacttttgcctcctgagcaaggtaccatggctgccagacttcaggtgaactcaaaggtctgccagccaggaaggagcactcttatggaaacaagttttaatacaattttaaaatgtattgctctttgcctgaactttgatgctttaacaaaataaacattctatttataattccatatagaaaagttaagtgacttatttaataaatgtattattttcctttttaacattttcagtagaaaagtcagtctctgttaaaattactcattaaatgttagaaagctttaagacatttaacattgttataaatgaaaccaaaatatgggttatacattttacatacaaaactgtttgtgaactttgtgaacataagatactatcattttcccaataaaataaatggattttgcaacaactt

SEQ ID NO: 105345 - DNA, 1561 bp, Homo sapiens
  Payload ID: 666
  Gene Symbol: AK9
  Gene Name: adenylate kinase 9
  ENST ID: ENST00000491875
  CDS Start-End: 1-656
aagttgaggaagaaaatacaaaaaagcagcttccagaagtacaacttacagaagaagaagaagtaatcaaatcaagtctaatggaaaatgagcccttgcctcctgaaattcttgaagtaattctttctgagtggtggcttaaggaaccaatacgttccacaggttttatattagatggtttcccacgatatccagaagaggcccagtttttgggagatcgtggatttttcccagatgcagctgtttttatacaagttgatgatcaagatatttttgatcgcctccttcctgcccaaattgaaaagtggaaactaaaacaaaagaagaaattagaaaggaagaaactgatcaaagacatgaaggcaaaaatcagggttgatacgattgctaaaagaagggctgaacttatattagagagagataaaaaaaggagggagccaaacaaggagaagagaaaaagaggaatatcagaaaatacaacttgctacaagtgcaaccacatgtcaccctggtgtgaatatgctggacttccgtacagaggactgctgatattgtacagtgcaactgcaactgcaactgcaggcacaaagcattgcagaagcggggccaaagtaattgttgctttgtcaaaacaaaatattcacaaccaaaagtagataagaaaaaaccattggactgagaaaattatggcaccatgtaagaataagaaccctcctcttaattatttgcctcgattttcattcatttattcattcagtccatcagcaaacattaattgagctttgtgtctgacactgtttcaaatactggcaaatcagccatgagcaaaacttacagaaatcgtagcctcattataatgctcatttctctcatcaaacatgttctgaaagtttgctctgtttaaggtgtcatgctaatgtttaggatcaaaaagatgtcctaacctggaattaagtacagttaactactttaagcccttgggagtccctagtggtccccttctgaatcacttcaaatgtttcagcagtgaaggagtccaggctttgcagttaaacacacctacgcagtatcccttctccagttctcactgactttgttcactgctctccagtgcctggtggagtgctgacacatgtgacattcaacttcagttgtttcgctgaggttgtataacattgagtaagtcacttagcctctgtaaacctagggctttttattgtaaaatgggaaaaattaatacatttagtttccctaattaataataatttaatttccctttgctactcttcagttaaatcttcttttcttaagaattaattttcaggataaactttaaatgttctttataattttttcatttgttaacattagaatggtgtgatttcttctgatttttcattcggaaattcaatattctatgtagaggttaaataggattttgtaagtcagctctcctgagacttcatgtttgtaaaactgtctgtgtatcccacaaaactgatacaaacaaactcgcagcacaactcctgagatgtttgatgaataaaaaattaaaactgta

SEQ ID NO: 105346 - DNA, 2759 bp, Homo sapiens
  Payload ID: 666
  Gene Symbol: AK9
  Gene Name: adenylate kinase 9
  ENST ID: ENST00000470564
  CDS Start-End: 1-2249
cccaaattgaaaagtggaaactaaaacaaaagaagaaattagaaaggaagaaactgatcaaagacatgaaggcaaaaatcagggttgatacgattgctaaaagaagggctgaacttatattagagagagataaaaaaaggagggagaatgttgttagagatgatgaagagattagtgaggaagaacttgaagaagacaatgatgatattgaaaacatccttgaagatgagtttccaaaagatgaggaagagatgagtggcgaggaagatgaagaacaggaaactgatgcaattgagcgcctgagaggtgaactaggagaaaaatttgaagcagatacacataatttacaaataatacaggatgaacttgagaggtatttgataccaataatttccattaatggagctcggagaaatcacattgtacaatatacattgaatatgaaactgaaaccactggtggaaaatcgtgcaagcatttttgagaaatgtcatccaataccagcaccccttgcccagaaaatgctcacctttacctacaagtatataagctcattcggctattgggaccctgtaaagctaagtgaaggagagacaatcaagccagttgaaaatgcagagaatccaatttatcctgtaatccatcgtcagtatatttattttttatctagtaaagaaacaaaagaaaaatttatgaagaacccaatcaaatatatccgccaacccaaacctaagcctactgtgcccattaggattataattgtggggcctccaaaatctgggaaaactacagttgccaaaaaaattacaagtgaatatgggttaaagcatttatcaataggaggagctttgcgttatgtactaaacaatcacccggaaacagagctggcacttatgttaaattggcatcttcataaaggaatgacagcacctgatgaactggctattcaagccttagaactttctctgatggaaagtgtgtgcaatactgcaggtgttgtcatcgatggatatcctgtaactaaacatcaaatgaatctcttggaagctaggtcaatcattcccatggtcatctttgaattgagtgtgccttccaaggagattttcaaaagattgctcctagaaaaagaaaatgaacaaagattgccttatccattgcacaatagtgcacaaattgtagctgtcaataatgtaaagtatcgcaaaaatattggtgagattaggcaatattatcaagaacagcatcagaactggtatgtgattgatggatttcacagcaaatggtgggtatggaatgaagtcattaagaatgttcaaatggtgaataaatacatgcagacatacctggaaagaataaaagcaggaaaagctgcctgcattgacaagttatgtatcacacctcaagagctgctttctcgcctgggagaatttgaacagttctgccctgtcagcctggcagaatcccaggaattatttgattgctctgcaactgactccttggaatttgcagcagagttcagggggcactactataaaatgagttctcaggaaaaactgaataaattcttggagaacccagaattgtacgtgcctcccttagcacctcatccactcccatctgctgacatgatccccaaaagactgacactgtcagagctgaagagtcgattccctaagtgtgcggagctccagggctactgtccagtgacctataaggatggaaaccaaagatatgaagctctagtacctggtagcattaactatgctttagaatatcataatcgtatatatatttgtgagaacaaagaaaaactccagaaatttttgaggtcgccactgaaatactgggaacagaagcttccacacaagcttcccccattaagggaaccgatacttcttactagtcttcctttgcctggatatctggaacagggtattgcaacttctctaattaaagcaatgaatgcagcgggatgcttaaagcccaagttcccctttttaagtataaggagatctgcactgctatatatagcacttcatctcaaagcatttaatcccaaaggttccgaatacacaagaaaaaagtataagaagaagatggagcagtttatggagagttgtgaactcataacatacttgggtgccaagatgaccagaaaatacaaggaacctcagttcagagccattgactttgatcataagttaaagacctttctctctctcagaaatatagacccaattaatgggtagtttacttaggtgatagcagcctgaatctcaagagttatctgaaagtgatagagggaaactgagagaagtagattgaaaatctgggcctcttggaagtacttttgcctcctgagcaaggtaccatggctgccagacttcaggtgaactcaaaggtctgccagccaggaaggagcactcttatggaaacaagttttaatacaattttaaaatgtattgctctttgcctgaactttgatgctttaacaaaataaacattctatttataattccatatagaaaagttaagtgacttatttaataaatgtattattttcctttttaacattttcagtagaaaagtcagtctctgttaaaattactcattaaatgttagaaagctttaagacatttaacattgttataaatgaaaccaaaatatgggttatacattttacatacaaaactgtttgtgaactttgtgaacataagatactatcattttcccaataaaataaatggattttgcaacaa

SEQ ID NO: 105347 - DNA, 1032 bp, Homo sapiens
  Payload ID: 666
  Gene Symbol: AK9
  Gene Name: adenylate kinase 9
  ENST ID: ENST00000490722
  CDS Start-End: 1-937
tcacagcaaatggtgggtatggaatgaagtcattaagaatgttcaaatggtgaataaatacatgcagacatacctggaaagaataaaagcagagctgctttctcgcctgggagaatttgaacagttctgccctgtcagcctggcagaatcccaggaattatttgattgctctgcaactgactccttggaatttgcagcagagttcagggggcactactataaaatgagttctcaggaaaaactgaataaattcttggagaacccagaattgtacgtgcctcccttagcacctcatccactcccatctgctgacatgatccccaaaagactgacactgtcagagctgaagagtcgattccctaagtgtgcggagctccagggctactgtccagtgacctataaggatggaaaccaaagatatgaagctctagtacctggtagcattaactatgctttagaatatcataatcgtatatatatttgtgagaacaaagaaaaactccagaaatttttgaggtcgccactgaaatactgggaacagaagcttccacacaagcttcccccattaagggaaccgatacttcttactagtcttcctttgcctggatatctggaacagggtattgcaacttctctaattaaagcaatgaatgcagcgggatgcttaaagcccaagttcccctttttaagtataaggagatctgcactgctatatatagcacttcatctcaaagcatttaatcccaaaggttccgaatacacaagaaaaaagtataagaagaagatggagcagtttatggagagttgtgaactcataacatacttgggtgccaagatgaccagaaaatacaaggaacctcagttcagagccattgactttgatcataagttaaagacctttctctctctcagaaatatagacccaattaatgggtagtttacttaggtgatagcagcctgaatctcaagagttatctgaaagtgatagagggaaactgagagaagtagattgaaaatctgggcctcttggaa

SEQ ID NO: 105348 - DNA, 577 bp, Homo sapiens
  Payload ID: 666
  Gene Symbol: AK9
  Gene Name: adenylate kinase 9
  ENST ID: ENST00000524674
  CDS Start-End: 1-577
ttatcactgaaataccatcactttcacaggatgccatgactaccttacagcaaatagaattaattaaaaacttaaacctgaaacctgatgttataatcaatataaagtgtcctgactatgatttgtgccagagaatttctgggcaaagacagcacaataatacgggatacatatacagtagagaccagtgggatcctgaagtcattgagaatcataggaaaaagaagaaagaagcccaaaaggacggaaaaggagaagaggaagaagaggaagaagagcaagaagaagaagaggcatttattgccgaaatgcagatggtggctgaaattcttcatcatctagttcagaggcctgaagattatttggaaaatgttgaaaacattgttaagctttataaggaaacaattctccaaactttagaagaagtaatggctgaacacaatccccagtatctcattgagctaaatggaaataaaccagcagaggagctctttatggatgagctatttcgtactcttgcatcttataaacttattgcaccaagatacagatggcaaagaagtaaatggggacgtac

SEQ ID NO: 105349 - DNA, 988 bp, Homo sapiens
  Payload ID: 666
  Gene Symbol: AK9
  Gene Name: adenylate kinase 9
  ENST ID: ENST00000532976
  CDS Start-End: 211-988
ataaatgccaaattaggtacaaaagtgactatttcgaattggaaaagaaatgacaaagaactacagccccgcctctcgaggccccgccccaccaagcagcaggtgcgtggcggccagaggtctccccggcaaccgcccgacagccccgcggagtccctggaggcagttgcttccctgaggagggtccggctgcggccagtattttgtgtcatgacttctcaagagaagacagaagagtatccttttgcagatatatttgatgaagatgaaactgaaaggaattttttgttgtccaaacctgtttgctttgttgtatttgggaaaccaggtgttgggaaaacaacattagcccgttacataacacaggcatggaaatgtattcgtgttgaagctttgccaattttagaagaacagattgctgctgaaaccgaatcaggagttatgttgcaatcaatgttgatcagcggtcaaagcattccagatgaacttgtcataaagctaatgttggagaagctcaactccccagaagtctgtcactttggttatattatcactgaaataccatcactttcacaggatgccatgactaccttacagcaaatagaattaattaaaaacttaaacctgaaacctgatgttataatcaatataaagtgtcctgactatgatttgtgccagagaatttctgggcaaagacagcacaataatacgggatacatatacagtagagaccagtgggatcctgaagtcattgagaatcataggaaaaagaagaaagaagcccaaaaggacggaaaaggagaagaggaagaagaggaagaagagcaagaagaagaagaggcatttattgccgaaatgcagatggtggctgaaattcttcatcatctagttcagaggcctgaagattatttggaaaatgttgaaaacattgttaagctttataaggaaacaattctccaaactttagaagaagtaatggctgaacaca

SEQ ID NO: 105350 - DNA, 411 bp, Homo sapiens
  Payload ID: 666
  Gene Symbol: AK9
  Gene Name: adenylate kinase 9
  ENST ID: ENST00000605986
  CDS Start-End: 1-411
ctgaagtcattgagaatcataggaaaaagaagaaagaagcccaaaaggacggaaaaggagaagaggaagaagaggaagaagagcaagaagaagaagaggcatttattgccgaaatgcagatggtggctgaaattcttcatcatctagttcagaggcctgaagattatttggaaaatgttgaaaacattgttaagctttataaggaaacaattctccaaactttagaagaagtaatggctgaacacaatccccagtatctcattgagctaaatggaaataaaccagcagaggagctctttatggtgagtgcagtgttaagcaggaatacttcacagcatggaaaatttaaatctattgacagtattgtacttcttttaataaacagaagcatatttatatttgaacaccatt

SEQ ID NO: 105351 - DNA, 1620 bp, Homo sapiens
  Payload ID: 667
  Gene Symbol: ADSL
  Gene Name: adenylosuccinate lyase
  ENST ID: ENST00000216194
  CDS Start-End: 32-1528
cagtccaccctggcggggtcgcagggttgggatggcggctggaggcgatcatggttcgcccgacagctaccgctcacctcttgcctcccgctatgccagcccggagatgtgcttcgtgtttagcgacaggtataaattccggacatggcggcagctgtggctgtggctggcggaggccgagcagacattgggtttgcctatcacagatgaacaaatccaggagatgaaatcaaacctggagaacatcgacttcaagatggcagctgaggaagagaaacgtttacgacatgatgtgatggctcacgtgcacacatttggccactgctgtccaaaagctgcaggcattattcaccttggtgctacttcttgctatgttggagacaatactagtctcattctgtcaaggggcgtgatcaaggcttattgcaacctccgcctcccaggctcagacagctctcctgtctcagtctcccaacttgccagagtgatctctcggcttgccgactttgctaaggaacgagccagtctacccacattaggtttcacacatttccagcctgcacagctgaccacagttgggaaacgttgctgtctttggattcaggatctttgcatggatctccagaacttgaagcgtgtccgagatgacctgcgcttccggggagtaaagggtaccactggcactcaggccagtttcctgcagctctttgagggagatgaccataaggtagagcagcttgacaagatggtgacagaaaaggcaggatttaagagagctttcatcatcacagggcagacatatacacgaaaagtggatattgaagtactgtctgtgctggctagcttgggggcatcagtgcacaagatttgcaccgacatacgcctcctggcaaacctcaaggagatggaggaaccctttgaaaaacagcagattggctcaagtgcgatgccatataagcggaatcccatgcgttcagaacgttgctgcagtcttgcccgccacctgatgacccttgtcatggacccgctacagacagcatctgtccagtggtttgaacgcacactggatgatagtgccaaccgacggatctgtttggccgaggcatttcttaccgcagatactatattgaatacgctgcagaacatttctgaaggattggtcgtgtaccccaaagtaattgaacggcgcattcggcaagagctgcctttcatggccacagagaacatcatcatggccatggtcaaagctggaggtagccgccaggattgccatgagaaaatcagagtgctttctcagcaggcagcttctgtggttaagcaggaagggggtgacaatgacctcatagagcgtatccaggttgatgcctacttcagtcccattcactcccagttggatcatttactggatccttcttctttcactggtcgtgcctcccagcaggtgcagagattcttagaagaggaggtgtatcccctgttaaaaccatatgaaagcgtgatgaaggtgaaagcagaattatgtctgtagagttggaagagaattaaacgaaaatcattgttaattgctgaggcatgaaaattgtgttactataatgccttattttacctcgagaattgtta

SEQ ID NO: 105352 - DNA, 1808 bp, Homo sapiens
  Payload ID: 667
  Gene Symbol: ADSL
  Gene Name: adenylosuccinate lyase
  Uniprot ID: P30566
  ENST ID: ENST00000342312
  CDS Start-End: 57-1334
tttccgcttccgctcttccctggtccagtccaccctggcggggtcgcagggttgggatggcggctggaggcgatcatggttcgcccgacagctaccgctcacctcttgcctcccgctatgccagcccggagatgtgcttcgtgtttagcgacaggtataaattccggacatggcggcagctgtggctgtggctggcggaggccgagcagacattgggtttgcctatcacagatgaacaaatccaggagatgaaatcaaacctggagaacatcgacttcaagatggcagctgaggaagagaaacgtttacgacatgatgtgatggctcacgtgcacacatttggccactgctgtccaaaagctgcaggcattattcaccttggtgctacttcttgctatgttggagacaatactgacttgattattcttagaaatgcacttgacctgcttttgccaaagcttgccagagtgatctctcggcttgccgactttgctaaggaacgagccagtctacccacattaggtttcacacatttccagcctgcacagctgaccacagttgggaaacgttgctgtctttggattcaggatctttgcatggatctccagaacttgaagcgtgtccgagatgacctgcgcttccggggagtaaagggtaccactggcactcaggccagtttcctgcagctctttgagggagatgaccataaggtagagcagcttgacaagatggtgacagaaaaggcaggatttaagagagctttcatcatcacagggcagacatatacacgaaaagtggatattgaagtactgtctgtgctggctagcttgggggcatcagtgcacaagatttgcaccgacatacgcctcctggcaaacctcaaggagatggaggaaccctttgaaaaacagcagattggctcaagtgcgatgccatataagcggaatcccatgcgttcagaacgttgctgcagtcttgcccgccacctgatgacccttgtcatggacccgctacagacagcatctgtccagtggtttgaacgcacactggatgatagtgccaaccgacggatctgtttggccgaggcatttcttaccgcagatactatattgaatacgctgcagaacatttctgaaggattggtcgtgtaccccaaagtaattgaacggcgcattcggcaagagctgcctttcatggccacagagaacatcatcatggccatggtcaaagctggaggtagccgccaggtgcagagattcttagaagaggaggtgtatcccctgttaaaaccatatgaaagcgtgatgaaggtgaaagcagaattatgtctgtagagttggaagagaattaaacgaaaatcattgttaattgctgaggcatgaaaattgtgttactataatgccttattttacctcgagaattgttaccttaaattagtacagcactttcttcttcccatggtgctttcctgtttctcagtctcacatttctcaacaaggcaaaaacaaagagcgttgaagttgactctgctcttgcatagtaaatgtagttcatacttgatctctgttctttcaaggcatattttccagctgcctcaagtttagtccttttcacgtgttcatttgcttgtaaagtagcaagaaatttctggtcctgtcttctaaaagtgaatttgatctaggtctagcaaaataacctggactcagtgattgagtcaatggtcagataccttttatttcggttatttttggctagtataagtgatgaagtttggaactacagtaaatacttaaaaaaaaaaaaaaaaa

SEQ ID NO: 105353 - DNA, 754 bp, Homo sapiens
  Payload ID: 667
  Gene Symbol: ADSL
  Gene Name: adenylosuccinate lyase
  ENST ID: ENST00000624503
  CDS Start-End: 42-425
ttccctggtccagtccaccctggcggggtcgcagggttgggatggcggctggaggcgatcatggttcgcccgacagctaccgctcacctcttgcctcccgctatgccagcccggagatgtgcttcgtgtttagcgacaggtataaattccggacatggcggcagctgtggctgtggctggcggaggccgagcagacattgggtttgcctatcacagatgaacaaatccaggagatgaaatcaaacctggagaacatcgacttcaagatggcagctgaggaagagaaacgtttacgacatgatgtgatggctcacgtgcacacatttggccactgctgtccaaaagctgcaggcattattcaccttggtgctacttcttgctatgttggagacaatactgtaggcgcctgtgttgtttatacttaaaactcagtctctagaatctatttgtcaattttatttgatgttgtccagttgaggaagtgacactatagatcttttttttttttttgaggcagagtctccctctgtctcccagactggagtgcagtggcacggctcactgcaagctccgcctcctgggttcacaccattctcctgcctcagcctcccgagtagctgggattacaggtgtgagccactgcccctggcctccaaatgctttctttagtcttaaatgaaacataattaaaggcatctttgtgtaactggcgagtcagatagtgggagaagaacagtcttcttacttggaaaat

SEQ ID NO: 105354 - DNA, 732 bp, Homo sapiens
  Payload ID: 667
  Gene Symbol: ADSL
  Gene Name: adenylosuccinate lyase
  ENST ID: ENST00000624027
  CDS Start-End: 1-245
agcgtatccaggttgatgcctacttcagtcccattcactcccagttggatcatttactggatccttcttctttcactggtcgtgcctcccagcagtgtaagcaagtgccattggacaagaacgttgtctgtgtcattccttgttgtatttccaatagcaagagcacatcagatacttggcaactaggcagtcttccagcttctgccactgcgcccgacttccttgttgcatggatttatagctgattgaagcaactgtagccaaagattgagttaattacctacctgccaggagagcactagtgttatttagcccattctcatcctacatatttttcggcatagatgaaaatgaaagcttttgtttatcagatttgcagatgacacaaaactgggagaattaacaagtatgtttatttggtaaaataagttttcatctctaacctaaatcggctgaaatgatgtgtcctaaactagaggaaaaagttaataaagatcaatgtaaataagttaatcttaaactcagtatgcaccagaactgagagaagactgttttaggaggtgttaatggttgtccagtgcccaaaaagccaccagaggcttactgctccgcactcttggcattacattcaattttggatacccagtctgaggaatagagatgaactggagagccaacctccaaaaagatcttgtggtggaggaatgttagggctctttatcctatacagaa

SEQ ID NO: 105355 - DNA, 678 bp, Homo sapiens
  Payload ID: 667
  Gene Symbol: ADSL
  Gene Name: adenylosuccinate lyase
  ENST ID: ENST00000624474
  CDS Start-End: 28-522
ccaccctggcggggtcgcagggttgggatggcggctggaggcgatcatggttcgcccgacagctaccgctcacctcttgcctcccgctatgccagcccggagatgtgcttcgtgtttagcgacaggtataaattccggacatggcggcagctgtggctgtggctggcggaggccgagcagacattgggtttgcctatcacagatgaacaaatccaggagatgaaatcaaacctggagaacatcgacttcaagatggcagctgaggaagagaaacgtttacgacatgatgtgatggctcacgtgcacacatttggccactgctgtccaaaagctgcaggcattattcaccttggtgctacttcttgctatgttggagacaatactgacttgattattcttagaaatgcacttgacctgcttttgccaaaggcctgcacagctgaccacagttgggaaacgttgctgtctttggattcaggatctttgcatggatctccagaacttgaagcgtgtccgagatgacctgcgcttccggggagtaaagggtaccactggcactcaggccagtttcctgcagctctttgagggagatgaccataaggtagagcagcttgacaagatggtgacagaaaaggcaggatttaagagagctttcatcatcacagggcagacatatac

SEQ ID NO: 105356 - DNA, 847 bp, Homo sapiens
  Payload ID: 667
  Gene Symbol: ADSL
  Gene Name: adenylosuccinate lyase
  ENST ID: ENST00000623632
  CDS Start-End: 60-847
aggtttccgcttccgctcttccctggtccagtccaccctggcggggtcgcagggttgggatggcggctggaggcgatcatggttcgcccgacagctaccgctcacctcttgcctcccgctatgccagcccggagatgtgcttcgtgtttagcgacaggtataaattccggacatggcggcagctgtggctgtggctggcggaggccgagcagacattgggtttgcctatcacagatgaacaaatccaggagatgaaatcaaacctggagaacatcgacttcaagatggcagctgaggaagagaaacgtttacgacatgatgtgatggctcacgtgcacacatttggccactgctgtccaaaagctgcaggcattattcaccttggtgctacttcttgctatgttggagacaatactcttgccagagtgatctctcggcttgccgactttgctaaggaacgagccagtctacccacattaggtttcacacatttccagcctgcacagctgaccacagttgggaaacgttgctgtctttggattcaggatctttgcatggatctccagaacttgaagcgtgtccgagatgacctgcgcttccggggagtaaagggtaccactggcactcaggccagtttcctgcagctctttgagggagatgaccataaggtagagcagcttgacaagatggtgacagaaaaggcaggatttaagagagctttcatcatcacagggcagacatatacacgaaaagtggatattgaagtactgtctgtgctggctagcttgggggcatcagtgcacaagatttgcaccgacatacgcctcctggcaaacctcaaggagat

SEQ ID NO: 105357 - DNA, 1079 bp, Homo sapiens
  Payload ID: 667
  Gene Symbol: ADSL
  Gene Name: adenylosuccinate lyase
  ENST ID: ENST00000625194
  CDS Start-End: 1-1079
gatctctcggcttgccgactttgctaaggaacgagccagtctacccacattaggtttcacacatttccagcctgcacagctgaccacagttgggaaacgttgctgtctttggattcaggatctttgcatggatctccagaacttgaagcgtgtccgagatgacctgcgcttccggggagtaaagggtaccactggcactcaggccagtttcctgcagctctttgagggagatgaccataaggtagagcagcttgacaagatggtgacagaaaaggcaggatttaagagagctttcatcatcacagggcagacatatacacgaaaagtggatattgaagtactgtctgtgctggctagcttgggggcatcagtgcacaagatttgcaccgacatacgcctcctggcaaacctcaaggagatggaggaaccctttgaaaaacagcagattggctcaagtgcgatgccatataagcggaatcccatgcgttcagaacgttgctgcagtcttgcccgccacctgatgacccttgtcatggacccgctacagacagcatctgtccagtggtttgaacgcacactggatgatagtgccaaccggtcagtggcacagggacatcacatacaccaagttgagtggagacggatctgtttggccgaggcatttcttaccgcagatactatattgaatacgctgcagaacatttctgaaggattggtcgtgtaccccaaagtaattgaacggcgcattcggcaagagctgcctttcatggccacagagaacatcatcatggccatggtcaaagctggaggtagccgccaggattgccatgagaaaatcagagtgctttctcagcaggcagcttctgtggttaagcaggaagggggtgacaatgacctcatagagcgtatccaggttgatgcctacttcagtcccattcactcccagttggatcatttactggatccttcttctttcactggtcgtgcctcccagcaggtgcagagattcttagaagaggaggtgtatcccctgttaaaaccatatgaaagcgtgatgaaggtgaaagcagaattatgtc

SEQ ID NO: 105358 - DNA, 856 bp, Homo sapiens
  Payload ID: 667
  Gene Symbol: ADSL
  Gene Name: adenylosuccinate lyase
  ENST ID: ENST00000623287
  CDS Start-End: 30-479
gtccaccctggcggggtcgcagggttgggatggcggctggaggcgatcatggttcgcccgacagctaccgctcacctcttgcctcccgctatgccagcccggagatgtgcttcgtgtttagcgacaggtataaattccggacatggcggcagctgtggctgtggctggcggaggccgagcagacattgggtttgcctatcacagatgaacaaatccaggagatgaaatcaaacctggagaacatcgacttcaagatggcagctgaggaagagaaacgtttacgacatgatgtgatggctcacgtgcacacatttggccactgctgtccaaaagctgcaggcattattcaccttggtgctacttcttgctatgttggagacaatactgcctgcacagctgaccacagttgggaaacgttgctgtctttggattcaggatctttgcatggatctccagaacttgaagcgtgtccgagatgacctgcgcttccggggagtaaagggtaccactggcactcaggccagtttcctgcagctctttgagggagatgaccataaggtagagcagcttgacaagatggtgacagaaaaggcaggatttaagagagctttcatcatcacagggcagacatatacacgaaaagtggatattgaagtactgtctgtgctggctagcttgggggcatcagtgcacaagatttgcaccgacatacgcctcctggcaaacctcaaggagatggaggaaccctttgaaaaacagcagattggctcaagtgcgatgccatataagcggaatcccatgcgttcagaacgttgctgcagtcttgcccgccacctgatgacccttgtcatggacc

SEQ ID NO: 105359 - DNA, 728 bp, Homo sapiens
  Payload ID: 667
  Gene Symbol: ADSL
  Gene Name: adenylosuccinate lyase
  ENST ID: ENST00000423176
  CDS Start-End: 1-308
agcgtatccaggttgatgcctacttcagtcccattcactcccagttggatcatttactggatccttcttctttcactggtcgtgcctcccagcaggtgcagagattcttagaagaggaggtgtatcccctgttaaaaccatatgaaagcgtgatgaagtgtaagcaagtgccattggacaagaacgttgtctgtgtcattccttgttgtatttccaatagcaagagcacatcagatacttggcaactaggcagtcttccagcttctgccactgcgcccgacttccttgttgcatggatttatagctgattgaagcaactgtagccaaagattgagttaattacctacctgccaggagagcactagtgttatttagcccattctcatcctacatatttttcggcatagatgaaaatgaaagcttttgtttatcagatttgcagatgacacaaaactgggagaattaacaagtatgtttatttggtaaaataagttttcatctctaacctaaatcggctgaaatgatgtgtcctaaactagaggaaaaagttaataaagatcaatgtaaataagttaatcttaaactcagtatgcaccagaactgagagaagactgttttaggaggtgttaatggttgtccagtgcccaaaaagccaccagaggcttactgctccgcactcttggcattacattcaattttggatacccagtctgaggaatagagatgaa

SEQ ID NO: 105360 - DNA, 713 bp, Homo sapiens
  Payload ID: 667
  Gene Symbol: ADSL
  Gene Name: adenylosuccinate lyase
  ENST ID: ENST00000480775
  CDS Start-End: 1-236
ggggagtaaagggtaccactggcactcaggccagtttcctgcagctctttgagggagatgaccataaggtagagcagcttgacaagatggtgacagaaaaggcaggatttaagagagctttcatcatcacagggcagacatatacacgaaaagtggatattgaagtactgtctgtgctggctagcttgggggcatcagtgcacaagtccttcgggaacagagaggagtcggagtaagatactctgcaggagctctttgggaggatgcgctggtcttcagctcagccacagcacacctaagagctcatctccttcatcagcctagtcacagctcccagactctactgcacactgacagtgtggggtgatgcttattcccctacctcccccagatttgcaccgacatacgcctcctggcaaacctcaaggagatggaggaaccctttgaaaaacagcagattggctcaagtgcgatgccatataagcggaatcccatgcgttcagaacgttgctgcagtcttgcccgccacctgatgacccttgtcatggacccgctacagacagcatctgtccagtggtttgaacgcacactggatgatagtgccaaccggtcagtggcacagggacatcacatacaccaaacggatctgtttggccgaggcatttcttaccgcagatactatattgaatacgctgcagaacatttctgaagga

SEQ ID NO: 105361 - DNA, 712 bp, Homo sapiens
  Payload ID: 667
  Gene Symbol: ADSL
  Gene Name: adenylosuccinate lyase
  ENST ID: ENST00000623978
  CDS Start-End: 312-712
agtccaccctggcggggtcgcagggttgggatggcggctggaggcgatcatggttcgcccgacagctaccgctcacctcttgcctcccgctatgccagcccggagatgtgcttcgtgtttagcgacaggacttgattattcttagaaatgcacttgacctgcttttgccaaagcttgccagagtgatctctcggcttgccgactttgctaaggaacgagccagtctacccacattaggtttcacacatttccagcctgcacagctgaccacagttgggaaacgttgctgtctttggattcaggatctttgcatggatctccagaacttgaagcgtgtccgagatgacctgcgcttccggggagtaaagggtaccactggcactcaggccagtttcctgcagctctttgagggagatgaccataaggtagagcagcttgacaagatggtgacagaaaaggcaggatttaagagagctttcatcatcacagggcagacatatacacgaaaagtggatattgaagtactgtctgtgctggctagcttgggggcatcagtgcacaagatttgcaccgacatacgcctcctggcaaacctcaaggagatggaggaaccctttgaaaaacagcagattggctcaagtgcgatgccatataagcggaatcccatgcgttcagaacgttgctgcagtcttgcccgccacctgatgaccct

SEQ ID NO: 105362 - DNA, 4359 bp, Homo sapiens
  Payload ID: 667
  Gene Symbol: ADSL
  Gene Name: adenylosuccinate lyase
  Uniprot ID: P30566
  ENST ID: ENST00000623063
  CDS Start-End: 60-1514
aggtttccgcttccgctcttccctggtccagtccaccctggcggggtcgcagggttgggatggcggctggaggcgatcatggttcgcccgacagctaccgctcacctcttgcctcccgctatgccagcccggagatgtgcttcgtgtttagcgacaggtataaattccggacatggcggcagctgtggctgtggctggcggaggccgagcagacattgggtttgcctatcacagatgaacaaatccaggagatgaaatcaaacctggagaacatcgacttcaagatggcagctgaggaagagaaacgtttacgacatgatgtgatggctcacgtgcacacatttggccactgctgtccaaaagctgcaggcattattcaccttggtgctacttcttgctatgttggagacaatactgacttgattattcttagaaatgcacttgacctgcttttgccaaagcttgccagagtgatctctcggcttgccgactttgctaaggaacgagccagtctacccacattaggtttcacacatttccagcctgcacagctgaccacagttgggaaacgttgctgtctttggattcaggatctttgcatggatctccagaacttgaagcgtgtccgagatgacctgcgcttccggggagtaaagggtaccactggcactcaggccagtttcctgcagctctttgagggagatgaccataaggtagagcagcttgacaagatggtgacagaaaaggcaggatttaagagagctttcatcatcacagggcagacatatacacgaaaagtggatattgaagtactgtctgtgctggctagcttgggggcatcagtgcacaagatttgcaccgacatacgcctcctggcaaacctcaaggagatggaggaaccctttgaaaaacagcagattggctcaagtgcgatgccatataagcggaatcccatgcgttcagaacgttgctgcagtcttgcccgccacctgatgacccttgtcatggacccgctacagacagcatctgtccagtggtttgaacgcacactggatgatagtgccaaccgacggatctgtttggccgaggcatttcttaccgcagatactatattgaatacgctgcagaacatttctgaaggattggtcgtgtaccccaaagtaattgaacggcgcattcggcaagagctgcctttcatggccacagagaacatcatcatggccatggtcaaagctggaggtagccgccaggattgccatgagaaaatcagagtgctttctcagcaggcagcttctgtggttaagcaggaagggggtgacaatgacctcatagagcgtatccaggttgatgcctacttcagtcccattcactcccagttggatcatttactggatccttcttctttcactggtcgtgcctcccagcaggtgcagagattcttagaagaggaggtgtatcccctgttaaaaccatatgaaagcgtgatgaaggtgaaagcagaattatgtctgtagagttggaagagaattaaacgaaaatcattgttaattgctgaggcatgaaaattgtgttactataatgccttattttacctcgagaattgttaccttaaattagtacagcactttcttcttcccatggtgctttcctgtttctcagtctcacatttctcaacaaggcaaaaacaaagagcgttgaagttgactctgctcttgcatagtaaatgtagttcatacttgatctctgttctttcaaggcatattttccagctgcctcaagtttagtccttttcacgtgttcatttgcttgtaaagtagcaagaaatttctggtcctgtcttctaaaagtgaatttgatctaggtctagcaaaataacctggactcagtgattgagtcaatggtcagataccttttatttcggttatttttggctagtataagtgatgaagtttggaactacagtaaatacttaaaaaaaaaaaaaaaaagaaccaaaccctgatgtgaccatcaggctgattgagctgaagttgtgcccaagctcatttcatcttttgataaggcttatacagcagggaaatgctaattgagtatattgatttcatcagggccgctgacagtctttattccttgttgcatggattttgttgttgaggcttgctctgtcacccagactagagtgcagtagcacaatcttggctcactgcaacctccgcctctcaggttcaagcgattctccagcctcagcctcccaagtagctgggattacaggcgcctgccgccatgcctggctaatttttgtatttttagacgggatggagttttgccatgttgggcgggctggtcttgaactcctgacctcaagtgatccgcccatctcagcctcccaaagttctgggattatagacatgagccaccacacccagcctaatcttgttttctttttttacttgtttacagtgtaagcaagtgccattggacaagaacgttgtctgtgtcattccttgttgtatttccaatagcaagagcacatcagatacttggcaactaggcagtcttccagcttctgccactgcgcccgacttccttgttgcatggatttatagctgattgaagcaactgtagccaaagattgagttaattacctacctgccaggagagcactagtgttatttagcccattctcatcctacatatttttcggcatagatgaaaatgaaagcttttgtttatcagatttgcagatgacacaaaactgggagaattaacaagtatgtttatttggtaaaataagttttcatctctaacctaaatcggctgaaatgatgtgtcctaaactagaggaaaaagttaataaagatcaatgtaaataagttaatcttaaactcagtatgcaccagaactgagagaagactgttttaggaggtgttaatggttgtccagtgcccaaaaagccaccagaggcttactgctccgcactcttggcattacattcaattttggatacccagtctgaggaatagagatgaactggagagccaacctccaaaaagatcttgtggtggaggaatgttagggctctttatcctatacagaagaaaactcctcggcacttcaaatattgccaggtgcaggaagagtgacttgattgtgtgttgccccaagagacacactgagctcaatacccattactgagactggcttggggccagacattggaaccactgagattagcaacctacactcaatcccccaggtcaggcagaagctggaagactgcctcgttaggaatgttgtgagggagaggaggctgaatcggttccagttttatttaaaagtagccaggaaatcaggttgcgatgatgcgcatttacagtcccagctacttgggaagctgaggcgatagggtcacttgagcccaagagtttagtccaggctgggtgacagcgagcccttgtcacttaaagccaacctaagagaagagcttatccttttggaaaaacaatagaagacaattctgaaaaccaaattctgaacataggctagtatagcaagcaagcagggatagcatagagccatttgctcaacttccagaaagagttactctgttcatctctaaaaaatcttgaaaagggccgggtgcggtggtggctcacgcctgtaatcccaacactttgggaggccgaggcaggtggatcacctgaggtcaggagttcgagaccagcttgaccgacaaggtgaaactccgtctctactaaaaatacaatcaaccgggcgtggtggcaggcgcctatagtcccagctacttgggaggctgagacaggagaattgcttgaacctgggaggcagaagttgcagtgagccaagatcatgccactgtactccagcctgggcaacggagcgagactccatctgaaaaaacaaaacagaaaaaatcttgaaaggatactaagtctgacacaaggaaattaagtcatgggactctgaccagatattctgtctacttccttctctgctatgggcaacttggaggcagcaactactatcagtttatctgtaatgtgagaatttatattacataacagatactggggatataggataccatggattttagttaatacatttcctcatagaaaataaggaaataacagtcttgttcctgtcctaacaattctgttagactaatgatctccagtgattggcgatttgacctggtttcttcctggactatttgaatgggtggatttgttggtgcatctcttgtcttctttccttttccattctcctttatttttgtatttacatacttgtatgcaactttgtaatctgattttcccatgtaacattttaatttga

SEQ ID NO: 105363 - DNA, 2780 bp, Homo sapiens
  Payload ID: 668
  Gene Symbol: ADSS
  Gene Name: adenylosuccinate synthase
  Uniprot ID: P30520
  ENST ID: ENST00000366535
  CDS Start-End: 318-1688
acgggagtggcgcgccaggccgcggaaggggcgtggcctcggtccggggtggcggccgttgccgccaccagggcctcttcctgcgggcggtgctgccgaggccggcctgcgcggggcagtcatggtacccccttgagcgggctgtggcggagagcggggcggggactggctggagggtggcggcccggcggggcgggggcggggccggcctctggctccttcttcctctgcatgtggctggcggccgcagagcagttcagttcgctcactcctcgccggccgcctctccttcgggctctcctcgcgtcactggagccatggcgttcgccgagacctacccggcggcatcctccctgcccaacggcgattgcggccgccccagggcgcggcccggaggaaaccgggtgacggtggtgctcggtgcgcagtggggcgacgaaggcaaagggaaggtggtggacctgctggcgcaggacgccgacatcgtgtgccgctgccagggaggaaataatgctggccatacagttgttgtggattctgtggaatatgattttcatctcttacccagtggaataattaatccaaatgtcactgcattcattggaaatggtgtggtaattcatctacctggattgtttgaagaagcagagaaaaatgttcaaaaaggaaaaggactagaaggctgggaaaaaaggcttattatatctgacagagctcatattgtatttgattttcatcaagcagctgatggtatccaggaacaacagagacaagaacaagcaggaaaaaatttgggtacaacaaaaaagggcattggcccagtttattcgtccaaagctgctcggagtggactcaggatgtgcgaccttgtttctgactttgatggcttctctgagaggtttaaagttctagctaaccaatacaaatctatataccccactttggaaatagacattgaaggtgaattacaaaaactcaagggttatatggaaaagattaaaccaatggtgagagatggagtttattttctatatgaggccctacatggaccaccaaagaaaatcttggtagaaggtgcaaatgcagcactattagatattgattttgggacttacccttttgtaacctcttcaaattgtactgttggaggtgtttgtactggtttgggtatgccacctcaaaatgttggagaagtgtatggagttgtgaaagcttatacaactagagttggtattggtgcctttcctacagagcaagacaatgaaattggagaattattacaaacaaggggtagagagtttggtgtaactactggaaggaaaagaagatgtggctggttggacctcgttttgctcaaatatgctcatatgatcaatggatttactgcgttggcacttaccaagttggatattttggacatgtttacggaaatcaaagttggagttgcttacaagttagatggtgaaatcatacctcatatcccagcaaaccaagaagtcttaaataaagttgaagttcaatataagactctcccaggatggaacacagacatatcaaatgcaagggcgtttaaagaactacctgttaatgcacaaaactatgttcgatttattgaagatgagcttcaaattccagttaagtggattggtgttggtaaatccagagaatctatgattcaactcttttaatgattgccagtaatgcaagaaacactccttgagagggaggggaaaagactttcttaaatatttcatttatgacctgcaaattcaagaataaagacactgaagtaagtttgaagccctacagttgtttccagtcttttcagatggatgcctactgtggagattaactttggcatattccagtgtcagctttctttagctggaattgccaaatcatttgttgctcctgctgctctcatggtgccacgttttttttttcaatgtttagtaatagtataatccatgttgtttgatatcaaaagtagaattacttttaatgtagtttttcttcattattgtcattgcgtgttcttaagttttacccctattagatggtaagaacaattaatgcagttttgcacaaatatttttacattctgatcattcagttctgtcattgtaatctttgttgttagaaacaaatgatgaaaacataggggttctgtaaacttttgtaatgctatgaattctgtttaaattttgggctgtctattttctgctgaaaccatgcaaaattgagctttggtggggctgggagggggttatgtattcatgggacctttaatttgtacagaacacagaacttatttctgtcagttatttaatacattgaaaatttagtgaaatgttcaaagagaatagatgtttcccaaaacaacaatctttatgttaaaaatagtcattaaaagatctgttgtaatatatggtggatatttttctttaatttcaaacattacctctgaaatgtgtatcttttcttttttatcttaccattaattttaaatctagtggattggttttcaacatcgtgcctgccgatatgcctacagaatcatctgtaagtgtcaaaatgaacccacgttgttagccataattttgattatgcctttatttctcctttcttgaaaaaaaaaaggtgttattttgacaattaggcataacattgttttgtagattatcttttaatgaactattttaaatgttaaattaggtgccacttaaatttattttattacaccatgaatagctgattaaaagaaccaaatatttctagta

SEQ ID NO: 105364 - DNA, 1766 bp, Homo sapiens
  Payload ID: 669
  Gene Symbol: ADSSL1
  Gene Name: adenylosuccinate synthase like 1
  Uniprot ID: Q8N142
  ENST ID: ENST00000330877
  CDS Start-End: 86-1459
ccccggcccggctccatttaatggcgcggacgccggcggcggcgggctcctggccgggccagcgcagcggaagagccaagccagcatgtcggggacccgagcctccaacgaccggccccccggcgcaggcggcgtcaagcgggggcggctgcagcaggaggcggcggcgaccggctcccgcgtgacggtggtgctgggcgcgcagtggggggacgagggcaaaggcaaggtggtggacctgctggccacggacgccgacatcatcagccgctgccaggggggcaacaacgccggccacacggtggtggtggatgggaaagagtacgacttccacctgctgcccagcggcatcatcaacaccaaggccgtgtccttcattggcaacggggtggtcatccacttgccaggcttgtttgaggaagcagagaagaatgaaaagaaaggcctgaaggactgggagaagaggctcatcatctctgacagagcccaccttgtgtttgattttcaccaggctgtcgacggacttcaggaagtgcagcgccaggcacaagaggggaagaatataggcaccaccaagaagggaatcggaccaacctactcttccaaagctgcccggacaggcctccgcatctgcgacctcctgtcagattttgatgagttttcctccagattcaagaacctggcccaccagcaccagtcgatgttccccaccctggaaatagacattgaaggccaactcaaaaggctcaagggctttgctgagcggatcagacccatggtccgagatggtgtttactttatgtatgaggcactccacggcccccccaagaagatcctggtggagggtgccaacgccgccctcctcgacattgacttcgggacctacccctttgtgacttcatccaactgcaccgtgggcggtgtgtgcacgggcctgggcatccccccgcagaacataggtgacgtgtatggcgtggtgaaagcctataccacacgtgtgggcatcggggccttccccaccgagcagatcaacgagattggaggcctgctgcagacccgcggccacgagtggggagtgaccacaggcaggaagaggcgctgcggctggctcgacctgatgattctaagatatgctcacatggtcaacggattcactgcgctggccctgacgaagctggacatcctggacgtactgggtgaggttaaagtcggtgtctcatacaagctgaacgggaaaaggattccctatttcccagctaaccaggagatgcttcagaaggtcgaagttgagtatgaaacgctgcctgggtggaaagcagacaccacaggcgccaggaggtgggaggacctgcccccacaggcccagaactacatccgctttgtggagaatcacgtgggagtcgcagtcaaatgggttggtgttggcaagtcaagagagtcgatgatccagctgttttagtcacagactgagctgatcccaacaggccctggcagcgtctggacttgtgtaaacagcagcagtcacgttcctcggccgccacaaccaacaccaaagcaggaaaaccattttctgtacttttatatttctgttcaacctgttggtttctacaatgattttaaacattggaaagccagccttgtgtatatttttaaaaattatattcaaaatgagccaaagtgctcagagaccttctatgacacattagtgtcacatggttgcgtgtccagccgaagcagtgtaataaacatctccaatggccactgaa

SEQ ID NO: 105365 - DNA, 1969 bp, Homo sapiens
  Payload ID: 669
  Gene Symbol: ADSSL1
  Gene Name: adenylosuccinate synthase like 1
  Uniprot ID: Q8N142
  ENST ID: ENST00000332972
  CDS Start-End: 160-1662
ggcgtcgtggggaggagcgtggcgtcggcgtcgtggggaggagcgtggcgtcggcgtcgtggggaggagcgtggcgtcggcgtcgtggggaggagcgtggcgtcggcgtcgtggggaggagcgtggcgtcggcgtcgtggggaggagcgtggcgtcggcatggtggggaggagctgtggggtggcaacccagaggcaaggaggtgggcagaggcccacgaacctggccctgaccctcagctcgtccccagctcacagcacagccctcccctggctgcctccaaggagtctccagttactgagtggccactccgtgccagctcagcccacccctcaccttcccagtgcctgtggaggcccaactagggtgacgctgggagaggagagggcttggaggagccacgggtcaaatgcaggaggccacacctgcctgcccaggaggactgcaggagccggatccttaacacctggaggggagcgggggggcaacaacgccggccacacggtggtggtggatgggaaagagtacgacttccacctgctgcccagcggcatcatcaacaccaaggccgtgtccttcattggcaacggggtggtcatccacttgccaggcttgtttgaggaagcagagaagaatgaaaagaaaggcctgaaggactgggagaagaggctcatcatctctgacagagcccaccttgtgtttgattttcaccaggctgtcgacggacttcaggaagtgcagcgccaggcacaagaggggaagaatataggcaccaccaagaagggaatcggaccaacctactcttccaaagctgcccggacaggcctccgcatctgcgacctcctgtcagattttgatgagttttcctccagattcaagaacctggcccaccagcaccagtcgatgttccccaccctggaaatagacattgaaggccaactcaaaaggctcaagggctttgctgagcggatcagacccatggtccgagatggtgtttactttatgtatgaggcactccacggcccccccaagaagatcctggtggagggtgccaacgccgccctcctcgacattgacttcgggacctacccctttgtgacttcatccaactgcaccgtgggcggtgtgtgcacgggcctgggcatccccccgcagaacataggtgacgtgtatggcgtggtgaaagcctataccacacgtgtgggcatcggggccttccccaccgagcagatcaacgagattggaggcctgctgcagacccgcggccacgagtggggagtgaccacaggcaggaagaggcgctgcggctggctcgacctgatgattctaagatatgctcacatggtcaacggattcactgcgctggccctgacgaagctggacatcctggacgtactgggtgaggttaaagtcggtgtctcatacaagctgaacgggaaaaggattccctatttcccagctaaccaggagatgcttcagaaggtcgaagttgagtatgaaacgctgcctgggtggaaagcagacaccacaggcgccaggaggtgggaggacctgcccccacaggcccagaactacatccgctttgtggagaatcacgtgggagtcgcagtcaaatgggttggtgttggcaagtcaagagagtcgatgatccagctgttttagtcacagactgagctgatcccaacaggccctggcagcgtctggacttgtgtaaacagcagcagtcacgttcctcggccgccacaaccaacaccaaagcaggaaaaccattttctgtacttttatatttctgttcaacctgttggtttctacaatgattttaaacattggaaagccagccttgtgtatatttttaaaaattatattcaaaatgagccaaagtgctcagagaccttctatgacacattagtgtcacatggttgcgtgtccagccgaagcagtgtaataaacatctccaatggccactgaa

SEQ ID NO: 105366 - DNA, 520 bp, Homo sapiens
  Payload ID: 669
  Gene Symbol: ADSSL1
  Gene Name: adenylosuccinate synthase like 1
  ENST ID: ENST00000555674
  CDS Start-End: 192-416
cctgcttaccacccaacactgagaaaatcaaactgggccacgtgcccacttgctgccttccttgcagctgagtccctaggcaaggaggccctggatgggggtggccgtgtcaccaaatatccgcttccctggtgataggaggtctgtgggccccactcatctcctgtgtgcttcccccagctaaccaggagatgcttcagaaggtcgaagttgagtatgaaacgctgcctgggtggaaagcagacaccacaggcgccaggaggtgggaggacctgcccccacaggcccagaactacatccgctttgtggagaatcacgtgggagtcgcagtgtgtatcataacagtcttttctgctctctcagtcaaatgggttggtgttggcaagtcaagagagtcgatgatccagctgttttagtcacagactgagctgatcccaacaggccctggcagcgtctggacttgtgtaaacagcagcagtcacgttcctcggccgccacaaccaacaccaaagcaggaaaa

SEQ ID NO: 105367 - DNA, 1791 bp, Homo sapiens
  Payload ID: 669
  Gene Symbol: ADSSL1
  Gene Name: adenylosuccinate synthase like 1
  ENST ID: ENST00000553540
  CDS Start-End: 1-681
atggtggggaggagctgtggggtggcaacccagaggcaaggaggtgggcagaggcccacgaacctggccctgaccctcagctcgtccccagctcacagcacagccctcccctggctgcctccaaggagtctccagttactgagtggccactccgtgccagctcagcccacccctcaccttcccagtgcctgtggaggcccaactagggtgacgctgggagaggagagggcttggaggagccacgggtcaaatgcaggaggccacacctgcctgcccaggaggactgcaggagccggatccttaacacctggaggggagcgggggggcaacaacgccggccacacggtggtggtggatgggaaagagtacgacttccacctgctgcccagcggcatcatcaacaccaaggccgtgtccttcattggcaacggggtggtcatccacttgccaggcttgtttgaggaagcagagaagaatgaaaagaaaggcctgaaggactgggagaagaggctcatcatctctgacagagcccaccttggctgtcgacggacttcaggaagtgcagcgccaggcacaagaggggaagaatataggcaccaccaagaagggaatcggaccaacctactcttccaaagctgcccggacaggcctccgcatctgcgacctcctgtcagattttgatgagttttcctccagattcaagaacctggcccaccagcaccagtcgatgttccccaccctggaaatagacattgaaggccaactcaaaaggctcaagggctttgctgagcggatcagacccatggtccgagatggtgtttactttatgtatgaggcactccacggcccccccaagaagatcctggtggagggtgccaacgccgccctcctcgacattgacttcgggacctacccctttgtgacttcatccaactgcaccgtgggcggtgtgtgcacgggcctgggcatccccccgcagaacataggtgacgtgtatggcgtggtgaaagcctataccacacgtgtgggcatcggggccttccccaccgagcagatcaacgagattggaggcctgctgcagacccgcggccacgagtggggagtgaccacaggcaggaagaggcgctgcggctggctcgacctgatgattctaagatatgctcacatggtcaacggattcactgcgctggccctgacgaagctggacatcctggacgtactgggtgaggttaaagtcggtgtctcatacaagctgaacgggaaaaggattccctatttcccagctaaccaggagatgcttcagaaggtcgaagttgagtatgaaacgctgcctgggtggaaagcagacaccacaggcgccaggaggtgggaggacctgcccccacaggcccagaactacatccgctttgtggagaatcacgtgggagtcgcagtcaaatgggttggtgttggcaagtcaagagagtcgatgatccagctgttttagtcacagactgagctgatcccaacaggccctggcagcgtctggacttgtgtaaacagcagcagtcacgttcctcggccgccacaaccaacaccaaagcaggaaaaccattttctgtacttttatatttctgttcaacctgttggtttctacaatgattttaaacattggaaagccagccttgtgtatatttttaaaaattatattcaaaatgagccaaagtgctcagagaccttctatgacacattagtgtcacatggttgcgtgtccagccgaagcagtgtaataaacatctccaatggccactg

SEQ ID NO: 105368 - DNA, 652 bp, Homo sapiens
  Payload ID: 669
  Gene Symbol: ADSSL1
  Gene Name: adenylosuccinate synthase like 1
  ENST ID: ENST00000556623
  CDS Start-End: 154-345
gcacatatgtgtcatgtccctctggtctggaaggcgtgtagtgtctgagccccactgctgtcccctgcttaccacccaacactgagaaaatcaaactgggccacgtgcccacttgctgccttccttgcagctgagtccctagctaaccaggagatgcttcagaaggtcgaagttgagtatgaaacgctgcctgggtggaaagcagacaccacaggcgccaggaggtgggaggacctgcccccacaggcccagaactacatccgctttgtggagaatcacgtgggagtcgcagtcaaatgggttggtgttggcaagtcaagagagtcgatgatccagctgttttagtcacagactgagctgatcccaacaggccctggcagcgtctggacttgtgtaaacagcagcagtcacgttcctcggccgccacaaccaacaccaaagcaggaaaaccattttctgtacttttatatttctgttcaacctgttggtttctacaatgattttaaacattggaaagccagccttgtgtatatttttaaaaattatattcaaaatgagccaaagtgctcagagaccttctatgacacattagtgtcacatggttgcgtgtccagccgaagcagtgtaataaacatctccaatggccactgaa

SEQ ID NO: 105369 - DNA, 1012 bp, Homo sapiens
  Payload ID: 669
  Gene Symbol: ADSSL1
  Gene Name: adenylosuccinate synthase like 1
  ENST ID: ENST00000555486
  CDS Start-End: 1-546
ggcgtcgtggggaggagcgtggcgtcggcgtcgtggggaggagcgtggcgtcggcgtcgtggggaggagcgtggcgtcggcgtcgtggggaggagcgtggcgtcggcgtcgtggggaggagcgtggcgtcggcgtcgtggggaggagcgtggcgtcggcatggggggcaacaacgccggccacacggtggtggtggatgggaaagagtacgacttccacctgctgcccagcggcatcatcaacaccaaggccgtgtccttcattggcaacggggtggtcatccacttgccaggcttgtttgaggaagcagagaagaatgaaaagaaaggcctgaaggactgggagaagaggctcatcatctctgacagagcccaccttggagactcaggccagcaggaggtgaggtccatgtatacacatctgtcctctgcttctctcctgtctcctgctgccctcacctggcccgcccgacagtgtttgattttcaccaggctgtcgacggacttcaggaagtgcagcgccaggcacaagaggggaagaatataggcaccaccaagaagggaatcggaccaacctactcttccaaagctgcccggacaggcctccgcatctgcgacctcctgtcagattttgatgagttttcctccagattcaagaacctggcccaccagcaccagtcgatgttccccaccctggaaatagacattgaaggccaactcaaaaggctcaagggctttgctgagcggatcagacccatggtccgagatggtgtttactttatgtatgaggcactccacggcccccccaagaagatcctggtggagggtgccaacgccgccctcctcgacattgacttcgggacctacccctttgtgacttcatccaactgcaccgtgggcggtgtgtgcacgggcctgggcatccccccgcagaacataggtgacgtgtatggcgtggtgaaagcctataccacacgtgtgggcatcggggccttccccaccgagcagatcaa

SEQ ID NO: 105370 - DNA, 2383 bp, Homo sapiens
  Payload ID: 670
  Gene Symbol: AJAP1
  Gene Name: adherens junctions associated protein 1
  Uniprot ID: Q9UKB5
  ENST ID: ENST00000378190
  CDS Start-End: 695-1930
cacgccccgcgctccacggcgccctcgccccgcgcgcctctcgtgcccgcctcctgccagtctccgggccgcggccgtctgcagagcgagcgctcagacggagcccccgggcaacttgagtggcgccgatcggcggcggagcctctggcagagccccccgacccggcagcgcggaggggactcgcgtccgtccgcgtcgcgtcaccccaaaccctaagcagcgccgccccatcggcgcggagctccggctggaggcaagagccgcgcgccgggagacacgcaccgtgagcggcagcgccgccggcctccctcctcgccgccccggagggcgaagccgcggctccccagccctttgctgcgccgcgacagcgccggaacacgccccgcctcgctgccgccttcgctgtgccgccggcggagggggccgcgagccccgcgccccggccggaggatgtgcgcccccgcgggccgcccagcctgagccatgcgccccaacggcggcggcgcgccggccggcatggagccccgcgcggccgcgctctgactcgctgtgcgccccgcggccggcgggcggcgggaggcggcggaccgagagccggagaccggcgccgcgggacggaagcgagcgggcgcgggcgccgcgcagatggcctgggcgagccaggtctgaggccccgctccccgaaacgtgaccatgtggattcaacagcttttaggactcagctccatgtccatccgctggccgggccgccccctcggaagccatgcctggatactgatagccatgtttcagctcgccgtggacctgcccgcctgtgaggccctgggcccggggccggagttctggctcctgccgcggtcgccgccccggccgccccggctgtggagttttaggagtggacagccagcgcgggtcccggccccggtgtggagcccccggccgccccgagtggagcggatccacgggcagatgcagatgcctcgagccagacgggcccacaggccccgggaccaggcggccgccctcgtgcccaaggcaggactggccaagcccccagctgctgccaaatccagcccttccctcgcctcttcgtcctcgtcctcgtcctccgcggtggccggtggggccccggagcagcaggccctcctgaggaggggcaagaggcacctgcagggggacggtctcagcagcttcgactccagaggcagccggcccaccacagagactgagttcatcgcctgggggcccacgggggacgaggaggccctggagtccaacacatttccgggcgtttacggccccaccacggtctccatcctacaaacacggaagacaactgtggccgccaccaccaccaccaccaccacggccacccccatgacgctgcagactaaggggttcaccgagtccttggatccccggagaaggatcccaggtggggttagcacaacggagccttccaccagtcccagcaacaacggggaagtcacccagcccccaaggattctgggggaggcctcaggtctggctgtccatcagatcatcaccatcaccgtctccctcatcatggtcatagctgctctcatcacaactcttgtcttaaaaaattgctgtgcccaaagcgggaacactcgtcggaacagccaccagcggaagaccaaccagcaggaggagagctgccagaacctcacggacttcccctcggcccgggtgcccagcagcctggacatattcacggcctataacgagaccctgcagtgttctcacgagtgcgtcagggcatctgtgcccgtgtacaccgatgagacgctgcactcgacgacgggggagtacaaatccacatttaatggaaaccgaccctcctcttctgatcggcatcttattcctgtggccttcgtgtctgagaaatggtttgaaatctcctgctgactggccgaagtcttttttacctcctgggggcagggcagacgccgtgtgtctgtttcacggcggttgtccggaatgccagtggctcctgggcagatgtgcaccccagattcagcctttgtgatagattccaacacgttctggcctcagaccacctttgtggtggggccagactgctctgggcaaagtgaagctggcctttatgctccaaggaagggggcctcgagagcaggcctgcattggctctcggactaattcgcgatcatctttcatacagcaggtacacttcagcaaacctcgttaatgttgatctctttccctttgccaaggccgcttcgttctgaacggagcctgcaaagtcataaaagctcttgaatccgaagcaagtgagaaataaatcatgcactattattattttcaaaaacacattgatcactaataaaaaataagaagtgt

SEQ ID NO: 105371 - DNA, 11666 bp, Homo sapiens
  Payload ID: 670
  Gene Symbol: AJAP1
  Gene Name: adherens junctions associated protein 1
  Uniprot ID: Q9UKB5
  ENST ID: ENST00000378191
  CDS Start-End: 382-1617
tcgccgccccggagggcgaagccgcggctccccagccctttgctgcgccgcgacagcgccggaacacgccccgcctcgctgccgccttcgctgtgccgccggcggagggggccgcgagccccgcgccccggccggaggatgtgcgcccccgcgggccgcccagcctgagccatgcgccccaacggcggcggcgcgccggccggcatggagccccgcgcggccgcgctctgactcgctgtgcgccccgcggccggcgggcggcgggaggcggcggaccgagagccggagaccggcgccgcgggacggaagcgagcgggcgcgggcgccgcgcagatggcctgggcgagccaggtctgaggccccgctccccgaaacgtgaccatgtggattcaacagcttttaggactcagctccatgtccatccgctggccgggccgccccctcggaagccatgcctggatactgatagccatgtttcagctcgccgtggacctgcccgcctgtgaggccctgggcccggggccggagttctggctcctgccgcggtcgccgccccggccgccccggctgtggagttttaggagtggacagccagcgcgggtcccggccccggtgtggagcccccggccgccccgagtggagcggatccacgggcagatgcagatgcctcgagccagacgggcccacaggccccgggaccaggcggccgccctcgtgcccaaggcaggactggccaagcccccagctgctgccaaatccagcccttccctcgcctcttcgtcctcgtcctcgtcctccgcggtggccggtggggccccggagcagcaggccctcctgaggaggggcaagaggcacctgcagggggacggtctcagcagcttcgactccagaggcagccggcccaccacagagactgagttcatcgcctgggggcccacgggggacgaggaggccctggagtccaacacatttccgggcgtttacggccccaccacggtctccatcctacaaacacggaagacaactgtggccgccaccaccaccaccaccaccacggccacccccatgacgctgcagactaaggggttcaccgagtccttggatccccggagaaggatcccaggtggggttagcacaacggagccttccaccagtcccagcaacaacggggaagtcacccagcccccaaggattctgggggaggcctcaggtctggctgtccatcagatcatcaccatcaccgtctccctcatcatggtcatagctgctctcatcacaactcttgtcttaaaaaattgctgtgcccaaagcgggaacactcgtcggaacagccaccagcggaagaccaaccagcaggaggagagctgccagaacctcacggacttcccctcggcccgggtgcccagcagcctggacatattcacggcctataacgagaccctgcagtgttctcacgagtgcgtcagggcatctgtgcccgtgtacaccgatgagacgctgcactcgacgacgggggagtacaaatccacatttaatggaaaccgaccctcctcttctgatcggcatcttattcctgtggccttcgtgtctgagaaatggtttgaaatctcctgctgactggccgaagtcttttttacctcctgggggcagggcagacgccgtgtgtctgtttcacggattccgttggtgaacctgtaaaaacaaaacaaacaaaacaaaacaaaaaagacaaaacctaaaactgagctatctaagggggagggtccccgcacctaccacttctgtttgccggtgggaaactcacagagcaggacgctctaggccaaatctatttttgtaaaaatgctcatgcctatgggtgactgccttctcccagagttttctttggagaacagaaagaagaaaggaaagaaaggaaccagaggcagagagacgaggatacccagcgaaagggacgggaggaagcatccgaaacctaggattcgtcctacgattctgaacctgtgccaataataccattatgtgccatgtactgacccgaaaggctcggccgcagagccggggcccagcgaatcacgcagagaaatcttacagaaaacaggggtgggaatctcttccgatagagtcgctatttctggttaatatacatatataaatatataaatacaaacacacacacacactttttttgtactgtagcaatttttgaagatcttaaatgttcctttttaaaaaaaagaattgtgttataggttacaaaatctgatttatttaacatgcttagtatgagcagaataaaccagtgttttctactttggcaactcacgtcacacacatattacacacatgtgcgcattacacacacacaatacacatacatgcatatagacgcatctattggaaatgcagttccacaggtgagcatgttctttctggtgacctggtattccatcaccattcaccccaggggacagcctcgaccgagacaaggaggcccttaaatgacagcctgcatttgctagacggttggtgagtggcatcaaatgtgtgacttactatcttgggccagaactaagaatgccaaggttttatatatgtgtgtgtatatatatatatatatatatatatatatatatatatatgtttgtgtgtgtatatatatatatatatatatatgtttgtgtgtgtatatatatgtttgtgtatatatatacacatatgcatacatatgatttttttttttcatttaagtgttggaagatgctacctaacagccacgttcacatttacgtagctggttgcttacaaacgggcctgagcccctggttgggtgggtggtggattcttggacgtgtgtgtcatacaagcatagactggattaaagaagttttccagttccaaaaattaaaggaatatatccttatgatgtgtgtgtgtaatatcagggcagaacttagacatacgtgaagggccccggttggtttgaaaacgaaaaatagtcattctgtgtgcaaaccacaaggctgccccagtcaggcagcgccctgacctggcctgtgctgcattgccttcccttgcgcaggtgggcaggtgtggcccgctttttctagggcccaagggtgacttggaatcttgggggaagcctcggcaaagatgccgttctcccgtcagcttccattggccgatggatgtttctgttttgtcaccgagaatcctactataaactacccagtggaaacaggggccccagacctgagcctcagtacagagaatcccaaccacacacactttattaaaaatactgccatgccgccgggcctccctcacaagcctcacctgaaacgggctcactggtgccccagacttgctgtcaacagcgggtgctgtagggatctagggatgcatctcatggcccacgctgtgcctccttaaaggatgtttcctgtccatgggagacgcctaacatggtgtgggtccctgtctccaaagactatatttctcacgcgtggcccacgtgcagctttaatttcagcagtagagtgcatgagccaattcagtgaaatgtcacaggccaggcaaaaaggttaaagatcagacagacagctgaccttactgccctcaatggccaggctgatgacctgattcttcccttgggctcagtctccctctaaaacaccttgtgatatgcttcagaagttcacttttgtatctcctgaaacatgtgaacctagagtaaggcctccggaggtgaaaggattgtttttgtgatgcagcagtgttgagatctgtatccatggtattgctcacaaattaggaaaagttgttctttagtttttgttctgtcatttattttccccccaagctttggcacatcctgagacaatgcaaacatccgccactggcatttggccgtctccaggttcctggcactcacctgcatggcgctccagcctgcagctctctctgcgcgccatccggcctcgtccatcccattctccttcaatcactccctcccgctgaggtgggcctcctgactccaggtgagcacagcgtggtgcgagtgcatggtgagggctggcggcggccaacaggcagtggggtggctgctctggtctctgacattctgagctccagagtgagcccaactaaggaggaggtgacggccggggggccctgttggttcgctgatcatgagaacctaggattcccgagggactcctggtatctgctctgtcaactcccagctgctcagcccccttctctgaccatgtgcggcaccctggatgccctgaactctttcctgggtccataagacatcgagccttggaaggaagcgtaatgcaacaaccctcttgtccccgataagagccacagattcaaggcagggctgtgagacccacacaggcacaaacaccagacaagcaagtgcatgcccattccacacccaaaagtctggttctgtaccaacatgacatccgtcaaggtaaatccacacaaaggctgctatttctggatgattgaggcagtgtctgtagacgtgttactttacttttttaaatggttacctgctctcccagacccctcacctgggattgtcgtctaggtaagaggagataatgagtgaaagtgactgggcctcggaaatgcagccccacccacggtgaagtctgcaccagagcacagacttgtcctacttcgggccatatgtataggtaatgcccatgtactttgtgtgtcggtggctgctgatttggcctgatcagtccttctgcagccttggggcagtgtttcaagctagttggtgtcctctttcctctgcttgacccctggaattcagagtctaatagtagacacctcccatcccccacccaaggcctggtcctttcctttgcttgagcttttattcctcaagaaaagaactccaaggaagggtgatgtggtttgttagggttccccagttttcgtccacttccatcttattcctcggagatcccgcaattgcaaaccccctggcagcctcctggcacctgcatttgcctttaaagcttagaaacagctgggaatgcactccttgtacagtccagtccgttttcagacaaagtcgctgctagtcttcacacgcttgatgtcactttgtctgattggaatatgcgtgtcattgctcttgtttccgagtttggcgtgagaaaggcagggttctccaggcatggtcagggagcttccccaccgtttcccattgggctcagattccagccattaccgagacaaatccaagccttctcacgcaacgtggaagcgtggtgacaccctggggtgtgtggaggtggctgctagtgttcctatttactgccctccttgcacacagaagggagaggccacttaggggaccttgtcttctccgtagtatttctagtccttgccaatcttgaacttgagtggacttctcatattacattcagctcccagaaattcactccagtccttcctggagcattgtgaaattagaaacctgaactcatcagcaaaccccacccactctttgaatcgggacaccaggaaacccgttactactaatgtgatcttaccatcttaatcctttctttcaaaaatacgtgactctttcacagccatattttagcgtcaggaaaagccatgcttagagggattggtcttcaaaattttgtgtgtgatgcccaatgtgtaggccatattgaaaggtgaacgcaccaaaggatcgaccctgtcaccttggatggtctctattttgaccctgttgcccatggagaggtattttacccttttgcttctttgctcaggtggtccagggttgtctgtagcccaggaagcggactgaccctgtatcttgaaagataagaccaggaaccgggagtgaggctgggactctcactcagccttttcacggtcagtcttggtcttctcatacttatttcaagatggcaccaggacacaccttcttttgtccacctgttgacaccatcaccctctttcatcaaggtgatctctttcatcagggcatatatgagacttggtgctccaccagactgtcttctcccctacccctgccccttccacaaagccatttctcaagtcgcagtgggaaaagataccaagacacctgatttcttgaaccattcttgcttcagcatgtgaattctttaagacactactcacatatgccattggagagaaacaacccgttctgcatcaccataatgaaccgatcagtcattcatcctcttattcaacaaatacttgttccacttctaccacactggccatacagttggaggcaagatgggcacagttatggccttgtgggctttatattctacagtgggaggaggtggatggttaatgtgaaagcaaaccaaaataatttccagagagagaagaggcaggaagagagcagagcagagtgatggggctgggggcagagaaggagagaggggaagagggagagagtggggggcattgaaggggaagaaagagaggcaggggttgtctacgtctcctcctcctgcgacccatcacctactggaaaattaccacttgctgcttgagggttggtctggtgttggatggaggaagaaggccttagtcttagctcttggataaaatgcagtgcagcactgaagataagacatcgcagttgttacgacgcctggttctccaccaaattcctctgtcattccagcaagagtggaagcagaggggcaggggcaggggcaggatgagggctgctgccctggtgatgagcttgccccatccctgggcactggctctgcccagcccctcccatgttggtcccatctgtcaggttgccaggccaagcaggtctcaggtcagccaggtctcaaggaggataagggggttcaacgtcagcgacttggcccacggggcacgggcaccttggggatgccattcttcttggtgccagaaggcagctgcatctccagaagctcccccagcactgagctcacttagtggcatccttcttaaacagcatctgcttttaagtaagcagctattccaaaacatgccgtgattcatgtaatttttgagtggttactttggtgcagtttgtcaatttgctctaccatactgttttttgattatttgtttgttttctagtgtaaatagcacagcccacataaatgagcgaaactcatcatctgaggatctttgattattcttccccacttattgtacattgatgtgccgcctgctaggaagataaactccctctttgctcactctgagccaggatctctgtgttagttacactcagccttatctgagcattccagggaggtcttaaatgaatgtttggggttttgaaacatgctaccagcccttccttccaaagagcatgaagcatggctctgtgtggttttgtgtgtctaggtttagagcttgtatttggatgtaaggagtgactaaaaacaggtctaggcagagaactgctatcttttaaaccaccccagccctcagtcgaacagaaagaatgagcgtcttctgatgtcaaatcattctagaaaggtcttagctagtgagcacaaagtagccaatcccgggagtttatatgggcctccatgtgaccaagccatccctagctaggaaacttaactctttgcacaacctccctttatgctgaagggcccttgggaacatgggaacatttgcactttgtcagaggagtggccccaccctactctctgcctgaaacacaaagcagctcccctcagaacagccagcccggtgcagaagcacttgaacttctcatcttccatcttatttcactttggttgcagggagttaaatacataggccacagcagactaagggagcggtgtgcacaatggcccccagaatatccagtgacccaagtgatgttagtcttagggtccctaaggcagtagggcatggggaggaaagttctctccatcgattcccaaacacaccagccacaagtccacactccacacctgtaaacgcacagcccatgccccattgtaaaggtgactgaagagaatggtcaactcggtggtgatgggcctgttttggagctaaaagcataaaatgaatcctccctgtagctccattgccttttcctcgtgaaggattccctgctaaatgttctaagagttactgtacatagaatcaagagagcagttttgaatgagccgtaaatctgagtcatatataagaggcataatataaattgggccaagcttgcccatgtgggacacacaggtttatagagattaaacactagtgagtagcgggggaagggaacagtgactgtataaatggccatataaatgacctacttgtcttctcatgtaggctggaatcagaacctacgtatgctgtagataacagtcaattaaatgggttaatgttctaagccaagagagttctaagccaagacatgtgcttgggactggattaactcttgtcaatatcttggattccatagtaaaacatctgttaagtaacatgcggcaggaaaggatgcagggagcattggactgtaggaaattctcctttatacaagttaattagttttgtctctggtggctgtctcttaaaacagaatcccctggagacccgggttttcattttgtaattcaacacccaaatatttgcaacactaaataacaactccctaaagacttcagtcttgcatgggcataagcaactcacactggttagcttttgtcagatttcgtcgtttccgcagcaaaatttcttagtgttgatgttgatagcttctgggttggcaaactggcagttcactctagtcttactgggttgggcaagtccttgcccctagaaaattggggatagctttggccatgggaggagcaagaacactacgcagtcgtaagctctgttttttgttttgttttgttttgttttgttttcggcaccattatgtacgatgaagacttacagccactgctaatacagcataggggacactttgaggagccctagtatcattgtttgaaatcattgtacagggaactgcaggggtgaacaccattgtaccaatccccgggccagtgtctcatttcctaacagaatcatcccattcttgttcactcttcagtcatcccaagccaaaagggaaaattcgaaacccactgtgacaccccaaccctaatttccaacctttggaggactcacctggggcagaagggagaaagggctttgctgaagtctcaggctgccgagagccatgtatgggcataggagcaagctgatggcatggctcttgacaaggttttctatagggcagcagctgctgctcccaggggaaccctctcctgttgcctccgcagtctattctggggtggaaacaccattctctattatttctctcacatacatgtggatttctaatatcaagttatgtgactgcctaccacttaaggcctacaaaaccacatgggagtttctttattgcgtatgcagccagtcaacatgaatgggaccctagaaactgtgaggagcaggattctctaaggtgctcttagatacggtgtcacttccacatacaagcacaattctcccagttaaggggctggaagacaagcggggcaactggttttgaaaagcccgctggcgtgccagagggggtgtttgcccacaccctccttgaatttaactgccacaatctatccgcagatgtgttttgttctatttcttgtttttcactagcgtttgcgttgcttcctctgaagccagagggtgaaaggccctagcaaagttagttatcagtcaactgatgataactgtgatccttaaagatgaattcccagcctgaggtgacacacagaggttcagcagacgtctcaggatctgtcatatgtcatgttgcttggtgtgaagatggaagaacaaagtccacatcagtttctgctccttcaaacagtgtgtcgatatgaaacattgagatttggcagaaacatgtgcctagtttgcagcaccaaatactggtcttctcagaagtgtttctgtttttttgtttttgtttttgtttttgtttttgtttttgttttgtttaatttcctcttctggcatcccaatttggatcatttcctctctttctttcctggagaaacaggatggcaggtgctggagcccagagagggggtcaccctccagctaaaatgatttaaatggaaaggagaatgacagcaaagcctcacgtgaactttaatgaccttatcaatgacctttactaactgactcttggtacccggattgttgagaggtgagtgggactaaaagccaggatcaagatcaggttgctccacacatttgcagatcaggaaccccgggaatatgagttagacccagaaagtattgaactggacattgaatgaagcttgaggccatgcattgataacatttttagagtctgttacattattttctcaaaaggaacacatgtttactacaaaccatttagaaaataccaataaccaaacagaagggaaatgtctggaaccttccagttgtttaattctgtagaaactgttcacgaaaggctgaatgagtggggacaagtcacagagatctcgccatggttagcaccagggacaagtctggctctaatgtatgttttatgaagtctgattagctttgaaatgcatctttgccagctgaacttgtcatgcactaaacttcccattgatcattagagtgtctacgattaagtggaaaaggtggtcaaccatttggatgtttgactttcacaacatcaagcattggccattgggcgtatctgggcattggtatggaataaacaggatactcagtgaaacatccaaactattgactggatttttcccatggggcatctgtctaagagtcacagatctgagaaatagaaggaccaggtccgtgtggatgctcctagtgcgttcaaataacccttgaattcaccaggtctcattgcatttatttaaagatggagcccattgtcccccctcctcctcagctcacccatggaactagaaattcacaaacctgaagctgaaccacaggacaagaaattaaacagcaacggccacatggcctcttttttcacaggttttgcattgaatgttttagaactttattcccccgccccctcacccatgtataccaaaactggttttattttcattttcctaaattattttctgatacaataaactgttaactgtttatttatacttttacaaggagcacttgttatttttcaaaaggaaaacaaaagcctctctgttttcatgttctccgtatatctataccacagctgtctctatagacgtatttatatatcatcttcttgagagagttaacctcctgtagtttaatgttgtgtttcttttctttaaatgcatatcataatcatgttaataaacaaaaatgacacaatatatgtgggtggggggcggggggcaggtggctgggtgtgatttccgtacaggtgaacttttattccagatttttttaagttgtttctgtatttcaaagctatgtatttggaaaacattgtaaatgaaacacctatattaactttcctgtgtatatttagtactctgatgttgctattaaaaaaaaaaacataatatgaaaaaaaaaaaaaa

SEQ ID NO: 105372 - DNA, 3438 bp, Homo sapiens
  Payload ID: 671
  Gene Symbol: ADGRA1
  Gene Name: adhesion G protein-coupled receptor A1
  Uniprot ID: Q86SQ6
  ENST ID: ENST00000392606
  CDS Start-End: 130-1521
cccgtggggggctcatcctacccacagtaagagcatcctggcgtgaccccactgaggacttcacctcctctcccttggtggacacctatccaggtgggcatcgtgctgcactattctacactgtccaccatgctgtggataggagtgaccgccaggaacatctacaagcaggtgaccaagaaggcccctctgtgcctggacacagaccagccaccgtaccccaggcagcccctgctcaggttttacctcgtcagcggaggggtcccctttatcatctgtggggtcacggctgccacgaacatcaggaattacgggacagaggacgaggacacggcgtactgctggatggcctgggagcccagcctgggcgccttctacggcccagccgccatcatcaccctggtcacctgtgtgtacttcctgggcacctacgtgcagctgcggcgccacccagggcgcaggtacgagctgcgcacacagcccgaggagcagcggcggctggcgacacccgagggcggccgtgggatccggccaggcaccccacccgcacacgatgcccccggcgcctccgtgctgcagaacgagcactcattccaggcacagctgcgcgccgccgccttcacgctgttcctgttcacggccacgtgggccttcggggcgctggcggtgtcacagggccacttcctggacatggtcttcagctgcctgtacggcgccttctgcgtgaccctgggactcttcgtgctcatccaccactgcgccaagcgtgaggacgtgtggcagtgctggtgggcatgctgcccgccccgcaaggacgcccaccccgcacttgacgccaacggggccgcgctgggccgcgccgcctgcctgcactcgccgggactgggccagccacggggcttcgcgcacccaccgggcccctgcaagatgaccaacctgcaggccgcgcagggccacgccagttgcctgtcaccggccaccccgtgctgcgccaagatgcactgcgagccactgacggcggacgaggcgcacgtgcacctgcaggaggagggcgccttcgggcacgacccccacctgcacgggtgccttcagggcagaactaagccgccctactttagccggcacccagcagaggagcccgagtacgcctaccacatcccatccagcctggatggcagcccccgcagctcgcgcacagacagcccccccagctctctggatggcccggcggggacacacacgctggcctgctgcacccagggcgaccccttccccatggtcacccagcccgagggcagtgatgggagccctgccctctacagctgccccacgcagccgggcagggaggcagcgctcgggcccggccacttggagatgctgcggaggacacagtccctgccctttggtggccccagccagaacgggctgcccaagggtaaattgctagaaggcctgccgtttggcaccgacgggaccggcaacatccgaacgggaccctggaaaaacgaaactactgtgtagatgggggcagaggacacggtgttcctggaggagcttcagagcagagtggggggcccatctgccacatgaggtcactgggggtaccgaagtgaccccgcctttcagaagccgttcacacccctgccccttccttgtgatcacacccctgccccttccttgtgatcacacccctgccccttccttgtgatcacacccctgccccttccttgtgaaagacctcagcggggaaacgctccgggccacgcccactccccttatcccaattccgcgtgctggtcccgcacacggtcatccggtttctgtcctgtggtctccagtcctggggcaccctagaggcagagcaggggattccatcaaaggacccactgagaccccagcatggccctgcccgagatgccctgctgcccacggagtcctggcttcccctggtgtggccgggcagggccgagatcgcaggagggggctgccctgacctttcccagtgttcaatgtgtgtgtcttgcgttctactccgggggtggcggcggcaggtctgtccccagcattctcgctctgggcagaaccctcgggaccctccgctgtcgtgtgtctgagccacccctgcagcttcacagggcccctgcacacctctgcccactcagtgtgccctgtcagccctgtccttgtcgtagccccagccctgcagggctgagagcaccacagatgctgggggctgctctggactttggggatggctgtcagcctcagagggccaatggggggctttcacgggcccaaggcttgggaaaatgcccagacatcctttagtgaagactcgacttccaaaaccagccaccgctgggactggattccactccagtataggcacttagcaacacgaaggtttattccaaaaagaaaaggggctgacagacgggagattctcatggacaaaatccctttccctttttctcgtctccatgaacatctgggtaccaagccctgactcaaaggacagatgtggatgacagcaagacttctgtgaaagcaagtggcccgtccctaggtgggagggagtccagagggtcatgggtgtgaaactgtgcacagctttccctccctccctcttcctccttgtctgtgacacatgtgcacccacacacacacacacaaacacatgtgcatatcacacacatgcacacacacaaacacatgtgcatatcacacacgcgcacacacccaaacacgtgcatatcacacacatgcacacacacaaacacgtgcatatcacacacatgcacacaaacgtgcatatcacacacacgcacacacacccaaacacgtgcatatcacacacacgcacacacacaaacacgtgcatatcacacacaaacacacgtgcacacatacttaacacacacttgcacctgctgtgcacatgtgcacacacacgtagtagtgtgttttccagccacccacacactgggtttgcattggagattgtttcaccctgcaaacgtcaacgtcagcagactcgtcggtgcgctgtgctatccggttgggaggtctcaccaggagcagagcctccctaacgtgcacctccgagaagaggggtgtcggggagtgttcccagcacctgctcggtggaagggctctccggagactggcactcagtatctgagtatgaggagcctcacttcccggggtgtcggtaaacttgaccgtgactcagtaacccacagcgtgctcctcccagcaaaccccgtgtgtccttacaggtcgaccagacgggccgtcggaggaccaccaggtggctctgcctctgcctcaccttctcacctgcttccatagctgatgtgaacccgaatccccacgctgtgctgtgtacgcactgtaggtgcagaaccgtccacacaaaaatacagtcttggcattgtt

SEQ ID NO: 105373 - DNA, 4283 bp, Homo sapiens
  Payload ID: 671
  Gene Symbol: ADGRA1
  Gene Name: adhesion G protein-coupled receptor A1
  Uniprot ID: Q86SQ6
  ENST ID: ENST00000392607
  CDS Start-End: 437-2119
gtcgccgcgggaggtgcgcgcagaggcggcggcgctgctggccgggctgggccgctcgtgcgcggggctgtgactcaccggccggcgccgcagccccgcaatctgttgataactcggtcccagctcggccgctgccctcgcgaatggagagcgggtccccggcggggggagcgcagcgcgtctgtctccgggagcgcggcccggccgccccggcagccgcttcggccacagcagatgggagcagctcccggactgcgcccgccccgccgcggtcaccctgaggccaggggcccgggagcgcgacctcctggccgccgtctgggactttgaccttccagaggccatggaggctggcggggagcagggcgccacctgatcgcctccccctggacgcctcctccagcggcgctcacgcttccgcaactttgcagcgctcatggatctgaagacagtgctctccctgccccgctacccaggggagttcctgcaccccgtggtgtacgcgtgcacggccgtcatgctgctctgcctcctggcctccttcgtcacctacatcgtgcaccagagcgccatccgcatcagccgcaagggccggcacacgctcctgaatttctgcttccacgcggccctgaccttcactgtgttcgccggcggcatcaatcgcaccaagtaccccatcctgtgccaggcggtgggcatcgtgctgcactattctacactgtccaccatgctgtggataggagtgaccgccaggaacatctacaagcaggtgaccaagaaggcccctctgtgcctggacacagaccagccaccgtaccccaggcagcccctgctcaggttttacctcgtcagcggaggggtcccctttatcatctgtggggtcacggctgccacgaacatcaggaattacgggacagaggacgaggacacggcgtactgctggatggcctgggagcccagcctgggcgccttctacggcccagccgccatcatcaccctggtcacctgtgtgtacttcctgggcacctacgtgcagctgcggcgccacccagggcgcaggtacgagctgcgcacacagcccgaggagcagcggcggctggcgacacccgagggcggccgtgggatccggccaggcaccccacccgcacacgatgcccccggcgcctccgtgctgcagaacgagcactcattccaggcacagctgcgcgccgccgccttcacgctgttcctgttcacggccacgtgggccttcggggcgctggcggtgtcacagggccacttcctggacatggtcttcagctgcctgtacggcgccttctgcgtgaccctgggactcttcgtgctcatccaccactgcgccaagcgtgaggacgtgtggcagtgctggtgggcatgctgcccgccccgcaaggacgcccaccccgcacttgacgccaacggggccgcgctgggccgcgccgcctgcctgcactcgccgggactgggccagccacggggcttcgcgcacccaccgggcccctgcaagatgaccaacctgcaggccgcgcagggccacgccagttgcctgtcaccggccaccccgtgctgcgccaagatgcactgcgagccactgacggcggacgaggcgcacgtgcacctgcaggaggagggcgccttcgggcacgacccccacctgcacgggtgccttcagggcagaactaagccgccctactttagccggcacccagcagaggagcccgagtacgcctaccacatcccatccagcctggatggcagcccccgcagctcgcgcacagacagcccccccagctctctggatggcccggcggggacacacacgctggcctgctgcacccagggcgaccccttccccatggtcacccagcccgagggcagtgatgggagccctgccctctacagctgccccacgcagccgggcagggaggcagcgctcgggcccggccacttggagatgctgcggaggacacagtccctgccctttggtggccccagccagaacgggctgcccaagggtaaattgctagaaggcctgccgtttggcaccgacgggaccggcaacatccgaacgggaccctggaaaaacgaaactactgtgtagatgggggcagaggacacggtgttcctggaggagcttcagagcagagtggggggcccatctgccacatgaggtcactgggggtaccgaagtgaccccgcctttcagaagccgttcacacccctgccccttccttgtgatcacacccctgccccttccttgtgatcacacccctgccccttccttgtgatcacacccctgccccttccttgtgaaagacctcagcggggaaacgctccgggccacgcccactccccttatcccaattccgcgtgctggtcccgcacacggtcatccggtttctgtcctgtggtctccagtcctggggcaccctagaggcagagcaggggattccatcaaaggacccactgagaccccagcatggccctgcccgagatgccctgctgcccacggagtcctggcttcccctggtgtggccgggcagggccgagatcgcaggagggggctgccctgacctttcccagtgttcaatgtgtgtgtcttgcgttctactccgggggtggcggcggcaggtctgtccccagcattctcgctctgggcagaaccctcgggaccctccgctgtcgtgtgtctgagccacccctgcagcttcacagggcccctgcacacctctgcccactcagtgtgccctgtcagccctgtccttgtcgtagccccagccctgcagggctgagagcaccacagatgctgggggctgctctggactttggggatggctgtcagcctcagagggccaatggggggctttcacgggcccaaggcttgggaaaatgcccagacatcctttagtgaagactcgacttccaaaaccagccaccgctgggactggattccactccagtataggcacttagcaacacgaaggtttattccaaaaagaaaaggggctgacagacgggagattctcatggacaaaatccctttccctttttctcgtctccatgaacatctgggtaccaagccctgactcaaaggacagatgtggatgacagcaagacttctgtgaaagcaagtggcccgtccctaggtgggagggagtccagagggtcatgggtgtgaaactgtgcacagctttccctccctccctcttcctccttgtctgtgacacatgtgcacccacacacacacacacaaacacatgtgcatatcacacacatgcacacacacaaacacatgtgcatatcacacacgcgcacacacccaaacacgtgcatatcacacacatgcacacacacaaacacgtgcatatcacacacatgcacacaaacgtgcatatcacacacacgcacacacacccaaacacgtgcatatcacacacacgcacacacacaaacacgtgcatatcacacacaaacacacgtgcacacatacttaacacacacttgcacctgctgtgcacatgtgcacacacacgtagtagtgtgttttccagccacccacacactgggtttgcattggagattgtttcaccctgcaaacgtcaacgtcagcagactcgtcggtgcgctgtgctatccggttgggaggtctcaccaggagcagagcctccctaacgtgcacctccgagaagaggggtgtcggggagtgttcccagcacctgctcggtggaagggctctccggagactggcactcagtatctgagtatgaggagcctcacttcccggggtgtcggtaaacttgaccgtgactcagtaacccacagcgtgctcctcccagcaaaccccgtgtgtccttacaggtcgaccagacgggccgtcggaggaccaccaggtggctctgcctctgcctcaccttctcacctgcttccatagctgatgtgaacccgaatccccacgctgtgctgtgtacgcactgtaggtgcagaaccgtccacacaaaaatacagtcttggcattgtttgttctttgtgaggctggttaatagcatccccgtgtgtttttctcaccctcgatggggtagaggggcacctgaatgtgtggcccccgtctgtgtcctggatcctggggcagggctgctctccctggcccctgcagcccctcatgaactttccaccctcagtgcccccggctgagcagagaggcgtcccaccattcaaccaaagaaagtcaacattgaacattaaacctctgtgtgtttctatactga

SEQ ID NO: 105374 - DNA, 6004 bp, Homo sapiens
  Payload ID: 671
  Gene Symbol: ADGRA1
  Gene Name: adhesion G protein-coupled receptor A1
  Uniprot ID: Q86SQ6
  ENST ID: ENST00000607359
  CDS Start-End: 1-3840
atgcgaggccacgggaaccactcgcggctgaaatccagatgtgcttctctgggcaacgtccatcaccaccaggcacagatggcgcacggtgcacactgccgagggggccggacaccacagtcaccagacagccggggcccaaccgctgggggccacacccggggcagatggacgtaccggcccatcgaggccctcatcaacgtcagctttcccggagcaaagggtgggagaacggccgagggcgagccctcatgggcgtgggtcttcagaagtggctatttgcagagacaggctcttcctgggcttcccgtctccacccgagtggctgcctgctggtggcaacaccatccaggcagggactcagggttcttgggacctggatttattgacctgctcagagaggagcccagcggccgtgcagatgggaaggcagctgctcagaaaacagggcgtctttatttgttcccgactttcctaggcaacaaattaccagaggccgccgactcgtttggggaaattgcttctgggaacagtgttatttttacctccgtcttgcaatcctctcacccacctggcaccccaccgcccagcgcacgcaagccaagtcccggagctgccatgctcgtctgtgaggaaacgctggagctgggtgcccagggctgctgggggtccacgagcccccggggccaggccgtgagcttggtcggtgggcccacggccggaggctccaggctgggaggggctggctgcaccatgggcctgctcatggccctccaggccagacgccccagggacggcacctgggctgaccctcgaagatgctccagggctgtggagggctcgggcctcaccagggctgcccttgtgagtccagggccatcgggggtggaggaggacaccaggagggaaggctgcgtgcttgtgggctcctggaggtcgtccacccacagaagccgtgttctgattatcaacacgccctctggcaggaccccctggagccagggctccctcggcagcaccgggcgctacaaccagacccgggcaccaggcagccagcagcaggggctgtgctcggatgcagctctacacgaggattttgtgccggagcctactcctgccttctttcaataccctccacaagccttcagcaaaaccaaggttcgcgacttggggaggggaggcctttatgccttttccaaggaggagaaggtatctgaggcccagcgggtagaggcctacgagacccacggccttggcctgagtacaggccgacagaaccctgtgccgtccccctgtaagcctggatgcgtgtgccagggccttgcgctggacgcagaggcctggccgaggcaccctggacgcaggccctgtgcggccaaggaggcctgcctgggcccacctggctgcagcggggagctgagcctccctgaggaggaaggaatcgcacctggggcagcaacagcagctcctgcctgggtccctcatggccgcgtgagccgcttcctcactgtaaagctcttcacctatgtaactatgtatcaatgtaaacaggaacgtatcctccgcctctgcatctctggtgaatccgggcgatacgtgcggcgctcacgcttccgcaactttgcagcgctcatggtgagtacgggggtcccgggggtcctgcagctgggggctaggccgctgcgggggggcggccacccgtatggggactcccaggctggaaaagttgtggaatggcgagctggtgaccgggcttccgggctcagtgccggggaaagaaggttcctcagccagtcggagctgcagacctggccccggacacctcactgtgtaggaaagaaggttcctcagccagttggagctgcagacctagccccggacacctcactgtgcaggaaagaaggttcctcagccagtcggagctgcagacctggccccggacacctcacccgcagggaggaagattccttcaggcagctggcattccccaggtttgaagaggtcactttcccacctctcactgctgcagaaagagcaccctctgtccacggtggacactctctagccagccagggcctcgtcttggctggacggacaagaagtgtggcctcaggagggaagcaggagctctcgggcccgctggctgcctgcatcccgacacaggatctgaagacagtgctctccctgccccgctacccaggggagttcctgcaccccgtggtgtacgcgtgcacggccgtcatgctgctctgcctcctggcctccttcgtcacctacatcgtgcaccagagcgccatccgcatcagccgcaagggccggcacacgctcctgaatttctgcttccacgcggccctgaccttcactgtgttcgccggcggcatcaatcgcaccaagtaccccatcctgtgccaggcggtgggcatcgtgctgcactattctacactgtccaccatgctgtggataggagtgaccgccaggaacatctacaagcaggtgaccaagaaggcccctctgtgcctggacacagaccagccaccgtaccccaggcagcccctgctcaggttttacctcgtcagcggaggggtcccctttatcatctgtggggtcacggctgccacgaacatcaggaattacgggacagaggacgaggacacggcctgctggatggcctgggagcccagcctgggcgccttctacggcccagccgccatcatcaccctggtcacctgtgtgtacttcctgggcacctacgtgcagctgcggcgccacccagggcgcaggtacgagctgcgcacacagcccgaggagcagcggcggctggcgacacccgagggcggccgtgggatccggccaggcaccccacccgcacacgatgcccccggcgcctccgtgctgcagaacgagcactcattccaggcacagctgcgcgccgccgccttcacgctgttcctgttcacggccacgtgggccttcggggcgctggcggtgtcacagggccacttcctggacatggtcttcagctgcctgtacggcgccttctgcgtgaccctgggactcttcgtgctcatccaccactgcgccaagcgtgaggacgtgtggcagtgctggtgggcatgctgcccgccccgcaaggacgcccaccccgcacttgacgccaacggggccgcgctgggccgcgccgcctgcctgcactcgccgggactgggccagccacggggcttcgcgcacccaccgggcccctgcaagatgaccaacctgcaggccgcgcagggccacgccagttgcctgtcaccggccaccccgtgctgcgccaagatgcactgcgagccactgacggcggacgaggcgcacgtgcacctgcaggaggagggcgccttcgggcacgacccccacctgcacgggtgccttcagggcagaactaagccgccctactttagccggcacccagcagaggagcccgagtacgcctaccacatcccatccagcctggatggcagcccccgcagctcgcgcacagacagcccccccagctctctggatggcccggcggggacacacacgctggcctgctgcacccagggcgaccccttccccatggtcacccagcccgagggcagtgatgggagccctgccctctacagctgccccacgcagccgggcagggaggcagcgctcgggcccggccacttggagatgctgcggaggacacagtccctgccctttggtggccccagccagaacgggctgcccaagggtaaattgctagaaggcctgccgtttggcaccgacgggaccggcaacatccgaacgggaccctggaaaaacgaaactactgtgtagatgggggcagaggacacggtgttcctggaggagcttcagagcagagtggggggcccatctgccacatgaggtcactgggggtaccgaagtgaccccgcctttcagaagccgttcacacccctgccccttccttgtgatcacacccctgccccttccttgtgatcacacccctgccccttccttgtgatcacacccctgccccttccttgtgaaagacctcagcggggaaacgctccgggccacgcccactccccttatcccaattccgcgtgctggtcccgcacacggtcatccggtttctgtcctgtggtctccagtcctggggcaccctagaggcagagcaggggattccatcaaaggacccactgagaccccagcatggccctgcccgagatgccctgctgcccacggagtcctggcttcccctggtgtggccgggcagggccgagatcgcaggagggggctgccctgacctttcccagtgttcaatgtgtgtgtcttgcgttctactccgggggtggcggcggcaggtctgtccccagcattctcgctctgggcagaaccctcgggaccctccgctgtcgtgtgtctgagccacccctgcagcttcacagggcccctgcacacctctgcccactcagtgtgccctgtcagccctgtccttgtcgtagccccagccctgcagggctgagagcaccacagatgctgggggctgctctggactttggggatggctgtcagcctcagagggccaatggggggctttcacgggcccaaggcttgggaaaatgcccagacatcctttagtgaagactcgacttccaaaaccagccaccgctgggactggattccactccagtataggcacttagcaacacgaaggtttattccaaaaagaaaaggggctgacagacgggagattctcatggacaaaatccctttccctttttctcgtctccatgaacatctgggtaccaagccctgactcaaaggacagatgtggatgacagcaagacttctgtgaaagcaagtggcccgtccctaggtgggagggagtccagagggtcatgggtgtgaaactgtgcacagctttccctccctccctcttcctccttgtctgtgacacatgtgcacccacacacacacacacaaacacatgtgcatatcacacacatgcacacacacaaacacatgtgcatatcacacacgcgcacacacccaaacacgtgcatatcacacacatgcacacacacaaacacgtgcatatcacacacatgcacacaaacgtgcatatcacacacacgcacacacacccaaacacgtgcatatcacacacacgcacacacacaaacacgtgcatatcacacacaaacacacgtgcacacatacttaacacacacttgcacctgctgtgcacatgtgcacacacacgtagtagtgtgttttccagccacccacacactgggtttgcattggagattgtttcaccctgcaaacgtcaacgtcagcagactcgtcggtgcgctgtgctatccggttgggaggtctcaccaggagcagagcctccctaacgtgcacctccgagaagaggggtgtcggggagtgttcccagcacctgctcggtggaagggctctccggagactggcactcagtatctgagtatgaggagcctcacttcccggggtgtcggtaaacttgaccgtgactcagtaacccacagcgtgctcctcccagcaaaccccgtgtgtccttacaggtcgaccagacgggccgtcggaggaccaccaggtggctctgcctctgcctcaccttctcacctgcttccatagctgatgtgaacccgaatccccacgctgtgctgtgtacgcactgtaggtgcagaaccgtccacacaaaaatacagtcttggcattgtttgttctttgtgaggctggttaatagcatccccgtgtgtttttctcaccctcgatggggtagaggggcacctgaatgtgtggcccccgtctgtgtcctggatcctggggcagggctgctctccctggcccctgcagcccctcatgaactttccaccctcagtgcccccggctgagcagagaggcgtcccaccattcaaccaaagaaagtcaacattgaacattaaacctctgtgtgtttctatactga

SEQ ID NO: 105375 - DNA, 6270 bp, Homo sapiens
  Payload ID: 672
  Gene Symbol: ADGRA2
  Gene Name: adhesion G protein-coupled receptor A2
  Uniprot ID: Q96PE1
  ENST ID: ENST00000315215
  CDS Start-End: 364-3729
gcggcggcagcaggagcccggcgcgatccgctaggtcccagcccagcgcccagcgagcaggcgacgcggaggggccgggcctccagtgtcccgagggccgggcgctgagactccggccgcgcagctgggagctgcccgcgctgcgctgacagccgcgccgacgtcctccccgccggggcgctcgcaggacatgcccccggggcgcggcggcggggaccccggggctcgcctccgcccagggcccccctccacgccctcgggagccccgggcccccgctgagcactcctcccgcacgcctgggtccctccggccggcgcgcagcccggccccagcgctgtgggtccccgcggggcgatgggttgatgggcgccgggggacgcaggatgcggggggcgcccgcgcgcctgctgctgccgctgctgccgtggctcctgctgctcctggcgcccgaggctcggggcgcgcccggctgcccgctatccatccgcagctgcaagtgctcgggggagcggcccaaggggctgagcggcggcgtccctggcccggctcggcggagggtggtgtgcagcggcggggacctcccggagcctcccgagcccggccttctgcctaacggcaccgttaccctgctcttgagcaataacaagatcacggggctccgcaatggctccttcctgggactgtcactgctggagaagctggacctgaggaacaacatcatcagcacagtgcagccgggcgccttcctgggcctgggggagctgaagcgtttagatctctccaacaaccggattggctgtctcacctccgagaccttccagggcctccccaggcttctccgactaaacatatctggaaacatcttctccagtctgcaacctggggtctttgatgagctgccagcccttaaggttgtggacttgggcaccgagttcctgacctgtgactgccacctgcgctggctgctgccctgggcccagaatcgctccctgcagctgtcggaacacacgctctgtgcttaccccagtgccctgcatgctcaggccctgggcagcctccaggaggcccagctctgctgcgagggggccctggagctgcacacacaccacctcatcccgtccctacgccaagtggtgttccagggggatcggctgcccttccagtgctctgccagctacctgggcaacgacacccgcatccgctggtaccacaaccgagcccctgtggagggtgatgagcaggcgggcatcctcctggccgagagcctcatccacgactgcaccttcatcaccagtgagctgacgctgtctcacatcggcgtgtgggcctcaggcgagtgggagtgcaccgtgtccatggcccaaggcaacgccagcaagaaggtggagatcgtggtgctggagacctctgcctcctactgccccgccgagcgtgttgccaacaaccgcggggacttcaggtggccccgaactctggctggcatcacagcctaccagtcctgcctgcagtatcccttcacctcagtgcccctgggcgggggtgccccgggcacccgagcctcccgccggtgtgaccgtgccggccgctgggagccaggggactactcccactgtctctacaccaacgacatcaccagggtgctgtacaccttcgtgctgatgcccatcaatgcctccaatgcgctgaccctggctcaccagctgcgcgtgtacacagccgaggccgctagcttttcagacatgatggatgtagtctatgtggctcagatgatccagaaatttttgggttatgtcgaccagatcaaagagctggtagaggtgatggtggacatggccagcaacctgatgctggtggacgagcacctgctgtggctggcccagcgcgaggacaaggcctgcagccgcatcgtgggtgccctggagcgcattgggggggccgccctcagcccccatgcccagcacatctcagtggagctgagcgcctttcccagggaggtggggggcgccggggcagggctgcaccccgtggtatacccctgcacggccttgctgctgctctgcctcttcgccaccatcatcacctacatcctcaaccacagctccatccgtgtgtcccggaaaggctggcacatgctgctgaacttgtgcttccacatagccatgacctctgctgtctttgcggggggcatcacactcaccaactaccagatggtctgccaggcggtgggcatcaccctgcactactcctccctatccacgctgctctggatgggcgtgaaggcgcgagtgctccataaggagctcacctggagggcaccccctccgcaagaaggggaccccgctctgcctactcccagtcctatgctccggttctatttgatcgctggagggattccactcattatctgtggcatcacagctgcagtcaacatccacaactaccgggaccacagcccctactgctggctggtgtggcgtccaagccttggcgccttctacatccctgtggctttgattctgctcatcacctggatctatttcctgtgcgccgggctacgcttacggggtcctctggcacagaaccccaaggcgggcaacagcagggcctccctggaggcaggggaggagctgaggggttccaccaggctcaggggcagcggccccctcctgagtgactcaggttcccttcttgctactgggagcgcgcgagtggggacgcccgggcccccggaggatggtgacagcctctattctccgggagtccagctaggggcgctggtgaccacgcacttcctgtacttggccatgtgggcctgcggggctctggcagtgtcccagcgctggctgccccgggtggtgtgcagctgcttgtacggggtggcagcctccgccctgggcctcttcgtcttcactcaccactgtgccaggcggagggacgtgagagcctcgtggcgcgcctgctgcccccctgcctctcccgcggccccccatgccccgccccgggccctgcccgccgccgcagaggacggttccccggtgttcggggagggccccccctccctcaagtcctccccaagcggcagcagcggccatccgctggctctgggcccctgcaagctcaccaacctgcagctggcccagagtcaggtgtgcgaggcgggggcggcggccggcggggaaggagagccggagccggcgggcacccggggaaacctcgcccaccgccaccccaacaacgtgcaccacgggcgtcgggcgcacaagagccgggccaagggacaccgcgcgggggaggcctgcggcaagaaccggctcaaggccctgcgcgggggcgcggcgggggcgctggagctgctgtccagcgagagcggcagtctgcacaacagccccaccgacagctacctgggcagcagccgcaacagcccgggcgccggcctgcagctggaaggcgagcccatgctcacgccgtccgagggcagcgacaccagcgccgcgccgctttctgaggcgggccgggcaggccagcgccgcagcgccagccgcgacagtctcaagggcggcggcgcgctggagaaggagagccatcgccgctcgtacccgctcaacgccgccagcctaaacggcgcccccaaggggggcaagtacgacgacgtcaccctgatgggcgcggaggtagccagcggcggctgcatgaagaccggactctggaagagcgaaactaccgtctaaggtggggcgggcgacgcggtagacgggctggccacgcggctcgttcccccgctcctcggggccctccaaggtgtctccgtagtcagcaggttggaggcagaggagccgatggctggaggaagcccacaggcggatgttccccacttgcctagagggcatccctctggggtagcgacagacaatcccagaaacacgcataatacatttccgtccagcccggggcagtctgactgtcggtgccctcccaggaacggggaaggcctccgtctgtgtgaaagggcacagcacatcccaggtgcaccctccccaagtactcccaccccgcctactgtccatgcggcctcactgggggccatcagcctcaccagcaaagcagagatgagagcgtgggaactgtgttctttcctccctgccctctactgatttcagcccagcccctgcctagatcctaggtcccttttcctcccgagtttggctggcacgagagctagcccagcacatgaagcaggtgatgttaagtcacaaggtgctgcttttcagatccactatgcaagaggggagggtggggccacgtgaaaggcagctctagacatcaaccagtcctgggggaggggagtgggaaccgggcacaactaggaacaatgccaccattcccacaggagtggtacttaaaccagacagcagggttcagaggtggcacaccgggacaaagctgaggccctgcacctcaacagctgactgccaggtgcctgtgggtgaactgaggggagtagagggagagggcaggtggaactggggcagaatctagtcatgccctaaagctagtcctgtaaacaatggtgccccagaaagctgcaggtggtgtttggagaagcagttacttttcagttacaagacccatctccctagtctcagccttacaacaccacgggactaaggaagagcacttccttgcctccgtaaggccagaggaagaaccatcccaatcatttgatctccagctccacagtagagagaaacctacaaaatgtcaaaccagcttcccgactcccaggagctcaagccaagcccagaggcagtggctggggtccctgcaggtcatgaggggcctatgcctttactccttttaaacaccagcacccgtcttttccccaacctaaaaccaaccaccagcatttcactacaggaccaaatggaaaccgagggaaccctgggtcttgggaagaacaacaggaaaccaaggtctgacctagggttccctcccagtcttcacatcactctggcctcatcaccaaggtgacagaggacacaggggagggggaaaacccacacacactccttggaatgggtcctgttatttatgcttgctgcacagacatattagaagaaaaaaaaaagctttgtattattcttccacatatgctggctgctgtttacacaccctgccaatgccttagcactggagagctttttgcaatatgctggggaaaggggagggagggaatgaaagtgccaaagaaaacatgtttttaagaactcgggttttatacaatagaatgttttctagcagatgcctcttgttttaatatattaaaattttgcaaagccctttgagctactgccttagtctacccactgtccttttgttatgaggtagaggatctcatgacaccatacacacaaacccatcattgcctgtgaatgcacgtagggccagaattccccagttcccgctcctctgagggttgatactgctgggaatgccaaccactccacaagcagagggaagccccctcaggcctgcaggaggagccgcagcagtgtgtccaattcaaaccagcagcaaagagcctgacattttcccatccatctatgaggaaagccatctcacagaacatggacataggcaacttgctctcccacaccaagggatgggaatctctcctacctatagtcatccctgcactcctgactttactccaggacccagggtccaactaatggcagagcccctcttggttccttcaaacaagaaaagcaatacctacggactggtgtacacttccatccttggttataacaggaatgttatcaagctgtcagaacaggatgaagtgctcccagtggatatccatcagggagggttagggacactcgtggcagcctgtctagcagcctgggctctctgaaagtccctaacttcctgaggggtacgcaaatactgttctatttcactatcagaaatgttctcatctccagtgacagtggagacagggggtacagggcagatccgcttcggggacttcaacatgcagggtggcaagagaagggcaggactggccggccgcttcccctggggtaaacctaaggaattatttcccacctccccttctccttgcccctgtccccaccccggtggctccttctctcgggtctccacttctgctgtcccatcccgaaaggcagagcggaccagtgactggcggtgctggagaaggtcaccgatgtgcttcaccacagaccgtttgtcaagtctcagaa

SEQ ID NO: 105376 - DNA, 571 bp, Homo sapiens
  Payload ID: 672
  Gene Symbol: ADGRA2
  Gene Name: adhesion G protein-coupled receptor A2
  ENST ID: ENST00000428068
  CDS Start-End: 1-571
agagccgctgtgcagggcctggaaccccggccagcccatctctcccttggctgtgtggctgccttcctctactggtttccccgggagcatctcctgcatggaggaaaagggaaggtgccctcctatttgggatgccttgggctcttgagcaataacaagatcacggggctccgcaatggctccttcctgggactgtcactgctggagaagctggacctgaggaacaacatcatcagcacagtgcagccgggcgccttcctgggcctgggggagctgaagcgtttagatctctccaacaaccggattggctgtctcacctccgagaccttccagggcctccccaggcttctccgactaaacatatctggaaacatcttctccagtctgcaacctggggtctttgatgagctgccagcccttaaggttgtggacttgggcaccgagttcctgacctgtgactgccacctgcgctggctgctgccctgggcccagaatcgctccctgcagctgtcggaacacacgctctgtgcttaccccagtgccctgcatgctcaggccctgggcagcctcc

SEQ ID NO: 105377 - DNA, 5651 bp, Homo sapiens
  Payload ID: 672
  Gene Symbol: ADGRA2
  Gene Name: adhesion G protein-coupled receptor A2
  Uniprot ID: Q96PE1
  ENST ID: ENST00000412232
  CDS Start-End: 14-4030
gggcgatgggttgatgggcgccgggggacgcaggatgcggggggcgcccgcgcgcctgctgctgccgctgctgccgtggctcctgctgctcctggcgcccgaggctcggggcgcgcccggctgcccgctatccatccgcagctgcaagtgctcgggggagcggcccaaggggctgagcggcggcgtccctggcccggctcggcggagggtggtgtgcagcggcggggacctcccggagcctcccgagcccggccttctgcctaacggcaccgttaccctgctcttgagcaataacaagatcacggggctccgcaatggctccttcctgggactgtcactgctggagaagctggacctgaggaacaacatcatcagcacagtgcagccgggcgccttcctgggcctgggggagctgaagcgtttagatctctccaacaaccggattggctgtctcacctccgagaccttccagggcctccccaggcttctccgactaaacatatctggaaacatcttctccagtctgcaacctggggtctttgatgagctgccagcccttaaggttgtggacttgggcaccgagttcctgacctgtgactgccacctgcgctggctgctgccctgggcccagaatcgctccctgcagctgtcggaacacacgctctgtgcttaccccagtgccctgcatgctcaggccctgggcagcctccaggaggcccagctctgctgcgagggggccctggagctgcacacacaccacctcatcccgtccctacgccaagtggtgttccagggggatcggctgcccttccagtgctctgccagctacctgggcaacgacacccgcatccgctggtaccacaaccgagcccctgtggagggtgatgagcaggcgggcatcctcctggccgagagcctcatccacgactgcaccttcatcaccagtgagctgacgctgtctcacatcggcgtgtgggcctcaggcgagtgggagtgcaccgtgtccatggcccaaggcaacgccagcaagaaggtggagatcgtggtgctggagacctctgcctcctactgccccgccgagcgtgttgccaacaaccgcggggacttcaggtggccccgaactctggctggcatcacagcctaccagtcctgcctgcagtatcccttcacctcagtgcccctgggcgggggtgccccgggcacccgagcctcccgccggtgtgaccgtgccggccgctgggagccaggggactactcccactgtctctacaccaacgacatcaccagggtgctgtacaccttcgtgctgatgcccatcaatgcctccaatgcgctgaccctggctcaccagctgcgcgtgtacacagccgaggccgctagcttttcagacatgatggatgtagtctatgtggctcagatgatccagaaatttttgggttatgtcgaccagatcaaagagctggtagaggtgatggtggacatggccagcaacctgatgctggtggacgagcacctgctgtggctggcccagcgcgaggacaaggcctgcagccgcatcgtgggtgccctggagcgcattgggggggccgccctcagcccccatgcccagcacatctcagtgaatgcgaggaacgtggcattggaggcctacctcatcaagccgcacagctacgtgggcctgacctgcacagccttccagaggagggagggaggggtgccgggcacacggccaggaagccctggccagaaccccccacctgagcccgagcccccagctgaccagcagctccgcttccgctgcaccaccgggaggcccaatgtttctctgtcgtccttccacatcaagaacagcgtggccctggcctccatccagctgcccccgagtctattctcatcccttccggctgccctggctcccccggtgcccccagactgcaccctgcaactgctcgtcttccgaaatggccgcctcttccacagccacagcaacacctcccgccctggagctgctgggcctggcaagaggcgtggcgtggccacccccgtcatcttcgcaggaaccagtggctgtggcgtgggaaacctgacagagccagtggccgtttcgctgcggcactgggctgagggagccgaacctgtggccgcttggtggagccaggaggggcccggggaggctgggggctggacctcggagggctgccagctccgctccagccagcccaatgtcagcgccctgcactgccagcacttgggcaatgtggccgtgctcatggagctgagcgcctttcccagggaggtggggggcgccggggcagggctgcaccccgtggtatacccctgcacggccttgctgctgctctgcctcttcgccaccatcatcacctacatcctcaaccacagctccatccgtgtgtcccggaaaggctggcacatgctgctgaacttgtgcttccacatagccatgacctctgctgtctttgcggggggcatcacactcaccaactaccagatggtctgccaggcggtgggcatcaccctgcactactcctccctatccacgctgctctggatgggcgtgaaggcgcgagtgctccataaggagctcacctggagggcaccccctccgcaagaaggggaccccgctctgcctactcccagtcctatgctccggttctatttgatcgctggagggattccactcattatctgtggcatcacagctgcagtcaacatccacaactaccgggaccacagcccctactgctggctggtgtggcgtccaagccttggcgccttctacatccctgtggctttgattctgctcatcacctggatctatttcctgtgcgccgggctacgcttacggggtcctctggcacagaaccccaaggcgggcaacagcagggcctccctggaggcaggggaggagctgaggggttccaccaggctcaggggcagcggccccctcctgagtgactcaggttcccttcttgctactgggagcgcgcgagtggggacgcccgggcccccggaggatggtgacagcctctattctccgggagtccagctaggggcgctggtgaccacgcacttcctgtacttggccatgtgggcctgcggggctctggcagtgtcccagcgctggctgccccgggtggtgtgcagctgcttgtacggggtggcagcctccgccctgggcctcttcgtcttcactcaccactgtgccaggcggagggacgtgagagcctcgtggcgcgcctgctgcccccctgcctctcccgcggccccccatgccccgccccgggccctgcccgccgccgcagaggacggttccccggtgttcggggagggccccccctccctcaagtcctccccaagcggcagcagcggccatccgctggctctgggcccctgcaagctcaccaacctgcagctggcccagagtcaggtgtgcgaggcgggggcggcggccggcggggaaggagagccggagccggcgggcacccggggaaacctcgcccaccgccaccccaacaacgtgcaccacgggcgtcgggcgcacaagagccgggccaagggacaccgcgcgggggaggcctgcggcaagaaccggctcaaggccctgcgcgggggcgcggcgggggcgctggagctgctgtccagcgagagcggcagtctgcacaacagccccaccgacagctacctgggcagcagccgcaacagcccgggcgccggcctgcagctggaaggcgagcccatgctcacgccgtccgagggcagcgacaccagcgccgcgccgctttctgaggcgggccgggcaggccagcgccgcagcgccagccgcgacagtctcaagggcggcggcgcgctggagaaggagagccatcgccgctcgtacccgctcaacgccgccagcctaaacggcgcccccaaggggggcaagtacgacgacgtcaccctgatgggcgcggaggtagccagcggcggctgcatgaagaccggactctggaagagcgaaactaccgtctaaggtggggcgggcgacgcggtagacgggctggccacgcggctcgttcccccgctcctcggggccctccaaggtgtctccgtagtcagcaggttggaggcagaggagccgatggctggaggaagcccacaggcggatgttccccacttgcctagagggcatccctctggggtagcgacagacaatcccagaaacacgcataatacatttccgtccagcccggggcagtctgactgtcggtgccctcccaggaacggggaaggcctccgtctgtgtgaaagggcacagcacatcccaggtgcaccctccccaagtactcccaccccgcctactgtccatgcggcctcactgggggccatcagcctcaccagcaaagcagagatgagagcgtgggaactgtgttctttcctccctgccctctactgatttcagcccagcccctgcctagatcctaggtcccttttcctcccgagtttggctggcacgagagctagcccagcacatgaagcaggtgatgttaagtcacaaggtgctgcttttcagatccactatgcaagaggggagggtggggccacgtgaaaggcagctctagacatcaaccagtcctgggggaggggagtgggaaccgggcacaactaggaacaatgccaccattcccacaggagtggtacttaaaccagacagcagggttcagaggtggcacaccgggacaaagctgaggccctgcacctcaacagctgactgccaggtgcctgtgggtgaactgaggggagtagagggagagggcaggtggaactggggcagaatctagtcatgccctaaagctagtcctgtaaacaatggtgccccagaaagctgcaggtggtgtttggagaagcagttacttttcagttacaagacccatctccctagtctcagccttacaacaccacgggactaaggaagagcacttccttgcctccgtaaggccagaggaagaaccatcccaatcatttgatctccagctccacagtagagagaaacctacaaaatgtcaaaccagcttcccgactcccaggagctcaagccaagcccagaggcagtggctggggtccctgcaggtcatgaggggcctatgcctttactccttttaaacaccagcacccgtcttttccccaacctaaaaccaaccaccagcatttcactacaggaccaaatggaaaccgagggaaccctgggtcttgggaagaacaacaggaaaccaaggtctgacctagggttccctcccagtcttcacatcactctggcctcatcaccaaggtgacagaggacacaggggagggggaaaacccacacacactccttggaatgggtcctgttatttatgcttgctgcacagacatattagaagaaaaaaaaaagctttgtattattcttccacatatgctggctgctgtttacacaccctgccaatgccttagcactggagagctttttgcaatatgctggggaaaggggagggagggaatgaaagtgccaaagaaaacatgtttttaagaactcgggttttatacaatagaatgttttctagcagatgcctcttgttttaatatattaaaattttgcaaagccctttgagctactg

SEQ ID NO: 105378 - DNA, 4566 bp, Homo sapiens
  Payload ID: 673
  Gene Symbol: ADGRA3
  Gene Name: adhesion G protein-coupled receptor A3
  Uniprot ID: Q8IWK6
  ENST ID: ENST00000334304
  CDS Start-End: 271-4236
ggcggcggcagaggaggaggaggaggcggtgctcgcgccgggcggtagagcggcgctgggacccatgcggccgtgacccccggctccctagaggcccagcgcagccgcagcggacaaaggagcatgtccgcgccggggaaggcccgtcctccggccgccataaggctccggtcgccgctgggcccgcgccgcgctcctgcccgcccgggctccggggcggcccgctaggccagtgcgccgccgctcgccccgcaggccccggcccgcagcatggagccacccggacgccggcggggccgcgcgcagccgccgctgttgctgccgctctcgctgttagcgctgctcgcgctgctgggaggcggcggcggcggcggcgccgcggcgctgcccgccggctgcaagcacgatgggcggccccgaggggctggcagggcggcgggcgccgccgagggcaaggtggtgtgcagcagcctggaactcgcgcaggtcctgcccccagatactctgcccaaccgcacggtcaccctgattctgagtaacaataagatatccgagctgaagaatggctcattttctgggttaagtctccttgaaagattggacctccgaaacaatcttattagtagtatagatccaggtgccttctggggactgtcatctctaaaaagattggatctgacaaacaatcgaataggatgtctgaatgcagacatatttcgaggactcaccaatctggttcggctaaacctttcggggaatttgttttcttcattatctcaaggaacttttgattatcttgcgtcattacggtctttggaattccagactgagtatcttttgtgtgactgtaacatactgtggatgcatcgctgggtaaaggagaagaacatcacggtacgggataccaggtgtgtttatcctaagtcactgcaggcccaaccagtcacaggcgtgaagcaggagctgttgacatgcgaccctccgcttgaattgccgtctttctacatgactccatctcatcgccaagttgtgtttgaaggagacagccttcctttccagtgcatggcttcatatattgatcaggacatgcaagtgttgtggtatcaggatgggagaatagttgaaaccgatgaatcgcaaggtatttttgttgaaaagaacatgattcacaactgctccttgattgcaagtgccctaaccatttctaatattcaggctggatctactggaaattggggctgtcatgtccagaccaaacgtgggaataatacgaggactgtggatattgtggtattagagagttctgcacagtactgtcctccagagagggtggtaaacaacaaaggtgacttcagatggcccagaacattggcaggcattactgcatatctgcagtgtacgcggaacacccatggcagtgggatatatcccggaaacccacaggatgagagaaaagcttggcgcagatgtgatagaggtggcttttgggcagatgatgattattctcgctgtcagtatgcaaatgatgtcactagagttctttatatgtttaatcagatgcccctcaatcttaccaatgccgtggcaacagctcgacagttactggcttacactgtggaagcagccaacttttctgacaaaatggatgttatatttgtggcagaaatgattgaaaaatttggaagatttaccaaggaggaaaaatcaaaagagctaggtgacgtgatggttgacattgcaagtaacatcatgttggctgatgaacgtgtcctgtggctggcgcagagggaagctaaagcctgcagtaggattgtgcagtgtcttcagcgcattgctacctaccggctagccggtggagctcacgtttattcaacatattcacccaatattgctctggaagcttatgtcatcaagtctactggcttcacggggatgacctgtaccgtgttccagaaagtggcagcctctgatcgtacaggactttcggattatgggaggcgggatccagagggaaacctggataagcagctgagctttaagtgcaatgtttcaaatacattttcgagtctggcactaaagaatactattgtggaggcttctattcagcttcctccttcccttttctcaccaaagcaaaaaagagaactcagaccaactgatgactctctttacaagcttcaactcattgcattccgcaatggaaagctttttccagccactggaaattcaacaaatttggctgatgatggaaaacgacgtactgtggttacccctgtgattctcaccaaaatagatggtgtgaatgtagatacccaccacatccctgttaatgtgacactgcgtcgaattgcacatggagcagatgctgttgcagcccggtgggatttcgatttgctgaacggacaaggaggctggaagtcagatgggtgccatatactctattcagatgaaaatatcactacgattcagtgctactcccttagtaactatgcagttttaatggatttgacgggatctgaactatacacccaggcggccagcctcctgcatcctgtggtttatactaccgctatcattctcctcttatgtctcttagccgtcattgtcagttacatataccatcacagtttgattagaatcagcctcaagagctggcacatgcttgtgaacttgtgctttcatattttcctaacctgtgtggtctttgtgggaggaataacccagactaggaatgccagcatctgccaagcagttgggataattcttcactattccacccttgccacagtactatgggtaggagtgacagctcgaaatatctacaaacaagtcactaaaaaagctaaaagatgccaggatcctgatgaaccaccacctccaccaagaccaatgctcagattttacctgattggtggtggtatccccatcattgtttgcggcataactgcagcagcgaacattaagaattacggcagtcggccaaacgcaccctattgctggatggcatgggaaccctccttgggagccttctatgggccagccagcttcatcacttttgtaaactgcatgtactttctgagcatatttattcagttgaaaagacaccctgagcgcaaatatgagcttaaggagcccacggaggagcaacagagattggcagccaatgaaaatggcgaaataaatcatcaggattcaatgtctttgtctctgatttctacatcagccttggaaaatgagcacacttttcattctcagctcttgggggccagccttactttgctcttatatgttgcactgtggatgtttggggctttggctgtttctttgtattaccctttggacttggtttttagcttcgtttttggagccacaagtttaagcttcagtgcgttcttcgtggtccaccattgtgttaatagggaggatgttagacttgcgtggatcatgacttgctgcccaggacggagctcgtattcagtgcaagtcaacgtccagccccccaactctaatgggacgaatggagaggcacccaaatgccccaatagcagtgcggagtcttcatgcacaaacaaaagtgcttcaagcttcaaaaattcctcccagggctgcaaattaacaaacttgcaggcggctgcagctcagtgccatgccaattctttacctttgaactccacccctcagcttgataatagtctgacagaacattcaatggacaatgatattaaaatgcacgtggcgcctttagaagttcagtttcgaacaaatgtgcactcaagccgccaccataaaaacagaagtaaaggacaccgggcaagccgactcacagtcctgagagaatatgcctacgatgtcccaacgagcgtggaaggaagcgtgcagaacggcttacctaaaagccggctgggcaataacgaaggacactcgaggagccgaagagcttatttagcctacagagagagacagtacaacccaccccagcaagacagcagcgatgcttgtagcacacttcccaaaagtagcagaaattttgaaaagccagtttcaaccactagtaaaaaagatgcgttaaggaagccagctgtggttgaacttgaaaatcagcaaaaatcttatggcctcaacttggccattcagaatggaccaattaaaagcaatgggcaggagggacccttgctcggtaccgatagcactggcaatgttaggactggattatggaaacacgaaactactgtgtaacattgctgggcttcctaggcagaaattcatataaactgtgatactcacattccttgaagctatgagcatttaaaaactgtttacagccaccatagggattcaaaagaatttggaataaactttgaagttttggattttacttatttttatccccaaattgttgctattttttaggatctgaaacaaaatctttctaaaacattgttttagttgtcaaagcaccaacaggacattttgggatgtgaaatgtaatttcttggaatctgtaatttgtacttaatatttcaggcttgtatttaatataataaataggtgtttgttattgtgtcg

SEQ ID NO: 105379 - DNA, 2870 bp, Homo sapiens
  Payload ID: 673
  Gene Symbol: ADGRA3
  Gene Name: adhesion G protein-coupled receptor A3
  Uniprot ID: Q8IWK6
  ENST ID: ENST00000502482
  CDS Start-End: 214-2064
gggacccatgcggccgtgacccccggctccctagaggcccagcgcagccgcagcggacaaaggagcatgtccgcgccggggaaggcccgtcctccggccgccataaggctccggtcgccgctgggcccgcgccgcgctcctgcccgcccgggctccggggcggcccgctaggccagtgcgccgccgctcgccccgcaggccccggcccgcagcatggagccacccggacgccggcggggccgcgcgcagccgccgctgttgctgccgctctcgctgttagcgctgctcgcgctgctgggaggcggcggcggcggcggcgccgcggcgctgcccgccggctgcaagcacgatgggcggccccgaggggctggcagggcggcgggcgccgccgagggcaaggtggtgtgcagcagcctggaactcgcgcaggtcctgcccccagatactctgcccaaccgcacggtcaccctgattctgagtaacaataagatatccgagctgaagaatggctcattttctgggttaagtctccttgaaagattggacctccgaaacaatcttattagtagtatagatccaggtgccttctggggactgtcatctctaaaaagattggatctgacaaacaatcgaataggatgtctgaatgcagacatatttcgaggactcaccaatctggttcggctaaacctttcggggaatttgttttcttcattatctcaaggaacttttgattatcttgcgtcattacggtctttggaattccagactgagtatcttttgtgtgactgtaacatactgtggatgcatcgctgggtaaaggagaagaacatcacggtacgggataccaggtgtgtttatcctaagtcactgcaggcccaaccagtcacaggcgtgaagcaggagctgttgacatgcgaccctccgcttgaattgccgtctttctacatgactccatctcatcgccaagttgtgtttgaaggagacagccttcctttccagtgcatggcttcatatattgatcaggacatgcaagtgttgtggtatcaggatgggagaatagttgaaaccgatgaatcgcaaggtatttttgttgaaaagaacatgattcacaactgctccttgattgcaagtgccctaaccatttctaatattcaggctggatctactggaaattggggctgtcatgtccagaccaaacgtgggaataatacgaggactgtggatattgtggtattagagagttctgcacagtactgtcctccagagagggtggtaaacaacaaaggtgacttcagatggcccagaacattggcaggcattactgcatatctgcagtgtacgcggaacacccatggcagtgggatatatcccggaaacccacaggatgagagaaaagcttggcgcagatgtgatagaggtggcttttgggcagatgatgattattctcgctgtcagtatgcaaatgatgtcactagagttctttatatgtttaatcagatgcccctcaatcttaccaatgccgtggcaacagctcgacagttactggcttacactgtggaagcagccaacttttctgacaaaatggatgttatatttgtggcagaaatgattgaaaaatttggaagatttaccaaggaggaaaaatcaaaagagctaggtgacgtgatggttgacattgcaagtaacatcatgttggctgatgaacgtgtcctgtggctggcgcagagggaagctaaagcctgcagtaggattgtgcagtgtcttcagcgcattgctacctaccggctagccggtggagctcacgtttattcaacatattcacccaatattgctctggaagcttatgtcatcaagtctactggcttcacggggatgacctgtaccgtgttccagaaagtggcagcctctgatcgtacaggactttcggattatgggaggcgggatccagagggaaacctggataagcagctgagctttaagtgcaatgtttcaaatacattttcgagtctggcactaaaggtatgttacattctgcaatcatttaagactatttacagttaaattagaatgctccaaatgttctgcttcgcaaaataaccttattaaaagattttttttttgcaggaagataggtattattgcttttgctactgttttaaagaaaactaaccaggaagaactgcattacgactttcaagggccctaggcatttttgcctttgattccctttcttcacataaaaatatcagaaattacattttataactgcagtggtataaatgcaaatatactattgttacatgtgaaaaaatcttatttgacttaaaagtttatttatttgtttttttgctcctgattttaagacaataagatgttttcatgggcccctaaaagtatcatgagcctttggcactgcgcctgccaagcctagtggagaagtcaaccctgagaccaggtgtttaatcaagcaagctgtatatcaaaatttttggcagaaaacacaaatatgtcatatatctttttttaaaaaaagtatttcattgaagcaagcaaaatgaaagcatttttactgatttttaaaattggtgctttagatatatttgactacactgtattgaagcaaatagaggaggcacaactccagcaccctaatggaaccacatttttttcacttagctttctgtgggcatgtgtaattgtattctctgcggtttttaatctcacagtactttatttctgtcttgtccctcaataatatcacaaacaatattccagtcattttaatggctgcataataactgatccaacaggtgttaggtgttctggtttagtgtgagcactcaataaatattgaatgaatgaacgaa

SEQ ID NO: 105380 - DNA, 1572 bp, Homo sapiens
  Payload ID: 673
  Gene Symbol: ADGRA3
  Gene Name: adhesion G protein-coupled receptor A3
  Uniprot ID: Q8IWK6
  ENST ID: ENST00000508133
  CDS Start-End: 29-1174
atttctgtaatcatctgatactcttaggatgccactgaagaggaataactctaaataccctccgcttgaattgccgtctttctacatgactccatctcatcgccaagttgtgtttgaaggagacagccttcctttccagtgcatggcttcatatattgatcaggacatgcaagtgttgtggtatcaggatgggagaatagttgaaaccgatgaatcgcaaggtatttttgttgaaaagaacatgattcacaactgctccttgattgcaagtgccctaaccatttctaatattcaggctggatctactggaaattggggctgtcatgtccagaccaaacgtgggaataatacgaggactgtggatattgtggtattagagagttctgcacagtactgtcctccagagagggtggtaaacaacaaaggtgacttcagatggcccagaacattggcaggcattactgcatatctgcagtgtacgcggaacacccatggcagtgggatatatcccggaaacccacaggatgagagaaaagcttggcgcagatgtgatagaggtggcttttgggcagatgatgattattctcgctgtcagtatgcaaatgatgtcactagagttctttatatgtttaatcagatgcccctcaatcttaccaatgccgtggcaacagctcgacagttactggcttacactgtggaagcagccaacttttctgacaaaatggatgttatatttgtggcagaaatgattgaaaaatttggaagatttaccaaggaggaaaaatcaaaagagctaggtgacgtgatggttgacattgcaagtaacatcatgttggctgatgaacgtgtcctgtggctggcgcagagggaagctaaagcctgcagtaggattgtgcagtgtcttcagcgcattgctacctaccggctagccggtggagctcacgtttattcaacatattcacccaatattgctctggaagcttatgtcatcaagtctactggcttcacggggatgacctgtaccgtgttccagaaagtggcagcctctgatcgtacaggactttcggattatgggaggcgggatccagagggaaacctggataagcagctgagctttaagtgcaatgtttcaaatacattttcgagtctggcactaaaggggaaattccggtgaatatggaattagaagaagagaggttagaagccaagaaaaagattgtacaataaattcttcaactatggaatgtttttagatggttaattgttcacttctttggtatatatatattttttactgaatgctgaataatttgttatttaaaaatcctcaataaagaaatctgaaaaaattcagtgatcagtcagcattttcagttgttcctatgtgttattattttttttttctaaatgtgtttcctagtctcaaggaaatttctgctaagtgtactgaatctaaacctctattatgtttgtataatttcattcttttgttgtgtggaggtttgaattcatcataaatcaccttaaagttccataagcccaaattaattatactcatatttatgatatgct

SEQ ID NO: 105381 - DNA, 682 bp, Homo sapiens
  Payload ID: 673
  Gene Symbol: ADGRA3
  Gene Name: adhesion G protein-coupled receptor A3
  ENST ID: ENST00000511051
  CDS Start-End: 213-317
ttcatattttcctaacctgtgtggtctttgtgggaggaataacccagactaggaatgccagcatctgccaagcagttgggataattcttcactattccacccttgccacagtactatgggtaggagtgacagctcgaaatatctacaaacaagtcactaaaaaagctaaaagatgccaggatcctgatgaaccaccacctccaccaagaccaatgctcagattttacctgattggtggtggtatccccatcattgtttgcggcataactgcagcagcgaacattaagaattacggcagtcggccaaacgcaccctagctgtacagcagtcatgacgctggcatctgcttggcttctggggagccctcgggaaacttacaatcatggcagaaggtgaaggagaagcagtgtccattctccagtatggttttgggggagtatggcttcctacctactgcggaccacctgtcaactctgggctgtaacatgagagaattgtgaacttctgtcttgtttgagccatggtttcattctctttttcagccatgtagcctgtgctgtaactcagtgccacattagcaactagtgaaagtcaatgtgggtaaatttgtcattcttcaggttagaacatttcttccttttattcttgtgtttttggctaaataaactgggaaattatagta

SEQ ID NO: 105382 - DNA, 733 bp, Homo sapiens
  Payload ID: 673
  Gene Symbol: ADGRA3
  Gene Name: adhesion G protein-coupled receptor A3
  ENST ID: ENST00000514129
  CDS Start-End: 443-733
gagctgaagaatggctcattttctgggttaagtctccttgaaagattggacctccgaaacaatcttattagtagtatagatccaggtgccttctggggactgtcatctctaaaaagattggatctgacaaacaatcgaataggatgtctgaatgcagacatatttcgaggactcaccaatctggttcggctaaacctttcggggaatttgttttcttcattatctcaaggaacttttgattatcttgcgtcattacggtctttggaattccagactgagtatcttttgtgtgactgtaacatactgtggatgcatcgctgggtaaaggagaagaacatcacggtacgggataccagaccctccgcttgaattgccgtctttctacatgactccatctcatcgccaagttgtgtttgaaggagacagccttcctttccagtgcatggcttcatatattgatcaggacatgcaagtgttgtggtatcaggatgggagaatagttgaaaccgatgaatcgcaaggtatttttgttgaaaagaacatgattcacaactgctccttgattgcaagtgccctaaccatttctaatattcaggctggatctactggaaattggggctgtcatgtccagaccaaacgtgggaataatacgaggactgtggatattgtggtattagagagttctgcacagtactgtcctccagagagggtggtaaacaacaaaggtgacttc

SEQ ID NO: 105383 - DNA, 5527 bp, Homo sapiens
  Payload ID: 674
  Gene Symbol: ADGRB1
  Gene Name: adhesion G protein-coupled receptor B1
  Uniprot ID: O14514
  ENST ID: ENST00000323289
  CDS Start-End: 184-4938
ggactttagaagccgttgctgccctctctgtcacctgaagcggggccctctcccatcccacccttgccccgcctccctgcccccaccgggccggccctgcccgccgccggaccctggcatgtcaagacctggtccgcgcctgcctgcccagcccgcggaaccccggcggccccgcgagctaggatgaggggccaggccgccgccccgggccccgtctggatcctcgccccgctgctactgctgctgctgctgctgggacgccgcgcgcgggcggccgccggagcagacgcggggcccgggcccgagccgtgcgccacgctggtgcagggaaagttcttcggctacttctccgcggccgccgtgttcccggccaacgcctcgcgctgctcctggacgctacgcaacccggacccgcggcgctacactctctacatgaaggtggccaaggcgcccgtgccctgcagcggccccggccgcgtgcgcacctaccagttcgactccttcctcgagtccacgcgcacctacctgggcgtggagagcttcgacgaggtgctgcggctctgcgacccctccgcacccctggccttcctgcaggccagcaagcagttcctgcagatgcggcgccagcagccgccccagcacgacgggctccggccccgggccgggccgccgggccccaccgacgacttctccgtggagtacctggtggtggggaaccgcaaccccagccgtgccgcctgccagatgctgtgccgctggctggacgcgtgtctggccggtagtcgcagctcgcacccctgcgggatcatgcagaccccctgcgcctgcctgggcggcgaggcgggcggccctgccgcgggacccctggccccccgcggggatgtctgcttgagagatgcggtggctggtggccctgaaaactgcctcaccagcctgacccaggaccggggcgggcacggcgccacaggcggctggaagctgtggtccctgtggggcgaatgcacgcgggactgcgggggaggcctccagacgcggacgcgcacctgcctgcccgcgccgggcgtggagggcggcggctgcgagggggtgctggaggagggtcgccagtgcaaccgcgaggcctgcggccccgctgggcgcaccagctcccggagccagtccctgcggtccacagatgcccggcggcgcgaggagctgggggacgagctgcagcagtttgggttcccagccccccagaccggtgacccagcagccgaggagtggtccccgtggagcgtgtgctccagcacctgcggcgagggctggcagacccgcacgcgcttctgcgtgtcctcctcctacagcacgcagtgcagcggacccctgcgcgagcagcggctgtgcaacaactctgccgtgtgcccagtgcatggtgcctgggatgagtggtcgccctggagcctctgctccagcacctgtggccgtggctttcgggatcgcacgcgcacctgcaggcccccccagtttgggggcaacccctgtgagggccctgagaagcaaaccaagttctgcaacattgccctgtgccctggccgggcagtggatggaaactggaatgagtggtcgagctggagcgcctgctccgccagctgctcccagggccgacagcagcgcacgcgtgaatgcaacgggccttcctacgggggtgcggagtgccagggccactgggtggagacccgagactgcttcctgcagcagtgcccagtggatggcaagtggcaggcctgggcgtcatggggcagttgcagcgtcacgtgtggggctggcagccagcgacgggagcgtgtctgctctgggcccttcttcgggggagcagcctgccagggcccccaggatgagtaccggcagtgcggcacccagcggtgtcccgagccccatgagatctgtgatgaggacaactttggtgctgtgatctggaaggagaccccagcgggagaggtggctgctgtccggtgtccccgcaacgccacaggactcatcctgcgacggtgtgagctggacgaggaaggcatcgcctactgggagccccccacctacatccgctgtgtttccattgactacagaaacatccagatgatgacccgggagcacctggccaaggctcagcgagggctgcctggggagggggtctcggaggtcatccagacactggtggagatctctcaggacgggaccagctacagtggggacctgctgtccaccatcgatgtcctgaggaacatgacagagattttccggagagcgtactacagccccacccctggggacgtacagaactttgtccagatccttagcaacctgttggcagaggagaatcgggacaagtgggaggaggcccagctggcgggccccaacgccaaggagctgttccggctggtggaggactttgtggacgtcatcggcttccgcatgaaggacctgagggatgcataccaggtgacagacaacctggttctcagcatccataagctcccagccagcggagccactgacatcagcttccccatgaagggctggcgggccacgggtgactgggccaaggtgccagaggacagggtcactgtgtccaagagtgtcttctccacggggctgacagaggccgatgaagcatccgtgtttgtggtgggcaccgtgctctacaggaacctgggcagcttcctggccctgcagaggaacacgaccgtcctgaattctaaggtgatctccgtgactgtgaaacccccgcctcgctccctgcgcacacccttggagatcgagtttgcccacatgtataatggcaccaccaaccagacctgtatcctgtgggatgagacggatgtaccctcctcctccgcccccccgcagctcgggccctggtcgtggcgcggctgccgcacggtgcccctcgacgccctccggacgcgctgcctctgtgaccggctctccaccttcgccatcttagcccagctcagcgccgacgcgaacatggagaaggcgactctgccgtcggtgacgctcatcgtgggctgtggcgtgtcctctctcaccctgctcatgctggtcatcatctacgtgtccgtgtggaggtacattcgctcagagcgttctgtcatcctcatcaacttctgcctgtccatcatctcctccaatgccctcatcctcatcgggcagacccagacccgcaacaaggtggtgtgcacgctggtggccgccttcctgcacttcttcttcctgtcctccttctgctgggtgctcaccgaggcctggcagtcctacatggcggtgacgggccacctccggaaccgcctcatccgcaagcgcttcctctgcctgggctgggggctccctgcactggttgtggccatttctgtgggattcaccaaggccaaagggtacagcaccatgaactactgctggctctccctggaggggggactgctctatgccttcgtgggacctgccgctgccgttgtgctggtgaacatggtcattgggatcctggtgttcaacaagctcgtgtccaaagacggcatcacggacaagaagctgaaggagcgggcaggggcctccctgtggagctcctgcgtggtgctgccgctgctggcgctgacctggatgtcggctgtgctcgccgtcaccgaccgccgctccgccctcttccagatcctcttcgctgtcttcgactcgctggagggcttcgtcatcgtcatggtgcactgtatcctccgtagagaggtccaggacgctgtgaaatgccgtgtggttgaccggcaggaggagggcaacggggactcagggggctccttccagaacggccacgcccagctcatgaccgacttcgagaaggacgtggatctggcctgtagatcagtgctgaacaaggacatcgcggcctgccgcactgccaccatcacgggcacactgaagcggccgtctctgcccgaggaggagaagctgaagctggcccatgccaaggggccgcccaccaatttcaacagcctgccggccaacgtgtccaagctgcacctgcacggctcaccccgctatcccggcgggcccctgcccgacttccccaaccactcactgaccctcaagagggacaaggcgcccaagtcctccttcgtcggtgacggggacatcttcaagaagctggactcggagctgagccgggcccaggagaaggctctggacacgagctacgtgatcctgcccacggccacggccacgctgcggcccaagcccaaggaggagcccaagtacagcatccacattgaccagatgccgcagacccgcctcatccacctcagcacggcccccgaggccagcctccccgcccgcagcccgccctcccgccagccccccagcggcgggccccccgaggcaccccctgcccagcccccaccgcctccgcccccaccgccaccacctccccagcagcccctgcccccaccgcccaatctggagccggcaccccccagcctgggggatcccggggagcctgccgcccatccgggacccagcacggggcccagcaccaagaacgagaatgtcgccaccttgtctgtgagctccctggagcggcggaagtcgcggtatgcagaactggactttgagaagatcatgcacacccggaagcggcaccaagacatgttccaggacctgaaccggaagctgcagcacgcagcggagaaggacaaggaggtgctggggccggacagcaagccggaaaagcagcagacgcccaacaagaggccctgggagagcctccggaaagcccacgggacgcccacgtgggtgaagaaggagctggagccgctgcagccgtcgccgctggagcttcgcagcgtggagtgggagaggtcgggcgccacgatcccgctggtgggccaggacatcatcgacctccagaccgaggtctgagcgggtgggcggcggccacgcactgggccacggaggagggatgctgctccgcccgctcctgccgcagacgggcacagacacgctcgcgggcagcgggccaggcccgcaccccggcctcagggcgctcagacggcggccaggcacagggcccgcagtgctgggaccagagccagatgcaggacaggaggcggcccggccagcgggcacagggcaccagaggccgaaggtgcctcagactccgccctcctcgggccgaggcccagcgggcagatgggcggacggctgtggaccgtggacaggcccagcgcggccagcgtcccagggtacccgcctgagctcctgctgcggaggagctgcctgcttggcccggccggcctggcaccgttttttaaacacccccatccctcgggaagcagccagctccccacaccttccagggccctaggcccctcctagacccaggtggagggcacagccctccgaccctcatggcccccaggggcaggactgagtcccctccaggaagaagcaggggggaatctattttttctctccttttcttttcttcaataaaaagaattaaaaaccc

SEQ ID NO: 105384 - DNA, 5903 bp, Homo sapiens
  Payload ID: 674
  Gene Symbol: ADGRB1
  Gene Name: adhesion G protein-coupled receptor B1
  ENST ID: ENST00000521208
  CDS Start-End: 646-4125
gcggcggcggcggccggagagggagcggcgggcgcaggcggcggcggcgggcgcggcgttggcggcggccccggcggagcgagcgcggagccggagagccgggagcacaggcggccgcgccgcgtcctggcccggcccgggcccgcgcgccagcatcgtccgcagcgcgggcatccggaccctccgggcgcccggggggctccagcaggcgcgggggaacgggagggggcctgcgtgcgccggcgggtgctctccagggggcgtcccggcgaggcccagagcgggccgggggcggcggcggctggaggagccccccccacctccggtcgggcgcccggctcagccgccggcgacgcgaggcgctcgcggggatttgcaactcgccggatcgagtcctcgccggcggggccgctgctgctggggaagctgctgctggtggccacaggctggcaccagggccctggactttagaagccgttgctgccctctctgtcacctgaagcggggccctctcccatcccacccttgccccgcctccctgcccccaccgggccggccctgcccgccgccggaccctggcatgtcaagacctggtccgcgcctgcctgcccagcccgcggaaccccggcggccccgcgagctaggatgaggggccaggccgccgccccgggccccgtctggatcctcgccccgctgctactgctgctgctgctgctgggacgccgcgcgcgggcggccgccggagcagacgcggggcccgggcccgagccgtgcgccacgctggtgcagggaaagttcttcggctacttctccgcggccgccgtgttcccggccaacgcctcgcgctgctcctggacgctacgcaacccggacccgcggcgctacactctctacatgaaggtggccaaggcgcccgtgccctgcagcggccccggccgcgtgcgcacctaccagttcgactccttcctcgagtccacgcgcacctacctgggcgtggagagcttcgacgaggtgctgcggctctgcgacccctccgcacccctggccttcctgcaggccagcaagcagttcctgcagatgcggcgccagcagccgccccagcacgacgggctccggccccgggccgggccgccgggccccaccgacgacttctccgtggagtacctggtggtggggaaccgcaaccccagccgtgccgcctgccagatgctgtgccgctggctggacgcgtgtctggccggtagtcgcagctcgcacccctgcgggatcatgcagaccccctgcgcctgcctgggcggcgaggcgggcggccctgccgcgggacccctggccccccgcggggatgtctgcttgagagatgcggtggctggtggccctgaaaactgcctcaccagcctgacccaggaccggggcgggcacggcgccacaggcggctggaagctgtggtccctgtggggcgaatgcacgcgggactgcgggggaggcctccagacgcggacgcgcacctgcctgcccgcgccgggcgtggagggcggcggctgcgagggggtgctggaggagggtcgccagtgcaaccgcgaggcctgcggccccgctgggcgcaccagctcccggagccagtccctgcggtccacagatgcccggcggcgcgaggagctgggggacgagctgcagcagtttgggttcccagccccccagaccggtgacccagcagccgaggagtggtccccgtggagcgtgtgctccagcacctgcggcgagggctggcagacccgcacgcgcttctgcgtgtcctcctcctacagcacgcagtgcagcggacccctgcgcgagcagcggctgtgcaacaactctgccgtgtgcccagtgcatggtgcctgggatgagtggtcgccctggagcctctgctccagcacctgtggccgtggctttcgggatcgcacgcgcacctgcaggcccccccagtttgggggcaacccctgtgagggccctgagaagcaaaccaagttctgcaacattgccctgtgccctggccgggcagtggatggaaactggaatgagtggtcgagctggagcgcctgctccgccagctgctcccagggccgacagcagcgcacgcgtgaatgcaacgggccttcctacgggggtgcggagtgccagggccactgggtggagacccgagactgcttcctgcagcagtgcccagtggatggcaagtggcaggcctgggcgtcatggggcagttgcagcgtcacgtgtggggctggcagccagcgacgggagcgtgtctgctctgggcccttcttcgggggagcagcctgccagggcccccaggatgagtaccggcagtgcggcacccagcggtgtcccgagccccatgagatctgtgatgaggacaactttggtgctgtgatctggaaggagaccccagcgggagaggtggctgctgtccggtgtccccgcaacgccacaggactcatcctgcgacggtgtgagctggacgaggaaggcatcgcctactgggagccccccacctacatccgctgtgtttccattgactacagaaacatccagatgatgacccgggagcacctggccaaggctcagcgagggctgcctggggagggggtctcggaggtcatccagacactggtggagatctctcaggacgggaccagctacagtggggacctgctgtccaccatcgatgtcctgaggaacatgacagagattttccggagagcgtactacagccccacccctggggacgtacagaactttgtccagatccttagcaacctgttggcagaggagaatcgggacaagtgggaggaggcccagctggcgggccccaacgccaaggagctgttccggctggtggaggactttgtggacgtcatcggcttccgcatgaaggacctgagggatgcataccaggtgacagacaacctggttctcagcatccataagctcccagccagcggagccactgacatcagcttccccatgaagggctggcgggccacgggtgactgggccaaggtgccagaggacagggtcactgtgtccaagagtgtcttctccacggggctgacagaggccgatgaagcatccgtgtttgtggtgggcaccgtgctctacaggaacctgggcagcttcctggccctgcagaggaacacgaccgtcctgaattctaaggtgatctccgtgactgtgaaacccccgcctcgctccctgcgcacacccttggagatcgagtttgcccacatgtataatggcaccaccaaccagacctgtatcctgtgggatgagacggatgtaccctcctcctccgcccccccgcagctcgggccctggtcgtggcgcggctgccgcacggtgcccctcgacgccctccggacgcgctgcctctgtgaccggctctccaccttcgccatcttagcccagctcagcgccgacgcgaacatggagaaggcgactctgccgtcggtgacgctcatcgtgggctgtggcgtgtcctctctcaccctgctcatgctggtcatcatctacgtgtccgtgtggaggtacattcgctcagagcgttctgtcatcctcatcaacttctgcctgtccatcatctcctccaatgccctcatcctcatcgggcagacccagacccgcaacaaggtggtgtgcacgctggtggccgccttcctgcacttcttcttcctgtcctccttctgctgggtgctcaccgaggcctggcagtcctacatggcggtgacgggccacctccggaaccgcctcatccgcaagcgcttcctctgcctgggctgggggctccctgcactggttgtggccatttctgtgggattcaccaaggccaaagggtacagcaccatgaactactgctggctctccctggaggggggactgctctatgccttcgtgggacctgccgctgccgttgtgctgggcctccctgtggagctcctgcgtggtgctgccgctgctggcgctgacctggatgtcggctgtgctcgccgtcaccgaccgccgctccgccctcttccagatcctcttcgctgtcttcgactcgctggagggcttcgtcatcgtcatggtgcactgtatcctccgtagagaggtccaggacgctgtgaaatgccgtgtggttgaccggcaggaggagggcaacggggactcagggggctccttccagaacggccacgcccagctcatgaccgacttcgagaaggacgtggatctggcctgtagatcagtgctgaacaaggacatcgcggcctgccgcactgccaccatcacgggcacactgaagcggccgtctctgcccgaggaggagaagctgaagctggcccatgccaaggggccgcccaccaatttcaacagcctgccggccaacgtgtccaagctgcacctgcacggctcaccccgctatcccggcgggcccctgcccgacttccccaaccactcactgaccctcaagagggacaaggcgcccaagtcctccttcgtcggtgacggggacatcttcaagaagctggactcggagctgagccgggcccaggagaaggctctggacacgagctacgtgatcctgcccacggccacggccacgctgcggcccaagcccaaggaggagcccaagtacagcatccacattgaccagatgccgcagacccgcctcatccacctcagcacggcccccgaggccagcctccccgcccgcagcccgccctcccgccagccccccagcggcgggccccccgaggcaccccctgcccagcccccaccgcctccgcccccaccgccaccacctccccagcagcccctgcccccaccgcccaatctggagccggcaccccccagcctgggggatcccggggagcctgccgcccatccgggacccagcacggggcccagcaccaagaacgagaatgtcgccaccttgtctgtgagctccctggagcggcggaagtcgcggtatgcagaactggactttgagaagatcatgcacacccggaagcggcaccaagacatgttccaggacctgaaccggaagctgcagcacgcagcggagaaggacaaggaggtgctggggccggacagcaagccggaaaagcagcagacgcccaacaagaggccctgggagagcctccggaaagcccacgggacgcccacgtgggtgaagaaggagctggagccgctgcagccgtcgccgctggagcttcgcagcgtggagtgggagaggtcgggcgccacgatcccgctggtgggccaggacatcatcgacctccagaccgaggtctgagcgggtgggcggcggccacgcactgggccacggaggagggatgctgctccgcccgctcctgccgcagacgggcacagacacgctcgcgggcagcgggccaggcccgcaccccggcctcagggcgctcagacggcggccaggcacagggcccgcagtgctgggaccagagccagatgcaggacaggaggcggcccggccagcgggcacagggcaccagaggccgaaggtgcctcagactccgccctcctcgggccgaggcccagcgggcagatgggcggacggctgtggaccgtggacaggcccagcgcggccagcgtcccagggtacccgcctgagctcctgctgcggaggagctgcctgcttggcccggccggcctggcaccgttttttaaacacccccatccctcgggaagcagccagctccccacaccttccagggccctaggcccctcctagacccaggtggagggcacagccctccgaccctcatggcccccaggggcaggactgagtcccctccaggaagaagcaggggggaatctattttttctctccttttcttttcttcaataaaaagaattaaaaaccc

SEQ ID NO: 105385 - DNA, 6241 bp, Homo sapiens
  Payload ID: 674
  Gene Symbol: ADGRB1
  Gene Name: adhesion G protein-coupled receptor B1
  Uniprot ID: O14514
  ENST ID: ENST00000517894
  CDS Start-End: 895-5649
gatgtaatccgtaatgcagtctctggctcccgattcgggatccagtttcagagagcgagagattggggagcgccggcagccgggtggggggaagcagctctcgcctctctcctcctccttctcctcgtcctcggcctcctcctcctccccgcgccgccccgcccccggctcggcttggctcgcccccccccccccctcgccaggaaggggaaaaaaggcgagaagagccgggcaggcgagaggagcggagcggcggcggcggccggagagggagcggcgggcgcaggcggcggcggcgggcgcggcgttggcggcggccccggcggagcgagcgcggagccggagagccgggagcacaggcggccgcgccgcgtcctggcccggcccgggcccgcgcgccagcatcgtccgcagcgcgggcatccggaccctccgggcgcccggggggctccagcaggcgcgggggaacgggagggggcctgcgtgcgccggcgggtgctctccagggggcgtcccggcgaggcccagagcgggccgggggcggcggcggctggaggagccccccccacctccggtcgggcgcccggctcagccgccggcgacgcgaggcgctcgcggggatttgcaactcgccggatcgagtcctcgccggcggggccgctgctgctggggaagctgctgctggtggccacaggctggcaccagggccctggactttagaagccgttgctgccctctctgtcacctgaagcggggccctctcccatcccacccttgccccgcctccctgcccccaccgggccggccctgcccgccgccggaccctggcatgtcaagacctggtccgcgcctgcctgcccagcccgcggaaccccggcggccccgcgagctaggatgaggggccaggccgccgccccgggccccgtctggatcctcgccccgctgctactgctgctgctgctgctgggacgccgcgcgcgggcggccgccggagcagacgcggggcccgggcccgagccgtgcgccacgctggtgcagggaaagttcttcggctacttctccgcggccgccgtgttcccggccaacgcctcgcgctgctcctggacgctacgcaacccggacccgcggcgctacactctctacatgaaggtggccaaggcgcccgtgccctgcagcggccccggccgcgtgcgcacctaccagttcgactccttcctcgagtccacgcgcacctacctgggcgtggagagcttcgacgaggtgctgcggctctgcgacccctccgcacccctggccttcctgcaggccagcaagcagttcctgcagatgcggcgccagcagccgccccagcacgacgggctccggccccgggccgggccgccgggccccaccgacgacttctccgtggagtacctggtggtggggaaccgcaaccccagccgtgccgcctgccagatgctgtgccgctggctggacgcgtgtctggccggtagtcgcagctcgcacccctgcgggatcatgcagaccccctgcgcctgcctgggcggcgaggcgggcggccctgccgcgggacccctggccccccgcggggatgtctgcttgagagatgcggtggctggtggccctgaaaactgcctcaccagcctgacccaggaccggggcgggcacggcgccacaggcggctggaagctgtggtccctgtggggcgaatgcacgcgggactgcgggggaggcctccagacgcggacgcgcacctgcctgcccgcgccgggcgtggagggcggcggctgcgagggggtgctggaggagggtcgccagtgcaaccgcgaggcctgcggccccgctgggcgcaccagctcccggagccagtccctgcggtccacagatgcccggcggcgcgaggagctgggggacgagctgcagcagtttgggttcccagccccccagaccggtgacccagcagccgaggagtggtccccgtggagcgtgtgctccagcacctgcggcgagggctggcagacccgcacgcgcttctgcgtgtcctcctcctacagcacgcagtgcagcggacccctgcgcgagcagcggctgtgcaacaactctgccgtgtgcccagtgcatggtgcctgggatgagtggtcgccctggagcctctgctccagcacctgtggccgtggctttcgggatcgcacgcgcacctgcaggcccccccagtttgggggcaacccctgtgagggccctgagaagcaaaccaagttctgcaacattgccctgtgccctggccgggcagtggatggaaactggaatgagtggtcgagctggagcgcctgctccgccagctgctcccagggccgacagcagcgcacgcgtgaatgcaacgggccttcctacgggggtgcggagtgccagggccactgggtggagacccgagactgcttcctgcagcagtgcccagtggatggcaagtggcaggcctgggcgtcatggggcagttgcagcgtcacgtgtggggctggcagccagcgacgggagcgtgtctgctctgggcccttcttcgggggagcagcctgccagggcccccaggatgagtaccggcagtgcggcacccagcggtgtcccgagccccatgagatctgtgatgaggacaactttggtgctgtgatctggaaggagaccccagcgggagaggtggctgctgtccggtgtccccgcaacgccacaggactcatcctgcgacggtgtgagctggacgaggaaggcatcgcctactgggagccccccacctacatccgctgtgtttccattgactacagaaacatccagatgatgacccgggagcacctggccaaggctcagcgagggctgcctggggagggggtctcggaggtcatccagacactggtggagatctctcaggacgggaccagctacagtggggacctgctgtccaccatcgatgtcctgaggaacatgacagagattttccggagagcgtactacagccccacccctggggacgtacagaactttgtccagatccttagcaacctgttggcagaggagaatcgggacaagtgggaggaggcccagctggcgggccccaacgccaaggagctgttccggctggtggaggactttgtggacgtcatcggcttccgcatgaaggacctgagggatgcataccaggtgacagacaacctggttctcagcatccataagctcccagccagcggagccactgacatcagcttccccatgaagggctggcgggccacgggtgactgggccaaggtgccagaggacagggtcactgtgtccaagagtgtcttctccacggggctgacagaggccgatgaagcatccgtgtttgtggtgggcaccgtgctctacaggaacctgggcagcttcctggccctgcagaggaacacgaccgtcctgaattctaaggtgatctccgtgactgtgaaacccccgcctcgctccctgcgcacacccttggagatcgagtttgcccacatgtataatggcaccaccaaccagacctgtatcctgtgggatgagacggatgtaccctcctcctccgcccccccgcagctcgggccctggtcgtggcgcggctgccgcacggtgcccctcgacgccctccggacgcgctgcctctgtgaccggctctccaccttcgccatcttagcccagctcagcgccgacgcgaacatggagaaggcgactctgccgtcggtgacgctcatcgtgggctgtggcgtgtcctctctcaccctgctcatgctggtcatcatctacgtgtccgtgtggaggtacattcgctcagagcgttctgtcatcctcatcaacttctgcctgtccatcatctcctccaatgccctcatcctcatcgggcagacccagacccgcaacaaggtggtgtgcacgctggtggccgccttcctgcacttcttcttcctgtcctccttctgctgggtgctcaccgaggcctggcagtcctacatggcggtgacgggccacctccggaaccgcctcatccgcaagcgcttcctctgcctgggctgggggctccctgcactggttgtggccatttctgtgggattcaccaaggccaaagggtacagcaccatgaactactgctggctctccctggaggggggactgctctatgccttcgtgggacctgccgctgccgttgtgctggtgaacatggtcattgggatcctggtgttcaacaagctcgtgtccaaagacggcatcacggacaagaagctgaaggagcgggcaggggcctccctgtggagctcctgcgtggtgctgccgctgctggcgctgacctggatgtcggctgtgctcgccgtcaccgaccgccgctccgccctcttccagatcctcttcgctgtcttcgactcgctggagggcttcgtcatcgtcatggtgcactgtatcctccgtagagaggtccaggacgctgtgaaatgccgtgtggttgaccggcaggaggagggcaacggggactcagggggctccttccagaacggccacgcccagctcatgaccgacttcgagaaggacgtggatctggcctgtagatcagtgctgaacaaggacatcgcggcctgccgcactgccaccatcacgggcacactgaagcggccgtctctgcccgaggaggagaagctgaagctggcccatgccaaggggccgcccaccaatttcaacagcctgccggccaacgtgtccaagctgcacctgcacggctcaccccgctatcccggcgggcccctgcccgacttccccaaccactcactgaccctcaagagggacaaggcgcccaagtcctccttcgtcggtgacggggacatcttcaagaagctggactcggagctgagccgggcccaggagaaggctctggacacgagctacgtgatcctgcccacggccacggccacgctgcggcccaagcccaaggaggagcccaagtacagcatccacattgaccagatgccgcagacccgcctcatccacctcagcacggcccccgaggccagcctccccgcccgcagcccgccctcccgccagccccccagcggcgggccccccgaggcaccccctgcccagcccccaccgcctccgcccccaccgccaccacctccccagcagcccctgcccccaccgcccaatctggagccggcaccccccagcctgggggatcccggggagcctgccgcccatccgggacccagcacggggcccagcaccaagaacgagaatgtcgccaccttgtctgtgagctccctggagcggcggaagtcgcggtatgcagaactggactttgagaagatcatgcacacccggaagcggcaccaagacatgttccaggacctgaaccggaagctgcagcacgcagcggagaaggacaaggaggtgctggggccggacagcaagccggaaaagcagcagacgcccaacaagaggccctgggagagcctccggaaagcccacgggacgcccacgtgggtgaagaaggagctggagccgctgcagccgtcgccgctggagcttcgcagcgtggagtgggagaggtcgggcgccacgatcccgctggtgggccaggacatcatcgacctccagaccgaggtctgagcgggtgggcggcggccacgcactgggccacggaggagggatgctgctccgcccgctcctgccgcagacgggcacagacacgctcgcgggcagcgggccaggcccgcaccccggcctcagggcgctcagacggcggccaggcacagggcccgcagtgctgggaccagagccagatgcaggacaggaggcggcccggccagcgggcacagggcaccagaggccgaaggtgcctcagactccgccctcctcgggccgaggcccagcgggcagatgggcggacggctgtggaccgtggacaggcccagcgcggccagcgtcccagggtacccgcctgagctcctgctgcggaggagctgcctgcttggcccggccggcctggcaccgttttttaaacacccccatccctcgggaagcagccagctccccacaccttccagggccctaggcccctcctagacccaggtggagggcacagccctccgaccctcatggcccccaggggcaggactgagtcccctccaggaagaagcaggggggaatctattttttctctccttttcttttcttcaataaaaagaattaaaaacccatc

SEQ ID NO: 105386 - DNA, 5400 bp, Homo sapiens
  Payload ID: 675
  Gene Symbol: ADGRB2
  Gene Name: adhesion G protein-coupled receptor B2
  Uniprot ID: O60241
  ENST ID: ENST00000373655
  CDS Start-End: 343-5097
gccgcccgggagagcgggagcctcggccctccgcgcggctgcagctacctaccctgcgcccggcccggtccccgacttagggatggcaaacttgcgccccgtggccgcccccgccagcgccggcccccgctcctgctgctgacggcgcccaggaaatccacagcagtgatacatgtgacgtccacactgacagtgccctcctgtgggcatggctcaggttgtgcgcagttcctggcacactggctgtaactccgcccctttctctccctctcagtaaagcaagattacgcggtgacatgcctcacagctgatcacgacacacggggatggagagcaagagttatggagaatacaggttggatgggcaagggacataggatgaccccagcctgtcccctcttactgtctgtgattctgtccctgcgcctggccaccgccttcgaccccgcccccagtgcctgctctgccctggcctcgggtgtgctctacggggccttctcgctgcaggacctctttcctaccatcgcctcgggctgctcctggaccctggagaaccctgaccccaccaagtactccctctacctgcgcttcaaccgccaggagcaggtgtgcgcacactttgccccccgcctgctgcccctggaccactacctggtcaactttacctgcctgcggcctagccccgaggaggcggtggcccaggcggagtcagaggtggggcggccagaagaggaggaggcagaggcggcagcggggttggagctgtgcagcggctcaggcccctttaccttcctgcacttcgacaagaacttcgtgcagctgtgcctgtcggctgagccctccgaggccccgcgcctgctggcgcccgctgccctagccttccgctttgtcgaggtcttgctcatcaacaacaacaactctagccaattcacctgtggtgtgctctgccgctggagtgaggagtgtggccgcgctgccggcagggcctgcggctttgctcagccaggctgcagctgccctggagaggcgggggccggctccaccaccaccacatctccaggccctcctgctgcccacaccctgtccaatgccctggtgcccgggggcccagccccacctgctgaggccgatttgcactcggggagcagcaatgatctgttcacaaccgagatgagatatggtgaggagccggaagaggaaccgaaagtgaaaacccagtggccgaggtctgcagatgagcctgggctatacatggcgcagacaggcgacccggcggctgaggagtggtccccgtggagcgtgtgttccctgacgtgtgggcagggtctgcaggtgcggacccgctcctgtgtgtcctccccctatgggaccctgtgcagcgggcccctgcgggagaccaggccctgcaacaattcagccacctgcccagtgcacggcgtgtgggaggagtgggggtcctggagcctgtgctcccgcagctgcgggcgggggtcccggagccggatgcggacctgcgtgcccccccagcacggcggcaaggcctgcgagggtcctgagctgcagactaagctctgcagtatggctgcctgcccggtggaaggccagtggttagaatggggtccctggggcccatgctccacgtcctgtgccaatgggacccaacagcgcagccggaagtgcagcgtggcgggcccagcctgggccacatgcacgggtgccctcactgacacccgggagtgcagcaacctcgagtgcccggccactgatagcaagtgggggccatggaatgcgtggagcctgtgctctaagacgtgtgacacaggctggcagcgccgcttccgcatgtgccaggccacgggcacgcagggctacccctgcgagggcaccggagaggaggtgaagccttgtagtgagaagaggtgtccagccttccatgagatgtgcagggatgagtacgtgatgctgatgacgtggaagaaggcagctgctggcgagatcatctacaacaagtgccccccgaatgcctcagggtctgccagccgccgctgtctcctcagtgcccaaggcgtggcgtactgggggctgcccagctttgctcgctgcatctcccatgagtaccgctacctgtatctgtcacttagggagcacctggccaaggggcagcgcatgctggcaggcgagggcatgtcgcaggtggtgcgcagcctgcaggagctactggcccggcgcacctactatagtggggacctgctcttctctgtggacattctgaggaatgtcactgacacctttaagagggccacctacgtgccctcggctgatgatgtgcagcgcttcttccaggtggtgagcttcatggtggatgcggaaaacaaggagaagtgggacgatgctcagcaggtgtcccctggctctgtgcacctgctccgtgtcgtggaggacttcattcacctggtgggcgatgctctcaaggccttccagagctctctgattgtcacagataatctagtgatcagcattcagcgagagcccgtctcagctgtgtccagtgacatcacgttccccatgcggggccgccggggcatgaaggactgggtgcggcactcagaggaccgcctcttcctgcccaaggaggtgctcagcctctcctccccagggaagccagccacatctggggcagcaggcagccctggcagggggaggggcccaggaacggtgcctcctggcccaggccactcccaccagcgcctcctcccagcagaccctgatgagtcctcctactttgtgatcggtgctgtactctaccgcacccttggcctcatcctgccgcctcccaggcccccgctggccgtcacatcccgggtgatgacagtgactgtgcgcccccctacccagcctccagctgagcccctcatcactgtggagctctcctacatcatcaatgggaccacggatccccattgcgccagctgggactactccagagcagatgccagctcaggagactgggacactgaaaattgccagaccctggagacccaggcagctcacacccgctgccagtgccagcacctgtccacctttgctgtactagcccagccgcccaaggacctgaccctggagctggcgggctccccctcggtccccctggtgatcggctgtgcagtgtcgtgcatggcgctgctcaccctgctcgccatctatgccgccttttggaggttcataaaatctgaacgctccatcatcttgctgaacttctgcctgtccatcttggcatccaacatcctgatcctcgtgggccagtcccgggtgctgagcaagggcgtgtgcaccatgacggctgccttcctgcacttcttctttctctcctccttttgctgggtgcttaccgaggcctggcagtcctacctggctgtcattgggcggatgcgcacccgcctcgttcgcaagcgcttcctctgcctgggctggggtctgcctgccctggtggtggccgtgtctgttggctttacccgaacgaaaggatacggtacatccagctactgctggctctccctggagggcggcctgctctacgcctttgtgggccctgcagccgtcattgtcctggtgaacatgctcatcggaatcatcgtcttcaacaagctcatggcacgtgatggcatctccgacaaatccaagaagcagagggccgggtcggagcggtgcccctgggccagcctgctcctcccctgctcagcgtgtggagcggtccccagccccctgctcagctcagcctcggccaggaacgccatggcctcactctggagctcctgcgtggtgctgcccctgctggcgctcacctggatgtctgccgtcctggctatgacagaccgccgttccgtcctcttccaggccctctttgctgtcttcaactccgcgcagggctttgtcatcactgctgtgcactgcttcctgcgccgagaggtccaggatgtggtgaagtgccagatgggggtgtgccgggctgatgagagcgaagactcccctgactcgtgtaagaacgggcagctgcagatcctgtcagactttgaaaaggatgtggatctggcttgtcaaacagtgctgttcaaggaggtcaacacttgcaacccgtccaccatcacgggcacactatcccgcctgtccctggatgaggatgaggagcccaagtcctgcctcgtgggccctgagggcagcctcagcttctcaccactgcctgggaatatcctggtgcccatggcagcctcaccagggctgggggagcctccgcccccacaggaggccaaccctgtttacatgtgtggggagggtggcctgcggcagctggacctcacatggctgcggcccactgagccaggctctgagggagactacatggtgctgccccggcggactttgagcctgcagcctggcggtgggggtggaggtggtgaggatgcccccagggcccggccggaggggaccccccggcgagctgccaagacagtggcccacactgaaggctaccccagcttcctgtccgtggaccactcgggcctggggctgggccctgcctatggatctctccagaatccctatggaatgaccttccaaccgccaccgccgacacccagcgcccgccaagtgcccgagccaggggagcgcagccggaccatgcctcgcaccgtgcccggctctaccatgaagatgggctccctggagcgaaagaaattacggtattcagacctggactttgaggtgatgcacacccggaaacggcattcagaactctaccacgagctcaaccagaagttccacactttcgaccgctaccgcagccagtccacggccaagagggagaagcggtggagtgtgtcctcgggtggggcagccgagcggagcgtgtgcaccgataagcccagccctggggagcgccccagcttgtcccaacatcggcgccatcagagctggagcaccttcaaatctatgacactgggctcgctgccccccaagccccgagaacggctgactctgcaccgggcagcagcctgggagcccacagaaccaccggatggtgacttccagacagaggtgtgagtgccacgctggactgcccactgcatataaatatatatatctctctattttcacactccactttggaactacccaggagccagcgccctctcccctctcccgagggctgggcagggaggcgccgtggactcagccaggctgggggagccggacatggcttggcctggggtcccagggcccttccttgtttctcagaggcccctcagccactggaaccccatcttcagcccagcctgtccgtccctgtcccgggctggggaggggggaggggaactttgttgggaataaacttcactctgtgga

SEQ ID NO: 105387 - DNA, 5414 bp, Homo sapiens
  Payload ID: 675
  Gene Symbol: ADGRB2
  Gene Name: adhesion G protein-coupled receptor B2
  Uniprot ID: O60241
  ENST ID: ENST00000373658
  CDS Start-End: 355-5112
ttttctgcacccgccgcccgggagagcgggagcctcggccctccgcgcggctgcagctacctaccctgcgcccggcccggtccccgacttagggatggcaaacttgcgccccgtggccgcccccgccagcgccggcccccgctcctgctgctgacggcgcccaggaaatccacagcagtgatacatgtgacgtccacactgacagtgccctcctgtgggcatggctcaggttgtgcgcagttcctggcacactggctgtaactccgcccctttctctccctctcagtaaagcaagattacgcggtgacatgcctcacagctgatcacgacacacggggatggagagcaagagttatggagaatacaggttggatgggcaagggacataggatgaccccagcctgtcccctcttactgtctgtgattctgtccctgcgcctggccaccgccttcgaccccgcccccagtgcctgctctgccctggcctcgggtgtgctctacggggccttctcgctgcaggacctctttcctaccatcgcctcgggctgctcctggaccctggagaaccctgaccccaccaagtactccctctacctgcgcttcaaccgccaggagcaggtgtgcgcacactttgccccccgcctgctgcccctggaccactacctggtcaactttacctgcctgcggcctagccccgaggaggcggtggcccaggcggagtcagaggtggggcggccagaagaggaggaggcagaggcggcagcggggttggagctgtgcagcggctcaggcccctttaccttcctgcacttcgacaagaacttcgtgcagctgtgcctgtcggctgagccctccgaggccccgcgcctgctggcgcccgctgccctagccttccgctttgtcgaggtcttgctcatcaacaacaacaactctagccaattcacctgtggtgtgctctgccgctggagtgaggagtgtggccgcgctgccggcagggcctgcggctttgctcagccaggctgcagctgccctggagaggcgggggccggctccaccaccaccacatctccaggccctcctgctgcccacaccctgtccaatgccctggtgcccgggggcccagccccacctgctgaggccgatttgcactcggggagcagcaatgatctgttcacaaccgagatgagatatggtgaggagccggaagaggaaccgaaagtgaaaacccagtggccgaggtctgcagatgagcctgggctatacatggcgcagacaggcgacccggcggctgaggagtggtccccgtggagcgtgtgttccctgacgtgtgggcagggtctgcaggtgcggacccgctcctgtgtgtcctccccctatgggaccctgtgcagcgggcccctgcgggagaccaggccctgcaacaattcagccacctgcccagtgcacggcgtgtgggaggagtgggggtcctggagcctgtgctcccgcagctgcgggcgggggtcccggagccggatgcggacctgcgtgcccccccagcacggcggcaaggcctgcgagggtcctgagctgcagactaagctctgcagtatggctgcctgcccggtggaaggccagtggttagaatggggtccctggggcccatgctccacgtcctgtgccaatgggacccaacagcgcagccggaagtgcagcgtggcgggcccagcctgggccacatgcacgggtgccctcactgacacccgggagtgcagcaacctcgagtgcccggccactgatagcaagtgggggccatggaatgcgtggagcctgtgctctaagacgtgtgacacaggctggcagcgccgcttccgcatgtgccaggccacgggcacgcagggctacccctgcgagggcaccggagaggaggtgaagccttgtagtgagaagaggtgtccagccttccatgagatgtgcagggatgagtacgtgatgctgatgacgtggaagaaggcagctgctggcgagatcatctacaacaagtgccccccgaatgcctcagggtctgccagccgccgctgtctcctcagtgcccaaggcgtggcgtactgggggctgcccagctttgctcgctgcatctcccatgagtaccgctacctgtatctgtcacttagggagcacctggccaaggggcagcgcatgctggcaggcgagggcatgtcgcaggtggtgcgcagcctgcaggagctactggcccggcgcacctactatagtggggacctgctcttctctgtggacattctgaggaatgtcactgacacctttaagagggccacctacgtgccctcggctgatgatgtgcagcgcttcttccaggtggtgagcttcatggtggatgcggaaaacaaggagaagtgggacgatgctcagcaggtgtcccctggctctgtgcacctgctccgtgtcgtggaggacttcattcacctggtgggcgatgctctcaaggccttccagagctctctgattgtcacagataatctagtgatcagcattcagcgagagcccgtctcagctgtgtccagtgacatcacgttccccatgcggggccgccggggcatgaaggactgggtgcggcactcagaggaccgcctcttcctgcccaaggaggtgctcagcctctcctccccagggaagccagccacatctggggcagcaggcagccctggcagggggaggggcccaggaacggtgcctcctggcccaggccactcccaccagcgcctcctcccagcagaccctgatgagtcctcctactttgtgatcggtgctgtactctaccgcacccttggcctcatcctgccgcctcccaggcccccgctggccgtcacatcccgggtgatgacagtgactgtgcgcccccctacccagcctccagctgagcccctcatcactgtggagctctcctacatcatcaatgggaccacggatccccattgcgccagctgggactactccagagcagatgccagctcaggagactgggacactgaaaattgccagaccctggagacccaggcagctcacacccgctgccagtgccagcacctgtccacctttgctgtactagcccagccgcccaaggacctgaccctggagctggcgggctccccctcggtccccctggtgatcggctgtgcagtgtcgtgcatggcgctgctcaccctgctcgccatctatgccgccttttggaggttcataaaatctgaacgctccatcatcttgctgaacttctgcctgtccatcttggcatccaacatcctgatcctcgtgggccagtcccgggtgctgagcaagggcgtgtgcaccatgacggctgccttcctgcacttcttctttctctcctccttttgctgggtgcttaccgaggcctggcagtcctacctggctgtcattgggcggatgcgcacccgcctcgttcgcaagcgcttcctctgcctgggctggggtctgcctgccctggtggtggccgtgtctgttggctttacccgaacgaaaggatacggtacatccagctactgctggctctccctggagggcggcctgctctacgcctttgtgggccctgcagccgtcattgtcctggtgaacatgctcatcggaatcatcgtcttcaacaagctcatggcacgtgatggcatctccgacaaatccaagaagcagagggccgggtcggagcggtgcccctgggccagcctgctcctcccctgctcagcgtgtggagcggtccccagccccctgctcagctcagcctcggccaggaacgccatggcctcactctggagctcctgcgtggtgctgcccctgctggcgctcacctggatgtctgccgtcctggctatgacagaccgccgttccgtcctcttccaggccctctttgctgtcttcaactccgcgcagggctttgtcatcactgctgtgcactgcttcctgcgccgagaggtccaggatgtggtgaagtgccagatgggggtgtgccgggctgatgagagcgaagactcccctgactcgtgtaagaacgggcagctgcagatcctgtcagactttgaaaaggatgtggatctggcttgtcaaacagtgctgttcaaggaggtcaacacttgcaacccgtccaccatcacgggcacactatcccgcctgtccctggatgaggatgaggagcccaagtcctgcctcgtgggccctgagggcagcctcagcttctcaccactgcctgggaatatcctggtgcccatggcagcctcaccagggctgggggagcctccgcccccacaggaggccaaccctgtttacatgtgtggggagggtggcctgcggcagctggacctcacatggctgcggcccactgagccaggctctgagggagactacatggtgctgccccggcggactttgagcctgcagcctggcggtgggggtggaggtggtgaggatgcccccagggcccggccggaggggaccccccggcgagctgccaagacagtggcccacactgaaggctaccccagcttcctgtccgtggaccactcgggcctggggctgggccctgcctatggatctctccagaatccctatggaatgaccttccaaccgccaccgccgacacccagcgcccgccaagtgcccgagccaggggagcgcagccggaccatgcctcgcaccgtgcccggctctaccatgaagatgggctccctggagcgaaagaaattacggtattcagacctggactttgagaaggtgatgcacacccggaaacggcattcagaactctaccacgagctcaaccagaagttccacactttcgaccgctaccgcagccagtccacggccaagagggagaagcggtggagtgtgtcctcgggtggggcagccgagcggagcgtgtgcaccgataagcccagccctggggagcgccccagcttgtcccaacatcggcgccatcagagctggagcaccttcaaatctatgacactgggctcgctgccccccaagccccgagaacggctgactctgcaccgggcagcagcctgggagcccacagaaccaccggatggtgacttccagacagaggtgtgagtgccacgctggactgcccactgcatataaatatatatatctctctattttcacactccactttggaactacccaggagccagcgccctctcccctctcccgagggctgggcagggaggcgccgtggactcagccaggctgggggagccggacatggcttggcctggggtcccagggcccttccttgtttctcagaggcccctcagccactggaaccccatcttcagcccagcctgtccgtccctgtcccgggctggggaggggggaggggaactttgttgggaataaacttcactctgtgg

SEQ ID NO: 105388 - DNA, 4675 bp, Homo sapiens
  Payload ID: 675
  Gene Symbol: ADGRB2
  Gene Name: adhesion G protein-coupled receptor B2
  ENST ID: ENST00000398538
  CDS Start-End: 2-4666
gatgaccccagcctgtcccctcttactgtctgtgattctgtccctgcgcctggccaccgccttcgaccccgcccccagtgcctgctctgccctggcctcgggtgtgctctacggggccttctcgctgcaggacctctttcctaccatcgcctcgggctgctcctggaccctggagaaccctgaccccaccaagtactccctctacctgcgcttcaaccgccaggagcaggtgtgcgcacactttgccccccgcctgctgcccctggaccactacctggtcaactttacctgcctgcggcctagccccgaggaggcggtggcccaggcggagtcagaggtggggcggccagaagaggaggaggcagaggcggcagcggggttggagctgtgcagcggctcaggcccctttaccttcctgcacttcgacaagaacttcgtgcagctgtgcctgtcggctgagccctccgaggccccgcgcctgctggcgcccgctgccctagccttccgctttgtcgaggtcttgctcatcaacaacaacaactctagccaattcacctgtggtgtgctctgccgctggagtgaggagtgtggccgcgctgccggcagggcctgcggctttgctcagccaggctgcagctgccctggagaggcgggggccggctccaccaccaccacatctccaggccctcctgctgcccacaccctgtccaatgccctggtgcccgggggcccagccccacctgctgaggccgatttgcactcggggagcagcaatgatctgttcacaaccgagatgagatatggtgaggagccggaagaggaaccgaaagtgaaaacccagtggccgaggtctgcagatgagcctgggctatacatggcgcagacaggcgacccggcggctgaggagtggtccccgtggagcgtgtgttccctgacgtgtgggcagggtctgcaggtgcggacccgctcctgtgtgtcctccccctatgggaccctgtgcagcgggcccctgcgggagaccaggccctgcaacaattcagccacctgcccagtgcacggcgtgtgggaggagtgggggtcctggagcctgtgctcccgcagctgcgggcgggggtcccggagccggatgcggacctgcgtgcccccccagcacggcggcaaggcctgcgagggtcctgagctgcagactaagctctgcagtatggctgcctgcccggtggaaggccagtggttagaatggggtccctggggcccatgctccacgtcctgtgccaatgggacccaacagcgcagccggaagtgcagcgtggcgggcccagcctgggccacatgcacgggtgccctcactgacacccgggagtgcagcaacctcgagtgcccggccactgatagcaagtgggggccatggaatgcgtggagcctgtgctctaagacgtgtgacacaggctggcagcgccgcttccgcatgtgccaggccacgggcacgcagggctacccctgcgagggcaccggagaggaggtgaagccttgtagtgagaagaggtgtccagccttccatgagatgtgcagggatgagtacgtgatgctgatgacgtggaagaaggcagctgctggcgagatcatctacaacaagtgccccccgaatgcctcagggtctgccagccgccgctgtctcctcagtgcccaaggcgtggcgtactgggggctgcccagctttgctcgctgcatctcccatgagtaccgctacctgtatctgtcacttagggagcacctggccaaggggcagcgcatgctggcaggcgagggcatgtcgcaggtggtgcgcagcctgcaggagctactggcccggcgcacctactatagtggggacctgctcttctctgtggacattctgaggaatgtcactgacacctttaagagggccacctacgtgccctcggctgatgatgtgcagcgcttcttccaggtggtgagcttcatggtggatgcggaaaacaaggagaagtgggacgatgctcagcaggtgtcccctggctctgtgcacctgctccgtgtcgtggaggacttcattcacctggtgggcgatgctctcaaggccttccagagctctctgattgtcacagataatctagtgatcagcattcagcgagagcccgtctcagctgtgtccagtgacatcacgttccccatgcggggccgccggggcatgaaggactgggtgcggcactcagaggaccgcctcttcctgcccaaggaggtgctcagcctctcctccccagggaagccagccacatctggggcagcaggcagccctggcagggggaggggcccaggaacggtgcctcctggcccaggccactcccaccagcgcctcctcccagcagaccctgatgagtcctcctactttgtgatcggtgctgtactctaccgcacccttggcctcatcctgccgcctcccaggcccccgctggccgtcacatcccgggtgatgacagtgactgtgcgcccccctacccagcctccagctgagcccctcatcactgtggagctctcctacatcatcaatgggaccacggatccccattgcgccagctgggactactccagagcagatgccagctcaggagactgggacactgaaaattgccagaccctggagacccaggcagctcacacccgctgccagtgccagcacctgtccacctttgctgtactagcccagccgcccaaggacctgaccctggagctggcgggctccccctcggtccccctggtgatcggctgtgcagtgtcgtgcatggcgctgctcaccctgctcgccatctatgccgccttttggaggttcataaaatctgaacgctccatcatcttgctgaacttctgcctgtccatcttggcatccaacatcctgatcctcgtgggccagtcccgggtgctgagcaagggcgtgtgcaccatgacggctgccttcctgcacttcttctttctctcctccttttgctgggtgcttaccgaggcctggcagtcctacctggctgtcattgggcggatgcgcacccgcctcgttcgcaagcgcttcctctgcctgggctggggtctgcctgccctggtggtggccgtgtctgttggctttacccgaacgaaaggatacggtacatccagctactgctggctctccctggagggcggcctgctctacgcctttgtgggccctgcagccgtcattgtcctggtgaacatgctcatcggaatcatcgtcttcaacaagctcatggcacgtgatggcatctccgacaaatccaagaagcagagggccgggtcggagcggtgcccctgggccagcctgctcctcccctgctcagcgtgtggagcggtccccagccccctgctcagctcagcctcggccaggaacgccatggcctcactctggagctcctgcgtggtgctgcccctgctggcgctcacctggatgtctgccgtcctggctatgacagaccgccgttccgtcctcttccaggccctctttgctgtcttcaactccgcgcagggctttgtcatcactgctgtgcactgcttcctgcgccgagaggtccaggatgtggtgaagtgccagatgggggtgtgccgggctgatgagagcgaagactcccctgactcgtgtaagaacgggcagctgcagatcctgtcagactttgaaaaggatgtggatctggcttgtcaaacagtgctgttcaaggaggtcaacacttgcaacccgtccaccatcacgggcacactatcccgcctgtccctggatgaggatgaggagcccaagtcctgcctcgtgggccctgagggcagcctcagcttctcaccactgcctgggaatatcctggtgcccatggcagcctcaccagggctgggggagcctccgcccccacaggaggccaaccctgtttacatgtgtggggagggtggcctgcggcagctggacctcacatggctgcggcccactgagccaggctctgagggagactacatggtgctgccccggcggactttgagcctgcagcctggcggtgggggtggaggtggtgaggatgcccccagggcccggccggaggggaccccccggcgagctgccaagacagtggcccacactgaaggctaccccagcttcctgtccgtggaccactcgggcctggggctgggccctgcctatggatctctccagaatccctatggaatgaccttccaaccgccaccgccgacacccagcgcccgccaagtgcccgagccaggggagcgcagccggaccatgcctcgcaccgtgcccggctctaccatgaagatgggctccctggagcgaaagaaattacggtattcagacctggactttgagaaggtgatgcacacccggaaacggcattcagaactctaccacgagctcaaccagaagttccacactttcgaccgctaccgcagccagtccacggccaaggataagcccagccctggggagcgccccagcttgtcccaacatcggcgccatcagagctggagcaccttcaaatctatgacactgggctcgctgccccccaagccccgagaacggctgactctgcaccgggcagcagcctgggagcccacagaaccaccggatggtgacttccagacagaggtgtgagtgccacgc

SEQ ID NO: 105389 - DNA, 5176 bp, Homo sapiens
  Payload ID: 675
  Gene Symbol: ADGRB2
  Gene Name: adhesion G protein-coupled receptor B2
  ENST ID: ENST00000398542
  CDS Start-End: 473-4873
actcggcccggcgcgcgctgcgggcagcggccggagcggccggaggaaccgggttcggcggcagcggcggcggcgctcagagaccgaagaggatgcggcaccggctctcagagcccggggctgcggccgccgcccgcaaataggaggcggcgcgcggcgcgggcggtgctcggggcgggggagcgggggagcggggggcggcgcggcaaggaggcggcggcggcggcggcggcaggagcccgcgcccggcccggcgccgcccgcccgcccgccccgcgctgctccgcggcgccttttctgcacccgccgcccgggagagcgggagcctcggccctccgcgcggctgcagctacctaccctgcgcccggcccggtccccgacttagggatggcaaacttgcgccccgtggccgcccccgccagcgccggcccccgctcctgctgctgacggcgcccagggcaagggacataggatgaccccagcctgtcccctcttactgtctgtgattctgtccctgcgcctggccaccgccttcgaccccgcccccagtgcctgctctgccctggcctcgggtgtgctctacggggccttctcgctgcaggacctctttcctaccatcgcctcgggctgctcctggaccctggagaaccctgaccccaccaagtactccctctacctgcgcttcaaccgccaggagcaggtgtgcgcacactttgccccccgcctgctgcccctggaccactacctggtcaactttacctgcctgcggcctagccccgaggaggcggtggcccaggcggagtcagaggtggggcggccagaagaggaggaggcagaggcggcagcggggttggagctgtgcagcggctcaggcccctttaccttcctgcacttcgacaagaacttcgtgcagctgtgcctgtcggctgagccctccgaggccccgcgcctgctggcgcccgctgccctagccttccgctttgtcgaggtcttgctcatcaacaacaacaactctagccaattcacctgtggtgtgctctgccgctggagtgaggagtgtggccgcgctgccggcagggcctgcggctttgctcagccaggctgcagctgccctggagaggcgggggccggctccaccaccaccacatctccaggccctcctgctgcccacaccctgtccaatgccctggtgcccgggggcccagccccacctgctgaggccgatttgcactcggggagcagcaatgatctgttcacaaccgagatgagatatggtgaggagccggaagaggaaccgaaagtgaaaacccagtggccgaggtctgcagatgagcctgggctatacatggcgcagacaggcgacccggcggctgaggagtggtccccgtggagcgtgtgttccctgacgtgtgggcagggtctgcaggtgcggacccgctcctgtgtgtcctccccctatgggaccctgtgcagcgggcccctgcgggagaccaggccctgcaacaattcagccacctgcccagtggaaggccagtggttagaatggggtccctggggcccatgctccacgtcctgtgccaatgggacccaacagcgcagccggaagtgcagcgtggcgggcccagcctgggccacatgcacgggtgccctcactgacacccgggagtgcagcaacctcgagtgcccggccactgatagcaagtgggggccatggaatgcgtggagcctgtgctctaagacgtgtgacacaggctggcagcgccgcttccgcatgtgccaggccacgggcacgcagggctacccctgcgagggcaccggagaggaggtgaagccttgtagtgagaagaggtgtccagccttccatgagatgtgcagggatgagtacgtgatgctgatgacgtggaagaaggcagctgctggcgagatcatctacaacaagtgccccccgaatgcctcagggtctgccagccgccgctgtctcctcagtgcccaaggcgtggcgtactgggggctgcccagctttgctcgctgcatctcccatgagtaccgctacctgtatctgtcacttagggagcacctggccaaggggcagcgcatgctggcaggcgagggcatgtcgcaggtggtgcgcagcctgcaggagctactggcccggcgcacctactatagtggggacctgctcttctctgtggacattctgaggaatgtcactgacacctttaagagggccacctacgtgccctcggctgatgatgtgcagcgcttcttccaggtggtgagcttcatggtggatgcggaaaacaaggagaagtgggacgatgctcagcaggtgtcccctggctctgtgcacctgctccgtgtcgtggaggacttcattcacctggtgggcgatgctctcaaggccttccagagctctctgattgtcacagataatctagtgatcagcattcagcgagagcccgtctcagctgtgtccagtgacatcacgttccccatgcggggccgccggggcatgaaggactgggtgcggcactcagaggaccgcctcttcctgcccaaggaggtgctcagcctctcctccccagggaagccagccacatctggggcagcaggcagccctggcagggggaggggcccaggaacggtgcctcctggcccaggccactcccaccagcgcctcctcccagcagaccctgatgagtcctcctactttgtgatcggtgctgtactctaccgcacccttggcctcatcctgccgcctcccaggcccccgctggccgtcacatcccgggtgatgacagtgactgtgcgcccccctacccagcctccagctgagcccctcatcactgtggagctctcctacatcatcaatgggaccacggatccccattgcgccagctgggactactccagagcagatgccagctcaggagactgggacactgaaaattgccagaccctggagacccaggcagctcacacccgctgccagtgccagcacctgtccacctttgctgtactagcccagccgcccaaggacctgaccctggagctggcgggctccccctcggtccccctggtgatcggctgtgcagtgtcgtgcatggcgctgctcaccctgctcgccatctatgccgccttttggaggttcataaaatctgaacgctccatcatcttgctgaacttctgcctgtccatcttggcatccaacatcctgatcctcgtgggccagtcccgggtgctgagcaagggcgtgtgcaccatgacggctgccttcctgcacttcttctttctctcctccttttgctgggtgcttaccgaggcctggcagtcctacctggctgtcattgggcggatgcgcacccgcctcgttcgcaagcgcttcctctgcctgggctggggtctgcctgccctggtggtggccgtgtctgttggctttacccgaacgaaaggatacggtacatccagctactgctggctctccctggagggcggcctgctctacgcctttgtgggccctgcagccgtcattgtcctggtgaacatgctcatcggaatcatcgtcttcaacaagctcatggcacgtgatggcatctccgacaaatccaagaagcagagggccggggcctcactctggagctcctgcgtggtgctgcccctgctggcgctcacctggatgtctgccgtcctggctatgacagaccgccgttccgtcctcttccaggccctctttgctgtcttcaactccgcgcagggctttgtcatcactgctgtgcactgcttcctgcgccgagaggtccaggatgtggtgaagtgccagatgggggtgtgccgggctgatgagagcgaagactcccctgactcgtgtaagaacgggcagctgcagatcctgtcagactttgaaaaggatgtggatctggcttgtcaaacagtgctgttcaaggaggtcaacacttgcaacccgtccaccatcacgggcacactatcccgcctgtccctggatgaggatgaggagcccaagtcctgcctcgtgggccctgagggcagcctcagcttctcaccactgcctgggaatatcctggtgcccatggcagcctcaccagggctgggggagcctccgcccccacaggaggccaaccctgtttacatgtgtggggagggtggcctgcggcagctggacctcacatggctgcggcccactgagccaggctctgagggagactacatggtgctgccccggcggactttgagcctgcagcctggcggtgggggtggaggtggtgaggatgcccccagggcccggccggaggggaccccccggcgagctgccaagacagtggcccacactgaaggctaccccagcttcctgtccgtggaccactcgggcctggggctgggccctgcctatggatctctccagaatccctatggaatgaccttccaaccgccaccgccgacacccagcgcccgccaagtgcccgagccaggggagcgcagccggaccatgcctcgcaccgtgcccggctctaccatgaagatgggctccctggagcgaaagaaattacggtattcagacctggactttgagaaggtgatgcacacccggaaacggcattcagaactctaccacgagctcaaccagaagttccacactttcgaccgctaccgcagccagtccacggccaaggataagcccagccctggggagcgccccagcttgtcccaacatcggcgccatcagagctggagcaccttcaaatctatgacactgggctcgctgccccccaagccccgagaacggctgactctgcaccgggcagcagcctgggagcccacagaaccaccggatggtgacttccagacagaggtgtgagtgccacgctggactgcccactgcatataaatatatatatctctctattttcacactccactttggaactacccaggagccagcgccctctcccctctcccgagggctgggcagggaggcgccgtggactcagccaggctgggggagccggacatggcttggcctggggtcccagggcccttccttgtttctcagaggcccctcagccactggaaccccatcttcagcccagcctgtccgtccctgtcccgggctggggaggggggaggggaactttgttgggaataaacttcactctgtgga

SEQ ID NO: 105390 - DNA, 4857 bp, Homo sapiens
  Payload ID: 675
  Gene Symbol: ADGRB2
  Gene Name: adhesion G protein-coupled receptor B2
  ENST ID: ENST00000398547
  CDS Start-End: 55-4554
ccagcgccggcccccgctcctgctgctgacggcgcccagggcaagggacataggatgaccccagcctgtcccctcttactgtctgtgattctgtccctgcgcctggccaccgccttcgaccccgcccccagtgcctgctctgccctggcctcgggtgtgctctacggggccttctcgctgcaggacctctttcctaccatcgcctcgggctgctcctggaccctggagaaccctgaccccaccaagtactccctctacctgcgcttcaaccgccaggagcaggtgtgcgcacactttgccccccgcctgctgcccctggaccactacctggtcaactttacctgcctgcggcctagccccgaggaggcggtggcccaggcggagtcagaggtggggcggccagaagaggaggaggcagaggcggcagcggggttggagctgtgcagcggctcaggcccctttaccttcctgcacttcgacaagaacttcgtgcagctgtgcctgtcggctgagccctccgaggccccgcgcctgctggcgcccgctgccctagccttccgctttgtcgaggtcttgctcatcaacaacaacaactctagccaattcacctgtggtgtgctctgccgctggagtgaggagtgtggccgcgctgccggcagggcctgcggctttgctcagccaggctgcagctgccctggagaggcgggggccggctccaccaccaccacatctccaggccctcctgctgcccacaccctgtccaatgccctggtgcccgggggcccagccccacctgctgaggccgatttgcactcggggagcagcaatgatctgttcacaaccgagatgagatatggtgaggagccggaagaggaaccgaaagtgaaaacccagtggccgaggtctgcagatgagcctgggctatacatggcgcagacagtgcacggcgtgtgggaggagtgggggtcctggagcctgtgctcccgcagctgcgggcgggggtcccggagccggatgcggacctgcgtgcccccccagcacggcggcaaggcctgcgagggtcctgagctgcagactaagctctgcagtatggctgcctgcccggtggaaggccagtggttagaatggggtccctggggcccatgctccacgtcctgtgccaatgggacccaacagcgcagccggaagtgcagcgtggcgggcccagcctgggccacatgcacgggtgccctcactgacacccgggagtgcagcaacctcgagtgcccggccactgatagcaagtgggggccatggaatgcgtggagcctgtgctctaagacgtgtgacacaggctggcagcgccgcttccgcatgtgccaggccacgggcacgcagggctacccctgcgagggcaccggagaggaggtgaagccttgtagtgagaagaggtgtccagccttccatgagatgtgcagggatgagtacgtgatgctgatgacgtggaagaaggcagctgctggcgagatcatctacaacaagtgccccccgaatgcctcagggtctgccagccgccgctgtctcctcagtgcccaaggcgtggcgtactgggggctgcccagctttgctcgctgcatctcccatgagtaccgctacctgtatctgtcacttagggagcacctggccaaggggcagcgcatgctggcaggcgagggcatgtcgcaggtggtgcgcagcctgcaggagctactggcccggcgcacctactatagtggggacctgctcttctctgtggacattctgaggaatgtcactgacacctttaagagggccacctacgtgccctcggctgatgatgtgcagcgcttcttccaggtggtgagcttcatggtggatgcggaaaacaaggagaagtgggacgatgctcagcaggtgtcccctggctctgtgcacctgctccgtgtcgtggaggacttcattcacctggtgggcgatgctctcaaggccttccagagctctctgattgtcacagataatctagtgatcagcattcagcgagagcccgtctcagctgtgtccagtgacatcacgttccccatgcggggccgccggggcatgaaggactgggtgcggcactcagaggaccgcctcttcctgcccaaggaggtgctcagcctctcctccccagggaagccagccacatctggggcagcaggcagccctggcagggggaggggcccaggaacggtgcctcctggcccaggccactcccaccagcgcctcctcccagcagaccctgatgagtcctcctactttgtgatcggtgctgtactctaccgcacccttggcctcatcctgccgcctcccaggcccccgctggccgtcacatcccgggtgatgacagtgactgtgcgcccccctacccagcctccagctgagcccctcatcactgtggagctctcctacatcatcaatgggaccacggatccccattgcgccagctgggactactccagagcagatgccagctcaggagactgggacactgaaaattgccagaccctggagacccaggcagctcacacccgctgccagtgccagcacctgtccacctttgctgtactagcccagccgcccaaggacctgaccctggagctggcgggctccccctcggtccccctggtgatcggctgtgcagtgtcgtgcatggcgctgctcaccctgctcgccatctatgccgccttttggaggttcataaaatctgaacgctccatcatcttgctgaacttctgcctgtccatcttggcatccaacatcctgatcctcgtgggccagtcccgggtgctgagcaagggcgtgtgcaccatgacggctgccttcctgcacttcttctttctctcctccttttgctgggtgcttaccgaggcctggcagtcctacctggctgtcattgggcggatgcgcacccgcctcgttcgcaagcgcttcctctgcctgggctggggtctgcctgccctggtggtggccgtgtctgttggctttacccgaacgaaaggatacggtacatccagctactgctggctctccctggagggcggcctgctctacgcctttgtgggccctgcagccgtcattgtcctggtgaacatgctcatcggaatcatcgtcttcaacaagctcatggcacgtgatggcatctccgacaaatccaagaagcagagggccgggtcggagcggtgcccctgggccagcctgctcctcccctgctcagcgtgtggagcggtccccagccccctgctcagctcagcctcggccaggaacgccatggcctcactctggagctcctgcgtggtgctgcccctgctggcgctcacctggatgtctgccgtcctggctatgacagaccgccgttccgtcctcttccaggccctctttgctgtcttcaactccgcgcagggctttgtcatcactgctgtgcactgcttcctgcgccgagaggtccaggatgtggtgaagtgccagatgggggtgtgccgggctgatgagagcgaagactcccctgactcgtgtaagaacgggcagctgcagatcctgtcagactttgaaaaggatgtggatctggcttgtcaaacagtgctgttcaaggaggtcaacacttgcaacccgtccaccatcacgggcacactatcccgcctgtccctggatgaggatgaggagcccaagtcctgcctcgtgggccctgagggcagcctcagcttctcaccactgcctgggaatatcctggtgcccatggcagcctcaccagggctgggggagcctccgcccccacaggaggccaaccctgtttacatgtgtggggagggtggcctgcggcagctggacctcacatggctgcggcccactgagccaggctctgagggagactacatggtgctgccccggcggactttgagcctgcagcctggcggtgggggtggaggtggtgaggatgcccccagggcccggccggaggggaccccccggcgagctgccaagacagtggcccacactgaaggctaccccagcttcctgtccgtggaccactcgggcctggggctgggccctgcctatggatctctccagaatccctatggaatgaccttccaaccgccaccgccgacacccagcgcccgccaagtgcccgagccaggggagcgcagccggaccatgcctcgcaccgtgcccggctctaccatgaagatgggctccctggagcgaaagaaattacggtattcagacctggactttgagaaggtgatgcacacccggaaacggcattcagaactctaccacgagctcaaccagaagttccacactttcgaccgctaccgcagccagtccacggccaaggataagcccagccctggggagcgccccagcttgtcccaacatcggcgccatcagagctggagcaccttcaaatctatgacactgggctcgctgccccccaagccccgagaacggctgactctgcaccgggcagcagcctgggagcccacagaaccaccggatggtgacttccagacagaggtgtgagtgccacgctggactgcccactgcatataaatatatatatctctctattttcacactccactttggaactacccaggagccagcgccctctcccctctcccgagggctgggcagggaggcgccgtggactcagccaggctgggggagccggacatggcttggcctggggtcccagggcccttccttgtttctcagaggcccctcagccactggaaccccatcttcagcccagcctgtccgtccctgtcccgggctggggaggggggaggggaactttgttgggaataaacttcactctgtgga

SEQ ID NO: 105391 - DNA, 4879 bp, Homo sapiens
  Payload ID: 675
  Gene Symbol: ADGRB2
  Gene Name: adhesion G protein-coupled receptor B2
  ENST ID: ENST00000398556
  CDS Start-End: 74-4576
ggggagggagatccagcttcagacatgcaaaggaagaccccgcagaggatcctgcctgacacttagctgtcatatgctgagcctcagagggccagatactcatggcaagggacataggatgaccccagcctgtcccctcttactgtctgtgattctgtccctgcgcctggccaccgccttcgaccccgcccccagtgcctgctctgccctggcctcgggtgtgctctacggggccttctcgctgcaggacctctttcctaccatcgcctcgggctgctcctggaccctggagaaccctgaccccaccaagtactccctctacctgcgcttcaaccgccaggagcaggtgtgcgcacactttgccccccgcctgctgcccctggaccactacctggtcaactttacctgcctgcggcctagccccgaggaggcggtggcccaggcggagtcagaggtggggcggccagaagaggaggaggcagaggcggcagcggggttggagctgtgcagcggctcaggcccctttaccttcctgcacttcgacaagaacttcgtgcagctgtgcctgtcggctgagccctccgaggccccgcgcctgctggcgcccgctgccctagccttccgctttgtcgaggtcttgctcatcaacaacaacaactctagccaattcacctgtggtgtgctctgccgctggagtgaggagtgtggccgcgctgccggcagggcctgcggctttgctcagccaggctgcagctgccctggagaggcgggggccggctccaccaccaccacatctccaggccctcctgctgcccacaccctgtccaatgccctggtgcccgggggcccagccccacctgctgaggccgatttgcactcggggagcagcaatgatctgttcacaaccgagatgagatatggtgaggagccggaagaggaaccgaaagtgaaaacccagtggccgaggtctgcagatgagcctgggctatacatggcgcagacagtgcacggcgtgtgggaggagtgggggtcctggagcctgtgctcccgcagctgcgggcgggggtcccggagccggatgcggacctgcgtgcccccccagcacggcggcaaggcctgcgagggtcctgagctgcagactaagctctgcagtatggctgcctgcccggtggaaggccagtggttagaatggggtccctggggcccatgctccacgtcctgtgccaatgggacccaacagcgcagccggaagtgcagcgtggcgggcccagcctgggccacatgcacgggtgccctcactgacacccgggagtgcagcaacctcgagtgcccggccactgatagcaagtgggggccatggaatgcgtggagcctgtgctctaagacgtgtgacacaggctggcagcgccgcttccgcatgtgccaggccacgggcacgcagggctacccctgcgagggcaccggagaggaggtgaagccttgtagtgagaagaggtgtccagccttccatgagatgtgcagggatgagtacgtgatgctgatgacgtggaagaaggcagctgctggcgagatcatctacaacaagtgccccccgaatgcctcagggtctgccagccgccgctgtctcctcagtgcccaaggcgtggcgtactgggggctgcccagctttgctcgctgcatctcccatgagtaccgctacctgtatctgtcacttagggagcacctggccaaggggcagcgcatgctggcaggcgagggcatgtcgcaggtggtgcgcagcctgcaggagctactggcccggcgcacctactatagtggggacctgctcttctctgtggacattctgaggaatgtcactgacacctttaagagggccacctacgtgccctcggctgatgatgtgcagcgcttcttccaggtggtgagcttcatggtggatgcggaaaacaaggagaagtgggacgatgctcagcaggtgtcccctggctctgtgcacctgctccgtgtcgtggaggacttcattcacctggtgggcgatgctctcaaggccttccagagctctctgattgtcacagataatctagtgatcagcattcagcgagagcccgtctcagctgtgtccagtgacatcacgttccccatgcggggccgccggggcatgaaggactgggtgcggcactcagaggaccgcctcttcctgcccaaggaggtgctcagcctctcctccccagggaagccagccacatctggggcagcaggcagccctggcagggggaggggcccaggaacggtgcctcctggcccaggccactcccaccagcgcctcctcccagcagaccctgatgagtcctcctactttgtgatcggtgctgtactctaccgcacccttggcctcatcctgccgcctcccaggcccccgctggccgtcacatcccgggtgatgacagtgactgtgcgcccccctacccagcctccagctgagcccctcatcactgtggagctctcctacatcatcaatgggaccacggatccccattgcgccagctgggactactccagagcagatgccagctcaggagactgggacactgaaaattgccagaccctggagacccaggcagctcacacccgctgccagtgccagcacctgtccacctttgctgtactagcccagccgcccaaggacctgaccctggagctggcgggctccccctcggtccccctggtgatcggctgtgcagtgtcgtgcatggcgctgctcaccctgctcgccatctatgccgccttttggaggttcataaaatctgaacgctccatcatcttgctgaacttctgcctgtccatcttggcatccaacatcctgatcctcgtgggccagtcccgggtgctgagcaagggcgtgtgcaccatgacggctgccttcctgcacttcttctttctctcctccttttgctgggtgcttaccgaggcctggcagtcctacctggctgtcattgggcggatgcgcacccgcctcgttcgcaagcgcttcctctgcctgggctggggtctgcctgccctggtggtggccgtgtctgttggctttacccgaacgaaaggatacggtacatccagctactgctggctctccctggagggcggcctgctctacgcctttgtgggccctgcagccgtcattgtcctggtgaacatgctcatcggaatcatcgtcttcaacaagctcatggcacgtgatggcatctccgacaaatccaagaagcagagggccggggcctcactctggagctcctgcgtggtgctgcccctgctggcgctcacctggatgtctgccgtcctggctatgacagaccgccgttccgtcctcttccaggccctctttgctgtcttcaactccgcgcagggctttgtcatcactgctgtgcactgcttcctgcgccgagaggtccaggatgtggtgaagtgccagatgggggtgtgccgggctgatgagagcgaagactcccctgactcgtgtaagaacgggcagctgcagatcctgtcagactttgaaaaggatgtggatctggcttgtcaaacagtgctgttcaaggaggtcaacacttgcaacccgtccaccatcacgggcacactatcccgcctgtccctggatgaggatgaggagcccaagtcctgcctcgtgggccctgagggcagcctcagcttctcaccactgcctgggaatatcctggtgcccatggcagcctcaccagggctgggggagcctccgcccccacaggaggccaaccctgtttacatgtgtggggagggtggcctgcggcagctggacctcacatggctgcggcccactgagccaggctctgagggagactacatggtgctgccccggcggactttgagcctgcagcctggcggtgggggtggaggtggtgaggatgcccccagggcccggccggaggggaccccccggcgagctgccaagacagtggcccacactgaaggctaccccagcttcctgtccgtggaccactcgggcctggggctgggccctgcctatggatctctccagaatccctatggaatgaccttccaaccgccaccgccgacacccagcgcccgccaagtgcccgagccaggggagcgcagccggaccatgcctcgcaccgtgcccggctctaccatgaagatgggctccctggagcgaaagaaattacggtattcagacctggactttgagaaggtgatgcacacccggaaacggcattcagaactctaccacgagctcaaccagaagttccacactttcgaccgctaccgcagccagtccacggccaagagggagaagcggtggagtgtgtcctcgggtggggcagccgagcggagcgtgtgcaccgataagcccagccctggggagcgccccagcttgtcccaacatcggcgccatcagagctggagcaccttcaaatctatgacactgggctcgctgccccccaagccccgagaacggctgactctgcaccgggcagcagcctgggagcccacagaaccaccggatggtgacttccagacagaggtgtgagtgccacgctggactgcccactgcatataaatatatatatctctctattttcacactccactttggaactacccaggagccagcgccctctcccctctcccgagggctgggcagggaggcgccgtggactcagccaggctgggggagccggacatggcttggcctggggtcccagggcccttccttgtttctcagaggcccctcagccactggaaccccatcttcagcccagcctgtccgtccctgtcccgggctggggaggggggaggggaactttgttgggaataaacttcactctgtgga

SEQ ID NO: 105392 - DNA, 2541 bp, Homo sapiens
  Payload ID: 675
  Gene Symbol: ADGRB2
  Gene Name: adhesion G protein-coupled receptor B2
  ENST ID: ENST00000420125
  CDS Start-End: 1-2541
ggcaagggacataggatgaccccagcctgtcccctcttactgtctgtgattctgtccctgcgcctggccaccgccttcgaccccgcccccagtgcctgctctgccctggcctcgggtgtgctctacggggccttctcgctgcaggacctctttcctaccatcgcctcgggctgctcctggaccctggagaaccctgaccccaccaagtactccctctacctgcgcttcaaccgccaggagcaggtgtgcgcacactttgccccccgcctgctgcccctggaccactacctggtcaactttacctgcctgcggcctagccccgaggaggcggtggcccaggcggagtcagaggtggggcggccagaagaggaggaggcagaggcggcagcggggttggagctgtgcagcggctcaggcccctttaccttcctgcacttcgacaagaacttcgtgcagctgtgcctgtcggctgagccctccgaggccccgcgcctgctggcgcccgctgccctagccttccgctttgtcgaggtcttgctcatcaacaacaacaactctagccaattcacctgtggtgtgctctgccgctggagtgaggagtgtggccgcgctgccggcagggcctgcggctttgctcagccaggctgcagctgccctggagaggcgggggccggctccaccaccaccacatctccaggccctcctgctgcccacaccctgtccaatgccctggtgcccgggggcccagccccacctgctgaggccgatttgcactcggggagcagcaatgatctgttcacaaccgagatgagatatggtgaggagccggaagaggaaccgaaagtgaaaacccagtggccgaggtctgcagatgagcctgggctatacatggcgcagacaggcgacccggcggctgaggagtggtccccgtggagcgtgtgttccctgacgtgtgggcagggtctgcaggtgcggacccgctcctgtgtgtcctccccctatgggaccctgtgcagcgggcccctgcgggagaccaggccctgcaacaattcagccacctgcccagtggaaggccagtggttagaatggggtccctggggcccatgctccacgtcctgtgccaatgggacccaacagcgcagccggaagtgcagcgtggcgggcccagcctgggccacatgcacgggtgccctcactgacacccgggagtgcagcaacctcgagtgcccggccactgatagcaagtgggggccatggaatgcgtggagcctgtgctctaagacgtgtgacacaggctggcagcgccgcttccgcatgtgccaggccacgggcacgcagggctacccctgcgagggcaccggagaggaggtgaagccttgtagtgagaagaggtgtccagccttccatgagatgtgcagggatgagtacgtgatgctgatgacgtggaagaaggcagctgctggcgagatcatctacaacaagtgccccccgaatgcctcagggtctgccagccgccgctgtctcctcagtgcccaaggcgtggcgtactgggggctgcccagctttgctcgctgcatctcccatgagtaccgctacctgtatctgtcacttagggagcacctggccaaggggcagcgcatgctggcaggcgagggcatgtcgcaggtggtgcgcagcctgcaggagctactggcccggcgcacctactatagtggggacctgctcttctctgtggacattctgaggaatgtcactgacacctttaagagggccacctacgtgccctcggctgatgatgtgcagcgcttcttccaggtggtgagcttcatggtggatgcggaaaacaaggagaagtgggacgatgctcagcaggtgtcccctggctctgtgcacctgctccgtgtcgtggaggacttcattcacctggtgggcgatgctctcaaggccttccagagctctctgattgtcacagataatctagtgatcagcattcagcgagagcccgtctcagctgtgtccagtgacatcacgttccccatgcggggccgccggggcatgaaggactgggtgcggcactcagaggaccgcctcttcctgcccaaggaggtgctcagcctctcctccccagggaagccagccacatctggggcagcaggcagccctggcagggggaggggcccaggaacggtgcctcctggcccaggccactcccaccagcgcctcctcccagcagaccctgatgagtcctcctactttgtgatcggtgctgtactctaccgcacccttggcctcatcctgccgcctcccaggcccccgctggccgtcacatcccgggtgatgacagtgactgtgcgcccccctacccagcctccagctgagcccctcatcactgtggagctctcctacatcatcaatgggaccacggatccccattgcgccagctgggactactccagagcagatgccagctcaggagactgggacactgaaaattgccagaccctggagacccaggcagctcacacccgctgccagtgccag

SEQ ID NO: 105393 - DNA, 539 bp, Homo sapiens
  Payload ID: 675
  Gene Symbol: ADGRB2
  Gene Name: adhesion G protein-coupled receptor B2
  ENST ID: ENST00000436464
  CDS Start-End: 179-183
accgcccccaggggccgagggctgccccttgtcccccttccagttctgcccgcgttttcctccttaaggaggaaccccctcccctaagagagcgaccctctctggcagtcggagcgggaggactgcacagagggggtcgctccctcccctcggcccagtccccagctccggaggcaggatggagggtgtgcgtcccccagggcgacagagctctaggagagcggctcctgaggaccctgtccttgggtccgagcgctggcagaggacccaaagccaccgagtgggggtcaccgcctgcgtggcggcctgggcaggtcgggcggcgagcgccggggaggcggagggaaatccacagcagtgatacatgtgacgtccacactgacagtgccctcctgtgggcatggctcaggttgtgcgcagttcctggcacactggctgtaactccgcccctttctctccctctcagtaaagcaagattacgcggtgacatgcctcacagctgatcacgacacacggggatggagagcaagagttatgga

SEQ ID NO: 105394 - DNA, 4919 bp, Homo sapiens
  Payload ID: 675
  Gene Symbol: ADGRB2
  Gene Name: adhesion G protein-coupled receptor B2
  Uniprot ID: O60241
  ENST ID: ENST00000527361
  CDS Start-End: 39-4694
cagctgatcacgacacacggggatggagagcaagagttatggagaatacaggttggatgggcaagggacataggatgaccccagcctgtcccctcttactgtctgtgattctgtccctgcgcctggccaccgccttcgaccccgcccccagtgcctgctctgccctggcctcgggtgtgctctacggggccttctcgctgcaggacctctttcctaccatcgcctcgggctgctcctggaccctggagaaccctgaccccaccaagtactccctctacctgcgcttcaaccgccaggagcaggtgtgcgcacactttgccccccgcctgctgcccctggaccactacctggtcaactttacctgcctgcggcctagccccgaggaggcggtggcccaggcggagtcagaggtggggcggccagaagaggaggaggcagaggcggcagcggggttggagctgtgcagcggctcaggcccctttaccttcctgcacttcgacaagaacttcgtgcagctgtgcctgtcggctgagccctccgaggccccgcgcctgctggcgcccgctgccctagccttccgctttgtcgaggtcttgctcatcaacaacaacaactctagccaattcacctgtggtgtgctctgccgctggagtgaggagtgtggccgcgctgccggcagggcctgcggctttgctcagccaggctgcagctgccctggagaggcgggggccggctccaccaccaccacatctccaggccctcctgctgcccacaccctgtccaatgccctggtgcccgggggcccagccccacctgctgaggccgatttgcactcggggagcagcaatgatctgttcacaaccgagatgagatatggtgaggagccggaagaggaaccgaaagtgaaaacccagtggccgaggtctgcagatgagcctgggctatacatggcgcagacaggcgacccggcggctgaggagtggtccccgtggagcgtgtgttccctgacgtgtgggcagggtctgcaggtgcggacccgctcctgtgtgtcctccccctatgggaccctgtgcagcgggcccctgcgggagaccaggccctgcaacaattcagccacctgcccagtgcacggcgtgtgggaggagtgggggtcctggagcctgtgctcccgcagctgcgggcgggggtcccggagccggatgcggacctgcgtgcccccccagcacggcggcaaggcctgcgagggtcctgagctgcagactaagctctgcagtatggctgcctgcccggtggaaggccagtggttagaatggggtccctggggcccatgctccacgtcctgtgccaatgggacccaacagcgcagccggaagtgcagcgtggcgggcccagcctgggccacatgcacgggtgccctcactgacacccgggagtgcagcaacctcgagtgcccggccactgatagcaagtgggggccatggaatgcgtggagcctgtgctctaagacgtgtgacacaggctggcagcgccgcttccgcatgtgccaggccacgggcacgcagggctacccctgcgagggcaccggagaggaggtgaagccttgtagtgagaagaggtgtccagccttccatgagatgtgcagggatgagtacgtgatgctgatgacgtggaagaaggcagctgctggcgagatcatctacaacaagtgccccccgaatgcctcagggtctgccagccgccgctgtctcctcagtgcccaaggcgtggcgtactgggggctgcccagctttgctcgctgcatctcccatgagtaccgctacctgtatctgtcacttagggagcacctggccaaggggcagcgcatgctggcaggcgagggcatgtcgcaggtggtgcgcagcctgcaggagctactggcccggcgcacctactatagtggggacctgctcttctctgtggacattctgaggaatgtcactgacacctttaagagggccacctacgtgccctcggctgatgatgtgcagcgcttcttccaggtggtgagcttcatggtggatgcggaaaacaaggagaagtgggacgatgctcagcaggtgtcccctggctctgtgcacctgctccgtgtcgtggaggacttcattcacctggtgggcgatgctctcaaggccttccagagctctctgattgtcacagataatctagtgatcagcattcagcgagagcccgtctcagctgtgtccagtgacatcacgttccccatgcggggccgccggggcatgaaggactgggtgcggcactcagaggaccgcctcttcctgcccaaggaggtgctcagcctctcctccccagggaagccagccacatctggggcagcaggcagccctggcagggggaggggcccaggaacggtgcctcctggcccaggccactcccaccagcgcctcctcccagcagaccctgatgagtcctcctactttgtgatcggtgctgtactctaccgcacccttggcctcatcctgccgcctcccaggcccccgctggccgtcacatcccgggtgatgacagtgactgtgcgcccccctacccagcctccagctgagcccctcatcactgtggagctctcctacatcatcaatgggaccacggatccccattgcgccagctgggactactccagagcagatgccagctcaggagactgggacactgaaaattgccagaccctggagacccaggcagctcacacccgctgccagtgccagcacctgtccacctttgctgtactagcccagccgcccaaggacctgaccctggagctggcgggctccccctcggtccccctggtgatcggctgtgcagtgtcgtgcatggcgctgctcaccctgctcgccatctatgccgccttttggaggttcataaaatctgaacgctccatcatcttgctgaacttctgcctgtccatcttggcatccaacatcctgatcctcgtgggccagtcccgggtgctgagcaagggcgtgtgcaccatgacggctgccttcctgcacttcttctttctctcctccttttgctgggtgcttaccgaggcctggcagtcctacctggctgtcattgggcggatgcgcacccgcctcgttcgcaagcgcttcctctgcctgggctggggtctgcctgccctggtggtggccgtgtctgttggctttacccgaacgaaaggatacggtacatccagctactgctggctctccctggagggcggcctgctctacgcctttgtgggccctgcagccgtcattgtcctggtgaacatgctcatcggaatcatcgtcttcaacaagctcatggcacgtgatggcatctccgacaaatccaagaagcagagggccggggcctcactctggagctcctgcgtggtgctgcccctgctggcgctcacctggatgtctgccgtcctggctatgacagaccgccgttccgtcctcttccaggccctctttgctgtcttcaactccgcgcagggctttgtcatcactgctgtgcactgcttcctgcgccgagaggtccaggatgtggtgaagtgccagatgggggtgtgccgggctgatgagagcgaagactcccctgactcgtgtaagaacgggcagctgcagatcctgtcagactttgaaaaggatgtggatctggcttgtcaaacagtgctgttcaaggaggtcaacacttgcaacccgtccaccatcacgggcacactatcccgcctgtccctggatgaggatgaggagcccaagtcctgcctcgtgggccctgagggcagcctcagcttctcaccactgcctgggaatatcctggtgcccatggcagcctcaccagggctgggggagcctccgcccccacaggaggccaaccctgtttacatgtgtggggagggtggcctgcggcagctggacctcacatggctgcggcccactgagccaggctctgagggagactacatggtgctgccccggcggactttgagcctgcagcctggcggtgggggtggaggtggtgaggatgcccccagggcccggccggaggggaccccccggcgagctgccaagacagtggcccacactgaaggctaccccagcttcctgtccgtggaccactcgggcctggggctgggccctgcctatggatctctccagaatccctatggaatgaccttccaaccgccaccgccgacacccagcgcccgccaagtgcccgagccaggggagcgcagccggaccatgcctcgcaccgtgcccggctctaccatgaagatgggctccctggagcgaaagaaattacggtattcagacctggactttgaggtgatgcacacccggaaacggcattcagaactctaccacgagctcaaccagaagttccacactttcgaccgctaccgcagccagtccacggccaagagggagaagcggtggagtgtgtcctcgggtggggcagccgagcggagcgtgtgcaccgataagcccagccctggggagcgccccagcttgtcccaacatcggcgccatcagagctggagcaccttcaaatctatgacactgggctcgctgccccccaagccccgagaacggctgactctgcaccgggcagcagcctgggagcccacagaaccaccggatggtgacttccagacagaggtgtgagtgccacgctggactgcccactgcatataaatatatatatctctctattttcacactccactttggaactacccaggagccagcgccctctcccctctcccgagggctgggcagggaggcgccgtggactcagccaggctgggggagccggacatggcttggcctggggtcccagggcccttccttgtttctcagaggcccctcagccactggaaccccatcttc

SEQ ID NO: 105395 - DNA, 1613 bp, Homo sapiens
  Payload ID: 675
  Gene Symbol: ADGRB2
  Gene Name: adhesion G protein-coupled receptor B2
  ENST ID: ENST00000533175
  CDS Start-End: 92-1613
atacatataacatccctgcgcacaggaacaagcaacatgcattcaggacttgggcacatgttaatacaccgtgcatgtgtgtggcacttgcatgcacctacccaggcaacatggcagtgcacacttagggcacctgtatgcatatgcaaagttcagcgcacatgactggcacctgcatgcacagggacatgcaatatgcaatgcacatgggaagggcaagggacataggatgaccccagcctgtcccctcttactgtctgtgattctgtccctgcgcctggccaccgccttcgaccccgcccccagtgcctgctctgccctggcctcgggtgtgctctacggggccttctcgctgcaggacctctttcctaccatcgcctcgggctgctcctggaccctggagaaccctgaccccaccaagtactccctctacctgcgcttcaaccgccaggagcaggtgtgcgcacactttgccccccgcctgctgcccctggaccactacctggtcaactttacctgcctgcggcctagccccgaggaggcggtggcccaggcggagtcagaggtggggcggccagaagaggaggaggcagaggcggcagcggggttggagctgtgcagcggctcaggcccctttaccttcctgcacttcgacaagaacttcgtgcagctgtgcctgtcggctgagccctccgaggccccgcgcctgctggcgcccgctgccctagccttccgctttgtcgaggtcttgctcatcaacaacaacaactctagccaattcacctgtggtgtgctctgccgctggagtgaggagtgtggccgcgctgccggcagggcctgcggctttgctcagccaggctgcagctgccctggagaggcgggggccggctccaccaccaccacatctccaggccctcctgctgcccacaccctgtccaatgccctggtgcccgggggcccagccccacctgctgaggccgatttgcactcggggagcagcaatgatctgttcacaaccgagatgagatatggtgaggagccggaagaggaaccgaaagtgaaaacccagtggccgaggtctgcagatgagcctgggctatacatggcgcagacagtgcacggcgtgtgggaggagtgggggtcctggagcctgtgctcccgcagctgcgggcgggggtcccggagccggatgcggacctgcgtgcccccccagcacggcggcaaggcctgcgagggtcctgagctgcagactaagctctgcagtatggctgcctgcccggtggaaggccagtggttagaatggggtccctggggcccatgctccacgtcctgtgccaatgggacccaacagcgcagccggaagtgcagcgtggcgggcccagcctgggccacatgcacgggtgccctcactgacacccgggagtgcagcaacctcgagtgcccggccactgatagcaagtgggggccatggaatgcgtggagcctgtgctctaagacgtgtgacacaggctggcagcgccgcttccgcatgtgccaggccacgggcacgcagggctacccctgcgagggcaccggagaggaggtgaagccttgtagtgagaagaggtgtccag

SEQ ID NO: 105396 - DNA, 2927 bp, Homo sapiens
  Payload ID: 676
  Gene Symbol: ADGRB3
  Gene Name: adhesion G protein-coupled receptor B3
  ENST ID: ENST00000238918
  CDS Start-End: 127-2313
atatgctttagcattttaaatggctacaccaaagagaaaattgaaccaggctctcttccctactcctactggactttggggtggggttattcctctgaatgttctagcggacttggggttagcttaatgcttctgccccagggcaaagaagcagttgagggaaagaaatgtcaaggacgtcagaggcgagctggactgagtgaagtgtggagtaggaagcttaggaacgagtctttgggaacgtggtccacccagggatgtaaaactgtgcttaccgatgcatcccatacgaaatgcttatgtgatcgtctctctaccttcgccattttggctcagcaacctagagaaataatcatggaatcctctggcacaccttcagttaccctaatagtaggcagtggtctttcttgcttggccttgattaccctagcagttgtctatgcagcattatggaggtacatacgctctgagagatccataatactaattaacttctgcctgtctatcatctcatccaatatcctcatactggttggacagactcagacacataataagagtatctgcacaaccaccactgcatttttgcactttttcttcctggcttcattctgttgggttttgactgaggcgtggcaatcatatatggctgtaactggaaaaattaggacacggcttataagaaaacgctttttgtgccttggatggggtttaccagcattagtagtggccacatcagtaggcttcaccagaacaaaaggatatggcactgatcactactgctggctctctcttgaaggaggactactctatgcttttgtgggacctgcagccgctgttgtcctggtcaacatggtgattggcattttggtatttaataaacttgtttccagagatggaatcctagataaaaagctcaaacacagagccggtcagatgagtgagcctcatagcggtttgacgctcaaatgtgccaagtgtggagtagtttcaacaacagctttgtcagccaccaccgccagtaacgccatggcgtctctttggagctcctgtgtggtgttgccccttctggctttgacgtggatgtctgcggttctggccatgacagataaacgctccatattgtttcaaatactttttgctgtgtttgattcattgcaaggctttgttatagtcatggtccactgcattcttcggagagaggttcaggatgcatttagatgccgattgagaaactgtcaggatcccatcaatgcagattcttcgagttcgtttcctaatgggcatgctcaaatcatgacagactttgaaaaggatgtagacattgcctgtcgatcagttcttcataaggatattggtccttgccgagcagccacaataacaggaacactttctaggatttctctaaatgatgatgaagaagaaaagggaacaaaccctgaagggctaagctattcaacattgcctggaaatgtcatttccaaagtcatcatccagcaacccacaggtttgcacatgcccatgagtatgaatgagcttagcaatccatgtttgaaaaaagaaaatagtgaattgcggagaactgtgtacttatgtacggatgataatttgagaggggctgacatggacatagtccatcctcaagaaagaatgatggaaagtgactatattgtgatgcccagaagttctgtaaataaccagccttcaatgaaagaagaaagcaaaatgaatattggcatggaaaccttgccgcatgaaaggctattgcactacaaagtaaaccctgaattcaatatgaatccccctgtaatggaccagttcaatatgaacttagagcaacatctcgcaccccaggaacatatgcagaatttgccctttgaacctcgcacagctgtgaagaatttcatggcctctgagttggatgataatgcaggactatcaagaagtgaaactggatcaacgatatcaatgagttctttagagagaagaaaatcacgatattcagaccttgactttgagaaggtcatgcatacaaggaagaggcatatggaactatttcaagaactaaatcagaaatttcaaactttggacagatttcgggatataccaaatacaagcagtatggaaaaccccgcaccaaacaagaatccatgggacactttcaaaaaccccagtgaatacccgcattacaccacaatcaatgtcttagacacagaggcaaaggatgctttggaactgaggccagcagagtgggagaagtgtctgaatttgcctctggatgtgcaagagggtgactttcaaacagaagtttaaaaaaatcaaaatggactaaggtagagacaaaactttattgcactgacacttaagacttgggaagcctgacatttctatctggacagtgtgactatcttatgtcaggaccttcatgtgccaaacgtcagtggtgttttcatatggtaacttctcactagtcaggctagtggagagatgaccaggtgtacagttctgaccatcctgtgttgtaagtacccgtggaatggatttgtaaggtaatctttatagataaacctcaagcaacgattcatgttgtaaccgcttcatatggtttagttttcaaaaaacttcaccatgaagcacaatgtatatatttatgcagtttttaaagtttataacagtctgtttggccattactacactttttactttataatataaaagcaaagtttttgtcattaaatgaatgtttgttgagctacattcttcattgctttaaatgcaataaagtaataatctcacttttatatgaataatatatttcacatctttattattgcagttttctctagaaagctctgagaagctttctctgctgcagctgtgtataaaatatttaaaatgttgtatggtgtaaataaacttttgtctac

SEQ ID NO: 105397 - DNA, 6010 bp, Homo sapiens
  Payload ID: 676
  Gene Symbol: ADGRB3
  Gene Name: adhesion G protein-coupled receptor B3
  Uniprot ID: O60242
  ENST ID: ENST00000370598
  CDS Start-End: 822-5390
ctttccgacatcaccagccaaggatttttttccccgctctccttagtcgccgtccgtccatcagtacctgcaggggggaggaggaggagggaggaaagcggaaagaggaaaaagcataagcttgagccttccgatccgaccacgaatactcctgtaataaacccaccgccccaacaaatctgccatagcagccgccgccgccgccggtcacttctcgtctcagcgctttctttgcttcttggtttgttgggggtagcttttatgaaacaaatctttgctattaagccacttacattttggggggttccttagagtctcccttgggggggcttctccctccctttagcccccctcggtttggaggttggattcagttggatacggcgcaaggttctgggctcctgctggcttttttttcctctctctcatcgacccccctttggttcccaccccccaccttttgcttttcgtatgtatgcatttttaaaaataaatcctgattttggaagctgagccggggaaaatgggcaacggtgattgggaccgaaggggagtctctccgtcactgttgctgggacgcgtgcctgtgctggtgtcttagagcaagagcctccctgagctttcggagtggaagaacagtggaagagactgcagcctaaagacttttaaaattaacttggcatcacttttatcagctcaaaggctaaacaaacaaacaaaagcagtgtcatttattctaagaaataacttcttaaaggttaaagctgaaaaatattcaagttatttttggataacaacttacagaggccaaatgacataggatgaaggctgttcgtaacctgctgatttatatattttccacctatctcctggttatgtttggatttaatgctgcccaagacttctggtgttcaactttggtgaagggagtcatttatggatcgtattctgtaagtgaaatgtttcctaaaaactttacaaactgcacttggacgctggaaaatccagatccaaccaaatatagcatttacctgaaattttccaaaaaggaccttagctgctctaacttttcactcctggcttatcagtttgatcatttttcccatgaaaaaataaaggatcttttaagaaagaatcattctataatgcaactctgcaattccaagaatgctttcgtttttctacagtatgataaaaattttattcaaatacgtcgagtatttccaactaatttcccaggattacagaaaaaaggggaagaagatcagaaatctttttttgagtttttggtattgaacaaggtcagcccaagccagtttggttgccatgtattatgtacttggttggagagctgcttaaaatcagaaaatgggagaacagaatcatgtgggatcatgtatacaaaatgcacctgccctcagcatttgggagagtgggggatcgacgaccagtcgctgattttgttaaataacgtggtgttacccctgaatgagcagacagagggctgcctgacccaggagctgcaaaccacccaagtctgcaatcttaccagggaggccaagcgaccacccaaagaagaatttggaatgatgggagatcatacaattaaaagtcagcgacctcgatctgttcatgaaaaaagggtccctcaggaacaagctgatgctgctaaatttatggcacaaactggtgaatctggtgtggaagagtggtcccagtggagcacatgttcggttacttgtggtcaagggtcgcaggtgcgaaccagaacttgtgtatcaccttacgggacacactgcagcggcccattaagagaatcaagggtttgcaataacactgccctctgtccagtacacggagtatgggaggaatggtcaccatggagtttatgttcatttacatgtggtcgaggccaaagaacaagaacaaggtcatgcacacctcctcagtatggaggaaggccgtgtgaaggacctgaaacacatcataagccttgtaatattgctctttgcccagttgatggacagtggcaagagtggagttcgtggagccagtgctcagtaacgtgctcgaatgggactcagcagagaagccggcagtgcactgcagctgcccatggaggctccgaatgcagagggccatgggcagaaagcagagagtgctataaccctgaatgtacagccaatggtcaatggaatcagtggggtcattggagtggttgttccaagtcctgtgatggcggctgggaaaggcgaataaggacctgtcagggtgcagtgataacagggcagcaatgtgaaggaacgggcgaagaagtgagaagatgcaatgagcagcgatgccctgcaccttatgaaatatgccctgaggattatctgatgtcgatggtgtggaaaagaactccagcaggcgacttggcattcaatcaatgtcccctgaatgccacaggcaccactagcagacgctgctctctcagtcttcatggagtggccttctgggaacagccgagctttgcaagatgcatatcaaatgagtacagacacttgcagcattcaattaaagagcaccttgctaaggggcagcgaatgctggcaggtgatggaatgtcccaggtgaccaagacactgttggatttaactcagagaaaaaatttctatgcaggcgatcttctgatgtctgtggagatcctgagaaatgtgacagacacatttaaaagggcaagttacatccctgcatctgatggtgtccagaacttctttcaaatagttagcaaccttctagatgaagaaaacaaggaaaaatgggaagatgcacaacagatttatccagggtcaatagagttaatgcaggtgattgaagattttatacacattgttggaatggggatgatggactttcagaattcatacttaatgactggaaatgtagtggctagtattcagaagcttcctgcagcctctgttctaacagacatcaactttccaatgaaaggacggaagggaatggttgactgggcaagaaactcagaagatagggtagtaattccaaaaagcattttcactccggtgtcatcaaaagaattagatgaatcatctgtatttgttcttggcgcagtcctatacaaaaacttagatctaattttgcccactttgagaaattatactgtcattaattccaaaatcatcgtggtcacaataaggcctgaacccaaaacaaccgattcgtttctggagatagaactagctcatttggctaatggtactttgaatccctattgtgtattgtgggatgactccaaaacgaacgagtctttgggaacgtggtccacccagggatgtaaaactgtgcttaccgatgcatcccatacgaaatgcttatgtgatcgtctctctaccttcgccattttggctcagcaacctagagaaataatcatggaatcctctggcacaccttcagttaccctaatagtaggcagtggtctttcttgcttggccttgattaccctagcagttgtctatgcagcattatggaggtacatacgctctgagagatccataatactaattaacttctgcctgtctatcatctcatccaatatcctcatactggttggacagactcagacacataataagagtatctgcacaaccaccactgcatttttgcactttttcttcctggcttcattctgttgggttttgactgaggcgtggcaatcatatatggctgtaactggaaaaattaggacacggcttataagaaaacgctttttgtgccttggatggggtttaccagcattagtagtggccacatcagtaggcttcaccagaacaaaaggatatggcactgatcactactgctggctctctcttgaaggaggactactctatgcttttgtgggacctgcagccgctgttgtcctggtcaacatggtgattggcattttggtatttaataaacttgtttccagagatggaatcctagataaaaagctcaaacacagagccggtcagatgagtgagcctcatagcggtttgacgctcaaatgtgccaagtgtggagtagtttcaacaacagctttgtcagccaccaccgccagtaacgccatggcgtctctttggagctcctgtgtggtgttgccccttctggctttgacgtggatgtctgcggttctggccatgacagataaacgctccatattgtttcaaatactttttgctgtgtttgattcattgcaaggctttgttatagtcatggtccactgcattcttcggagagaggttcaggatgcatttagatgccgattgagaaactgtcaggatcccatcaatgcagattcttcgagttcgtttcctaatgggcatgctcaaatcatgacagactttgaaaaggatgtagacattgcctgtcgatcagttcttcataaggatattggtccttgccgagcagccacaataacaggaacactttctaggatttctctaaatgatgatgaagaagaaaagggaacaaaccctgaagggctaagctattcaacattgcctggaaatgtcatttccaaagtcatcatccagcaacccacaggtttgcacatgcccatgagtatgaatgagcttagcaatccatgtttgaaaaaagaaaatagtgaattgcggagaactgtgtacttatgtacggatgataatttgagaggggctgacatggacatagtccatcctcaagaaagaatgatggaaagtgactatattgtgatgcccagaagttctgtaaataaccagccttcaatgaaagaagaaagcaaaatgaatattggcatggaaaccttgccgcatgaaaggctattgcactacaaagtaaaccctgaattcaatatgaatccccctgtaatggaccagttcaatatgaacttagagcaacatctcgcaccccaggaacatatgcagaatttgccctttgaacctcgcacagctgtgaagaatttcatggcctctgagttggatgataatgcaggactatcaagaagtgaaactggatcaacgatatcaatgagttctttagagagaagaaaatcacgatattcagaccttgactttgagaaggtcatgcatacaaggaagaggcatatggaactatttcaagaactaaatcagaaatttcaaactttggacagatttcgggatataccaaatacaagcagtatggaaaaccccgcaccaaacaagaatccatgggacactttcaaaaaccccagtgaatacccgcattacaccacaatcaatgtcttagacacagaggcaaaggatgctttggaactgaggccagcagagtgggagaagtgtctgaatttgcctctggatgtgcaagagggtgactttcaaacagaagtttaaaaaaatcaaaatggactaaggtagagacaaaactttattgcactgacacttaagacttgggaagcctgacatttctatctggacagtgtgactatcttatgtcaggaccttcatgtgccaaacgtcagtggtgttttcatatggtaacttctcactagtcaggctagtggagagatgaccaggtgtacagttctgaccatcctgtgttgtaagtacccgtggaatggatttgtaaggtaatctttatagataaacctcaagcaacgattcatgttgtaaccgcttcatatggtttagttttcaaaaaacttcaccatgaagcacaatgtatatatttatgcagtttttaaagtttataacagtctgtttggccattactacactttttactttataatataaaagcaaagtttttgtcattaaatgaatgtttgttgagctacattcttcattgctttaaatgcaataaagtaataatctcacttttatatgaataatatatttcacatctttattattgcagttttctctagaaagctctgagaagctttctctgctgcagctgtgtataaaatatttaaaatgttgtatggtgtaaataaacttttgtctacatatca

SEQ ID NO: 105398 - DNA, 4569 bp, Homo sapiens
  Payload ID: 676
  Gene Symbol: ADGRB3
  Gene Name: adhesion G protein-coupled receptor B3
  Uniprot ID: O60242
  ENST ID: ENST00000546190
  CDS Start-End: 1-4569
atgaaggctgttcgtaacctgctgatttatatattttccacctatctcctggttatgtttggatttaatgctgcccaagacttctggtgttcaactttggtgaagggagtcatttatggatcgtattctgtaagtgaaatgtttcctaaaaactttacaaactgcacttggacgctggaaaatccagatccaaccaaatatagcatttacctgaaattttccaaaaaggaccttagctgctctaacttttcactcctggcttatcagtttgatcatttttcccatgaaaaaataaaggatcttttaagaaagaatcattctataatgcaactctgcaattccaagaatgctttcgtttttctacagtatgataaaaattttattcaaatacgtcgagtatttccaactaatttcccaggattacagaaaaaaggggaagaagatcagaaatctttttttgagtttttggtattgaacaaggtcagcccaagccagtttggttgccatgtattatgtacttggttggagagctgcttaaaatcagaaaatgggagaacagaatcatgtgggatcatgtatacaaaatgcacctgccctcagcatttgggagagtgggggatcgacgaccagtcgctgattttgttaaataacgtggtgttacccctgaatgagcagacagagggctgcctgacccaggagctgcaaaccacccaagtctgcaatcttaccagggaggccaagcgaccacccaaagaagaatttggaatgatgggagatcatacaattaaaagtcagcgacctcgatctgttcatgaaaaaagggtccctcaggaacaagctgatgctgctaaatttatggcacaaactggtgaatctggtgtggaagagtggtcccagtggagcacatgttcggttacttgtggtcaagggtcgcaggtgcgaaccagaacttgtgtatcaccttacgggacacactgcagcggcccattaagagaatcaagggtttgcaataacactgccctctgtccagtacacggagtatgggaggaatggtcaccatggagtttatgttcatttacatgtggtcgaggccaaagaacaagaacaaggtcatgcacacctcctcagtatggaggaaggccgtgtgaaggacctgaaacacatcataagccttgtaatattgctctttgcccagttgatggacagtggcaagagtggagttcgtggagccagtgctcagtaacgtgctcgaatgggactcagcagagaagccggcagtgcactgcagctgcccatggaggctccgaatgcagagggccatgggcagaaagcagagagtgctataaccctgaatgtacagccaatggtcaatggaatcagtggggtcattggagtggttgttccaagtcctgtgatggcggctgggaaaggcgaataaggacctgtcagggtgcagtgataacagggcagcaatgtgaaggaacgggcgaagaagtgagaagatgcaatgagcagcgatgccctgcaccttatgaaatatgccctgaggattatctgatgtcgatggtgtggaaaagaactccagcaggcgacttggcattcaatcaatgtcccctgaatgccacaggcaccactagcagacgctgctctctcagtcttcatggagtggccttctgggaacagccgagctttgcaagatgcatatcaaatgagtacagacacttgcagcattcaattaaagagcaccttgctaaggggcagcgaatgctggcaggtgatggaatgtcccaggtgaccaagacactgttggatttaactcagagaaaaaatttctatgcaggcgatcttctgatgtctgtggagatcctgagaaatgtgacagacacatttaaaagggcaagttacatccctgcatctgatggtgtccagaacttctttcaaatagttagcaaccttctagatgaagaaaacaaggaaaaatgggaagatgcacaacagatttatccagggtcaatagagttaatgcaggtgattgaagattttatacacattgttggaatggggatgatggactttcagaattcatacttaatgactggaaatgtagtggctagtattcagaagcttcctgcagcctctgttctaacagacatcaactttccaatgaaaggacggaagggaatggttgactgggcaagaaactcagaagatagggtagtaattccaaaaagcattttcactccggtgtcatcaaaagaattagatgaatcatctgtatttgttcttggcgcagtcctatacaaaaacttagatctaattttgcccactttgagaaattatactgtcattaattccaaaatcatcgtggtcacaataaggcctgaacccaaaacaaccgattcgtttctggagatagaactagctcatttggctaatggtactttgaatccctattgtgtattgtgggatgactccaaaacgaacgagtctttgggaacgtggtccacccagggatgtaaaactgtgcttaccgatgcatcccatacgaaatgcttatgtgatcgtctctctaccttcgccattttggctcagcaacctagagaaataatcatggaatcctctggcacaccttcagttaccctaatagtaggcagtggtctttcttgcttggccttgattaccctagcagttgtctatgcagcattatggaggtacatacgctctgagagatccataatactaattaacttctgcctgtctatcatctcatccaatatcctcatactggttggacagactcagacacataataagagtatctgcacaaccaccactgcatttttgcactttttcttcctggcttcattctgttgggttttgactgaggcgtggcaatcatatatggctgtaactggaaaaattaggacacggcttataagaaaacgctttttgtgccttggatggggtttaccagcattagtagtggccacatcagtaggcttcaccagaacaaaaggatatggcactgatcactactgctggctctctcttgaaggaggactactctatgcttttgtgggacctgcagccgctgttgtcctggtcaacatggtgattggcattttggtatttaataaacttgtttccagagatggaatcctagataaaaagctcaaacacagagccggtcagatgagtgagcctcatagcggtttgacgctcaaatgtgccaagtgtggagtagtttcaacaacagctttgtcagccaccaccgccagtaacgccatggcgtctctttggagctcctgtgtggtgttgccccttctggctttgacgtggatgtctgcggttctggccatgacagataaacgctccatattgtttcaaatactttttgctgtgtttgattcattgcaaggctttgttatagtcatggtccactgcattcttcggagagaggttcaggatgcatttagatgccgattgagaaactgtcaggatcccatcaatgcagattcttcgagttcgtttcctaatgggcatgctcaaatcatgacagactttgaaaaggatgtagacattgcctgtcgatcagttcttcataaggatattggtccttgccgagcagccacaataacaggaacactttctaggatttctctaaatgatgatgaagaagaaaagggaacaaaccctgaagggctaagctattcaacattgcctggaaatgtcatttccaaagtcatcatccagcaacccacaggtttgcacatgcccatgagtatgaatgagcttagcaatccatgtttgaaaaaagaaaatagtgaattgcggagaactgtgtacttatgtacggatgataatttgagaggggctgacatggacatagtccatcctcaagaaagaatgatggaaagtgactatattgtgatgcccagaagttctgtaaataaccagccttcaatgaaagaagaaagcaaaatgaatattggcatggaaaccttgccgcatgaaaggctattgcactacaaagtaaaccctgaattcaatatgaatccccctgtaatggaccagttcaatatgaacttagagcaacatctcgcaccccaggaacatatgcagaatttgccctttgaacctcgcacagctgtgaagaatttcatggcctctgagttggatgataatgcaggactatcaagaagtgaaactggatcaacgatatcaatgagttctttagagagaagaaaatcacgatattcagaccttgactttgagaaggtcatgcatacaaggaagaggcatatggaactatttcaagaactaaatcagaaatttcaaactttggacagatttcgggatataccaaatacaagcagtatggaaaaccccgcaccaaacaagaatccatgggacactttcaaaaaccccagtgaatacccgcattacaccacaatcaatgtcttagacacagaggcaaaggatgctttggaactgaggccagcagagtgggagaagtgtctgaatttgcctctggatgtgcaagagggtgactttcaaacagaagtttaa

SEQ ID NO: 105399 - DNA, 532 bp, Homo sapiens
  Payload ID: 676
  Gene Symbol: ADGRB3
  Gene Name: adhesion G protein-coupled receptor B3
  ENST ID: ENST00000603207
  CDS Start-End: 96-532
agtcccggtttcagcacctccggcgctggacagctctctgcacgccgcaccgccgcctgcttgctttttcccactctcgctttgcattactggagatgcatctaaattacatcctgttcaacaacaagaacgagtctttgggaacgtggtccacccagggatgtaaaactgtgcttaccgatgcatcccatacgaaatgcttatgtgatcgtctctctaccttcgccattttggctcagcaacctagagaaataatcatggaatcctctggcacaccttcagttaccctaatagtaggcagtggtctttcttgcttggccttgattaccctagcagttgtctatgcagcattatggaggtacatacgctctgagagatccataatactaattaacttctgcctgtctatcatctcatccaatatcctcatactggttggacagactcagacacataataagagtatctgcacaaccaccactgcatttttgcactttttcttcctggcttcattctgttgggttttgactga

SEQ ID NO: 105400 - DNA, 590 bp, Homo sapiens
  Payload ID: 676
  Gene Symbol: ADGRB3
  Gene Name: adhesion G protein-coupled receptor B3
  ENST ID: ENST00000604969
  CDS Start-End: 387-590
agtcccggtttcagcacctccggcgctggacagctctctgcacgccgcaccgccgcctgcttgctttttcccactctcgctttgcattactggagatgcatctaaattacatcctgttcaacaacaagtagatttttttttcctgtacaggaattacagtagacgactctctcaattaaactgcattttcttctttacggatttggctatcaggcgtatttatcccgatttcctcccccctcactcccctttgcaggaacgagtctttgggaacgtggtccacccagggatgtaaaactgtgcttaccgatgcatcccatacgaaatgcttatgtgatcgtctctctaccttcgccattttggctcagcaacctagagaaataatcatggaatcctctggcacaccttcagttaccctaatagtaggcagtggtctttcttgcttggccttgattaccctagcagttgtctatgcagcattatggaggtacatacgctctgagagatccataatactaattaacttctgcctgtctatcatctcatccaatatcctcatactggttggacagactcagacacataataag

SEQ ID NO: 105401 - DNA, 5168 bp, Homo sapiens
  Payload ID: 677
  Gene Symbol: ADGRD1
  Gene Name: adhesion G protein-coupled receptor D1
  Uniprot ID: Q6QNK2
  ENST ID: ENST00000261654
  CDS Start-End: 560-3184
actcactccccctccacccagagagcaggacggaggtgtgaacttgagccagaccagaaggagctcgagagcggccgcaggacaagcccgaggagcaggcgggcgctccaggggaaaaccacgcacaaaaccttcttcagagaaaagggaagctccaaacctgactgagacaaacggaggctcttgaaataaaaagaaaataccgcaggacaaacagcctcccgtccccgggcgcaggtcgcggtcacagtggtgacctgggattgctttcccaggactgcgagtcgggtttgggtttctcctccctgcattccacagctgctctggtcatcgcaacgtgtttattgatcactgaagaatctcaagttttgagacgaggaagaaacacccattaggtctccaagacagctgtgtttcacaaactttaaggagacagaaattttctcccctggaacctgtgaaaatgtcccttttccaaggaagtgaaggttaagaggtcccgttctcacagaccctcaggaatttcacttggctccgagctttgacctccgagagagccatggaaaagctgctgcggctgtgctgctggtactcctggctgctgctattttattacaactttcaggtgcgtggcgtctactccagatcgcaggaccatccaggatttcaggtgttggcgtctgcttcccattactggccactggagaatgtggatgggatccatgaacttcaggatacaactggagatattgtggaagggaaggtcaacaaaggcatttacctgaaagaggaaaagggagtcacgcttctctattacggcaggtacaacagctcctgcatcagcaagccagagcagtgtggccctgaaggggtcacgttttcttttttctggaagacacaaggagaacagtctagaccaatcccttctgcgtatgggggacaggtcatctccaatgggttcaaagtctgctccagcggtggcagaggctctgtggagctgtatacgcgggacaattccatgacatgggaggcctccttcagccccccaggcccctattggactcatgtcctatttacatggaaatccaaggagggcctgaaagtctacgtcaacgggaccctgagcacctctgatccgagtggaaaagtgtctcgtgactatggagagtccaacgtcaacctcgtgatagggtctgagcaggaccaggccaagtgttatgagaacggtgctttcgatgagttcatcatctgggagcgggctctgactccggatgagatcgccatgtacttcactgctgccattggaaagcatgctttattgtcttcaacgctgccaagcctcttcatgacatccacagcaagccccgtgatgcccacagatgcctaccatcccatcataaccaacctgacagaagagagaaaaaccttccaaagtcccggagtgatactgagttacctccaaaatgtatccctcagcttacccagtaagtccctctcggagcagacagccttgaatctcaccaagaccttcttaaaagccgtgggagagatccttctactgcctggttggattgctctgtcagaggacagcgccgtggtactgagtctcatcgacactattgacaccgtcatgggccatgtatcctccaacctgcacggcagcacgccccaggtcaccgtggagggctcctctgccatggcagagttttccgtggccaaaatcctgcccaagaccgtgaattcctcccattaccgcttcccggcccacgggcagagcttcatccagatcccccacgaggccttccacaggcacgcctggagcaccgtcgtgggtctgctgtaccacagcatgcactactacctgaacaacatctggcccgcccacaccaagatcgcggaggccatgcatcaccaggactgcctgctgttcgccaccagccacctgatttccctggaggtgtccccaccacccaccctgtctcagaacctgtcgggctctccactcattacggtccacctcaagcacagattgacacgtaagcagcacagtgaggccaccaacagcagcaaccgagtcttcgtgtactgcgccttcctggacttcagctccggagaaggggtctggtcgaaccacggctgtgcgctcacgagaggaaacctcacctactccgtctgccgctgcactcacctcaccaactttgccatcctcatgcaggtggtcccgctggagcttgcacgcggacaccaggtggcgctgtcgtctatcagctatgtgggctgctccctctccgtgctctgcctggtggccacgctggtcaccttcgccgtgctgtcctccgtgagcaccatccggaaccagcgctaccacatccacgccaacctgtccttcgccgtgctggtggcccaggtcctgctgctcattagtttccgcctcgagccgggcacgaccccctgccaagtgatggccgtgctcctacactacttcttcctgagtgccttcgcatggatgctggtggaggggctgcacctctacagcatggtgatcaaggtctttgggtcggaggacagcaagcaccgttactactatgggatgggatggggttttcctcttctgatctgcatcatttcactgtcatttgccatggacagttacggaacaagcaacaattgctggctgtcgttggcgagtggcgccatctgggcctttgtagcccctgccctgtttgtcatcgtggtcaacattggcatcctcatcgctgtgaccagagtcatctcacagatcagcgccgacaactacaagatccatggagaccccagtgccttcaagttgacagccaaggcagtggccgtgctgctgcccatcctgggtacctcgtgggtctttggcgtgcttgctgtcaacggttgtgctgtggttttccagtacatgtttgccacgctcaactccctgcagggactgttcatattcctctttcattgtctcctgaattcagaggtgagagccgccttcaagcacaaaaccaaggtctggtcgctcacgagcagctctgcccgcacctccaacgcgaagcccttccactcggacctcatgaatgggacccggccaggcatggcctccaccaagctcagcccttgggacaagagcagccactctgcccaccgcgtcgacctgtcagccgtgtgagccgggaggctgccaaccaggccaggctgcgctcagaacacacccccccaaacagaatgaaatgccccacctttgcccatggaccctctccttgctgctgtctggacatgggtgttgtggccccgagacagctgtcctcccctgtgactctggctgtcggagcacactgctcagcccagcagcctgatgcccaggccagcgtgggccctcctgccttgcatccacccgtgggctgagtgacttcctcgggggattcccaggacacagtggcctgactgtgatggtgcccttgagcctcccttcatcactcagcatcagacccagcgaggccaggacactcggggccggtcccgcagcaccaggaggggatgttcagcctctgtgccttggtggggcttggggactcagggccaaagaggtggttcaggtccccacgcaccctcagtcaggcgcaggcagctgggggtgtgtggggaagagcatgcggagtccccagtgtctgaatccactgagtggtgagttccccacagccggcgctagccgtggtgtgtgtctctgtaggtggtgccggcgtgggccaacctgtgctgtgtcatcagttgggggcccctgcccaagccgagctcgagccgtgggcgggagtcgttgactctccaggtgagggcgacccctctgccctgtccttgggggggtcccctctgctcacgtgaagagccgctctgggccttgaggctgcctgatggtgcctgtgcttgggggagcttctcggccatccgctgtgagttttgcctctttggaccccaattcggccttaagatgccctcctccctcgtgtgccagcctccttggttgttcttgggccacaggagctggccgtgtccccgcagtgcctggtgtccaggtggaaagtggagggcattttccagggcactgctttccccagaggcttcctcatggctcacaggcactctacgaagtttctaatgggcagaccacgcggcaggtagcacagtgcgctccgtctggtcaccatgagaccgacctgcgctgagtccccactgacctggagagggagggctggtgacagccgtgtcttctgtgttgagggaaatttatggactcagattcagccccagaggagatgggataattgttatggacccatgtgtgggcatgatcctgtggaacacaggtttgggatcatagatgtgaattaagacaccaccgagatacgggctgtgaggttcatactgtgctgatagcactcgtggtgtctgtgaaatgtgggtaagacattcaaacctggttttgatactggaaactcttcctttaaaactgtgaccatgatttcattcagcccctccacacccctatgtctgccttgtttcagagtgagttttctatggagcctgtggcccttttgcagcccacctggtggcttcttaatgtaactcttcccctggtcgcctggagtggaccactcatctgcaggcctctcctgcatggggagggtaggcagggagcagcatgtctgcaggggtgaacctttgctcttctgtcaggcgaggcccaggctgcaccagccacctgccacatggtgacagtgccacgggccctgcgtatggcccctgcaaccgtgctctggcgggcacacctggctgctgcaggccaaggccgctgttcagtgaagagtcccatgtttagtatggactaaagtcccatgtttagccactgccccaggctcccgtgaccccagaaaccaggtcacatggaccacagtgccagatcctcatcacgccggtgagcacctagaagtgagaacactgtattcctacaatgtacacttggatatttctccttatttagtttctagtgaaacaaatcaagtaaggaactatctttagtttagatggaattatttgtttttaattgttgccgtattcatctatatagctaatatttcaagataagtaatgaacaaaac

SEQ ID NO: 105402 - DNA, 2892 bp, Homo sapiens
  Payload ID: 677
  Gene Symbol: ADGRD1
  Gene Name: adhesion G protein-coupled receptor D1
  ENST ID: ENST00000335486
  CDS Start-End: 216-686
gtcatggagtgtctgcacgggacgtcctggagagtcggacacgtaagcagcacagtgaggccaccaacagcagcaaccgagtcttcgtgtactgcgccttcctggacttcagctccggagaaggggtctggtcgaaccacggctgtgcgctcacgagaggaaacctcacctactccgtctgccgctgcactcacctcaccaactttgccatcctcatgcaggtggtcccgctggaggtcaacattggcatcctcatcgctgtgaccagagtcatctcacagatcagcgccgacaactacaagatccatggagaccccagtgccttcaagttgacagccaaggcagtggccgtgctgctgcccatcctgggtacctcgtgggtctttggcgtgcttgctgtcaacggttgtgctgtggttttccagtacatgtttgccacgctcaactccctgcagggactgttcatattcctctttcattgtctcctgaattcagaggtgagagccgccttcaagcacaaaaccaaggtctggtcgctcacgagcagctctgcccgcacctccaacgcgaagcccttccactcggacctcatgaatgggacccggccaggcatggcctccaccaagctcagcccttgggacaagagcagccactctgcccaccgcgtcgacctgtcagccgtgtgagccgggaggctgccaaccaggccaggctgcgctcagaacacacccccccaaacagaatgaaatgccccacctttgcccatggaccctctccttgctgctgtctggacatgggtgttgtggccccgagacagctgtcctcccctgtgactctggctgtcggagcacactgctcagcccagcagcctgatgcccaggccagcgtgggccctcctgccttgcatccacccgtgggctgagtgacttcctcgggggattcccaggacacagtggcctgactgtgatggtgcccttgagcctcccttcatcactcagcatcagacccagcgaggccaggacactcggggccggtcccgcagcaccaggaggggatgttcagcctctgtgccttggtggggcttggggactcagggccaaagaggtggttcaggtccccacgcaccctcagtcaggcgcaggcagctgggggtgtgtggggaagagcatgcggagtccccagtgtctgaatccactgagtggtgagttccccacagccggcgctagccgtggtgtgtgtctctgtaggtggtgccggcgtgggccaacctgtgctgtgtcatcagttgggggcccctgcccaagccgagctcgagccgtgggcgggagtcgttgactctccaggtgagggcgacccctctgccctgtccttgggggggtcccctctgctcacgtgaagagccgctctgggccttgaggctgcctgatggtgcctgtgcttgggggagcttctcggccatccgctgtgagttttgcctctttggaccccaattcggccttaagatgccctcctccctcgtgtgccagcctccttggttgttcttgggccacaggagctggccgtgtccccgcagtgcctggtgtccaggtggaaagtggagggcattttccagggcactgctttccccagaggcttcctcatggctcacaggcactctacgaagtttctaatgggcagaccacgcggcaggtagcacagtgcgctccgtctggtcaccatgagaccgacctgcgctgagtccccactgacctggagagggagggctggtgacagccgtgtcttctgtgttgagggaaatttatggactcagattcagccccagaggagatgggataattgttatggacccatgtgtgggcatgatcctgtggaacacaggtttgggatcatagatgtgaattaagacaccaccgagatacgggctgtgaggttcatactgtgctgatagcactcgtggtgtctgtgaaatgtgggtaagacattcaaacctggttttgatactggaaactcttcctttaaaactgtgaccatgatttcattcagcccctccacacccctatgtctgccttgtttcagagtgagttttctatggagcctgtggcccttttgcagcccacctggtggcttcttaatgtaactcttcccctggtcgcctggagtggaccactcatctgcaggcctctcctgcatggggagggtaggcagggagcagcatgtctgcaggggtgaacctttgctcttctgtcaggcgaggcccaggctgcaccagccacctgccacatggtgacagtgccacgggccctgcgtatggcccctgcaaccgtgctctggcgggcacacctggctgctgcaggccaaggccgctgttcagtgaagagtcccatgtttagtatggactaaagtcccatgtttagccactgccccaggctcccgtgaccccagaaaccaggtcacatggaccacagtgccagatcctcatcacgccggtgagcacctagaagtgagaacactgtattcctacaatgtacacttggatatttctccttatttagtttctagtgaaacaaatcaagtaaggaactatctttagtttagatggaattatttgtttttaattgttgccgtattcatctatatagctaatatttcaagataagtaatgaacaaaacctgtctaaaccttttgtttccaatgaatgaaagtcatgcactttatttataggctctatgttttggcttctgcagtacttttattatctatacataatttggccaaaaataagaaattggaaagaatgaaatgtttagtttatagtagaagaaagatgatgacactaagttgtgaaaatatgttgtgatttttatgaaataaactcatgtcctgaaaagaaa

SEQ ID NO: 105403 - DNA, 1182 bp, Homo sapiens
  Payload ID: 677
  Gene Symbol: ADGRD1
  Gene Name: adhesion G protein-coupled receptor D1
  Uniprot ID: Q6QNK2
  ENST ID: ENST00000543617
  CDS Start-End: 1-1182
atgcatcgtgtttgctttctttcatttcagacacgtaagcagcacagtgaggccaccaacagcagcaaccgagtcttcgtgtactgcgccttcctggacttcagctccggagaaggggtctggtcgaaccacggctgtgcgctcacgagaggaaacctcacctactccgtctgccgctgcactcacctcaccaactttgccatcctcatgcaggtggtcccgctggagcttgcacgcggacaccaggtggcgctgtcgtctatcagctatgtgggctgctccctctccgtgctctgcctggtggccacgctggtcaccttcgccgtgctgtcctccgtgagcaccatccggaaccagcgctaccacatccacgccaacctgtccttcgccgtgctggtggcccaggtcctgctgctcattagtttccgcctcgagccgggcacgaccccctgccaagtgatggccgtgctcctacactacttcttcctgagtgccttcgcatggatgctggtggaggggctgcacctctacagcatggtgatcaaggtctttgggtcggaggacagcaagcaccgttactactatgggatgggatggggttttcctcttctgatctgcatcatttcactgtcatttgccatggacagttacggaacaagcaacaattgctggctgtcgttggcgagtggcgccatctgggcctttgtagcccctgccctgtttgtcatcgtggtcaacattggcatcctcatcgctgtgaccagagtcatctcacagatcagcgccgacaactacaagatccatggagaccccagtgccttcaagttgacagccaaggcagtggccgtgctgctgcccatcctgggtacctcgtgggtctttggcgtgcttgctgtcaacggttgtgctgtggttttccagtacatgtttgccacgctcaactccctgcagggactgttcatattcctctttcattgtctcctgaattcagaggtgagagccgccttcaagcacaaaaccaaggtctggtcgctcacgagcagctctgcccgcacctccaacgcgaagcccttccactcggacctcatgaatgggacccggccaggcatggcctccaccaagctcagcccttgggacaagagcagccactctgcccaccgcgtcgacctgtcagccgtgtga

SEQ ID NO: 105404 - DNA, 735 bp, Homo sapiens
  Payload ID: 677
  Gene Symbol: ADGRD1
  Gene Name: adhesion G protein-coupled receptor D1
  ENST ID: ENST00000542091
  CDS Start-End: 74-735
aggttaagaggtcccgttctcacagaccctcaggaatttcacttggctccgagctttgacctccgagagagccatggaaaagctgctgcggctgtgctgctggtactcctggctgctgctattttattacaactttcaggtgcgtggcgtctactccagatcgcaggaccatccaggatttcaggtgttggcgtctgcttcccattactggccactggagaatgtggatgggatccatgaacttcaggatacaactggagatattgtggaagggaaggtcaacaaaggcatttacctgaaagaggaaaagggagtcacgcttctctattacggcaggtacaacagctcctgcatcagcaagccagagcagtgtggccctgaaggcccctattggactcatgtcctatttacatggaaatccaaggagggcctgaaagtctacgtcaacgggaccctgagcacctctgatccgagtggaaaagtgtctcgtgactatggagagtccaacgtcaacctcgtgatagggtctgagcaggaccaggccaagtgttatgagaacggtgctttcgatgagttcatcatctgggagcgggctctgactccggatgagatcgccatgtacttcactgctgccattggaaagcatgctttattgtcttcaacgctgccaagcctcttcatgacatccacagcaagccccgtgatgcccacagatgcctaccatcccatcataac

SEQ ID NO: 105405 - DNA, 2776 bp, Homo sapiens
  Payload ID: 677
  Gene Symbol: ADGRD1
  Gene Name: adhesion G protein-coupled receptor D1
  Uniprot ID: Q6QNK2
  ENST ID: ENST00000535015
  CDS Start-End: 31-2751
tggctccgagctttgacctccgagagagccatggaaaagctgctgcggctgtgctgctggtactcctggctgctgctattttattacaactttcaggtgcgtggcgtctactccagatcgcaggaccatccaggatttcaggtgttggcgtctgcttcccattactggccactggagaatgtggatgggatccatgaacttcaggatacaactggagcgtcccgaacccacaagctcactgtgcttccttcccgtaatgctacttttgtgtattccaatgattctgcctactcaaatctctctgcaactgtagatattgtggaagggaaggtcaacaaaggcatttacctgaaagaggaaaagggagtcacgcttctctattacggcaggtacaacagctcctgcatcagcaagccagagcagtgtggccctgaaggggtcacgttttcttttttctggaagacacaaggagaacagtctagaccaatcccttctgcgtatgggggacaggtcatctccaatgggttcaaagtctgctccagcggtggcagaggctctgtggagctgtatacgcgggacaattccatgacatgggaggcctccttcagccccccaggcccctattggactcatgtcctatttacatggaaatccaaggagggcctgaaagtctacgtcaacgggaccctgagcacctctgatccgagtggaaaagtgtctcgtgactatggagagtccaacgtcaacctcgtgatagggtctgagcaggaccaggccaagtgttatgagaacggtgctttcgatgagttcatcatctgggagcgggctctgactccggatgagatcgccatgtacttcactgctgccattggaaagcatgctttattgtcttcaacgctgccaagcctcttcatgacatccacagcaagccccgtgatgcccacagatgcctaccatcccatcataaccaacctgacagaagagagaaaaaccttccaaagtcccggagtgatactgagttacctccaaaatgtatccctcagcttacccagtaagtccctctcggagcagacagccttgaatctcaccaagaccttcttaaaagccgtgggagagatccttctactgcctggttggattgctctgtcagaggacagcgccgtggtactgagtctcatcgacactattgacaccgtcatgggccatgtatcctccaacctgcacggcagcacgccccaggtcaccgtggagggctcctctgccatggcagagttttccgtggccaaaatcctgcccaagaccgtgaattcctcccattaccgcttcccggcccacgggcagagcttcatccagatcccccacgaggccttccacaggcacgcctggagcaccgtcgtgggtctgctgtaccacagcatgcactactacctgaacaacatctggcccgcccacaccaagatcgcggaggccatgcatcaccaggactgcctgctgttcgccaccagccacctgatttccctggaggtgtccccaccacccaccctgtctcagaacctgtcgggctctccactcattacggtccacctcaagcacagattgacacgtaagcagcacagtgaggccaccaacagcagcaaccgagtcttcgtgtactgcgccttcctggacttcagctccggagaaggggtctggtcgaaccacggctgtgcgctcacgagaggaaacctcacctactccgtctgccgctgcactcacctcaccaactttgccatcctcatgcaggtggtcccgctggagcttgcacgcggacaccaggtggcgctgtcgtctatcagctatgtgggctgctccctctccgtgctctgcctggtggccacgctggtcaccttcgccgtgctgtcctccgtgagcaccatccggaaccagcgctaccacatccacgccaacctgtccttcgccgtgctggtggcccaggtcctgctgctcattagtttccgcctcgagccgggcacgaccccctgccaagtgatggccgtgctcctacactacttcttcctgagtgccttcgcatggatgctggtggaggggctgcacctctacagcatggtgatcaaggtctttgggtcggaggacagcaagcaccgttactactatgggatgggatggggttttcctcttctgatctgcatcatttcactgtcatttgccatggacagttacggaacaagcaacaattgctggctgtcgttggcgagtggcgccatctgggcctttgtagcccctgccctgtttgtcatcgtggtcaacattggcatcctcatcgctgtgaccagagtcatctcacagatcagcgccgacaactacaagatccatggagaccccagtgccttcaagttgacagccaaggcagtggccgtgctgctgcccatcctgggtacctcgtgggtctttggcgtgcttgctgtcaacggttgtgctgtggttttccagtacatgtttgccacgctcaactccctgcagggactgttcatattcctctttcattgtctcctgaattcagaggtgagagccgccttcaagcacaaaaccaaggtctggtcgctcacgagcagctctgcccgcacctccaacgcgaagcccttccactcggacctcatgaatgggacccggccaggcatggcctccaccaagctcagcccttgggacaagagcagccactctgcccaccgcgtcgacctgtcagccgtgtgagccgggaggctgccaaccaggccag

SEQ ID NO: 105406 - DNA, 5529 bp, Homo sapiens
  Payload ID: 677
  Gene Symbol: ADGRD1
  Gene Name: adhesion G protein-coupled receptor D1
  ENST ID: ENST00000446583
  CDS Start-End: 1856-2893
aggcgggggagccagtggctattctaggaaaattccatctccagggcatgaaaagacagataaagatcagtgtaactcacctgtgctgagtaacatggtgggtcacggtggggctctggaaccaggatgtcttgacctgagtcctgaattggccccttcccagctccgtcacttgccgtgagtcctccaaccaccatgtggcttcgtggcttcatttgtaaagtggggcaagagtgtgcgcagctggcaagggctgagcaattgaatgacttcactcatgtaaaacagagcaggaccaggcgcagggcaggtccgtggaaaaggttaactattgccatcattaggaaccatcaaggggctcacacacatgatctcagtggaggcttctagcagcctgtgagggggtgttagagatgtctggatgccagcaacagacgctgactctggttctcctgagcagaaaggtagtttattggaaggataaggggagcacaatgtatcagagtgaagtcatgaaaacaagacaaaatccaaggtcttagaaaatatcttatatggtattattatatcatttttgtattcggcacaaaaagggcaggccaaaaataagccctaatgagacaactgtataaaaacgttttgagtagcctaatgagtgaaaattatttaaaacgtgttaattattattgcatgtatgaaagaatacaggtcgccttgttgcgatagaaatgccaaagtcccttgctttccaataacatgggcctgagaaaattcagtgtcactcatccacgacgatccgatgtggaggttcctattcccacggagatgaagccacaagcaaaggcctgtccgtgtgcaggtctgtcctgagcatgaacatcctgtcccagagagaaaatgctccctctgggaagagcctccctgggcaccccttgggtccttggagcccttctgggccacatctctgcttagcgttgggggacctgtcacacccgagtggggtgaccacgggctcgcgacctgtatgaggcgagactccagcattctaggggatgaccgcaaaaccaggccctcagcagaggccgcctccttccagagccttctgtggctgggcgggggtctccaggcagctccgcagcccccgcaaataccccctggtgctgagtccgcttatacagacagagacgaagggcagcgacagcgtttttgttttctgaagtgggagggtctcgtgaccgcagctcaggaggaaaacgaggcgccggctttgcaggtgggtaggagtttgtgttgtactcggaggctgggagcccctggggcttctgtagggagaggcggtctgagacgcgctttagaagttgacctgctgctctgcggggactcggtgcgggagacgagtggaggctgctgcgtcatccaggtgagaggagagccaggtgcgcagtgagcagaggtgggaggaaagctggttgccacggagatgagggcgtgtccatcactgcaaggctccacccacagcactatcctgggcggaaccttcctggccccacccacagccttagctgattggactgtggagtacatgtgacttcaggctgtgtccttataggttggctggcctctagtgccctgcccatgtggtcatggagtgtctgcacgggacgtcctggagagtcggacacgtaagcagcacagtgaggccaccaacagcagcaaccgagtcttcgtgtactgcgccttcctggacttcagctccggagaaggggtctggtcgaaccacggctgtgcgctcacgagaggaaacctcacctactccgtctgccgctgcactcacctcaccaactttgccatcctcatgcaggtggtcccgctggagcttgcacgcggacaccaggtggcgctgtcgtctatcagctatgtgggctgctccctctccgtgctctgcctggtggccacgctggtcaccttcgccgtgctgtcctccgtgagcaccatccggaaccagcgctaccacatccacgccaacctgtccttcgccgtgctggtggcccaggtcctgctgctcattagtttccgcctcgagccgggcacgaccccctgccaagtgatggccgtgctcctacactacttcttcctgagtgccttcgcatggatgctggtggaggggctgcacctctacagcatggtgatcaaggtctttgggtcggaggacagcaagcaccgttactactatgggatgggatggggttttcctcttctgatctgcatcatttcactgtcatttgccatggacagttacggaacaagcaacaattgctggctgtcgttggcgagtggcgccatctgggcctttgtagcccctgccctgtttgtcatcgtggtcaacattggcatcctcatcgctgtgaccagagtcatctcacagatcagcgccgacaactacaagatccatggagaccccagtgccttcaagttgacagccaaggcagtggccgtgctgctgcccatcctgggtacctcgtgggtctttggcgtgcttgctgtcaacggttgtgctgtggttttccagtacatgtttgccacgctcaactccctgcagggactgttcatattcctctttcattgtctcctgaattcagaggccaggtgggccaaggagggcagagcagagtcgctgagcaggatggtggccgggcagaagggctgcatgatcacaaagcccagtgaccccttgatcgcaacgcccagtgaccccttgcaaggcctgaggtggatcccggtggcaggaaggcagtgcagccatggaagcccgcccgcccacccgcctgcctgcccaccacgcatttgtttatttgcttctctctcacactcaccccgggacattcattgctgagtgtgaggagcccagcagaggccactccacacccagcttccctggcctgcgatacaacctggctctgccccacagagcagcgatgcacagctcagctgtggagccagcagctccgactcatatttccaaatcccaacctccctcgcacatctggttccggagttgcaccggcacagactcctctggttacggctgttgcagcctctgaaattgctctcacgatcccttccccgctttcaaggtgagagccgccttcaagcacaaaaccaaggtctggtcgctcacgagcagctctgcccgcacctccaacgcgaagcccttccactcggacctcatgaatgggacccggccaggcatggcctccaccaagctcagcccttgggacaagagcagccactctgcccaccgcgtcgacctgtcagccgtgtgagccgggaggctgccaaccaggccaggctgcgctcagaacacacccccccaaacagaatgaaatgccccacctttgcccatggaccctctccttgctgctgtctggacatgggtgttgtggccccgagacagctgtcctcccctgtgactctggctgtcggagcacactgctcagcccagcagcctgatgcccaggccagcgtgggccctcctgccttgcatccacccgtgggctgagtgacttcctcgggggattcccaggacacagtggcctgactgtgatggtgcccttgagcctcccttcatcactcagcatcagacccagcgaggccaggacactcggggccggtcccgcagcaccaggaggggatgttcagcctctgtgccttggtggggcttggggactcagggccaaagaggtggttcaggtccccacgcaccctcagtcaggcgcaggcagctgggggtgtgtggggaagagcatgcggagtccccagtgtctgaatccactgagtggtgagttccccacagccggcgctagccgtggtgtgtgtctctgtaggtggtgccggcgtgggccaacctgtgctgtgtcatcagttgggggcccctgcccaagccgagctcgagccgtgggcgggagtcgttgactctccaggtgagggcgacccctctgccctgtccttgggggggtcccctctgctcacgtgaagagccgctctgggccttgaggctgcctgatggtgcctgtgcttgggggagcttctcggccatccgctgtgagttttgcctctttggaccccaattcggccttaagatgccctcctccctcgtgtgccagcctccttggttgttcttgggccacaggagctggccgtgtccccgcagtgcctggtgtccaggtggaaagtggagggcattttccagggcactgctttccccagaggcttcctcatggctcacaggcactctacgaagtttctaatgggcagaccacgcggcaggtagcacagtgcgctccgtctggtcaccatgagaccgacctgcgctgagtccccactgacctggagagggagggctggtgacagccgtgtcttctgtgttgagggaaatttatggactcagattcagccccagaggagatgggataattgttatggacccatgtgtgggcatgatcctgtggaacacaggtttgggatcatagatgtgaattaagacaccaccgagatacgggctgtgaggttcatactgtgctgatagcactcgtggtgtctgtgaaatgtgggtaagacattcaaacctggttttgatactggaaactcttcctttaaaactgtgaccatgatttcattcagcccctccacacccctatgtctgccttgtttcagagtgagttttctatggagcctgtggcccttttgcagcccacctggtggcttcttaatgtaactcttcccctggtcgcctggagtggaccactcatctgcaggcctctcctgcatggggagggtaggcagggagcagcatgtctgcaggggtgaacctttgctcttctgtcaggcgaggcccaggctgcaccagccacctgccacatggtgacagtgccacgggccctgcgtatggcccctgcaaccgtgctctggcgggcacacctggctgctgcaggccaaggccgctgttcagtgaagagtcccatgtttagtatggactaaagtcccatgtttagccactgccccaggctcccgtgaccccagaaaccaggtcacatggaccacagtgccagatcctcatcacgccggtgagcacctagaagtgagaacactgtattcctacaatgtacacttggatatttctccttatttagtttctagtgaaacaaatcaagtaaggaactatctttagtttagatggaattatttgtttttaattgttgccgtattcatctatatagctaatatttcaagataagtaatgaacaaaacctgtctaaaccttttgtttccaatgaatgaaagtcatgcactttatttataggctctatgttttggcttctgcagtacttttattatctatacataatttggccaaaaataagaaattggaaagaatgaaatgtttagtttatagtagaagaaagatgatgacactaagttgtgaaaatatgttgtgatttttatgaaataaactcatgtcctgaaaagaaa

SEQ ID NO: 105407 - DNA, 3244 bp, Homo sapiens
  Payload ID: 678
  Gene Symbol: ADGRD2
  Gene Name: adhesion G protein-coupled receptor D2
  Uniprot ID: Q7Z7M1
  ENST ID: ENST00000334810
  CDS Start-End: 1-2917
atcaggagtctctctgggaccccctccaactccccaggtgaatcaaggaacccttgggccccaggttgcccccgtggccgccggcgaggtggtgaagactgcaggtggggtgtgcaagttctctggacagcgactgagctggtggcaggcccaagagtcctgcgagcagcagtttggccacttggcactgcagccccctgatggggttcttgcttcacggctgcgcgatccggtctgggtgggccaaagagaggcccctctgcggagacccccacagaggcgtgcgcgcaccaccgccgtgctggtgttcgacgagaggacggctgaccgggcggcgcggctgcggagccctctgcctgagctggcagcgctgaccgcgtgtactcacgtgcagtgggactgtgcctcgcccgaccccgcagcgctcttctccgttgccgcgcccgcgctgcccaacgcgctgcagctgcgcgccttcgccgagccggggggcgtcgtgcgcgctgcgctggtggtgcgtgggcagcacgcgcccttcctcgcagccttccgcgccgacggccgctggcaccatgtgtgcgccacgtgggagcagcggggcgggcgctgggcgctgttctccgatgggaggcggcgcgctggggcgcgggggctgggcgccggccacccggtgccgtccggcggcatcctggtgctgggccaggatcaggactctctgggcggtggcttctcggtgcgtcacgccctcagcggcaacctcaccgacttccacctgtgggcgcgggcgctgagccccgctcagctgcaccgggcacgggcctgcgcgccgccctcagagggcctgctcttccgctgggacccgggcgccctggacgtcacgccctcgctgctgcccactgtgtgggtgcgccttctctgtcccgtgccctccgaggagtgccctacgtggaacccgggacctcgcagtgagggctctgagctctgcctggagccgcagcccttcctctgctgctaccggacagagccctatcgtcggctgcaggatgcccagtcgtggcctggccaggatgttatcagccgagtcaatgccttggccaacgacattgtgctcctcccggaccccctctccgaagtccatggggccctgtccccagcggaggcctccagcttcctgggccttctggagcatgtcctggcgatggagatggctcccctggggccggccgcactgctggctgttgtccgcttcctgaagagggtggtggccctcggggctggggacccagagctgttgttgacaggcccctgggagcagctgagccaaggcgttgtatctgtggccagcctggtcctggaggagcaggtggctgacacatggctctccctccgtgaagtgattggtgggcctatggccctggtggcgagtgtgcagcgcctggcacccctgctgagcacctcaatgacctcagagcggccccgaatgcgcatccagcaccgccatgctggcctggaggtgcggagcttacgcttgagggaggccagcacgaggggctgcttattcacaatgcctggtgggcgtccagaggggcccggccatatccacattcctgcgagtgaagtgaggcgactcctcaggaaaggcctctctggagtcaccgtgatccacagctggttcacctccagagtcttccagcacaccctagagggaccggacctagagccccaggcccctgccagctcagaggaggcaaacagggtgcagaggttcctaagcacccaggtggggtcagccatcatctcctctgaagtgtgggacgtcactggagaggtcaacgtggccatgacctttcatctccagcaccgggcccagagccccctgttccctccccatcccccaagcccatatacagggggtgcctgggccaccacaggctgctccgtggctgccctgtacctggactccaccgcctgcttctgcaaccacagcaccagctttgccatcctgctgcaaatctatgaagtacagagaggccctgaggaggagtcgctgctgaggactctgtcatttgtgggctgtggcgtgtccttctgcgccctcaccaccaccttcttgctcttcctggtggccggggtccccaagtcagagcgaaccacagtccacaagaacctcaccttctccctggcctctgccgagggcttcctcatgaccagcgagtgggccaaggccaatgaggtggcatgtgtggctgtcacagtcgcaatgcacttcctctttctggtggcattctcctggatgctggtggaggggctgctgctgtggaggaaggtggtagctgtgagcatgcacccgggcccaggcatgcggctctaccacgccacaggctggggcgtgcctgtgggcatcgtggcggtcaccctggccatgctcccccatgactacgtggcccccggacattgctggctcaatgtgcacacaaatgccatctgggccttcgtggggcctgtgctcttcgtgctgactgccaacacctgcatcctggcccgtgtggtaatgatcaccgtgtccagtgcccgccgccgtgcccgcatgttgagcccacagccctgcctgcagcagcagatctggacccagatatgggccacggtgaagcccgtgctggtcctgctgcccgtcctaggcctgacctggctggcaggcatcctggtgcacctgagccccgcctgggcctacgctgccgtgggcctcaactccatccaggggctgtacatcttcctggtttatgctgcctgcaatgaggaggtgcggagcgccctgcagaggatggctgagaagaaggtggccgagggacctatggccctagaactccctcagcattctcctccattgcaaacccggagagacaggctgtggaactgacagcgttcaaagcttcaggtttctagagagtggctgggaaactcgtcgccaaaccctgcccagctcagctctgctgggaccccagaccccagaacggcgcagcgggagtccctgagccccaacagcggccccagctcccgtggcctcagcctctggctttccctaaaggactgtgggcctcagccccctgttcccctagcccaccaggtccccaggctctttcccccagtctttgcctatctgtgatctgctccttcccccatgctccgaagttccaacgggctctgccgtgtctggtaataaataggactgttgggctctcctgtc

SEQ ID NO: 105408 - DNA, 722 bp, Homo sapiens
  Payload ID: 678
  Gene Symbol: ADGRD2
  Gene Name: adhesion G protein-coupled receptor D2
  ENST ID: ENST00000610875
  CDS Start-End: 1-126
tttctggtggcattctcctggatgctggtggaggggctgctgctgtggaggaaggtggtagctgtgagcatgcacccgggcccaggcatgcggctctaccacgccacaggctgggggccacggtgaagcccgtgctggtcctgctgcccgtcctaggcctgacctggctggcaggcatcctggtgcacctgagccccgcctgggcctacgctgccgtgggcctcaactccatccaggggctgtacatcttcctggtttatgctgcctgcaatgaggaggtgcggagcgccctgcagaggatggctgagaagaaggtggccgagggacctatggccctagaactccctcagcattctcctccattgcaaacccggagagacaggctgtggaactgacagcgttcaaagcttcaggtttctagagagtggctgggaaactcgtcgccaaaccctgcccagctcagctctgctgggaccccagaccccagaacggcgcagcgggagtccctgagccccaacagcggccccagctcccgtggcctcagcctctggctttccctaaaggactgtgggcctcagccccctgttcccctagcccaccaggtccccaggctctttcccccagtctttgcctatctgtgatctgctccttcccccatgctccgaagttccaacgggctctgccgtgtctggtaataaataggactgttgggctctcctgtc

SEQ ID NO: 105409 - DNA, 2939 bp, Homo sapiens
  Payload ID: 679
  Gene Symbol: ADGRE1
  Gene Name: adhesion G protein-coupled receptor E1
  Uniprot ID: Q14246
  ENST ID: ENST00000250572
  CDS Start-End: 44-2509
agtagaaaagtttcttttctttgaatgacagaactacagcataatgcgtggcttcaacctgctcctcttctggggatgttgtgttatgcacagctgggaagggcacataagacccacacggaaaccaaacacaaagggtaataactgtagagacagtaccttgtgcccagcttatgccacctgcaccaatacagtggacagttactattgcgcttgcaaacaaggcttcctgtccagcaatgggcaaaatcacttcaaggatccaggagtgcgatgcaaagatattgatgaatgttctcaaagcccccagccctgtggtcctaactcatcctgcaaaaacctgtcagggaggtacaagtgcagctgtttagatggtttctcttctcccactggaaatgactgggtcccaggaaagccgggcaatttctcctgtactgatatcaatgagtgcctcaccagcagcgtctgccctgagcattctgactgtgtcaactccatgggaagctacagttgcagctgtcaagttggattcatctctagaaactccacctgtgaagacgtggatgaatgtgcagatccaagagcttgcccagagcatgcaacttgtaataacactgttggaaactactcttgtttctgcaacccaggatttgaatccagcagtggccacttgagtttccagggtctcaaagcatcgtgtgaagatattgatgaatgcactgaaatgtgccccatcaattcaacatgcaccaacactcctgggagctacttttgcacctgccaccctggctttgcaccaagcaatggacagttgaatttcacagaccaaggagtggaatgtagagatattgatgagtgccgccaagatccatcaacctgtggtcctaattctatctgcaccaatgccctgggctcctacagctgtggctgcattgcaggctttcatcccaatccagaaggctcccagaaagatggcaacttcagctgccaaagggttctcttcaaatgtaaggaagatgtgatacccgataataagcagatccagcaatgccaagagggaaccgcagtgaaacctgcatatgtctccttttgtgcacaaataaataacatcttcagcgttctggacaaagtgtgtgaaaataaaacgaccgtagtttctctgaagaatacaactgagagctttgtccctgtgcttaaacaaatatccacgtggactaaattcaccaaggaagagacgtcctccctggccacagtcttcctggagagtgtggaaagcatgacactggcatctttttggaaaccctcagcaaatatcactccggctgttcggacggaatacttagacattgagagcaaagttatcaacaaagaatgcagtgaagagaatgtgacgttggacttggtagccaagggggataagatgaagatcgggtgttccacaattgaggaatctgaatccacagagaccactggtgtggcttttgtctcctttgtgggcatggaatcggttttaaatgagcgcttcttcaaagaccaccaggctcccttgaccacctctgagatcaagctgaagatgaattctcgagtcgttgggggcataatgactggagagaagaaagacggcttctcagatccaatcatctacactctggagaacattcagccaaagcagaagtttgagaggcccatctgtgtttcctggagcactgatgtgaagggtggaagatggacatcctttggctgtgtgatcctggaagcttctgagacatataccatctgcagctgtaatcagatggcaaatcttgccgttatcatggcgtctggggagctcacgatgggctgcgccatcatcgcgggcttcctgcactaccttttccttgcctgcttcttctggatgctggtggaggctgtgatactgttcttgatggtcagaaacctgaaggtggtgaattacttcagctctcgcaacatcaagatgctgcacatctgtgcctttggttatgggctgccgatgctggtggtggtgatctctgccagtgtgcagccacagggctatggaatgcataatcgctgctggctgaatacagagacagggttcatctggagtttcttggggccagtttgcacagttatagtgatcaactcccttctcctgacctggaccttgtggatcctgaggcagaggctttccagtgttaatgccgaagtctcaacgctaaaagacaccaggttactgaccttcaaggcctttgcccagctcttcatcctgggctgctcctgggtgctgggcatttttcagattggacctgtggcaggtgtcatggcttacctgttcaccatcatcaacagcctgcagggggccttcatcttcctcatccactgtctgctcaacggccaggtacgagaagaatacaagaggtggatcactgggaagacgaagcccagctcccagtcccagacctcaaggatcttgctgtcctccatgccatccgcttccaagacgggttaaagtcctttcttgctttcaaatatgctatggagccacagttgaggacagtagtttcctgcaggagcctaccctgaaatctcttctcagcttaacatggaaatgaggatcccaccagccccagaaccctctggggaagaatgttgggggcggtcttcctgtggttgtatgcactgatgagaaatcaggcgtttctgctccaaacgaccattttatcttcgtgctctgcaacttcttcaattccagagtttctgagaacagacccaaattcaatggcatgaccaagaacacctggctaccattttgttttctcctgcccttgttggtgcatggttctaagcatgcccctccagagcctatcatacgcctgatacagagaacctctcaataaatgatttgtcgcctgtctgactgatttaccctaggataaaga

SEQ ID NO: 105410 - DNA, 3128 bp, Homo sapiens
  Payload ID: 679
  Gene Symbol: ADGRE1
  Gene Name: adhesion G protein-coupled receptor E1
  Uniprot ID: Q14246
  ENST ID: ENST00000312053
  CDS Start-End: 38-2698
aaagtttcttttctttgaatgacagaactacagcataatgcgtggcttcaacctgctcctcttctggggatgttgtgttatgcacagctgggaagggcacataagacccacacggaaaccaaacacaaagggtaataactgtagagacagtaccttgtgcccagcttatgccacctgcaccaatacagtggacagttactattgcgcttgcaaacaaggcttcctgtccagcaatgggcaaaatcacttcaaggatccaggagtgcgatgcaaagatattgatgaatgttctcaaagcccccagccctgtggtcctaactcatcctgcaaaaacctgtcagggaggtacaagtgcagctgtttagatggtttctcttctcccactggaaatgactgggtcccaggaaagccgggcaatttctcctgtactgatatcaatgagtgcctcaccagcagcgtctgccctgagcattctgactgtgtcaactccatgggaagctacagttgcagctgtcaagttggattcatctctagaaactccacctgtgaagacgtggatgaatgtgcagatccaagagcttgcccagagcatgcaacttgtaataacactgttggaaactactcttgtttctgcaacccaggatttgaatccagcagtggccacttgagtttccagggtctcaaagcatcgtgtgaagatattgatgaatgcactgaaatgtgccccatcaattcaacatgcaccaacactcctgggagctacttttgcacctgccaccctggctttgcaccaagcaatggacagttgaatttcacagaccaaggagtggaatgtagagatattgatgagtgccgccaagatccatcaacctgtggtcctaattctatctgcaccaatgccctgggctcctacagctgtggctgcattgcaggctttcatcccaatccagaaggctcccagaaagatggcaacttcagctgccaaagggttctcttcaaatgtaaggaagatgtgatacccgataataagcagatccagcaatgccaagagggaaccgcagtgaaacctgcatatgtctccttttgtgcacaaataaataacatcttcagcgttctggacaaagtgtgtgaaaataaaacgaccgtagtttctctgaagaatacaactgagagctttgtccctgtgcttaaacaaatatccacgtggactaaattcaccaaggaagagacgtcctccctggccacagtcttcctggagagtgtggaaagcatgacactggcatctttttggaaaccctcagcaaatatcactccggctgttcggacggaatacttagacattgagagcaaagttatcaacaaagaatgcagtgaagagaatgtgacgttggacttggtagccaagggggataagatgaagatcgggtgttccacaattgaggaatctgaatccacagagaccactggtgtggcttttgtctcctttgtgggcatggaatcggttttaaatgagcgcttcttcaaagaccaccaggctcccttgaccacctctgagatcaagctgaagatgaattctcgagtcgttgggggcataatgactggagagaagaaagacggcttctcagatccaatcatctacactctggagaacattcagccaaagcagaagtttgagaggcccatctgtgtttcctggagcactgatgtgaagggtggaagatggacatcctttggctgtgtgatcctggaagcttctgagacatataccatctgcagctgtaatcagatggcaaatcttgccgttatcatggcgtctggggagctcacgatggacttttccttgtacatcattagccatgtaggcattatcatctccttggtgtgcctcgtcttggccatcgccacctttctgctgtgtcgctccatccgaaatcacaacacctacctccacctgcacctctgcgtgtgtctcctcttggcgaagactctcttcctcgccggtatacacaagactgacaacaagatgggctgcgccatcatcgcgggcttcctgcactaccttttccttgcctgcttcttctggatgctggtggaggctgtgatactgttcttgatggtcagaaacctgaaggtggtgaattacttcagctctcgcaacatcaagatgctgcacatctgtgcctttggttatgggctgccgatgctggtggtggtgatctctgccagtgtgcagccacagggctatggaatgcataatcgctgctggctgaatacagagacagggttcatctggagtttcttggggccagtttgcacagttatagtgatcaactcccttctcctgacctggaccttgtggatcctgaggcagaggctttccagtgttaatgccgaagtctcaacgctaaaagacaccaggttactgaccttcaaggcctttgcccagctcttcatcctgggctgctcctgggtgctgggcatttttcagattggacctgtggcaggtgtcatggcttacctgttcaccatcatcaacagcctgcagggggccttcatcttcctcatccactgtctgctcaacggccaggtacgagaagaatacaagaggtggatcactgggaagacgaagcccagctcccagtcccagacctcaaggatcttgctgtcctccatgccatccgcttccaagacgggttaaagtcctttcttgctttcaaatatgctatggagccacagttgaggacagtagtttcctgcaggagcctaccctgaaatctcttctcagcttaacatggaaatgaggatcccaccagccccagaaccctctggggaagaatgttgggggcggtcttcctgtggttgtatgcactgatgagaaatcaggcgtttctgctccaaacgaccattttatcttcgtgctctgcaacttcttcaattccagagtttctgagaacagacccaaattcaatggcatgaccaagaacacctggctaccattttgttttctcctgcccttgttggtgcatggttctaagcatgcccctccagagcctatcatacgcctgatacagagaacctctcaataaatgatttgtcgcctgtctgactgatttaccctaggataaaga

SEQ ID NO: 105411 - DNA, 3056 bp, Homo sapiens
  Payload ID: 679
  Gene Symbol: ADGRE1
  Gene Name: adhesion G protein-coupled receptor E1
  Uniprot ID: Q14246
  ENST ID: ENST00000381404
  CDS Start-End: 31-2634
cttttctttgaatgacagaactacagcataatgcgtggcttcaacctgctcctcttctggggatgttgtgttatgcacagctgggaagggcacataagacccacacggaaaccaaacacaaagggtaataactgtagagacagtaccttgtgcccagcttatgccacctgcaccaatacagtggacagttactattgcgcttgcaaacaaggcttcctgtccagcaatgggcaaaatcacttcaaggatccaggagtgcgatgcaaagatatcaatgagtgcctcaccagcagcgtctgccctgagcattctgactgtgtcaactccatgggaagctacagttgcagctgtcaagttggattcatctctagaaactccacctgtgaagacgtggatgaatgtgcagatccaagagcttgcccagagcatgcaacttgtaataacactgttggaaactactcttgtttctgcaacccaggatttgaatccagcagtggccacttgagtttccagggtctcaaagcatcgtgtgaagatattgatgaatgcactgaaatgtgccccatcaattcaacatgcaccaacactcctgggagctacttttgcacctgccaccctggctttgcaccaagcaatggacagttgaatttcacagaccaaggagtggaatgtagagatattgatgagtgccgccaagatccatcaacctgtggtcctaattctatctgcaccaatgccctgggctcctacagctgtggctgcattgcaggctttcatcccaatccagaaggctcccagaaagatggcaacttcagctgccaaagggttctcttcaaatgtaaggaagatgtgatacccgataataagcagatccagcaatgccaagagggaaccgcagtgaaacctgcatatgtctccttttgtgcacaaataaataacatcttcagcgttctggacaaagtgtgtgaaaataaaacgaccgtagtttctctgaagaatacaactgagagctttgtccctgtgcttaaacaaatatccacgtggactaaattcaccaaggaagagacgtcctccctggccacagtcttcctggagagtgtggaaagcatgacactggcatctttttggaaaccctcagcaaatatcactccggctgttcggacggaatacttagacattgagagcaaagttatcaacaaagaatgcagtgaagagaatgtgacgttggacttggtagccaagggggataagatgaagatcgggtgttccacaattgaggaatctgaatccacagagaccactggtgtggcttttgtctcctttgtgggcatggaatcggttttaaatgagcgcttcttcaaagaccaccaggctcccttgaccacctctgagatcaagctgaagatgaattctcgagtcgttgggggcataatgactggagagaagaaagacggcttctcagatccaatcatctacactctggagaacattcagccaaagcagaagtttgagaggcccatctgtgtttcctggagcactgatgtgaagggtggaagatggacatcctttggctgtgtgatcctggaagcttctgagacatataccatctgcagctgtaatcagatggcaaatcttgccgttatcatggcgtctggggagctcacgatggacttttccttgtacatcattagccatgtaggcattatcatctccttggtgtgcctcgtcttggccatcgccacctttctgctgtgtcgctccatccgaaatcacaacacctacctccacctgcacctctgcgtgtgtctcctcttggcgaagactctcttcctcgccggtatacacaagactgacaacaagatgggctgcgccatcatcgcgggcttcctgcactaccttttccttgcctgcttcttctggatgctggtggaggctgtgatactgttcttgatggtcagaaacctgaaggtggtgaattacttcagctctcgcaacatcaagatgctgcacatctgtgcctttggttatgggctgccgatgctggtggtggtgatctctgccagtgtgcagccacagggctatggaatgcataatcgctgctggctgaatacagagacagggttcatctggagtttcttggggccagtttgcacagttatagtggtaagcaaatactacaacagcctggcgaagtgtgttctgaaggaggagcaaggagacctgcgagatctggaatttccagggacgtgtgcagctgagaggatcaactcccttctcctgacctggaccttgtggatcctgaggcagaggctttccagtgttaatgccgaagtctcaacgctaaaagacaccaggttactgaccttcaaggcctttgcccagctcttcatcctgggctgctcctgggtgctgggcatttttcagattggacctgtggcaggtgtcatggcttacctgttcaccatcatcaacagcctgcagggggccttcatcttcctcatccactgtctgctcaacggccaggtacgagaagaatacaagaggtggatcactgggaagacgaagcccagctcccagtcccagacctcaaggatcttgctgtcctccatgccatccgcttccaagacgggttaaagtcctttcttgctttcaaatatgctatggagccacagttgaggacagtagtttcctgcaggagcctaccctgaaatctcttctcagcttaacatggaaatgaggatcccaccagccccagaaccctctggggaagaatgttgggggcggtcttcctgtggttgtatgcactgatgagaaatcaggcgtttctgctccaaacgaccattttatcttcgtgctctgcaacttcttcaattccagagtttctgagaacagacccaaattcaatggcatgaccaagaacacctggctaccattttgttttctcctgcccttgttggtgcatggttctaagcatgcccctccagagcctatcatacgcctgatacagagaacctctcaataaatgatttgtcgcctgtctgactgatttaccctag

SEQ ID NO: 105412 - DNA, 2687 bp, Homo sapiens
  Payload ID: 679
  Gene Symbol: ADGRE1
  Gene Name: adhesion G protein-coupled receptor E1
  Uniprot ID: Q14246
  ENST ID: ENST00000381407
  CDS Start-End: 39-2276
aaaagtttcttttctttgaatgacagaactacagcataatgcgtggcttcaacctgctcctcttctggggatgttgtgttatgcacagctgggaagggcacataagacccacacggaaaccaaacacaaagggtaataactgtagagacagtaccttgtgcccagcttatgccacctgcaccaatacagtggacagttactattgcgcttgcaaacaaggcttcctgtccagcaatgggcaaaatcacttcaaggatccaggagtgcgatgcaaagatattgatgaatgcactgaaatgtgccccatcaattcaacatgcaccaacactcctgggagctacttttgcacctgccaccctggctttgcaccaagcaatggacagttgaatttcacagaccaaggagtggaatgtagagatattgatgagtgccgccaagatccatcaacctgtggtcctaattctatctgcaccaatgccctgggctcctacagctgtggctgcattgcaggctttcatcccaatccagaaggctcccagaaagatggcaacttcagctgccaaagggttctcttcaaatgtaaggaagatgtgatacccgataataagcagatccagcaatgccaagagggaaccgcagtgaaacctgcatatgtctccttttgtgcacaaataaataacatcttcagcgttctggacaaagtgtgtgaaaataaaacgaccgtagtttctctgaagaatacaactgagagctttgtccctgtgcttaaacaaatatccacgtggactaaattcaccaaggaagagacgtcctccctggccacagtcttcctggagagtgtggaaagcatgacactggcatctttttggaaaccctcagcaaatatcactccggctgttcggacggaatacttagacattgagagcaaagttatcaacaaagaatgcagtgaagagaatgtgacgttggacttggtagccaagggggataagatgaagatcgggtgttccacaattgaggaatctgaatccacagagaccactggtgtggcttttgtctcctttgtgggcatggaatcggttttaaatgagcgcttcttcaaagaccaccaggctcccttgaccacctctgagatcaagctgaagatgaattctcgagtcgttgggggcataatgactggagagaagaaagacggcttctcagatccaatcatctacactctggagaacattcagccaaagcagaagtttgagaggcccatctgtgtttcctggagcactgatgtgaagggtggaagatggacatcctttggctgtgtgatcctggaagcttctgagacatataccatctgcagctgtaatcagatggcaaatcttgccgttatcatggcgtctggggagctcacgatggacttttccttgtacatcattagccatgtaggcattatcatctccttggtgtgcctcgtcttggccatcgccacctttctgctgtgtcgctccatccgaaatcacaacacctacctccacctgcacctctgcgtgtgtctcctcttggcgaagactctcttcctcgccggtatacacaagactgacaacaagatgggctgcgccatcatcgcgggcttcctgcactaccttttccttgcctgcttcttctggatgctggtggaggctgtgatactgttcttgatggtcagaaacctgaaggtggtgaattacttcagctctcgcaacatcaagatgctgcacatctgtgcctttggttatgggctgccgatgctggtggtggtgatctctgccagtgtgcagccacagggctatggaatgcataatcgctgctggctgaatacagagacagggttcatctggagtttcttggggccagtttgcacagttatagtgatcaactcccttctcctgacctggaccttgtggatcctgaggcagaggctttccagtgttaatgccgaagtctcaacgctaaaagacaccaggttactgaccttcaaggcctttgcccagctcttcatcctgggctgctcctgggtgctgggcatttttcagattggacctgtggcaggtgtcatggcttacctgttcaccatcatcaacagcctgcagggggccttcatcttcctcatccactgtctgctcaacggccaggtacgagaagaatacaagaggtggatcactgggaagacgaagcccagctcccagtcccagacctcaaggatcttgctgtcctccatgccatccgcttccaagacgggttaaagtcctttcttgctttcaaatatgctatggagccacagttgaggacagtagtttcctgcaggagcctaccctgaaatctcttctcagcttaacatggaaatgaggatcccaccagccccagaaccctctggggaagaatgttgggggcggtcttcctgtggttgtatgcactgatgagaaatcaggcgtttctgctccaaacgaccattttatcttcgtgctctgcaacttcttcaattccagagtttctgagaacagacccaaattcaatggcatgaccaagaacacctggctaccattttgttttctcctgcccttgttggtgcatggttctaagcatgcccctccagagcctatcatacgcctgatacagagaacctctcaataaatgatttgtcgcctgtctgactg

SEQ ID NO: 105413 - DNA, 2567 bp, Homo sapiens
  Payload ID: 679
  Gene Symbol: ADGRE1
  Gene Name: adhesion G protein-coupled receptor E1
  Uniprot ID: Q14246
  ENST ID: ENST00000450315
  CDS Start-End: 33-2162
ttcttttctttgaatgacagaactacagcataatgcgtggcttcaacctgctcctcttctggggatgttgtgttatgcacagctgggaagggcacataagacccacacggaaaccaaacacaaagggtaataactgtagagacagtaccttgtgcccagcttatgccacctgcaccaatacagtggacagttactattgcgcttgcaaacaaggcttcctgtccagcaatgggcaaaatcacttcaaggatccaggagtgcgatgcaaagatattgatgaatgttctcaaagcccccagccctgtggtcctaactcatcctgcaaaaacctgtcagggaggtacaagtgcagctgtttagatggtttctcttctcccactggaaatgactgggtcccaggaaagccgggcaatttctcctgtactgatatcaatgagtgcctcaccagcagggttctcttcaaatgtaaggaagatgtgatacccgataataagcagatccagcaatgccaagagggaaccgcagtgaaacctgcatatgtctccttttgtgcacaaataaataacatcttcagcgttctggacaaagtgtgtgaaaataaaacgaccgtagtttctctgaagaatacaactgagagctttgtccctgtgcttaaacaaatatccacgtggactaaattcaccaaggaagagacgtcctccctggccacagtcttcctggagagtgtggaaagcatgacactggcatctttttggaaaccctcagcaaatatcactccggctgttcggacggaatacttagacattgagagcaaagttatcaacaaagaatgcagtgaagagaatgtgacgttggacttggtagccaagggggataagatgaagatcgggtgttccacaattgaggaatctgaatccacagagaccactggtgtggcttttgtctcctttgtgggcatggaatcggttttaaatgagcgcttcttcaaagaccaccaggctcccttgaccacctctgagatcaagctgaagatgaattctcgagtcgttgggggcataatgactggagagaagaaagacggcttctcagatccaatcatctacactctggagaacattcagccaaagcagaagtttgagaggcccatctgtgtttcctggagcactgatgtgaagggtggaagatggacatcctttggctgtgtgatcctggaagcttctgagacatataccatctgcagctgtaatcagatggcaaatcttgccgttatcatggcgtctggggagctcacgatggacttttccttgtacatcattagccatgtaggcattatcatctccttggtgtgcctcgtcttggccatcgccacctttctgctgtgtcgctccatccgaaatcacaacacctacctccacctgcacctctgcgtgtgtctcctcttggcgaagactctcttcctcgccggtatacacaagactgacaacaagatgggctgcgccatcatcgcgggcttcctgcactaccttttccttgcctgcttcttctggatgctggtggaggctgtgatactgttcttgatggtcagaaacctgaaggtggtgaattacttcagctctcgcaacatcaagatgctgcacatctgtgcctttggttatgggctgccgatgctggtggtggtgatctctgccagtgtgcagccacagggctatggaatgcataatcgctgctggctgaatacagagacagggttcatctggagtttcttggggccagtttgcacagttatagtgatcaactcccttctcctgacctggaccttgtggatcctgaggcagaggctttccagtgttaatgccgaagtctcaacgctaaaagacaccaggttactgaccttcaaggcctttgcccagctcttcatcctgggctgctcctgggtgctgggcatttttcagattggacctgtggcaggtgtcatggcttacctgttcaccatcatcaacagcctgcagggggccttcatcttcctcatccactgtctgctcaacggccaggtacgagaagaatacaagaggtggatcactgggaagacgaagcccagctcccagtcccagacctcaaggatcttgctgtcctccatgccatccgcttccaagacgggttaaagtcctttcttgctttcaaatatgctatggagccacagttgaggacagtagtttcctgcaggagcctaccctgaaatctcttctcagcttaacatggaaatgaggatcccaccagccccagaaccctctggggaagaatgttgggggcggtcttcctgtggttgtatgcactgatgagaaatcaggcgtttctgctccaaacgaccattttatcttcgtgctctgcaacttcttcaattccagagtttctgagaacagacccaaattcaatggcatgaccaagaacacctggctaccattttgttttctcctgcccttgttggtgcatggttctaagcatgcccctccagagcctatcatacgcctgatacagagaacctctcaataaatgatttgtcgcctgtc

SEQ ID NO: 105414 - DNA, 956 bp, Homo sapiens
  Payload ID: 679
  Gene Symbol: ADGRE1
  Gene Name: adhesion G protein-coupled receptor E1
  ENST ID: ENST00000595026
  CDS Start-End: 1-956
tgtagagacagtaccttgtgcccagcttatgccacctgcaccaatacagtggacagttactattgcgcttgcaaacaaggcttcctgtccagcaatgggcaaaatcacttcaaggatccaggagtgcgatgcaaagatattgatgaatgttctcaaagcccccagccctgtggtcctaactcatcctgcaaaaacctgtcagggaggtacaagtgcagctgtttagatggtttctcttctcccactggaaatgactgggtcccaggaaagccgggcaatttctcctgtactgatatcaatgagtgcctcaccagcagcgtctgccctgagcattctgactgtgtcaactccatgggaagctacagttgcagctgtcaagttggattcatctctagaaactccacctgtgaagacgtggatgaatgtgcagatccaagagcttgcccagagcatgcaacttgtaataacactgttggaaactactcttgtttctgcaacccaggatttgaatccagcagtggccacttgagtttccagggtctcaaagcatcgtgtgaagatattgatgaatgcactgaaatgtgccccatcaattcaacatgcaccaacactcctgggagctacttttgcacctgccaccctggctttgcaccaagcaatggacagttgaatttcacagaccaaggagtggaatgtagaggggttctcttcaaatgtaaggaagatgtgatacccgataataagcagatccagcaatgccaagagggaaccgcagtgaaacctgcatatgtctccttttgtgcacaaataaataacatcttcagcgttctggacaaagtgtgtgaaaataaaacgaccgtagtttctctgaagaatacaactgagagctttgtccctgtgcttaaacaaatatccacgtggactaaattcaccaaggaagagacgtcctccctggc

SEQ ID NO: 105415 - DNA, 6767 bp, Homo sapiens
  Payload ID: 680
  Gene Symbol: ADGRE2
  Gene Name: adhesion G protein-coupled receptor E2
  Uniprot ID: Q9UHX3
  ENST ID: ENST00000315576
  CDS Start-End: 453-2924
ggtctgctctgtgcggtgaagcttctcttcttggcacctgcctggcatcggaagagggccccttctccctccctgggcttttatgtggacactgtaatgcctcagttttctttctttctttttgtttttgacacagggtctcactctatcacccaagctggagtgcagtggcaccatcttagctcaccgcagcctcaaactccccagctcgggtgattcttcctgcctcagcctcctgagtagtagcagctgggaccacagacgtctgccaccaagcccagctgcaccgccagttccggggagggccctgggccagcggctgtccgccccccctcctttataaagtcctggcctcgggacagcccgcacagctgcccagcctgcggagacgggacagccctgtcccactcactctttcccctgctgctcctgccggcagctcagctggaaccatgggaggccgcgtctttctcgtctttctcgcattctgtgtctggctgactctgccgggagctgaaacccaggactccaggggctgtgcccggtggtgccctcaggactcctcgtgtgtcaatgccaccgcctgtcgctgcaatccagggttcagctctttttctgagatcatcaccacccccatggagacttgtgacgacatcaacgagtgtgcaacactgtcgaaagtgtcatgcggaaaattctcggactgctggaacacagaggggagctacgactgcgtgtgcagcccaggatatgagcctgtttctggggcaaaaacattcaagaatgagagcgagaacacgtgtcaagatgtggacgaatgtcagcagaacccaaggctctgtaaaagctacggcacctgcgtcaacaccctcggcagctacacgtgccagtgcctgcctggcttcaagctcaaacctgaggacccgaagctctgcacagatgtgaatgaatgcacctccggacaaaacccatgccacagctccacccactgcctcaacaacgtgggcagctatcagtgccgctgccgcccgggctggcaaccgattccggggtcccccaatggcccaaacaataccgtctgtgaagatgtggacgagtgcagctccgggcagcatcagtgtgacagctccaccgtctgcttcaacaccgtgggttcatacagctgccgctgccgcccaggctggaagcccagacacggaatcccgaataaccaaaaggacactgtctgtgaagatatgactttctccacctggaccccgccccctggagtccacagccagacgctttcccgattcttcgacaaagtccaggacctgggcagagactacaagccaggcttggccaataacaccatccagagcatcttacaggcgctggatgagctgctggaggcccctggggacctggagaccctgccccgcttacagcagcactgtgtggccagtcacctgctggatggcctagaggatgtcctcagaggcctgagcaagaacctttccaatgggctgttgaacttcagttatcctgcaggcacagaattgtccctggaggtgcagaagcaagtagacaggagtgtcaccttgagacagaatcaggcagtgatgcagctcgactggaatcaggcacagaaatctggtgacccaggcccttctgtggtgggccttgtctccattccagggatgggcaagttgctggctgaggcccctctggtcctggaacctgagaagcagatgcttctgcatgagacacaccagggcttgctgcaggacggctcccccatcctgctctcagatgtgatctctgcctttctgagcaacaacgacacccaaaacctcagctccccagttaccttcaccttctcccaccgttcagtgatcccgagacagaaggtgctctgtgtcttctgggagcatggccagaatggatgtggtcactgggccaccacaggctgcagcacaataggcaccagagacaccagcaccatctgccgttgcacccacctgagcagctttgccgtcctcatggcccactacgatgtgcaggaggaggatcccgtgctgactgtcatcacctacatggggctgagcgtctctctgctgtgcctcctcctggcggccctcacttttctcctgtgtaaagccatccagaacaccagcacctcactgcatctgcagctctcgctctgcctcttcctggcccacctcctcttcctcgtggcaattgatcaaaccggacacaaggtgctgtgctccatcatcgccggtaccttgcactatctctacctggccaccttgacctggatgctgctggaggccctgtacctcttcctcactgcacggaacctgacggtggtcaactactcaagcatcaacagattcatgaagaagctcatgttccctgtgggctacggagtcccagctgtgacagtggccatttctgcagcctccaggcctcacctttatggaacaccttcccgctgctggctccaaccagaaaagggatttatatggggcttccttggacctgtctgcgccatcttctctgtgaatttagttctctttctggtgactctctggattttgaaaaacagactctcctccctcaatagtgaagtgtccaccctccggaacacaaggatgctggcatttaaagcgacagctcagctgttcatcctgggctgcacgtggtgtctgggcatcttgcaggtgggtccggctgcccgggtcatggcctacctcttcaccatcatcaacagcctgcagggtgtcttcatcttcctggtgtactgcctcctcagccagcaggtccgggagcaatatgggaaatggtccaaagggatcaggaaattgaaaactgagtctgagatgcacacactctccagcagtgctaaggctgacacctccaaacccagcacggttaactagaaaaatcttctgaataagatcttccctctttgcccgtggaaaatctgaacaatctttgagccatctagaggggaaagaaaagactttgttctgtgtgtttcaagaaattcaccatgtcagcaatatgaaggatgttatggaaggcgtgctaggcattcaattcctgcagaaaccggaaatcttccatgccctgcaatgtgctcatcaaactctcagcatatggacggccagctgtggcccatatcttggtcactctgaagcacaatatttatgaagctatagaacgttaagacctctttcacagcctctccttcctacaaagactcctccaaatcttaaaatgaagcaggaaaacgagcctaagaggactttcataccgacaacatctgaaaggactagaatgttcacaccacgatctggatttcttaattttttgtttttgtttttgttgttctctagttctacgggtttgattatttagtcatgtgaaaaatattgattactcacacatagatcaagagagacacggctcctgccttcatggagcttttaggggaaaatgaagtggctcttgcagctagagttgactcagaagccgaaattcctagaaatcaggtttctactgctaggcaattgaagtataaactattttataaacactgtcttctttcgtcttcacaccaacatgcagaaaagtttctaatctcagatcggggatgtgcaacaaattccatttcaaaggaatgacctgcaaaactcctaaatattccaagcaaatgcccttaaccctgtctgttatctgctttccttgaacagaaattctacatgaccataaaacctcgaagatgggtatggcacagttcatgccctgtaatcctagcactttgggagggtgaggcaggaggatggctcaagcccaggagtttgagaccagtgtgggcaacagagtgagaaccatctctacccaaaaaaaaaattaaaaattagccaagcatggtgatgatataggagttaaggagaaatcatttaggcaaatagcaagggtaggaagtcctcagtaaggttttccatttaatgaaaagcagcccccaaaatcattttcttttctaacaaagaacagcctgtaaaatcgagctgcagacatagacaagcaagctggaagcttccacgggtgaatgccggcagctgtgccaataggaaaaagctacctagactaggcatgtccaaaatggcggctccaagttcccttctctttgccagccatgtgtacagtaaaaagcaggcaacatagtgtcagccaaagctcatttgcataataagattagggtggggtggccagctcacataggggtaggccctaggtaaatcagacaccgccttctcaagcctgtctataaaatctggtacactatgacgagggtcagatttcccattcagacgcccctctcccatgcaagagaaagagctgttctcctttctctttcttttgcctattaaacctctgctcctggccaggcacagtggctcacgcctataatcccagcactttgggaggctgaggtggtcagatcacctaaggtcaggagttcaagaccagcctggtcaacatggtgaaatcttgtctctagtaaaaatacaaaaatatatgaaatctcacatagatgataatattaagttccaaaagcaactcaacctggtagattctaattttttttgaggcagggtcttgctttgtcacccatgctggagtacaatggcacaaacactgctcactgcagcctcgacctcccaaggcctaagcaatcctcctgcctcagtccccctccaggtatttgaaactacaggtgtgtaccaccacaccgggctaatttttgtattttttgtagagacgtgggtctcactatgctgcccaggctcaggtcttaatctcctgagctcaggcaatccgcaggcctcagcctccctaagtgcggggattacaggcttgagccactgcacctagcctctatttgttttacaaaagagaaattgagatcctgaatgttaagtgacttgcctgaggccatcccactaacaggagccagggttaggattcaaaccccatccaactggtcccagagctggagcttcttgcactgccctacactacctaccatctccatcctctgggcacctttttataagaaccaaaacattacagagcattgctttgtcaactcagctgggaacatttcccagtgcaactcacatttttcactgctctgtgcctgtccgtataagctcaatgagtattgatttaggggctttggagaactttgaatgctaccccccaagtaaccattgttggcaacctggtacctctacttttagccatttctccttctctataaatagtgcagaagtaacccacttggtaacaggcatccttgccaagcctccaccactaggtcagtgtaagaattaaagaaagaggaaagaaacacaaaaagtggcttgatggttaagacaggtttattttagagaaaacacacctgagaggggctgctggctgaattaggttagagtcttttctacagactaagagtgtttaaggatttagggtgggagagtttcttagaggcttggactgcttctgtgttttttttgttgtgcttatatgggagggagagtggtgtgtttgcttttatacatttttctgcagctgtaggcataccccccaagtctgcttttagcttccctattttagtgcacctggagggaaaggaatgtgcttattaaggcccactgttttactggggcccattgtatgagggtgaagtttggcagttacccaagagacttttcctccaccttcctctgtgcccgagctgttttatctgcattttactgtctgctttttttggctgcttatagtttttaaaaaagtaatttccttaaatccagaaggctaaaaatgaagctgaaacttaaagtggcggtgtttgtccaaaataacggggctcctgctctgccagtcagtaccctcaagtcactcctgatcctcaacctccatgcctaaggctggttcaagagaccacataatatctgccttttattacatacatgatgggtgcatgggattctgcgtgccctttgcttgatatagactgctaaggtgagatggggaatatcagagtcagctgctgcttgaggaagcagaacacacagctggaggcttggaacatgtgggtccctatgagtgtagagcccatatccccatagagtctacctagagcaggggtcgccaaatgttttcttaaagagcctgatagtgtatatgttaggctttgtgagccaggtatttacagcaactcaattctaccactgtggtatgaaaacagctatagacaatcataaatgaatgatcatggctatgttttaataaaactttacagacactgaacttgaacttccattgtgatatgaaaacagctatagacaatcataaatgaatgatcatggctatgttttaataaaactttatggacactgagcttgaacttcatatatcagtcatgtgacacaaaatatcattcttctttttatttgttttcacccatttgaaaaatgtaaaaactattcttagctgtacagaaacagatggtgggtcagatttgactcactgcccatagtttccagaccatgatgttcaggttcatggaagcacttcactctacactaatttattcatccattcatcacatatgtgatgagcacatacagacacacctcagagatattgcaggctccactccagatcaccacaataatgtgaatattgcaataaagcaagtcatacacatt

SEQ ID NO: 105416 - DNA, 1497 bp, Homo sapiens
  Payload ID: 680
  Gene Symbol: ADGRE2
  Gene Name: adhesion G protein-coupled receptor E2
  ENST ID: ENST00000392962
  CDS Start-End: 86-1225
acagctgcccagcctgcggagacgggacagccctgtcccactcactctttcccctgctgctcctgccggcagctcagctggaaccatgggaggccgcgtctttctcgtctttctcgcattctgtgtctggctgactctgccgggagctgaaacccaggactccaggggctgtgcccggtggtgccctcaggactcctcgtgtgtcaatgccaccgcctgtcgctgcaatccagggttcagctctttttctgagatcatcaccacccccatggagacttgtgacgacatcaacgagtgtgcaacactgtcgaaagtgtcatgcggaaaattctcggactgctggaacacagaggggagctacgactgcgtgtgcagcccaggatatgagcctgtttctggggcaaaaacattcaagaatgagagcgagaacacgtgtcaagatgtggacgaatgtcagcagaacccaaggctctgtaaaagctacggcacctgcgtcaacaccctcggcagctacacgtgccagtgcctgcctggcttcaagctcaaacctgaggacccgaagctctgcacagatgtggacgagtgcagctccgggcagcatcagtgtgacagctccaccgtctgcttcaacaccgtgggttcatacagctgccgctgccgcccaggctggaagcccagacacggaatcccgaataaccaaaaggacactgtctgtgaagatatgactttctccacctggaccccgccccctggagtccacagccagacgctttcccgattcttcgacaaagtccaggacctgggcagagactacaagccaggcttggccaataacaccatccagagcatcttacaggcgctggatgagctgctggaggcccctggggacctggagaccctgccccgcttacagcagcactgtgtggccagtcacctgctggatggcctagaggatgtcctcagaggcctgagcaagaacctttccaatgggctgttgaacttcagttatcctgcaggcacagaattgtccctggaggtgcagaagcaagtagacaggagtgtcaccttgagacagaatcaggcagtgatgcagctcgactggaatcaggcacagaaatctggtgacccaggaggaggatcccgtgctgactgtcatcacctacatggggctgagcgtctctctgctgtgcctcctcctggcggccctcacttttctcctgtgtaaagccatccagaacaccagcacctcactgcatctgcagctctcgctctgcctcttcctggcccacctcctcttcctcgtggcaattgatcaaaccggacacaaggtgctgtgctccatcatcgccggtaccttgcactatctctacctggccaccttgacctggatgctgctggaggccctgtacctcttcctcactgcacggaacctgacggtggtcaactactcaagcatcaacagattcatgaagaagctcatgttccctgtgggctacg

SEQ ID NO: 105417 - DNA, 2513 bp, Homo sapiens
  Payload ID: 680
  Gene Symbol: ADGRE2
  Gene Name: adhesion G protein-coupled receptor E2
  Uniprot ID: Q9UHX3
  ENST ID: ENST00000392965
  CDS Start-End: 87-2384
cacagctgcccagcctgcggagacgggacagccctgtcccactcactctttcccctgctgctcctgccggcagctcagctggaaccatgggaggccgcgtctttctcgtctttctcgcattctgtgtctggctgactctgccgggagctgaaacccaggactccaggggctgtgcccggtggtgccctcaggactcctcgtgtgtcaatgccaccgcctgtcgctgcaatccagggttcagctctttttctgagatcatcaccacccccatggagacttgtgacgacatcaacgagtgtgcaacactgtcgaaagtgtcatgcggaaaattctcggactgctggaacacagaggggagctacgactgcgtgtgcagcccaggatatgagcctgtttctggggcaaaaacattcaagaatgagagcgagaacacgtgtcaagatgtggacgaatgtcagcagaacccaaggctctgtaaaagctacggcacctgcgtcaacaccctcggcagctacacgtgccagtgcctgcctggcttcaagctcaaacctgaggacccgaagctctgcacagatgtgaatgaatgcacctccggacaaaacccatgccacagctccacccactgcctcaacaacgtgggcagctatcagtgccgctgccgcccgggctggcaaccgattccggggtcccccaatggcccaaacaataccgtctgtgaagatgtggacgagtgcagctccgggcagcatcagtgtgacagctccaccgtctgcttcaacaccgtgggttcatacagctgccgctgccgcccaggctggaagcccagacacggaatcccgaataaccaaaaggacactgtctgtgaagatatgactttctccacctggaccccgccccctggagtccacagccagacgctttcccgattcttcgacaaagtccaggacctgggcagagactacaagccaggcttggccaataacaccatccagagcatcttacaggcgctggatgagctgctggaggcccctggggacctggagaccctgccccgcttacagcagcactgtgtggccagtcacctgctggatggcctagaggatgtcctcagaggcctgagcaagaacctttccaatgggctgttgaacttcagttatcctgcaggcacagaattgtccctggaggtgcagaagcaagtagacaggagtgtcaccttgagacagaatcaggcagtgatgcagctcgactggaatcaggcacagaaatctggtgacccaggcccttctgtggtgggccttgtctccattccagggatgggcaagttgctggctgaggcccctctggtcctggaacctgagaagcagatgcttctgcatgagacacaccagggcttgctgcaggacggctcccccatcctgctctcagatgtgatctctgcctttctgagcaacaacgacacccaaaacctcagctccccagttaccttcaccttctcccaccgtgaggaggatcccgtgctgactgtcatcacctacatggggctgagcgtctctctgctgtgcctcctcctggcggccctcacttttctcctgtgtaaagccatccagaacaccagcacctcactgcatctgcagctctcgctctgcctcttcctggcccacctcctcttcctcgtggcaattgatcaaaccggacacaaggtgctgtgctccatcatcgccggtaccttgcactatctctacctggccaccttgacctggatgctgctggaggccctgtacctcttcctcactgcacggaacctgacggtggtcaactactcaagcatcaacagattcatgaagaagctcatgttccctgtgggctacggagtcccagctgtgacagtggccatttctgcagcctccaggcctcacctttatggaacaccttcccgctgctggctccaaccagaaaagggatttatatggggcttccttggacctgtctgcgccatcttctctgtgaatttagttctctttctggtgactctctggattttgaaaaacagactctcctccctcaatagtgaagtgtccaccctccggaacacaaggatgctggcatttaaagcgacagctcagctgttcatcctgggctgcacgtggtgtctgggcatcttgcaggtgggtccggctgcccgggtcatggcctacctcttcaccatcatcaacagcctgcagggtgtcttcatcttcctggtgtactgcctcctcagccagcaggtccgggagcaatatgggaaatggtccaaagggatcaggaaattgaaaactgagtctgagatgcacacactctccagcagtgctaaggctgacacctccaaacccagcacggttaactagaaaaatcttctgaataagatcttccctctttgcccgtggaaaatctgaacaatctttgagccatctagaggggaaagaaaagactttgttctgtgtgtttcaagaaattcaccatgtcagcaatatgaa

SEQ ID NO: 105418 - DNA, 2046 bp, Homo sapiens
  Payload ID: 680
  Gene Symbol: ADGRE2
  Gene Name: adhesion G protein-coupled receptor E2
  Uniprot ID: Q9UHX3
  ENST ID: ENST00000595839
  CDS Start-End: 1-2046
atgggaggccgcgtctttctcgtctttctcgcattctgtgtctggctgactctgccgggagctgaaacccaggactccaggggctgtgcccggtggtgccctcaggactcctcgtgtgtcaatgccaccgcctgtcgctgcaatccagggttcagctctttttctgagatcatcaccacccccatggagacttgtgacgacatcaacgagtgtgcaacactgtcgaaagtgtcatgcggaaaattctcggactgctggaacacagaggggagctacgactgcgtgtgcagcccaggatatgagcctgtttctggggcaaaaacattcaagaatgagagcgagaacacgtgtcaagatatgactttctccacctggaccccgccccctggagtccacagccagacgctttcccgattcttcgacaaagtccaggacctgggcagagactacaagccaggcttggccaataacaccatccagagcatcttacaggcgctggatgagctgctggaggcccctggggacctggagaccctgccccgcttacagcagcactgtgtggccagtcacctgctggatggcctagaggatgtcctcagaggcctgagcaagaacctttccaatgggctgttgaacttcagttatcctgcaggcacagaattgtccctggaggtgcagaagcaagtagacaggagtgtcaccttgagacagaatcaggcagtgatgcagctcgactggaatcaggcacagaaatctggtgacccaggcccttctgtggtgggccttgtctccattccagggatgggcaagttgctggctgaggcccctctggtcctggaacctgagaagcagatgcttctgcatgagacacaccagggcttgctgcaggacggctcccccatcctgctctcagatgtgatctctgcctttctgagcaacaacgacacccaaaacctcagctccccagttaccttcaccttctcccaccgttcagtgatcccgagacagaaggtgctctgtgtcttctgggagcatggccagaatggatgtggtcactgggccaccacaggctgcagcacaataggcaccagagacaccagcaccatctgccgttgcacccacctgagcagctttgccgtcctcatggcccactacgatgtgcaggaggaggatcccgtgctgactgtcatcacctacatggggctgagcgtctctctgctgtgcctcctcctggcggccctcacttttctcctgtgtaaagccatccagaacaccagcacctcactgcatctgcagctctcgctctgcctcttcctggcccacctcctcttcctcgtggcaattgatcaaaccggacacaaggtgctgtgctccatcatcgccggtaccttgcactatctctacctggccaccttgacctggatgctgctggaggccctgtacctcttcctcactgcacggaacctgacggtggtcaactactcaagcatcaacagattcatgaagaagctcatgttccctgtgggctacggagtcccagctgtgacagtggccatttctgcagcctccaggcctcacctttatggaacaccttcccgctgctggctccaaccagaaaagggatttatatggggcttccttggacctgtctgcgccatcttctctgtgaatttagttctctttctggtgactctctggattttgaaaaacagactctcctccctcaatagtgaagtgtccaccctccggaacacaaggatgctggcatttaaagcgacagctcagctgttcatcctgggctgcacgtggtgtctgggcatcttgcaggtgggtccggctgcccgggtcatggcctacctcttcaccatcatcaacagcctgcagggtgtcttcatcttcctggtgtactgcctcctcagccagcaggtccgggagcaatatgggaaatggtccaaagggatcaggaaattgaaaactgagtctgagatgcacacactctccagcagtgctaaggctgacacctccaaacccagcacggttaactag

SEQ ID NO: 105419 - DNA, 1511 bp, Homo sapiens
  Payload ID: 680
  Gene Symbol: ADGRE2
  Gene Name: adhesion G protein-coupled receptor E2
  ENST ID: ENST00000595208
  CDS Start-End: 1-992
cattcaagaatgagagcgagaacacgtgtcaagatgtggacgaatgtcagcagaacccaaggctctgtaaaagctacggcacctgcgtcaacaccctcggcagctacacgtgccagtgcctgcctggcttcaagctcaaacctgaggacccgaagctctgcacagatgtggacgagtgcagctccgggcagcatcagtgtgacagctccaccgtctgcttcaacaccgtgggttcatacagctgccgctgccgcccaggctggaagcccagacacggaatcccgaataaccaaaaggacactgtctgtgaagatatgactttctccacctggaccccgccccctggagtccacagccagacgctttcccgattcttcgacaaagtccaggacctgggcagagactacaagccaggcttggccaataacaccatccagagcatcttacaggcgctggatgagctgctggaggcccctggggacctggagaccctgccccgcttacagcagcactgtgtggccagtcacctgctggatggcctagaggatgtcctcagaggcctgagcaagaacctttccaatgggctgttgaacttcagttatcctgcaggcacagaattgtccctggaggtgcagaagcaagtagacaggagtgtcaccttgagacagaatcaggcagtgatgcagctcgactggaatcaggcacagaaatctggtgacccagtcagtgatcccgagacagaaggtgctctgtgtcttctgggagcatggccagaatggatgtggtcactgggccaccacaggctgcagcacaataggcaccagagacaccagcaccatctgccgttgcacccacctgagcagctttgccgtcctcatggcccactacgatgtgcaggaggaggatcccgtgctgactgtcatcacctacatggggctgagcgtctctctgctgtgcctcctcctggcggccctcacttttctcctgtgtaaagccatccagaacaccagcacctcactgcatctgcagctctcgctctgcctcttcctggcccacctcctcttcctcgtggcaattgatcaaaccggacacaaggtgctgtgctccatcatcgccggtaccttgcactatctctacctggccaccttgacctggatgctgctggaggccctgtacctcttcctcactgcacggaacctgacggtggtcaactactcaagcatcaacagattcatgaagaagctcatgttccctgtgggctacggagtcccagctgtgacagtggccatttctgcagcctccaggcctcacctttatggaacaccttcccgctgctggctccaaccagaaaagggatttatatggggcttccttggacctgtctgcgccatcttctctgtgaatttagttctctttctggtgactctctggattttgaaaaacagactctcctccctcaatagtgaagtgtccaccctccggaacacaaggatgctggcatttaaagcgac

SEQ ID NO: 105420 - DNA, 2325 bp, Homo sapiens
  Payload ID: 680
  Gene Symbol: ADGRE2
  Gene Name: adhesion G protein-coupled receptor E2
  Uniprot ID: Q9UHX3
  ENST ID: ENST00000594294
  CDS Start-End: 1-2325
atgggaggccgcgtctttctcgtctttctcgcattctgtgtctggctgactctgccgggagctgaaacccaggactccaggggctgtgcccggtggtgccctcaggactcctcgtgtgtcaatgccaccgcctgtcgctgcaatccagggttcagctctttttctgagatcatcaccacccccatggagacttgtgacgacatcaacgagtgtgcaacactgtcgaaagtgtcatgcggaaaattctcggactgctggaacacagaggggagctacgactgcgtgtgcagcccaggatatgagcctgtttctggggcaaaaacattcaagaatgagagcgagaacacgtgtcaagatgtggacgaatgtcagcagaacccaaggctctgtaaaagctacggcacctgcgtcaacaccctcggcagctacacgtgccagtgcctgcctggcttcaagctcaaacctgaggacccgaagctctgcacagatgtggacgagtgcagctccgggcagcatcagtgtgacagctccaccgtctgcttcaacaccgtgggttcatacagctgccgctgccgcccaggctggaagcccagacacggaatcccgaataaccaaaaggacactgtctgtgaagatatgactttctccacctggaccccgccccctggagtccacagccagacgctttcccgattcttcgacaaagtccaggacctgggcagagactacaagccaggcttggccaataacaccatccagagcatcttacaggcgctggatgagctgctggaggcccctggggacctggagaccctgccccgcttacagcagcactgtgtggccagtcacctgctggatggcctagaggatgtcctcagaggcctgagcaagaacctttccaatgggctgttgaacttcagttatcctgcaggcacagaattgtccctggaggtgcagaagcaagtagacaggagtgtcaccttgagacagaatcaggcagtgatgcagctcgactggaatcaggcacagaaatctggtgacccaggcccttctgtggtgggccttgtctccattccagggatgggcaagttgctggctgaggcccctctggtcctggaacctgagaagcagatgcttctgcatgagacacaccagggcttgctgcaggacggctcccccatcctgctctcagatgtgatctctgcctttctgagcaacaacgacacccaaaacctcagctccccagttaccttcaccttctcccaccgttcagtgatcccgagacagaaggtgctctgtgtcttctgggagcatggccagaatggatgtggtcactgggccaccacaggctgcagcacaataggcaccagagacaccagcaccatctgccgttgcacccacctgagcagctttgccgtcctcatggcccactacgatgtgcaggaggaggatcccgtgctgactgtcatcacctacatggggctgagcgtctctctgctgtgcctcctcctggcggccctcacttttctcctgtgtaaagccatccagaacaccagcacctcactgcatctgcagctctcgctctgcctcttcctggcccacctcctcttcctcgtggcaattgatcaaaccggacacaaggtgctgtgctccatcatcgccggtaccttgcactatctctacctggccaccttgacctggatgctgctggaggccctgtacctcttcctcactgcacggaacctgacggtggtcaactactcaagcatcaacagattcatgaagaagctcatgttccctgtgggctacggagtcccagctgtgacagtggccatttctgcagcctccaggcctcacctttatggaacaccttcccgctgctggctccaaccagaaaagggatttatatggggcttccttggacctgtctgcgccatcttctctgtgaatttagttctctttctggtgactctctggattttgaaaaacagactctcctccctcaatagtgaagtgtccaccctccggaacacaaggatgctggcatttaaagcgacagctcagctgttcatcctgggctgcacgtggtgtctgggcatcttgcaggtgggtccggctgcccgggtcatggcctacctcttcaccatcatcaacagcctgcagggtgtcttcatcttcctggtgtactgcctcctcagccagcaggtccgggagcaatatgggaaatggtccaaagggatcaggaaattgaaaactgagtctgagatgcacacactctccagcagtgctaaggctgacacctccaaacccagcacggttaactag

SEQ ID NO: 105421 - DNA, 3128 bp, Homo sapiens
  Payload ID: 680
  Gene Symbol: ADGRE2
  Gene Name: adhesion G protein-coupled receptor E2
  ENST ID: ENST00000601345
  CDS Start-End: 87-2582
cacagctgcccagcctgcggagacgggacagccctgtcccactcactctttcccctgctgctcctgccggcagctcagctggaaccatgggaggccgcgtctttctcgtctttctcgcattctgtgtctggctgactctgccgggagctgaaacccaggactccaggggctgtgcccggtggtgccctcaggactcctcgtgtgtcaatgccaccgcctgtcgctgcaatccagggttcagctctttttctgagatcatcaccacccccatggagacttgtgacgacatcaacgagtgtgcaacactgtcgaaagtgtcatgcggaaaattctcggactgctggaacacagaggggagctacgactgcgtgtgcagcccaggatatgagcctgtttctggggcaaaaacattcaagaatgagagcgagaacacgtgtcaagatgtggacgaatgtcagcagaacccaaggctctgtaaaagctacggcacctgcgtcaacaccctcggcagctacacgtgccagtgcctgcctggcttcaagctcaaacctgaggacccgaagctctgcacagatgtgaatgaatgcacctccggacaaaacccatgccacagctccacccactgcctcaacaacgtgggcagctatcagtgccgctgccgcccgggctggcaaccgattccggggtcccccaatggcccaaacaataccgtctgtgaagatgtggacgagtgcagctccgggcagcatcagtgtgacagctccaccgtctgcttcaacaccgtgggttcatacagctgccgctgccgcccaggctggaagcccagacacggaatcccgaataaccaaaaggacactgtctgtgaagatatgactttctccacctggaccccgccccctggagtccacagccagacgctttcccgattcttcgacaaagtccaggacctgggcagagactacaagccaggcttggccaataacaccatccagagcatcttacaggcgctggatgagctgctggaggcccctggggacctggagaccctgccccgcttacagcagcactgtgtggccagtcacctgctggatggcctagaggatgtcctcagaggcctgagcaagaacctttccaatgggctgttgaacttcagttatcctgcaggcacagaattgtccctggaggtgcagaagcaagtagacaggagtgtcaccttgagacagaatcaggcagtgatgcagctcgactggaatcaggcacagaaatctggtgacccagggatgggcaagttgctggctgaggcccctctggtcctggaacctgagaagcagatgcttctgcatgagacacaccagggcttgctgcaggacggctcccccatcctgctctcagatgtgatctctgcctttctgagcaacaacgacacccaaaacctcagctccccagttaccttcaccttctcccaccgttcagtgatcccgagacagaaggtgctctgtgtcttctgggagcatggccagaatggatgtggtcactgggccaccacaggctgcagcacaataggcaccagagacaccagcaccatctgccgttgcacccacctgagcagctttgccgtcctcatggcccactacgatgtgcaggaggaggatcccgtgctgactgtcatcacctacatggggctgagcgtctctctgctgtgcctcctcctggcggccctcacttttctcctgtgtaaagccatccagaacaccagcacctcactgcatctgcagctctcgctctgcctcttcctggcccacctcctcttcctcgtggcaattgatcaaaccggacacaaggtgctgtgctccatcatcgccggtaccttgcactatctctacctggccaccttgacctggatgctgctggaggccctgtacctcttcctcactgcacggaacctgacggtggtcaactactcaagcatcaacagattcatgaagaagctcatgttccctgtgggctacggagtcccagctgtgacagtggccatttctgcagcctccaggcctcacctttatggaacaccttcccgctgctggctccaaccagaaaagggatttatatggggcttccttggacctgtctgcgccatcttctctgtgaatttagttctctttctggtgactctctggattttgaaaaacagactctcctccctcaatagtgaagtgtccaccctccggaacacaaggatgctggcatttaaagcgacagctcagctgttcatcctgggctgcacgtggtgtctgggcatcttgcaggtgggtccggctgcccgggtcatggcctacctcttcaccatcatcaacagcctgcagggtgtcttcatcttcctggtgtactgcctcctcagccagcaggtccgggagcaatatgggaaatggtccaaagggatcaggaaattgaaaactgagtctgagatgcacacactctccagcagtgctaaggctgacacctccaaacccagcacgccaggaacagtggttcaagcttgtaatgccagcactctgggaggccaaagcaggaagatcacttgagcccgggacaacttggggatcacttgaagccatattatcctatgcctcaatggcatgggataattcatgacattgatgactaataaccaacatttattaatgtagacatacaaagttctgttgtatttttctcacctcttcttccatcttctccagattatatgtgtaattctaaccccatttcactgatgagcaaagtaagactacttggatttgtgtcaaatgtacagagtctcggccaggcacagtgactcatgcctgtaatcccagcactttgggaggccgaggcaggtggatcacaaagtcaggagatcgagaccatcctggctaacacggtgaaaccccatctctactaaaaatacaaaaaaaaaaaaaaaatagccaggcgtggtggtgggcgactgtagtcccagctactcgggaggctgtggcaggagaatggtgtgaacccaggaggcagagctggcagtgagccgagatcgcgccaatgcactccagcctgggcaacagaacgagactctgtctcaaaaaaaaaaaaaaaaaaaa

SEQ ID NO: 105422 - DNA, 2596 bp, Homo sapiens
  Payload ID: 680
  Gene Symbol: ADGRE2
  Gene Name: adhesion G protein-coupled receptor E2
  Uniprot ID: Q9UHX3
  ENST ID: ENST00000596991
  CDS Start-End: 1-2439
atgggaggccgcgtctttctcgtctttctcgcattctgtgtctggctgactctgccgggagctgaaacccaggactccaggggctgtgcccggtggtgccctcaggactcctcgtgtgtcaatgccaccgcctgtcgctgcaatccagggttcagctctttttctgagatcatcaccacccccatggagacttgtgacgacatcaacgagtgtgcaacactgtcgaaagtgtcatgcggaaaattctcggactgctggaacacagaggggagctacgactgcgtgtgcagcccaggatatgagcctgtttctggggcaaaaacattcaagaatgagagcgagaacacgtgtcaagatgtggacgaatgtcagcagaacccaaggctctgtaaaagctacggcacctgcgtcaacaccctcggcagctacacgtgccagtgcctgcctggcttcaagctcaaacctgaggacccgaagctctgcacagatgtgaatgaatgcacctccggacaaaacccatgccacagctccacccactgcctcaacaacgtgggcagctatcagtgccgctgccgcccgggctggcaaccgattccggggtcccccaatggcccaaacaataccgtctgtgaagatgtggacgagtgcagctccgggcagcatcagtgtgacagctccaccgtctgcttcaacaccgtgggttcatacagctgccgctgccgcccaggctggaagcccagacacggaatcccgaataaccaaaaggacactgtctgtgaagatatgactttctccacctggaccccgccccctggagtccacagccagacgctttcccgattcttcgacaaagtccaggacctgggcagagactacaagccaggcttggccaataacaccatccagagcatcttacaggcgctggatgagctgctggaggcccctggggacctggagaccctgccccgcttacagcagcactgtgtggccagtcacctgctggatggcctagaggatgtcctcagaggcctgagcaagaacctttccaatgggctgttgaacttcagttatcctgcaggcacagaattgtccctggaggtgcagaagcaagtagacaggagtgtcaccttgagacagaatcaggcagtgatgcagctcgactggaatcaggcacagaaatctggtgacccagggatgggcaagttgctggctgaggcccctctggtcctggaacctgagaagcagatgcttctgcatgagacacaccagggcttgctgcaggacggctcccccatcctgctctcagatgtgatctctgcctttctgagcaacaacgacacccaaaacctcagctccccagttaccttcaccttctcccaccgttcagtgatcccgagacagaaggtgctctgtgtcttctgggagcatggccagaatggatgtggtcactgggccaccacaggctgcagcacaataggcaccagagacaccagcaccatctgccgttgcacccacctgagcagctttgccgtcctcatggcccactacgatgtgcaggaggaggatcccgtgctgactgtcatcacctacatggggctgagcgtctctctgctgtgcctcctcctggcggccctcacttttctcctgtgtaaagccatccagaacaccagcacctcactgcatctgcagctctcgctctgcctcttcctggcccacctcctcttcctcgtggcaattgatcaaaccggacacaaggtgctgtgctccatcatcgccggtaccttgcactatctctacctggccaccttgacctggatgctgctggaggccctgtacctcttcctcactgcacggaacctgacggtggtcaactactcaagcatcaacagattcatgaagaagctcatgttccctgtgggctacggagtcccagctgtgacagtggccatttctgcagcctccaggcctcacctttatggaacaccttcccgctgctggctccaaccagaaaagggatttatatggggcttccttggacctgtctgcgccatcttctctgtgaatttagttctctttctggtgactctctggattttgaaaaacagactctcctccctcaatagtgaagtgtccaccctccggaacacaaggatgctggcatttaaagcgacagctcagctgttcatcctgggctgcacgtggtgtctgggcatcttgcaggtgggtccggctgcccgggtcatggcctacctcttcaccatcatcaacagcctgcagggtgtcttcatcttcctggtgtactgcctcctcagccagcaggtccgggagcaatatgggaaatggtccaaagggatcaggaaattgaaaactgagtctgagatgcacacactctccagcagtgctaaggctgacacctccaaacccagcacggttaactagaaaaatcttctgaataagatcttccctctttgcccgtggaaaatctgaacaatctttgagccatctagaggggaaagaaaagactttgttctgtgtgtttcaagaaattcaccatgtcagcaatatgaaggatgttatggaaggcgtgctaggcatt

SEQ ID NO: 105423 - DNA, 2193 bp, Homo sapiens
  Payload ID: 680
  Gene Symbol: ADGRE2
  Gene Name: adhesion G protein-coupled receptor E2
  Uniprot ID: Q9UHX3
  ENST ID: ENST00000594076
  CDS Start-End: 1-2193
atgggaggccgcgtctttctcgtctttctcgcattctgtgtctggctgactctgccgggagctgaaacccaggactccaggggctgtgcccggtggtgccctcaggactcctcgtgtgtcaatgccaccgcctgtcgctgcaatccagggttcagctctttttctgagatcatcaccacccccatggagacttgtgacgacatcaacgagtgtgcaacactgtcgaaagtgtcatgcggaaaattctcggactgctggaacacagaggggagctacgactgcgtgtgcagcccaggatatgagcctgtttctggggcaaaaacattcaagaatgagagcgagaacacgtgtcaagatgtggacgagtgcagctccgggcagcatcagtgtgacagctccaccgtctgcttcaacaccgtgggttcatacagctgccgctgccgcccaggctggaagcccagacacggaatcccgaataaccaaaaggacactgtctgtgaagatatgactttctccacctggaccccgccccctggagtccacagccagacgctttcccgattcttcgacaaagtccaggacctgggcagagactacaagccaggcttggccaataacaccatccagagcatcttacaggcgctggatgagctgctggaggcccctggggacctggagaccctgccccgcttacagcagcactgtgtggccagtcacctgctggatggcctagaggatgtcctcagaggcctgagcaagaacctttccaatgggctgttgaacttcagttatcctgcaggcacagaattgtccctggaggtgcagaagcaagtagacaggagtgtcaccttgagacagaatcaggcagtgatgcagctcgactggaatcaggcacagaaatctggtgacccaggcccttctgtggtgggccttgtctccattccagggatgggcaagttgctggctgaggcccctctggtcctggaacctgagaagcagatgcttctgcatgagacacaccagggcttgctgcaggacggctcccccatcctgctctcagatgtgatctctgcctttctgagcaacaacgacacccaaaacctcagctccccagttaccttcaccttctcccaccgttcagtgatcccgagacagaaggtgctctgtgtcttctgggagcatggccagaatggatgtggtcactgggccaccacaggctgcagcacaataggcaccagagacaccagcaccatctgccgttgcacccacctgagcagctttgccgtcctcatggcccactacgatgtgcaggaggaggatcccgtgctgactgtcatcacctacatggggctgagcgtctctctgctgtgcctcctcctggcggccctcacttttctcctgtgtaaagccatccagaacaccagcacctcactgcatctgcagctctcgctctgcctcttcctggcccacctcctcttcctcgtggcaattgatcaaaccggacacaaggtgctgtgctccatcatcgccggtaccttgcactatctctacctggccaccttgacctggatgctgctggaggccctgtacctcttcctcactgcacggaacctgacggtggtcaactactcaagcatcaacagattcatgaagaagctcatgttccctgtgggctacggagtcccagctgtgacagtggccatttctgcagcctccaggcctcacctttatggaacaccttcccgctgctggctccaaccagaaaagggatttatatggggcttccttggacctgtctgcgccatcttctctgtgaatttagttctctttctggtgactctctggattttgaaaaacagactctcctccctcaatagtgaagtgtccaccctccggaacacaaggatgctggcatttaaagcgacagctcagctgttcatcctgggctgcacgtggtgtctgggcatcttgcaggtgggtccggctgcccgggtcatggcctacctcttcaccatcatcaacagcctgcagggtgtcttcatcttcctggtgtactgcctcctcagccagcaggtccgggagcaatatgggaaatggtccaaagggatcaggaaattgaaaactgagtctgagatgcacacactctccagcagtgctaaggctgacacctccaaacccagcacggttaactag

SEQ ID NO: 105424 - DNA, 2254 bp, Homo sapiens
  Payload ID: 681
  Gene Symbol: ADGRE3
  Gene Name: adhesion G protein-coupled receptor E3
  Uniprot ID: Q9BY15
  ENST ID: ENST00000253673
  CDS Start-End: 102-2060
ttcaattctcatgggatttcttgagctaggaaaggtggttggcttacggcacagtagagagcttccagggctggctggcgtgggatacccgtaccacagaaatgcagggaccattgcttcttccaggcctctgctttctgctgagcctctttggagctgtgactcagaaaaccaaaacttcctgtgctaagtgccccccaaatgcttcctgtgtcaataacactcactgcacctgcaaccatggatatacttctggatctgggcagaaactattcacattccccttggagacatgtaacgacattaatgaatgtacaccaccctatagtgtatattgtggatttaacgctgtgtgttacaatgtcgaaggaagtttctactgtcaatgtgtcccaggatatagactgcattctgggaatgaacaattcagtaattccaatgagaacacctgtcaggacaccacctcctcaaagacaaccgagggcaggaaagagctgcaaaagattgtggacaaatttgagtcacttctcaccaatcagactttatggagaacagaagggagacaagaaatctcatccacagctaccactattctccgggatgtggaatcgaaagttctagaaactgccttgaaagatccagaacaaaaagtcctgaaaatccaaaacgatagtgtagctattgaaactcaagcgattacagacaattgctctgaagaaagaaagacattcaacttgaacgtccaaatgaactcaatggacatccgttgcagtgacatcatccagggagacacacaaggtcccagtgccattgcctttatctcatattcttctcttggaaacatcataaatgcaactttttttgaagagatggataagaaagatcaagtgtatctgaactctcaggttgtgagtgctgctattggacccaaaaggaacgtgtctctctccaagtctgtgacgctgactttccagcacgtgaagatgacccccagtaccaaaaaggtcttctgtgtctactggaagagcacagggcagggcagccagtggtccagggatggctgcttcctgatacacgtgaacaagagtcacaccatgtgtaattgcagtcacctgtccagcttcgctgtcctgatggccctgaccagccaggaggaggatcccgtgctgactgtcatcacctacgtggggctgagcgtctctctgctgtgcctcctcctggcggccctcacttttctcctgtgtaaagccatccggaacaccagcacctcactgcatctgcagctctcgctctgcctcttcctggcccacctcctcttcctcgtggggattgatcgaactgaacccaaggtgctgtgctccatcatcgccggtgctttgcactatctctacctggccgccttcacctggatgctgctggagggtgtgcacctcttcctcactgcacggaacctgacagtggtcaactactcaagcatcaatagactcatgaagtggatcatgttcccagtcggctatggcgttcccgctgtgactgtggccatttctgcagcctcctggcctcacctttatggaactgctgatcgatgctggctccacctggaccagggattcatgtggagtttccttggcccagtctgtgccattttctctgcgaatttagtattgtttatcttggtcttttggattttgaaaagaaaactttcctccctcaatagtgaagtgtcaaccatccagaacacaaggatgctggctttcaaagcaacagctcagctcttcatcctgggctgcacatggtgtctgggcttgctacaggtgggtccagctgcccaggtcatggcctacctcttcaccatcatcaacagcctccaaggcttcttcatcttcttggtctactgcctcctcagccagcaggtccagaaacaatatcaaaagtggtttagagagatcgtaaaatcaaaatctgagtctgagacatacacactttccagcaagatgggtcctgactcaaaacccagtgagggggatgtttttccaggacaagtgaagagaaaatattaaaactagaatattcaactccatatggaaaatcatatccatggatctctttggcattatgaagaatgaagctaaggaaaagggaattcattaaacatatcatccttggagaggaagtaatcaacctttacttcccaagctgtttgttctccacaataggctctcaacaaatgtgtggtaaattgcatttctcttca

SEQ ID NO: 105425 - DNA, 2267 bp, Homo sapiens
  Payload ID: 681
  Gene Symbol: ADGRE3
  Gene Name: adhesion G protein-coupled receptor E3
  Uniprot ID: Q9BY15
  ENST ID: ENST00000344373
  CDS Start-End: 149-1951
gcttttctgatagcaatttcatgagtcagctgacctaagatacatacttcaattctcatgggatttcttgagctaggaaaggtggttggcttacggcacagtagagagcttccagggctggctggcgtgggatacccgtaccacagaaatgcagggaccattgcttcttccaggcctctgctttctgctgagcctctttggagctgtgactcagaaaaccaaaacttcctgtgctaagtgccccccaaatgcttcctgtgtcaataacactcactgcacctgcaaccatggatatacttctggatctgggcagaaactattcacattccccttggagacatgtaacgacaccacctcctcaaagacaaccgagggcaggaaagagctgcaaaagattgtggacaaatttgagtcacttctcaccaatcagactttatggagaacagaagggagacaagaaatctcatccacagctaccactattctccgggatgtggaatcgaaagttctagaaactgccttgaaagatccagaacaaaaagtcctgaaaatccaaaacgatagtgtagctattgaaactcaagcgattacagacaattgctctgaagaaagaaagacattcaacttgaacgtccaaatgaactcaatggacatccgttgcagtgacatcatccagggagacacacaaggtcccagtgccattgcctttatctcatattcttctcttggaaacatcataaatgcaactttttttgaagagatggataagaaagatcaagtgtatctgaactctcaggttgtgagtgctgctattggacccaaaaggaacgtgtctctctccaagtctgtgacgctgactttccagcacgtgaagatgacccccagtaccaaaaaggtcttctgtgtctactggaagagcacagggcagggcagccagtggtccagggatggctgcttcctgatacacgtgaacaagagtcacaccatgtgtaattgcagtcacctgtccagcttcgctgtcctgatggccctgaccagccaggaggaggatcccgtgctgactgtcatcacctacgtggggctgagcgtctctctgctgtgcctcctcctggcggccctcacttttctcctgtgtaaagccatccggaacaccagcacctcactgcatctgcagctctcgctctgcctcttcctggcccacctcctcttcctcgtggggattgatcgaactgaacccaaggtgctgtgctccatcatcgccggtgctttgcactatctctacctggccgccttcacctggatgctgctggagggtgtgcacctcttcctcactgcacggaacctgacagtggtcaactactcaagcatcaatagactcatgaagtggatcatgttcccagtcggctatggcgttcccgctgtgactgtggccatttctgcagcctcctggcctcacctttatggaactgctgatcgatgctggctccacctggaccagggattcatgtggagtttccttggcccagtctgtgccattttctctgcgaatttagtattgtttatcttggtcttttggattttgaaaagaaaactttcctccctcaatagtgaagtgtcaaccatccagaacacaaggatgctggctttcaaagcaacagctcagctcttcatcctgggctgcacatggtgtctgggcttgctacaggtgggtccagctgcccaggtcatggcctacctcttcaccatcatcaacagcctccaaggcttcttcatcttcttggtctactgcctcctcagccagcaggtccagaaacaatatcaaaagtggtttagagagatcgtaaaatcaaaatctgagtctgagacatacacactttccagcaagatgggtcctgactcaaaacccagtgagggggatgtttttccaggacaagtgaagagaaaatattaaaactagaatattcaactccatatggaaaatcatatccatggatctctttggcattatgaagaatgaagctaaggaaaagggaattcattaaacatatcatccttggagaggaagtaatcaacctttacttcccaagctgtttgttctccacaataggctctcaacaaatgtgtggtaaattgcatttctcttcactatggtgtattcagtcaatgcttgtccctggaaacccaaagcatgaccactgcaaatatttccttgactttttgtaaatgaagaggtccttttcctcaagttcttagtcccactcatccta

SEQ ID NO: 105426 - DNA, 1971 bp, Homo sapiens
  Payload ID: 681
  Gene Symbol: ADGRE3
  Gene Name: adhesion G protein-coupled receptor E3
  ENST ID: ENST00000443157
  CDS Start-End: 75-1655
aggaaaggtggttggcttacggcacagtagagagcttccagggctggctggcgtgggatacccgtaccacagaaatgcagggaccattgcttcttccaggcctctgctttctgctgagcctctttggagctgtgactcagaaaaccaaaacttcctgtgctaagtgccccccaaatgcttcctgtgtcaataacactcactgcacctgcaaccatggatatacttctggatctgggcagaaactattcacattccccttggagacatgtaacgctattgaaactcaagcgattacagacaattgctctgaagaaagaaagacattcaacttgaacgtccaaatgaactcaatggacatccgttgcagtgacatcatccagggagacacacaaggtcccagtgccattgcctttatctcatattcttctcttggaaacatcataaatgcaactttttttgaagagatggataagaaagatcaagtgtatctgaactctcaggttgtgagtgctgctattggacccaaaaggaacgtgtctctctccaagtctgtgacgctgactttccagcacgtgaagatgacccccagtaccaaaaaggtcttctgtgtctactggaagagcacagggcagggcagccagtggtccagggatggctgcttcctgatacacgtgaacaagagtcacaccatgtgtaattgcagtcacctgtccagcttcgctgtcctgatggccctgaccagccaggaggaggatcccgtgctgactgtcatcacctacgtggggctgagcgtctctctgctgtgcctcctcctggcggccctcacttttctcctgtgtaaagccatccggaacaccagcacctcactgcatctgcagctctcgctctgcctcttcctggcccacctcctcttcctcgtggggattgatcgaactgaacccaaggtgctgtgctccatcatcgccggtgctttgcactatctctacctggccgccttcacctggatgctgctggagggtgtgcacctcttcctcactgcacggaacctgacagtggtcaactactcaagcatcaatagactcatgaagtggatcatgttcccagtcggctatggcgttcccgctgtgactgtggccatttctgcagcctcctggcctcacctttatggaactgctgatcgatgctggctccacctggaccagggattcatgtggagtttccttggcccagtctgtgccattttctctgcgaatttagtattgtttatcttggtcttttggattttgaaaagaaaactttcctccctcaatagtgaagtgtcaaccatccagaacacaaggatgctggctttcaaagcaacagctcagctcttcatcctgggctgcacatggtgtctgggcttgctacaggtgggtccagctgcccaggtcatggcctacctcttcaccatcatcaacagcctccaaggcttcttcatcttcttggtctactgcctcctcagccagcaggtccagaaacaatatcaaaagtggtttagagagatcgtaaaatcaaaatctgagtctgagacatacacactttccagcaagatgggtcctgactcaaaacccagtgagggggatgtttttccaggacaagtgaagagaaaatattaaaactagaatattcaactccatatggaaaatcatatccatggatctctttggcattatgaagaatgaagctaaggaaaagggaattcattaaacatatcatccttggagaggaagtaatcaacctttacttcccaagctgtttgttctccacaataggctctcaacaaatgtgtggtaaattgcatttctcttcactatggtgtattcagtcaatgcttgtccctggaaacccaaagcatgaccactgcaaatatttccttgactttttgtaaatgaagaggtccttttcctcaagttcttagtcccactcatccta

SEQ ID NO: 105427 - DNA, 486 bp, Homo sapiens
  Payload ID: 681
  Gene Symbol: ADGRE3
  Gene Name: adhesion G protein-coupled receptor E3
  ENST ID: ENST00000595472
  CDS Start-End: 229-402
caatagctaggcagaaaaggtacagcaaataaacgaaaagcagaaccatgagtctgatggcgaaagaggggaagcagtttgcttttctgatagcaatttcatgagtcagctgacctaagatacatacttcaattctcatgggatttcttgagctaggaaaggtggttggcttacggcacagtagagagcttccagggctggctggcgtgggatacccgtaccacagaaatgcagggaccattgcttcttccaggcctctgctttctgctgagcctctttggagctgtgactcagaaaaccaaaagtgagtgctcagagccagaacagagaacttgtggaccaagggctggacctggagccactcatggtctccagtgggctggagaaaagtgcctgttctgagagcaatatttgggaaggcttgctcctgtgtttcattatttgtttgcttaatttatcattatatcaaatatggatagcctttta

SEQ ID NO: 105428 - DNA, 2099 bp, Homo sapiens
  Payload ID: 681
  Gene Symbol: ADGRE3
  Gene Name: adhesion G protein-coupled receptor E3
  ENST ID: ENST00000599900
  CDS Start-End: 589-1902
aacggaagtggctgtggctcaggctgttgtggccagggtagccttaggcggcggcagagaaactaacgtcttctttagcctccaaggagaaattctagtattcttacccgggggatgaggcctctgctttctgctgagcctctttggagctgtgactcagaaaaccaaaacttcctgtgctaagtgccccccaaatgcttcctgtgtcaataacactcactgcacctgcaaccatggatatacttctggatctgggcagaaactattcacattccccttggagacatgtaacgacattaatgaatgtacaccaccctatagtgtatattgtggatttaacgctgtgtgttacaatgtcgaaggaagtttctactgtcaatgtgtcccaggatatagactgcattctgggaatgaacaattcagtaattccaatgagaacacctgtcaggacaccacctcctcaaagacaaccgagggcaggaaagaggtgagtggaggctgatccccagacccttcccagctattgaaactcaagcgattacagacaattgctctgaagaaagaaagacattcaacttgaacgtccaaatgaactcaatggacatccgttgcagtgacatcatccagggagacacacaaggtcccagtgccattgcctttatctcatattcttctcttggaaacatcataaatgcaactttttttgaagagatggataagaaagatcaagtgtatctgaactctcaggttgtgagtgctgctattggacccaaaaggaacgtgtctctctccaagtctgtgacgctgactttccagcacgtgaagatgacccccagtaccaaaaaggtcttctgtgtctactggaagagcacagggcagggcagccagtggtccagggatggctgcttcctgatacacgtgaacaagagtcacaccatgtgtaattgcagtcacctgtccagcttcgctgtcctgatggccctgaccagccaggaggaggatcccgtgctgactgtcatcacctacgtggggctgagcgtctctctgctgtgcctcctcctggcggccctcacttttctcctgtgtaaagccatccggaacaccagcacctcactgcatctgcagctctcgctctgcctcttcctggcccacctcctcttcctcgtggggattgatcgaactgaacccaaggtgctgtgctccatcatcgccggtgctttgcactatctctacctggccgccttcacctggatgctgctggagggtgtgcacctcttcctcactgcacggaacctgacagtggtcaactactcaagcatcaatagactcatgaagtggatcatgttcccagtcggctatggcgttcccgctgtgactgtggccatttctgcagcctcctggcctcacctttatggaactgctgatcgatgctggctccacctggaccagggattcatgtggagtttccttggcccagtctgtgccattttctctgcgaatttagtattgtttatcttggtcttttggattttgaaaagaaaactttcctccctcaatagtgaagtgtcaaccatccagaacacaaggatgctggctttcaaagcaacagctcagctcttcatcctgggctgcacatggtgtctgggcttgctacaggtgggtccagctgcccaggtcatggcctacctcttcaccatcatcaacagcctccaaggcttcttcatcttcttggtctactgcctcctcagccagcaggtccagaaacaatatcaaaagtggtttagagagatcgtaaaatcaaaatctgagtctgagacatacacactttccagcaagatgggtcctgactcaaaacccagtgagggggatgtttttccaggacaagtgaagagaaaatattaaaactagaatattcaactccatatggaaaatcatatccatggatctctttggcattatgaagaatgaagctaaggaaaagggaattcattaaacatatcatccttggagaggaagtaatcaacctttacttcccaagctgtttgttctccacaataggctctcaacaaatgtgtggtaaattgcatttctcttcacta

SEQ ID NO: 105429 - DNA, 3188 bp, Homo sapiens
  Payload ID: 682
  Gene Symbol: ADGRE5
  Gene Name: adhesion G protein-coupled receptor E5
  Uniprot ID: P48960
  ENST ID: ENST00000242786
  CDS Start-End: 81-2588
acagctgcctagcctgtggagacgggacagccctgtcccactcactctttcccctgccgctcctgccggcagctccaaccatgggaggccgcgtctttctcgcattctgtgtctggctgactctgccgggagctgaaacccaggactccaggggctgtgcccggtggtgccctcagaactcctcgtgtgtcaatgccaccgcctgtcgctgcaatccagggttcagctctttttctgagatcatcaccaccccgacggagacttgtgacgacatcaacgagtgtgcaacaccgtcgaaagtgtcatgcggaaaattctcggactgctggaacacagaggggagctacgactgcgtgtgcagcccgggatatgagcctgtttctggggcaaaaacattcaagaatgagagcgagaacacctgtcaagatgtggacgaatgtcagcagaacccaaggctctgtaaaagctacggcacctgcgtcaacacccttggcagctatacctgccagtgcctgcctggcttcaagttcatacctgaggatccgaaggtctgcacagatgtgaatgaatgcacctccggacaaaacccgtgccacagctccacccactgcctcaacaacgtgggcagctatcagtgccgctgccgcccgggctggcaaccgattccggggtcccccaatggcccaaacaataccgtctgtgaagatgtggacgagtgcagctccgggcagcatcagtgtgacagctccaccgtctgcttcaacaccgtgggttcatacagctgccgctgccgcccaggctggaagcccagacacggaatcccgaataaccaaaaggacactgtctgtgaagatatgactttctccacctggaccccgccccctggagtccacagccagacgctttcccgattcttcgacaaagtccaggacctgggcagagactccaagacaagctcagccgaggtcaccatccagaatgtcatcaaattggtggatgaactgatggaagctcctggagacgtagaggccctggcgccacctgtccggcacctcatagccacccagctgctctcaaaccttgaagatatcatgaggatcctggccaagagcctgcctaaaggccccttcacctacatttccccttcgaacacagagctgaccctgatgatccaggagcggggggacaagaacgtcactatgggtcagagcagcgcacgcatgaagctgaattgggctgtggcagctggagccgaggatccaggccccgccgtggcgggcatcctctccatccagaacatgacgacattgctggccaatgcctccttgaacctgcattccaagaagcaagccgaactggaggagatatatgaaagcagcatccgtggtgtccaactcagacgcctctctgccgtcaactccatctttctgagccacaacaacaccaaggaactcaactcccccatccttttcgccttctcccaccttgagtcctccgatggggaggcgggaagagaccctcctgccaaggacgtgatgcctgggccacggcaggagctgctctgtgccttctggaagagtgacagcgacaggggagggcactgggccaccgagggctgccaggtgctgggcagcaagaacggcagcaccacctgccaatgcagccacctgagcagctttgcgatccttatggctcattatgacgtggaggactggaagctgaccctgatcaccagggtgggactggcgctgtcactcttctgcctgctgctgtgcatcctcactttcctgctggtgcggcccatccagggctcgcgcaccaccatacacctgcacctctgcatctgcctcttcgtgggctccaccatcttcctggccggcatcgagaacgaaggcggccaggtggggctgcgctgccgcctggtggccgggctgctgcactactgtttcctggccgccttctgctggatgagcctcgaaggcctggagctctactttcttgtggtgcgcgtgttccaaggccagggcctgagtacgcgctggctctgcctgatcggctatggcgtgcccctgctcatcgtgggcgtctcggctgccatctacagcaagggctacggccgccccagatactgctggttggactttgagcagggcttcctctggagcttcttgggacctgtgaccttcatcattttgtgcaatgctgtcattttcgtgactaccgtctggaagctcactcagaagttttctgaaatcaatccagacatgaagaaattaaagaaggcgagggcgctgaccatcacggccatcgcgcagctcttcctgttgggctgcacctgggtctttggcctgttcatcttcgacgatcggagcttggtgctgacctatgtgtttaccatcctcaactgcctgcagggcgccttcctctacctgctgcactgcctgctcaacaagaaggttcgggaagaataccggaagtgggcctgcctagttgctggggggagcaagtactcagaattcacctccaccacgtctggcactggccacaatcagacccgggccctcagggcatcagagtccggcatatgaaggcgcatggttctggacggcccagcagctcctgtggccacagcagctttgtacacgaagaccatccatcctcccttcgtccaccactctactccctccaccctccctccctgatcccgtgtgccaccaggagggagtggcagctatagtctggcaccaaagtccaggacacccagtggggtggagtcggagccactggtcctgctgctggctgcctctctgctccaccttgtgacccagggtggggacaggggctggcccagggctgcaatgcagcatgttgccctggcacctgtggccagtactcgggacagactaagggcgcttgtcccatcctggacttttcctctcatgtctttgctgcagaactgaagagactaggcgctggggctcagcttccctcttaagctaagactgatgtcagaggccccatggcgaggccccttggggccactgcctgaggctcacggtacagaggcctgccctgcctggccgggcaggaggttctcactgttgtgaaggttgtagacgttgtgtaatgtgtttttatctgttaaaatttttcagtgttgacacttaaaattaaacacatgcatacag

SEQ ID NO: 105430 - DNA, 3054 bp, Homo sapiens
  Payload ID: 682
  Gene Symbol: ADGRE5
  Gene Name: adhesion G protein-coupled receptor E5
  Uniprot ID: P48960
  ENST ID: ENST00000357355
  CDS Start-End: 90-2450
acagcctgcacagctgcctagcctgtggagacgggacagccctgtcccactcactctttcccctgccgctcctgccggcagctccaaccatgggaggccgcgtctttctcgcattctgtgtctggctgactctgccgggagctgaaacccaggactccaggggctgtgcccggtggtgccctcagaactcctcgtgtgtcaatgccaccgcctgtcgctgcaatccagggttcagctctttttctgagatcatcaccaccccgacggagacttgtgacgacatcaacgagtgtgcaacaccgtcgaaagtgtcatgcggaaaattctcggactgctggaacacagaggggagctacgactgcgtgtgcagcccgggatatgagcctgtttctggggcaaaaacattcaagaatgagagcgagaacacctgtcaagatgtggacgaatgtcagcagaacccaaggctctgtaaaagctacggcacctgcgtcaacacccttggcagctatacctgccagtgcctgcctggcttcaagttcatacctgaggatccgaaggtctgcacagatgtggacgagtgcagctccgggcagcatcagtgtgacagctccaccgtctgcttcaacaccgtgggttcatacagctgccgctgccgcccaggctggaagcccagacacggaatcccgaataaccaaaaggacactgtctgtgaagatatgactttctccacctggaccccgccccctggagtccacagccagacgctttcccgattcttcgacaaagtccaggacctgggcagagactccaagacaagctcagccgaggtcaccatccagaatgtcatcaaattggtggatgaactgatggaagctcctggagacgtagaggccctggcgccacctgtccggcacctcatagccacccagctgctctcaaaccttgaagatatcatgaggatcctggccaagagcctgcctaaaggccccttcacctacatttccccttcgaacacagagctgaccctgatgatccaggagcggggggacaagaacgtcactatgggtcagagcagcgcacgcatgaagctgaattgggctgtggcagctggagccgaggatccaggccccgccgtggcgggcatcctctccatccagaacatgacgacattgctggccaatgcctccttgaacctgcattccaagaagcaagccgaactggaggagatatatgaaagcagcatccgtggtgtccaactcagacgcctctctgccgtcaactccatctttctgagccacaacaacaccaaggaactcaactcccccatccttttcgccttctcccaccttgagtcctccgatggggaggcgggaagagaccctcctgccaaggacgtgatgcctgggccacggcaggagctgctctgtgccttctggaagagtgacagcgacaggggagggcactgggccaccgagggctgccaggtgctgggcagcaagaacggcagcaccacctgccaatgcagccacctgagcagctttgcgatccttatggctcattatgacgtggaggactggaagctgaccctgatcaccagggtgggactggcgctgtcactcttctgcctgctgctgtgcatcctcactttcctgctggtgcggcccatccagggctcgcgcaccaccatacacctgcacctctgcatctgcctcttcgtgggctccaccatcttcctggccggcatcgagaacgaaggcggccaggtggggctgcgctgccgcctggtggccgggctgctgcactactgtttcctggccgccttctgctggatgagcctcgaaggcctggagctctactttcttgtggtgcgcgtgttccaaggccagggcctgagtacgcgctggctctgcctgatcggctatggcgtgcccctgctcatcgtgggcgtctcggctgccatctacagcaagggctacggccgccccagatactgctggttggactttgagcagggcttcctctggagcttcttgggacctgtgaccttcatcattttgtgcaatgctgtcattttcgtgactaccgtctggaagctcactcagaagttttctgaaatcaatccagacatgaagaaattaaagaaggcgagggcgctgaccatcacggccatcgcgcagctcttcctgttgggctgcacctgggtctttggcctgttcatcttcgacgatcggagcttggtgctgacctatgtgtttaccatcctcaactgcctgcagggcgccttcctctacctgctgcactgcctgctcaacaagaaggttcgggaagaataccggaagtgggcctgcctagttgctggggggagcaagtactcagaattcacctccaccacgtctggcactggccacaatcagacccgggccctcagggcatcagagtccggcatatgaaggcgcatggttctggacggcccagcagctcctgtggccacagcagctttgtacacgaagaccatccatcctcccttcgtccaccactctactccctccaccctccctccctgatcccgtgtgccaccaggagggagtggcagctatagtctggcaccaaagtccaggacacccagtggggtggagtcggagccactggtcctgctgctggctgcctctctgctccaccttgtgacccagggtggggacaggggctggcccagggctgcaatgcagcatgttgccctggcacctgtggccagtactcgggacagactaagggcgcttgtcccatcctggacttttcctctcatgtctttgctgcagaactgaagagactaggcgctggggctcagcttccctcttaagctaagactgatgtcagaggccccatggcgaggccccttggggccactgcctgaggctcacggtacagaggcctgccctgcctggccgggcaggaggttctcactgttgtgaaggttgtagacgttgtgtaatgtgtttttatctgttaaaatttttcagtgttgacacttaaaattaaacacatgcatacagaaga

SEQ ID NO: 105431 - DNA, 2751 bp, Homo sapiens
  Payload ID: 682
  Gene Symbol: ADGRE5
  Gene Name: adhesion G protein-coupled receptor E5
  Uniprot ID: P48960
  ENST ID: ENST00000358600
  CDS Start-End: 369-2597
agagcagccagccccaacacagaggccaaagggttcgtcagagccacatggtggaaactctagcagagggtttttgaaagcaggttgcacttcattcttactgagtgcacgtgtgtgtgtgtgtgtgtgtgtgtgtgtgtgtgtgtgtgtatgcagcgcccctgggtctgtgtttttattgcactttcctgctggcttccagctgcaccgccagttccggggagggccctgggccagcggctgtccgccccccctccttcataaagtcctggcctcgggacagcctgcacagctgcctagcctgtggagacgggacagccctgtcccactcactctttcccctgccgctcctgccggcagctccaaccatgggaggccgcgtctttctcgcattctgtgtctggctgactctgccgggagctgaaacccaggactccaggggctgtgcccggtggtgccctcagaactcctcgtgtgtcaatgccaccgcctgtcgctgcaatccagggttcagctctttttctgagatcatcaccaccccgacggagacttgtgacgacatcaacgagtgtgcaacaccgtcgaaagtgtcatgcggaaaattctcggactgctggaacacagaggggagctacgactgcgtgtgcagcccgggatatgagcctgtttctggggcaaaaacattcaagaatgagagcgagaacacctgtcaagatgtggacgagtgcagctccgggcagcatcagtgtgacagctccaccgtctgcttcaacaccgtgggttcatacagctgccgctgccgcccaggctggaagcccagacacggaatcccgaataaccaaaaggacactgtctgtgaagatatgactttctccacctggaccccgccccctggagtccacagccagacgctttcccgattcttcgacaaagtccaggacctgggcagagactccaagacaagctcagccgaggtcaccatccagaatgtcatcaaattggtggatgaactgatggaagctcctggagacgtagaggccctggcgccacctgtccggcacctcatagccacccagctgctctcaaaccttgaagatatcatgaggatcctggccaagagcctgcctaaaggccccttcacctacatttccccttcgaacacagagctgaccctgatgatccaggagcggggggacaagaacgtcactatgggtcagagcagcgcacgcatgaagctgaattgggctgtggcagctggagccgaggatccaggccccgccgtggcgggcatcctctccatccagaacatgacgacattgctggccaatgcctccttgaacctgcattccaagaagcaagccgaactggaggagatatatgaaagcagcatccgtggtgtccaactcagacgcctctctgccgtcaactccatctttctgagccacaacaacaccaaggaactcaactcccccatccttttcgccttctcccaccttgagtcctccgatggggaggcgggaagagaccctcctgccaaggacgtgatgcctgggccacggcaggagctgctctgtgccttctggaagagtgacagcgacaggggagggcactgggccaccgagggctgccaggtgctgggcagcaagaacggcagcaccacctgccaatgcagccacctgagcagctttgcgatccttatggctcattatgacgtggaggactggaagctgaccctgatcaccagggtgggactggcgctgtcactcttctgcctgctgctgtgcatcctcactttcctgctggtgcggcccatccagggctcgcgcaccaccatacacctgcacctctgcatctgcctcttcgtgggctccaccatcttcctggccggcatcgagaacgaaggcggccaggtggggctgcgctgccgcctggtggccgggctgctgcactactgtttcctggccgccttctgctggatgagcctcgaaggcctggagctctactttcttgtggtgcgcgtgttccaaggccagggcctgagtacgcgctggctctgcctgatcggctatggcgtgcccctgctcatcgtgggcgtctcggctgccatctacagcaagggctacggccgccccagatactgctggttggactttgagcagggcttcctctggagcttcttgggacctgtgaccttcatcattttgtgcaatgctgtcattttcgtgactaccgtctggaagctcactcagaagttttctgaaatcaatccagacatgaagaaattaaagaaggcgagggcgctgaccatcacggccatcgcgcagctcttcctgttgggctgcacctgggtctttggcctgttcatcttcgacgatcggagcttggtgctgacctatgtgtttaccatcctcaactgcctgcagggcgccttcctctacctgctgcactgcctgctcaacaagaaggttcgggaagaataccggaagtgggcctgcctagttgctggggggagcaagtactcagaattcacctccaccacgtctggcactggccacaatcagacccgggccctcagggcatcagagtccggcatatgaaggcgcatggttctggacggcccagcagctcctgtggccacagcagctttgtacacgaagaccatccatcctcccttcgtccaccactctactccctccaccctccctccctgatcccgtgtgccaccaggagggagtggcagctatagtctgg

SEQ ID NO: 105432 - DNA, 572 bp, Homo sapiens
  Payload ID: 682
  Gene Symbol: ADGRE5
  Gene Name: adhesion G protein-coupled receptor E5
  ENST ID: ENST00000587606
  CDS Start-End: 109-572
ataaagtcctggcctcgggacagcctgcacagctgcctagcctgtggagacgggacagccctgtcccactcactctttcccctgccgctcctgccggcagctccaaccatgggaggccgcgtctttctcgcattctgtgtctggctgactctgccgggagctgaaacccaggactccaggggctgtgcccggtggtgccctcagaactcctcgtgtgtcaatgccaccgcctgtcgctgcaatccagggttcagctctttttctgagatcatcaccaccccgacggagacttgtgacgacatcaacgagtgtgcaacaccgtcgaaagtgtcatgcggaaaattctcggactgctggaacacagaggggagctacgactgcgtgtgcagcccgggatatgagcctgtttctggggcaaaaacattcaagaatgagagcgagaacacctgtcaaggtaagaaccaccccacgtcctctgactttccatccatgaggtttggggtcaccagagccattctggcagcatccagagagcagggccttggttgtagggtcagtgcctggcgtctgag

SEQ ID NO: 105433 - DNA, 578 bp, Homo sapiens
  Payload ID: 682
  Gene Symbol: ADGRE5
  Gene Name: adhesion G protein-coupled receptor E5
  ENST ID: ENST00000586517
  CDS Start-End: 109-578
ataaagtcctggcctcgggacagcctgcacagctgcctagcctgtggagacgggacagccctgtcccactcactctttcccctgccgctcctgccggcagctccaaccatgggaggccgcgtctttctcggctgtgcccggtggtgccctcagaactcctcgtgtgtcaatgccaccgcctgtcgctgcaatccagggttcagctctttttctgagatcatcaccaccccgacggagacttgtgacgacatcaacgagtgtgcaacaccgtcgaaagtgtcatgcggaaaattctcggactgctggaacacagaggggagctacgactgcgtgtgcagcccgggatatgagcctgtttctggggcaaaaacattcaagaatgagagcgagaacacctgtcaagatgtggacgagtgcagctccgggcagcatcagtgtgacagctccaccgtctgcttcaacaccgtgggttcatacagctgccgctgccgcccaggctggaagcccagacacggaatcccgaataaccaaaaggacactgtctgtgaagatatgactttctccacctggaccccgcc

SEQ ID NO: 105434 - DNA, 573 bp, Homo sapiens
  Payload ID: 682
  Gene Symbol: ADGRE5
  Gene Name: adhesion G protein-coupled receptor E5
  ENST ID: ENST00000592261
  CDS Start-End: 81-573
acagctgcctagcctgtggagacgggacagccctgtcccactcactctttcccctgccgctcctgccggcagctccaaccatgggaggccgcgtctttctcgcattctgtgtctggctgactctgccgggagctgaaacccaggactccaggggctgtgcccggtggtgccctcagaactcctcgtgtgtcaatgccaccgcctgtcgctgcaatccagggttcagctctttttctgagatcatcaccaccccgacggagacttgtgacgacatcaacgagtgtgcaacaccgtcgaaagtgtcatgcggaaaattctcggactgctggaacacagaggggagctacgactgcgtgtgcagcccgggatatgagcctgtttctggggcaaaaacattcaagaatgagagcgagaacacctgtcaagatgtgaatgaatgcacctccggacaaaacccgtgccacagctccacccactgcctcaacaacgtgggcagctatcagtgccgctgccgcccgggctggcaaccgattccggggtcccccaatggcccaaacaataccgtctgtgaag

SEQ ID NO: 105435 - DNA, 2142 bp, Homo sapiens
  Payload ID: 683
  Gene Symbol: ADGRF1
  Gene Name: adhesion G protein-coupled receptor F1
  ENST ID: ENST00000283297
  CDS Start-End: 1-2142
atggacatatcaatacaaagaaatggaagcatcgttgctgggtatgaagttgttggctccagcagtgcatctgaactgctgtcagccattgaacatgttgccgagaaggctaagacagcccttcacaagctgtttccattagaagacggctctttcagagtgttcggaaaagcccagtgtaatgacattgtctttggatttgggtccaaggatgatgaatataccctgccctgcagcagtggctacaggggaaacatcacagccaagtgtgagtcctctgggtggcaggtcatcagggagacttgtgtgctctctctgcttgaagaactgaacaagaatttcagtatgattgtaggcaatgccactgaggcagctgtgtcatccttcgtgcaaaatctttctgtcatcattcggcaaaacccatcaaccacagtggggaatctggcttcggtggtgtcgattctgagcaatatttcatctctgtcactggccagccatttcagggtgtccaattcaacaatggaggatgtcatcagtatagctgacaatatccttaattcagcctcagtaaccaactggacagtcttactgcgggaagaaaagtatgccagctcacggttactagagacattagaaaacatcagcactctggtgcctccgacagctcttcctctgaatttttctcggaaattcattgactggaaagggattccagtgaacaaaagccaactcaaaaggggttacagctatcagattaaaatgtgtccccaaaatacatctattcccatcagaggccgtgtgttaattgggtcagaccaattccagagatcccttccagaaactattatcagcatggcctcgttgactctggggaacattctacccgtttccaaaaatggaaatgctcaggtcaatggacctgtgatatccacggttattcaaaactattccataaatgaagttttcctatttttttccaagatagagtcaaacctgagccagcctcattgtgtgttttgggatttcagtcatttgcagtggaacgatgcaggctgccacctagtgaatgaaactcaagacatcgtgacgtgccaatgtactcacttgacctccttctccatattgatgtcaccttttgtcccctctacaatcttccccgttgtaaaatggatcacctatgtgggactgggtatctccattggaagtctcattttatgcctgatcatcgaggctttgttttggaagcagattaaaaaaagccaaacctctcacacacgtcgtatttgcatggtgaacatagccctgtccctcttgattgctgatgtctggtttattgttggtgccacagtggacaccacggtgaacccttctggagtctgcacagctgctgtgttctttacacacttcttctacctctctttgttcttctggatgctcatgcttggcatcctgctggcttaccggatcatcctcgtgttccatcacatggcccagcatttgatgatggctgttggattttgcctgggttatgggtgccctctcattatatctgtcattaccattgctgtcacgcaacctagcaatacctacaaaaggaaagatgtgtgttggcttaactggtccaatggaagcaaaccactcctggcttttgttgtccctgcactggctattgtggctgtgaacttcgttgtggtgctgctagttctcacaaagctctggaggccgactgttggggaaagactgagtcgggatgacaaggccaccatcatccgcgtggggaagagcctcctcattctgacccctctgctagggctcacctggggctttggaataggaacaatagtggacagccagaatctggcttggcatgttatttttgctttactcaatgcattccagggattttttatcttatgctttggaatactcttggacagtaagctgcgacaacttctgttcaacaagttgtctgccttaagttcttggaagcaaacagaaaagcaaaactcatcagatttatctgccaaacccaaattctcaaagcctttcaacccactgcaaaacaaaggccattatgcattttctcatactggagattcctccgacaacatcatgctaactcagtttgtctcaaatgaataa

SEQ ID NO: 105436 - DNA, 1370 bp, Homo sapiens
  Payload ID: 683
  Gene Symbol: ADGRF1
  Gene Name: adhesion G protein-coupled receptor F1
  Uniprot ID: Q5T601
  ENST ID: ENST00000371243
  CDS Start-End: 148-804
agatactgatactttctttccaaacagcataagaagtgattgagccacaagtatactgaaggaagggctccctcgagttctggtgtgaagagataaatcaccagtcacagactatgcacccgactgctgctgttcagtccagggaaaatgaaagttggagtgctgtggctcatttctttcttcaccttcactgacggccacggtggcttcctggggaaaaatgatggcatcaaaacaaaaaaagaactcattgtgaataagaaaaaacatctaggcccagtcgaagaatatcagctgctgcttcaggtgacctatagagattccaaggagaaaagagatttgagaaattttctgaagctcttgaagcctccattattatggtcacatgggctaattagaattatcagagcaaaggctaccacagactgcaacagcctgaatggagtcctgcagtgtacctgtgaagacagctacacctggtttcctccctcatgccttgatccccagaactgctaccttcacacggctggagcactcccaagctgtgaatgtcatctcaacaacctcagccagagtgtcaatttctgtgagagaacaaagatttggggcactttcaaaattaatgaaaggtttacaaatgaccttttgaattcatcttctgctatatactccaaatatgcaaatggaattgaaattcaacttaaaaaagcatatgaaagaattcaaggttttgagtcggttcaggtcacccaatttcgaatgtcactcttgtcgcccaagttggagtgcaatggcacaatctaggctcactgcaaccctgcaacctctgcctaccgggttcaagagattcccctgcctcagcctcccaagtagctggaattacagacacctgccaccacatccagctaactttttttgtatttttagtagagacagggtttcaccatgttggccacactggtctcaaactcctgacctcaggtgatccgcctgcctcggcccccaaagtgctgggattacaggcatgagccaccacatctggcctaggaccttaaatattggaaagcattctcaaaactgtgggtcagtgagtagaactacaaaacaatagcagtagggcagaaacttgaaagaaggcaggagatcatggtgacagtggatgggaaaaagtgagggttggggataagggttgcgggttgtcgaagggtggattttctccttcagcaactacaggagatatgatgcctcataattcggagccagaagtggggctttgggtgagatatctttgcacagataacatgtatacatcatagttcaaaacccagtagtcattgtttacagcaaataaagaaatatttagtaaatta

SEQ ID NO: 105437 - DNA, 5468 bp, Homo sapiens
  Payload ID: 683
  Gene Symbol: ADGRF1
  Gene Name: adhesion G protein-coupled receptor F1
  Uniprot ID: Q5T601
  ENST ID: ENST00000371253
  CDS Start-End: 217-2949
agtaatgcgtgccaggaattgctgatggatcagtgagcctgtgttcatgccagtgagctgctgtggctcagatactgatactttctttccaaacagcataagaagtgattgagccacaagtatactgaaggaagggctccctcgagttctggtgtgaagagataaatcaccagtcacagactatgcacccgactgctgctgttcagtccagggaaaatgaaagttggagtgctgtggctcatttctttcttcaccttcactgacggccacggtggcttcctggggaaaaatgatggcatcaaaacaaaaaaagaactcattgtgaataagaaaaaacatctaggcccagtcgaagaatatcagctgctgcttcaggtgacctatagagattccaaggagaaaagagatttgagaaattttctgaagctcttgaagcctccattattatggtcacatgggctaattagaattatcagagcaaaggctaccacagactgcaacagcctgaatggagtcctgcagtgtacctgtgaagacagctacacctggtttcctccctcatgccttgatccccagaactgctaccttcacacggctggagcactcccaagctgtgaatgtcatctcaacaacctcagccagagtgtcaatttctgtgagagaacaaagatttggggcactttcaaaattaatgaaaggtttacaaatgaccttttgaattcatcttctgctatatactccaaatatgcaaatggaattgaaattcaacttaaaaaagcatatgaaagaattcaaggttttgagtcggttcaggtcacccaatttcgaaatggaagcatcgttgctgggtatgaagttgttggctccagcagtgcatctgaactgctgtcagccattgaacatgttgccgagaaggctaagacagcccttcacaagctgtttccattagaagacggctctttcagagtgttcggaaaagcccagtgtaatgacattgtctttggatttgggtccaaggatgatgaatataccctgccctgcagcagtggctacaggggaaacatcacagccaagtgtgagtcctctgggtggcaggtcatcagggagacttgtgtgctctctctgcttgaagaactgaacaagaatttcagtatgattgtaggcaatgccactgaggcagctgtgtcatccttcgtgcaaaatctttctgtcatcattcggcaaaacccatcaaccacagtggggaatctggcttcggtggtgtcgattctgagcaatatttcatctctgtcactggccagccatttcagggtgtccaattcaacaatggaggatgtcatcagtatagctgacaatatccttaattcagcctcagtaaccaactggacagtcttactgcgggaagaaaagtatgccagctcacggttactagagacattagaaaacatcagcactctggtgcctccgacagctcttcctctgaatttttctcggaaattcattgactggaaagggattccagtgaacaaaagccaactcaaaaggggttacagctatcagattaaaatgtgtccccaaaatacatctattcccatcagaggccgtgtgttaattgggtcagaccaattccagagatcccttccagaaactattatcagcatggcctcgttgactctggggaacattctacccgtttccaaaaatggaaatgctcaggtcaatggacctgtgatatccacggttattcaaaactattccataaatgaagttttcctatttttttccaagatagagtcaaacctgagccagcctcattgtgtgttttgggatttcagtcatttgcagtggaacgatgcaggctgccacctagtgaatgaaactcaagacatcgtgacgtgccaatgtactcacttgacctccttctccatattgatgtcaccttttgtcccctctacaatcttccccgttgtaaaatggatcacctatgtgggactgggtatctccattggaagtctcattttatgcctgatcatcgaggctttgttttggaagcagattaaaaaaagccaaacctctcacacacgtcgtatttgcatggtgaacatagccctgtccctcttgattgctgatgtctggtttattgttggtgccacagtggacaccacggtgaacccttctggagtctgcacagctgctgtgttctttacacacttcttctacctctctttgttcttctggatgctcatgcttggcatcctgctggcttaccggatcatcctcgtgttccatcacatggcccagcatttgatgatggctgttggattttgcctgggttatgggtgccctctcattatatctgtcattaccattgctgtcacgcaacctagcaatacctacaaaaggaaagatgtgtgttggcttaactggtccaatggaagcaaaccactcctggcttttgttgtccctgcactggctattgtggctgtgaacttcgttgtggtgctgctagttctcacaaagctctggaggccgactgttggggaaagactgagtcgggatgacaaggccaccatcatccgcgtggggaagagcctcctcattctgacccctctgctagggctcacctggggctttggaataggaacaatagtggacagccagaatctggcttggcatgttatttttgctttactcaatgcattccagggattttttatcttatgctttggaatactcttggacagtaagctgcgacaacttctgttcaacaagttgtctgccttaagttcttggaagcaaacagaaaagcaaaactcatcagatttatctgccaaacccaaattctcaaagcctttcaacccactgcaaaacaaaggccattatgcattttctcatactggagattcctccgacaacatcatgctaactcagtttgtctcaaatgaataaggcaaggaatcataaaatcaagaaaaaatttccagaacaacttgacatttagagacaaatgtcaatgaagaaattatgctcagtattcgatcgggttttctgatttaggggtctgggaataaaacaagaatgtctcagtggcttcattactgctcccttttgtcttcaattaaatgaaaagaagatttatttccatgtgatttgattcaaagaaagtgctccataaatgcagaagagtaggttttgttggaaatcgtgtcagttgtaccctgaccataaaatatggtttctattttcataaaacagcattattcacatggcatttccaataatctggattgaaggaagaaaattttatgaaatagctttagataaattaataggccacgttcattttcttgtcaaaaagttactggtggggggatggtgggaaaaagttattagtgcaaatttcctagagaaaaaaccatttctctttcaaattttccagttgaattttatgttcgcttttgcttcttaggttctatcacttaatattgaaagttaatcagaaataaaatgtaaacttctatttcagatagctttgtaaccatttatcagaaagtataataatgtgatatgatatataatgtggtatttttcagtttacaaggcacttccatctggtcctaaaccctgcaaacaaaagtgtcaaggcagacctagtgcagagatgagggcatgggggctcagagaggtaaagtgacttgccaaagattgtgaagccagttaagggaaattggggatttttaggacatttgtctcccagaccatttctacagccaataaaagccttgaaaattacctacatctctagtaaatctttctgaggtcagttacacagttcaccattcccagaattctatgtaagagagaaattaagggagaatttggttgtcagcttccagggaggtaccttaaaacatccttattttctttcataatacaccataggcactttgtggaagttattttcttgtacagccagtgccacttttggatgacatacaaagcagcaggagttgacgctatgtgaagcaacacttctcttccatacttccatcacatttggctcacctacctgagtttcagccgtgaccatagtgcccagaggaacccgagcctttgattcatccttgctgttttgagaggcctagggagtgtctcttagcctcctgacatggaaagccttcatgctatgcaaataaagacagctgggggaacttctagttagtggtggtagattaaataagcatacctgagagaaattcaaagttagacttccacaaggcaccaaggtgcagcacacatgaaatatgaaagtgagaggttcaaaggaaatgactgaggatcagttagatggttctataccccacaaatatgtatgagagtcaacagaattttatgagaaagacttctttgcagaaaactgctctatgagccttctcactctacctacccacaaaagtgagagaaggaggaatgtctgctccttgacctcaaatttagtgagagaagatttctcagatagctcagatagctcagatttctcagaaccacaacaattaggatgcatggctgatggaagtctgattcttgcctagaattgtggccacagctccggtagtagagccctgaatgagttctgtgttgagaatagcctgtatgtctagtgtttgtcagggcaatggatgtgtgtgtttcccatgaaccatagtgagacatgcaagagtgaaggtcagcatggggctcttttaggtcctctctgatagggttgtccaaagaggtggagggaacccagcatcaagaagtgggaggtgaagccagattgtgggatgaggaaggagtcacaaatgaccacctggaatacaaaaaaatctacacaagctaaagatgagaagtcagggctatgagaatttctatgggagttcttgaatgctccctctcttattacacacaattactatccagagaaccctgacaccatgtgaaggcagccctatctcataagacagatttctttttttggggaccttggggaaagggaggccagaaacctccgtgtccaaggtggggtggaaggagagggagaaatcttagcaaaaatgtcaaccagcaagggaagatgtgctagcgcaagtaggcaactcaacacaagactcagttggagagggaagaaaaatttagtactaaattattgtagtttcttcttattgtaggcgactgggagtcataattaccaaactatttaaaatgaccaaaatgttgctcttacctgagtatgttggcatacaactggaatgtatctgatggaagaaaaagcttctcccactgaataaattttatgaggatgatgagagacaaaaaaatgtttgatcagatatcatgtatgtgcatgcttgtctaattcactgattatgcatacattcacctcaaaatgctactaaaacaacaataaaataatgaaaaagtgaatagca

SEQ ID NO: 105438 - DNA, 722 bp, Homo sapiens
  Payload ID: 683
  Gene Symbol: ADGRF1
  Gene Name: adhesion G protein-coupled receptor F1
  ENST ID: ENST00000475745
  CDS Start-End: 1-483
gaatatcagctgctgcttcaggtgacctatagagattccaaggagaaaagagatttgagaaattttctgaagctcttgaagcctccattattatggtcacatgggctaattagaattatcagagcaaaggctaccacagactgcaacagcctgaatggagtcctgcagtgtacctgtgaagacagctacacctggtttcctccctcatgccttgatccccagaactgctaccttcacacggctggagcactcccaagctgtgaatgtcatctcaacaacctcagccagagtgtcaatttctgtgagagaacaaagatttggggcactttcaaaattaatgaaaggtttacaaatgaccttttgaattcatcttctgctatatactccaaatatgcaaatggaattgaaattcaacttaaaaaagcatatgaaagaattcaaggttttgagtcggttcaggtcacccaatttcgcccagtgtaatgacattgtctttggatttgggtccaaggatgatgaatataccctgccctgcagcagtggctacaggggaaacatcacagccaagtgtgagtcctctgggtggcaggtcatcagggagacttgtgtgctctctctgcttgaagaactgaacaagaatttcagtatgattgtaggcaatgccactgaggcagctgtgtcatccttcgtgcaaaatctttctgtcatcattcggcaaaacc

SEQ ID NO: 105439 - DNA, 561 bp, Homo sapiens
  Payload ID: 683
  Gene Symbol: ADGRF1
  Gene Name: adhesion G protein-coupled receptor F1
  ENST ID: ENST00000487323
  CDS Start-End: 1-412
atggtcacatgggctaattagaattatcagagcaaaggctaccacagactgcaacagcctgaatggagtcctgcagtgtacctgtgaagacagctacacctggtttcctccctcatgccttgatccccagaactgctaccttcacacggctggagcactcccaagctgtgaatgtcatctcaacaacctcagccagagtgtcaatttctgtgagagaacaaagatttggggcactttcaaaattaatgaaaggtttacaaatgaccttttgaattcatcttctgctatatactccaaatatgcaaatggaattgaaattcaacttaaaaaagcatatgaaagaattcaaggttttgagtcggttcaggtcacccaatttcggacagttatacacctgtggaacctggtttaacttcactaaatcaaacctataacaagcaggaaaatactctgtaatcaatagaatggacatatcaatacaaagaaatggaagcatcgttgctgggtatgaagttgttggctccagcagtgcatctgaactgctgtcagccattgaacatg

SEQ ID NO: 105440 - DNA, 2127 bp, Homo sapiens
  Payload ID: 684
  Gene Symbol: ADGRF2
  Gene Name: adhesion G protein-coupled receptor F2
  Uniprot ID: Q8IZF7
  ENST ID: ENST00000296862
  CDS Start-End: 1-2127
atggggctgactgcctatgggaaccgcagggtccagcctggggagctgccattcggggctaacttgactctcatccatacaagagcccagcctgtgatttgtagcaagcttctcttgacaaagagagtgagtcccatctctttcttcttgtccaaatttcaaaattcctggggtgaggatggatgggttcagttggatcaactgccatcccctaatgcagtcagctctgaccaagtacactgttcagctggctgcacacacaggaaatgtggatgggctgcaagcaaaagcaaggagaaggtgcctgccaggccacacggtgtatgcgatggtgtctgtacagactactcccagtgtactcaaccttgccctccagacactcagggaaatatggggttttcatgcaggcaaaagacatggcacaagatcactgacacctgccagactcttaatgccctcaacatctttgaggaggattcacgtttggttcagccatttgaagacaatataaaaataagtgtatatactggaaagtctgagaccataacagatatgttgctacaaaagtgtcccacagatctgtcttgtgtaattagaaacattcagcagtctccctggataccaggaaacattgccgtaattgtgcagctcttacacaacatatcaacagcaatatggacaggtgttgatgaggcaaagatgcagagttacagcaccatagccaaccacattcttaacagcaaaagcatctccaactggactttcattcctgacagaaacagcagctatatcctgctacattcagtcaactcctttgcaagaaggctattcatagataaacatcctgttgacatatcagatgtcttcattcatactatgggcaccaccatatctggagataacattggaaaaaatttcactttttctatgagaattaatgataccagcaatgaagtcactgggagagtgttgatcagcagagatgaacttcggaaggtgccttccccttctcaggtcatcagcattgcatttccaactattggggctattttggaagccagtcttttggaaaatgttactgtaaatgggcttgtcctgtctgccattttgcccaaggaacttaaaagaatctcactgatttttgaaaagatcagcaagtcagaggagaggaggacacagtgtgttggctggcactctgtggagaacagatgggaccagcaggcctgcaaaatgattcaagaaaactcccagcaagctgtttgcaaatgtaggccaagcaaattgtttacctctttctcaattcttatgtcacctcacatcttagagagtctgattctgacttacatcacatatgtaggcctgggcatttctatttgcagcctgatcctttgcttgtccattgaggtcctagtctggagccaagtgacaaagacagagatcacctatttacgccatgtgtgcattgttaacattgcagccactttgctgatggcagatgtgtggttcattgtggcttcctttcttagtggcccaataacacaccacaagggatgtgtggcagccacattttttgttcatttcttttacctttctgtatttttctggatgcttgccaaggcactccttatcctctatggaatcatgattgttttccataccttgcccaagtcagtcctggtggcatctctgttttcagtgggctatggatgccctttggccattgctgccatcactgttgctgccactgaacctggcaaaggctatctacgacctgagatctgctggctcaactgggacatgaccaaagccctcctggccttcgtgatcccagctttggccatcgtggtagtaaacctgatcacagtcacactggtgattgtcaagacccagcgagctgccattggcaattccatgttccaggaagtgagagccattgtgagaatcagcaagaacatcgccatcctcacaccacttctgggactgacctggggatttggagtagccactgtcatcgatgacagatccctggccttccacattatcttctccctgctcaatgcattccaggtaagtccagatgcttctgaccaagtgcaaagtgagagaattcatgaagatgttctgtga

SEQ ID NO: 105441 - DNA, 4895 bp, Homo sapiens
  Payload ID: 684
  Gene Symbol: ADGRF2
  Gene Name: adhesion G protein-coupled receptor F2
  Uniprot ID: Q8IZF7
  ENST ID: ENST00000398742
  CDS Start-End: 50-1978
ctttttatttctttttatagaaacaagaaagtcagctgtgtggaagacaatgactcatatacttttgctgtactacttggtgtttcttttgcccacagagtcctgtaggacattgtatcaggctgcaagcaaaagcaaggagaaggtgcctgccaggccacacggtgtatgcgatggtgtctgtacagactactcccagtgtactcaaccttgccctccagacactcagggaaatatggggttttcatgcaggcaaaagacatggcacaagatcactgacacctgccagactcttaatgccctcaacatctttgaggaggattcacgtttggttcagccatttgaagacaatataaaaataagtgtatatactggaaagtctgagaccataacagatatgttgctacaaaagtgtcccacagatctgtcttgtgtaattagaaacattcagcagtctccctggataccaggaaacattgccgtaattgtgcagctcttacacaacatatcaacagcaatatggacaggtgttgatgaggcaaagatgcagagttacagcaccatagccaaccacattcttaacagcaaaagcatctccaactggactttcattcctgacagaaacagcagctatatcctgctacattcagtcaactcctttgcaagaaggctattcatagataaacatcctgttgacatatcagatgtcttcattcatactatgggcaccaccatatctggagataacattggaaaaaatttcactttttctatgagaattaatgataccagcaatgaagtcactgggagagtgttgatcagcagagatgaacttcggaaggtgccttccccttctcaggtcatcagcattgcatttccaactattggggctattttggaagccagtcttttggaaaatgttactgtaaatgggcttgtcctgtctgccattttgcccaaggaacttaaaagaatctcactgatttttgaaaagatcagcaagtcagaggagaggaggacacagtgtgttggctggcactctgtggagaacagatgggaccagcaggcctgcaaaatgattcaagaaaactcccagcaagctgtttgcaaatgtaggccaagcaaattgtttacctctttctcaattcttatgtcacctcacatcttagagagtctgattctgacttacatcacatatgtaggcctgggcatttctatttgcagcctgatcctttgcttgtccattgaggtcctagtctggagccaagtgacaaagacagagatcacctatttacgccatgtgtgcattgttaacattgcagccactttgctgatggcagatgtgtggttcattgtggcttcctttcttagtggcccaataacacaccacaagggatgtgtggcagccacattttttgttcatttcttttacctttctgtatttttctggatgcttgccaaggcactccttatcctctatggaatcatgattgttttccataccttgcccaagtcagtcctggtggcatctctgttttcagtgggctatggatgccctttggccattgctgccatcactgttgctgccactgaacctggcaaaggctatctacgacctgagatctgctggctcaactgggacatgaccaaagccctcctggccttcgtgatcccagctttggccatcgtggtagtaaacctgatcacagtcacactggtgattgtcaagacccagcgagctgccattggcaattccatgttccaggaagtgagagccattgtgagaatcagcaagaacatcgccatcctcacaccacttctgggactgacctggggatttggagtagccactgtcatcgatgacagatccctggccttccacattatcttctccctgctcaatgcattccagggtttcttcatcctagtgtttggaaccatcctggatccaaagataagagaagccttaaagggttgagtagcctctgcaaaaaggagctccagaatatcagagaatgcttcttctgaattatcttgtcatcccatcaaaggcccaagttaacaaaccaggctacatccctaacctaggaggaatggcagagcccaaaggagaaatgtgctcattcctgtcttcttgcttctggagaatatgtaggaagctcacacatgtggtgctgatggaggagggcgtgatgtgcagaaaggatgaaaggctcctctgtctaagctgttctgtgctactaaacatttctcgtccatcaactgtacatagctacatatgtcatgctgggcagccacagcaaacaaaaagacaaagggggccacaaccgtggtttttgttggggcttccatctctatgctgttgggtcacatttgtcttcagaaagcaacctctgtctcatcttggaaaaggcggcctgagatttcacctggctggattctgtgtgttgctgagggaggagcctcatgaatagtcacaaagagttgggctgactctaagtaggacattgcagattatttttttttttcaaaaggaatccactgccagtatatccactttttcaaatttaaatagattggattgtcaacttggtttaggcttagatacaacttccttggccatgaaccaaggggaaaagcatagagcttttgagacagaaagatgaccattttcagttaaggagatggaagtctggagttgtgagtcaatgctaatcgaggactgagccagaggtagaaacccaagtgtgctggctcccagccctgtacttcctcttcaagaccatatagacactgaaagatcttctgcctacactgacaatgtaaggtcaatcctcaccaacaatatgcttttttgatacctgggattggagagaggaaatatcacatttccaattcagagctgctctttttcttaacctgtatgtaaacaaattcaacattcaaaccaggtgttacctgatagaacagtattgtaggtagaagctctttgaggaaaaaaaaaaaacctctttacaaagcaaggacatagatgactgcagcagcatctaactagtggatgaaggcaaaggggcaatgggcagcctttaattatcccaacaagaagtcagtattgatgacgtttcattacaaaggagaaagtggggctcaccttaggtatgagtgcagtcccttccttccttccttccttccttccttccttccttccttccttccttccttccttccttccttccttccttccttcttccctccctccctccctctctctctctctttctccctttctctttctttctttttttctccctctctctctttctttctttctttgtttcttattacaaataatcttcctataagtaggaaagtttgagcagacaaaaagcatcaatctgaagttaaaaaaaatgcatcaacctggagaaatagtcatttttcaaatggcattgcttatcttgggacaacaaaagcatccttcacaaataaagtcagagagtggttttaatttaccatttaccaatagatttgtatgttcttttcaagagaaggggtgagatagacatagtcctggttttcctcaatgcaggcttaggtacaaagagatgtcacttacccagagtccatatattgaagtgaaaatggaatttcatgaagcaaatatagttataggatggtaactctggacaaattttataaaagatgaactccaattgcttcatttcacagataacagctctgagcactagggagagagggagggattggcctagcatttgctttgtgtcttgagcagtcacatctattatggaagtactcactactcagctatactcactccctgagacaggatggttggaaagaaaccccaccttagcttcatcattaaccaagaaaccccaaggatgcttagagaaaaactctggaattatttgggaattcctggaagaagctatgccctctctcctgcatcccaaagcccactctacaccatcttgaaaaatgtcaaggaactgcatggattaggttgactctggatgaccctgggtagagacacattcagtttcctgctgacaccgcaccaagaaagtgatttggtcaggtgactctaggagaaattggtactgatagtatccaaggcagatttttaagtatcagacttaatacataatgattcttgggaaagccatttaaatccctgagactttaagtggataaatgtaggtaaagtagtatagtacttggctcataataattgctcattcaaattcacatgttagttttagttgttttttttaaattagagtcctgtgaatacatgaacccacccacccacatgcaaacacaagcaaacacacagccatgaccccatgcataagtttggctgaagacaccctcatgggaactagttcactgacttccaaattaaagagttaagcatttgatttggtctgttcaacattaggggtatcagccagcaaaatctgttgagcttaccattgaaaaatcctttcattcattactgtggtcataatacacagttacctggccaggaaagagtacacatcacagggatctgctcactgcacgtgtgcctgagctctccctcactttctgccttcttcaagaattcttccctgattggtccaaccagaagcgctgattctccccacctgatttcctgtaattttataatctatgtccttcacttttgtgttatattgtttatttccttttggtctttttgtgtgcatatgtatatgttttggggaatggggtattcacttttgttactcactgtgttactcacttttgtatgcccatagtgcagagcatggtgccttgtacatagagtatgttcggtaaatatgtgcaataaaaagtcctttgattac

SEQ ID NO: 105442 - DNA, 3043 bp, Homo sapiens
  Payload ID: 684
  Gene Symbol: ADGRF2
  Gene Name: adhesion G protein-coupled receptor F2
  ENST ID: ENST00000507065
  CDS Start-End: 279-2201
aggagctactcccatgcaggacttgtctgtcaggctgcagcactcctgcacatggggctgactgcctatgggaaccgcagggtccagcctggggagctgccattcggggctaacttgactctcatccatacaagagcccagcctgtgatttgtagcaaggtatgacagaagagagccagtaatgcccatatctccagctgccagggagtggggcaaatttgccggtgagtttgtctttggccagccacaaaacaagaaagtcagctgtgtggaagacaatgactcatatacttttgctgtactacttggtgtttcttttgcccacagagtcctgtaggacattgtatcaggctgcaagcaaaagcaaggagaaggtgcctgccaggccacacggtgtatgcgatggtgtctgtacagactactcccagtgtactcaaccttgccctccagacactcagggaaatatggggttttcatgcaggcaaaagacatggcacaagatcactgacacctgccagactcttaatgccctcaacatctttgaggaggattcacgtttggttcagccatttgaagacaatataaaaataagtgtatatactggaaagtctgagaccataacagatatgttgctacaaaagtgtcccacagatctgtcttgtgtaattagaaacattcagcagtctccctggataccaggaaacattgccgtaattgtgcagctcttacacaacatatcaacagcaatatggacaggtgttgatgaggcaaagatgcagagttacagcaccatagccaaccacattcttaacagcaaaagcatctccaactggactttcattcctgacagaaacagcagctatatcctgctacattcagtcaactcctttgcaagaaggctattcatagataaacatcctgttgacatatcagatgtcttcattcatactatgggcaccaccatatctggagataacattggaaaaaatttcactttttctatgagaattaatgataccagcaatgaagtcactgggagagtgttgatcagcagagatgaacttcggaaggtgccttccccttctcaggtcatcagcattgcatttccaactattggggctattttggaagccagtcttttggaaaatgttactgtaaatgggcttgtcctgtctgccattttgcccaaggaacttaaaagaatctcactgatttttgaaaagatcagcaagtcagaggagaggaggacacagtgtgttggctggcactctgtggagaacagatgggaccagcaggcctgcaaaatgattcaagaaaactcccagcaagctgtttgcaaatgtaggccaagcaaattgtttacctctttctcaattcttatgtcacctcacatcttagagagtctgattctgacttacatcacatatgtaggcctgggcatttctatttgcagcctgatcctttgcttgtccattgaggtcctagtctggagccaagtgacaaagacagagatcacctatttacgccatgtgtgcattgttaacattgcagccactttgctgatggcagatgtgtggttcattgtggcttcctttcttagtggcccaataacacaccacaagggatgtgtggcagccacattttttgttcatttcttttacctttctgtatttttctggatgcttgccaaggcactccttatcctctatggaatcatgattgttttccataccttgcccaagtcagtcctggtggcatctctgttttcagtgggctatggatgccctttggccattgctgccatcactgttgctgccactgaacctggcaaaggctatctacgacctgagatctgctggctcaactgggacatgaccaaagccctcctggccttcgtgatcccagctttggccatcgtggtagtaaacctgatcacagtcacactggtgattgtcaagacccagcgagctgccattggcaattccatgttccaggaagtgagagccattgtgagaatcagcaagaacatcgccatcctcacaccacttctgggactgacctggggatttggagtagccactgtcatcgatgacagatccctggccttccacattatcttctccctgctcaatgcattccaggtaagtccagatgcttctgaccaagtgcaaagtgagagaattcatgaagatgttctgtgattaggtgcttgtgacattagatttctacataaaagccaatggatttggaatagcatatggagtggggaaataaacttttgttccagagatacctggatttggatcctgactctttcatttactaataatgtataacatgatcttgggatatttactcaacttttttcaagccatattttcctcacatataaaatgagtgcaatactgttcactttataggggtgtttggaaagtgaaattaaatggtgaatgggaaaggatcaagtactaaaatgatctaaagaccatagacagcctagtaataggctaagttgttatggtttaaaaattaagcaataacaccttccccaaaatttaggtatgtagctggaggtattaaagtttgcacatttattacatttccttccacttaggatttttaactaccattggaaaccatcttattttaacatggcaagctctacagagaggtattgaagatagtttctcctctcttctcttatcacacttagatgaattaagcaacgttcacagtttcatgtgtatgctttgccaaattttctatgcttatacaaacatattttcacataacacgggttaaaacaatgtatattattgtgtaacttgcttttgcacttaaaaatatgctctagaattttaccagctcattatgcatgaatatttctctaatggctgcataccattccatattcaataatttccttcttgattgaaatttttctccattgttttgtgttatagtatgtgaatgatccaaagtttattatattgaatgttaatatgtagatagtaactaattgaaaagaaagcttttatttttc

SEQ ID NO: 105443 - DNA, 5126 bp, Homo sapiens
  Payload ID: 684
  Gene Symbol: ADGRF2
  Gene Name: adhesion G protein-coupled receptor F2
  Uniprot ID: Q8IZF7
  ENST ID: ENST00000467205
  CDS Start-End: 277-2205
gcaaggtatgacagaagagagccagtaatgcccatatctccagctgccagggagtggggcaaatttgccgtagagacggggtttcaccgtgttagccaggatggtctcgatctcctgacctcgtgatctgcgcacctcggcctcccaaagtgctgggattacagatatgaaccatcgcgcccggcccagaagatgacttcttgactcctctctctccgtatctgacactacttcattctttaccaggaaacaagaaagtcagctgtgtggaagacaatgactcatatacttttgctgtactacttggtgtttcttttgcccacagagtcctgtaggacattgtatcaggctgcaagcaaaagcaaggagaaggtgcctgccaggccacacggtgtatgcgatggtgtctgtacagactactcccagtgtactcaaccttgccctccagacactcagggaaatatggggttttcatgcaggcaaaagacatggcacaagatcactgacacctgccagactcttaatgccctcaacatctttgaggaggattcacgtttggttcagccatttgaagacaatataaaaataagtgtatatactggaaagtctgagaccataacagatatgttgctacaaaagtgtcccacagatctgtcttgtgtaattagaaacattcagcagtctccctggataccaggaaacattgccgtaattgtgcagctcttacacaacatatcaacagcaatatggacaggtgttgatgaggcaaagatgcagagttacagcaccatagccaaccacattcttaacagcaaaagcatctccaactggactttcattcctgacagaaacagcagctatatcctgctacattcagtcaactcctttgcaagaaggctattcatagataaacatcctgttgacatatcagatgtcttcattcatactatgggcaccaccatatctggagataacattggaaaaaatttcactttttctatgagaattaatgataccagcaatgaagtcactgggagagtgttgatcagcagagatgaacttcggaaggtgccttccccttctcaggtcatcagcattgcatttccaactattggggctattttggaagccagtcttttggaaaatgttactgtaaatgggcttgtcctgtctgccattttgcccaaggaacttaaaagaatctcactgatttttgaaaagatcagcaagtcagaggagaggaggacacagtgtgttggctggcactctgtggagaacagatgggaccagcaggcctgcaaaatgattcaagaaaactcccagcaagctgtttgcaaatgtaggccaagcaaattgtttacctctttctcaattcttatgtcacctcacatcttagagagtctgattctgacttacatcacatatgtaggcctgggcatttctatttgcagcctgatcctttgcttgtccattgaggtcctagtctggagccaagtgacaaagacagagatcacctatttacgccatgtgtgcattgttaacattgcagccactttgctgatggcagatgtgtggttcattgtggcttcctttcttagtggcccaataacacaccacaagggatgtgtggcagccacattttttgttcatttcttttacctttctgtatttttctggatgcttgccaaggcactccttatcctctatggaatcatgattgttttccataccttgcccaagtcagtcctggtggcatctctgttttcagtgggctatggatgccctttggccattgctgccatcactgttgctgccactgaacctggcaaaggctatctacgacctgagatctgctggctcaactgggacatgaccaaagccctcctggccttcgtgatcccagctttggccatcgtggtagtaaacctgatcacagtcacactggtgattgtcaagacccagcgagctgccattggcaattccatgttccaggaagtgagagccattgtgagaatcagcaagaacatcgccatcctcacaccacttctgggactgacctggggatttggagtagccactgtcatcgatgacagatccctggccttccacattatcttctccctgctcaatgcattccagggtttcttcatcctagtgtttggaaccatcctggatccaaagataagagaagccttaaagggttgagtagcctctgcaaaaaggagctccagaatatcagagaatgcttcttctgaattatcttgtcatcccatcaaaggcccaagttaacaaaccaggctacatccctaacctaggaggaatggcagagcccaaaggagaaatgtgctcattcctgtcttcttgcttctggagaatatgtaggaagctcacacatgtggtgctgatggaggagggcgtgatgtgcagaaaggatgaaaggctcctctgtctaagctgttctgtgctactaaacatttctcgtccatcaactgtacatagctacatatgtcatgctgggcagccacagcaaacaaaaagacaaagggggccacaaccgtggtttttgttggggcttccatctctatgctgttgggtcacatttgtcttcagaaagcaacctctgtctcatcttggaaaaggcggcctgagatttcacctggctggattctgtgtgttgctgagggaggagcctcatgaatagtcacaaagagttgggctgactctaagtaggacattgcagattatttttttttttcaaaaggaatccactgccagtatatccactttttcaaatttaaatagattggattgtcaacttggtttaggcttagatacaacttccttggccatgaaccaaggggaaaagcatagagcttttgagacagaaagatgaccattttcagttaaggagatggaagtctggagttgtgagtcaatgctaatcgaggactgagccagaggtagaaacccaagtgtgctggctcccagccctgtacttcctcttcaagaccatatagacactgaaagatcttctgcctacactgacaatgtaaggtcaatcctcaccaacaatatgcttttttgatacctgggattggagagaggaaatatcacatttccaattcagagctgctctttttcttaacctgtatgtaaacaaattcaacattcaaaccaggtgttacctgatagaacagtattgtaggtagaagctctttgaggaaaaaaaaaaaacctctttacaaagcaaggacatagatgactgcagcagcatctaactagtggatgaaggcaaaggggcaatgggcagcctttaattatcccaacaagaagtcagtattgatgacgtttcattacaaaggagaaagtggggctcaccttaggtatgagtgcagtcccttccttccttccttccttccttccttccttccttccttccttccttccttccttccttccttccttccttccttcttccctccctccctccctctctctctctctttctccctttctctttctttctttttttctccctctctctctttctttctttctttgtttcttattacaaataatcttcctataagtaggaaagtttgagcagacaaaaagcatcaatctgaagttaaaaaaaatgcatcaacctggagaaatagtcatttttcaaatggcattgcttatcttgggacaacaaaagcatccttcacaaataaagtcagagagtggttttaatttaccatttaccaatagatttgtatgttcttttcaagagaaggggtgagatagacatagtcctggttttcctcaatgcaggcttaggtacaaagagatgtcacttacccagagtccatatattgaagtgaaaatggaatttcatgaagcaaatatagttataggatggtaactctggacaaattttataaaagatgaactccaattgcttcatttcacagataacagctctgagcactagggagagagggagggattggcctagcatttgctttgtgtcttgagcagtcacatctattatggaagtactcactactcagctatactcactccctgagacaggatggttggaaagaaaccccaccttagcttcatcattaaccaagaaaccccaaggatgcttagagaaaaactctggaattatttgggaattcctggaagaagctatgccctctctcctgcatcccaaagcccactctacaccatcttgaaaaatgtcaaggaactgcatggattaggttgactctggatgaccctgggtagagacacattcagtttcctgctgacaccgcaccaagaaagtgatttggtcaggtgactctaggagaaattggtactgatagtatccaaggcagatttttaagtatcagacttaatacataatgattcttgggaaagccatttaaatccctgagactttaagtggataaatgtaggtaaagtagtatagtacttggctcataataattgctcattcaaattcacatgttagttttagttgttttttttaaattagagtcctgtgaatacatgaacccacccacccacatgcaaacacaagcaaacacacagccatgaccccatgcataagtttggctgaagacaccctcatgggaactagttcactgacttccaaattaaagagttaagcatttgatttggtctgttcaacattaggggtatcagccagcaaaatctgttgagcttaccattgaaaaatcctttcattcattactgtggtcataatacacagttacctggccaggaaagagtacacatcacagggatctgctcactgcacgtgtgcctgagctctccctcactttctgccttcttcaagaattcttccctgattggtccaaccagaagcgctgattctccccacctgatttcctgtaattttataatctatgtccttcacttttgtgttatattgtttatttccttttggtctttttgtgtgcatatgtatatgttttggggaatggggtattcacttttgttactcactgtgttactcacttttgtatgcccatagtgcagagcatggtgccttgtacatagagtatgttcggtaaatatgtgcaataaaaagtcctttgattacacaa

SEQ ID NO: 105444 - DNA, 3240 bp, Homo sapiens
  Payload ID: 685
  Gene Symbol: ADGRF3
  Gene Name: adhesion G protein-coupled receptor F3
  Uniprot ID: Q8IZF5
  ENST ID: ENST00000311519
  CDS Start-End: 1-3240
atggtctgttcggctgccccactgctgctcctggccacaactcttcccctgctggggtcaccagttgcccaagcatcccaacctgtaagtgagactggggtgagacccagggaaggtctgcagaggcgacaatggggacccctgattgggagagacaaagcatggaatgaaaggatagacagacccttccctgcctgccccatccccctatcttctagctttggccgatggcccaagggccagacaatgtgggcccagacctccaccctcaccctgacagaggaggagttgggacagagtcaggctggaggggaatctggatctgggcagctcctggaccaagagaatggagcaggggaatcagcgctggtctccgtctatgtacatctggactttccagataagacctggccccctgaactctccaggacactgactctccctgctgcctcagcttcctcttccccaaggcctcttctcactggcctcagactcacaacagagtgtaatgtcaaccacaaggggaatttctattgtgcttgcctctctggctaccagtggaacaccagcatctgcctccattaccctccttgtcaaagcctccacaaccaccagccttgtggctgccttgtcttcagccatcccgaacccgggtactgccagttgctgccacctgggtcccctgtcacctgcctccctgcagtccccgggatcctcaacctgaactcccagctgcagatgcctggtgacacgctgagcctgactctccatctgagccaggaggccaccaacctgagctggttcctgaggcacccagggagccccagtcccatcctcctgcagccagggacacaggtgtctgtgacttccagccacggccaggctgccctcagcgtctccaacatgtcccatcactgggcaggtgagtacatgagctgcttcgaggcccagggcttcaagtggaacctgtatgaggtggtgagggtgcccttgaaggcgacagatgtggctcgacttccataccagctgtccatctcctgtgccacctcccctggcttccagctgagctgctgcatccccagcacaaacctggcctacaccgcggcctggagccctggagagggcagcaaagcttcctccttcaacgagtcaggctctcagtgctttgtgctggctgttcagcgctgcccgatggctgacaccacgtacgcttgtgacctgcagagcctgggcctggctccactcagggtccccatctccatcaccatcatccaggatggagacatcacctgccctgaggacgcctcggtgctcacctggaatgtcaccaaggctggccacgtggcacaggccccatgtcctgagagcaagaggggcatagtgaggaggctctgtggggctgacggagtctgggggccggtccacagcagctgcacagatgcgaggctcctggccttgttcactagaaccaagctgctgcaggcaggccagggcagtcctgctgaggaggtgccacagatcctggcacagctgccagggcaggcggcagaggcaagttcaccctccgacttactgaccctgctgagcaccatgaaatacgtggccaaggtggtggcagaggccagaatacagcttgaccgcagagccctgaagaatctcctgattgccacagacaaggtcctagatatggacaccaggtctctgtggaccctggcccaagcccggaagccctgggcaggctcgactctcctgctggctgtggagaccctggcatgcagcctgtgcccacaggaccaccccttcgccttcagcttacccaatgtgctgctgcagagccagctgtttggacccacgtttcctgctgactacagcatctccttccctactcggcccccactgcaggctcagattcccaggcactcactggccccattggtccgtaatggaactgaaataagtattactagcctggtgctgcgaaaactggaccaccttctgccctcaaactatggacaagggctgggggattccctctatgccactcctggcctggtccttgtcatttccatcatggcaggtgaccgggccttcagccagggagaggtcatcatggactttgggaacacagatggttcccctcactgtgtcttctgggatcacagtctcttccagggcagggggggttggtccaaagaagggtgccaggcacaggtggccagtgccagccccactgctcagtgcctctgccagcacctcactgccttctccgtcctcatgtccccacacactgttccggaagaacccgctctggcgctgctgactcaagtgggcttgggagcttccatactggcgctgcttgtgtgcctgggtgtgtactggctggtgtggagagtcgtggtgcggaacaagatctcctatttccgccacgccgccctgctcaacatggtgttctgcttgctggccgcagacacttgcttcctgggcgccccattcctctctccagggccccgaagcccgctctgccttgctgccgccttcctctgtcatttcctctacctggccacctttttctggatgctggcgcaggccctggtgttggcccaccagctgctctttgtctttcaccagctggcaaagcaccgagttctccccctcatggtgctcctgggctacctgtgcccactggggttggcaggtgtcaccctggggctctacctacctcaagggcaatacctgagggagggggaatgctggttggatgggaagggaggggcgttatacaccttcgtggggccagtgctggccatcataggcgtgaatgggctggtactagccatggccatgctgaagttgctgagaccttcgctgtcagagggacccccagcagagaagcgccaagctctgctgggggtgatcaaagccctgctcattcttacacccatctttggcctcacctgggggctgggcctggccactctgttagaggaagtctccacggtccctcattacatcttcaccattctcaacaccctccagggcgtcttcatcctattgtttggttgcctcatggacaggaagatacaagaagctttgcgcaaacgcttctgccgcgcccaagcccccagctccaccatctccctggtgagttgctgccttcagatcctcagctgtgcatccaagagcatgtcagaaggcattccatggccctcctcagaggacatgggcacagccagaagctga

SEQ ID NO: 105445 - DNA, 3896 bp, Homo sapiens
  Payload ID: 685
  Gene Symbol: ADGRF3
  Gene Name: adhesion G protein-coupled receptor F3
  Uniprot ID: Q8IZF5
  ENST ID: ENST00000333478
  CDS Start-End: 584-3205
ctccctttcatctggtggccctagcgccacaagctgccgcttaggaagtccctgccgggagcagaagtggagacatcagcaggatggcatcggcaagtcgctcccctcccgggcctcatctgccaaacgatcatctcctcctccgaagttgtatgcatgacaggcgagtggaaacttcactaaaatgaaggcgattgacacaacagaaggaactccatcctttcgggggcttacgaaaataataagtttaaaaaaaataggaagggaattccctcgctccatgatcactgagcgctctcctaaggaaaaggaaatctcccggggggtgccgactacgggcggcgggcttaggatgctcccacgctccccgacccccaatccccaggacccgcaggacctccggaggaacgcccgccagcccgcccggagccacgcggcacaaggtgacacggaccgcgccgcgcgggcccctcagccgcctgggcgaggccgggagcagggagaggggcatccgccggcccgcggtaccttgtacttatcaaagccagccagctgctccgggctcacgtattcgtagccagccatgacgacccgaaaactgagcgcccactcggcagcgactcccggctacaaggctgtgacacacaagcaccacaccggctgggcaaggatggcaaagactgggctgcccgagaagggacagagtcaggctggaggggaatctggatctgggcagctcctggaccaagagaatggagcaggggaatcagcgctggtctccgtctatgtacatctggactttccagataagacctggccccctgaactctccaggacactgactctccctgctgcctcagcttcctcttccccaaggcctcttctcactggcctcagactcacaacaggtgagtacatgagctgcttcgaggcccagggcttcaagtggaacctgtatgaggtggtgagggtgcccttgaaggcgacagatgtggctcgacttccataccagctgtccatctcctgtgccacctcccctggcttccagctgagctgctgcatccccagcacaaacctggcctacaccgcggcctggagccctggagagggcagcaaagcttcctccttcaacgagtcaggctctcagtgctttgtgctggctgttcagcgctgcccgatggctgacaccacgtacgcttgtgacctgcagagcctgggcctggctccactcagggtccccatctccatcaccatcatccaggatggagacatcacctgccctgaggacgcctcggtgctcacctggaatgtcaccaaggctggccacgtggcacaggccccatgtcctgagagcaagaggggcatagtgaggaggctctgtggggctgacggagtctgggggccggtccacagcagctgcacagatgcgaggctcctggccttgttcactagaaccaagctgctgcaggcaggccagggcagtcctgctgaggaggtgccacagatcctggcacagctgccagggcaggcggcagaggcaagttcaccctccgacttactgaccctgctgagcaccatgaaatacgtggccaaggtggtggcagaggccagaatacagcttgaccgcagagccctgaagaatctcctgattgccacagacaaggtcctagatatggacaccaggtctctgtggaccctggcccaagcccggaagccctgggcaggctcgactctcctgctggctgtggagaccctggcatgcagcctgtgcccacaggaccaccccttcgccttcagcttacccaatgtgctgctgcagagccagctgtttggacccacgtttcctgctgactacagcatctccttccctactcggcccccactgcaggctcagattcccaggcactcactggccccattggtccgtaatggaactgaaataagtattactagcctggtgctgcgaaaactggaccaccttctgccctcaaactatggacaagggctgggggattccctctatgccactcctggcctggtccttgtcatttccatcatggcaggtgaccgggccttcagccagggagaggtcatcatggactttgggaacacagatggttcccctcactgtgtcttctgggatcacagtctcttccagggcagggggggttggtccaaagaagggtgccaggcacaggtggccagtgccagccccactgctcagtgcctctgccagcacctcactgccttctccgtcctcatgtccccacacactgttccggaagaacccgctctggcgctgctgactcaagtgggcttgggagcttccatactggcgctgcttgtgtgcctgggtgtgtactggctggtgtggagagtcgtggtgcggaacaagatctcctatttccgccacgccgccctgctcaacatggtgttctgcttgctggccgcagacacttgcttcctgggcgccccattcctctctccagggccccgaagcccgctctgccttgctgccgccttcctctgtcatttcctctacctggccacctttttctggatgctggcgcaggccctggtgttggcccaccagctgctctttgtctttcaccagctggcaaagcaccgagttctccccctcatggtgctcctgggctacctgtgcccactggggttggcaggtgtcaccctggggctctacctacctcaagggcaatacctgagggagggggaatgctggttggatgggaagggaggggcgttatacaccttcgtggggccagtgctggccatcataggcgtgaatgggctggtactagccatggccatgctgaagttgctgagaccttcgctgtcagagggacccccagcagagaagcgccaagctctgctgggggtgatcaaagccctgctcattcttacacccatctttggcctcacctgggggctgggcctggccactctgttagaggaagtctccacggtccctcattacatcttcaccattctcaacaccctccagggcgtcttcatcctattgtttggttgcctcatggacaggaagatacaagaagctttgcgcaaacgcttctgccgcgcccaagcccccagctccaccatctccctggccacaaatgaaggctgcatcttggaacacagcaaaggaggaagcgacactgccaggaagacagatgcttcagagtgaaccacacacggacccatgttcctgcaagggagttgaggctgtgtgcttgaacccaccagatgagccctggcccaatgctctgaactcttcccgcctcccggagctcagcccttgagaaaggcaggcttatatttcccttagtgacactcatttatcttacagctcaccccttctcatttctaaagtatccagcaagaatagcaggaaaaattagctaaaggcacctaatgaataagcctgcctttgctccagaaataatcgacagatatcaaagtgcggaataattacaagtaaactttctcaaccagtttttaactacaacaatacatgttgtgaatgaatatatttgataaaaatggttttaattgacctattcagcgatttctgattatttctttttcaatagttatgaagaaaggatgacttacttgacaggaacctctgatctttcaaacattggagatgaagggcagaatttggtttgtcttttcaagtttaggaaaaggtgaagttaattggtccctctttctttaacctttaaaaaatcaatataaaatgtaagtttcttaaccatatccatgtatagaggcattgattgatatgagcacgttgtaagaataggttataaaaatttaaagtttaatataaatttatatcaattaataaagtttaatttatatttaaaaatgaa

SEQ ID NO: 105446 - DNA, 3353 bp, Homo sapiens
  Payload ID: 685
  Gene Symbol: ADGRF3
  Gene Name: adhesion G protein-coupled receptor F3
  Uniprot ID: Q8IZF5
  ENST ID: ENST00000421160
  CDS Start-End: 54-3047
tcttccttgcggaaatttgcatcgtgggcttgtagggactgcttcactgagccatggtctgttcggctgccccactgctgctcctggccacaactcttcccctgctggggtcaccagttgcccaagcatcccaacctggacagagtcaggctggaggggaatctggatctgggcagctcctggaccaagagaatggagcaggggaatcagcgctggtctccgtctatgtacatctggactttccagataagacctggccccctgaactctccaggacactgactctccctgctgcctcagcttcctcttccccaaggcctcttctcactggcctcagactcacaacagagtgtaatgtcaaccacaaggggaatttctattgtgcttgcctctctggctaccagtggaacaccagcatctgcctccattaccctccttgtcaaagcctccacaaccaccagccttgtggctgccttgtcttcagccatcccgaacccgggtactgccagttgctgccacctgggtcccctgtcacctgcctccctgcagtccccgggatcctcaacctgaactcccagctgcagatgcctggtgacacgctgagcctgactctccatctgagccaggaggccaccaacctgagctggttcctgaggcacccagggagccccagtcccatcctcctgcagccagggacacaggtgtctgtgacttccagccacggccaggctgccctcagcgtctccaacatgtcccatcactgggcaggtgagtacatgagctgcttcgaggcccagggcttcaagtggaacctgtatgaggtggtgagggtgcccttgaaggcgacagatgtggctcgacttccataccagctgtccatctcctgtgccacctcccctggcttccagctgagctgctgcatccccagcacaaacctggcctacaccgcggcctggagccctggagagggcagcaaagcttcctccttcaacgagtcaggctctcagtgctttgtgctggctgttcagcgctgcccgatggctgacaccacgtacgcttgtgacctgcagagcctgggcctggctccactcagggtccccatctccatcaccatcatccaggatggagacatcacctgccctgaggacgcctcggtgctcacctggaatgtcaccaaggctggccacgtggcacaggccccatgtcctgagagcaagaggggcatagtgaggaggctctgtggggctgacggagtctgggggccggtccacagcagctgcacagatgcgaggctcctggccttgttcactagaaccaagctgctgcaggcaggccagggcagtcctgctgaggaggtgccacagatcctggcacagctgccagggcaggcggcagaggcaagttcaccctccgacttactgaccctgctgagcaccatgaaatacgtggccaaggtggtggcagaggccagaatacagcttgaccgcagagccctgaagaatctcctgattgccacagacaaggtcctagatatggacaccaggtctctgtggaccctggcccaagcccggaagccctgggcaggctcgactctcctgctggctgtggagaccctggcatgcagcctgtgcccacaggaccaccccttcgccttcagcttacccaatgtgctgctgcagagccagctgtttggacccacgtttcctgctgactacagcatctccttccctactcggcccccactgcaggctcagattcccaggcactcactggccccattggtccgtaatggaactgaaataagtattactagcctggtgctgcgaaaactggaccaccttctgccctcaaactatggacaagggctgggggattccctctatgccactcctggcctggtccttgtcatttccatcatggcaggtgaccgggccttcagccagggagaggtcatcatggactttgggaacacagatggttcccctcactgtgtcttctgggatcacagtctcttccagggcagggggggttggtccaaagaagggtgccaggcacaggtggccagtgccagccccactgctcagtgcctctgccagcacctcactgccttctccgtcctcatgtccccacacactgttccggaagaacccgctctggcgctgctgactcaagtgggcttgggagcttccatactggcgctgcttgtgtgcctgggtgtgtactggctggtgtggagagtcgtggtgcggaacaagatctcctatttccgccacgccgccctgctcaacatggtgttctgcttgctggccgcagacacttgcttcctgggcgccccattcctctctccagggccccgaagcccgctctgccttgctgccgccttcctctgtcatttcctctacctggccacctttttctggatgctggcgcaggccctggtgttggcccaccagctgctctttgtctttcaccagctggcaaagcaccgagttctccccctcatggtgctcctgggctacctgtgcccactggggttggcaggtgtcaccctggggctctacctacctcaagggcaatacctgagggagggggaatgctggttggatgggaagggaggggcgttatacaccttcgtggggccagtgctggccatcataggcgtgaatgggctggtactagccatggccatgctgaagttgctgagaccttcgctgtcagagggacccccagcagagaagcgccaagctctgctgggggtgatcaaagccctgctcattcttacacccatctttggcctcacctgggggctgggcctggccactctgttagaggaagtctccacggtccctcattacatcttcaccattctcaacaccctccagggcgtcttcatcctattgtttggttgcctcatggacaggaagatacaagaagctttgcgcaaacgcttctgccgcgcccaagcccccagctccaccatctccctggccacaaatgaaggctgcatcttggaacacagcaaaggaggaagcgacactgccaggtgagaactaggctttctcaggggcagcgtaagcagggtggattgaggacggtgtggcaaagggcctcctggcaaagtgctggagagaagcctcctctttctatacccagcccacaccaaagggtaggaaacaggtttttctagggtagccattgctagatggctgggagacggtggaaatgtcagagagcagaaagcatagcaccttatcttgctttccaagaaagcaagaagtttcaccaccaccagtccttgacttggtttctctgaaaattccttttcacattatcacacatttaattatcatgag

SEQ ID NO: 105447 - DNA, 3620 bp, Homo sapiens
  Payload ID: 685
  Gene Symbol: ADGRF3
  Gene Name: adhesion G protein-coupled receptor F3
  ENST ID: ENST00000435303
  CDS Start-End: 510-872
atcagcaggatggcatcggcaagtcgctcccctcccgggcctcatctgccaaacgatcatctcctcctccgaagttgtatgcatgacaggcgagtggaaacttcactaaaatgaaggcgattgacacaacagaaggaactccatcctttcgggggcttacgaaaataataagtttaaaaaaaataggaagggaattccctcgctccatgatcactgagcgctctcctaaggaaaaggaaatctcccggggggtgccgactacgggcggcgggcttaggatgctcccacgctccccgacccccaatccccaggacccgcaggacctccggaggaacgcccgccagcccgcccggagccacgcggcacaaggtgacacggaccgcgccgcgcgggcccctcagccgcctgggcgaggccgggagcagggagaggggcatccgccggcccgcggtaccttgtacttatcaaagccagccagctgctccgggctcacgtattcgtagccagccatgacgacccgaaaactgagcgcccactcggcagcgactcccggctacaaggctgtgacacacaagcaccacaccggctgggcaaggatggcaaagactgggctgcccgagaagcttcctccttcaacgagtcaggctctcagtgctttgtgctggctgttcagcgctgcccgatggctgacaccacgtacgcttgtgacctgcagagcctgggcctggctccactcagggtccccatctccatcaccatcatccaggatggagacatcacctgccctgaggacgcctcggtgctcacctggaatgtcaccaaggctggccacgtggcacaggccccatgtcctgagagcaagaggggcatagtgaggaggctctgtggggctgacggagtctgggggccggtccacagcagctgcacagatgcgaggctcctggccttgttcactagaaccaagctgctgcaggcaggccagggcagtcctgctgaggaggtgccacagatcctggcacagctgccagggcaggcggcagaggcaagttcaccctccgacttactgaccctgctgagcaccatgaaatacgtggccaaggtggtggcagaggccagaatacagcttgaccgcagagccctgaagaatctcctgattgccacagacaaggtcctagatatggacaccaggtctctgtggaccctggcccaagcccggaagccctgggcaggctcgactctcctgctggctgtggagaccctggcatgcagcctgtgcccacaggaccaccccttcgccttcagcttacccaatgtgctgctgcagagccagctgtttggacccacgtttcctgctgactacagcatctccttccctactcggcccccactgcaggctcagattcccaggcactcactggccccattggtccgtaatggaactgaaataagtattactagcctggtgctgcgaaaactggaccaccttctgccctcaaactatggacaagggctgggggattccctctatgccactcctggcctggtccttgtcatttccatcatggcaggtgaccgggccttcagccagggagaggtcatcatggactttgggaacacagatggttcccctcactgtgtcttctgggatcacagtctcttccagggcagggggggttggtccaaagaagggtgccaggcacaggtggccagtgccagccccactgctcagtgcctctgccagcacctcactgccttctccgtcctcatgtccccacacactgttccggaagaacccgctctggcgctgctgactcaagtgggcttgggagcttccatactggcgctgcttgtgtgcctgggtgtgtactggctggtgtggagagtcgtggtgcggaacaagatctcctatttccgccacgccgccctgctcaacatggtgttctgcttgctggccgcagacacttgcttcctgggcgccccattcctctctccagggccccgaagcccgctctgccttgctgccgccttcctctgtcatttcctctacctggccacctttttctggatgctggcgcaggccctggtgttggcccaccagctgctctttgtctttcaccagctggcaaagcaccgagttctccccctcatggtgctcctgggctacctgtgcccactggggttggcaggtgtcaccctggggctctacctacctcaagggcaatacctgagggagggggaatgctggttggatgggaagggaggggcgttatacaccttcgtggggccagtgctggccatcataggcgtgaatgggctggtactagccatggccatgctgaagttgctgagaccttcgctgtcagagggacccccagcagagaagcgccaagctctgctgggggtgatcaaagccctgctcattcttacacccatctttggcctcacctgggggctgggcctggccactctgttagaggaagtctccacggtccctcattacatcttcaccattctcaacaccctccagggcgtcttcatcctattgtttggttgcctcatggacaggaagatacaagaagctttgcgcaaacgcttctgccgcgcccaagcccccagctccaccatctccctggccacaaatgaaggctgcatcttggaacacagcaaaggaggaagcgacactgccaggaagacagatgcttcagagtgaaccacacacggacccatgttcctgcaagggagttgaggctgtgtgcttgaacccaccagatgagccctggcccaatgctctgaactcttcccgcctcccggagctcagcccttgagaaaggcaggcttatatttcccttagtgacactcatttatcttacagctcaccccttctcatttctaaagtatccagcaagaatagcaggaaaaattagctaaaggcacctaatgaataagcctgcctttgctccagaaataatcgacagatatcaaagtgcggaataattacaagtaaactttctcaaccagtttttaactacaacaatacatgttgtgaatgaatatatttgataaaaatggttttaattgacctattcagcgatttctgattatttctttttcaatagttatgaagaaaggatgacttacttgacaggaacctctgatctttcaaacattggagatgaagggcagaatttggtttgtcttttcaagtttaggaaaaggtgaagttaattggtccctctttctttaacctttaaaaaatcaatataaaatgtaagtttcttaaccatatccatgtatagaggcattgattgatatgagcacgttgtaagaataggttataaaaatttaaagtttaatataaatttatatcaattaataaagtttaatttatatttaaaaatgaatactagaagaaaatctttttgaagacaccaagatatctatctggctgaattaacttatggaattcacaagaggaagatgacaggattctgagaaatttttaaactagatacgtgaaaaaagtctgatgaatcggtctttgttaattatgcaattcatggatattttttataaaatgggacgggggcattttctgttaaaataaaaatggttatgctatc

SEQ ID NO: 105448 - DNA, 3493 bp, Homo sapiens
  Payload ID: 685
  Gene Symbol: ADGRF3
  Gene Name: adhesion G protein-coupled receptor F3
  Uniprot ID: Q8IZF5
  ENST ID: ENST00000447444
  CDS Start-End: 584-3205
ctccctttcatctggtggccctagcgccacaagctgccgcttaggaagtccctgccgggagcagaagtggagacatcagcaggatggcatcggcaagtcgctcccctcccgggcctcatctgccaaacgatcatctcctcctccgaagttgtatgcatgacaggcgagtggaaacttcactaaaatgaaggcgattgacacaacagaaggaactccatcctttcgggggcttacgaaaataataagtttaaaaaaaataggaagggaattccctcgctccatgatcactgagcgctctcctaaggaaaaggaaatctcccggggggtgccgactacgggcggcgggcttaggatgctcccacgctccccgacccccaatccccaggacccgcaggacctccggaggaacgcccgccagcccgcccggagccacgcggcacaaggtgacacggaccgcgccgcgcgggcccctcagccgcctgggcgaggccgggagcagggagaggggcatccgccggcccgcggtaccttgtacttatcaaagccagccagctgctccgggctcacgtattcgtagccagccatgacgacccgaaaactgagcgcccactcggcagcgactcccggctacaaggctgtgacacacaagcaccacaccggctgggcaaggatggcaaagactgggctgcccgagaagggacagagtcaggctggaggggaatctggatctgggcagctcctggaccaagagaatggagcaggggaatcagcgctggtctccgtctatgtacatctggactttccagataagacctggccccctgaactctccaggacactgactctccctgctgcctcagcttcctcttccccaaggcctcttctcactggcctcagactcacaacaggtgagtacatgagctgcttcgaggcccagggcttcaagtggaacctgtatgaggtggtgagggtgcccttgaaggcgacagatgtggctcgacttccataccagctgtccatctcctgtgccacctcccctggcttccagctgagctgctgcatccccagcacaaacctggcctacaccgcggcctggagccctggagagggcagcaaagcttcctccttcaacgagtcaggctctcagtgctttgtgctggctgttcagcgctgcccgatggctgacaccacgtacgcttgtgacctgcagagcctgggcctggctccactcagggtccccatctccatcaccatcatccaggatggagacatcacctgccctgaggacgcctcggtgctcacctggaatgtcaccaaggctggccacgtggcacaggccccatgtcctgagagcaagaggggcatagtgaggaggctctgtggggctgacggagtctgggggccggtccacagcagctgcacagatgcgaggctcctggccttgttcactagaaccaagctgctgcaggcaggccagggcagtcctgctgaggaggtgccacagatcctggcacagctgccagggcaggcggcagaggcaagttcaccctccgacttactgaccctgctgagcaccatgaaatacgtggccaaggtggtggcagaggccagaatacagcttgaccgcagagccctgaagaatctcctgattgccacagacaaggtcctagatatggacaccaggtctctgtggaccctggcccaagcccggaagccctgggcaggctcgactctcctgctggctgtggagaccctggcatgcagcctgtgcccacaggaccaccccttcgccttcagcttacccaatgtgctgctgcagagccagctgtttggacccacgtttcctgctgactacagcatctccttccctactcggcccccactgcaggctcagattcccaggcactcactggccccattggtccgtaatggaactgaaataagtattactagcctggtgctgcgaaaactggaccaccttctgccctcaaactatggacaagggctgggggattccctctatgccactcctggcctggtccttgtcatttccatcatggcaggtgaccgggccttcagccagggagaggtcatcatggactttgggaacacagatggttcccctcactgtgtcttctgggatcacagtctcttccagggcagggggggttggtccaaagaagggtgccaggcacaggtggccagtgccagccccactgctcagtgcctctgccagcacctcactgccttctccgtcctcatgtccccacacactgttccggaagaacccgctctggcgctgctgactcaagtgggcttgggagcttccatactggcgctgcttgtgtgcctgggtgtgtactggctggtgtggagagtcgtggtgcggaacaagatctcctatttccgccacgccgccctgctcaacatggtgttctgcttgctggccgcagacacttgcttcctgggcgccccattcctctctccagggccccgaagcccgctctgccttgctgccgccttcctctgtcatttcctctacctggccacctttttctggatgctggcgcaggccctggtgttggcccaccagctgctctttgtctttcaccagctggcaaagcaccgagttctccccctcatggtgctcctgggctacctgtgcccactggggttggcaggtgtcaccctggggctctacctacctcaagggcaatacctgagggagggggaatgctggttggatgggaagggaggggcgttatacaccttcgtggggccagtgctggccatcataggcgtgaatgggctggtactagccatggccatgctgaagttgctgagaccttcgctgtcagagggacccccagcagagaagcgccaagctctgctgggggtgatcaaagccctgctcattcttacacccatctttggcctcacctgggggctgggcctggccactctgttagaggaagtctccacggtccctcattacatcttcaccattctcaacaccctccagggcgtcttcatcctattgtttggttgcctcatggacaggaagatacaagaagctttgcgcaaacgcttctgccgcgcccaagcccccagctccaccatctccctggccacaaatgaaggctgcatcttggaacacagcaaaggaggaagcgacactgccaggaagacagatgcttcagagtgaaccacacacggacccatgttcctgcaagggagttgaggctgtgtgcttgaacccaccagatgagccctggcccaatgctctgaactcttcccgcctcccggagctcagcccttgagaaagttatgaagaaaggatgacttacttgacaggaacctctgatctttcaaacattggagatgaagggcagaatttggtttgtcttttcaagtttaggaaaaggtgaagttaattggtccctctttctttaacctttaaaaaatcaatataaaatgtaagtttcttaaccat

SEQ ID NO: 105449 - DNA, 575 bp, Homo sapiens
  Payload ID: 685
  Gene Symbol: ADGRF3
  Gene Name: adhesion G protein-coupled receptor F3
  ENST ID: ENST00000433584
  CDS Start-End: 313-575
ccctgccgggagcagaagtggagacatcagcaggatggcatcggcaagtcgctcccctcccgggcctcatctgccaaacgatcatctcctcctccgaagttgtatgcatgacaggacccgcaggacctccggaggaacgcccgccagcccgcccggagccacgcggcacaaggtgacacggaccgcgccgcgcgggcccctcagccgcctgggcgaggccgggagcagggagaggggcatccgccggcccgcggtaccttgtacttatcaaagccagccagctgctccgggctcacgtattcgtagccagccatgacgacccgaaaactgagcgcccactcggcagcgactcccggctacaaggctgtgacacacaagcaccacaccggctgggcaaggatggcaaagactgggctgcccgagaagggacagagtcaggctggaggggaatctggatctgggcagctcctggaccaagagaatggagcaggggaatcagcgctggtctccgtctatgtacatctggactttccagataagacctggccccctgaactctccaggacactgactct

SEQ ID NO: 105450 - DNA, 3162 bp, Homo sapiens
  Payload ID: 686
  Gene Symbol: ADGRF4
  Gene Name: adhesion G protein-coupled receptor F4
  Uniprot ID: Q8IZF3
  ENST ID: ENST00000283303
  CDS Start-End: 259-2346
acaagccttgaaactgtgggtaactttacagttctcagatcggcttctcgcaacaggcagtcagttctcactgggccccttggactcccatttcaaaaatggagaagacagatcacagccactgaccagggaccgtgggaggtgccacgtgatggtgaggcatcatgctagggagctgagctctgaccttcctgctgggtgattctccacctctgggctgctagatctacttcctggatgccgtgaagatcctcatgtatgaaaatgaagtcccaggcaaccatgatttgctgcttagtgttctttctgtccacagaatgttcccactatagatccaagattcacctaaaagctggagataaacttcaaagccctgaagggaaacccaagactggaaggatccaagagaaatgcgaaggaccttgtatttcttcttccaactgcagccagccctgtgctaaggactttcatggagaaataggatttacatgtaatcaaaaaaagtggcaaaaatcagctgaaacatgtacaagcctttctgtggaaaaactctttaaggactcaactggtgcatctcgcctttctgtagcagcaccatctatacctctgcatattctagactttcgagctccagagaccattgagagtgtagctcaaggaatccgtaagaactgcccctttgattatgcctgcatcactgacatggtgaaatcatcagaaacaacatctggaaatattgcatttatagtggagttattaaaaaatatttctacagacttgtctgataatgttactcgagagaaaatgaagagctatagtgaagtggccaaccacatcctcgacacagcagccatttcaaactgggctttcattcccaacaaaaatgccagctcggatttgttgcagtcagtgaatttgtttgccagacaactccacatccacaataattctgagaacattgtgaatgaactcttcattcagacaaaagggtttcacatcaaccataatacctcagagaaaagcctcaatttctccatgagcatgaacaataccacagaagatatcttaggaatggtacagattcccaggcaagagctaaggaagctgtggccaaatgcatcccaagccattagcatagctttcccaaccttgggggctatcctgagagaagcccacttgcaaaatgtgagtcttcccagacaggtaaatggtctggtgctatcagtggttttaccagaaaggttgcaagaaatcatactcaccttcgaaaagatcaataaaacccgcaatgccagagcccagtgtgttggctggcactccaagaaaaggagatgggatgagaaagcgtgccaaatgatgttggatatcaggaacgaagtgaaatgccgctgtaactacaccagtgtggtgatgtctttttccattctcatgtcctccaaatcgatgaccgacaaagttctggactacatcacctgcattgggctcagcgtctcaatcctaagcttggttctttgcctgatcattgaagccacagtgtggtcccgggtggttgtgacggagatatcatacatgcgtcacgtgtgcatcgtgaatatagcagtgtcccttctgactgccaatgtgtggtttatcataggctctcactttaacattaaggcccaggactacaacatgtgtgttgcagtgacatttttcagccactttttctacctctctctgtttttctggatgctcttcaaagcattgctcatcatttatggaatattggtcattttccgtaggatgatgaagtcccgaatgatggtcattggctttgccattggctatgggtgcccattgatcattgctgtcactacagttgctatcacagagccagagaaaggctacatgagacctgaggcctgttggcttaactgggacaataccaaagcccttttagcatttgccatcccggcgttcgtcattgtggctgtaaatctgattgtggttttggttgttgctgtcaacactcagaggccctctattggcagttccaagtctcaggatgtggtcataattatgaggatcagcaaaaatgttgccatcctcactccactgctgggactgacctggggttttggaatagccactctcatagaaggcacttccttgacgttccatataatttttgccttgctcaatgctttccagggttttttcatcctgctgtttggaaccattatggatcacaagataagagatgctttgaggatgaggatgtcttcactgaaggggaaatcgagggcagctgagaatgcatcactaggcccaaccaatggatctaaattaatgaatcgtcaaggatgaaatgctgccccatttctcatggatgtcctgagaccaagaggggagatccaggagaaagaggccatggaaagcaggctggagtgaggaggaatggtcatgcttccttggaagactttctcttcttgtcaggagtgactcccaagctcttggtcggccgaagaaaaactgaggataacatttgctgactgggctttaaggagcatgatttatggaccccttaacctacccgtgccctgcaagaggctggcttcttggtcaatcttgactagattaagagtcaatctgcaagccattttatggtctccctggccagctgggggctgtagggccctgctgggcttggtcgtctttcactcctgaggcctgctctgtggctccatagctcagtcctccatcactctgcgtggatcctgggtactttggacagtgagggttcgatccaattttaggggtagggttgggggtgggagtgggagtgtgggttggcaggaggaagaatgagtctactttggagacaattaagtcatggtacgtttcctaaagatagggaacggaagaaaagcaagagaactgtttaatatgctgattattttagtctattttagaccttgagtaaactaatttagcttctaggatccaagtttccttatttgtgaaacaggaaaaaaaaattcttgtaggtattactgtttgtgtgtttgagtttactgcacatgtttgtgtttgtgtatatgtgtcttttaaaaatactatatataaagaagattctggttgttattttagacataaacgaatatatgtacctttcacaacttg

SEQ ID NO: 105451 - DNA, 3074 bp, Homo sapiens
  Payload ID: 686
  Gene Symbol: ADGRF4
  Gene Name: adhesion G protein-coupled receptor F4
  Uniprot ID: Q8IZF3
  ENST ID: ENST00000327753
  CDS Start-End: 171-2258
acaagccttgaaactgtgggtaactttacagttctcagatcggcttctcgcaacaggcagtcagttctcactgggccccttggactcccatttcaaaaatggagaagacagatcacagccactgaccagggaccgtgggaggtgccacgtgatggtgaagatcctcatgtatgaaaatgaagtcccaggcaaccatgatttgctgcttagtgttctttctgtccacagaatgttcccactatagatccaagattcacctaaaagctggagataaacttcaaagccctgaagggaaacccaagactggaaggatccaagagaaatgcgaaggaccttgtatttcttcttccaactgcagccagccctgtgctaaggactttcatggagaaataggatttacatgtaatcaaaaaaagtggcaaaaatcagctgaaacatgtacaagcctttctgtggaaaaactctttaaggactcaactggtgcatctcgcctttctgtagcagcaccatctatacctctgcatattctagactttcgagctccagagaccattgagagtgtagctcaaggaatccgtaagaactgcccctttgattatgcctgcatcactgacatggtgaaatcatcagaaacaacatctggaaatattgcatttatagtggagttattaaaaaatatttctacagacttgtctgataatgttactcgagagaaaatgaagagctatagtgaagtggccaaccacatcctcgacacagcagccatttcaaactgggctttcattcccaacaaaaatgccagctcggatttgttgcagtcagtgaatttgtttgccagacaactccacatccacaataattctgagaacattgtgaatgaactcttcattcagacaaaagggtttcacatcaaccataatacctcagagaaaagcctcaatttctccatgagcatgaacaataccacagaagatatcttaggaatggtacagattcccaggcaagagctaaggaagctgtggccaaatgcatcccaagccattagcatagctttcccaaccttgggggctatcctgagagaagcccacttgcaaaatgtgagtcttcccagacaggtaaatggtctggtgctatcagtggttttaccagaaaggttgcaagaaatcatactcaccttcgaaaagatcaataaaacccgcaatgccagagcccagtgtgttggctggcactccaagaaaaggagatgggatgagaaagcgtgccaaatgatgttggatatcaggaacgaagtgaaatgccgctgtaactacaccagtgtggtgatgtctttttccattctcatgtcctccaaatcgatgaccgacaaagttctggactacatcacctgcattgggctcagcgtctcaatcctaagcttggttctttgcctgatcattgaagccacagtgtggtcccgggtggttgtgacggagatatcatacatgcgtcacgtgtgcatcgtgaatatagcagtgtcccttctgactgccaatgtgtggtttatcataggctctcactttaacattaaggcccaggactacaacatgtgtgttgcagtgacatttttcagccactttttctacctctctctgtttttctggatgctcttcaaagcattgctcatcatttatggaatattggtcattttccgtaggatgatgaagtcccgaatgatggtcattggctttgccattggctatgggtgcccattgatcattgctgtcactacagttgctatcacagagccagagaaaggctacatgagacctgaggcctgttggcttaactgggacaataccaaagcccttttagcatttgccatcccggcgttcgtcattgtggctgtaaatctgattgtggttttggttgttgctgtcaacactcagaggccctctattggcagttccaagtctcaggatgtggtcataattatgaggatcagcaaaaatgttgccatcctcactccactgctgggactgacctggggttttggaatagccactctcatagaaggcacttccttgacgttccatataatttttgccttgctcaatgctttccagggttttttcatcctgctgtttggaaccattatggatcacaagataagagatgctttgaggatgaggatgtcttcactgaaggggaaatcgagggcagctgagaatgcatcactaggcccaaccaatggatctaaattaatgaatcgtcaaggatgaaatgctgccccatttctcatggatgtcctgagaccaagaggggagatccaggagaaagaggccatggaaagcaggctggagtgaggaggaatggtcatgcttccttggaagactttctcttcttgtcaggagtgactcccaagctcttggtcggccgaagaaaaactgaggataacatttgctgactgggctttaaggagcatgatttatggaccccttaacctacccgtgccctgcaagaggctggcttcttggtcaatcttgactagattaagagtcaatctgcaagccattttatggtctccctggccagctgggggctgtagggccctgctgggcttggtcgtctttcactcctgaggcctgctctgtggctccatagctcagtcctccatcactctgcgtggatcctgggtactttggacagtgagggttcgatccaattttaggggtagggttgggggtgggagtgggagtgtgggttggcaggaggaagaatgagtctactttggagacaattaagtcatggtacgtttcctaaagatagggaacggaagaaaagcaagagaactgtttaatatgctgattattttagtctattttagaccttgagtaaactaatttagcttctaggatccaagtttccttatttgtgaaacaggaaaaaaaaattcttgtaggtattactgtttgtgtgtttgagtttactgcacatgtttgtgtttgtgtatatgtgtcttttaaaaatactatatataaagaagattctggttgttattttagacataaacgaatatatgtacctttcacaacttg

SEQ ID NO: 105452 - DNA, 3075 bp, Homo sapiens
  Payload ID: 686
  Gene Symbol: ADGRF4
  Gene Name: adhesion G protein-coupled receptor F4
  ENST ID: ENST00000371220
  CDS Start-End: 1-2259
atgtacactggtccctgtaaggtcctccacctctcatctgggcttttaccaaatagcggtaggtttggtattgttctcagcgatgaataccaggttgtaacatctttatggtgccagctgtatacaacccatgcacctcaacaggcctctggaatgcttcttctgaattatcttgtcatcccatcaaaggcccaagttaacaaaccaggctacatccctaacctaggagaatgttcccactatagatccaagattcacctaaaagctggagataaacttcaaagccctgaagggaaacccaagactggaaggatccaagagaaatgcgaaggaccttgtatttcttcttccaactgcagccagccctgtgctaaggactttcatggagaaataggatttacatgtaatcaaaaaaagtggcaaaaatcagctgaaacatgtacaagcctttctgtggaaaaactctttaaggactcaactggtgcatctcgcctttctgtagcagcaccatctatacctctgcatattctagactttcgagctccagagaccattgagagtgtagctcaaggaatccgtaagaactgcccctttgattatgcctgcatcactgacatggtgaaatcatcagaaacaacatctggaaatattgcatttatagtggagttattaaaaaatatttctacagacttgtctgataatgttactcgagagaaaatgaagagctatagtgaagtggccaaccacatcctcgacacagcagccatttcaaactgggctttcattcccaacaaaaatgccagctcggatttgttgcagtcagtgaatttgtttgccagacaactccacatccacaataattctgagaacattgtgaatgaactcttcattcagacaaaagggtttcacatcaaccataatacctcagagaaaagcctcaatttctccatgagcatgaacaataccacagaagatatcttaggaatggtacagattcccaggcaagagctaaggaagctgtggccaaatgcatcccaagccattagcatagctttcccaaccttgggggctatcctgagagaagcccacttgcaaaatgtgagtcttcccagacaggtaaatggtctggtgctatcagtggttttaccagaaaggttgcaagaaatcatactcaccttcgaaaagatcaataaaacccgcaatgccagagcccagtgtgttggctggcactccaagaaaaggagatgggatgagaaagcgtgccaaatgatgttggatatcaggaacgaagtgaaatgccgctgtaactacaccagtgtggtgatgtctttttccattctcatgtcctccaaatcgatgaccgacaaagttctggactacatcacctgcattgggctcagcgtctcaatcctaagcttggttctttgcctgatcattgaagccacagtgtggtcccgggtggttgtgacggagatatcatacatgcgtcacgtgtgcatcgtgaatatagcagtgtcccttctgactgccaatgtgtggtttatcataggctctcactttaacattaaggcccaggactacaacatgtgtgttgcagtgacatttttcagccactttttctacctctctctgtttttctggatgctcttcaaagcattgctcatcatttatggaatattggtcattttccgtaggatgatgaagtcccgaatgatggtcattggctttgccattggctatgggtgcccattgatcattgctgtcactacagttgctatcacagagccagagaaaggctacatgagacctgaggcctgttggcttaactgggacaataccaaagcccttttagcatttgccatcccggcgttcgtcattgtggctgtaaatctgattgtggttttggttgttgctgtcaacactcagaggccctctattggcagttccaagtctcaggatgtggtcataattatgaggatcagcaaaaatgttgccatcctcactccactgctgggactgacctggggttttggaatagccactctcatagaaggcacttccttgacgttccatataatttttgccttgctcaatgctttccagggttttttcatcctgctgtttggaaccattatggatcacaagataagagatgctttgaggatgaggatgtcttcactgaaggggaaatcgagggcagctgagaatgcatcactaggcccaaccaatggatctaaattaatgaatcgtcaaggatgaaatgctgccccatttctcatggatgtcctgagaccaagaggggagatccaggagaaagaggccatggaaagcaggctggagtgaggaggaatggtcatgcttccttggaagactttctcttcttgtcaggagtgactcccaagctcttggtcggccgaagaaaaactgaggataacatttgctgactgggctttaaggagcatgatttatggaccccttaacctacccgtgccctgcaagaggctggcttcttggtcaatcttgactagattaagagtcaatctgcaagccattttatggtctccctggccagctgggggctgtagggccctgctgggcttggtcgtctttcactcctgaggcctgctctgtggctccatagctcagtcctccatcactctgcgtggatcctgggtactttggacagtgagggttcgatccaattttaggggtagggttgggggtgggagtgggagtgtgggttggcaggaggaagaatgagtctactttggagacaattaagtcatggtacgtttcctaaagatagggaacggaagaaaagcaagagaactgtttaatatgctgattattttagtctattttagaccttgagtaaactaatttagcttctaggatccaagtttccttatttgtgaaacaggaaaaaaaaattcttgtaggtattactgtttgtgtgtttgagtttactgcacatgtttgtgtttgtgtatatgtgtcttttaaaaatactatatataaagaagattctggttgttattttagacataaacgaatatatgtacctttcacaacttg

SEQ ID NO: 105453 - DNA, 5668 bp, Homo sapiens
  Payload ID: 687
  Gene Symbol: ADGRF5
  Gene Name: adhesion G protein-coupled receptor F5
  Uniprot ID: Q8IZF2
  ENST ID: ENST00000265417
  CDS Start-End: 235-4275
agagaacagaaggcagttcacctctgctcccgacagcctgggaacccgcaagagccccagcatttgaagtctggtcttgtgaaaccccaccctcctctggctgtgtgattgaatgggatgccctcgaggttcacctcacctgagagggttttgggcagatcagcagtaaggtgttaaattttagaagcctgaaaactccagaagagaaaggccaaccaactcaaacttgaagacatgaaatccccaaggagaaccactttgtgcctcatgtttattgtgatttattcttccaaagctgcactgaactggaattacgagtctactattcatcctttgagtcttcatgaacatgaaccagctggtgaagaggcactgaggcaaaaacgagccgttgccacaaaaagtcctacggctgaagaatacactgttaatattgagatcagttttgaaaatgcatccttcctggatcctatcaaagcctacttgaacagcctcagttttccaattcatgggaataacactgaccaaattaccgacattttgagcataaatgtgacaacagtctgcagacctgctggaaatgaaatctggtgctcctgcgagacaggttatgggtggcctcgggaaaggtgtcttcacaatctcatttgtcaagagcgtgacgtcttcctcccagggcaccattgcagttgccttaaagaactgcctcccaatggacctttttgcctgcttcaggaagatgttaccctgaacatgagagtcagactaaatgtaggctttcaagaagacctcatgaacacttcctccgccctctataggtcctacaagaccgacttggaaacagcgttccggaagggttacggaattttaccaggcttcaagggcgtgactgtgacagggttcaagtctggaagtgtggttgtgacatatgaagtcaagactacaccaccatcacttgagttaatacataaagccaatgaacaagttgtacagagcctcaatcagacctacaaaatggactacaactcctttcaagcagttactatcaatgaaagcaatttctttgtcacaccagaaatcatctttgaaggggacacagtcagtctggtgtgtgaaaaggaagttttgtcctccaatgtgtcttggcgctatgaagaacagcagttggaaatccagaacagcagcagattctcgatttacaccgcacttttcaacaacatgacttcggtgtccaagctcaccatccacaacatcactccaggtgatgcaggtgaatatgtttgcaaactgatattagacatttttgaatatgagtgcaagaagaaaatagatgttatgcccatccaaattttggcaaatgaagaaatgaaggtgatgtgcgacaacaatcctgtatctttgaactgctgcagtcagggtaatgttaattggagcaaagtagaatggaagcaggaaggaaaaataaatattccaggaacccctgagacagacatagattctagctgcagcagatacaccctcaaggctgatggaacccagtgcccaagcgggtcgtctggaacaacagtcatctacacttgtgagttcatcagtgcctatggagccagaggcagtgcaaacataaaagtgacattcatctctgtggccaatctaacaataaccccggacccaatttctgtttctgagggacaaaacttttctataaaatgcatcagtgatgtgagtaactatgatgaggtttattggaacacttctgctggaattaaaatataccaaagattttataccacgaggaggtatcttgatggagcagaatcagtactgacagtcaagacctcgaccagggagtggaatggaacctatcactgcatatttagatataagaattcatacagtattgcaaccaaagacgtcattgttcacccgctgcctctaaagctgaacatcatggttgatcctttggaagctactgtttcatgcagtggttcccatcacatcaagtgctgcatagaggaggatggagactacaaagttactttccatacgggttcctcatcccttcctgctgcaaaagaagttaacaaaaaacaagtgtgctacaaacacaatttcaatgcaagctcagtttcctggtgttcaaaaactgttgatgtgtgttgtcactttaccaatgctgctaataattcagtctggagcccatctatgaagctgaatctggttcctggggaaaacatcacatgccaggatcccgtaataggtgtcggagagccggggaaagtcatccagaagctatgccggttctcaaacgttcccagcagccctgagagtcccattggcgggaccatcacttacaaatgtgtaggctcccagtgggaggagaagagaaatgactgcatctctgccccaataaacagtctgctccagatggctaaggctttgatcaagagcccctctcaggatgagatgctccctacatacctgaaggatctttctattagcatagacaaagcggaacatgaaatcagctcttctcctgggagtctgggagccattattaacatccttgatctgctctcaacagttccaacccaagtaaattcagaaatgatgacgcacgtgctctctacggttaatgtcatccttggcaagcccgtcttgaacacctggaaggttttacaacagcaatggaccaatcagagttcacagctactacattcagtggaaagattttcccaagcattacagtcgggagatagccctcctttgtccttctcccaaactaatgtgcagatgagcagcatggtaatcaagtccagccacccagaaacctatcaacagaggtttgttttcccatactttgacctctggggcaatgtggtcattgacaagagctatctagaaaacttgcagtcggattcgtctattgtcaccatggctttcccaactctccaagccatccttgcccaggatatccaggaaaataactttgcagagagcttagtgatgacaaccactgtcagccacaatacaactatgccattcaggatttcaatgacttttaagaacaatagcccttcaggcggcgaaacgaagtgtgtcttctggaacttcaggcttgccaacaacacaggggggtgggacagcagtgggtgctatgtagaagaaggtgatggggacaatgtcacctgtatctgtgaccacctaacatcattctccatcctcatgtcccctgactccccagatcctagttctctcctgggaatactcctggatattatttcttatgttggggtgggcttttccatcttgagcttggcagcctgtctagttgtggaagctgtggtgtggaaatcggtgaccaagaaccggacttcttatatgcgccacacctgcatagtgaatatcgctgcctcccttctggtcgccaacacctggttcattgtggtcgctgccatccaggacaatcgctacatactctgcaagacagcctgtgtggctgccaccttcttcatccacttcttctacctcagcgtcttcttctggatgctgacactgggcctcatgctgttctatcgcctggttttcattctgcatgaaacaagcaggtccactcagaaagccattgccttctgtcttggctatggctgcccacttgccatctcggtcatcacgctgggagccacccagccccgggaagtctatacgaggaagaatgtctgttggctcaactgggaggacaccaaggccctgctggctttcgccatcccagcactgatcattgtggtggtgaacataaccatcactattgtggtcatcaccaagatcctgaggccttccattggagacaagccatgcaagcaggagaagagcagcctgtttcagatcagcaagagcattggggtcctcacaccactcttgggcctcacttggggttttggtctcaccactgtgttcccagggaccaaccttgtgttccatatcatatttgccatcctcaatgtcttccagggattattcattttactctttggatgcctctgggatctgaaggtacaggaagctttgctgaataagttttcattgtcgagatggtcttcacagcactcaaagtcaacatccctgggttcatccacacctgtgttttctatgagttctccaatatcaaggagatttaacaatttgtttggtaaaacaggaacgtataatgtttccaccccagaagcaaccagctcatccctggaaaactcatccagtgcttcttcgttgctcaactaagaacaggataatccaacctacgtgacctcccggggacagtggctgtgcttttaaaaagagatgcttgcaaagcaatggggaacgtgttctcggggcaggtttccgggagcagatgccaaaaagactttttcatagagaagaggctttcttttgtaaagacagaataaaaataattgttatgtttctgtttgttccctccccctcccccttgtgtgataccacatgtgtatagtatttaagtgaaactcaagccctcaaggcccaacttctctgtctatattgtaatatagaatttcgaagagacattttcactttttacacattgggcacaaagataagctttgattaaagtagtaagtaaaaggctacctaggaaatacttcagtgaattctaagaaggaaggaaggaagaaaggaaggaaagaagggagggaaacagggagaaagggaaaaagaagaaaaagagaaagatgaaaataggaacaaataaagacaaacaacattaagggccatattgtaagatttccatgttaatgatctaatataatcactcagtgcaacattgagaatttttttttaatggctcaaaaatggaaactgaaagcaagtcatggggaatgaatactttgggcagtatcttcctgatgtcttcttagctaagaggaggaaaaaaaggctgaaaaaatagggaggaaattccttcatcagaacgacttcaagtggataacaatatttataagaaatgaatggaaggaaatatgatcctcctgagactaactttgtatgttaaggtttgaactaagtgaatgtatctgcagaggaagtattacaaagatatgtcattagatccaagtgctgattaaatttttatagtttatcagaaaagccttatattttagtttgttccacattttgaaagcaaaaaatatatatttgatatacccttcaattgccaaatttgatatgttgcactgaagacagaccctgtcatatatttaatggcttcaagcaggtacttctctgtgcattatagaatagattttaataatcttatagcattgtatattattattgctgttgtcactgttattattattgtggatactggcccttggtgtgttgcatagctccctatgtattctctgtttccatctttaagttcccagaccaatatacattaagagttttgcatggtctaaattgtgtttattccaaccacgtggaaagctcctggaaagaaattttacattcggttgttctgtgctcctaatgacacttgaccttgttgaacaaatggcagagcctttcccaaggatttgattgtttgtgaattatctgcatgtgtgcttttttttggtgtgtatttcattaaaaaatataaatatttatgaaa

SEQ ID NO: 105454 - DNA, 5810 bp, Homo sapiens
  Payload ID: 687
  Gene Symbol: ADGRF5
  Gene Name: adhesion G protein-coupled receptor F5
  Uniprot ID: Q8IZF2
  ENST ID: ENST00000283296
  CDS Start-End: 290-4330
actttttgtttttaaaacagcagcgcggctctcagggatgactctgtgagactgggaggatcatagctgggggaggctgagcgtgggagcggtgctgccagtcctgcctgaaaacgcgaaatgagtcttgcttggttctccctccactgggcgtgagagcccctgcccaggaggcccaggacaaatggccccatagtggaaactgggaagcttttaggcatctgatcagagcgggagccagccgggggaccacagtgctggacaggccaaccaactcaaacttgaagacatgaaatccccaaggagaaccactttgtgcctcatgtttattgtgatttattcttccaaagctgcactgaactggaattacgagtctactattcatcctttgagtcttcatgaacatgaaccagctggtgaagaggcactgaggcaaaaacgagccgttgccacaaaaagtcctacggctgaagaatacactgttaatattgagatcagttttgaaaatgcatccttcctggatcctatcaaagcctacttgaacagcctcagttttccaattcatgggaataacactgaccaaattaccgacattttgagcataaatgtgacaacagtctgcagacctgctggaaatgaaatctggtgctcctgcgagacaggttatgggtggcctcgggaaaggtgtcttcacaatctcatttgtcaagagcgtgacgtcttcctcccagggcaccattgcagttgccttaaagaactgcctcccaatggacctttttgcctgcttcaggaagatgttaccctgaacatgagagtcagactaaatgtaggctttcaagaagacctcatgaacacttcctccgccctctataggtcctacaagaccgacttggaaacagcgttccggaagggttacggaattttaccaggcttcaagggcgtgactgtgacagggttcaagtctggaagtgtggttgtgacatatgaagtcaagactacaccaccatcacttgagttaatacataaagccaatgaacaagttgtacagagcctcaatcagacctacaaaatggactacaactcctttcaagcagttactatcaatgaaagcaatttctttgtcacaccagaaatcatctttgaaggggacacagtcagtctggtgtgtgaaaaggaagttttgtcctccaatgtgtcttggcgctatgaagaacagcagttggaaatccagaacagcagcagattctcgatttacaccgcacttttcaacaacatgacttcggtgtccaagctcaccatccacaacatcactccaggtgatgcaggtgaatatgtttgcaaactgatattagacatttttgaatatgagtgcaagaagaaaatagatgttatgcccatccaaattttggcaaatgaagaaatgaaggtgatgtgcgacaacaatcctgtatctttgaactgctgcagtcagggtaatgttaattggagcaaagtagaatggaagcaggaaggaaaaataaatattccaggaacccctgagacagacatagattctagctgcagcagatacaccctcaaggctgatggaacccagtgcccaagcgggtcgtctggaacaacagtcatctacacttgtgagttcatcagtgcctatggagccagaggcagtgcaaacataaaagtgacattcatctctgtggccaatctaacaataaccccggacccaatttctgtttctgagggacaaaacttttctataaaatgcatcagtgatgtgagtaactatgatgaggtttattggaacacttctgctggaattaaaatataccaaagattttataccacgaggaggtatcttgatggagcagaatcagtactgacagtcaagacctcgaccagggagtggaatggaacctatcactgcatatttagatataagaattcatacagtattgcaaccaaagacgtcattgttcacccgctgcctctaaagctgaacatcatggttgatcctttggaagctactgtttcatgcagtggttcccatcacatcaagtgctgcatagaggaggatggagactacaaagttactttccatacgggttcctcatcccttcctgctgcaaaagaagttaacaaaaaacaagtgtgctacaaacacaatttcaatgcaagctcagtttcctggtgttcaaaaactgttgatgtgtgttgtcactttaccaatgctgctaataattcagtctggagcccatctatgaagctgaatctggttcctggggaaaacatcacatgccaggatcccgtaataggtgtcggagagccggggaaagtcatccagaagctatgccggttctcaaacgttcccagcagccctgagagtcccattggcgggaccatcacttacaaatgtgtaggctcccagtgggaggagaagagaaatgactgcatctctgccccaataaacagtctgctccagatggctaaggctttgatcaagagcccctctcaggatgagatgctccctacatacctgaaggatctttctattagcatagacaaagcggaacatgaaatcagctcttctcctgggagtctgggagccattattaacatccttgatctgctctcaacagttccaacccaagtaaattcagaaatgatgacgcacgtgctctctacggttaatgtcatccttggcaagcccgtcttgaacacctggaaggttttacaacagcaatggaccaatcagagttcacagctactacattcagtggaaagattttcccaagcattacagtcgggagatagccctcctttgtccttctcccaaactaatgtgcagatgagcagcatggtaatcaagtccagccacccagaaacctatcaacagaggtttgttttcccatactttgacctctggggcaatgtggtcattgacaagagctatctagaaaacttgcagtcggattcgtctattgtcaccatggctttcccaactctccaagccatccttgcccaggatatccaggaaaataactttgcagagagcttagtgatgacaaccactgtcagccacaatacaactatgccattcaggatttcaatgacttttaagaacaatagcccttcaggcggcgaaacgaagtgtgtcttctggaacttcaggcttgccaacaacacaggggggtgggacagcagtgggtgctatgtagaagaaggtgatggggacaatgtcacctgtatctgtgaccacctaacatcattctccatcctcatgtcccctgactccccagatcctagttctctcctgggaatactcctggatattatttcttatgttggggtgggcttttccatcttgagcttggcagcctgtctagttgtggaagctgtggtgtggaaatcggtgaccaagaaccggacttcttatatgcgccacacctgcatagtgaatatcgctgcctcccttctggtcgccaacacctggttcattgtggtcgctgccatccaggacaatcgctacatactctgcaagacagcctgtgtggctgccaccttcttcatccacttcttctacctcagcgtcttcttctggatgctgacactgggcctcatgctgttctatcgcctggttttcattctgcatgaaacaagcaggtccactcagaaagccattgccttctgtcttggctatggctgcccacttgccatctcggtcatcacgctgggagccacccagccccgggaagtctatacgaggaagaatgtctgttggctcaactgggaggacaccaaggccctgctggctttcgccatcccagcactgatcattgtggtggtgaacataaccatcactattgtggtcatcaccaagatcctgaggccttccattggagacaagccatgcaagcaggagaagagcagcctgtttcagatcagcaagagcattggggtcctcacaccactcttgggcctcacttggggttttggtctcaccactgtgttcccagggaccaaccttgtgttccatatcatatttgccatcctcaatgtcttccagggattattcattttactctttggatgcctctgggatctgaaggtacaggaagctttgctgaataagttttcattgtcgagatggtcttcacagcactcaaagtcaacatccctgggttcatccacacctgtgttttctatgagttctccaatatcaaggagatttaacaatttgtttggtaaaacaggaacgtataatgtttccaccccagaagcaaccagctcatccctggaaaactcatccagtgcttcttcgttgctcaactaagaacaggataatccaacctacgtgacctcccggggacagtggctgtgcttttaaaaagagatgcttgcaaagcaatggggaacgtgttctcggggcaggtttccgggagcagatgccaaaaagactttttcatagagaagaggctttcttttgtaaagacagaataaaaataattgttatgtttctgtttgttccctccccctcccccttgtgtgataccacatgtgtatagtatttaagtgaaactcaagccctcaaggcccaacttctctgtctatattgtaatatagaatttcgaagagacattttcactttttacacattgggcacaaagataagctttgattaaagtagtaagtaaaaggctacctaggaaatacttcagtgaattctaagaaggaaggaaggaagaaaggaaggaaagaagggagggaaacagggagaaagggaaaaagaagaaaaagagaaagatgaaaataggaacaaataaagacaaacaacattaagggccatattgtaagatttccatgttaatgatctaatataatcactcagtgcaacattgagaatttttttttaatggctcaaaaatggaaactgaaagcaagtcatggggaatgaatactttgggcagtatcttcctgatgtcttcttagctaagaggaggaaaaaaaggctgaaaaaatagggaggaaattccttcatcagaacgacttcaagtggataacaatatttataagaaatgaatggaaggaaatatgatcctcctgagactaactttgtatgttaaggtttgaactaagtgaatgtatctgcagaggaagtattacaaagatatgtcattagatccaagtgctgattaaatttttatagtttatcagaaaagccttatattttagtttgttccacattttgaaagcaaaaaatatatatttgatatacccttcaattgccaaatttgatatgttgcactgaagacagaccctgtcatatatttaatggcttcaagcaggtacttctctgtgcattatagaatagattttaataatcttatagcattgtatattattattgctgttgtcactgttattattattgtggatactggcccttggtgtgttgcatagctccctatgtattctctgtttccatctttaagttcccagaccaatatacattaagagttttgcatggtctaaattgtgtttattccaaccacgtggaaagctcctggaaagaaattttacattcggttgttctgtgctcctaatgacacttgaccttgttgaacaaatggcagagcctttcccaaggatttgattgtttgtgaattatctgcatgtgtgcttttttttggtgtgtatttcattaaaaaatataaatatttatgaaaattgcacgcatattagagttaaccatgtactattgatacagcaacgctacattgcaaataaaagtccgatcccaaaaggagaatgag

SEQ ID NO: 105455 - DNA, 3925 bp, Homo sapiens
  Payload ID: 688
  Gene Symbol: ADGRG1
  Gene Name: adhesion G protein-coupled receptor G1
  Uniprot ID: Q9Y653
  ENST ID: ENST00000388813
  CDS Start-End: 428-2491
agggaggagggaggagcccagctggggcaggagaggggtgtctccccaccaaacaaacccggtccctccctctccgcactagctgtctgccctgccctgccgtaggagatgggctgggagcctcccacgctctccagctcactcggcaggcagcggggaccagggctggcaggttaagcctctgggggtggatcctgaaaggtggtccagccgcctggccctgcgtgggaccctccacctggcagcaggtacccaaacaagggctggacagcagggtctcgctctgtcacacaggctggagtgcagtggtgtgatcttggctcatcgtaacctccacctcccgggttcaagtgattctcatgcctcagcctcccgagtagctgggattacaggtggtgacttccaagagtgactccgtcggaggaaaatgactccccagtcgctgctgcagacgacactgttcctgctgagtctgctcttcctggtccaaggtgcccacggcaggggccacagggaagactttcgcttctgcagccagcggaaccagacacacaggagcagcctccactacaaacccacaccagacctgcgcatctccatcgagaactccgaagaggccctcacagtccatgcccctttccctgcagcccaccctgcttcccgatccttccctgaccccaggggcctctaccacttctgcctctactggaaccgacatgctgggagattacatcttctctatggcaagcgtgacttcttgctgagtgacaaagcctctagcctcctctgcttccagcaccaggaggagagcctggctcagggccccccgctgttagccacttctgtcacctcctggtggagccctcagaacatcagcctgcccagtgccgccagcttcaccttctccttccacagtcctccccacacggccgctcacaatgcctcggtggacatgtgcgagctcaaaagggacctccagctgctcagccagttcctgaagcatccccagaaggcctcaaggaggccctcggctgcccccgccagccagcagttgcagagcctggagtcgaaactgacctctgtgagattcatgggggacatggtgtccttcgaggaggaccggatcaacgccacggtgtggaagctccagcccacagccggcctccaggacctgcacatccactcccggcaggaggaggagcagagcgagatcatggagtactcggtgctgctgcctcgaacactcttccagaggacgaaaggccggagcggggaggctgagaagagactcctcctggtggacttcagcagccaagccctgttccaggacaagaattccagccaagtcctgggtgagaaggtcttggggattgtggtacagaacaccaaagtagccaacctcacggagcccgtggtgctcactttccagcaccagctacagccgaagaatgtgactctgcaatgtgtgttctgggttgaagaccccacattgagcagcccggggcattggagcagtgctgggtgtgagaccgtcaggagagaaacccaaacatcctgcttctgcaaccacttgacctactttgcagtgctgatggtctcctcggtggaggtggacgccgtgcacaagcactacctgagcctcctctcctacgtgggctgtgtcgtctctgccctggcctgccttgtcaccattgccgcctacctctgctccaggaggaaacctcgggactacaccatcaaggtgcacatgaacctgctgctggccgtcttcctgctggacacgagcttcctgctcagcgagccggtggccctgacaggctctgaggctggctgccgagccagtgccatcttcctgcacttctccctgctcacctgcctttcctggatgggcctcgaggggtacaacctctaccgactcgtggtggaggtctttggcacctatgtccctggctacctactcaagctgagcgccatgggctggggcttccccatctttctggtgacgctggtggccctggtggatgtggacaactatggccccatcatcttggctgtgcataggactccagagggcgtcatctacccttccatgtgctggatccgggactccctggtcagctacatcaccaacctgggcctcttcagcctggtgtttctgttcaacatggccatgctagccaccatggtggtgcagatcctgcggctgcgcccccacacccaaaagtggtcacatgtgctgacactgctgggcctcagcctggtccttggcctgccctgggccttgatcttcttctcctttgcttctggcaccttccagcttgtcgtcctctaccttttcagcatcatcacctccttccaaggcttcctcatcttcatctggtactggtccatgcggctgcaggcccggggtggcccctcccctctgaagagcaactcagacagcgccaggctccccatcagctcgggcagcacctcgtccagccgcatctaggcctccagcccacctgcccatgtgatgaagcagagattcggcctcgtcgcacactgcctgtggcccccgagcccggcccagccccaggccagtcagccgcagactttggaaagcccaacgaccatggagagatgggccgttgccatggtggacggactcccgggctgggcttttgaattggccttggggactactcggctctcactcagctcccacgggactcagaagtgcgccgccatgctgcctagggtactgtccccacatctgtcccaacccagctggaggcctggtctctccttacaacccctgggcccagccctcattgctgggggccaggccttggatcttgagggtctggcacatccttaatcctgtgcccctgcctgggacagaaatgtggctccagttgctctgtctctcgtggtcaccctgagggcactctgcatcctctgtcattttaacctcaggtggcacccagggcgaatggggcccagggcagaccttcagggccagagccctggcggaggagaggccctttgccaggagcacagcagcagctcgcctacctctgagcccaggccccctccctccctcagccccccagtcctccctccatcttccctggggttctcctcctctcccagggcctccttgctccttcgttcacagctgggggtccccgattccaatgctgttttttggggagtggtttccaggagctgcctggtgtctgctgtaaatgtttgtctactgcacaagcctcggcctgcccctgagccaggctcggtaccgatgcgtgggctgggctaggtccctctgtccatctgggcctttgtatgagctgcattgcccttgctcaccctgaccaagcacacgcctcagaggggccctcagcctctcctgaagccctcttgtggcaagaactgtggaccatgccagtcccgtctggtttccatcccaccactccaaggactgagactgacctcctctggtgacactggcctagggcctgacactctcctaagaggttctctccaagcccccaaatagctccaggcgccctcggccgcccatcatggttaattctgtccaacaaacacacacgggtagattgctggcctgttgtaggtggtagggacacagatgaccgacctggtcactcctcctgccaacattcagtctggtatgtgaggcgtgcgtgaagcaagaactcctggagctacagggacagggagccatcattcctgcctgggaatcctggaagacttcctgcaggagtcagcgttcaatcttgaccttgaagatgggaaggatgttctttttacgtaccaattcttttgtcttttgatattaaaaagaagtacatgttcattgtagagaatttggaaactgtagaagagaatcaagaagaaaaataaaaatcagctgttgtaa

SEQ ID NO: 105456 - DNA, 3860 bp, Homo sapiens
  Payload ID: 688
  Gene Symbol: ADGRG1
  Gene Name: adhesion G protein-coupled receptor G1
  Uniprot ID: Q9Y653
  ENST ID: ENST00000456916
  CDS Start-End: 332-2410
gagaaatccatgactcacatatatcgtccgtcatccccagtcaagctcagggaggagggaggagcccagctggggcaggagaggggtgtctccccaccaaacaaacccggtccctccctctccgcactagctgtctgccctgccctgccgtaggagatgggctgggagcctcccacgctctccagctcactcggcaggcagcggggaccagggctggcaggttaagcctctgggggtggatcctgaaaggtggtccagccgcctggccctgcgtgggaccctccacctggcagcaggtggtgacttccaagagtgactccgtcggaggaaaatgactccccagtcgctgctgcagacgacactgttcctgctgagtctgctcttcctggtccaagcctctgcctcctcaggtgcccacggcaggggccacagggaagactttcgcttctgcagccagcggaaccagacacacaggagcagcctccactacaaacccacaccagacctgcgcatctccatcgagaactccgaagaggccctcacagtccatgcccctttccctgcagcccaccctgcttcccgatccttccctgaccccaggggcctctaccacttctgcctctactggaaccgacatgctgggagattacatcttctctatggcaagcgtgacttcttgctgagtgacaaagcctctagcctcctctgcttccagcaccaggaggagagcctggctcagggccccccgctgttagccacttctgtcacctcctggtggagccctcagaacatcagcctgcccagtgccgccagcttcaccttctccttccacagtcctccccacacggccgctcacaatgcctcggtggacatgtgcgagctcaaaagggacctccagctgctcagccagttcctgaagcatccccagaaggcctcaaggaggccctcggctgcccccgccagccagcagttgcagagcctggagtcgaaactgacctctgtgagattcatgggggacatggtgtccttcgaggaggaccggatcaacgccacggtgtggaagctccagcccacagccggcctccaggacctgcacatccactcccggcaggaggaggagcagagcgagatcatggagtactcggtgctgctgcctcgaacactcttccagaggacgaaaggccggagcggggaggctgagaagagactcctcctggtggacttcagcagccaagccctgttccaggacaagaattccagccaagtcctgggtgagaaggtcttggggattgtggtacagaacaccaaagtagccaacctcacggagcccgtggtgctcactttccagcaccagctacagccgaagaatgtgactctgcaatgtgtgttctgggttgaagaccccacattgagcagcccggggcattggagcagtgctgggtgtgagaccgtcaggagagaaacccaaacatcctgcttctgcaaccacttgacctactttgcagtgctgatggtctcctcggtggaggtggacgccgtgcacaagcactacctgagcctcctctcctacgtgggctgtgtcgtctctgccctggcctgccttgtcaccattgccgcctacctctgctccaggaggaaacctcgggactacaccatcaaggtgcacatgaacctgctgctggccgtcttcctgctggacacgagcttcctgctcagcgagccggtggccctgacaggctctgaggctggctgccgagccagtgccatcttcctgcacttctccctgctcacctgcctttcctggatgggcctcgaggggtacaacctctaccgactcgtggtggaggtctttggcacctatgtccctggctacctactcaagctgagcgccatgggctggggcttccccatctttctggtgacgctggtggccctggtggatgtggacaactatggccccatcatcttggctgtgcataggactccagagggcgtcatctacccttccatgtgctggatccgggactccctggtcagctacatcaccaacctgggcctcttcagcctggtgtttctgttcaacatggccatgctagccaccatggtggtgcagatcctgcggctgcgcccccacacccaaaagtggtcacatgtgctgacactgctgggcctcagcctggtccttggcctgccctgggccttgatcttcttctcctttgcttctggcaccttccagcttgtcgtcctctaccttttcagcatcatcacctccttccaaggcttcctcatcttcatctggtactggtccatgcggctgcaggcccggggtggcccctcccctctgaagagcaactcagacagcgccaggctccccatcagctcgggcagcacctcgtccagccgcatctaggcctccagcccacctgcccatgtgatgaagcagagattcggcctcgtcgcacactgcctgtggcccccgagcccggcccagccccaggccagtcagccgcagactttggaaagcccaacgaccatggagagatgggccgttgccatggtggacggactcccgggctgggcttttgaattggccttggggactactcggctctcactcagctcccacgggactcagaagtgcgccgccatgctgcctagggtactgtccccacatctgtcccaacccagctggaggcctggtctctccttacaacccctgggcccagccctcattgctgggggccaggccttggatcttgagggtctggcacatccttaatcctgtgcccctgcctgggacagaaatgtggctccagttgctctgtctctcgtggtcaccctgagggcactctgcatcctctgtcattttaacctcaggtggcacccagggcgaatggggcccagggcagaccttcagggccagagccctggcggaggagaggccctttgccaggagcacagcagcagctcgcctacctctgagcccaggccccctccctccctcagccccccagtcctccctccatcttccctggggttctcctcctctcccagggcctccttgctccttcgttcacagctgggggtccccgattccaatgctgttttttggggagtggtttccaggagctgcctggtgtctgctgtaaatgtttgtctactgcacaagcctcggcctgcccctgagccaggctcggtaccgatgcgtgggctgggctaggtccctctgtccatctgggcctttgtatgagctgcattgcccttgctcaccctgaccaagcacacgcctcagaggggccctcagcctctcctgaagccctcttgtggcaagaactgtggaccatgccagtcccgtctggtttccatcccaccactccaaggactgagactgacctcctctggtgacactggcctagggcctgacactctcctaagaggttctctccaagcccccaaatagctccaggcgccctcggccgcccatcatggttaattctgtccaacaaacacacacgggtagattgctggcctgttgtaggtggtagggacacagatgaccgacctggtcactcctcctgccaacattcagtctggtatgtgaggcgtgcgtgaagcaagaactcctggagctacagggacagggagccatcattcctgcctgggaatcctggaagacttcctgcaggagtcagcgttcaatcttgaccttgaagatgggaaggatgttctttttacgtaccaattcttttgtcttttgatattaaaaagaagtacatgttcattgtagagaatttggaaactgtagaagagaatcaagaagaaaaataaaaatcagctgttgtaatcacctagcaaactgg

SEQ ID NO: 105457 - DNA, 3820 bp, Homo sapiens
  Payload ID: 688
  Gene Symbol: ADGRG1
  Gene Name: adhesion G protein-coupled receptor G1
  Uniprot ID: Q9Y653
  ENST ID: ENST00000540164
  CDS Start-End: 307-2370
ccagcttcaaagtctctgtcctcttgaaaaaaggtggtcgggggacattgacccaccagccccgcaggctactgcctgcaaacaagaacccctcatctgccacgcacgttcttaatgtatctatagtctgcctgatgccacaaaggagtccagggtctcgctctgtcacacaggctggagtgcagtggtgtgatcttggctcatcgtaacctccacctcccgggttcaagtgattctcatgcctcagcctcccgagtagctgggattacaggtggtgacttccaagagtgactccgtcggaggaaaatgactccccagtcgctgctgcagacgacactgttcctgctgagtctgctcttcctggtccaaggtgcccacggcaggggccacagggaagactttcgcttctgcagccagcggaaccagacacacaggagcagcctccactacaaacccacaccagacctgcgcatctccatcgagaactccgaagaggccctcacagtccatgcccctttccctgcagcccaccctgcttcccgatccttccctgaccccaggggcctctaccacttctgcctctactggaaccgacatgctgggagattacatcttctctatggcaagcgtgacttcttgctgagtgacaaagcctctagcctcctctgcttccagcaccaggaggagagcctggctcagggccccccgctgttagccacttctgtcacctcctggtggagccctcagaacatcagcctgcccagtgccgccagcttcaccttctccttccacagtcctccccacacggccgctcacaatgcctcggtggacatgtgcgagctcaaaagggacctccagctgctcagccagttcctgaagcatccccagaaggcctcaaggaggccctcggctgcccccgccagccagcagttgcagagcctggagtcgaaactgacctctgtgagattcatgggggacatggtgtccttcgaggaggaccggatcaacgccacggtgtggaagctccagcccacagccggcctccaggacctgcacatccactcccggcaggaggaggagcagagcgagatcatggagtactcggtgctgctgcctcgaacactcttccagaggacgaaaggccggagcggggaggctgagaagagactcctcctggtggacttcagcagccaagccctgttccaggacaagaattccagccaagtcctgggtgagaaggtcttggggattgtggtacagaacaccaaagtagccaacctcacggagcccgtggtgctcactttccagcaccagctacagccgaagaatgtgactctgcaatgtgtgttctgggttgaagaccccacattgagcagcccggggcattggagcagtgctgggtgtgagaccgtcaggagagaaacccaaacatcctgcttctgcaaccacttgacctactttgcagtgctgatggtctcctcggtggaggtggacgccgtgcacaagcactacctgagcctcctctcctacgtgggctgtgtcgtctctgccctggcctgccttgtcaccattgccgcctacctctgctccaggaggaaacctcgggactacaccatcaaggtgcacatgaacctgctgctggccgtcttcctgctggacacgagcttcctgctcagcgagccggtggccctgacaggctctgaggctggctgccgagccagtgccatcttcctgcacttctccctgctcacctgcctttcctggatgggcctcgaggggtacaacctctaccgactcgtggtggaggtctttggcacctatgtccctggctacctactcaagctgagcgccatgggctggggcttccccatctttctggtgacgctggtggccctggtggatgtggacaactatggccccatcatcttggctgtgcataggactccagagggcgtcatctacccttccatgtgctggatccgggactccctggtcagctacatcaccaacctgggcctcttcagcctggtgtttctgttcaacatggccatgctagccaccatggtggtgcagatcctgcggctgcgcccccacacccaaaagtggtcacatgtgctgacactgctgggcctcagcctggtccttggcctgccctgggccttgatcttcttctcctttgcttctggcaccttccagcttgtcgtcctctaccttttcagcatcatcacctccttccaaggcttcctcatcttcatctggtactggtccatgcggctgcaggcccggggtggcccctcccctctgaagagcaactcagacagcgccaggctccccatcagctcgggcagcacctcgtccagccgcatctaggcctccagcccacctgcccatgtgatgaagcagagattcggcctcgtcgcacactgcctgtggcccccgagcccggcccagccccaggccagtcagccgcagactttggaaagcccaacgaccatggagagatgggccgttgccatggtggacggactcccgggctgggcttttgaattggccttggggactactcggctctcactcagctcccacgggactcagaagtgcgccgccatgctgcctagggtactgtccccacatctgtcccaacccagctggaggcctggtctctccttacaacccctgggcccagccctcattgctgggggccaggccttggatcttgagggtctggcacatccttaatcctgtgcccctgcctgggacagaaatgtggctccagttgctctgtctctcgtggtcaccctgagggcactctgcatcctctgtcattttaacctcaggtggcacccagggcgaatggggcccagggcagaccttcagggccagagccctggcggaggagaggccctttgccaggagcacagcagcagctcgcctacctctgagcccaggccccctccctccctcagccccccagtcctccctccatcttccctggggttctcctcctctcccagggcctccttgctccttcgttcacagctgggggtccccgattccaatgctgttttttggggagtggtttccaggagctgcctggtgtctgctgtaaatgtttgtctactgcacaagcctcggcctgcccctgagccaggctcggtaccgatgcgtgggctgggctaggtccctctgtccatctgggcctttgtatgagctgcattgcccttgctcaccctgaccaagcacacgcctcagaggggccctcagcctctcctgaagccctcttgtggcaagaactgtggaccatgccagtcccgtctggtttccatcccaccactccaaggactgagactgacctcctctggtgacactggcctagggcctgacactctcctaagaggttctctccaagcccccaaatagctccaggcgccctcggccgcccatcatggttaattctgtccaacaaacacacacgggtagattgctggcctgttgtaggtggtagggacacagatgaccgacctggtcactcctcctgccaacattcagtctggtatgtgaggcgtgcgtgaagcaagaactcctggagctacagggacagggagccatcattcctgcctgggaatcctggaagacttcctgcaggagtcagcgttcaatcttgaccttgaagatgggaaggatgttctttttacgtaccaattcttttgtcttttgatattaaaaagaagtacatgttcattgtagagaatttggaaactgtagaagagaatcaagaagaaaaataaaaatcagctgttgtaatcacctagcaaactgg

SEQ ID NO: 105458 - DNA, 554 bp, Homo sapiens
  Payload ID: 688
  Gene Symbol: ADGRG1
  Gene Name: adhesion G protein-coupled receptor G1
  ENST ID: ENST00000568618
  CDS Start-End: 272-554
acttggtgagtggaagctgtgatcctccctctcctcttagaatctccctggattccagggcccttttcactgcaccagataagacccctgtttagtcccactcatcatctggtgtcctgccaggcatggggactgggaggatgtgggggcctgaggccaggacactgggactctcacagacgtgtcacaaggttgtcatcacagggaggaggaccagtgtgtgcaaaggcttggaggtggtgacttccaagagtgactccgtcggaggaaaatgactccccagtcgctgctgcagacgacactgttcctgctgagtctgctcttcctggtccaaggtgcccacggcaggggccacagggaagactttcgcttctgcagccagcggaaccagacacacaggagcagcctccactacaaacccacaccagacctgcgcatctccatcgagaactccgaagaggccctcacagtccatgcccctttccctgcagcccaccctgcttcccgatccttccctgaccccaggggcctctaccacttctgcctctactgga

SEQ ID NO: 105459 - DNA, 571 bp, Homo sapiens
  Payload ID: 688
  Gene Symbol: ADGRG1
  Gene Name: adhesion G protein-coupled receptor G1
  ENST ID: ENST00000563548
  CDS Start-End: 195-571
acacaggcacaggccggtgagggacctgcccagacctggagggtctcgctctgtcacacaggctggagtgcagtggtgtgatcttggctcatcgtaacctccacctcccgggttcaagtgattctcatgcctcagcctcccgagtagctgggattacaggtggtgacttccaagagtgactccgtcggaggaaaatgactccccagtcgctgctgcagacgacactgttcctgctgagtctgctcttcctggtccaagcctctgcctcctcaggtgcccacggcaggggccacagggaagactttcgcttctgcagccagcggaaccagacacacaggagcagcctccactacaaacccacaccagacctgcgcatctccatcgagaactccgaagaggccctcacagtccatgcccctttccctgcagcccaccctgcttcccgatccttccctgaccccaggggcctctaccacttctgcctctactggaaccgacatgctgggagattacatcttctctatggcaagcgtgacttcttgctgagtgacaaagcctctagcctcctctg

SEQ ID NO: 105460 - DNA, 536 bp, Homo sapiens
  Payload ID: 688
  Gene Symbol: ADGRG1
  Gene Name: adhesion G protein-coupled receptor G1
  ENST ID: ENST00000568157
  CDS Start-End: 143-536
gtgtaaagggaagaaggaagcagtggatggccaggttcgtgggtcttcccggcaggagacagcagagaggcgcctgcccgggaagggttaatcccagagccgtccaggtggtgacttccaagagtgactccgtcggaggaaaatgactccccagtcgctgctgcagacgacactgttcctgctgagtctgctcttcctggtccaaggtgcccacggcaggggccacagggaagactttcgcttctgcagccagcggaaccagacacacaggagcagcctccactacaaacccacaccagacctgcgcatctccatcgagaactccgaagaggccctcacagtccatgcccctttccctgcagcccaccctgcttcccgatccttccctgaccccaggggcctctaccacttctgcctctactggaaccgacatgctgggagattacatcttctctatggcaagcgtgacttcttgctgagtgacaaagcctctagcctcctctgcttccagcaccaggaggagagcctggctcagg

SEQ ID NO: 105461 - DNA, 590 bp, Homo sapiens
  Payload ID: 688
  Gene Symbol: ADGRG1
  Gene Name: adhesion G protein-coupled receptor G1
  ENST ID: ENST00000568791
  CDS Start-End: 347-590
attccaggcggggcctggactgagggaggaggcaggaagaaactcacaaagagttggcagatcacggatggagggcagcatctcccaacagcctgggcggccgctgagacccagagaacccaaggactcccctgggctcatccagcagcctctgcttcccaggagagaggtgctgaagtccacgaagagacagggtctcgctctgtcacacaggctggagtgcagtggtgtgatcttggctcatcgtaacctccacctcccgggttcaagtgattctcatgcctcagcctcccgagtagctgggattacaggtggtgacttccaagagtgactccgtcggaggaaaatgactccccagtcgctgctgcagacgacactgttcctgctgagtctgctcttcctggtccaaggcaggtgcccacggcaggggccacagggaagactttcgcttctgcagccagcggaaccagacacacaggagcagcctccactacaaacccacaccagacctgcgcatctccatcgagaactccgaagaggccctcacagtccatgcccctttccctgcagcccaccctgcttcccgatcc

SEQ ID NO: 105462 - DNA, 567 bp, Homo sapiens
  Payload ID: 688
  Gene Symbol: ADGRG1
  Gene Name: adhesion G protein-coupled receptor G1
  ENST ID: ENST00000565013
  CDS Start-End: 211-567
aatcatctatcctcattgctcggaggaggagggcagacaggagcctctgcagggagtggtctcgctctgtcacacaggctggagtgcagtggtgtgatcttggctcatcgtaacctccacctcccgggttcaagtgattctcatgcctcagcctcccgagtagctgggattacaggtggtgacttccaagagtgactccgtcggaggaaaatgactccccagtcgctgctgcagacgacactgttcctgctgagtctgctcttcctggtccaaggtgcccacggcaggggccacagggaagactttcgcttctgcagccagcggaaccagacacacaggagcagcctccactacaaacccacaccagacctgcgcatctccatcgagaactccgaagaggccctcacagtccatgcccctttccctgcagcccaccctgcttcccgatccttccctgaccccaggggcctctaccacttctgcctctactggaaccgacatgctgggagattacatcttctctatggcaagcgtgacttcttgctgagtgacaaagcctctagcctc

SEQ ID NO: 105463 - DNA, 548 bp, Homo sapiens
  Payload ID: 688
  Gene Symbol: ADGRG1
  Gene Name: adhesion G protein-coupled receptor G1
  ENST ID: ENST00000564783
  CDS Start-End: 530-548
acttgggaacaggacaagttacggagccacgttgctttgctgggtctgagccggggtgtgacgtagtccctgcagctgccaacggttgccagggcaacggttgccaggggctgctgtcacctgcgccccttctcccgcgctggcggctggggcttctcagcctctattccctggctgtcccctttgtttgaagctccagtgagggagcagtggctggggtggcccagcttcaaagtctctgtcctcttgaaaaaaggtggtcgggggacattgacccaccagccccgcaggctactgcctgcaaacaagaacccctcatctgccacgcacgttcttaatgtatctatagtctgcctgatgccacaaaggagtccagggtctcgctctgtcacacaggctggagtgcagtggtgtgatcttggctcatcgtaacctccacctcccgggttcaagtgattctcatgcctcagcctcccgagtagctgggattacaggtggtgacttccaagagtgactccgtcggaggaaaatgactccccagtcgctgc

SEQ ID NO: 105464 - DNA, 804 bp, Homo sapiens
  Payload ID: 688
  Gene Symbol: ADGRG1
  Gene Name: adhesion G protein-coupled receptor G1
  ENST ID: ENST00000563007
  CDS Start-End: 260-553
gggcaggagaggggtgtctccccaccaaacaaacccggtccctccctctccgcactagctgtctgccctgccctgccgtaggagatgggctgggagcctcccacgctctccagctcactcggcaggcagcggggaccagggctggcaggttaagcctctgggggtggatcctgaaaggtggtccagccgcctggccctgcgtgggaccctccacctggcagcaggtggtgacttccaagagtgactccgtcggaggaaaatgactccccagtcgctgctgcagacgacactgttcctgctgagtctgctcttcctggtccaagccagcggaaccagacacacaggagcagcctccactacaaacccacaccagacctgcgcatctccatcgagaactccgaagaggccctcacagtccatgcccctttccctgcagcccaccctgcttcccgatccttccctgaccccaggggcctctaccacttctgcctctactggaaccgacatgctgggagattacatcttctctatggcaagcgtgacttcttgctgagtgacaaagcctctagcctcctctgcttccagcaccaggaggagagcctggctcagggccccccgctgttagccacttctgtcacctcctggtggagccctcagaacatcagcctgcccagtgccgccagcttcaccttctccttccacagtcctccccacacggccgctcacaatgcctcggtggacatgtgcgagctcaaaagggacctccagctgctcagccagttcctgaagcatccccagaaggcc

SEQ ID NO: 105465 - DNA, 507 bp, Homo sapiens
  Payload ID: 688
  Gene Symbol: ADGRG1
  Gene Name: adhesion G protein-coupled receptor G1
  ENST ID: ENST00000562003
  CDS Start-End: 69-507
acaggccggtgagggacctgcccagacctggaggtggtgacttccaagagtgactccgtcggaggaaaatgactccccagtcgctgctgcagacgacactgttcctgctgagtctgctcttcctggtccaagcctctgcctcctcaggtgcccacggcaggggccacagggaagactttcgcttctgcagccagcggaaccagacacacaggagcagcctccactacaaacccacaccagacctgcgcatctccatcgagaactccgaagaggccctcacagtccatgcccctttccctgcagcccaccctgcttcccgatccttccctgaccccaggggcctctaccacttctgcctctactggaaccgacatgctgggagattacatcttctctatggcaagcgtgacttcttgctgagtgacaaagcctctagcctcctctgcttccagcaccaggaggagagcctggctcagggccccccgctgttagccacttctgtcacct

SEQ ID NO: 105466 - DNA, 572 bp, Homo sapiens
  Payload ID: 688
  Gene Symbol: ADGRG1
  Gene Name: adhesion G protein-coupled receptor G1
  ENST ID: ENST00000566508
  CDS Start-End: 282-572
tctcccgcgctggcggctggggcttctcagcctctattccctggctgtcccctttgtttgaagctccagtgagggagcagtggctggggtggcccagcttcaaagtctctgtcctcttgaaaaaaggtggtcgggggacattgacccaccagccccgcaggctactgcctgcaaacaagaacccctcatctgccacgcacgttcttaatgtatctatagtctgcctgatgccacaaaggagtccaggtggtgacttccaagagtgactccgtcggaggaaaatgactccccagtcgctgctgcagacgacactgttcctgctgagtctgctcttcctggtccaaggcagcggaaccagacacacaggagcagcctccactacaaacccacaccagacctgcgcatctccatcgagaactccgaagaggccctcacagtccatgcccctttccctgcagcccaccctgcttcccgatccttccctgaccccaggggcctctaccacttctgcctctactggaaccgacatgctgggagattacatcttctctatggcaagcgtgacttcttgc

SEQ ID NO: 105467 - DNA, 944 bp, Homo sapiens
  Payload ID: 688
  Gene Symbol: ADGRG1
  Gene Name: adhesion G protein-coupled receptor G1
  ENST ID: ENST00000566271
  CDS Start-End: 351-944
aacaaacccggtccctccctctccgcactagctgtctgccctgccctgccgtaggagatgggctgggagcctcccacgctctccagctcactcggcaggcagcggggaccagggctggcaggttaagcctctgggggtggatcctgaaaggtggtccagccgcctggccctgcgtgggaccctccacctggcagcagggtctcgctctgtcacacaggctggagtgcagtggtgtgatcttggctcatcgtaacctccacctcccgggttcaagtgattctcatgcctcagcctcccgagtagctgggattacaggtggtgacttccaagagtgactccgtcggaggaaaatgactccccagtcgctgctgcagacgacactgttcctgctgagtctgctcttcctggtccaagcctctgcctcctcaggtgcccacggcaggggccacagggaagactttcgcttctgcagccagcggaaccagacacacaggagcagcctccactacaaacccacaccagacctgcgcatctccatcgagaactccgaagaggccctcacagtccatgcccctttccctgcagcccaccctgcttcccgatccttccctgaccccaggggcctctaccacttctgcctctactggaaccgacatgctgggagattacatcttctctatggcaagcgtgacttcttgctgagtgacaaagcctctagcctcctctgcttccagcaccaggaggagagcctggctcagggccccccgctgttagccacttctgtcacctcctggtggagccctcagaacatcagcctgcccagtgccgccagcttcaccttctccttccacagtcctccccacacggccgctcacaatgcctcggtggacatgtgcgagctcaaaagggacctccagctgctcagccagttcctgaagcatccc

SEQ ID NO: 105468 - DNA, 896 bp, Homo sapiens
  Payload ID: 688
  Gene Symbol: ADGRG1
  Gene Name: adhesion G protein-coupled receptor G1
  ENST ID: ENST00000568645
  CDS Start-End: 348-641
aaacccggtccctccctctccgcactagctgtctgccctgccctgccgtaggagatgggctgggagcctcccacgctctccagctcactcggcaggcagcggggaccagggctggcaggttaagcctctgggggtggatcctgaaaggtggtccagccgcctggccctgcgtgggaccctccacctggcagcagggtctcgctctgtcacacaggctggagtgcagtggtgtgatcttggctcatcgtaacctccacctcccgggttcaagtgattctcatgcctcagcctcccgagtagctgggattacaggtggtgacttccaagagtgactccgtcggaggaaaatgactccccagtcgctgctgcagacgacactgttcctgctgagtctgctcttcctggtccaagccagcggaaccagacacacaggagcagcctccactacaaacccacaccagacctgcgcatctccatcgagaactccgaagaggccctcacagtccatgcccctttccctgcagcccaccctgcttcccgatccttccctgaccccaggggcctctaccacttctgcctctactggaaccgacatgctgggagattacatcttctctatggcaagcgtgacttcttgctgagtgacaaagcctctagcctcctctgcttccagcaccaggaggagagcctggctcagggccccccgctgttagccacttctgtcacctcctggtggagccctcagaacatcagcctgcccagtgccgccagcttcaccttctccttccacagtcctccccacacggccgctcacaatgcctcggtggacatgtgcgagctcaaaagggacctccagctgctcagccagttcctgaagcatccccagaaggcctcaa

SEQ ID NO: 105469 - DNA, 575 bp, Homo sapiens
  Payload ID: 688
  Gene Symbol: ADGRG1
  Gene Name: adhesion G protein-coupled receptor G1
  ENST ID: ENST00000565976
  CDS Start-End: 294-575
acctgcgccccttctcccgcgctggcggctggggcttctcagcctctattccctggctgtcccctttgtttgaagctccagtgagggagcagtggctggggtggcccagcttcaaagtctctgtcctcttgaaaaaaggtggtcgggggacattgacccaccagccccgcaggctactgcctgcaaacaagaacccctcatctgccacgcacgttcttaatgtatctatagtctgcctgatgccacaaaggagtccaggtggtgacttccaagagtgactccgtcggaggaaaatgactccccagtcgctgctgcagacgacactgttcctgctgagtctgctcttcctggtccaaggtgcccacggcaggggccacagggaagactttcgcttctgcagccagcggaaccagacacacaggagcagcctccactacaaacccacaccagacctgcgcatctccatcgagaactccgaagaggccctcacagtccatgcccctttccctgcagcccaccctgcttcccgatccttccctgaccccaggggcctctaccacttctgcctctactgg

SEQ ID NO: 105470 - DNA, 594 bp, Homo sapiens
  Payload ID: 688
  Gene Symbol: ADGRG1
  Gene Name: adhesion G protein-coupled receptor G1
  ENST ID: ENST00000566164
  CDS Start-End: 246-594
agctgtctgccctgccctgccgtaggagatgggctgggagcctcccacgctctccagctcactcggcaggcagcggggaccagggctggcagggtctcgctctgtcacacaggctggagtgcagtggtgtgatcttggctcatcgtaacctccacctcccgggttcaagtgattctcatgcctcagcctcccgagtagctgggattacaggtggtgacttccaagagtgactccgtcggaggaaaatgactccccagtcgctgctgcagacgacactgttcctgctgagtctgctcttcctggtccaaggtgcccacggcaggggccacagggaagactttcgcttctgcagccagcggaaccagacacacaggagcagcctccactacaaacccacaccagacctgcgcatctccatcgagaactccgaagaggccctcacagtccatgcccctttccctgcagcccaccctgcttcccgatccttccctgaccccaggggcctctaccacttctgcctctactggaaccgacatgctgggagattacatcttctctatggcaagcgtgacttcttgctgagtgacaaagcct

SEQ ID NO: 105471 - DNA, 582 bp, Homo sapiens
  Payload ID: 688
  Gene Symbol: ADGRG1
  Gene Name: adhesion G protein-coupled receptor G1
  ENST ID: ENST00000561782
  CDS Start-End: 79-582
gtaggggttggcctcctggcaaggcccagcatgacaaaggcaggtggtgacttccaagagtgactccgtcggaggaaaatgactccccagtcgctgctgcagacgacactgttcctgctgagtctgctcttcctggtccaagcctctgcctcctcaggtgcccacggcaggggccacagggaagactttcgcttctgcagccagcggaaccagacacacaggagcagcctccactacaaacccacaccagacctgcgcatctccatcgagaactccgaagaggccctcacagtccatgcccctttccctgcagcccaccctgcttcccgatccttccctgaccccaggggcctctaccacttctgcctctactggaaccgacatgctgggagattacatcttctctatggcaagcgtgacttcttgctgagtgacaaagcctctagcctcctctgcttccagcaccaggaggagagcctggctcagggccccccgctgttagccacttctgtcacctcctggtggagccctcagaacatcagcctgcccagtgccgccagcttcaccttctccttccacagt

SEQ ID NO: 105472 - DNA, 568 bp, Homo sapiens
  Payload ID: 688
  Gene Symbol: ADGRG1
  Gene Name: adhesion G protein-coupled receptor G1
  ENST ID: ENST00000563374
  CDS Start-End: 333-568
ctctccgcactagctgtctgccctgccctgccgtaggagatgggctgggagcctcccacgctctccagctcactcggcaggcagcggggaccagggctggcaggttaagcctctgggggtggatcctgaaaggtggtccagccgcctggccctgcgtgggaccctccacctggcagcagggtctcgctctgtcacacaggctggagtgcagtggtgtgatcttggctcatcgtaacctccacctcccgggttcaagtgattctcatgcctcagcctcccgagtagctgggattacaggtggtgacttccaagagtgactccgtcggaggaaaatgactccccagtcgctgctgcagacgacactgttcctgctgagtctgctcttcctggtccaaggcaggtgcccacggcaggggccacagggaagactttcgcttctgcagccagcggaaccagacacacaggagcagcctccactacaaacccacaccagacctgcgcatctccatcgagaactccgaagaggccctcacagtccatgcccctttccctgcagcccaccctgctt

SEQ ID NO: 105473 - DNA, 4254 bp, Homo sapiens
  Payload ID: 688
  Gene Symbol: ADGRG1
  Gene Name: adhesion G protein-coupled receptor G1
  Uniprot ID: Q9Y653
  ENST ID: ENST00000568909
  CDS Start-End: 175-2256
agacaggcggagcctcacctggggctgcccgccagcccagacaagctcagactgggtgcctgtggccctgggaggaggtggaaggggaggagcaggccacacaggcacaggccggtgagggacctgcccagacctggaggtggtgacttccaagagtgactccgtcggaggaaaatgactccccagtcgctgctgcagacgacactgttcctgctgagtctgctcttcctggtccaaggtgcccacggcaggggccacagggaagactttcgcttctgcagccagcggaaccagacacacaggagcagcctccactacaaacccacaccagacctgcgcatctccatcgagaactccgaagaggccctcacagtccatgcccctttccctgcagcccaccctgcttcccgatccttccctgaccccaggggcctctaccacttctgcctctactggaaccgacatgctgggagattacatcttctctatggcaagcgtgacttcttgctgagtgacaaagcctctagcctcctctgcttccagcaccaggaggagagcctggctcagggccccccgctgttagccacttctgtcacctcctggtggagccctcagaacatcagcctgcccagtgccgccagcttcaccttctccttccacagtcctccccacacggccgctcacaatgcctcggtggacatgtgcgagctcaaaagggacctccagctgctcagccagttcctgaagcatccccagaaggcctcaaggaggccctcggctgcccccgccagccagcagttgcagagcctggagtcgaaactgacctctgtgagattcatgggggacatggtgtccttcgaggaggaccggatcaacgccacggtgtggaagctccagcccacagccggcctccaggacctgcacatccactcccggcaggaggaggagcagagcgagatcatggagtactcggtgctgctgcctcgaacactcttccagaggacgaaaggccggagcggggaggctgagaagagactcctcctggtggacttcagcagccaagccctgttccaggacaagaattccagccaagtcctgggtgagaaggtcttggggattgtggtacagaacaccaaagtagccaacctcacggagcccgtggtgctcactttccagcaccagctacagccgaagaatgtgactctgcaatgtgtgttctgggttgaagaccccacattgagcagcccggggcattggagcagtgctgggtgtgagaccgtcaggagagaaacccaaacatcctgcttctgcaaccacttgacctactttgcagtgctgatggtctcctcggtggaggtggacgccgtgcacaagcactacctgagcctcctctcctacgtgggctgtgtcgtctctgccctggcctgccttgtcaccattgccgcctacctctgctccagggtgcccctgccgtgcaggaggaaacctcgggactacaccatcaaggtgcacatgaacctgctgctggccgtcttcctgctggacacgagcttcctgctcagcgagccggtggccctgacaggctctgaggctggctgccgagccagtgccatcttcctgcacttctccctgctcacctgcctttcctggatgggcctcgaggggtacaacctctaccgactcgtggtggaggtctttggcacctatgtccctggctacctactcaagctgagcgccatgggctggggcttccccatctttctggtgacgctggtggccctggtggatgtggacaactatggccccatcatcttggctgtgcataggactccagagggcgtcatctacccttccatgtgctggatccgggactccctggtcagctacatcaccaacctgggcctcttcagcctggtgtttctgttcaacatggccatgctagccaccatggtggtgcagatcctgcggctgcgcccccacacccaaaagtggtcacatgtgctgacactgctgggcctcagcctggtccttggcctgccctgggccttgatcttcttctcctttgcttctggcaccttccagcttgtcgtcctctaccttttcagcatcatcacctccttccaaggcttcctcatcttcatctggtactggtccatgcggctgcaggcccggggtggcccctcccctctgaagagcaactcagacagcgccaggctccccatcagctcgggcagcacctcgtccagccgcatctaggcctccagcccacctgcccatgtgatgaagcagagattcggcctcgtcgcacactgcctgtggcccccgagcccggcccagccccaggccagtcagccgcagactttggaaagcccaacgaccatggagagatgggccgttgccatggtggacggactcccgggctgggcttttgaattggccttggggactactcggctctcactcagctcccacgggactcagaagtgcgccgccatgctgcctagggtactgtccccacatctgtcccaacccagctggaggcctggtctctccttacaacccctgggcccagccctcattgctgggggccaggccttggatcttgagggtctggcacatccttaatcctgtgcccctgcctgggacagaaatgtggctccagttgctctgtctctcgtggtcaccctgagggcactctgcatcctctgtcattttaacctcaggtggcacccagggcgaatggggcccagggcagaccttcagggccagagccctggcggaggagaggccctttgccaggagcacagcagcagctcgcctacctctgagcccaggccccctccctccctcagccccccagtcctccctccatcttccctggggttctcctcctctcccagggcctccttgctccttcgttcacagctgggggtccccgattccaatgctgttttttggggagtggtttccaggagctgcctggtgtctgctgtaaatgtttgtctactgcacaagcctcggcctgcccctgagccaggctcggtaccgatgcgtgggctgggctaggtccctctgtccatctgggcctttgtatgagctgcattgcccttgctcaccctgaccaagcacacgcctcagaggggccctcagcctctcctgaagccctcttgtggcaagaactgtggaccatgccagtcccgtctggtttccatcccaccactccaaggactgagactgacctcctctggtgacactggcctagggcctgacactctcctaagaggttctctccaagcccccaaatagctccaggcgccctcggccgcccatcatggttaattctgtccaacaaacacacacgggtagattgctggcctgttgtaggtggtagggacacagatgaccgacctggtcactcctcctgccaacattcagtctggtatgtgaggcgtgcgtgaagcaagaactcctggagctacagggacagggagccatcattcctgcctgggaatcctggaagacttcctgcaggagtcagcgttcaatcttgaccttgaagatgggaaggatgttctttttacgtaccaattcttttgtcttttgatattaaaaagaagtacatgttcattgtagagaatttggaaactgtagaagagaatcaagaagaaaaataaaaatcagctgttgtaatcacctagcaaactggcgtaagcattttgggtcatttccttctgagctttttcctgtgcttctattgaaagagtcactgatactaatacaaataccttggggccaatcaggaaacatgaaagagagaagagggctgtgtgtgaagaaaaaaaaaaaatcgactgctggaaacctcatcaaccagggcacaggggaagataaatggcaacttggtgtctgtgctggggaggcaatggggagtggtggggcctgtggcgaactggagactcccaaccccatgctgagagcgtggctgctcatcagctccagctggtcactaccttgcagggatgagggcccatgtagccagaccacctgccttttatgagaaatgggaaatccagactgtggtttgacatcccctgattttaaaattttggcgaatccaaaacattttctggccaaagagattacagtcaaaagctgcctggtcctgggatttatgcaaccagtttactgatcactctgcagcaggtgggctgcaagaattaaatcactggacttctctcccatccctgcctttaa

SEQ ID NO: 105474 - DNA, 565 bp, Homo sapiens
  Payload ID: 688
  Gene Symbol: ADGRG1
  Gene Name: adhesion G protein-coupled receptor G1
  ENST ID: ENST00000567397
  CDS Start-End: 271-565
agctcactcggcaggcagcggggaccagggctggcaggttaagcctctgggggtggatcctgaaaggtggtccagccgcctggccctgcgtgggaccctccacctggcagcagacagggtctcgctctgtcacacaggctggagtgcagtggtgtgatcttggctcatcgtaacctccacctcccgggttcaagtgattctcatgcctcagcctcccgagtagctgggattacaggtggtgacttccaagagtgactccgtcggaggaaaatgactccccagtcgctgctgcagacgacactgttcctgctgagtctgctcttcctggtccaagcctctgcctcctcaggtgcccacggcaggggccacagggaagactttcgcttctgcagccagcggaaccagacacacaggagcagcctccactacaaacccacaccagacctgcgcatctccatcgagaactccgaagaggccctcacagtccatgcccctttccctgcagcccaccctgcttcccgatccttccctgaccccaggggcctctaccacttctgcctctact

SEQ ID NO: 105475 - DNA, 3655 bp, Homo sapiens
  Payload ID: 688
  Gene Symbol: ADGRG1
  Gene Name: adhesion G protein-coupled receptor G1
  ENST ID: ENST00000564907
  CDS Start-End: 167-460
agatcacggatggagggcagcatctcccaacagcctgggcggccgctgagacccagagaacccaaggactcccctgggctcatccagcagcctctgcttcccaggagagaggtgctgaagtccacgaagaggtggtgacttccaagagtgactccgtcggaggaaaatgactccccagtcgctgctgcagacgacactgttcctgctgagtctgctcttcctggtccaaggcagcggaaccagacacacaggagcagcctccactacaaacccacaccagacctgcgcatctccatcgagaactccgaagaggccctcacagtccatgcccctttccctgcagcccaccctgcttcccgatccttccctgaccccaggggcctctaccacttctgcctctactggaaccgacatgctgggagattacatcttctctatggcaagcgtgacttcttgctgagtgacaaagcctctagcctcctctgcttccagcaccaggaggagagcctggctcagggccccccgctgttagccacttctgtcacctcctggtggagccctcagaacatcagcctgcccagtgccgccagcttcaccttctccttccacagtcctccccacacggccgctcacaatgcctcggtggacatgtgcgagctcaaaagggacctccagctgctcagccagttcctgaagcatccccagaaggcctcaaggaggccctcggctgcccccgccagccagcagttgcagagcctggagtcgaaactgacctctgtgagattcatgggggacatggtgtccttcgaggaggaccggatcaacgccacggtgtggaagctccagcccacagccggcctccaggacctgcacatccactcccggcaggaggaggagcagagcgagatcatggagtactcggtgctgctgcctcgaacactcttccagaggacgaaaggccggagcggggaggctgagaagagactcctcctggtggacttcagcagccaagccctgttccaggacaagaattccagccaagtcctgggtgagaaggtcttggggattgtggtacagaacaccaaagtagccaacctcacggagcccgtggtgctcactttccagcaccagctacagccgaagaatgtgactctgcaatgtgtgttctgggttgaagaccccacattgagcagcccggggcattggagcagtgctgggtgtgagaccgtcaggagagaaacccaaacatcctgcttctgcaaccacttgacctactttgcagtgctgatggtctcctcggtggaggtggacgccgtgcacaagcactacctgagcctcctctcctacgtgggctgtgtcgtctctgccctggcctgccttgtcaccattgccgcctacctctgctccagggtgcccctgccgtgcaggaggaaacctcgggactacaccatcaaggtgcacatgaacctgctgctggccgtcttcctgctggacacgagcttcctgctcagcgagccggtggccctgacaggctctgaggctggctgccgagccagtgccatcttcctgcacttctccctgctcacctgcctttcctggatgggcctcgaggggtacaacctctaccgactcgtggtggaggtctttggcacctatgtccctggctacctactcaagctgagcgccatgggctggggcttccccatctttctggtgacgctggtggccctggtggatgtggacaactatggccccatcatcttggctgtgcataggactccagagggcgtcatctacccttccatgtgctggatccgggactccctggtcagctacatcaccaacctgggcctcttcagcctggtgtttctgttcaacatggccatgctagccaccatggtggtgcagatcctgcggctgcgcccccacacccaaaagtggtcacatgtgctgacactgctgggcctcagcctggtccttggcctgccctgggccttgatcttcttctcctttgcttctggcaccttccagcttgtcgtcctctaccttttcagcatcatcacctccttccaaggcttcctcatcttcatctggtactggtccatgcggctgcaggcccggggtggcccctcccctctgaagagcaactcagacagcgccaggctccccatcagctcgggcagcacctcgtccagccgcatctaggcctccagcccacctgcccatgtgatgaagcagagattcggcctcgtcgcacactgcctgtggcccccgagcccggcccagccccaggccagtcagccgcagactttggaaagcccaacgaccatggagagatgggccgttgccatggtggacggactcccgggctgggcttttgaattggccttggggactactcggctctcactcagctcccacgggactcagaagtgcgccgccatgctgcctagggtactgtccccacatctgtcccaacccagctggaggcctggtctctccttacaacccctgggcccagccctcattgctgggggccaggccttggatcttgagggtctggcacatccttaatcctgtgcccctgcctgggacagaaatgtggctccagttgctctgtctctcgtggtcaccctgagggcactctgcatcctctgtcattttaacctcaggtggcacccagggcgaatggggcccagggcagaccttcagggccagagccctggcggaggagaggccctttgccaggagcacagcagcagctcgcctacctctgagcccaggccccctccctccctcagccccccagtcctccctccatcttccctggggttctcctcctctcccagggcctccttgctccttcgttcacagctgggggtccccgattccaatgctgttttttggggagtggtttccaggagctgcctggtgtctgctgtaaatgtttgtctactgcacaagcctcggcctgcccctgagccaggctcggtaccgatgcgtgggctgggctaggtccctctgtccatctgggcctttgtatgagctgcattgcccttgctcaccctgaccaagcacacgcctcagaggggccctcagcctctcctgaagccctcttgtggcaagaactgtggaccatgccagtcccgtctggtttccatcccaccactccaaggactgagactgacctcctctggtgacactggcctagggcctgacactctcctaagaggttctctccaagcccccaaatagctccaggcgccctcggccgcccatcatggttaattctgtccaacaaacacacacgggtagattgctggcctgttgtaggtggtagggacacagatgaccgacctggtcactcctcctgccaacattcagtctggtatgtgaggcgtgcgtgaagcaagaactcctggagctacagggacagggagccatcattcctgcctgggaatcctggaagacttcctgcaggagtcagcgttcaatcttgaccttgaagatgggaaggatgttctttttacgtaccaattcttttgtcttttgatattaaaaagaagtacatgttcattgtagagaatttggaaactgtagaagagaatcaagaagaaaaataaaaatcagctgttgtaatcacctagcaaactgg

SEQ ID NO: 105476 - DNA, 4042 bp, Homo sapiens
  Payload ID: 688
  Gene Symbol: ADGRG1
  Gene Name: adhesion G protein-coupled receptor G1
  Uniprot ID: Q9Y653
  ENST ID: ENST00000562631
  CDS Start-End: 533-2596
actttggggagactggccctgggaggcgacagatggaggctgaggaagcagagtgatccccggccccttcctgtccctgaacactgtctgcctggatgaggggtgaggctgaggtgcccccttgcccggcgctgagtcatgggcatcccccaggatcactgcctcagcgctctcagccctgccccctcctggtctccctctgagaaatccatgactcacatatatcgtccgtcatccccagtcaagctcagggaggagggaggagcccagctggggcaggagaggggtgtctccccaccaaacaaacccggtccctccctctccgcactagctgtctgccctgccctgccgtaggagatgggctgggagcctcccacgctctccagctcactcggcaggcagcggggaccagggctggcaggttaagcctctgggggtggatcctgaaaggtggtccagccgcctggccctgcgtgggaccctccacctggcagcaggtggtgacttccaagagtgactccgtcggaggaaaatgactccccagtcgctgctgcagacgacactgttcctgctgagtctgctcttcctggtccaaggtgcccacggcaggggccacagggaagactttcgcttctgcagccagcggaaccagacacacaggagcagcctccactacaaacccacaccagacctgcgcatctccatcgagaactccgaagaggccctcacagtccatgcccctttccctgcagcccaccctgcttcccgatccttccctgaccccaggggcctctaccacttctgcctctactggaaccgacatgctgggagattacatcttctctatggcaagcgtgacttcttgctgagtgacaaagcctctagcctcctctgcttccagcaccaggaggagagcctggctcagggccccccgctgttagccacttctgtcacctcctggtggagccctcagaacatcagcctgcccagtgccgccagcttcaccttctccttccacagtcctccccacacggccgctcacaatgcctcggtggacatgtgcgagctcaaaagggacctccagctgctcagccagttcctgaagcatccccagaaggcctcaaggaggccctcggctgcccccgccagccagcagttgcagagcctggagtcgaaactgacctctgtgagattcatgggggacatggtgtccttcgaggaggaccggatcaacgccacggtgtggaagctccagcccacagccggcctccaggacctgcacatccactcccggcaggaggaggagcagagcgagatcatggagtactcggtgctgctgcctcgaacactcttccagaggacgaaaggccggagcggggaggctgagaagagactcctcctggtggacttcagcagccaagccctgttccaggacaagaattccagccaagtcctgggtgagaaggtcttggggattgtggtacagaacaccaaagtagccaacctcacggagcccgtggtgctcactttccagcaccagctacagccgaagaatgtgactctgcaatgtgtgttctgggttgaagaccccacattgagcagcccggggcattggagcagtgctgggtgtgagaccgtcaggagagaaacccaaacatcctgcttctgcaaccacttgacctactttgcagtgctgatggtctcctcggtggaggtggacgccgtgcacaagcactacctgagcctcctctcctacgtgggctgtgtcgtctctgccctggcctgccttgtcaccattgccgcctacctctgctccaggaggaaacctcgggactacaccatcaaggtgcacatgaacctgctgctggccgtcttcctgctggacacgagcttcctgctcagcgagccggtggccctgacaggctctgaggctggctgccgagccagtgccatcttcctgcacttctccctgctcacctgcctttcctggatgggcctcgaggggtacaacctctaccgactcgtggtggaggtctttggcacctatgtccctggctacctactcaagctgagcgccatgggctggggcttccccatctttctggtgacgctggtggccctggtggatgtggacaactatggccccatcatcttggctgtgcataggactccagagggcgtcatctacccttccatgtgctggatccgggactccctggtcagctacatcaccaacctgggcctcttcagcctggtgtttctgttcaacatggccatgctagccaccatggtggtgcagatcctgcggctgcgcccccacacccaaaagtggtcacatgtgctgacactgctgggcctcagcctggtccttggcctgccctgggccttgatcttcttctcctttgcttctggcaccttccagcttgtcgtcctctaccttttcagcatcatcacctccttccaaggcttcctcatcttcatctggtactggtccatgcggctgcaggcccggggtggcccctcccctctgaagagcaactcagacagcgccaggctccccatcagctcgggcagcacctcgtccagccgcatctaggcctccagcccacctgcccatgtgatgaagcagagattcggcctcgtcgcacactgcctgtggcccccgagcccggcccagccccaggccagtcagccgcagactttggaaagcccaacgaccatggagagatgggccgttgccatggtggacggactcccgggctgggcttttgaattggccttggggactactcggctctcactcagctcccacgggactcagaagtgcgccgccatgctgcctagggtactgtccccacatctgtcccaacccagctggaggcctggtctctccttacaacccctgggcccagccctcattgctgggggccaggccttggatcttgagggtctggcacatccttaatcctgtgcccctgcctgggacagaaatgtggctccagttgctctgtctctcgtggtcaccctgagggcactctgcatcctctgtcattttaacctcaggtggcacccagggcgaatggggcccagggcagaccttcagggccagagccctggcggaggagaggccctttgccaggagcacagcagcagctcgcctacctctgagcccaggccccctccctccctcagccccccagtcctccctccatcttccctggggttctcctcctctcccagggcctccttgctccttcgttcacagctgggggtccccgattccaatgctgttttttggggagtggtttccaggagctgcctggtgtctgctgtaaatgtttgtctactgcacaagcctcggcctgcccctgagccaggctcggtaccgatgcgtgggctgggctaggtccctctgtccatctgggcctttgtatgagctgcattgcccttgctcaccctgaccaagcacacgcctcagaggggccctcagcctctcctgaagccctcttgtggcaagaactgtggaccatgccagtcccgtctggtttccatcccaccactccaaggactgagactgacctcctctggtgacactggcctagggcctgacactctcctaagaggttctctccaagcccccaaatagctccaggcgccctcggccgcccatcatggttaattctgtccaacaaacacacacgggtagattgctggcctgttgtaggtggtagggacacagatgaccgacctggtcactcctcctgccaacattcagtctggtatgtgaggcgtgcgtgaagcaagaactcctggagctacagggacagggagccatcattcctgcctgggaatcctggaagacttcctgcaggagtcagcgttcaatcttgaccttgaagatgggaaggatgttctttttacgtaccaattcttttgtcttttgatattaaaaagaagtacatgttcattgtagagaatttggaaactgtagaagagaatcaagaagaaaaataaaaatcagctgttgtaatcacctagcaaa

SEQ ID NO: 105477 - DNA, 551 bp, Homo sapiens
  Payload ID: 688
  Gene Symbol: ADGRG1
  Gene Name: adhesion G protein-coupled receptor G1
  ENST ID: ENST00000568979
  CDS Start-End: 267-551
agctcactcggcaggcagcggggaccagggctggcaggttaagcctctgggggtggatcctgaaaggtggtccagccgcctggccctgcgtgggaccctccacctggcagcagggtctcgctctgtcacacaggctggagtgcagtggtgtgatcttggctcatcgtaacctccacctcccgggttcaagtgattctcatgcctcagcctcccgagtagctgggattacaggtggtgacttccaagagtgactccgtcggaggaaaatgactccccagtcgctgctgcagacgacactgttcctgctgagtctgctcttcctggtccaagcccaccctgcttcccgatccttccctgaccccaggggcctctaccacttctgcctctactggaaccgacatgctgggagattacatcttctctatggcaagcgtgacttcttgctgagtgacaaagcctctagcctcctctgcttccagcaccaggaggagagcctggctcagggccccccgctgttagccacttctgtcacctcctggtggagccctcag

SEQ ID NO: 105478 - DNA, 594 bp, Homo sapiens
  Payload ID: 688
  Gene Symbol: ADGRG1
  Gene Name: adhesion G protein-coupled receptor G1
  ENST ID: ENST00000561696
  CDS Start-End: 93-594
aatcatctatcctcattgctcggaggaggagggcagacaggagcctctgcagggagtgtggtgacttccaagagtgactccgtcggaggaaaatgactccccagtcgctgctgcagacgacactgttcctgctgagtctgctcttcctggtccaaggtgcccacggcaggggccacagggaagactttcgcttctgcagccagcggaaccagacacacaggagcagcctccactacaaacccacaccagacctgcgcatctccatcgagaactccgaagaggccctcacagtccatgcccctttccctgcagcccaccctgcttcccgatccttccctgaccccaggggcctctaccacttctgcctctactggaaccgacatgctgggagattacatcttctctatggcaagcgtgacttcttgctgagtgacaaagcctctagcctcctctgcttccagcaccaggaggagagcctggctcagggccccccgctgttagccacttctgtcacctcctggtggagccctcagaacatcagcctgcccagtgccgccagcttcaccttctccttccacagtcctccccacacgg

SEQ ID NO: 105479 - DNA, 574 bp, Homo sapiens
  Payload ID: 688
  Gene Symbol: ADGRG1
  Gene Name: adhesion G protein-coupled receptor G1
  ENST ID: ENST00000567553
  CDS Start-End: 303-574
aactcacaaagagttggcagatcacggatggagggcagcatctcccaacagcctgggcggccgctgagacccagagaacccaaggactcccctgggctcatccagcagcctctgcttcccaggagagaggtgctgaagtccacgaagagggtctcgctctgtcacacaggctggagtgcagtggtgtgatcttggctcatcgtaacctccacctcccgggttcaagtgattctcatgcctcagcctcccgagtagctgggattacaggtggtgacttccaagagtgactccgtcggaggaaaatgactccccagtcgctgctgcagacgacactgttcctgctgagtctgctcttcctggtccaagcctctgcctcctcaggtgcccacggcaggggccacagggaagactttcgcttctgcagccagcggaaccagacacacaggagcagcctccactacaaacccacaccagacctgcgcatctccatcgagaactccgaagaggccctcacagtccatgcccctttccctgcagcccaccctgcttcccgatccttccctgaccccagggg

SEQ ID NO: 105480 - DNA, 576 bp, Homo sapiens
  Payload ID: 688
  Gene Symbol: ADGRG1
  Gene Name: adhesion G protein-coupled receptor G1
  ENST ID: ENST00000564729
  CDS Start-End: 413-576
cacctgcgccccttctcccgcgctggcggctggggcttctcagcctctattccctggctgtcccctttgtttgaagctccagtgagggagcagtggctggggtggcccagcttcaaagtctctgtcctcttgaaaaaaggtggtcgggggacattgacccaccagccccgcaggctactgcctgcaaacaagaacccctcatctgccacgcacgttcttaatgtatctatagtctgcctgatgccacaaaggagtccagggtctcgctctgtcacacaggctggagtgcagtggtgtgatcttggctcatcgtaacctccacctcccgggttcaagtgattctcatgcctcagcctcccgagtagctgggattacaggtggtgacttccaagagtgactccgtcggaggaaaatgactccccagtcgctgctgcagacgacactgttcctgctgagtctgctcttcctggtccaaggtgcccacggcaggggccacagggaagactttcgcttctgcagccagcggaaccagacacacaggagcagcctccactacaaacccacaccagacctgcg

SEQ ID NO: 105481 - DNA, 622 bp, Homo sapiens
  Payload ID: 688
  Gene Symbol: ADGRG1
  Gene Name: adhesion G protein-coupled receptor G1
  ENST ID: ENST00000561969
  CDS Start-End: 144-622
gtgggaactttggggagactggccctgggaggcgacagatggaggctgaggaagcagagtgatccccggccccttcctgtccctgaacactgtctgcctggatgaggggtggtgacttccaagagtgactccgtcggaggaaaatgactccccagtcgctgctgcagacgacactgttcctgctgagtctgctcttcctggtccaaggtgcccacggcaggggccacagggaagactttcgcttctgcagccagcggaaccagacacacaggagcagcctccactacaaacccacaccagacctgcgcatctccatcgagaactccgaagaggccctcacagtccatgcccctttccctgcagcccaccctgcttcccgatccttccctgaccccaggggcctctaccacttctgcctctactggaaccgacatgctgggagattacatcttctctatggcaagcgtgacttcttgctgagtgacaaagcctctagcctcctctgcttccagcaccaggaggagagcctggctcagggccccccgctgttagccacttctgtcacctcctggtggagccctcagaacatcagcctgcccagtgccgccagcttcaccttctc

SEQ ID NO: 105482 - DNA, 586 bp, Homo sapiens
  Payload ID: 688
  Gene Symbol: ADGRG1
  Gene Name: adhesion G protein-coupled receptor G1
  ENST ID: ENST00000563414
  CDS Start-End: 254-586
agacaactgaggtccggctgtggtttgagagggaagacagtctagaggggtcaggggagacggttcagcatcctctttgtcccttgctaccagcttggagggtctcgctctgtcacacaggctggagtgcagtggtgtgatcttggctcatcgtaacctccacctcccgggttcaagtgattctcatgcctcagcctcccgagtagctgggattacaggtggtgacttccaagagtgactccgtcggaggaaaatgactccccagtcgctgctgcagacgacactgttcctgctgagtctgctcttcctggtccaaggtgcccacggcaggggccacagggaagactttcgcttctgcagccagcggaaccagacacacaggagcagcctccactacaaacccacaccagacctgcgcatctccatcgagaactccgaagaggccctcacagtccatgcccctttccctgcagcccaccctgcttcccgatccttccctgaccccaggggcctctaccacttctgcctctactggaaccgacatgctgggagattacatcttctctatggcaagcgtgacttcttg

SEQ ID NO: 105483 - DNA, 553 bp, Homo sapiens
  Payload ID: 688
  Gene Symbol: ADGRG1
  Gene Name: adhesion G protein-coupled receptor G1
  ENST ID: ENST00000570044
  CDS Start-End: 342-553
ttccaggcggggcctggactgagggaggaggcaggaagaaactcacaaagagttggcagatcacggatggagggcagcatctcccaacagcctgggcggccgctgagacccagagaacccaaggactcccctgggctcatccagcagcctctgcttcccaggagagaggtgctgaagtccacgaagagggtctcgctctgtcacacaggctggagtgcagtggtgtgatcttggctcatcgtaacctccacctcccgggttcaagtgattctcatgcctcagcctcccgagtagctgggattacaggtggtgacttccaagagtgactccgtcggaggaaaatgactccccagtcgctgctgcagacgacactgttcctgctgagtctgctcttcctggtccaaggtgcccacggcaggggccacagggaagactttcgcttctgcagccagcggaaccagacacacaggagcagcctccactacaaacccacaccagacctgcgcatctccatcgagaactccgaagaggccctcacagtccatgccccttt

SEQ ID NO: 105484 - DNA, 1016 bp, Homo sapiens
  Payload ID: 688
  Gene Symbol: ADGRG1
  Gene Name: adhesion G protein-coupled receptor G1
  ENST ID: ENST00000561988
  CDS Start-End: 249-1016
agactgggtgcctgtggccctgggaggaggtggaaggggaggagcaggccacacaggcacaggccggtgagggacctgcccagacctggagacagggtctcgctctgtcacacaggctggagtgcagtggtgtgatcttggctcatcgtaacctccacctcccgggttcaagtgattctcatgcctcagcctcccgagtagctgggattacaggtggtgacttccaagagtgactccgtcggaggaaaatgactccccagtcgctgctgcagacgacactgttcctgctgagtctgctcttcctggtccaaggtgcccacggcaggggccacagggaagactttcgcttctgcagccagcggaaccagacacacaggagcagcctccactacaaacccacaccagacctgcgcatctccatcgagaactccgaagaggccctcacagtccatgcccctttccctgcagcccaccctgcttcccgatccttccctgaccccaggggcctctaccacttctgcctctactggaaccgacatgctgggagattacatcttctctatggcaagcgtgacttcttgctgagtgacaaagcctctagcctcctctgcttccagcaccaggaggagagcctggctcagggccccccgctgttagccacttctgtcacctcctggtggagccctcagaacatcagcctgcccagtgccgccagcttcaccttctccttccacagtcctccccacacggccgctcacaatgcctcggtggacatgtgcgagctcaaaagggacctccagctgctcagccagttcctgaagcatccccagaaggcctcaaggaggccctcggctgcccccgccagccagcagttgcagagcctggagtcgaaactgacctctgtgagattcatgggggacatggtgtccttcgaggaggaccggatcaacgccacggtgtggaagctccagcccacagccggcctccaggacctgcacatccactcccggcaggag

SEQ ID NO: 105485 - DNA, 699 bp, Homo sapiens
  Payload ID: 688
  Gene Symbol: ADGRG1
  Gene Name: adhesion G protein-coupled receptor G1
  ENST ID: ENST00000562467
  CDS Start-End: 346-699
tgtttgaagctccagtgagggagcagtggctggggtggcccagcttcaaagtctctgtcctcttgaaaaaaggtggtcgggggacattgacccaccagccccgcaggctactgcctgcaaacaagaacccctcatctgccacgcacgttcttaatgtatctatagtctgcctgatgccacaaaggagtccagggtctcgctctgtcacacaggctggagtgcagtggtgtgatcttggctcatcgtaacctccacctcccgggttcaagtgattctcatgcctcagcctcccgagtagctgggattacaggtggtgacttccaagagtgactccgtcggaggaaaatgactccccagtcgctgctgcagacgacactgttcctgctgagtctgctcttcctggtccaagcctctgcctcctcaggtgcccacggcaggggccacagggaagactttcgcttctgcagccagcggaaccagacacacaggagcagcctccactacaaacccacaccagacctgcgcatctccatcgagaactccgaagaggccctcacagtccatgcccctttccctgcagcccaccctgcttcccgatccttccctgaccccaggggcctctaccacttctgcctctactggaaccgacatgctgggagattacatcttctctatggcaagcgtgacttcttgctgagt

SEQ ID NO: 105486 - DNA, 855 bp, Homo sapiens
  Payload ID: 688
  Gene Symbol: ADGRG1
  Gene Name: adhesion G protein-coupled receptor G1
  ENST ID: ENST00000566169
  CDS Start-End: 394-855
gctatccaaggcaaagggacaccaaggggcaaaggtctgtgggtgggatgcctgtgctcgggggcgggcagtggtcactgtgtgtaaagggaagaaggaagcagtggatggccaggttcgtgggtcttcccggcaggagacagcagagaggcgcctgcccgggaagggttaatcccagagccgtccaggtcctgtccactcaacttccacctccatcctctgaggaaatgggttttccaggagcttggcctgggcagcggtgactcgtggctccacacggaagtgactcaggtcccccgggagaaagcgagccgtgggtccccactgcccaccgtgcagaggggcagggctgagccaggtggtgacttccaagagtgactccgtcggaggaaaatgactccccagtcgctgctgcagacgacactgttcctgctgagtctgctcttcctggtccaaggtgcccacggcaggggccacagggaagactttcgcttctgcagccagcggaaccagacacacaggagcagcctccactacaaacccacaccagacctgcgcatctccatcgagaactccgaagaggccctcacagtccatgcccctttccctgcagcccaccctgcttcccgatccttccctgaccccaggggcctctaccacttctgcctctactggaaccgacatgctgggagattacatcttctctatggcaagcgtgacttcttgctgagtgacaaagcctctagcctcctctgcttccagcaccaggaggagagcctggctcagggccccccgctgttagccacttctgtcacctcctggtggagccctcagaacatcagcctgcccagtgcc

SEQ ID NO: 105487 - DNA, 586 bp, Homo sapiens
  Payload ID: 688
  Gene Symbol: ADGRG1
  Gene Name: adhesion G protein-coupled receptor G1
  ENST ID: ENST00000569494
  CDS Start-End: 85-586
gtcacggggctaagtgctatccaaggcaaagggacaccaaggggcaaaggtggtgacttccaagagtgactccgtcggaggaaaatgactccccagtcgctgctgcagacgacactgttcctgctgagtctgctcttcctggtccaaggtgcccacggcaggggccacagggaagactttcgcttctgcagccagcggaaccagacacacaggagcagcctccactacaaacccacaccagacctgcgcatctccatcgagaactccgaagaggccctcacagtccatgcccctttccctgcagcccaccctgcttcccgatccttccctgaccccaggggcctctaccacttctgcctctactggaaccgacatgctgggagattacatcttctctatggcaagcgtgacttcttgctgagtgacaaagcctctagcctcctctgcttccagcaccaggaggagagcctggctcagggccccccgctgttagccacttctgtcacctcctggtggagccctcagaacatcagcctgcccagtgccgccagcttcaccttctccttccacagtcctccccacacgg

SEQ ID NO: 105488 - DNA, 602 bp, Homo sapiens
  Payload ID: 688
  Gene Symbol: ADGRG1
  Gene Name: adhesion G protein-coupled receptor G1
  ENST ID: ENST00000565314
  CDS Start-End: 181-602
cacaaagagttggcagatcacggatggagggcagcatctcccaacagcctgggcggccgctgagacccagagaacccaaggactcccctgggctcatccagcagcctctgcttcccaggagagaggtgctgaagtccacgaagaggtggtgacttccaagagtgactccgtcggaggaaaatgactccccagtcgctgctgcagacgacactgttcctgctgagtctgctcttcctggtccaaggtgcccacggcaggggccacagggaagactttcgcttctgcagccagcggaaccagacacacaggagcagcctccactacaaacccacaccagacctgcgcatctccatcgagaactccgaagaggccctcacagtccatgcccctttccctgcagcccaccctgcttcccgatccttccctgaccccaggggcctctaccacttctgcctctactggaaccgacatgctgggagattacatcttctctatggcaagcgtgacttcttgctgagtgacaaagcctctagcctcctctgcttccagcaccaggaggagagcctggctcagggccccccgctgttagccacttctgtcac

SEQ ID NO: 105489 - DNA, 487 bp, Homo sapiens
  Payload ID: 688
  Gene Symbol: ADGRG1
  Gene Name: adhesion G protein-coupled receptor G1
  ENST ID: ENST00000562414
  CDS Start-End: 361-487
agttgtcgccctgacctggggggtgggcggacagcatccaagggccctgttgccgtggcaaccccggcctctctgtgggaactttggggagactggccctgggaggcgacagatggaggctgaggaagcagagtgatccccggccccttcctgtccctgaacactgtctgcctggatgaggggagatgggctgggagcctcccacgctctccagctcactcggcaggcagcggggaccagggctggcaggttaagcctctgggggtggatcctgaaaggtggtccagccgcctggccctgcgtgggaccctccacctggcagcaggtggtgacttccaagagtgactccgtcggaggaaaatgactccccagtcgctgctgcagacgacactgttcctgctgagtctgctcttcctggtccaaggtgcccacggcaggggccacagggaagactttcgcttctgcagccagcggaaccagacacaca

SEQ ID NO: 105490 - DNA, 578 bp, Homo sapiens
  Payload ID: 688
  Gene Symbol: ADGRG1
  Gene Name: adhesion G protein-coupled receptor G1
  ENST ID: ENST00000569154
  CDS Start-End: 224-578
aatcccagagccgtccaggtcctgtccactcaacttccacctccatcctctgaggaaatgggttttccaggagcttggcctgggcagcggtgactcgtggctccacacggaagtgactcaggtcccccgggagaaagcgagccgtgggtccccactgcccaccgtgcagaggggcagggctgagccaggtggtgacttccaagagtgactccgtcggaggaaaatgactccccagtcgctgctgcagacgacactgttcctgctgagtctgctcttcctggtccaagcccctgccacggggtcccatctgcagcctctgcctcctcaggtgcccacggcaggggccacagggaagactttcgcttctgcagccagcggaaccagacacacaggagcagcctccactacaaacccacaccagacctgcgcatctccatcgagaactccgaagaggccctcacagtccatgcccctttccctgcagcccaccctgcttcccgatccttccctgaccccaggggcctctaccacttctgcctctactggaaccgacatgctgggagattacatcttctcta

SEQ ID NO: 105491 - DNA, 533 bp, Homo sapiens
  Payload ID: 688
  Gene Symbol: ADGRG1
  Gene Name: adhesion G protein-coupled receptor G1
  ENST ID: ENST00000564722
  CDS Start-End: 141-533
ggttggtactgagcgcctgatggctgaggccctgtagcgctggggatctgcggctccagaggcagagacagccatgcctactgacagtgaaggctcactttgaaggtggtgacttccaagagtgactccgtcggaggaaaatgactccccagtcgctgctgcagacgacactgttcctgctgagtctgctcttcctggtccaaggtgcccacggcaggggccacagggaagactttcgcttctgcagccagcggaaccagacacacaggagcagcctccactacaaacccacaccagacctgcgcatctccatcgagaactccgaagaggccctcacagtccatgcccctttccctgcagcccaccctgcttcccgatccttccctgaccccaggggcctctaccacttctgcctctactggaaccgacatgctgggagattacatcttctctatggcaagcgtgacttcttgctgagtgacaaagcctctagcctcctctgcttccagcaccaggaggagagcctggctcag

SEQ ID NO: 105492 - DNA, 591 bp, Homo sapiens
  Payload ID: 688
  Gene Symbol: ADGRG1
  Gene Name: adhesion G protein-coupled receptor G1
  ENST ID: ENST00000565770
  CDS Start-End: 322-591
agctgtctgccctgccctgccgtaggagatgggctgggagcctcccacgctctccagctcactcggcaggcagcggggaccagggctggcaggttaagcctctgggggtggatcctgaaaggtggtccagccgcctggccctgcgtgggaccctccacctggcagcagggtctcgctctgtcacacaggctggagtgcagtggtgtgatcttggctcatcgtaacctccacctcccgggttcaagtgattctcatgcctcagcctcccgagtagctgggattacaggtggtgacttccaagagtgactccgtcggaggaaaatgactccccagtcgctgctgcagacgacactgttcctgctgagtctgctcttcctggtccaagcccctgccacggggtcccatctgcagcctctgcctcctcaggtgcccacggcaggggccacagggaagactttcgcttctgcagccagcggaaccagacacacaggagcagcctccactacaaacccacaccagacctgcgcatctccatcgagaactccgaagaggccctcacagtccatgcccctttccctgcagcccaccctg

SEQ ID NO: 105493 - DNA, 3858 bp, Homo sapiens
  Payload ID: 688
  Gene Symbol: ADGRG1
  Gene Name: adhesion G protein-coupled receptor G1
  Uniprot ID: Q9Y653
  ENST ID: ENST00000562558
  CDS Start-End: 352-2415
aaacaaacccggtccctccctctccgcactagctgtctgccctgccctgccgtaggagatgggctgggagcctcccacgctctccagctcactcggcaggcagcggggaccagggctggcaggttaagcctctgggggtggatcctgaaaggtggtccagccgcctggccctgcgtgggaccctccacctggcagcagggtctcgctctgtcacacaggctggagtgcagtggtgtgatcttggctcatcgtaacctccacctcccgggttcaagtgattctcatgcctcagcctcccgagtagctgggattacaggtggtgacttccaagagtgactccgtcggaggaaaatgactccccagtcgctgctgcagacgacactgttcctgctgagtctgctcttcctggtccaaggtgcccacggcaggggccacagggaagactttcgcttctgcagccagcggaaccagacacacaggagcagcctccactacaaacccacaccagacctgcgcatctccatcgagaactccgaagaggccctcacagtccatgcccctttccctgcagcccaccctgcttcccgatccttccctgaccccaggggcctctaccacttctgcctctactggaaccgacatgctgggagattacatcttctctatggcaagcgtgacttcttgctgagtgacaaagcctctagcctcctctgcttccagcaccaggaggagagcctggctcagggccccccgctgttagccacttctgtcacctcctggtggagccctcagaacatcagcctgcccagtgccgccagcttcaccttctccttccacagtcctccccacacggccgctcacaatgcctcggtggacatgtgcgagctcaaaagggacctccagctgctcagccagttcctgaagcatccccagaaggcctcaaggaggccctcggctgcccccgccagccagcagttgcagagcctggagtcgaaactgacctctgtgagattcatgggggacatggtgtccttcgaggaggaccggatcaacgccacggtgtggaagctccagcccacagccggcctccaggacctgcacatccactcccggcaggaggaggagcagagcgagatcatggagtactcggtgctgctgcctcgaacactcttccagaggacgaaaggccggagcggggaggctgagaagagactcctcctggtggacttcagcagccaagccctgttccaggacaagaattccagccaagtcctgggtgagaaggtcttggggattgtggtacagaacaccaaagtagccaacctcacggagcccgtggtgctcactttccagcaccagctacagccgaagaatgtgactctgcaatgtgtgttctgggttgaagaccccacattgagcagcccggggcattggagcagtgctgggtgtgagaccgtcaggagagaaacccaaacatcctgcttctgcaaccacttgacctactttgcagtgctgatggtctcctcggtggaggtggacgccgtgcacaagcactacctgagcctcctctcctacgtgggctgtgtcgtctctgccctggcctgccttgtcaccattgccgcctacctctgctccaggaggaaacctcgggactacaccatcaaggtgcacatgaacctgctgctggccgtcttcctgctggacacgagcttcctgctcagcgagccggtggccctgacaggctctgaggctggctgccgagccagtgccatcttcctgcacttctccctgctcacctgcctttcctggatgggcctcgaggggtacaacctctaccgactcgtggtggaggtctttggcacctatgtccctggctacctactcaagctgagcgccatgggctggggcttccccatctttctggtgacgctggtggccctggtggatgtggacaactatggccccatcatcttggctgtgcataggactccagagggcgtcatctacccttccatgtgctggatccgggactccctggtcagctacatcaccaacctgggcctcttcagcctggtgtttctgttcaacatggccatgctagccaccatggtggtgcagatcctgcggctgcgcccccacacccaaaagtggtcacatgtgctgacactgctgggcctcagcctggtccttggcctgccctgggccttgatcttcttctcctttgcttctggcaccttccagcttgtcgtcctctaccttttcagcatcatcacctccttccaaggcttcctcatcttcatctggtactggtccatgcggctgcaggcccggggtggcccctcccctctgaagagcaactcagacagcgccaggctccccatcagctcgggcagcacctcgtccagccgcatctaggcctccagcccacctgcccatgtgatgaagcagagattcggcctcgtcgcacactgcctgtggcccccgagcccggcccagccccaggccagtcagccgcagactttggaaagcccaacgaccatggagagatgggccgttgccatggtggacggactcccgggctgggcttttgaattggccttggggactactcggctctcactcagctcccacgggactcagaagtgcgccgccatgctgcctagggtactgtccccacatctgtcccaacccagctggaggcctggtctctccttacaacccctgggcccagccctcattgctgggggccaggccttggatcttgagggtctggcacatccttaatcctgtgcccctgcctgggacagaaatgtggctccagttgctctgtctctcgtggtcaccctgagggcactctgcatcctctgtcattttaacctcaggtggcacccagggcgaatggggcccagggcagaccttcagggccagagccctggcggaggagaggccctttgccaggagcacagcagcagctcgcctacctctgagcccaggccccctccctccctcagccccccagtcctccctccatcttccctggggttctcctcctctcccagggcctccttgctccttcgttcacagctgggggtccccgattccaatgctgttttttggggagtggtttccaggagctgcctggtgtctgctgtaaatgtttgtctactgcacaagcctcggcctgcccctgagccaggctcggtaccgatgcgtgggctgggctaggtccctctgtccatctgggcctttgtatgagctgcattgcccttgctcaccctgaccaagcacacgcctcagaggggccctcagcctctcctgaagccctcttgtggcaagaactgtggaccatgccagtcccgtctggtttccatcccaccactccaaggactgagactgacctcctctggtgacactggcctagggcctgacactctcctaagaggttctctccaagcccccaaatagctccaggcgccctcggccgcccatcatggttaattctgtccaacaaacacacacgggtagattgctggcctgttgtaggtggtagggacacagatgaccgacctggtcactcctcctgccaacattcagtctggtatgtgaggcgtgcgtgaagcaagaactcctggagctacagggacagggagccatcattcctgcctgggaatcctggaagacttcctgcaggagtcagcgttcaatcttgaccttgaagatgggaaggatgttctttttacgtaccaattcttttgtcttttgatattaaaaagaagtacatgttcattgtagagaatttggaaactgtagaagagaatcaagaagaaaaataaaaatcagctgttgtaatcacctagc

SEQ ID NO: 105494 - DNA, 690 bp, Homo sapiens
  Payload ID: 688
  Gene Symbol: ADGRG1
  Gene Name: adhesion G protein-coupled receptor G1
  ENST ID: ENST00000567154
  CDS Start-End: 343-690
cacatatatcgtccgtcatccccagtcaagctcagggaggagggaggagcccagctggggcaggagaggggtgtctccccaccaaacaaacccggtccctccctctccgcactagctgtctgccctgccctgccgtaggagatgggctgggagcctcccacgctctccagctcactcggcaggcagcggggaccagggctggcaggttaagcctctgggggtggatcctgaaaggtggtccagccgcctggccctgcgtgggaccctccacctggcagcaggtacccaaacaagggctggacagcaggtggtgacttccaagagtgactccgtcggaggaaaatgactccccagtcgctgctgcagacgacactgttcctgctgagtctgctcttcctggtccaaggtgcccacggcaggggccacagggaagactttcgcttctgcagccagcggaaccagacacacaggagcagcctccactacaaacccacaccagacctgcgcatctccatcgagaactccgaagaggccctcacagtccatgcccctttccctgcagcccaccctgcttcccgatccttccctgaccccaggggcctctaccacttctgcctctactggaaccgacatgctgggagattacatcttctctatggcaagcgtgacttcttgctgagtgacaaagcc

SEQ ID NO: 105495 - DNA, 560 bp, Homo sapiens
  Payload ID: 688
  Gene Symbol: ADGRG1
  Gene Name: adhesion G protein-coupled receptor G1
  ENST ID: ENST00000568531
  CDS Start-End: 184-560
ttcaaagtctctgtcctcttgaaaaaaggtggtcgggggacattgacccaccagccccgcaggctactgcctgcaaacaagaacccctcatctgccacgcacgttcttaatgtatctatagtctgcctgatgccacaaaggagtccaggtggtgacttccaagagtgactccgtcggaggaaaatgactccccagtcgctgctgcagacgacactgttcctgctgagtctgctcttcctggtccaagcccaccctgcttcccgatccttccctgaccccaggggcctctaccacttctgcctctactggaaccgacatgctgggagattacatcttctctatggcaagcgtgacttcttgctgagtgacaaagcctctagcctcctctgcttccagcaccaggaggagagcctggctcagggccccccgctgttagccacttctgtcacctcctggtggagccctcagaacatcagcctgcccagtgccgccagcttcaccttctccttccacagtcctccccacacggccgctcacaatgcctcggtggacatgtgcga

SEQ ID NO: 105496 - DNA, 561 bp, Homo sapiens
  Payload ID: 688
  Gene Symbol: ADGRG1
  Gene Name: adhesion G protein-coupled receptor G1
  ENST ID: ENST00000565391
  CDS Start-End: 1-561
ctcggtggacatgtgcgagctcaaaagggacctccagctgctcagccagttcctgaagcatccccagaaggcctcaaggaggccctcggctgcccccgccagccagcagttgcagagcctggagtcgaaactgacctctgtgagattcatgggggacatggtgtccttcgaggaggaccggatcaacgccacggtgtggaagctccagcccacagccggcctccaggacctgcacatccactcccggcaggaggaggagcagagcgagatcatggagtactcggtgctgctgcctcgaacactcttccagaggacgaaaggccggagcggggaggctgagaagagactcctcctggtggacttcagcagccaagccctgttccaggacaagaattccagccaagtcctgggtgagaaggtctttggcacctatgtccctggctacctactcaagctgagcgccatgggctggggcttccccatctttctggtgacgctggtggccctggtggatgtggacaactatggccccatcatcttggctgtgcataggactccaga

SEQ ID NO: 105497 - DNA, 563 bp, Homo sapiens
  Payload ID: 688
  Gene Symbol: ADGRG1
  Gene Name: adhesion G protein-coupled receptor G1
  ENST ID: ENST00000565587
  CDS Start-End: 415-563
aaaatgagatggttggtgaccccagaggacaaacctgggttgtgctttctgagccatctcctggtgctgagcacttggaccgcttcagctctccacgggtcaggctggacagccctgtgaccacagcttgtcactggagtgtcttttcttcagggcccctcttgagtaggaggagaccaggctttgaaggttcctgagaggagatgtacgggacctgaatacagctttcctgacctgcccctcataggagcctgcagggagggtctcgctctgtcacacaggctggagtgcagtggtgtgatcttggctcatcgtaacctccacctcccgggttcaagtgattctcatgcctcagcctcccgagtagctgggattacaggtggtgacttccaagagtgactccgtcggaggaaaatgactccccagtcgctgctgcagacgacactgttcctgctgagtctgctcttcctggtccaaggtgcccacggcaggggccacagggaagactttcgcttctgcagccagcggaaccagacacacaggagcagcctccactacaaacc

SEQ ID NO: 105498 - DNA, 593 bp, Homo sapiens
  Payload ID: 688
  Gene Symbol: ADGRG1
  Gene Name: adhesion G protein-coupled receptor G1
  ENST ID: ENST00000567702
  CDS Start-End: 272-593
atggaggctgaggaagcagagtgatccccggccccttcctgtccctgaacactgtctgcctggatgagggctgtctgccctgccctgccgtaggagatgggctgggagcctcccacgctctccagctcactcggcaggcagcggggaccagggctggcaggttaagcctctgggggtggatcctgaaaggtggtccagccgcctggccctgcgtgggaccctccacctggcagcaggtggtgacttccaagagtgactccgtcggaggaaaatgactccccagtcgctgctgcagacgacactgttcctgctgagtctgctcttcctggtccaaggtgcccacggcaggggccacagggaagactttcgcttctgcagccagcggaaccagacacacaggagcagcctccactacaaacccacaccagacctgcgcatctccatcgagaactccgaagaggccctcacagtccatgcccctttccctgcagcccaccctgcttcccgatccttccctgaccccaggggcctctaccacttctgcctctactggaaccgacatgctgggagattacatcttctctatggcaagc

SEQ ID NO: 105499 - DNA, 3741 bp, Homo sapiens
  Payload ID: 688
  Gene Symbol: ADGRG1
  Gene Name: adhesion G protein-coupled receptor G1
  Uniprot ID: Q9Y653
  ENST ID: ENST00000567835
  CDS Start-End: 214-2295
ggaaggggaggagcaggccacacaggcacaggccggtgagggacctgcccagacctggagggtctcgctctgtcacacaggctggagtgcagtggtgtgatcttggctcatcgtaacctccacctcccgggttcaagtgattctcatgcctcagcctcccgagtagctgggattacaggtggtgacttccaagagtgactccgtcggaggaaaatgactccccagtcgctgctgcagacgacactgttcctgctgagtctgctcttcctggtccaaggtgcccacggcaggggccacagggaagactttcgcttctgcagccagcggaaccagacacacaggagcagcctccactacaaacccacaccagacctgcgcatctccatcgagaactccgaagaggccctcacagtccatgcccctttccctgcagcccaccctgcttcccgatccttccctgaccccaggggcctctaccacttctgcctctactggaaccgacatgctgggagattacatcttctctatggcaagcgtgacttcttgctgagtgacaaagcctctagcctcctctgcttccagcaccaggaggagagcctggctcagggccccccgctgttagccacttctgtcacctcctggtggagccctcagaacatcagcctgcccagtgccgccagcttcaccttctccttccacagtcctccccacacggccgctcacaatgcctcggtggacatgtgcgagctcaaaagggacctccagctgctcagccagttcctgaagcatccccagaaggcctcaaggaggccctcggctgcccccgccagccagcagttgcagagcctggagtcgaaactgacctctgtgagattcatgggggacatggtgtccttcgaggaggaccggatcaacgccacggtgtggaagctccagcccacagccggcctccaggacctgcacatccactcccggcaggaggaggagcagagcgagatcatggagtactcggtgctgctgcctcgaacactcttccagaggacgaaaggccggagcggggaggctgagaagagactcctcctggtggacttcagcagccaagccctgttccaggacaagaattccagccaagtcctgggtgagaaggtcttggggattgtggtacagaacaccaaagtagccaacctcacggagcccgtggtgctcactttccagcaccagctacagccgaagaatgtgactctgcaatgtgtgttctgggttgaagaccccacattgagcagcccggggcattggagcagtgctgggtgtgagaccgtcaggagagaaacccaaacatcctgcttctgcaaccacttgacctactttgcagtgctgatggtctcctcggtggaggtggacgccgtgcacaagcactacctgagcctcctctcctacgtgggctgtgtcgtctctgccctggcctgccttgtcaccattgccgcctacctctgctccagggtgcccctgccgtgcaggaggaaacctcgggactacaccatcaaggtgcacatgaacctgctgctggccgtcttcctgctggacacgagcttcctgctcagcgagccggtggccctgacaggctctgaggctggctgccgagccagtgccatcttcctgcacttctccctgctcacctgcctttcctggatgggcctcgaggggtacaacctctaccgactcgtggtggaggtctttggcacctatgtccctggctacctactcaagctgagcgccatgggctggggcttccccatctttctggtgacgctggtggccctggtggatgtggacaactatggccccatcatcttggctgtgcataggactccagagggcgtcatctacccttccatgtgctggatccgggactccctggtcagctacatcaccaacctgggcctcttcagcctggtgtttctgttcaacatggccatgctagccaccatggtggtgcagatcctgcggctgcgcccccacacccaaaagtggtcacatgtgctgacactgctgggcctcagcctggtccttggcctgccctgggccttgatcttcttctcctttgcttctggcaccttccagcttgtcgtcctctaccttttcagcatcatcacctccttccaaggcttcctcatcttcatctggtactggtccatgcggctgcaggcccggggtggcccctcccctctgaagagcaactcagacagcgccaggctccccatcagctcgggcagcacctcgtccagccgcatctaggcctccagcccacctgcccatgtgatgaagcagagattcggcctcgtcgcacactgcctgtggcccccgagcccggcccagccccaggccagtcagccgcagactttggaaagcccaacgaccatggagagatgggccgttgccatggtggacggactcccgggctgggcttttgaattggccttggggactactcggctctcactcagctcccacgggactcagaagtgcgccgccatgctgcctagggtactgtccccacatctgtcccaacccagctggaggcctggtctctccttacaacccctgggcccagccctcattgctgggggccaggccttggatcttgagggtctggcacatccttaatcctgtgcccctgcctgggacagaaatgtggctccagttgctctgtctctcgtggtcaccctgagggcactctgcatcctctgtcattttaacctcaggtggcacccagggcgaatggggcccagggcagaccttcagggccagagccctggcggaggagaggccctttgccaggagcacagcagcagctcgcctacctctgagcccaggccccctccctccctcagccccccagtcctccctccatcttccctggggttctcctcctctcccagggcctccttgctccttcgttcacagctgggggtccccgattccaatgctgttttttggggagtggtttccaggagctgcctggtgtctgctgtaaatgtttgtctactgcacaagcctcggcctgcccctgagccaggctcggtaccgatgcgtgggctgggctaggtccctctgtccatctgggcctttgtatgagctgcattgcccttgctcaccctgaccaagcacacgcctcagaggggccctcagcctctcctgaagccctcttgtggcaagaactgtggaccatgccagtcccgtctggtttccatcccaccactccaaggactgagactgacctcctctggtgacactggcctagggcctgacactctcctaagaggttctctccaagcccccaaatagctccaggcgccctcggccgcccatcatggttaattctgtccaacaaacacacacgggtagattgctggcctgttgtaggtggtagggacacagatgaccgacctggtcactcctcctgccaacattcagtctggtatgtgaggcgtgcgtgaagcaagaactcctggagctacagggacagggagccatcattcctgcctgggaatcctggaagacttcctgcaggagtcagcgttcaatcttgaccttgaagatgggaaggatgttctttttacgtaccaattcttttgtcttttgatattaaaaagaagtacatgttcattgtagagaatttggaaactgtagaagagaatcaagaagaaaaataaaaatcagctgttgtaatcacctagcaaa

SEQ ID NO: 105500 - DNA, 555 bp, Homo sapiens
  Payload ID: 688
  Gene Symbol: ADGRG1
  Gene Name: adhesion G protein-coupled receptor G1
  ENST ID: ENST00000566778
  CDS Start-End: 246-555
cagactgggtgcctgtggccctgggaggaggtggaaggggaggagcaggccacacaggcacaggccggtgagggacctgcccagacctggagggtctcgctctgtcacacaggctggagtgcagtggtgtgatcttggctcatcgtaacctccacctcccgggttcaagtgattctcatgcctcagcctcccgagtagctgggattacaggtggtgacttccaagagtgactccgtcggaggaaaatgactccccagtcgctgctgcagacgacactgttcctgctgagtctgctcttcctggtccaagcctctgcctcctcaggtgcccacggcaggggccacagggaagactttcgcttctgcagccagcggaaccagacacacaggagcagcctccactacaaacccacaccagacctgcgcatctccatcgagaactccgaagaggccctcacagtccatgcccctttccctgcagcccaccctgcttcccgatccttccctgaccccaggggcctctaccacttctgcctctactggaaccgacatgctg

SEQ ID NO: 105501 - DNA, 478 bp, Homo sapiens
  Payload ID: 688
  Gene Symbol: ADGRG1
  Gene Name: adhesion G protein-coupled receptor G1
  ENST ID: ENST00000562682
  CDS Start-End: 247-478
agtcgaggggaaggacaggagagaggtggcagagctgcagcagggttggtgtaggggttggcctcctggcaaggcccagcatgacaaaggcagggtctcgctctgtcacacaggctggagtgcagtggtgtgatcttggctcatcgtaacctccacctcccgggttcaagtgattctcatgcctcagcctcccgagtagctgggattacaggtggtgacttccaagagtgactccgtcggaggaaaatgactccccagtcgctgctgcagacgacactgttcctgctgagtctgctcttcctggtccaaggtgcccacggcaggggccacagggaagactttcgcttctgcagccagcggaaccagacacacaggagcagcctccactacaaacccacaccagacctgcgcatctccatcgagaactccgaagaggccctcacagtccatgcccctttccctgcagcccaccctgctt

SEQ ID NO: 105502 - DNA, 618 bp, Homo sapiens
  Payload ID: 688
  Gene Symbol: ADGRG1
  Gene Name: adhesion G protein-coupled receptor G1
  ENST ID: ENST00000567915
  CDS Start-End: 265-618
tggggcttctcagcctctattccctggctgtcccctttgtttgaagctccagtgagggagcagtggctggggtggcccagcttcaaagtctctgtcctcttgaaaaaaggtggtcgggggacattgacccaccagccccgcaggctactgcctgcaaacaagaacccctcatctgccacgcacgttcttaatgtatctatagtctgcctgatgccacaaaggagtccaggtggtgacttccaagagtgactccgtcggaggaaaatgactccccagtcgctgctgcagacgacactgttcctgctgagtctgctcttcctggtccaagcctctgcctcctcaggtgcccacggcaggggccacagggaagactttcgcttctgcagccagcggaaccagacacacaggagcagcctccactacaaacccacaccagacctgcgcatctccatcgagaactccgaagaggccctcacagtccatgcccctttccctgcagcccaccctgcttcccgatccttccctgaccccaggggcctctaccacttctgcctctactggaaccgacatgctgggagattacatcttctctatggcaagcgtgacttcttgctgagt

SEQ ID NO: 105503 - DNA, 592 bp, Homo sapiens
  Payload ID: 688
  Gene Symbol: ADGRG1
  Gene Name: adhesion G protein-coupled receptor G1
  ENST ID: ENST00000563445
  CDS Start-End: 254-592
tttggggagactggccctgggaggcgacagatggaggctgaggaagcagagtgatccccggccccttcctgtccctgaacactgtctgcctggatgagggggtctcgctctgtcacacaggctggagtgcagtggtgtgatcttggctcatcgtaacctccacctcccgggttcaagtgattctcatgcctcagcctcccgagtagctgggattacaggtggtgacttccaagagtgactccgtcggaggaaaatgactccccagtcgctgctgcagacgacactgttcctgctgagtctgctcttcctggtccaaggtgcccacggcaggggccacagggaagactttcgcttctgcagccagcggaaccagacacacaggagcagcctccactacaaacccacaccagacctgcgcatctccatcgagaactccgaagaggccctcacagtccatgcccctttccctgcagcccaccctgcttcccgatccttccctgaccccaggggcctctaccacttctgcctctactggaaccgacatgctgggagattacatcttctctatggcaagcgtgacttcttgctgagt

SEQ ID NO: 105504 - DNA, 560 bp, Homo sapiens
  Payload ID: 688
  Gene Symbol: ADGRG1
  Gene Name: adhesion G protein-coupled receptor G1
  ENST ID: ENST00000565338
  CDS Start-End: 392-560
agatggaggctgaggaagcagagtgatccccggccccttcctgtccctgaacactgtctgcctggatgagggctgtctgccctgccctgccgtaggagatgggctgggagcctcccacgctctccagctcactcggcaggcagcggggaccagggctggcaggttaagcctctgggggtggatcctgaaaggtggtccagccgcctggccctgcgtgggaccctccacctggcagcagggtctcgctctgtcacacaggctggagtgcagtggtgtgatcttggctcatcgtaacctccacctcccgggttcaagtgattctcatgcctcagcctcccgagtagctgggattacaggtggtgacttccaagagtgactccgtcggaggaaaatgactccccagtcgctgctgcagacgacactgttcctgctgagtctgctcttcctggtccaaggtgcccacggcaggggccacagggaagactttcgcttctgcagccagcggaaccagacacacaggagcagcctccactacaaacccacaccagacctgcgcatct

SEQ ID NO: 105505 - DNA, 579 bp, Homo sapiens
  Payload ID: 688
  Gene Symbol: ADGRG1
  Gene Name: adhesion G protein-coupled receptor G1
  ENST ID: ENST00000566123
  CDS Start-End: 327-579
gtctctggctgctgggttaaggctcaagcttgggagcagcttcacgtgtgagggagacgagggggaggtggcgcccagtcgaggggaaggacaggagagaggtggcagagctgcagcagggttggtgtaggggttggcctcctggcaaggcccagcatgacaaaggcagacagggtctcgctctgtcacacaggctggagtgcagtggtgtgatcttggctcatcgtaacctccacctcccgggttcaagtgattctcatgcctcagcctcccgagtagctgggattacaggtggtgacttccaagagtgactccgtcggaggaaaatgactccccagtcgctgctgcagacgacactgttcctgctgagtctgctcttcctggtccaaggtgcccacggcaggggccacagggaagactttcgcttctgcagccagcggaaccagacacacaggagcagcctccactacaaacccacaccagacctgcgcatctccatcgagaactccgaagaggccctcacagtccatgcccctttccctgcagcccaccctgcttcccgatccttccctgacccca

SEQ ID NO: 105506 - DNA, 545 bp, Homo sapiens
  Payload ID: 688
  Gene Symbol: ADGRG1
  Gene Name: adhesion G protein-coupled receptor G1
  ENST ID: ENST00000566187
  CDS Start-End: 87-545
acagagatacttagctgagactgatggcacctgcctctaagccgtttacaggtggtgacttccaagagtgactccgtcggaggaaaatgactccccagtcgctgctgcagacgacactgttcctgctgagtctgctcttcctggtccaaggtgcccacggcaggggccacagggaagactttcgcttctgcagccagcggaaccagacacacaggagcagcctccactacaaacccacaccagacctgcgcatctccatcgagaactccgaagaggccctcacagtccatgcccctttccctgcagcccaccctgcttcccgatccttccctgaccccaggggcctctaccacttctgcctctactggaaccgacatgctgggagattacatcttctctatggcaagcgtgacttcttgctgagtgacaaagcctctagcctcctctgcttccagcaccaggaggagagcctggctcagggccccccgctgttagccacttctgtcacctcctggtggagccctcagaacatcagcctgcccagt

SEQ ID NO: 105507 - DNA, 525 bp, Homo sapiens
  Payload ID: 688
  Gene Symbol: ADGRG1
  Gene Name: adhesion G protein-coupled receptor G1
  ENST ID: ENST00000564360
  CDS Start-End: 226-525
aagtccagggcgtgaggggactggaagtgcaggaaagagccaccagtggggctgggatccaaggtcacctggggtctcgctctgtcacacaggctggagtgcagtggtgtgatcttggctcatcgtaacctccacctcccgggttcaagtgattctcatgcctcagcctcccgagtagctgggattacaggtggtgacttccaagagtgactccgtcggaggaaaatgactccccagtcgctgctgcagacgacactgttcctgctgagtctgctcttcctggtccaaggtgcccacggcaggggccacagggaagactttcgcttctgcagccagcggaaccagacacacaggagcagcctccactacaaacccacaccagacctgcgcatctccatcgagaactccgaagaggccctcacagtccatgcccctttccctgcagcccaccctgcttcccgatccttccctgaccccaggggcctctaccacttctgcctctactggaaccgacatgctgggaga

SEQ ID NO: 105508 - DNA, 451 bp, Homo sapiens
  Payload ID: 688
  Gene Symbol: ADGRG1
  Gene Name: adhesion G protein-coupled receptor G1
  ENST ID: ENST00000569531
  CDS Start-End: 96-451
agtttcaactgcagctcttcattttaccaagagagaagtggtggcagtcctggtgtccaggtggtgacttccaagagtgactccgtcggaggaaaatgactccccagtcgctgctgcagacgacactgttcctgctgagtctgctcttcctggtccaaggtgcccacggcaggggccacagggaagactttcgcttctgcagccagcggaaccagacacacaggagcagcctccactacaaacccacaccagacctgcgcatctccatcgagaactccgaagaggccctcacagtccatgcccctttccctgcagcccaccctgcttcccgatccttccctgaccccaggggcctctaccacttctgcctctactggaaccgacatgctgggagattacatcttctctatggcaagcgtgacttcttgctgagtgacaaagcctctagcct

SEQ ID NO: 105509 - DNA, 3852 bp, Homo sapiens
  Payload ID: 688
  Gene Symbol: ADGRG1
  Gene Name: adhesion G protein-coupled receptor G1
  Uniprot ID: Q9Y653
  ENST ID: ENST00000568908
  CDS Start-End: 349-2412
aacaagagagggtggcggctgcagtggctgtggggcagccggaaatggggcgagacagacaggcggagcctcacctggggctgcccgccagcccagacaagctcagactgggtgcctgtggccctgggaggaggtggaaggggaggagcaggccacacaggcacaggccggtgagggacctgcccagacctggagggtctcgctctgtcacacaggctggagtgcagtggtgtgatcttggctcatcgtaacctccacctcccgggttcaagtgattctcatgcctcagcctcccgagtagctgggattacaggtggtgacttccaagagtgactccgtcggaggaaaatgactccccagtcgctgctgcagacgacactgttcctgctgagtctgctcttcctggtccaaggtgcccacggcaggggccacagggaagactttcgcttctgcagccagcggaaccagacacacaggagcagcctccactacaaacccacaccagacctgcgcatctccatcgagaactccgaagaggccctcacagtccatgcccctttccctgcagcccaccctgcttcccgatccttccctgaccccaggggcctctaccacttctgcctctactggaaccgacatgctgggagattacatcttctctatggcaagcgtgacttcttgctgagtgacaaagcctctagcctcctctgcttccagcaccaggaggagagcctggctcagggccccccgctgttagccacttctgtcacctcctggtggagccctcagaacatcagcctgcccagtgccgccagcttcaccttctccttccacagtcctccccacacggccgctcacaatgcctcggtggacatgtgcgagctcaaaagggacctccagctgctcagccagttcctgaagcatccccagaaggcctcaaggaggccctcggctgcccccgccagccagcagttgcagagcctggagtcgaaactgacctctgtgagattcatgggggacatggtgtccttcgaggaggaccggatcaacgccacggtgtggaagctccagcccacagccggcctccaggacctgcacatccactcccggcaggaggaggagcagagcgagatcatggagtactcggtgctgctgcctcgaacactcttccagaggacgaaaggccggagcggggaggctgagaagagactcctcctggtggacttcagcagccaagccctgttccaggacaagaattccagccaagtcctgggtgagaaggtcttggggattgtggtacagaacaccaaagtagccaacctcacggagcccgtggtgctcactttccagcaccagctacagccgaagaatgtgactctgcaatgtgtgttctgggttgaagaccccacattgagcagcccggggcattggagcagtgctgggtgtgagaccgtcaggagagaaacccaaacatcctgcttctgcaaccacttgacctactttgcagtgctgatggtctcctcggtggaggtggacgccgtgcacaagcactacctgagcctcctctcctacgtgggctgtgtcgtctctgccctggcctgccttgtcaccattgccgcctacctctgctccaggaggaaacctcgggactacaccatcaaggtgcacatgaacctgctgctggccgtcttcctgctggacacgagcttcctgctcagcgagccggtggccctgacaggctctgaggctggctgccgagccagtgccatcttcctgcacttctccctgctcacctgcctttcctggatgggcctcgaggggtacaacctctaccgactcgtggtggaggtctttggcacctatgtccctggctacctactcaagctgagcgccatgggctggggcttccccatctttctggtgacgctggtggccctggtggatgtggacaactatggccccatcatcttggctgtgcataggactccagagggcgtcatctacccttccatgtgctggatccgggactccctggtcagctacatcaccaacctgggcctcttcagcctggtgtttctgttcaacatggccatgctagccaccatggtggtgcagatcctgcggctgcgcccccacacccaaaagtggtcacatgtgctgacactgctgggcctcagcctggtccttggcctgccctgggccttgatcttcttctcctttgcttctggcaccttccagcttgtcgtcctctaccttttcagcatcatcacctccttccaaggcttcctcatcttcatctggtactggtccatgcggctgcaggcccggggtggcccctcccctctgaagagcaactcagacagcgccaggctccccatcagctcgggcagcacctcgtccagccgcatctaggcctccagcccacctgcccatgtgatgaagcagagattcggcctcgtcgcacactgcctgtggcccccgagcccggcccagccccaggccagtcagccgcagactttggaaagcccaacgaccatggagagatgggccgttgccatggtggacggactcccgggctgggcttttgaattggccttggggactactcggctctcactcagctcccacgggactcagaagtgcgccgccatgctgcctagggtactgtccccacatctgtcccaacccagctggaggcctggtctctccttacaacccctgggcccagccctcattgctgggggccaggccttggatcttgagggtctggcacatccttaatcctgtgcccctgcctgggacagaaatgtggctccagttgctctgtctctcgtggtcaccctgagggcactctgcatcctctgtcattttaacctcaggtggcacccagggcgaatggggcccagggcagaccttcagggccagagccctggcggaggagaggccctttgccaggagcacagcagcagctcgcctacctctgagcccaggccccctccctccctcagccccccagtcctccctccatcttccctggggttctcctcctctcccagggcctccttgctccttcgttcacagctgggggtccccgattccaatgctgttttttggggagtggtttccaggagctgcctggtgtctgctgtaaatgtttgtctactgcacaagcctcggcctgcccctgagccaggctcggtaccgatgcgtgggctgggctaggtccctctgtccatctgggcctttgtatgagctgcattgcccttgctcaccctgaccaagcacacgcctcagaggggccctcagcctctcctgaagccctcttgtggcaagaactgtggaccatgccagtcccgtctggtttccatcccaccactccaaggactgagactgacctcctctggtgacactggcctagggcctgacactctcctaagaggttctctccaagcccccaaatagctccaggcgccctcggccgcccatcatggttaattctgtccaacaaacacacacgggtagattgctggcctgttgtaggtggtagggacacagatgaccgacctggtcactcctcctgccaacattcagtctggtatgtgaggcgtgcgtgaagcaagaactcctggagctacagggacagggagccatcattcctgcctgggaatcctggaagacttcctgcaggagtcagcgttcaatcttgaccttgaagatgggaaggatgttctttttacgtaccaattcttttgtcttttgatattaaaaagaagtacatgttcattgtagagaatttggaaactgtagaagagaatcaagaagaaaaataaaaatcagctgttgtaatcacct

SEQ ID NO: 105510 - DNA, 2688 bp, Homo sapiens
  Payload ID: 688
  Gene Symbol: ADGRG1
  Gene Name: adhesion G protein-coupled receptor G1
  ENST ID: ENST00000565539
  CDS Start-End: 282-575
tctcccgcgctggcggctggggcttctcagcctctattccctggctgtcccctttgtttgaagctccagtgagggagcagtggctggggtggcccagcttcaaagtctctgtcctcttgaaaaaaggtggtcgggggacattgacccaccagccccgcaggctactgcctgcaaacaagaacccctcatctgccacgcacgttcttaatgtatctatagtctgcctgatgccacaaaggagtccaggtggtgacttccaagagtgactccgtcggaggaaaatgactccccagtcgctgctgcagacgacactgttcctgctgagtctgctcttcctggtccaagccagcggaaccagacacacaggagcagcctccactacaaacccacaccagacctgcgcatctccatcgagaactccgaagaggccctcacagtccatgcccctttccctgcagcccaccctgcttcccgatccttccctgaccccaggggcctctaccacttctgcctctactggaaccgacatgctgggagattacatcttctctatggcaagcgtgacttcttgctgagtgacaaagcctctagcctcctctgcttccagcaccaggaggagagcctggctcagggccccccgctgttagccacttctgtcacctcctggtggagccctcagaacatcagcctgcccagtgccgccagcttcaccttctccttccacagtcctccccacacggccgctcacaatgcctcggtggacatgtgcgagctcaaaagggacctccagctgctcagccagttcctgaagcatccccagaaggcctcaaggaggccctcggctgcccccgccagccagcagttgcagagcctggagtcgaaactgacctctgtgagattcatgggggacatggtgtccttcgaggaggaccggatcaacgccacggtgtggaagctccagcccacagccggcctccaggacctgcacatccactcccggcaggaggaggagcagagcgagatcatggagtactcggtgctgctgcctcgaacactcttccagaggacgaaaggccggagcggggaggctgagaagagactcctcctggtggacttcagcagccaagccctgttccaggacaagaattccagccaagtcctgggtgagaaggtcttggggattgtggtacagaacaccaaagtagccaacctcacggagcccgtggtgctcactttccagcaccagctacagccgaagaatgtgactctgcaatgtgtgttctgggttgaagaccccacattgagcagcccggggcattggagcagtgctgggtgtgagaccgtcaggagagaaacccaaacatcctgcttctgcaaccacttgacctactttgcagtgctgatggtctcctcggtggaggtggacgccgtgcacaagcactacctgagcctcctctcctacgtgggctgtgtcgtctctgccctggcctgccttgtcaccattgccgcctacctctgctccaggaggaaacctcgggactacaccatcaaggtgcacatgaacctgctgctggccgtcttcctgctggacacgagcttcctgctcagcgagccggtggccctgacaggctctgaggctggctgccgagccagtgccatcttcctgcacttctccctgctcacctgcctttcctggatgggcctcgaggggtacaacctctaccgactcgtggtggaggtctttggcacctatgtccctggctacctactcaagctgagcgccatgggctggggcttccccatctttctggtgacgctggtggccctggtggatgtggacaactatggccccatcatcttggctgtgcataggactccagagggcgtcatctacccttccatgtgctggatccgggactccctggtcagctacatcaccaacctgggcctcttcagcctggtgtttctgttcaacatggccatgctagccaccatggtggtgcagatcctgcggctgcgcccccacacccaaaagtggtcacatgtgctgacactgctgggcctcagcctggtccttggcctgccctgggccttgatcttcttctcctttgcttctggcaccttccagcttgtcgtcctctaccttttcagcatcatcacctccttccaaggcttcctcatcttcatctggtactggtccatgcggctgcaggcccggggtggcccctcccctctgaagagcaactcagacagcgccaggctccccatcagctcgggcagcacctcgtccagccgcatctaggcctccagcccacctgcccatgtgatgaagcagagattcggcctcgtcgcacactgcctgtggcccccgagcccggcccagccccaggccagtcagccgcagactttggaaagcccaacgaccatggagagatgggccgttgccatggtggacggactcccgggctgggcttttgaattggccttggggactactcggctctcactcagctcccacgggactcagaagtgcgccgccatgctgcctagggtactgtccccacatctgtcccaacccagctggaggcctggtctctccttacaacccctgggcccagccctcattgctgggggccaggccttggatcttgagggtctggcacatccttaatcctgtgcccctgcctg

SEQ ID NO: 105511 - DNA, 523 bp, Homo sapiens
  Payload ID: 688
  Gene Symbol: ADGRG1
  Gene Name: adhesion G protein-coupled receptor G1
  ENST ID: ENST00000569158
  CDS Start-End: 157-523
agcgctggggatctgcggctccagaggcagagacagggccaatccaggagggctgaagtgacacggtggttctgctttgtccttcagccatgcctactgacagtgaaggctcactttgaaggtggtgacttccaagagtgactccgtcggaggaaaatgactccccagtcgctgctgcagacgacactgttcctgctgagtctgctcttcctggtccaaggtgcccacggcaggggccacagggaagactttcgcttctgcagccagcggaaccagacacacaggagcagcctccactacaaacccacaccagacctgcgcatctccatcgagaactccgaagaggccctcacagtccatgcccctttccctgcagcccaccctgcttcccgatccttccctgaccccaggggcctctaccacttctgcctctactggaaccgacatgctgggagattacatcttctctatggcaagcgtgacttcttgctgagtgacaaagcctctagcctcctctgcttcc

SEQ ID NO: 105512 - DNA, 547 bp, Homo sapiens
  Payload ID: 688
  Gene Symbol: ADGRG1
  Gene Name: adhesion G protein-coupled receptor G1
  ENST ID: ENST00000564338
  CDS Start-End: 204-547
agctgtctgccctgccctgccgtaggagatgggctgggagcctcccacgctctccagctcactcggcaggcagcggggaccagggctggcaggttaagcctctgggggtggatcctgaaaggtggtccagccgcctggccctgcgtgggaccctccacctggcagcaggtggtgacttccaagagtgactccgtcggaggaaaatgactccccagtcgctgctgcagacgacactgttcctgctgagtctgctcttcctggtccaagcctctgcctcctcaggtgcccacggcaggggccacagggaagactttcgcttctgcagccagcggaaccagacacacaggagcagcctccactacaaacccacaccagacctgcgcatctccatcgagaactccgaagaggccctcacagtccatgcccctttccctgcagcccaccctgcttcccgatccttccctgaccccaggggcctctaccacttctgcctctactggaaccgacatgctgggagattacatcttctctatggcaagcgtgactt

SEQ ID NO: 105513 - DNA, 601 bp, Homo sapiens
  Payload ID: 688
  Gene Symbol: ADGRG1
  Gene Name: adhesion G protein-coupled receptor G1
  ENST ID: ENST00000563862
  CDS Start-End: 109-601
gtggttggtactgagcgcctgatggctgaggccctgtagcgctggggatctgcggctccagaggcagagacaggtggtgacttccaagagtgactccgtcggaggaaaatgactccccagtcgctgctgcagacgacactgttcctgctgagtctgctcttcctggtccaagcctctgcctcctcaggtgcccacggcaggggccacagggaagactttcgcttctgcagccagcggaaccagacacacaggagcagcctccactacaaacccacaccagacctgcgcatctccatcgagaactccgaagaggccctcacagtccatgcccctttccctgcagcccaccctgcttcccgatccttccctgaccccaggggcctctaccacttctgcctctactggaaccgacatgctgggagattacatcttctctatggcaagcgtgacttcttgctgagtgacaaagcctctagcctcctctgcttccagcaccaggaggagagcctggctcagggccccccgctgttagccacttctgtcacctcctggtggagccctcagaacatcagcctgcccagtgccgccagcttcaccttct

SEQ ID NO: 105514 - DNA, 734 bp, Homo sapiens
  Payload ID: 688
  Gene Symbol: ADGRG1
  Gene Name: adhesion G protein-coupled receptor G1
  ENST ID: ENST00000569101
  CDS Start-End: 138-734
gcagaggcagggcccttgcctgtggggccgtggttggtactgagcgcctgatggctgaggccctgtagcgctggggatctgcggctccagaggcagagacaggtggtgacttccaagagtgactccgtcggaggaaaatgactccccagtcgctgctgcagacgacactgttcctgctgagtctgctcttcctggtccaaggtgcccacggcaggggccacagggaagactttcgcttctgcagccagcggaaccagacacacaggagcagcctccactacaaacccacaccagacctgcgcatctccatcgagaactccgaagaggccctcacagtccatgcccctttccctgcagcccaccctgcttcccgatccttccctgaccccaggggcctctaccacttctgcctctactggaaccgacatgctgggagattacatcttctctatggcaagcgtgacttcttgctgagtgacaaagcctctagcctcctctgcttccagcaccaggaggagagcctggctcagggccccccgctgttagccacttctgtcacctcctggtggagccctcagaacatcagcctgcccagtgccgccagcttcaccttctccttccacagtcctccccacacggccgctcacaatgcctcggtggacatgtgcgagctcaaaagggacctccagctgctcagccagttcctgaagcatccccagaaggcctcaaggagg

SEQ ID NO: 105515 - DNA, 563 bp, Homo sapiens
  Payload ID: 688
  Gene Symbol: ADGRG1
  Gene Name: adhesion G protein-coupled receptor G1
  ENST ID: ENST00000569372
  CDS Start-End: 232-563
acacaggcacaggccggtgagggacctgcccagacctggaggagcgacgatgcctcactgcctgaccagaggcacctgacaccaggcctggcatccgagcagctgccactcagacctcacaggccagggccaagggagctgctgatgcaagaggcacaattttaggggcaagagcagcaagtaggatggtcttgaggtggtgacttccaagagtgactccgtcggaggaaaatgactccccagtcgctgctgcagacgacactgttcctgctgagtctgctcttcctggtccaaggtgcccacggcaggggccacagggaagactttcgcttctgcagccagcggaaccagacacacaggagcagcctccactacaaacccacaccagacctgcgcatctccatcgagaactccgaagaggccctcacagtccatgcccctttccctgcagcccaccctgcttcccgatccttccctgaccccaggggcctctaccacttctgcctctactggaaccgacatgctgggagattacatcttctctatggcaagcgtgacttctt

SEQ ID NO: 105516 - DNA, 558 bp, Homo sapiens
  Payload ID: 688
  Gene Symbol: ADGRG1
  Gene Name: adhesion G protein-coupled receptor G1
  ENST ID: ENST00000564103
  CDS Start-End: 354-558
gtcccctttgtttgaagctccagtgagggagcagtggctggggtggcccagcttcaaagtctctgtcctcttgaaaaaaggtggtcgggggacattgacccaccagccccgcaggctactgcctgcaaacaagaacccctcatctgccacgcacgttcttaatgtatctatagtctgcctgatgccacaaaggagtccagggtctcgctctgtcacacaggctggagtgcagtggtgtgatcttggctcatcgtaacctccacctcccgggttcaagtgattctcatgcctcagcctcccgagtagctgggattacaggtggtgacttccaagagtgactccgtcggaggaaaatgactccccagtcgctgctgcagacgacactgttcctgctgagtctgctcttcctggtccaagcctctagcctcctctgcttccagcaccaggaggagagcctggctcagggccccccgctgttagccacttctgtcacctcctggtggagccctcagaacatcagcctgcccagtgccgccagcttcaccttctccttccaca

SEQ ID NO: 105517 - DNA, 640 bp, Homo sapiens
  Payload ID: 688
  Gene Symbol: ADGRG1
  Gene Name: adhesion G protein-coupled receptor G1
  ENST ID: ENST00000568234
  CDS Start-End: 207-640
actagctgtctgccctgccctgccgtaggagatgggctgggagcctcccacgctctccagctcactcggcaggcagcggggaccagggctggcaggttaagcctctgggggtggatcctgaaaggtggtccagccgcctggccctgcgtgggaccctccacctggcagcaggtggtgacttccaagagtgactccgtcggaggaaaatgactccccagtcgctgctgcagacgacactgttcctgctgagtctgctcttcctggtccaagcctctgcctcctcaggtgcccacggcaggggccacagggaagactttcgcttctgcagccagcggaaccagacacacaggagcagcctccactacaaacccacaccagacctgcgcatctccatcgagaactccgaagaggccctcacagtccatgcccctttccctgcagcccaccctgcttcccgatccttccctgaccccaggggcctctaccacttctgcctctactggaaccgacatgctgggagattacatcttctctatggcaagcgtgacttcttgctgagtgacaaagcctctagcctcctctgcttccagcaccaggaggagagcctggctcagggccccccgctgttagccacttctgt

SEQ ID NO: 105518 - DNA, 937 bp, Homo sapiens
  Payload ID: 688
  Gene Symbol: ADGRG1
  Gene Name: adhesion G protein-coupled receptor G1
  ENST ID: ENST00000561833
  CDS Start-End: 451-937
gcttgtcttctctgggccaggcccctccatggtggctgaggactctttggaacagggaactgtcgtggaagaaagggcccggccctgccactgcctcctgtgggaccctgggccaggctcccctgctgtccaggcctgtttccctgtctgttccatgaaggagaggcaggggcagtggtctgtaaacccataagctgcagcagtaggcccctcccctggtctcatgggccacacacgccagccagccagagctcttcattttaccaagagagaagtggtggcagtcctggtgtccagggtctcgctctgtcacacaggctggagtgcagtggtgtgatcttggctcatcgtaacctccacctcccgggttcaagtgattctcatgcctcagcctcccgagtagctgggattacaggtggtgacttccaagagtgactccgtcggaggaaaatgactccccagtcgctgctgcagacgacactgttcctgctgagtctgctcttcctggtccaaggtgcccacggcaggggccacagggaagactttcgcttctgcagccagcggaaccagacacacaggagcagcctccactacaaacccacaccagacctgcgcatctccatcgagaactccgaagaggccctcacagtccatgcccctttccctgcagcccaccctgcttcccgatccttccctgaccccaggggcctctaccacttctgcctctactggaaccgacatgctgggagattacatcttctctatggcaagcgtgacttcttgctgagtgacaaagcctctagcctcctctgcttccagcaccaggaggagagcctggctcagggccccccgctgttagccacttctgtcacctcctggtggagccctcagaacatcagcctgcccagtgccgccagcttcaccttctccttccaca

SEQ ID NO: 105519 - DNA, 563 bp, Homo sapiens
  Payload ID: 688
  Gene Symbol: ADGRG1
  Gene Name: adhesion G protein-coupled receptor G1
  ENST ID: ENST00000568074
  CDS Start-End: 311-563
accagtggggctgggatccaaggtcacctgggtgagttctgatgggctccctgatttgggcccttgggaggatggcgtccagctgaacccatggaaacacattgttggaagctttctttactgtgacttttcaagagatgtgctttctaagagtcagggtctcgctctgtcacacaggctggagtgcagtggtgtgatcttggctcatcgtaacctccacctcccgggttcaagtgattctcatgcctcagcctcccgagtagctgggattacaggtggtgacttccaagagtgactccgtcggaggaaaatgactccccagtcgctgctgcagacgacactgttcctgctgagtctgctcttcctggtccaaggtgcccacggcaggggccacagggaagactttcgcttctgcagccagcggaaccagacacacaggagcagcctccactacaaacccacaccagacctgcgcatctccatcgagaactccgaagaggccctcacagtccatgcccctttccctgcagcccaccctgcttcccgatccttccctgacccca

SEQ ID NO: 105520 - DNA, 3594 bp, Homo sapiens
  Payload ID: 689
  Gene Symbol: ADGRG2
  Gene Name: adhesion G protein-coupled receptor G2
  Uniprot ID: Q8IZP9
  ENST ID: ENST00000340581
  CDS Start-End: 44-2740
tgcacagaggttctccactttgttttctgaactcgcggtcaggatggttttctctgtcaggcagtgtggccatgttggcagaactgaagaagttttactgacgttcaagatattccttgtcatcatttgtcttcatgtcgttctggtaacatccctggaagaagatactgataattccagtttgtcaccaccacctgaggttgaaacaacaagcctcaatgatgttactttaagcttactcccttcaaacgaaacaggcgtcaaaccccagagaaatatctgcaatttgtcatctatttgcaatgactcagcattttttagaggtgagatcatgtttcaatatgataaagaaagcactgttccccagaatcaacatataacgaatggcaccttaactggagtcctgtctctaagtgaattaaaacgctcagagctcaacaaaaccctgcaaaccctaagtgagacttactttataatgtgtgctacagcagaggcccaaagcacattaaattgtacattcacaataaaactgaataatacaatgaatgcatgtgctgtaatagctgctttggaaagagtaaagattcgaccaatggaacactgctgctgttctgtcaggataccctgcccttcctccccagaagagttggaaaagcttcagtgtgacctgcaggatcccattgtctgtcttgctgaccatccacgtggcccaccattttcttccagccaatccatcccagtggtgcctcgggccactgtgctttcccaggtccccaaagctacctcttttgctgagcctccagattattcacctgtgacccacaatgttccctctccaataggggagattcaacccctttcaccccagccttcagctcccatagcttccagccctgccattgacatgcccccacagtctgaaacgatctcttcccctatgccccaaacccatgtctccggcaccccacctcctgtgaaagcctcattttcctctcccaccgtgtctgcccctgcgaatgtcaacactaccagcgcacctcctgtccagacagacatcgtcaacaccagcagtatttctgatcttgagaaccaagtgttgcagatggagaaggctctgtccttgggcagcctggagcctaacctcgcaggagaaatgatcaaccaagtcagcagactccttcattccccgcctgacatgctggcccctctggctcaaagattgctgaaagtagtggatgacattggcctacagctgaacttttcaaacacgactataagtctaacctccccttctttggctctggctgtgatcagagtgaatgccagtagtttcaacacaactacctttgtggcccaagaccctgcaaatcttcaggatgagttaacagtgagatgtgtattttgggacttgggcagaaatggtggcagaggaggctggtcagacaatggctgctctgtcaaagacaggagattgaatgaaaccatctgtacctgtagccatctaacaagcttcggcgttctgctggacctatctaggacatctgtgctgcctgctcaaatgatggctctgacgttcattacatatattggttgtgggctttcatcaatttttctgtcagtgactcttgtaacctacatagcttttgaaaagatccggagggattacccttccaaaatcctcatccagctgtgtgctgctctgcttctgctgaacctggtcttcctcctggactcgtggattgctctgtataagatgcaaggcctctgcatctcagtggctgtatttcttcattattttctcttggtctcattcacatggatgggcctagaagcattccatatgtacctggcccttgtcaaagtatttaatacttacatccgaaaatacatccttaaattctgcattgtcggttggggggtaccagctgtggttgtgaccatcatcctgactatatccccagataactatgggcttggatcctatgggaaattccccaatggttcaccggatgacttctgctggatcaacaacaatgcagtattctacattacggtggtgggatatttctgtgtgatatttttgctgaacgtcagcatgttcattgtggtcctggttcagctctgtcgaattaaaaagaagaagcaactgggagcccagcgaaaaaccagtattcaagacctcaggagtatcgctggccttacatttttactgggaataacttggggctttgccttctttgcctggggaccagttaacgtgaccttcatgtatctgtttgccatctttaataccttacaaggatttttcatattcatcttttactgtgtggccaaagaaaatgtcaggaagcaatggaggcggtatctttgttgtggaaagttacggctggctgaaaattctgactggagtaaaactgctactaatggtttaaagaagcagactgtaaaccaaggagtgtccagctcttcaaattccttacagtcaagcagtaactccactaactccaccacactgctagtgaataatgattgctcagtacacgcaagcgggaatggaaatgcttctacagagaggaatggggtctcttttagtgttcagaatggagatgtgtgccttcacgatttcactggaaaacagcacatgtttaacgagaaggaagattcctgcaatgggaaaggccgtatggctctcagaaggacttcaaagcggggaagcttacactttattgagcaaatgtgattcctttcttctaaaatcaaagcatgatgcttgacagtgtgaaatgtccaattttaccttttacacaatgtgagatgtatgaaaatcaactcattttattctcggcaacatctggagaagcataagctaattaagggcgatgattattattacaagaagaaaccaagacattacaccatggtttttagacatttctgatttggtttcttatctttcattttataagaaggttggttttaaacaatacactaagaatgactcctataaagaaaacaaaaaaaggtagtgaactttcagctaccttttaaagaggctaagttatctttgataacatcatataaagcaactgttgacttcagcctgttggtgagtttagttgtgcatgcctttgttgtatataagctaaattctagtgacccatgtgtcaaaaatcttacttctacatttttttgtatttattttctactgtgtaaatgtattcctttgtagaatcatggttgttttgtctcacgtgataattcagaaaatccttgctcgttccgcaaatcctaaagctccttttggagatgatataggatgtgaaatacagaaacctcagtgaaatcaagaaataatgatcccagccagactgagaaaatgtaagcagacagtgccacagttagctcatacagtgcctttgagcaagttaggaaaagatgcccccactgggcagacacagccctatgggctcatggtttgacaaacagagtggagagaccatattttagccccactcaccctcttgggtgcacgacctgtacagccaaacacagcatccaatatgaatacccatcccctgaccgcatccccagtag

SEQ ID NO: 105521 - DNA, 4494 bp, Homo sapiens
  Payload ID: 689
  Gene Symbol: ADGRG2
  Gene Name: adhesion G protein-coupled receptor G2
  Uniprot ID: Q8IZP9
  ENST ID: ENST00000354791
  CDS Start-End: 243-2939
gcgcccagcctcgccgccgccgagcgcccgacgcgccacgccgcgctgggcagctggagagctggcggcggagcgggccgggagcggcgggggcggcgccgaggccgcgggcggggggaggagggccgcagccccggagaggggaaaaggcgggccggacggcgccagcagccagccccgaggacgcgagcggcaggtgtgcacagaggttctccactttgttttctgaactcgcggtcaggatggttttctctgtcaggcagtgtggccatgttggcagaactgaagaagttttactgacgttcaagatattccttgtcatcatttgtcttcatgtcgttctggtaacatccctggaagaagatactgataattccagtttgtcaccaccacctgaggttgaaacaacaagcctcaatgatgttactttaagcttactcccttcaaacgaaacaggcgtcaaaccccagagaaatatctgcaatttgtcatctatttgcaatgactcagcattttttagaggtgagatcatgtttcaatatgataaagaaagcactgttccccagaatcaacatataacgaatggcaccttaactggagtcctgtctctaagtgaattaaaacgctcagagctcaacaaaaccctgcaaaccctaagtgagacttactttataatgtgtgctacagcagaggcccaaagcacattaaattgtacattcacaataaaactgaataatacaatgaatgcatgtgctgtaatagctgctttggaaagagtaaagattcgaccaatggaacactgctgctgttctgtcaggataccctgcccttcctccccagaagagttggaaaagcttcagtgtgacctgcaggatcccattgtctgtcttgctgaccatccacgtggcccaccattttcttccagccaatccatcccagtggtgcctcgggccactgtgctttcccaggtccccaaagctacctcttttgctgagcctccagattattcacctgtgacccacaatgttccctctccaataggggagattcaacccctttcaccccagccttcagctcccatagcttccagccctgccattgacatgcccccacagtctgaaacgatctcttcccctatgccccaaacccatgtctccggcaccccacctcctgtgaaagcctcattttcctctcccaccgtgtctgcccctgcgaatgtcaacactaccagcgcacctcctgtccagacagacatcgtcaacaccagcagtatttctgatcttgagaaccaagtgttgcagatggagaaggctctgtccttgggcagcctggagcctaacctcgcaggagaaatgatcaaccaagtcagcagactccttcattccccgcctgacatgctggcccctctggctcaaagattgctgaaagtagtggatgacattggcctacagctgaacttttcaaacacgactataagtctaacctccccttctttggctctggctgtgatcagagtgaatgccagtagtttcaacacaactacctttgtggcccaagaccctgcaaatcttcaggatgagttaacagtgagatgtgtattttgggacttgggcagaaatggtggcagaggaggctggtcagacaatggctgctctgtcaaagacaggagattgaatgaaaccatctgtacctgtagccatctaacaagcttcggcgttctgctggacctatctaggacatctgtgctgcctgctcaaatgatggctctgacgttcattacatatattggttgtgggctttcatcaatttttctgtcagtgactcttgtaacctacatagcttttgaaaagatccggagggattacccttccaaaatcctcatccagctgtgtgctgctctgcttctgctgaacctggtcttcctcctggactcgtggattgctctgtataagatgcaaggcctctgcatctcagtggctgtatttcttcattattttctcttggtctcattcacatggatgggcctagaagcattccatatgtacctggcccttgtcaaagtatttaatacttacatccgaaaatacatccttaaattctgcattgtcggttggggggtaccagctgtggttgtgaccatcatcctgactatatccccagataactatgggcttggatcctatgggaaattccccaatggttcaccggatgacttctgctggatcaacaacaatgcagtattctacattacggtggtgggatatttctgtgtgatatttttgctgaacgtcagcatgttcattgtggtcctggttcagctctgtcgaattaaaaagaagaagcaactgggagcccagcgaaaaaccagtattcaagacctcaggagtatcgctggccttacatttttactgggaataacttggggctttgccttctttgcctggggaccagttaacgtgaccttcatgtatctgtttgccatctttaataccttacaaggatttttcatattcatcttttactgtgtggccaaagaaaatgtcaggaagcaatggaggcggtatctttgttgtggaaagttacggctggctgaaaattctgactggagtaaaactgctactaatggtttaaagaagcagactgtaaaccaaggagtgtccagctcttcaaattccttacagtcaagcagtaactccactaactccaccacactgctagtgaataatgattgctcagtacacgcaagcgggaatggaaatgcttctacagagaggaatggggtctcttttagtgttcagaatggagatgtgtgccttcacgatttcactggaaaacagcacatgtttaacgagaaggaagattcctgcaatgggaaaggccgtatggctctcagaaggacttcaaagcggggaagcttacactttattgagcaaatgtgattcctttcttctaaaatcaaagcatgatgcttgacagtgtgaaatgtccaattttaccttttacacaatgtgagatgtatgaaaatcaactcattttattctcggcaacatctggagaagcataagctaattaagggcgatgattattattacaagaagaaaccaagacattacaccatggtttttagacatttctgatttggtttcttatctttcattttataagaaggttggttttaaacaatacactaagaatgactcctataaagaaaacaaaaaaaggtagtgaactttcagctaccttttaaagaggctaagttatctttgataacatcatataaagcaactgttgacttcagcctgttggtgagtttagttgtgcatgcctttgttgtatataagctaaattctagtgacccatgtgtcaaaaatcttacttctacatttttttgtatttattttctactgtgtaaatgtattcctttgtagaatcatggttgttttgtctcacgtgataattcagaaaatccttgctcgttccgcaaatcctaaagctccttttggagatgatataggatgtgaaatacagaaacctcagtgaaatcaagaaataatgatcccagccagactgagaaaatgtaagcagacagtgccacagttagctcatacagtgcctttgagcaagttaggaaaagatgcccccactgggcagacacagccctatgggctcatggtttgacaaacagagtggagagaccatattttagccccactcaccctcttgggtgcacgacctgtacagccaaacacagcatccaatatgaatacccatcccctgaccgcatccccagtagtcagattatagaatctgcaccaagatgtttagctttataccttggccacagagagggatgaactgtcatccagaccatgtgtcaggaaaattgtgaacgtagatgaggtacatacactgccgcttctcaaatccccagagcctttaggaacaggagagtagactaggattccttctcttaaaaaggtacatatatatggaaaaaaatcatattgccgttctttaaaaggcaactgcatggtacattgttgattgttatgactggtacactctggcccagccagagctataattgttttttaaatgtgtcttgaagaatgcacagtgacaaggggagtagctattgggaacagggaactgtcctacactgctattgttgctacatgtatcgagccttgattgctcctagttatatacagggtctatcttgcttcctacctacatctgcttgagcagtgcctcaagtacatccttattaggaacatttcaaaccccttttagttaagtctttcactaaggttctcttgcatatatttcaagtgaatgttggatctcagactaaccatagtaataatacacatttctgtgagtgctgacttgtctttgcaatatttcttttctgatttatttaattttcttgtatttatatgttaaaatcaaaaatgttaaaatcaatgaaataaatttgcagttaagatcttt

SEQ ID NO: 105522 - DNA, 4630 bp, Homo sapiens
  Payload ID: 689
  Gene Symbol: ADGRG2
  Gene Name: adhesion G protein-coupled receptor G2
  Uniprot ID: Q8IZP9
  ENST ID: ENST00000356606
  CDS Start-End: 70-3081
agccccgaggacgcgagcggcaggtgtgcacagaggttctccactttgttttctgaactcgcggtcaggatggttttctctgtcaggcagtgtggccatgttggcagaactgaagaagttttactgacgttcaagatattccttgtcatcatttgtcttcatgtcgttctggtaacatccctggaagaagatactgataattccagtttgtcaccaccacctgctaaattatctgttgtcagttttgccccctcctccaatggtactccagaggttgaaacaacaagcctcaatgatgttactttaagcttactcccttcaaacgaaacaggcgtcaaaccccagagaaatatctgcaatttgtcatctatttgcaatgactcagcattttttagaggtgagatcatgtttcaatatgataaagaaagcactgttccccagaatcaacatataacgaatggcaccttaactggagtcctgtctctaagtgaattaaaacgctcagagctcaacaaaaccctgcaaaccctaagtgagacttactttataatgtgtgctacagcagaggcccaaagcacattaaattgtacattcacaataaaactgaataatacaatgaatgcatgtgctgtaatagctgctttggaaagagtaaagattcgaccaatggaacactgctgctgttctgtcaggataccctgcccttcctccccagaagagttggaaaagcttcagtgtgacctgcaggatcccattgtctgtcttgctgaccatccacgtggcccaccattttcttccagccaatccatcccagtggtgcctcgggccactgtgctttcccaggtccccaaagctacctcttttgctgagcctccagattattcacctgtgacccacaatgttccctctccaataggggagattcaacccctttcaccccagccttcagctcccatagcttccagccctgccattgacatgcccccacagtctgaaacgatctcttcccctatgccccaaacccatgtctccggcaccccacctcctgtgaaagcctcattttcctctcccaccgtgtctgcccctgcgaatgtcaacactaccagcgcacctcctgtccagacagacatcgtcaacaccagcagtatttctgatcttgagaaccaagtgttgcagatggagaaggctctgtccttgggcagcctggagcctaacctcgcaggagaaatgatcaaccaagtcagcagactccttcattccccgcctgacatgctggcccctctggctcaaagattgctgaaagtagtggatgacattggcctacagctgaacttttcaaacacgactataagtctaacctccccttctttggctctggctgtgatcagagtgaatgccagtagtttcaacacaactacctttgtggcccaagaccctgcaaatcttcaggtttctctggaaacccaagctcctgagaacagtattggcacaattactcttccttcatcgctgatgaataatttaccagctcatgacatggagctagcttccagggttcagttcaatttttttgaaacacctgctttgtttcaggatccttccctggagaacctctctctgatcagctacgtcatatcatcgagtgttgcaaacctgaccgtcaggaacttgacaagaaacgtgacagtcacattaaagcacatcaacccgagccaggatgagttaacagtgagatgtgtattttgggacttgggcagaaatggtggcagaggaggctggtcagacaatggctgctctgtcaaagacaggagattgaatgaaaccatctgtacctgtagccatctaacaagcttcggcgttctgctggacctatctaggacatctgtgctgcctgctcaaatgatggctctgacgttcattacatatattggttgtgggctttcatcaatttttctgtcagtgactcttgtaacctacatagcttttgaaaagatccggagggattacccttccaaaatcctcatccagctgtgtgctgctctgcttctgctgaacctggtcttcctcctggactcgtggattgctctgtataagatgcaaggcctctgcatctcagtggctgtatttcttcattattttctcttggtctcattcacatggatgggcctagaagcattccatatgtacctggcccttgtcaaagtatttaatacttacatccgaaaatacatccttaaattctgcattgtcggttggggggtaccagctgtggttgtgaccatcatcctgactatatccccagataactatgggcttggatcctatgggaaattccccaatggttcaccggatgacttctgctggatcaacaacaatgcagtattctacattacggtggtgggatatttctgtgtgatatttttgctgaacgtcagcatgttcattgtggtcctggttcagctctgtcgaattaaaaagaagaagcaactgggagcccagcgaaaaaccagtattcaagacctcaggagtatcgctggccttacatttttactgggaataacttggggctttgccttctttgcctggggaccagttaacgtgaccttcatgtatctgtttgccatctttaataccttacaaggatttttcatattcatcttttactgtgtggccaaagaaaatgtcaggaagcaatggaggcggtatctttgttgtggaaagttacggctggctgaaaattctgactggagtaaaactgctactaatggtttaaagaagcagactgtaaaccaaggagtgtccagctcttcaaattccttacagtcaagcagtaactccactaactccaccacactgctagtgaataatgattgctcagtacacgcaagcgggaatggaaatgcttctacagagaggaatggggtctcttttagtgttcagaatggagatgtgtgccttcacgatttcactggaaaacagcacatgtttaacgagaaggaagattcctgcaatgggaaaggccgtatggctctcagaaggacttcaaagcggggaagcttacactttattgagcaaatgtgattcctttcttctaaaatcaaagcatgatgcttgacagtgtgaaatgtccaattttaccttttacacaatgtgagatgtatgaaaatcaactcattttattctcggcaacatctggagaagcataagctaattaagggcgatgattattattacaagaagaaaccaagacattacaccatggtttttagacatttctgatttggtttcttatctttcattttataagaaggttggttttaaacaatacactaagaatgactcctataaagaaaacaaaaaaaggtagtgaactttcagctaccttttaaagaggctaagttatctttgataacatcatataaagcaactgttgacttcagcctgttggtgagtttagttgtgcatgcctttgttgtatataagctaaattctagtgacccatgtgtcaaaaatcttacttctacatttttttgtatttattttctactgtgtaaatgtattcctttgtagaatcatggttgttttgtctcacgtgataattcagaaaatccttgctcgttccgcaaatcctaaagctccttttggagatgatataggatgtgaaatacagaaacctcagtgaaatcaagaaataatgatcccagccagactgagaaaatgtaagcagacagtgccacagttagctcatacagtgcctttgagcaagttaggaaaagatgcccccactgggcagacacagccctatgggctcatggtttgacaaacagagtggagagaccatattttagccccactcaccctcttgggtgcacgacctgtacagccaaacacagcatccaatatgaatacccatcccctgaccgcatccccagtagtcagattatagaatctgcaccaagatgtttagctttataccttggccacagagagggatgaactgtcatccagaccatgtgtcaggaaaattgtgaacgtagatgaggtacatacactgccgcttctcaaatccccagagcctttaggaacaggagagtagactaggattccttctcttaaaaaggtacatatatatggaaaaaaatcatattgccgttctttaaaaggcaactgcatggtacattgttgattgttatgactggtacactctggcccagccagagctataattgttttttaaatgtgtcttgaagaatgcacagtgacaaggggagtagctattgggaacagggaactgtcctacactgctattgttgctacatgtatcgagccttgattgctcctagttatatacagggtctatcttgcttcctacctacatctgcttgagcagtgcctcaagtacatccttattaggaacatttcaaaccccttttagttaagtctttcactaaggttctcttgcatatatttcaagtgaatgttggatctcagactaaccatagtaataatacacatttctgtgagtgctgacttgtctttgcaatatttcttttctgatttatttaattttcttgtatttatatgttaaaatcaaaaatgttaaaatcaatgaaataaatttgcagttaag

SEQ ID NO: 105523 - DNA, 4678 bp, Homo sapiens
  Payload ID: 689
  Gene Symbol: ADGRG2
  Gene Name: adhesion G protein-coupled receptor G2
  Uniprot ID: Q8IZP9
  ENST ID: ENST00000357544
  CDS Start-End: 165-3128
cgggagcggcgggggcggcgccgaggccgcgggcggggggaggagggccgcagccccggagaggggaaaaggcgggccggacggcgccagcagccagccccgaggacgcgagcggcaggtgtgcacagaggttctccactttgttttctgaactcgcggtcaggatggttttctctgtcaggcagtgtggccatgttggcagaactgaagaagttttactgacgttcaagatattccttgtcatcatttgtcttcatgtcgttctggtaacatccctggaagaagatactgataattccagtttgtcaccaccacctgaggttgaaacaacaagcctcaatgatgttactttaagcttactcccttcaaacgaaacaggcgtcaaaccccagagaaatatctgcaatttgtcatctatttgcaatgactcagcattttttagaggtgagatcatgtttcaatatgataaagaaagcactgttccccagaatcaacatataacgaatggcaccttaactggagtcctgtctctaagtgaattaaaacgctcagagctcaacaaaaccctgcaaaccctaagtgagacttactttataatgtgtgctacagcagaggcccaaagcacattaaattgtacattcacaataaaactgaataatacaatgaatgcatgtgctgtaatagctgctttggaaagagtaaagattcgaccaatggaacactgctgctgttctgtcaggataccctgcccttcctccccagaagagttggaaaagcttcagtgtgacctgcaggatcccattgtctgtcttgctgaccatccacgtggcccaccattttcttccagccaatccatcccagtggtgcctcgggccactgtgctttcccaggtccccaaagctacctcttttgctgagcctccagattattcacctgtgacccacaatgttccctctccaataggggagattcaacccctttcaccccagccttcagctcccatagcttccagccctgccattgacatgcccccacagtctgaaacgatctcttcccctatgccccaaacccatgtctccggcaccccacctcctgtgaaagcctcattttcctctcccaccgtgtctgcccctgcgaatgtcaacactaccagcgcacctcctgtccagacagacatcgtcaacaccagcagtatttctgatcttgagaaccaagtgttgcagatggagaaggctctgtccttgggcagcctggagcctaacctcgcaggagaaatgatcaaccaagtcagcagactccttcattccccgcctgacatgctggcccctctggctcaaagattgctgaaagtagtggatgacattggcctacagctgaacttttcaaacacgactataagtctaacctccccttctttggctctggctgtgatcagagtgaatgccagtagtttcaacacaactacctttgtggcccaagaccctgcaaatcttcaggtttctctggaaacccaagctcctgagaacagtattggcacaattactcttccttcatcgctgatgaataatttaccagctcatgacatggagctagcttccagggttcagttcaatttttttgaaacacctgctttgtttcaggatccttccctggagaacctctctctgatcagctacgtcatatcatcgagtgttgcaaacctgaccgtcaggaacttgacaagaaacgtgacagtcacattaaagcacatcaacccgagccaggatgagttaacagtgagatgtgtattttgggacttgggcagaaatggtggcagaggaggctggtcagacaatggctgctctgtcaaagacaggagattgaatgaaaccatctgtacctgtagccatctaacaagcttcggcgttctgctggacctatctaggacatctgtgctgcctgctcaaatgatggctctgacgttcattacatatattggttgtgggctttcatcaatttttctgtcagtgactcttgtaacctacatagcttttgaaaagatccggagggattacccttccaaaatcctcatccagctgtgtgctgctctgcttctgctgaacctggtcttcctcctggactcgtggattgctctgtataagatgcaaggcctctgcatctcagtggctgtatttcttcattattttctcttggtctcattcacatggatgggcctagaagcattccatatgtacctggcccttgtcaaagtatttaatacttacatccgaaaatacatccttaaattctgcattgtcggttggggggtaccagctgtggttgtgaccatcatcctgactatatccccagataactatgggcttggatcctatgggaaattccccaatggttcaccggatgacttctgctggatcaacaacaatgcagtattctacattacggtggtgggatatttctgtgtgatatttttgctgaacgtcagcatgttcattgtggtcctggttcagctctgtcgaattaaaaagaagaagcaactgggagcccagcgaaaaaccagtattcaagacctcaggagtatcgctggccttacatttttactgggaataacttggggctttgccttctttgcctggggaccagttaacgtgaccttcatgtatctgtttgccatctttaataccttacaaggatttttcatattcatcttttactgtgtggccaaagaaaatgtcaggaagcaatggaggcggtatctttgttgtggaaagttacggctggctgaaaattctgactggagtaaaactgctactaatggtttaaagaagcagactgtaaaccaaggagtgtccagctcttcaaattccttacagtcaagcagtaactccactaactccaccacactgctagtgaataatgattgctcagtacacgcaagcgggaatggaaatgcttctacagagaggaatggggtctcttttagtgttcagaatggagatgtgtgccttcacgatttcactggaaaacagcacatgtttaacgagaaggaagattcctgcaatgggaaaggccgtatggctctcagaaggacttcaaagcggggaagcttacactttattgagcaaatgtgattcctttcttctaaaatcaaagcatgatgcttgacagtgtgaaatgtccaattttaccttttacacaatgtgagatgtatgaaaatcaactcattttattctcggcaacatctggagaagcataagctaattaagggcgatgattattattacaagaagaaaccaagacattacaccatggtttttagacatttctgatttggtttcttatctttcattttataagaaggttggttttaaacaatacactaagaatgactcctataaagaaaacaaaaaaaggtagtgaactttcagctaccttttaaagaggctaagttatctttgataacatcatataaagcaactgttgacttcagcctgttggtgagtttagttgtgcatgcctttgttgtatataagctaaattctagtgacccatgtgtcaaaaatcttacttctacatttttttgtatttattttctactgtgtaaatgtattcctttgtagaatcatggttgttttgtctcacgtgataattcagaaaatccttgctcgttccgcaaatcctaaagctccttttggagatgatataggatgtgaaatacagaaacctcagtgaaatcaagaaataatgatcccagccagactgagaaaatgtaagcagacagtgccacagttagctcatacagtgcctttgagcaagttaggaaaagatgcccccactgggcagacacagccctatgggctcatggtttgacaaacagagtggagagaccatattttagccccactcaccctcttgggtgcacgacctgtacagccaaacacagcatccaatatgaatacccatcccctgaccgcatccccagtagtcagattatagaatctgcaccaagatgtttagctttataccttggccacagagagggatgaactgtcatccagaccatgtgtcaggaaaattgtgaacgtagatgaggtacatacactgccgcttctcaaatccccagagcctttaggaacaggagagtagactaggattccttctcttaaaaaggtacatatatatggaaaaaaatcatattgccgttctttaaaaggcaactgcatggtacattgttgattgttatgactggtacactctggcccagccagagctataattgttttttaaatgtgtcttgaagaatgcacagtgacaaggggagtagctattgggaacagggaactgtcctacactgctattgttgctacatgtatcgagccttgattgctcctagttatatacagggtctatcttgcttcctacctacatctgcttgagcagtgcctcaagtacatccttattaggaacatttcaaaccccttttagttaagtctttcactaaggttctcttgcatatatttcaagtgaatgttggatctcagactaaccatagtaataatacacatttctgtgagtgctgacttgtctttgcaatatttcttttctgatttatttaattttcttgtatttatatgttaaaatcaaaaatgttaaaatcaatgaaataaatttgcagttaaga

SEQ ID NO: 105524 - DNA, 4661 bp, Homo sapiens
  Payload ID: 689
  Gene Symbol: ADGRG2
  Gene Name: adhesion G protein-coupled receptor G2
  Uniprot ID: Q8IZP9
  ENST ID: ENST00000357991
  CDS Start-End: 67-3111
cccgaggacgcgagcggcaggtgtgcacagaggttctccactttgttttctgaactcgcggtcaggatggttttctctgtcaggcagtgtggccatgttggcagaactgaagaagttttactgacgttcaagatattccttgtcatcatttgtcttcatgtcgttctggtaacatccctggaagaagatactgataattccagtttgtcaccaccacctgctaaattatctgttgtcagttttgccccctcctccaatgaggttgaaacaacaagcctcaatgatgttactttaagcttactcccttcaaacgaaacagaaaaaactaaaatcactatagtaaaaaccttcaatgcatcaggcgtcaaaccccagagaaatatctgcaatttgtcatctatttgcaatgactcagcattttttagaggtgagatcatgtttcaatatgataaagaaagcactgttccccagaatcaacatataacgaatggcaccttaactggagtcctgtctctaagtgaattaaaacgctcagagctcaacaaaaccctgcaaaccctaagtgagacttactttataatgtgtgctacagcagaggcccaaagcacattaaattgtacattcacaataaaactgaataatacaatgaatgcatgtgctgtaatagctgctttggaaagagtaaagattcgaccaatggaacactgctgctgttctgtcaggataccctgcccttcctccccagaagagttggaaaagcttcagtgtgacctgcaggatcccattgtctgtcttgctgaccatccacgtggcccaccattttcttccagccaatccatcccagtggtgcctcgggccactgtgctttcccaggtccccaaagctacctcttttgctgagcctccagattattcacctgtgacccacaatgttccctctccaataggggagattcaacccctttcaccccagccttcagctcccatagcttccagccctgccattgacatgcccccacagtctgaaacgatctcttcccctatgccccaaacccatgtctccggcaccccacctcctgtgaaagcctcattttcctctcccaccgtgtctgcccctgcgaatgtcaacactaccagcgcacctcctgtccagacagacatcgtcaacaccagcagtatttctgatcttgagaaccaagtgttgcagatggagaaggctctgtccttgggcagcctggagcctaacctcgcaggagaaatgatcaaccaagtcagcagactccttcattccccgcctgacatgctggcccctctggctcaaagattgctgaaagtagtggatgacattggcctacagctgaacttttcaaacacgactataagtctaacctccccttctttggctctggctgtgatcagagtgaatgccagtagtttcaacacaactacctttgtggcccaagaccctgcaaatcttcaggtttctctggaaacccaagctcctgagaacagtattggcacaattactcttccttcatcgctgatgaataatttaccagctcatgacatggagctagcttccagggttcagttcaatttttttgaaacacctgctttgtttcaggatccttccctggagaacctctctctgatcagctacgtcatatcatcgagtgttgcaaacctgaccgtcaggaacttgacaagaaacgtgacagtcacattaaagcacatcaacccgagccaggatgagttaacagtgagatgtgtattttgggacttgggcagaaatggtggcagaggaggctggtcagacaatggctgctctgtcaaagacaggagattgaatgaaaccatctgtacctgtagccatctaacaagcttcggcgttctgctggacctatctaggacatctgtgctgcctgctcaaatgatggctctgacgttcattacatatattggttgtgggctttcatcaatttttctgtcagtgactcttgtaacctacatagcttttgaaaagatccggagggattacccttccaaaatcctcatccagctgtgtgctgctctgcttctgctgaacctggtcttcctcctggactcgtggattgctctgtataagatgcaaggcctctgcatctcagtggctgtatttcttcattattttctcttggtctcattcacatggatgggcctagaagcattccatatgtacctggcccttgtcaaagtatttaatacttacatccgaaaatacatccttaaattctgcattgtcggttggggggtaccagctgtggttgtgaccatcatcctgactatatccccagataactatgggcttggatcctatgggaaattccccaatggttcaccggatgacttctgctggatcaacaacaatgcagtattctacattacggtggtgggatatttctgtgtgatatttttgctgaacgtcagcatgttcattgtggtcctggttcagctctgtcgaattaaaaagaagaagcaactgggagcccagcgaaaaaccagtattcaagacctcaggagtatcgctggccttacatttttactgggaataacttggggctttgccttctttgcctggggaccagttaacgtgaccttcatgtatctgtttgccatctttaataccttacaaggatttttcatattcatcttttactgtgtggccaaagaaaatgtcaggaagcaatggaggcggtatctttgttgtggaaagttacggctggctgaaaattctgactggagtaaaactgctactaatggtttaaagaagcagactgtaaaccaaggagtgtccagctcttcaaattccttacagtcaagcagtaactccactaactccaccacactgctagtgaataatgattgctcagtacacgcaagcgggaatggaaatgcttctacagagaggaatggggtctcttttagtgttcagaatggagatgtgtgccttcacgatttcactggaaaacagcacatgtttaacgagaaggaagattcctgcaatgggaaaggccgtatggctctcagaaggacttcaaagcggggaagcttacactttattgagcaaatgtgattcctttcttctaaaatcaaagcatgatgcttgacagtgtgaaatgtccaattttaccttttacacaatgtgagatgtatgaaaatcaactcattttattctcggcaacatctggagaagcataagctaattaagggcgatgattattattacaagaagaaaccaagacattacaccatggtttttagacatttctgatttggtttcttatctttcattttataagaaggttggttttaaacaatacactaagaatgactcctataaagaaaacaaaaaaaggtagtgaactttcagctaccttttaaagaggctaagttatctttgataacatcatataaagcaactgttgacttcagcctgttggtgagtttagttgtgcatgcctttgttgtatataagctaaattctagtgacccatgtgtcaaaaatcttacttctacatttttttgtatttattttctactgtgtaaatgtattcctttgtagaatcatggttgttttgtctcacgtgataattcagaaaatccttgctcgttccgcaaatcctaaagctccttttggagatgatataggatgtgaaatacagaaacctcagtgaaatcaagaaataatgatcccagccagactgagaaaatgtaagcagacagtgccacagttagctcatacagtgcctttgagcaagttaggaaaagatgcccccactgggcagacacagccctatgggctcatggtttgacaaacagagtggagagaccatattttagccccactcaccctcttgggtgcacgacctgtacagccaaacacagcatccaatatgaatacccatcccctgaccgcatccccagtagtcagattatagaatctgcaccaagatgtttagctttataccttggccacagagagggatgaactgtcatccagaccatgtgtcaggaaaattgtgaacgtagatgaggtacatacactgccgcttctcaaatccccagagcctttaggaacaggagagtagactaggattccttctcttaaaaaggtacatatatatggaaaaaaatcatattgccgttctttaaaaggcaactgcatggtacattgttgattgttatgactggtacactctggcccagccagagctataattgttttttaaatgtgtcttgaagaatgcacagtgacaaggggagtagctattgggaacagggaactgtcctacactgctattgttgctacatgtatcgagccttgattgctcctagttatatacagggtctatcttgcttcctacctacatctgcttgagcagtgcctcaagtacatccttattaggaacatttcaaaccccttttagttaagtctttcactaaggttctcttgcatatatttcaagtgaatgttggatctcagactaaccatagtaataatacacatttctgtgagtgctgacttgtctttgcaatatttcttttctgatttatttaattttcttgtatttatatgttaaaatcaaaaatgttaaaatcaatgaaataaatttgcagttaaga

SEQ ID NO: 105525 - DNA, 4702 bp, Homo sapiens
  Payload ID: 689
  Gene Symbol: ADGRG2
  Gene Name: adhesion G protein-coupled receptor G2
  Uniprot ID: Q8IZP9
  ENST ID: ENST00000360279
  CDS Start-End: 165-3152
cgggagcggcgggggcggcgccgaggccgcgggcggggggaggagggccgcagccccggagaggggaaaaggcgggccggacggcgccagcagccagccccgaggacgcgagcggcaggtgtgcacagaggttctccactttgttttctgaactcgcggtcaggatggttttctctgtcaggcagtgtggccatgttggcagaactgaagaagttttactgacgttcaagatattccttgtcatcatttgtcttcatgtcgttctggtaacatccctggaagaagatactgataattccagtttgtcaccaccacctgctaaattatctgttgtcagttttgccccctcctccaatggtactccagatgttactttaagcttactcccttcaaacgaaacaggcgtcaaaccccagagaaatatctgcaatttgtcatctatttgcaatgactcagcattttttagaggtgagatcatgtttcaatatgataaagaaagcactgttccccagaatcaacatataacgaatggcaccttaactggagtcctgtctctaagtgaattaaaacgctcagagctcaacaaaaccctgcaaaccctaagtgagacttactttataatgtgtgctacagcagaggcccaaagcacattaaattgtacattcacaataaaactgaataatacaatgaatgcatgtgctgtaatagctgctttggaaagagtaaagattcgaccaatggaacactgctgctgttctgtcaggataccctgcccttcctccccagaagagttggaaaagcttcagtgtgacctgcaggatcccattgtctgtcttgctgaccatccacgtggcccaccattttcttccagccaatccatcccagtggtgcctcgggccactgtgctttcccaggtccccaaagctacctcttttgctgagcctccagattattcacctgtgacccacaatgttccctctccaataggggagattcaacccctttcaccccagccttcagctcccatagcttccagccctgccattgacatgcccccacagtctgaaacgatctcttcccctatgccccaaacccatgtctccggcaccccacctcctgtgaaagcctcattttcctctcccaccgtgtctgcccctgcgaatgtcaacactaccagcgcacctcctgtccagacagacatcgtcaacaccagcagtatttctgatcttgagaaccaagtgttgcagatggagaaggctctgtccttgggcagcctggagcctaacctcgcaggagaaatgatcaaccaagtcagcagactccttcattccccgcctgacatgctggcccctctggctcaaagattgctgaaagtagtggatgacattggcctacagctgaacttttcaaacacgactataagtctaacctccccttctttggctctggctgtgatcagagtgaatgccagtagtttcaacacaactacctttgtggcccaagaccctgcaaatcttcaggtttctctggaaacccaagctcctgagaacagtattggcacaattactcttccttcatcgctgatgaataatttaccagctcatgacatggagctagcttccagggttcagttcaatttttttgaaacacctgctttgtttcaggatccttccctggagaacctctctctgatcagctacgtcatatcatcgagtgttgcaaacctgaccgtcaggaacttgacaagaaacgtgacagtcacattaaagcacatcaacccgagccaggatgagttaacagtgagatgtgtattttgggacttgggcagaaatggtggcagaggaggctggtcagacaatggctgctctgtcaaagacaggagattgaatgaaaccatctgtacctgtagccatctaacaagcttcggcgttctgctggacctatctaggacatctgtgctgcctgctcaaatgatggctctgacgttcattacatatattggttgtgggctttcatcaatttttctgtcagtgactcttgtaacctacatagcttttgaaaagatccggagggattacccttccaaaatcctcatccagctgtgtgctgctctgcttctgctgaacctggtcttcctcctggactcgtggattgctctgtataagatgcaaggcctctgcatctcagtggctgtatttcttcattattttctcttggtctcattcacatggatgggcctagaagcattccatatgtacctggcccttgtcaaagtatttaatacttacatccgaaaatacatccttaaattctgcattgtcggttggggggtaccagctgtggttgtgaccatcatcctgactatatccccagataactatgggcttggatcctatgggaaattccccaatggttcaccggatgacttctgctggatcaacaacaatgcagtattctacattacggtggtgggatatttctgtgtgatatttttgctgaacgtcagcatgttcattgtggtcctggttcagctctgtcgaattaaaaagaagaagcaactgggagcccagcgaaaaaccagtattcaagacctcaggagtatcgctggccttacatttttactgggaataacttggggctttgccttctttgcctggggaccagttaacgtgaccttcatgtatctgtttgccatctttaataccttacaaggatttttcatattcatcttttactgtgtggccaaagaaaatgtcaggaagcaatggaggcggtatctttgttgtggaaagttacggctggctgaaaattctgactggagtaaaactgctactaatggtttaaagaagcagactgtaaaccaaggagtgtccagctcttcaaattccttacagtcaagcagtaactccactaactccaccacactgctagtgaataatgattgctcagtacacgcaagcgggaatggaaatgcttctacagagaggaatggggtctcttttagtgttcagaatggagatgtgtgccttcacgatttcactggaaaacagcacatgtttaacgagaaggaagattcctgcaatgggaaaggccgtatggctctcagaaggacttcaaagcggggaagcttacactttattgagcaaatgtgattcctttcttctaaaatcaaagcatgatgcttgacagtgtgaaatgtccaattttaccttttacacaatgtgagatgtatgaaaatcaactcattttattctcggcaacatctggagaagcataagctaattaagggcgatgattattattacaagaagaaaccaagacattacaccatggtttttagacatttctgatttggtttcttatctttcattttataagaaggttggttttaaacaatacactaagaatgactcctataaagaaaacaaaaaaaggtagtgaactttcagctaccttttaaagaggctaagttatctttgataacatcatataaagcaactgttgacttcagcctgttggtgagtttagttgtgcatgcctttgttgtatataagctaaattctagtgacccatgtgtcaaaaatcttacttctacatttttttgtatttattttctactgtgtaaatgtattcctttgtagaatcatggttgttttgtctcacgtgataattcagaaaatccttgctcgttccgcaaatcctaaagctccttttggagatgatataggatgtgaaatacagaaacctcagtgaaatcaagaaataatgatcccagccagactgagaaaatgtaagcagacagtgccacagttagctcatacagtgcctttgagcaagttaggaaaagatgcccccactgggcagacacagccctatgggctcatggtttgacaaacagagtggagagaccatattttagccccactcaccctcttgggtgcacgacctgtacagccaaacacagcatccaatatgaatacccatcccctgaccgcatccccagtagtcagattatagaatctgcaccaagatgtttagctttataccttggccacagagagggatgaactgtcatccagaccatgtgtcaggaaaattgtgaacgtagatgaggtacatacactgccgcttctcaaatccccagagcctttaggaacaggagagtagactaggattccttctcttaaaaaggtacatatatatggaaaaaaatcatattgccgttctttaaaaggcaactgcatggtacattgttgattgttatgactggtacactctggcccagccagagctataattgttttttaaatgtgtcttgaagaatgcacagtgacaaggggagtagctattgggaacagggaactgtcctacactgctattgttgctacatgtatcgagccttgattgctcctagttatatacagggtctatcttgcttcctacctacatctgcttgagcagtgcctcaagtacatccttattaggaacatttcaaaccccttttagttaagtctttcactaaggttctcttgcatatatttcaagtgaatgttggatctcagactaaccatagtaataatacacatttctgtgagtgctgacttgtctttgcaatatttcttttctgatttatttaattttcttgtatttatatgttaaaatcaaaaatgttaaaatcaatgaaataaatttgcagttaaga

SEQ ID NO: 105526 - DNA, 4768 bp, Homo sapiens
  Payload ID: 689
  Gene Symbol: ADGRG2
  Gene Name: adhesion G protein-coupled receptor G2
  Uniprot ID: Q8IZP9
  ENST ID: ENST00000379869
  CDS Start-End: 165-3218
cgggagcggcgggggcggcgccgaggccgcgggcggggggaggagggccgcagccccggagaggggaaaaggcgggccggacggcgccagcagccagccccgaggacgcgagcggcaggtgtgcacagaggttctccactttgttttctgaactcgcggtcaggatggttttctctgtcaggcagtgtggccatgttggcagaactgaagaagttttactgacgttcaagatattccttgtcatcatttgtcttcatgtcgttctggtaacatccctggaagaagatactgataattccagtttgtcaccaccacctgctaaattatctgttgtcagttttgccccctcctccaatggtactccagaggttgaaacaacaagcctcaatgatgttactttaagcttactcccttcaaacgaaacagaaaaaactaaaatcactatagtaaaaaccttcaatgcatcaggcgtcaaaccccagagaaatatctgcaatttgtcatctatttgcaatgactcagcattttttagaggtgagatcatgtttcaatatgataaagaaagcactgttccccagaatcaacatataacgaatggcaccttaactggagtcctgtctctaagtgaattaaaacgctcagagctcaacaaaaccctgcaaaccctaagtgagacttactttataatgtgtgctacagcagaggcccaaagcacattaaattgtacattcacaataaaactgaataatacaatgaatgcatgtgctgtaatagctgctttggaaagagtaaagattcgaccaatggaacactgctgctgttctgtcaggataccctgcccttcctccccagaagagttggaaaagcttcagtgtgacctgcaggatcccattgtctgtcttgctgaccatccacgtggcccaccattttcttccagccaatccatcccagtggtgcctcgggccactgtgctttcccaggtccccaaagctacctcttttgctgagcctccagattattcacctgtgacccacaatgttccctctccaataggggagattcaacccctttcaccccagccttcagctcccatagcttccagccctgccattgacatgcccccacagtctgaaacgatctcttcccctatgccccaaacccatgtctccggcaccccacctcctgtgaaagcctcattttcctctcccaccgtgtctgcccctgcgaatgtcaacactaccagcgcacctcctgtccagacagacatcgtcaacaccagcagtatttctgatcttgagaaccaagtgttgcagatggagaaggctctgtccttgggcagcctggagcctaacctcgcaggagaaatgatcaaccaagtcagcagactccttcattccccgcctgacatgctggcccctctggctcaaagattgctgaaagtagtggatgacattggcctacagctgaacttttcaaacacgactataagtctaacctccccttctttggctctggctgtgatcagagtgaatgccagtagtttcaacacaactacctttgtggcccaagaccctgcaaatcttcaggtttctctggaaacccaagctcctgagaacagtattggcacaattactcttccttcatcgctgatgaataatttaccagctcatgacatggagctagcttccagggttcagttcaatttttttgaaacacctgctttgtttcaggatccttccctggagaacctctctctgatcagctacgtcatatcatcgagtgttgcaaacctgaccgtcaggaacttgacaagaaacgtgacagtcacattaaagcacatcaacccgagccaggatgagttaacagtgagatgtgtattttgggacttgggcagaaatggtggcagaggaggctggtcagacaatggctgctctgtcaaagacaggagattgaatgaaaccatctgtacctgtagccatctaacaagcttcggcgttctgctggacctatctaggacatctgtgctgcctgctcaaatgatggctctgacgttcattacatatattggttgtgggctttcatcaatttttctgtcagtgactcttgtaacctacatagcttttgaaaagatccggagggattacccttccaaaatcctcatccagctgtgtgctgctctgcttctgctgaacctggtcttcctcctggactcgtggattgctctgtataagatgcaaggcctctgcatctcagtggctgtatttcttcattattttctcttggtctcattcacatggatgggcctagaagcattccatatgtacctggcccttgtcaaagtatttaatacttacatccgaaaatacatccttaaattctgcattgtcggttggggggtaccagctgtggttgtgaccatcatcctgactatatccccagataactatgggcttggatcctatgggaaattccccaatggttcaccggatgacttctgctggatcaacaacaatgcagtattctacattacggtggtgggatatttctgtgtgatatttttgctgaacgtcagcatgttcattgtggtcctggttcagctctgtcgaattaaaaagaagaagcaactgggagcccagcgaaaaaccagtattcaagacctcaggagtatcgctggccttacatttttactgggaataacttggggctttgccttctttgcctggggaccagttaacgtgaccttcatgtatctgtttgccatctttaataccttacaaggatttttcatattcatcttttactgtgtggccaaagaaaatgtcaggaagcaatggaggcggtatctttgttgtggaaagttacggctggctgaaaattctgactggagtaaaactgctactaatggtttaaagaagcagactgtaaaccaaggagtgtccagctcttcaaattccttacagtcaagcagtaactccactaactccaccacactgctagtgaataatgattgctcagtacacgcaagcgggaatggaaatgcttctacagagaggaatggggtctcttttagtgttcagaatggagatgtgtgccttcacgatttcactggaaaacagcacatgtttaacgagaaggaagattcctgcaatgggaaaggccgtatggctctcagaaggacttcaaagcggggaagcttacactttattgagcaaatgtgattcctttcttctaaaatcaaagcatgatgcttgacagtgtgaaatgtccaattttaccttttacacaatgtgagatgtatgaaaatcaactcattttattctcggcaacatctggagaagcataagctaattaagggcgatgattattattacaagaagaaaccaagacattacaccatggtttttagacatttctgatttggtttcttatctttcattttataagaaggttggttttaaacaatacactaagaatgactcctataaagaaaacaaaaaaaggtagtgaactttcagctaccttttaaagaggctaagttatctttgataacatcatataaagcaactgttgacttcagcctgttggtgagtttagttgtgcatgcctttgttgtatataagctaaattctagtgacccatgtgtcaaaaatcttacttctacatttttttgtatttattttctactgtgtaaatgtattcctttgtagaatcatggttgttttgtctcacgtgataattcagaaaatccttgctcgttccgcaaatcctaaagctccttttggagatgatataggatgtgaaatacagaaacctcagtgaaatcaagaaataatgatcccagccagactgagaaaatgtaagcagacagtgccacagttagctcatacagtgcctttgagcaagttaggaaaagatgcccccactgggcagacacagccctatgggctcatggtttgacaaacagagtggagagaccatattttagccccactcaccctcttgggtgcacgacctgtacagccaaacacagcatccaatatgaatacccatcccctgaccgcatccccagtagtcagattatagaatctgcaccaagatgtttagctttataccttggccacagagagggatgaactgtcatccagaccatgtgtcaggaaaattgtgaacgtagatgaggtacatacactgccgcttctcaaatccccagagcctttaggaacaggagagtagactaggattccttctcttaaaaaggtacatatatatggaaaaaaatcatattgccgttctttaaaaggcaactgcatggtacattgttgattgttatgactggtacactctggcccagccagagctataattgttttttaaatgtgtcttgaagaatgcacagtgacaaggggagtagctattgggaacagggaactgtcctacactgctattgttgctacatgtatcgagccttgattgctcctagttatatacagggtctatcttgcttcctacctacatctgcttgagcagtgcctcaagtacatccttattaggaacatttcaaaccccttttagttaagtctttcactaaggttctcttgcatatatttcaagtgaatgttggatctcagactaaccatagtaataatacacatttctgtgagtgctgacttgtctttgcaatatttcttttctgatttatttaattttcttgtatttatatgttaaaatcaaaaatgttaaaatcaatgaaataaatttgcagttaaga

SEQ ID NO: 105527 - DNA, 4698 bp, Homo sapiens
  Payload ID: 689
  Gene Symbol: ADGRG2
  Gene Name: adhesion G protein-coupled receptor G2
  Uniprot ID: Q8IZP9
  ENST ID: ENST00000379873
  CDS Start-End: 243-3143
gcgcccagcctcgccgccgccgagcgcccgacgcgccacgccgcgctgggcagctggagagctggcggcggagcgggccgggagcggcgggggcggcgccgaggccgcgggcggggggaggagggccgcagccccggagaggggaaaaggcgggccggacggcgccagcagccagccccgaggacgcgagcggcaggtgtgcacagaggttctccactttgttttctgaactcgcggtcaggatggttttctctgtcaggcagtgtggccatgttggcagaactgaagaagttttactgacgttcaagatattccttgtcatcatttgtcttcatgtcgttctggtaacatccctggaagaagatactgataattccagtttgtcaccaccacctgctaaattatctgttgtcagttttgccccctcctccaatggtactccagaggttgaaacaacaagcctcaatgatgttactttaagcttactcccttcaaacgaaacagaaaaaactaaaatcactatagtaaaaaccttcaatgcatcaggcgtcaaaccccagagaaatatctgcaatttgtcatctatttgcaatgactcagcattttttagaggtgagatcatgtttcaatatgataaagaaagcactgttccccagaatcaacatataacgaatggcaccttaactggagtcctgtctctaagtgaattaaaacgctcagagctcaacaaaaccctgcaaaccctaagtgagacttactttataatgtgtgctacagcagaggcccaaagcacattaaattgtacattcacaataaaactgaataatacaatgaatgcatgtgctgtaatagctgctttggaaagagtaaagattcgaccaatggaacactgctgctgttctgtcaggataccctgcccttcctccccagaagagttggaaaagcttcagtgtgacctgcaggatcccattgtctgtcttgctgaccatccacgtggcccaccattttcttccagccaatccatcccagtggtgcctcgggccactgtgctttcccaggtccccaaagctacctcttttgctgagcctccagattattcacctgtgacccacaatgttccctctccaataggggagattcaacccctttcaccccagccttcagctcccatagcttccagccctgccattgacatgcccccacagtctgaaacgatctcttcccctatgccccaaacccatgtctccggcaccccacctcctgtgaaagcctcattttcctctcccaccgtgtctgcccctgcgaatgtcaacactaccagcgcacctcctgtccagacagacatcgtcaacaccagcagtatttctgatcttgagaaccaagtgttgcagatggagaaggctctgtccttgggcagcctggagcctaacctcgcaggagaaatgatcaaccaagtcagcagactccttcattccccgcctgacatgctggcccctctggctcaaagattgctgaaagtagtggatgacattggcctacagctgaacttttcaaacacgactataagtctaacctccccttctttggctctggctgtgatcagagtgaatgccagtagtttcaacacaactacctttgtggcccaagaccctgcaaatcttcaggtttctctggaaacccaagctcctgagaacagtattggcacaattactcttccttcatcgctgatgaataatttaccagctcatgacatggagctagcttccagggttcagttcaatttttttgaaacacctgctttgtttcaggatccttccctggagaacctctctctgatcagctacgtcatatcatcgagtgttgcaaacctgaccgtcaggaacttgacaagaaacgtgacagtcacattaaagcacatcaacccgagccaggatgagttaacagtgagatgtgtattttgggacttgggcagaaatggtggcagaggaggctggtcagacaatggctgctctgtcaaagacaggagattgaatgaaaccatctgtacctgtagccatctaacaagcttcggcgttctgctggacctatctaggacatctgtgctgcctgctcaaatgatggctctgacgttcattacatatattggttgtgggctttcatcaatttttctgtcagtgactcttgtaacctacatagcttttgaaaagatccggagggattacccttccaaaatcctcatccagctgtgtgctgctctgcttctgctgaacctggtcttcctcctggactcgtggattgctctgtataagatgcaaggcctctgcatctcagtggctgtatttcttcattattttctcttggtctcattcacatggatgggcctagaagcattccatatgtacctggcccttgtcaaagtatttaatacttacatccgaaaatacatccttaaattctgcattgtcggttggggggtaccagctgtggttgtgaccatcatcctgactatatccccagataactatgggcttggatcctatgggaaattccccaatggttcaccggatgacttctgctggatcaacaacaatgcagtattctacattacggtggtgggatatttctgtgtgatatttttgctgaacgtcagcatgttcattgtggtcctggttcagctctgtcgaattaaaaagaagaagcaactgggagcccagcgaaaaaccagtattcaagacctcaggagtatcgctggccttacatttttactgggaataacttggggctttgccttctttgcctggggaccagttaacgtgaccttcatgtatctgtttgccatctttaataccttacaaggatttttcatattcatcttttactgtgtggccaaagaaaatgtcaggaagcaatggaggcggtatctttgttgtggaaagttacggctggctgaaaattctggaaatgcttctacagagaggaatggggtctcttttagtgttcagaatggagatgtgtgccttcacgatttcactggaaaacagcacatgtttaacgagaaggaagattcctgcaatgggaaaggccgtatggctctcagaaggacttcaaagcggggaagcttacactttattgagcaaatgtgattcctttcttctaaaatcaaagcatgatgcttgacagtgtgaaatgtccaattttaccttttacacaatgtgagatgtatgaaaatcaactcattttattctcggcaacatctggagaagcataagctaattaagggcgatgattattattacaagaagaaaccaagacattacaccatggtttttagacatttctgatttggtttcttatctttcattttataagaaggttggttttaaacaatacactaagaatgactcctataaagaaaacaaaaaaaggtagtgaactttcagctaccttttaaagaggctaagttatctttgataacatcatataaagcaactgttgacttcagcctgttggtgagtttagttgtgcatgcctttgttgtatataagctaaattctagtgacccatgtgtcaaaaatcttacttctacatttttttgtatttattttctactgtgtaaatgtattcctttgtagaatcatggttgttttgtctcacgtgataattcagaaaatccttgctcgttccgcaaatcctaaagctccttttggagatgatataggatgtgaaatacagaaacctcagtgaaatcaagaaataatgatcccagccagactgagaaaatgtaagcagacagtgccacagttagctcatacagtgcctttgagcaagttaggaaaagatgcccccactgggcagacacagccctatgggctcatggtttgacaaacagagtggagagaccatattttagccccactcaccctcttgggtgcacgacctgtacagccaaacacagcatccaatatgaatacccatcccctgaccgcatccccagtagtcagattatagaatctgcaccaagatgtttagctttataccttggccacagagagggatgaactgtcatccagaccatgtgtcaggaaaattgtgaacgtagatgaggtacatacactgccgcttctcaaatccccagagcctttaggaacaggagagtagactaggattccttctcttaaaaaggtacatatatatggaaaaaaatcatattgccgttctttaaaaggcaactgcatggtacattgttgattgttatgactggtacactctggcccagccagagctataattgttttttaaatgtgtcttgaagaatgcacagtgacaaggggagtagctattgggaacagggaactgtcctacactgctattgttgctacatgtatcgagccttgattgctcctagttatatacagggtctatcttgcttcctacctacatctgcttgagcagtgcctcaagtacatccttattaggaacatttcaaaccccttttagttaagtctttcactaaggttctcttgcatatatttcaagtgaatgttggatctcagactaaccatagtaataatacacatttctgtgagtgctgacttgtctttgcaatatttcttttctgatttatttaattttcttgtatttatatgttaaaatcaaaaatgttaaaatcaatgaaataaatttgcagttaagatcttt

SEQ ID NO: 105528 - DNA, 4779 bp, Homo sapiens
  Payload ID: 689
  Gene Symbol: ADGRG2
  Gene Name: adhesion G protein-coupled receptor G2
  Uniprot ID: Q8IZP9
  ENST ID: ENST00000379876
  CDS Start-End: 243-3224
gcgcccagcctcgccgccgccgagcgcccgacgcgccacgccgcgctgggcagctggagagctggcggcggagcgggccgggagcggcgggggcggcgccgaggccgcgggcggggggaggagggccgcagccccggagaggggaaaaggcgggccggacggcgccagcagccagccccgaggacgcgagcggcaggtgtgcacagaggttctccactttgttttctgaactcgcggtcaggatggttttctctgtcaggcagtgtggccatgttggcagaactgaagaagttttactgacgttcaagatattccttgtcatcatttgtcttcatgtcgttctggtaacatccctggaagaagatactgataattccagtttgtcaccaccacctgatgttactttaagcttactcccttcaaacgaaacagaaaaaactaaaatcactatagtaaaaaccttcaatgcatcaggcgtcaaaccccagagaaatatctgcaatttgtcatctatttgcaatgactcagcattttttagaggtgagatcatgtttcaatatgataaagaaagcactgttccccagaatcaacatataacgaatggcaccttaactggagtcctgtctctaagtgaattaaaacgctcagagctcaacaaaaccctgcaaaccctaagtgagacttactttataatgtgtgctacagcagaggcccaaagcacattaaattgtacattcacaataaaactgaataatacaatgaatgcatgtgctgtaatagctgctttggaaagagtaaagattcgaccaatggaacactgctgctgttctgtcaggataccctgcccttcctccccagaagagttggaaaagcttcagtgtgacctgcaggatcccattgtctgtcttgctgaccatccacgtggcccaccattttcttccagccaatccatcccagtggtgcctcgggccactgtgctttcccaggtccccaaagctacctcttttgctgagcctccagattattcacctgtgacccacaatgttccctctccaataggggagattcaacccctttcaccccagccttcagctcccatagcttccagccctgccattgacatgcccccacagtctgaaacgatctcttcccctatgccccaaacccatgtctccggcaccccacctcctgtgaaagcctcattttcctctcccaccgtgtctgcccctgcgaatgtcaacactaccagcgcacctcctgtccagacagacatcgtcaacaccagcagtatttctgatcttgagaaccaagtgttgcagatggagaaggctctgtccttgggcagcctggagcctaacctcgcaggagaaatgatcaaccaagtcagcagactccttcattccccgcctgacatgctggcccctctggctcaaagattgctgaaagtagtggatgacattggcctacagctgaacttttcaaacacgactataagtctaacctccccttctttggctctggctgtgatcagagtgaatgccagtagtttcaacacaactacctttgtggcccaagaccctgcaaatcttcaggtttctctggaaacccaagctcctgagaacagtattggcacaattactcttccttcatcgctgatgaataatttaccagctcatgacatggagctagcttccagggttcagttcaatttttttgaaacacctgctttgtttcaggatccttccctggagaacctctctctgatcagctacgtcatatcatcgagtgttgcaaacctgaccgtcaggaacttgacaagaaacgtgacagtcacattaaagcacatcaacccgagccaggatgagttaacagtgagatgtgtattttgggacttgggcagaaatggtggcagaggaggctggtcagacaatggctgctctgtcaaagacaggagattgaatgaaaccatctgtacctgtagccatctaacaagcttcggcgttctgctggacctatctaggacatctgtgctgcctgctcaaatgatggctctgacgttcattacatatattggttgtgggctttcatcaatttttctgtcagtgactcttgtaacctacatagcttttgaaaagatccggagggattacccttccaaaatcctcatccagctgtgtgctgctctgcttctgctgaacctggtcttcctcctggactcgtggattgctctgtataagatgcaaggcctctgcatctcagtggctgtatttcttcattattttctcttggtctcattcacatggatgggcctagaagcattccatatgtacctggcccttgtcaaagtatttaatacttacatccgaaaatacatccttaaattctgcattgtcggttggggggtaccagctgtggttgtgaccatcatcctgactatatccccagataactatgggcttggatcctatgggaaattccccaatggttcaccggatgacttctgctggatcaacaacaatgcagtattctacattacggtggtgggatatttctgtgtgatatttttgctgaacgtcagcatgttcattgtggtcctggttcagctctgtcgaattaaaaagaagaagcaactgggagcccagcgaaaaaccagtattcaagacctcaggagtatcgctggccttacatttttactgggaataacttggggctttgccttctttgcctggggaccagttaacgtgaccttcatgtatctgtttgccatctttaataccttacaaggatttttcatattcatcttttactgtgtggccaaagaaaatgtcaggaagcaatggaggcggtatctttgttgtggaaagttacggctggctgaaaattctgactggagtaaaactgctactaatggtttaaagaagcagactgtaaaccaaggagtgtccagctcttcaaattccttacagtcaagcagtaactccactaactccaccacactgctagtgaataatgattgctcagtacacgcaagcgggaatggaaatgcttctacagagaggaatggggtctcttttagtgttcagaatggagatgtgtgccttcacgatttcactggaaaacagcacatgtttaacgagaaggaagattcctgcaatgggaaaggccgtatggctctcagaaggacttcaaagcggggaagcttacactttattgagcaaatgtgattcctttcttctaaaatcaaagcatgatgcttgacagtgtgaaatgtccaattttaccttttacacaatgtgagatgtatgaaaatcaactcattttattctcggcaacatctggagaagcataagctaattaagggcgatgattattattacaagaagaaaccaagacattacaccatggtttttagacatttctgatttggtttcttatctttcattttataagaaggttggttttaaacaatacactaagaatgactcctataaagaaaacaaaaaaaggtagtgaactttcagctaccttttaaagaggctaagttatctttgataacatcatataaagcaactgttgacttcagcctgttggtgagtttagttgtgcatgcctttgttgtatataagctaaattctagtgacccatgtgtcaaaaatcttacttctacatttttttgtatttattttctactgtgtaaatgtattcctttgtagaatcatggttgttttgtctcacgtgataattcagaaaatccttgctcgttccgcaaatcctaaagctccttttggagatgatataggatgtgaaatacagaaacctcagtgaaatcaagaaataatgatcccagccagactgagaaaatgtaagcagacagtgccacagttagctcatacagtgcctttgagcaagttaggaaaagatgcccccactgggcagacacagccctatgggctcatggtttgacaaacagagtggagagaccatattttagccccactcaccctcttgggtgcacgacctgtacagccaaacacagcatccaatatgaatacccatcccctgaccgcatccccagtagtcagattatagaatctgcaccaagatgtttagctttataccttggccacagagagggatgaactgtcatccagaccatgtgtcaggaaaattgtgaacgtagatgaggtacatacactgccgcttctcaaatccccagagcctttaggaacaggagagtagactaggattccttctcttaaaaaggtacatatatatggaaaaaaatcatattgccgttctttaaaaggcaactgcatggtacattgttgattgttatgactggtacactctggcccagccagagctataattgttttttaaatgtgtcttgaagaatgcacagtgacaaggggagtagctattgggaacagggaactgtcctacactgctattgttgctacatgtatcgagccttgattgctcctagttatatacagggtctatcttgcttcctacctacatctgcttgagcagtgcctcaagtacatccttattaggaacatttcaaaccccttttagttaagtctttcactaaggttctcttgcatatatttcaagtgaatgttggatctcagactaaccatagtaataatacacatttctgtgagtgctgacttgtctttgcaatatttcttttctgatttatttaattttcttgtatttatatgttaaaatcaaaaatgttaaaatcaatgaaataaatttgcagttaagatcttt

SEQ ID NO: 105529 - DNA, 4803 bp, Homo sapiens
  Payload ID: 689
  Gene Symbol: ADGRG2
  Gene Name: adhesion G protein-coupled receptor G2
  Uniprot ID: Q8IZP9
  ENST ID: ENST00000379878
  CDS Start-End: 243-3248
gcgcccagcctcgccgccgccgagcgcccgacgcgccacgccgcgctgggcagctggagagctggcggcggagcgggccgggagcggcgggggcggcgccgaggccgcgggcggggggaggagggccgcagccccggagaggggaaaaggcgggccggacggcgccagcagccagccccgaggacgcgagcggcaggtgtgcacagaggttctccactttgttttctgaactcgcggtcaggatggttttctctgtcaggcagtgtggccatgttggcagaactgaagaagttttactgacgttcaagatattccttgtcatcatttgtcttcatgtcgttctggtaacatccctggaagaagatactgataattccagtttgtcaccaccacctgaggttgaaacaacaagcctcaatgatgttactttaagcttactcccttcaaacgaaacagaaaaaactaaaatcactatagtaaaaaccttcaatgcatcaggcgtcaaaccccagagaaatatctgcaatttgtcatctatttgcaatgactcagcattttttagaggtgagatcatgtttcaatatgataaagaaagcactgttccccagaatcaacatataacgaatggcaccttaactggagtcctgtctctaagtgaattaaaacgctcagagctcaacaaaaccctgcaaaccctaagtgagacttactttataatgtgtgctacagcagaggcccaaagcacattaaattgtacattcacaataaaactgaataatacaatgaatgcatgtgctgtaatagctgctttggaaagagtaaagattcgaccaatggaacactgctgctgttctgtcaggataccctgcccttcctccccagaagagttggaaaagcttcagtgtgacctgcaggatcccattgtctgtcttgctgaccatccacgtggcccaccattttcttccagccaatccatcccagtggtgcctcgggccactgtgctttcccaggtccccaaagctacctcttttgctgagcctccagattattcacctgtgacccacaatgttccctctccaataggggagattcaacccctttcaccccagccttcagctcccatagcttccagccctgccattgacatgcccccacagtctgaaacgatctcttcccctatgccccaaacccatgtctccggcaccccacctcctgtgaaagcctcattttcctctcccaccgtgtctgcccctgcgaatgtcaacactaccagcgcacctcctgtccagacagacatcgtcaacaccagcagtatttctgatcttgagaaccaagtgttgcagatggagaaggctctgtccttgggcagcctggagcctaacctcgcaggagaaatgatcaaccaagtcagcagactccttcattccccgcctgacatgctggcccctctggctcaaagattgctgaaagtagtggatgacattggcctacagctgaacttttcaaacacgactataagtctaacctccccttctttggctctggctgtgatcagagtgaatgccagtagtttcaacacaactacctttgtggcccaagaccctgcaaatcttcaggtttctctggaaacccaagctcctgagaacagtattggcacaattactcttccttcatcgctgatgaataatttaccagctcatgacatggagctagcttccagggttcagttcaatttttttgaaacacctgctttgtttcaggatccttccctggagaacctctctctgatcagctacgtcatatcatcgagtgttgcaaacctgaccgtcaggaacttgacaagaaacgtgacagtcacattaaagcacatcaacccgagccaggatgagttaacagtgagatgtgtattttgggacttgggcagaaatggtggcagaggaggctggtcagacaatggctgctctgtcaaagacaggagattgaatgaaaccatctgtacctgtagccatctaacaagcttcggcgttctgctggacctatctaggacatctgtgctgcctgctcaaatgatggctctgacgttcattacatatattggttgtgggctttcatcaatttttctgtcagtgactcttgtaacctacatagcttttgaaaagatccggagggattacccttccaaaatcctcatccagctgtgtgctgctctgcttctgctgaacctggtcttcctcctggactcgtggattgctctgtataagatgcaaggcctctgcatctcagtggctgtatttcttcattattttctcttggtctcattcacatggatgggcctagaagcattccatatgtacctggcccttgtcaaagtatttaatacttacatccgaaaatacatccttaaattctgcattgtcggttggggggtaccagctgtggttgtgaccatcatcctgactatatccccagataactatgggcttggatcctatgggaaattccccaatggttcaccggatgacttctgctggatcaacaacaatgcagtattctacattacggtggtgggatatttctgtgtgatatttttgctgaacgtcagcatgttcattgtggtcctggttcagctctgtcgaattaaaaagaagaagcaactgggagcccagcgaaaaaccagtattcaagacctcaggagtatcgctggccttacatttttactgggaataacttggggctttgccttctttgcctggggaccagttaacgtgaccttcatgtatctgtttgccatctttaataccttacaaggatttttcatattcatcttttactgtgtggccaaagaaaatgtcaggaagcaatggaggcggtatctttgttgtggaaagttacggctggctgaaaattctgactggagtaaaactgctactaatggtttaaagaagcagactgtaaaccaaggagtgtccagctcttcaaattccttacagtcaagcagtaactccactaactccaccacactgctagtgaataatgattgctcagtacacgcaagcgggaatggaaatgcttctacagagaggaatggggtctcttttagtgttcagaatggagatgtgtgccttcacgatttcactggaaaacagcacatgtttaacgagaaggaagattcctgcaatgggaaaggccgtatggctctcagaaggacttcaaagcggggaagcttacactttattgagcaaatgtgattcctttcttctaaaatcaaagcatgatgcttgacagtgtgaaatgtccaattttaccttttacacaatgtgagatgtatgaaaatcaactcattttattctcggcaacatctggagaagcataagctaattaagggcgatgattattattacaagaagaaaccaagacattacaccatggtttttagacatttctgatttggtttcttatctttcattttataagaaggttggttttaaacaatacactaagaatgactcctataaagaaaacaaaaaaaggtagtgaactttcagctaccttttaaagaggctaagttatctttgataacatcatataaagcaactgttgacttcagcctgttggtgagtttagttgtgcatgcctttgttgtatataagctaaattctagtgacccatgtgtcaaaaatcttacttctacatttttttgtatttattttctactgtgtaaatgtattcctttgtagaatcatggttgttttgtctcacgtgataattcagaaaatccttgctcgttccgcaaatcctaaagctccttttggagatgatataggatgtgaaatacagaaacctcagtgaaatcaagaaataatgatcccagccagactgagaaaatgtaagcagacagtgccacagttagctcatacagtgcctttgagcaagttaggaaaagatgcccccactgggcagacacagccctatgggctcatggtttgacaaacagagtggagagaccatattttagccccactcaccctcttgggtgcacgacctgtacagccaaacacagcatccaatatgaatacccatcccctgaccgcatccccagtagtcagattatagaatctgcaccaagatgtttagctttataccttggccacagagagggatgaactgtcatccagaccatgtgtcaggaaaattgtgaacgtagatgaggtacatacactgccgcttctcaaatccccagagcctttaggaacaggagagtagactaggattccttctcttaaaaaggtacatatatatggaaaaaaatcatattgccgttctttaaaaggcaactgcatggtacattgttgattgttatgactggtacactctggcccagccagagctataattgttttttaaatgtgtcttgaagaatgcacagtgacaaggggagtagctattgggaacagggaactgtcctacactgctattgttgctacatgtatcgagccttgattgctcctagttatatacagggtctatcttgcttcctacctacatctgcttgagcagtgcctcaagtacatccttattaggaacatttcaaaccccttttagttaagtctttcactaaggttctcttgcatatatttcaagtgaatgttggatctcagactaaccatagtaataatacacatttctgtgagtgctgacttgtctttgcaatatttcttttctgatttatttaattttcttgtatttatatgttaaaatcaaaaatgttaaaatcaatgaaataaatttgcagttaagatcttt

SEQ ID NO: 105530 - DNA, 2728 bp, Homo sapiens
  Payload ID: 690
  Gene Symbol: ADGRG3
  Gene Name: adhesion G protein-coupled receptor G3
  Uniprot ID: Q86Y34
  ENST ID: ENST00000333493
  CDS Start-End: 162-1811
acaacccaaccaatggcgccatcgagcaggaagggtgagaaagaggacacaggaagccagagtggtggggctgcagggtgggggcaggccagctcagcagagcctggggccagagggccagacagccacagagctcctggcgtgggcaaggctggccaaggatggcgacgcccaggggcctgggggccctgctcctgctcctcctgctcccgacctcaggtcaggaaaagcccaccgaagggccaagaaacacctgcctggggagcaacaacatgtacgacatcttcaacttgaatgacaaggctttgtgcttcaccaagtgcaggcagtcgggcagcgactcctgcaatgtggaaaacttgcagagatactggctaaactacgaggcccatctgatgaaggaaggtttgacgcagaaggtgaacacgcctttcctgaaggctttggtccagaacctcagcaccaacactgcagaagacttctatttctctctggagccctctcaggttccgaggcaggtgatgaaggacgaggacaagccccctgacagagtgcgacttcccaagagcctttttcgatccctgccaggcaacaggtctgtggtccgcttggccgtcaccattctggacattggtccagggactctcttcaagggcccccggctcggcctgggagatggcagcggcgtgttgaacaatcgcctggtgggtttgagtgtgggacaaatgcatgtcaccaagctggctgagcctctggagatcgtcttctctcaccagcgaccgccccctaacatgaccctcacctgtgtattctgggatgtgactaaagggaccactggagactggtcttctgagggctgctccacggaggtcagacctgaggggaccgtgtgctgctgtgaccacctgacctttttcgccctgctcctgagacccaccttggaccagtccacggtgcatatcctcacacgcatctcccaggcgggctgtggggtctccatgatcttcctggccttcaccattattctttatgcctttctgaggctttcccgggagaggttcaagtcagaagatgccccaaagatccacgtggccctgggtggcagcctgttcctcctgaatctggccttcttggtcaatgtggggagtggctcaaaggggtctgatgctgcctgctgggcccggggggctgtcttccactacttcctgctctgtgccttcacctggatgggccttgaagccttccacctctacctgctcgctgtcagggtcttcaacacctacttcgggcactacttcctgaagctgagcctggtgggctggggcctgcccgccctgatggtcatcggcactgggagtgccaacagctacggcctctacaccatccgtgatagggagaaccgcacctctctggagctatgctggttccgtgaagggacaaccatgtacgccctctatatcaccgtccacggctacttcctcatcaccttcctctttggcatggtggtcctggccctggtggtctggaagatcttcaccctgtcccgtgctacagcggtcaaggagcgggggaagaaccggaagaaggtgctcaccctgctgggcctctcgagcctggtgggtgtgacatgggggttggccatcttcaccccgttgggcctctccaccgtctacatctttgcacttttcaactccttgcaaggtgtcttcatctgctgctggttcaccatcctttacctcccaagtcagagcaccacagtctcctcctctactgcaagattggaccaggcccactccgcatctcaagaataggaaggcacggccctgcaatatggactcagctctggctctctgtgtgaccttgggcagctccgtgcctctctctgtactccctcagtttccttctctgtacaatgtggctggggagggagaggatgggaccaggttggaccacgtggcatcagaggtcccatccagatccaactataggtccaagagtccacgtaagcaggtttgcaaggctctaaagttcctatagtcctgagaccccctgccagcaaagagtgacagtcacctccatgccctgccctcattgcaaagccctcactcaccttctggtctcagcaagggaggagagtctgttgctggcatagccctggaaggagcccccagcctctcccctcctcctccttgtcactggcctcccacaactccccttctggctgcctgtaaccttgaggggcattcaggaggccagcgttccctcaggcactgggggtttgttttggggggtgggagttgatcctcccacccagtctgcccctggtctctgcccatccaatcagagcccaccctcctggaagagacccccgtgttcagagtgctggcagccctgcacgtgtccagggacactgcatttcaaagaaccactgagtgggtgagctaccttgggcaaaccccccactcctgactctgactgccacgtgggtggcccgacctctgacctgctgtcatcgtagaggtagaaagcaaacaatctggggctcagcacacctgggggtgctcccactcattcagtgtgtggggcccctgagcagaggctgggcattgccactaggacctgagctcctagagaacaaggacctgggtggcctcgcttactgttccagcccaggccaagcacagggtctggctcgtggcaaaccttgaataaatatttgttggctgaa

SEQ ID NO: 105531 - DNA, 1785 bp, Homo sapiens
  Payload ID: 690
  Gene Symbol: ADGRG3
  Gene Name: adhesion G protein-coupled receptor G3
  ENST ID: ENST00000450388
  CDS Start-End: 262-1551
acagccacagagctcctggcgtgggcaaggctggccaaggatggcgacgcccaggggcctgggggccctgctcctgctcctcctgctcccgacctcaggtcaggaaaagcccaccgaagggccaagaaacacctgcctggggagcaacaacatgtacgacatcttcaacttgaatgacaaggctttgtgcttcaccaagtgcaggcagtcgggcagcgactcctgcaatgtggaaaacttgcagaggttccgaggcaggtgatgaaggacgaggacaagccccctgacagagtgcgacttcccaagagcctttttcgatccctgccaggcaacaggtctgtggtccgcttggccgtcaccattctggacattggtccagggactctcttcaagggcccccggctcggcctgggagatggcagcggcgtgttgaacaatcgcctggtgggtttgagtgtgggacaaatgcatgtcaccaagctggctgagcctctggagatcgtcttctctcaccagcgaccgccccctaacatgaccctcacctgtgtattctgggatgtgactaaagggaccactggagactggtcttctgagggctgctccacggaggtcagacctgaggggaccgtgtgctgctgtgaccacctgacctttttcgccctgctcctgagacccaccttggaccagtccacggtgcatatcctcacacgcatctcccaggcgggctgtggggtctccatgatcttcctggccttcaccattattctttatgcctttctgaggctttcccgggagaggttcaagtcagaagatgccccaaagatccacgtggccctgggtggcagcctgttcctcctgaatctggccttcttggtcaatgtggggagtggctcaaaggggtctgatgctgcctgctgggcccggggggctgtcttccactacttcctgctctgtgccttcacctggatgggccttgaagccttccacctctacctgctcgctgtcagggtcttcaacacctacttcgggcactacttcctgaagctgagcctggtgggctggggcctgcccgccctgatggtcatcggcactgggagtgccaacagctacggcctctacaccatccgtgatagggagaaccgcacctctctggagctatgctggttccgtgaagggacaaccatgtacgccctctatatcaccgtccacggctacttcctcatcaccttcctctttggcatggtggtcctggccctggtggtctggaagatcttcaccctgtcccgtgctacagcggtcaaggagcgggggaagaaccggaagaaggtgctcaccctgctgggcctctcgagcctggtgggtgtgacatgggggttggccatcttcaccccgttgggcctctccaccgtctacatctttgcacttttcaactccttgcaaggtgtcttcatctgctgctggttcaccatcctttacctcccaagtcagagcaccacagtctcctcctctactgcaagattggaccaggcccactccgcatctcaagaataggaaggcacggccctgcaatatggactcagctctggctctctgtgtgaccttgggcagctccgtgcctctctctgtactccctcagtttccttctctgtacaatgtggctggggagggagaggatgggaccaggttggaccacgtggcatcagaggtcccatccagatccaactataggtccaagagtccacgtaagcaggtttgcaaggctctaaagttcctatagtcctgaga

SEQ ID NO: 105532 - DNA, 2317 bp, Homo sapiens
  Payload ID: 690
  Gene Symbol: ADGRG3
  Gene Name: adhesion G protein-coupled receptor G3
  ENST ID: ENST00000567991
  CDS Start-End: 32-979
gagctcctggcgtgggcaaggctggccaaggatggcgacgcccaggggcctgggggccctgctcctgctcctcctgctcccgacctcaggtcaggaaaagcccaccgaagggccaagaaacacctgcctggggagcaacaacatgtacgacatcttcaacttgaatgacaaggctttgtgcttcaccaagtgcaggcagtcgggcagcgactcctgcaatgtggaaaacttgcagagatactggctaaactacgaggcccatctgatgaaggaaggtttgacgcagaaggtgaacacgcctttcctgaaggctttggtccagaacctcagcaccaacactgcagaagacttctatttctctctggagccctctcaggttccgaggcaggtgatgaaggacgaggacaagccccctgacagagtgcgacttcccaagagcctttttcgatccctgccaggcaacaggtctgtggtccgcttggccgtcaccattctggacattggtccagggactctcttcaagggcccccggctcggcctgggagatggcagcggcgtgttgaacaatcgcctggtgggtttgagtgtgggacaaatgcatgtcaccaagctggctgagcctctggagatcgtcttctctcaccagcgaccgccccctaacatgaccctcacctgtgtattctgggatgtgactaaagggaccactggagactggtcttctgagggctgctccacggaggtcagacctgaggggaccgtgtgctgctgtgaccacctgacctttttcgccctgctcctgagacccaccttggaccagtccacggtgcatatcctcacacgcatctcccaggcgggctgtggggtctccatgatcttcctggccttcaccattattctttatgcctttctgaggcctgcccgccctgatggtcatcggcactgggagtgccaacagctacggcctctacaccatccgtgatagggagaaccgcacctctctggagctatgctggttccgtgaagggacaaccatgtacgccctctatatcaccgtccacggctacttcctcatcaccttcctctttggcatggtggtcctggccctggtggtctggaagatcttcaccctgtcccgtgctacagcggtcaaggagcgggggaagaaccggaagaaggtgctcaccctgctgggcctctcgagcctggtgggtgtgacatgggggttggccatcttcaccccgttgggcctctccaccgtctacatctttgcacttttcaactccttgcaaggtgtcttcatctgctgctggttcaccatcctttacctcccaagtcagagcaccacagtctcctcctctactgcaagattggaccaggcccactccgcatctcaagaataggaaggcacggccctgcaatatggactcagctctggctctctgtgtgaccttgggcagctccgtgcctctctctgtactccctcagtttccttctctgtacaatgtggctggggagggagaggatgggaccaggttggaccacgtggcatcagaggtcccatccagatccaactataggtccaagagtccacgtaagcaggtttgcaaggctctaaagttcctatagtcctgagaccccctgccagcaaagagtgacagtcacctccatgccctgccctcattgcaaagccctcactcaccttctggtctcagcaagggaggagagtctgttgctggcatagccctggaaggagcccccagcctctcccctcctcctccttgtcactggcctcccacaactccccttctggctgcctgtaaccttgaggggcattcaggaggccagcgttccctcaggcactgggggtttgttttggggggtgggagttgatcctcccacccagtctgcccctggtctctgcccatccaatcagagcccaccctcctggaagagacccccgtgttcagagtgctggcagccctgcacgtgtccagggacactgcatttcaaagaaccactgagtgggtgagctaccttgggcaaaccccccactcctgactctgactgccacgtgggtggcccgacctctgacctgctgtcatcgtagaggtagaaagcaaacaatctggggctcagcacacctgggggtgctcccactcattcagtgtgtggggcccctgagcagaggctgggcattgccactaggacctgagctcctagagaacaaggacctgggtggcctcgcttactgttccagcccaggccaagcacagggtctggctcgtggcaaaccttgaataaatatttgttggctgaa

SEQ ID NO: 105533 - DNA, 590 bp, Homo sapiens
  Payload ID: 690
  Gene Symbol: ADGRG3
  Gene Name: adhesion G protein-coupled receptor G3
  ENST ID: ENST00000568245
  CDS Start-End: 72-281
agctcagcagagcctggggccagagggccagacagccacagagctcctggcgtgggcaaggctggccaaggatggcgacgcccaggggcctgggggccctgctcctgctcctcctgctcccgacctcaggtcaggaaaagcccaccgaagggccaagaaacacctgcctggggagcaacaacatgtacgacatcttcaacttgaatgacaaggctttgtgcttcaccaagtgcaggcagtcgggcagcgactcctgcaatgtggaaaacttgcagaggtgatccaggagcttcttagcaccccagagctgttcagaggctcctctttgtgctgcccagatactggctaaactacgaggcccatctgatgaaggaaggtttgacgcagaaggtgaacacgcctttcctgaaggctttggtccagaacctcagcaccaacactgcagaagacttctatttctctctggagccctctcaggttccgaggcaggtgatgaaggacgaggacaagccccctgacagagtgcgacttcccaagagcctttttcgatccctgccaggcaacaggtctgtggtccgcttggccgtcac

SEQ ID NO: 105534 - DNA, 9820 bp, Homo sapiens
  Payload ID: 691
  Gene Symbol: ADGRG4
  Gene Name: adhesion G protein-coupled receptor G4
  Uniprot ID: Q8IZF6
  ENST ID: ENST00000370652
  CDS Start-End: 181-9423
aggctgtgtgaccccacgttggggacaggtcacaaaacctaagccttgtgcctactggaaagaagaagcagtggagtccttgacagaagcagtggtgctggaacctggtgctaggcgctgggccaagcactttacatactgtgtgttatgtaatcttcacagcaatatgagacttagacaatgaaagaacacatcatatatcagaagctttatggattgattctcatgtcgagttttatctttctctcagatacactttcactaaaaggaaaaaagctggatttttttggaagaggtgacacatatgtaagcctgatagataccattcctgaactcagccgattcacagcatgcattgatctggtattcatggatgacaactcaaggtattggatggccttctcttatattactaataacgccctcctgggcagagaagacatagaccttggacttgcaggagaccatcagcagctaatactatacagattgggaaagaccttttctatccgtcaccacctggcttcatttcaatggcatacaatatgcttgatatgggatggtgtgaagggcaaattagaactcttcctgaataaagaaaggatactggaagtaacggatcaaccacacaacctgacacctcatgggactctgttcctagggcactttctcaagaatgagagcagcgaggttaaaagcatgatgcgtagctttcctggcagcttgtactactttcaactctgggaccacatcctggaaaacgaagagtttatgaagtgtttagatggaaatatagttagttgggaagaagacgtctggcttgtcaacaagatcatcccaactgttgacaggacactgcgctgctttgttcctgaaaatatgacaattcaagaaaaaagtacaactgtttcacaacagatagatatgaccactccatcccaaattactggagtaaaaccacaaaatactgcacattcctctacactattgtctcaaagcatacctatatttgcaactgattacacaaccatatcatattccaatacaacatctccacctctggaaacaatgactgcacaaaaaatcttaaagacactggtagatgagacagctacatttgcagtggatgttttatcaacttcatcagccatctctctgcctacccagagtatatccatagacaatactaccaattccatgaaaaaaacgaaatctccatcttcagaaagcacaaagacaacaaaaatggttgaagccatggctactgaaatctttcaaccacctacaccttctaatttcctatccacatccagatttaccaagaattcagttgtatctacaacttcagcaattaaatctcagtcggctgttacgaagacaacatctttattttcaactattgagtcaacatctatgtctacaacaccttgtctcaaacaaaaatccacaaatactggggcactccctatctccacagctggccaggagttcattgaatctacagctgccggaactgtaccttggtttacagtggaaaagacttcacctgcatctactcatgttgggactgcatcatcattcccacctgagcctgtgctcatctccacagctgctccagtagattctgtatttcctagaaaccagacagcatttccattggcaacaactgatatgaaaatagcatttacagtccattcattgactctcccaactaggcttattgagaccacacctgccccaaggacagctgaaacagaattgacatctacaaattttcaggatgtctctttacccagagtggaagatgccatgtctacttccatgtcgaaagagacctcctctaagaccttttctttcttaacatccttttcatttactgggactgagagtgtacagacagttattgatgctgaagctacacgtacagccttaactcctgaaatcacacttgcatctacagtggctgaaactatgctttcctccacaatcacaggacgagtttacacccagaatacacctacagctgatggacacttgcttactttgatgtccactagatcagcttccacatccaaggcacctgagtcaggtcccacatccacaactgatgaagctgcccatctgttctccagcaatgagaccatttggacttctaggccagaccaggccctgctggcatctatgaacacaaccaccatactcacatttgtgcctaatgaaaattttacatcagcatttcatgagaatactacttatacagaatatttatccgcaactaccaatatcaccccactgaaagcatctccagagggcaaaggtaccactgccaatgatgctactacagccagatatacaacagctgtatccaaattgacatcaccatggtttgctaatttctccatagtttctggaaccacatccataaccaatatgcctgaatttaaacttaccactttactactaaaaacaatacctatgtctacaaaacctgcaaatgaacttcctttgacaccaagggagactgttgttccatcagtagatataatatctactcttgcttgcattcaaccaaatttttctactgaggaaagtgcttctgagaccacacaaacagaaataaatggtgcaattgtatttggaggtacaacgacccctgtaccaaagtcagcaacaacacaaagattaaatgccactgtgacaagaaaagaagcaacttcccattatcttatgagaaaatcaactatagcagcagtggctgaggtttctccattttcaacaatgctggaagtgacagacgaatcagcacaaagggtgacagcttctgtcactgtttcctcttttcctgatatagaaaagctaagtaccccattggataataaaactgcaacaactgaggtgagagaaagttggcttttgacaaaattggtgaaaaccacacctaggagttcatacaatgaaatgacagaaatgtttaattttaaccacacctatgtagcacattggacttcagagacatctgagggaatttcagctggatctcccacttctgggagcacacatatattcggtgaacccctgggtgcttctaccacaaggatatcagaaaccagtttctccactacccctacagacaggacagctacgtccttgtctgatggtatcttacctccacagcctacagctgctcattcctcagcaacccctgtgcctgttactcatatgttctcattgccagttaatggcagttctgtggtggctgaggagactgaggttaccatgtctgagccttctacactggccagggctttttctacatctgtgctctcagatgtctcaaatctatcctcaactacaatgaccacagcattggtaccacctttggatcagactgcttccacaaccattgttattgtgcctacccatggagacttgattcgtaccacttcagaggccacggtaatctctgtcaggaagacatccatggcagttccttctctgacagaaacaccatttcattcactgagactctccactcctgtgacagctaaggctgagaccacccttttctctacctcagttgatacagtaaccccatctacacacactcttgtctgctcaaaacctccccctgacaacattcctcctgcgtcctccactcatgtgatctcaactacgtctacaccagaagcaactcaaccaatatctcaagtagaggagacttctacctatgctctcagcttcccatatactttcagtggtggtggagttgttgccagcttggctactggcaccacagagacctctgttgttgatgagaccacaccctcacacatctctgccaataagttgactacttcagtaaacagtcacatttcttcatctgccacatatcgtgtacacacaccagtgtccatccagttggtgactagcacctctgtcttatcttccgacaaagaccagatgaccatatccctgggaaaaacccctagaactatggaggtgacagaaatgtccccatcaaagaattcttttatttcatactcccggggtactccatctttggaaatgacagatacaggatttcctgagaccacaaaaatttccagtcaccaaacacattcgccttcagagattccacttgggactccctctgatggaaatttggcttcatctcccacttctggaagcacacagattacaccaaccttgacctcaagtaacacagtaggtgttcacattccagaaatgtctaccagtcttgggaaaacagctctcccctcacaagctctgacaatcaccacttttttgtgtcctgaaaaggaaagcacgagtgcccttccagcatatactcccaggactgtggaaatgatagtaaactccacctatgtgactcactctgtctcatatggccaggatacttcatttgtagataccacaacttccagctcaacaaggatatcaaatcctatggacatcaatacaactttttcacacttgcattcacttaggacacaacctgaggtgacttcagttgcctctttcatttctgaaagcacacagactttccctgagtccttgtctctttccacagctggactatataatgacggttttacagttctctccgacaggatcactacagccttttctgttccaaatgtacctacaatgcttcctagagaatcctctatggcaacgtccactcctatttaccagatgtcctcattgccagttaatgtaactgccttcacctccaaaaaagtttctgacactcccccaatagtgataactaaatcttctaaaacaatgcatccaggttgtttgaaaagtccctgtacagccacttctgggcctatgtctgagatgtcctcaataccagttaataactctgctttcacacctgcaacagtctcttctgacacttccacaagagttgggttattctctactttattgtcttcagttacccccaggactactatgaccatgcaaacatctacattggatgtcacacctgtgatatatgctggggctacttcaaaaaacaaaatggtttcctctgctttcactacagaaatgatagaggcaccttccaggatcacacctacgacctttctctctccaacagagccaactttgccctttgtaaaaaccgttcccaccaccattatggctgggatagtgactccatttgtaggcaccactgccttctctccactcagttctaagagcactggagctatttcctccattccaaagaccacattttcaccatttctatcagcaactcaacagtcatcacaagcagatgaggctacaactttgggcatattatctgggattactaacaggtccctatctactgtgaacagtggtacaggggtagctctcacagatacttattccagaatcactgttcctgaaaatatgctttcacctactcatgcagatagtctccatacttccttcaatattcaggtttccccatctctgactagctttaagagtgcttctggacccacaaaaaatgttaaaacaaccaccaattgcttttcttctaatactagaaagatgacttccttgttagaaaagacttccttaacaaactatgccacatctttgaatacccctgtttcataccctccatggaccccatccagtgcaactctaccctctttgacatcatttgtttattcacctcatagtactgaagctgagatctctactccaaagacctctcctcctcccacatcccaaatggttgaatttccagttctgggaacaagaatgacatctagtaatacccaacctctgcttatgacttcctggaacatacccacagctgaaggttctcagtttccaatttccaccactattaatgtacctacatccaatgagatggaaacagagactctacaccttgttcctgggcctttgtcaacattcacagcctctcagactggtctagtatctaaagatgtcatggcaatgtcatcaattcctatgtcaggaattcttcctaaccatgggctttctgagaacccttcattatcaacatctttaagagctatcacttccacattggctgacgttaagcacacatttgagaaaatgaccacatctgtaactcctgggaccacactcccatcaattctttctggtgccacttcaggatctgtaatttcaaagtcacccattctgacatggctcttatctagtctcccttctggctcccctccggcaactgtatctaatgcccctcatgttatgacttcctctacagtagaggtgtcaaaatcaacatttctgacatctgacatgatatcagcgcacccattcactaacttgacaacactaccctctgctactatgagcaccatactcacccgaaccattcctacacctacactgggtggtatcactactggcttcccaacttctctccctatgtctataaatgtcacagatgacattgtgtacatttccacacaccctgaggcatcctccagaaccacaataactgccaaccccaggactgtgtctcatccttcatccttcagcagaaagactatgtcaccttctacaactgaccacactctatctgttggtgccatgcctctgcctagctctacaataacatcttcatggaacagaattccaactgcatcatcaccctctactttaattattcctaagcccacactggactcccttctaaatataatgactactacatccactgttcctggagcctcatttccactcatatccactggggtgacatatccttttacagcaactgtgtcttcaccaatatcgtccttttttgaaacaacttggctggactccacaccttcctttctatctacggaagcatcgacttcgcctactgccaccaagtccacagtttccttctacaatgttgaaatgagcttctctgtctttgttgaagagccaaggatccctattaccagtgttataaatgaatttacggaaaattcgttgaattctatatttcagaacagtgaattttctcttgctactctggaaacccaaattaaaagcagggacatttcagaggaagagatggtcatggatcgagctattttggaacagagagaaggacaagaaatggctacaatttcctatgtaccatacagttgtgtttgtcaggtcatcataaaagccagctcttccttagcatcctctgaattgatgagaaaaatcaaaagtaaaatacatggcaacttcacacatggaaacttcacacaagatcaattgacgttattagtaaactgtgaacacgttgcagtgaaaaaactagagcctggaaattgcaaagctgatgaaacagcctctaaatacaaagggacctataagtggctattaaccaaccctacggagacagcccaaaccagatgcataaaaaatgaggatggaaatgccacaagattctgttcaatcagcatcaacacgggcaaatctcagtgggaaaagccaaagtttaaacaatgcaaattgcttcaagaacttcctgacaagattgtggatcttgctaatattaccataagtgatgagaatgctgaggatgttgcagagcatattttaaatttgataaatgaatccccagccctgggtaaagaagagacaaagattattgtttctaaaatatcagatatttcacaatgtgatgagataagtatgaacctaactcatgttatgttacaaataatcaacgttgttttggaaaagcaaaacaattccgcctctgatctgcatgaaataagcaatgaaattctgaggataattgagcgtactggtcacaagatggagttttctgggcagatagcaaatctgacggtggccgggctggctttggctgtgctgcggggggaccacacgtttgatggcatggctttcagcattcactcctatgaagaaggcacagaccctgagattttcctaggcaatgtccctgtgggagggattttggcttccatatatttgcctaaatcactgacggagagaattcctcttagcaacttacaaacgatcttgtttaatttctttggccaaacttcactctttaagaccaaaaatgtcactaaagcattaaccacctatgttgtgagtgccagcatttcagatgatatgttcattcaaaacttagctgacccagtggttatcactctgcagcatattggaggaaaccagaattatggtcaagttcactgtgccttttgggattttgagaataataatgggctgggtggatggaattcgtcaggctgtaaagtaaaggaaacaaatgtaaattacacaatctgtcagtgtgaccacctcacccattttggagtcttaatggatttatccaggtctacagtggattcagtgaatgaacagatattagcgcttataacatacaccggatgtggaatctcctccatttttctgggagttgcagtggtgacatacatagcttttcacaaacttcgaaaagattatcctgccaaaattctgatcaacctgtgcacagcactactgatgctaaacctggtatttttgatcaattcttggttgtcatcatttcagaaagtgggagtttgtatcacagctgcagtggcacttcattacttcctgcttgtttcttttacttggatgggcctggaggcagtccacatgtatttggctctagtcaaagtcttcaacatatacattccaaattatatccttaaattttgtctagttggttggggaatcccggctatcatggtggcaatcacagtcagtgtgaaaaaagatctgtatggaactctgagcccaacaactccgttttgttggattaaagatgattctatcttttacatctcagtggtggcttatttttgcctcatatttctcatgaatctctccatgttctgcactgttcttgttcaactgaattctgtgaaatcccaaatccagaagactcggcggaagatgatcctgcatgacctcaaaggcacaatgagcctgacattcttacttggcctcacctgggggtttgcattttttgcttggggacccatgaggaactttttcttgtatttgtttgccatttttaacactttgcaaggattcttcatttttgtgtttcactgtgtgatgaaggagagtgtgcgggagcagtggcagatacacctctgctgtgggtggttgcgattggataactcttctgatgggagcagccggtgtcagataaaggttggatataaacaggagggactaaagaaaatctttgagcacaaactgttgacgccatctctcaagtcaactgcaactagctccactttcaaatctttaggctctgcacaaggcacaccttcagaaataagctttccaaatgatgactttgacaaagatccttactgttcctctccttgatttgtgaagttgtgcctaattatgtaaaaagaatataatacctgtggaaataaaaatgaattccaagtgtatacttgctcgggtgatgggtgcaccaaaatctcacaaatcaccactaaataatgtactcatgtaaccaaatgctacctgttccaccaaaacctatggaaatttaaaaaaaacaaaaataaaaagcaaaacaaaaatcccaaaatgaattccattcacaaacagaatttttcaataaatcccagtagagatacttgcctcctcccaacccctgattggggaaaaggttgaatttgtgaaacaatctgctccaaccttctattttaattattattttgtaaggggaagaataacatttgataaatattaaagtcagaataattctcct

SEQ ID NO: 105535 - DNA, 8971 bp, Homo sapiens
  Payload ID: 691
  Gene Symbol: ADGRG4
  Gene Name: adhesion G protein-coupled receptor G4
  Uniprot ID: Q8IZF6
  ENST ID: ENST00000394141
  CDS Start-End: 151-8778
cagaaaagaaggtgactgaggcatggacagcagaaaatgagtctcctgtttagtacttctttcatttcacatcaaacataggaatttagagacaagatctggtcatttgagggtgggaagttaaaagagtccagttctcagacttagacaatgaaagaacacatcatatatcagaagctttatggattgattctcatgtcgagttttatctttctctcagttgttcctgaaaatatgacaattcaagaaaaaagtacaactgtttcacaacagatagatatgaccactccatcccaaattactggagtaaaaccacaaaatactgcacattcctctacactattgtctcaaagcatacctatatttgcaactgattacacaaccatatcatattccaatacaacatctccacctctggaaacaatgactgcacaaaaaatcttaaagacactggtagatgagacagctacatttgcagtggatgttttatcaacttcatcagccatctctctgcctacccagagtatatccatagacaatactaccaattccatgaaaaaaacgaaatctccatcttcagaaagcacaaagacaacaaaaatggttgaagccatggctactgaaatctttcaaccacctacaccttctaatttcctatccacatccagatttaccaagaattcagttgtatctacaacttcagcaattaaatctcagtcggctgttacgaagacaacatctttattttcaactattgagtcaacatctatgtctacaacaccttgtctcaaacaaaaatccacaaatactggggcactccctatctccacagctggccaggagttcattgaatctacagctgccggaactgtaccttggtttacagtggaaaagacttcacctgcatctactcatgttgggactgcatcatcattcccacctgagcctgtgctcatctccacagctgctccagtagattctgtatttcctagaaaccagacagcatttccattggcaacaactgatatgaaaatagcatttacagtccattcattgactctcccaactaggcttattgagaccacacctgccccaaggacagctgaaacagaattgacatctacaaattttcaggatgtctctttacccagagtggaagatgccatgtctacttccatgtcgaaagagacctcctctaagaccttttctttcttaacatccttttcatttactgggactgagagtgtacagacagttattgatgctgaagctacacgtacagccttaactcctgaaatcacacttgcatctacagtggctgaaactatgctttcctccacaatcacaggacgagtttacacccagaatacacctacagctgatggacacttgcttactttgatgtccactagatcagcttccacatccaaggcacctgagtcaggtcccacatccacaactgatgaagctgcccatctgttctccagcaatgagaccatttggacttctaggccagaccaggccctgctggcatctatgaacacaaccaccatactcacatttgtgcctaatgaaaattttacatcagcatttcatgagaatactacttatacagaatatttatccgcaactaccaatatcaccccactgaaagcatctccagagggcaaaggtaccactgccaatgatgctactacagccagatatacaacagctgtatccaaattgacatcaccatggtttgctaatttctccatagtttctggaaccacatccataaccaatatgcctgaatttaaacttaccactttactactaaaaacaatacctatgtctacaaaacctgcaaatgaacttcctttgacaccaagggagactgttgttccatcagtagatataatatctactcttgcttgcattcaaccaaatttttctactgaggaaagtgcttctgagaccacacaaacagaaataaatggtgcaattgtatttggaggtacaacgacccctgtaccaaagtcagcaacaacacaaagattaaatgccactgtgacaagaaaagaagcaacttcccattatcttatgagaaaatcaactatagcagcagtggctgaggtttctccattttcaacaatgctggaagtgacagacgaatcagcacaaagggtgacagcttctgtcactgtttcctcttttcctgatatagaaaagctaagtaccccattggataataaaactgcaacaactgaggtgagagaaagttggcttttgacaaaattggtgaaaaccacacctaggagttcatacaatgaaatgacagaaatgtttaattttaaccacacctatgtagcacattggacttcagagacatctgagggaatttcagctggatctcccacttctgggagcacacatatattcggtgaacccctgggtgcttctaccacaaggatatcagaaaccagtttctccactacccctacagacaggacagctacgtccttgtctgatggtatcttacctccacagcctacagctgctcattcctcagcaacccctgtgcctgttactcatatgttctcattgccagttaatggcagttctgtggtggctgaggagactgaggttaccatgtctgagccttctacactggccagggctttttctacatctgtgctctcagatgtctcaaatctatcctcaactacaatgaccacagcattggtaccacctttggatcagactgcttccacaaccattgttattgtgcctacccatggagacttgattcgtaccacttcagaggccacggtaatctctgtcaggaagacatccatggcagttccttctctgacagaaacaccatttcattcactgagactctccactcctgtgacagctaaggctgagaccacccttttctctacctcagttgatacagtaaccccatctacacacactcttgtctgctcaaaacctccccctgacaacattcctcctgcgtcctccactcatgtgatctcaactacgtctacaccagaagcaactcaaccaatatctcaagtagaggagacttctacctatgctctcagcttcccatatactttcagtggtggtggagttgttgccagcttggctactggcaccacagagacctctgttgttgatgagaccacaccctcacacatctctgccaataagttgactacttcagtaaacagtcacatttcttcatctgccacatatcgtgtacacacaccagtgtccatccagttggtgactagcacctctgtcttatcttccgacaaagaccagatgaccatatccctgggaaaaacccctagaactatggaggtgacagaaatgtccccatcaaagaattcttttatttcatactcccggggtactccatctttggaaatgacagatacaggatttcctgagaccacaaaaatttccagtcaccaaacacattcgccttcagagattccacttgggactccctctgatggaaatttggcttcatctcccacttctggaagcacacagattacaccaaccttgacctcaagtaacacagtaggtgttcacattccagaaatgtctaccagtcttgggaaaacagctctcccctcacaagctctgacaatcaccacttttttgtgtcctgaaaaggaaagcacgagtgcccttccagcatatactcccaggactgtggaaatgatagtaaactccacctatgtgactcactctgtctcatatggccaggatacttcatttgtagataccacaacttccagctcaacaaggatatcaaatcctatggacatcaatacaactttttcacacttgcattcacttaggacacaacctgaggtgacttcagttgcctctttcatttctgaaagcacacagactttccctgagtccttgtctctttccacagctggactatataatgacggttttacagttctctccgacaggatcactacagccttttctgttccaaatgtacctacaatgcttcctagagaatcctctatggcaacgtccactcctatttaccagatgtcctcattgccagttaatgtaactgccttcacctccaaaaaagtttctgacactcccccaatagtgataactaaatcttctaaaacaatgcatccaggttgtttgaaaagtccctgtacagccacttctgggcctatgtctgagatgtcctcaataccagttaataactctgctttcacacctgcaacagtctcttctgacacttccacaagagttgggttattctctactttattgtcttcagttacccccaggactactatgaccatgcaaacatctacattggatgtcacacctgtgatatatgctggggctacttcaaaaaacaaaatggtttcctctgctttcactacagaaatgatagaggcaccttccaggatcacacctacgacctttctctctccaacagagccaactttgccctttgtaaaaaccgttcccaccaccattatggctgggatagtgactccatttgtaggcaccactgccttctctccactcagttctaagagcactggagctatttcctccattccaaagaccacattttcaccatttctatcagcaactcaacagtcatcacaagcagatgaggctacaactttgggcatattatctgggattactaacaggtccctatctactgtgaacagtggtacaggggtagctctcacagatacttattccagaatcactgttcctgaaaatatgctttcacctactcatgcagatagtctccatacttccttcaatattcaggtttccccatctctgactagctttaagagtgcttctggacccacaaaaaatgttaaaacaaccaccaattgcttttcttctaatactagaaagatgacttccttgttagaaaagacttccttaacaaactatgccacatctttgaatacccctgtttcataccctccatggaccccatccagtgcaactctaccctctttgacatcatttgtttattcacctcatagtactgaagctgagatctctactccaaagacctctcctcctcccacatcccaaatggttgaatttccagttctgggaacaagaatgacatctagtaatacccaacctctgcttatgacttcctggaacatacccacagctgaaggttctcagtttccaatttccaccactattaatgtacctacatccaatgagatggaaacagagactctacaccttgttcctgggcctttgtcaacattcacagcctctcagactggtctagtatctaaagatgtcatggcaatgtcatcaattcctatgtcaggaattcttcctaaccatgggctttctgagaacccttcattatcaacatctttaagagctatcacttccacattggctgacgttaagcacacatttgagaaaatgaccacatctgtaactcctgggaccacactcccatcaattctttctggtgccacttcaggatctgtaatttcaaagtcacccattctgacatggctcttatctagtctcccttctggctcccctccggcaactgtatctaatgcccctcatgttatgacttcctctacagtagaggtgtcaaaatcaacatttctgacatctgacatgatatcagcgcacccattcactaacttgacaacactaccctctgctactatgagcaccatactcacccgaaccattcctacacctacactgggtggtatcactactggcttcccaacttctctccctatgtctataaatgtcacagatgacattgtgtacatttccacacaccctgaggcatcctccagaaccacaataactgccaaccccaggactgtgtctcatccttcatccttcagcagaaagactatgtcaccttctacaactgaccacactctatctgttggtgccatgcctctgcctagctctacaataacatcttcatggaacagaattccaactgcatcatcaccctctactttaattattcctaagcccacactggactcccttctaaatataatgactactacatccactgttcctggagcctcatttccactcatatccactggggtgacatatccttttacagcaactgtgtcttcaccaatatcgtccttttttgaaacaacttggctggactccacaccttcctttctatctacggaagcatcgacttcgcctactgccaccaagtccacagtttccttctacaatgttgaaatgagcttctctgtctttgttgaagagccaaggatccctattaccagtgttataaatgaatttacggaaaattcgttgaattctatatttcagaacagtgaattttctcttgctactctggaaacccaaattaaaagcagggacatttcagaggaagagatggtcatggatcgagctattttggaacagagagaaggacaagaaatggctacaatttcctatgtaccatacagttgtgtttgtcaggtcatcataaaagccagctcttccttagcatcctctgaattgatgagaaaaatcaaaagtaaaatacatggcaacttcacacatggaaacttcacacaagatcaattgacgttattagtaaactgtgaacacgttgcagtgaaaaaactagagcctggaaattgcaaagctgatgaaacagcctctaaatacaaagggacctataagtggctattaaccaaccctacggagacagcccaaaccagatgcataaaaaatgaggatggaaatgccacaagattctgttcaatcagcatcaacacgggcaaatctcagtgggaaaagccaaagtttaaacaatgcaaattgcttcaagaacttcctgacaagattgtggatcttgctaatattaccataagtgatgagaatgctgaggatgttgcagagcatattttaaatttgataaatgaatccccagccctgggtaaagaagagacaaagattattgtttctaaaatatcagatatttcacaatgtgatgagataagtatgaacctaactcatgttatgttacaaataatcaacgttgttttggaaaagcaaaacaattccgcctctgatctgcatgaaataagcaatgaaattctgaggataattgagcgtactggtcacaagatggagttttctgggcagatagcaaatctgacggtggccgggctggctttggctgtgctgcggggggaccacacgtttgatggcatggctttcagcattcactcctatgaagaaggcacagaccctgagattttcctaggcaatgtccctgtgggagggattttggcttccatatatttgcctaaatcactgacggagagaattcctcttagcaacttacaaacgatcttgtttaatttctttggccaaacttcactctttaagaccaaaaatgtcactaaagcattaaccacctatgttgtgagtgccagcatttcagatgatatgttcattcaaaacttagctgacccagtggttatcactctgcagcatattggaggaaaccagaattatggtcaagttcactgtgccttttgggattttgagaataataatgggctgggtggatggaattcgtcaggctgtaaagtaaaggaaacaaatgtaaattacacaatctgtcagtgtgaccacctcacccattttggagtcttaatggatttatccaggtctacagtggattcagtgaatgaacagatattagcgcttataacatacaccggatgtggaatctcctccatttttctgggagttgcagtggtgacatacatagcttttcacaaacttcgaaaagattatcctgccaaaattctgatcaacctgtgcacagcactactgatgctaaacctggtatttttgatcaattcttggttgtcatcatttcagaaagtgggagtttgtatcacagctgcagtggcacttcattacttcctgcttgtttcttttacttggatgggcctggaggcagtccacatgtatttggctctagtcaaagtcttcaacatatacattccaaattatatccttaaattttgtctagttggttggggaatcccggctatcatggtggcaatcacagtcagtgtgaaaaaagatctgtatggaactctgagcccaacaactccgttttgttggattaaagatgattctatcttttacatctcagtggtggcttatttttgcctcatatttctcatgaatctctccatgttctgcactgttcttgttcaactgaattctgtgaaatcccaaatccagaagactcggcggaagatgatcctgcatgacctcaaaggcacaatgagcctgacattcttacttggcctcacctgggggtttgcattttttgcttggggacccatgaggaactttttcttgtatttgtttgccatttttaacactttgcaaggattcttcatttttgtgtttcactgtgtgatgaaggagagtgtgcgggagcagtggcagatacacctctgctgtgggtggttgcgattggataactcttctgatgggagcagccggtgtcagataaaggttggatataaacaggagggactaaagaaaatctttgagcacaaactgttgacgccatctctcaagtcaactgcaactagctccactttcaaatctttaggctctgcacaaggcacaccttcagaaataagctttccaaatgatgactttgacaaagatccttactgttcctctccttgatttgtgaagttgtgcctaattatgtaaaaagaatataatacctgtggaaataaaaatgaattccaagtgtatacttgctcgggtgatgggtgcaccaaaatctcacaaatcaccactaaataatgtactcatgtaaccaaatgctacctgttccaccaaaacctatggaaatttaaaaaaaacaaaaataaaa

SEQ ID NO: 105536 - DNA, 9931 bp, Homo sapiens
  Payload ID: 691
  Gene Symbol: ADGRG4
  Gene Name: adhesion G protein-coupled receptor G4
  Uniprot ID: Q8IZF6
  ENST ID: ENST00000394143
  CDS Start-End: 292-9534
cagtttcttaatccagtctatcactgatggacatttggatatggagagcagatggtcaacattctcctcataaccttccagggaatggaagatacccgttgaagccctcccaggctgtgtgaccccacgttggggacaggtcacaaaacctaagccttgtgcctactggaaagaagaagcagtggagtccttgacagaagcagtggtgctggaacctggtgctaggcgctgggccaagcactttacatactgtgtgttatgtaatcttcacagcaatatgagacttagacaatgaaagaacacatcatatatcagaagctttatggattgattctcatgtcgagttttatctttctctcagatacactttcactaaaaggaaaaaagctggatttttttggaagaggtgacacatatgtaagcctgatagataccattcctgaactcagccgattcacagcatgcattgatctggtattcatggatgacaactcaaggtattggatggccttctcttatattactaataacgccctcctgggcagagaagacatagaccttggacttgcaggagaccatcagcagctaatactatacagattgggaaagaccttttctatccgtcaccacctggcttcatttcaatggcatacaatatgcttgatatgggatggtgtgaagggcaaattagaactcttcctgaataaagaaaggatactggaagtaacggatcaaccacacaacctgacacctcatgggactctgttcctagggcactttctcaagaatgagagcagcgaggttaaaagcatgatgcgtagctttcctggcagcttgtactactttcaactctgggaccacatcctggaaaacgaagagtttatgaagtgtttagatggaaatatagttagttgggaagaagacgtctggcttgtcaacaagatcatcccaactgttgacaggacactgcgctgctttgttcctgaaaatatgacaattcaagaaaaaagtacaactgtttcacaacagatagatatgaccactccatcccaaattactggagtaaaaccacaaaatactgcacattcctctacactattgtctcaaagcatacctatatttgcaactgattacacaaccatatcatattccaatacaacatctccacctctggaaacaatgactgcacaaaaaatcttaaagacactggtagatgagacagctacatttgcagtggatgttttatcaacttcatcagccatctctctgcctacccagagtatatccatagacaatactaccaattccatgaaaaaaacgaaatctccatcttcagaaagcacaaagacaacaaaaatggttgaagccatggctactgaaatctttcaaccacctacaccttctaatttcctatccacatccagatttaccaagaattcagttgtatctacaacttcagcaattaaatctcagtcggctgttacgaagacaacatctttattttcaactattgagtcaacatctatgtctacaacaccttgtctcaaacaaaaatccacaaatactggggcactccctatctccacagctggccaggagttcattgaatctacagctgccggaactgtaccttggtttacagtggaaaagacttcacctgcatctactcatgttgggactgcatcatcattcccacctgagcctgtgctcatctccacagctgctccagtagattctgtatttcctagaaaccagacagcatttccattggcaacaactgatatgaaaatagcatttacagtccattcattgactctcccaactaggcttattgagaccacacctgccccaaggacagctgaaacagaattgacatctacaaattttcaggatgtctctttacccagagtggaagatgccatgtctacttccatgtcgaaagagacctcctctaagaccttttctttcttaacatccttttcatttactgggactgagagtgtacagacagttattgatgctgaagctacacgtacagccttaactcctgaaatcacacttgcatctacagtggctgaaactatgctttcctccacaatcacaggacgagtttacacccagaatacacctacagctgatggacacttgcttactttgatgtccactagatcagcttccacatccaaggcacctgagtcaggtcccacatccacaactgatgaagctgcccatctgttctccagcaatgagaccatttggacttctaggccagaccaggccctgctggcatctatgaacacaaccaccatactcacatttgtgcctaatgaaaattttacatcagcatttcatgagaatactacttatacagaatatttatccgcaactaccaatatcaccccactgaaagcatctccagagggcaaaggtaccactgccaatgatgctactacagccagatatacaacagctgtatccaaattgacatcaccatggtttgctaatttctccatagtttctggaaccacatccataaccaatatgcctgaatttaaacttaccactttactactaaaaacaatacctatgtctacaaaacctgcaaatgaacttcctttgacaccaagggagactgttgttccatcagtagatataatatctactcttgcttgcattcaaccaaatttttctactgaggaaagtgcttctgagaccacacaaacagaaataaatggtgcaattgtatttggaggtacaacgacccctgtaccaaagtcagcaacaacacaaagattaaatgccactgtgacaagaaaagaagcaacttcccattatcttatgagaaaatcaactatagcagcagtggctgaggtttctccattttcaacaatgctggaagtgacagacgaatcagcacaaagggtgacagcttctgtcactgtttcctcttttcctgatatagaaaagctaagtaccccattggataataaaactgcaacaactgaggtgagagaaagttggcttttgacaaaattggtgaaaaccacacctaggagttcatacaatgaaatgacagaaatgtttaattttaaccacacctatgtagcacattggacttcagagacatctgagggaatttcagctggatctcccacttctgggagcacacatatattcggtgaacccctgggtgcttctaccacaaggatatcagaaaccagtttctccactacccctacagacaggacagctacgtccttgtctgatggtatcttacctccacagcctacagctgctcattcctcagcaacccctgtgcctgttactcatatgttctcattgccagttaatggcagttctgtggtggctgaggagactgaggttaccatgtctgagccttctacactggccagggctttttctacatctgtgctctcagatgtctcaaatctatcctcaactacaatgaccacagcattggtaccacctttggatcagactgcttccacaaccattgttattgtgcctacccatggagacttgattcgtaccacttcagaggccacggtaatctctgtcaggaagacatccatggcagttccttctctgacagaaacaccatttcattcactgagactctccactcctgtgacagctaaggctgagaccacccttttctctacctcagttgatacagtaaccccatctacacacactcttgtctgctcaaaacctccccctgacaacattcctcctgcgtcctccactcatgtgatctcaactacgtctacaccagaagcaactcaaccaatatctcaagtagaggagacttctacctatgctctcagcttcccatatactttcagtggtggtggagttgttgccagcttggctactggcaccacagagacctctgttgttgatgagaccacaccctcacacatctctgccaataagttgactacttcagtaaacagtcacatttcttcatctgccacatatcgtgtacacacaccagtgtccatccagttggtgactagcacctctgtcttatcttccgacaaagaccagatgaccatatccctgggaaaaacccctagaactatggaggtgacagaaatgtccccatcaaagaattcttttatttcatactcccggggtactccatctttggaaatgacagatacaggatttcctgagaccacaaaaatttccagtcaccaaacacattcgccttcagagattccacttgggactccctctgatggaaatttggcttcatctcccacttctggaagcacacagattacaccaaccttgacctcaagtaacacagtaggtgttcacattccagaaatgtctaccagtcttgggaaaacagctctcccctcacaagctctgacaatcaccacttttttgtgtcctgaaaaggaaagcacgagtgcccttccagcatatactcccaggactgtggaaatgatagtaaactccacctatgtgactcactctgtctcatatggccaggatacttcatttgtagataccacaacttccagctcaacaaggatatcaaatcctatggacatcaatacaactttttcacacttgcattcacttaggacacaacctgaggtgacttcagttgcctctttcatttctgaaagcacacagactttccctgagtccttgtctctttccacagctggactatataatgacggttttacagttctctccgacaggatcactacagccttttctgttccaaatgtacctacaatgcttcctagagaatcctctatggcaacgtccactcctatttaccagatgtcctcattgccagttaatgtaactgccttcacctccaaaaaagtttctgacactcccccaatagtgataactaaatcttctaaaacaatgcatccaggttgtttgaaaagtccctgtacagccacttctgggcctatgtctgagatgtcctcaataccagttaataactctgctttcacacctgcaacagtctcttctgacacttccacaagagttgggttattctctactttattgtcttcagttacccccaggactactatgaccatgcaaacatctacattggatgtcacacctgtgatatatgctggggctacttcaaaaaacaaaatggtttcctctgctttcactacagaaatgatagaggcaccttccaggatcacacctacgacctttctctctccaacagagccaactttgccctttgtaaaaaccgttcccaccaccattatggctgggatagtgactccatttgtaggcaccactgccttctctccactcagttctaagagcactggagctatttcctccattccaaagaccacattttcaccatttctatcagcaactcaacagtcatcacaagcagatgaggctacaactttgggcatattatctgggattactaacaggtccctatctactgtgaacagtggtacaggggtagctctcacagatacttattccagaatcactgttcctgaaaatatgctttcacctactcatgcagatagtctccatacttccttcaatattcaggtttccccatctctgactagctttaagagtgcttctggacccacaaaaaatgttaaaacaaccaccaattgcttttcttctaatactagaaagatgacttccttgttagaaaagacttccttaacaaactatgccacatctttgaatacccctgtttcataccctccatggaccccatccagtgcaactctaccctctttgacatcatttgtttattcacctcatagtactgaagctgagatctctactccaaagacctctcctcctcccacatcccaaatggttgaatttccagttctgggaacaagaatgacatctagtaatacccaacctctgcttatgacttcctggaacatacccacagctgaaggttctcagtttccaatttccaccactattaatgtacctacatccaatgagatggaaacagagactctacaccttgttcctgggcctttgtcaacattcacagcctctcagactggtctagtatctaaagatgtcatggcaatgtcatcaattcctatgtcaggaattcttcctaaccatgggctttctgagaacccttcattatcaacatctttaagagctatcacttccacattggctgacgttaagcacacatttgagaaaatgaccacatctgtaactcctgggaccacactcccatcaattctttctggtgccacttcaggatctgtaatttcaaagtcacccattctgacatggctcttatctagtctcccttctggctcccctccggcaactgtatctaatgcccctcatgttatgacttcctctacagtagaggtgtcaaaatcaacatttctgacatctgacatgatatcagcgcacccattcactaacttgacaacactaccctctgctactatgagcaccatactcacccgaaccattcctacacctacactgggtggtatcactactggcttcccaacttctctccctatgtctataaatgtcacagatgacattgtgtacatttccacacaccctgaggcatcctccagaaccacaataactgccaaccccaggactgtgtctcatccttcatccttcagcagaaagactatgtcaccttctacaactgaccacactctatctgttggtgccatgcctctgcctagctctacaataacatcttcatggaacagaattccaactgcatcatcaccctctactttaattattcctaagcccacactggactcccttctaaatataatgactactacatccactgttcctggagcctcatttccactcatatccactggggtgacatatccttttacagcaactgtgtcttcaccaatatcgtccttttttgaaacaacttggctggactccacaccttcctttctatctacggaagcatcgacttcgcctactgccaccaagtccacagtttccttctacaatgttgaaatgagcttctctgtctttgttgaagagccaaggatccctattaccagtgttataaatgaatttacggaaaattcgttgaattctatatttcagaacagtgaattttctcttgctactctggaaacccaaattaaaagcagggacatttcagaggaagagatggtcatggatcgagctattttggaacagagagaaggacaagaaatggctacaatttcctatgtaccatacagttgtgtttgtcaggtcatcataaaagccagctcttccttagcatcctctgaattgatgagaaaaatcaaaagtaaaatacatggcaacttcacacatggaaacttcacacaagatcaattgacgttattagtaaactgtgaacacgttgcagtgaaaaaactagagcctggaaattgcaaagctgatgaaacagcctctaaatacaaagggacctataagtggctattaaccaaccctacggagacagcccaaaccagatgcataaaaaatgaggatggaaatgccacaagattctgttcaatcagcatcaacacgggcaaatctcagtgggaaaagccaaagtttaaacaatgcaaattgcttcaagaacttcctgacaagattgtggatcttgctaatattaccataagtgatgagaatgctgaggatgttgcagagcatattttaaatttgataaatgaatccccagccctgggtaaagaagagacaaagattattgtttctaaaatatcagatatttcacaatgtgatgagataagtatgaacctaactcatgttatgttacaaataatcaacgttgttttggaaaagcaaaacaattccgcctctgatctgcatgaaataagcaatgaaattctgaggataattgagcgtactggtcacaagatggagttttctgggcagatagcaaatctgacggtggccgggctggctttggctgtgctgcggggggaccacacgtttgatggcatggctttcagcattcactcctatgaagaaggcacagaccctgagattttcctaggcaatgtccctgtgggagggattttggcttccatatatttgcctaaatcactgacggagagaattcctcttagcaacttacaaacgatcttgtttaatttctttggccaaacttcactctttaagaccaaaaatgtcactaaagcattaaccacctatgttgtgagtgccagcatttcagatgatatgttcattcaaaacttagctgacccagtggttatcactctgcagcatattggaggaaaccagaattatggtcaagttcactgtgccttttgggattttgagaataataatgggctgggtggatggaattcgtcaggctgtaaagtaaaggaaacaaatgtaaattacacaatctgtcagtgtgaccacctcacccattttggagtcttaatggatttatccaggtctacagtggattcagtgaatgaacagatattagcgcttataacatacaccggatgtggaatctcctccatttttctgggagttgcagtggtgacatacatagcttttcacaaacttcgaaaagattatcctgccaaaattctgatcaacctgtgcacagcactactgatgctaaacctggtatttttgatcaattcttggttgtcatcatttcagaaagtgggagtttgtatcacagctgcagtggcacttcattacttcctgcttgtttcttttacttggatgggcctggaggcagtccacatgtatttggctctagtcaaagtcttcaacatatacattccaaattatatccttaaattttgtctagttggttggggaatcccggctatcatggtggcaatcacagtcagtgtgaaaaaagatctgtatggaactctgagcccaacaactccgttttgttggattaaagatgattctatcttttacatctcagtggtggcttatttttgcctcatatttctcatgaatctctccatgttctgcactgttcttgttcaactgaattctgtgaaatcccaaatccagaagactcggcggaagatgatcctgcatgacctcaaaggcacaatgagcctgacattcttacttggcctcacctgggggtttgcattttttgcttggggacccatgaggaactttttcttgtatttgtttgccatttttaacactttgcaaggattcttcatttttgtgtttcactgtgtgatgaaggagagtgtgcgggagcagtggcagatacacctctgctgtgggtggttgcgattggataactcttctgatgggagcagccggtgtcagataaaggttggatataaacaggagggactaaagaaaatctttgagcacaaactgttgacgccatctctcaagtcaactgcaactagctccactttcaaatctttaggctctgcacaaggcacaccttcagaaataagctttccaaatgatgactttgacaaagatccttactgttcctctccttgatttgtgaagttgtgcctaattatgtaaaaagaatataatacctgtggaaataaaaatgaattccaagtgtatacttgctcgggtgatgggtgcaccaaaatctcacaaatcaccactaaataatgtactcatgtaaccaaatgctacctgttccaccaaaacctatggaaatttaaaaaaaacaaaaataaaaagcaaaacaaaaatcccaaaatgaattccattcacaaacagaatttttcaataaatcccagtagagatacttgcctcctcccaacccctgattggggaaaaggttgaatttgtgaaacaatctgctccaaccttctattttaattattattttgtaaggggaagaataacatttgataaatattaaagtcagaataattctcct

SEQ ID NO: 105537 - DNA, 3557 bp, Homo sapiens
  Payload ID: 692
  Gene Symbol: ADGRG5
  Gene Name: adhesion G protein-coupled receptor G5
  Uniprot ID: Q8IZF4
  ENST ID: ENST00000349457
  CDS Start-End: 320-1906
agtagctgcagactctacggggtgataccctcaaagggtgaccagggcatgaccgacagctcgaaggaagcaaagaggctgctgctggtgaaagaagaagtgaagtgagagtgtggtgcctgggcctggggtgaagggagcagagagaagtgcagtgggggtgcaggtgtggggcaaagggagaggccacccacagacgcctcccgacttccccttcttcctgcagaagctacaagacagcagccgagacagcagctgagacggcagcggcagcttctcagggccggagccagttcttggaggagactctgcacagggcatggatcactgtggtgcccttttcctgtgcctgtgccttctgactttgcagaatgcaacaacagagacatgggaagaactcctgagctacatggagaatatgcaggtgtccaggggccggagctcagttttttcctctcgtcaactccaccagctggagcagatgctactgaacaccagcttcccaggctacaacctgaccttgcagacacccaccatccagtctctggccttcaagctgagctgtgacttctctggcctctcgctgaccagtgccactctgaagcgggtgccccaggcaggaggtcagcatgcccggggtcagcacgccatgcagttccccgccgagctgacccgggacgcctgcaagacccgccccagggagctgcggctcatctgtatctacttctccaacacccactttttcaaggatgaaaacaactcatctctgctgaataactacgtcctgggggcccagctgagtcatgggcacgtgaacaacctcagggatcctgtgaacatcagcttctggcacaaccaaagcctggaaggctacaccctgacctgtgtcttctggaaggagggagccaggaaacagccctgggggggctggagccctgagggctgtcgtacagagcagccctcccactctcaggtgctctgccgctgcaaccacctcacctactttgctgttctcatgcaactctccccagccctggtccctgcagagttgctggcacctcttacgtacatctccctcgtgggctgcagcatctccatcgtggcctcgctgatcacagtcctgctgcacttccatttcaggaagcagagtgactccttaacacgcatccacatgaacctgcatgcctccgtgctgctcctgaacatcgccttcctgctgagccccgcattcgcaatgtctcctgtgcccgggtcagcatgcacggctctggccgctgccctgcactacgcgctgctcagctgcctcacctggatggccatcgagggcttcaacctctacctcctcctcgggcgtgtctacaacatctacatccgcagatatgtgttcaagcttggtgtgctaggctggggggccccagccctcctggtgctgctttccctctctgtcaagagctcggtatacggaccctgcacaatccccgtcttcgacagctgggagaatggcacaggcttccagaacatgtccatatgctgggtgcggagccccgtggtgcacagtgtcctggtcatgggctacggcggcctcacgtccctcttcaacctggtggtgctggcctgggcgctgtggaccctgcgcaggctgcgggagcgggcggatgcaccaagtgtcagggcctgccatgacactgtcactgtgctgggcctcaccgtgctgctgggaaccacctgggccttggccttcttttcttttggcgtcttcctgctgccccagctgttcctcttcaccatcttaaactcgctctacggtttcttccttttcctgtggttctgctcccagcggtgccgctcagaagcagaggccaaggcacagatagaggccttcagctcctcccaaacaacacagtagtccgggcctcctggcctggaatcctcagcctctctggccgccagtagcctgaggctacggctcctgctagagagggtggcaggcctgctgctggaccccagaggccactgtgaccgccaaggggccttttccacttccacggcctctccaggcactgaggggaaggcattgctctacctctccctgacattttgctccggggcagatccaaccttacctggggcagcaaactttgtcctggtacctgggcccagctcgccagggatgtgggcagagcaccagcctgggcatcaggaagccaagtttcaaggactgtctttgagtctgtctgtatgaccttgggcctgccacttctcacagaccctaggtatccacagctgtgacatgggggcaagcggctttgtttcagcctaacccaggagcttagtaaaaattgcataagaccagggggaagagtgtcagcgtggggtgggaattcccgcggcctccacctgcttgctaggggcaggatctcattcaggctgccctggaagcacctgcttggccctgccaccttcctccaggggagggccagatggcatcctggcttggggcgggtgggacctacccaggctctgagactttactggcctatgcctgaggcctcttttcctttaactccctaaattatgatgactccaagtccaagcccacccttcccaaagattgggaggttccgccgttcccagaggctcctcctgcggtgctcccaagacttccatagaccatctggaccagtagcccatcccgcagttttcttgggggcagaggaaaacgcttctttctcctccagctgaatcagctggatcccagtgtcctggctgtttggtgattgggcaagattgaatttgcccaggtaggcgtgagagtgtgggttttaaattcgaagctcaggccatagtttcagagaatcacccttaccccagaccttcatgagacagtgctcatgaagccagtgcgtttcccagaacgaacactaggcggcaccgttggtccacactcagaggcccttggcgccaagactgcatctagaatcgctcaaacacctgtttgcagaccccatgcaccagctggaggggccgtaactgcaggactgcgcctactgagtgacccatttcctccaggaggaaaggcaagacacgcttacacggccatttgtctcttttcccaatgcggcggtgcactttcgctcttgggggctgcaccccagacatagctggcaccagagcagggtgctcaggtggtgggtgctcagggccctgccccaggccactgggccgttttgatgacctcgaaggtcacaggcagaaaataggagcaggatttcccctggggaaaagttctcctgggacatcttctgctcttctgtacatttctagatgcaaataactccttcaccaggcagtgagtggcgtaggctctggagccaggctgcctgggctccaatgccagctctgccacttgctagctgtgagactgtggacaaaccactcagcctctgtgtgcctcagttttcctatttgtaaaatagaggccatagtggtacctattttgaagactaagtaaaagaattcaaataaagagacttggcacagagtaagtgctcagtaaa

SEQ ID NO: 105538 - DNA, 3767 bp, Homo sapiens
  Payload ID: 692
  Gene Symbol: ADGRG5
  Gene Name: adhesion G protein-coupled receptor G5
  Uniprot ID: Q8IZF4
  ENST ID: ENST00000340339
  CDS Start-End: 524-2110
ggcagcttctcaggtcagcctcctccgggcctctccccactctcctctgcccagttctctgtccttatccacaggcccctcagtgggcactggccatacccatgtccaggtgggcacagacctggtgatatcctggtgagcaagctggggacccaccctccttccctttctggttggcagctccacatctggggcaatgtagagatctgtgcttttggaaggaggggcaatttaaattaagaagtggttaggcatgggtctcgaatcttagcttccccgcgaggtctgggacaagtgaagagaggtttcttttctggacctcagtttctcatctgtaaaatggggtgagtctgggaacctgcaccttggatggctgtcaggggctcagtagaggacctggcacacagtttgtgcttggcaatctggagcaggtgcagctcctttcagagtgacctggattggatcctggggacagcatgtctcagggccggagccagttcttggaggagactctgcacagggcatggatcactgtggtgcccttttcctgtgcctgtgccttctgactttgcagaatgcaacaacagagacatgggaagaactcctgagctacatggagaatatgcaggtgtccaggggccggagctcagttttttcctctcgtcaactccaccagctggagcagatgctactgaacaccagcttcccaggctacaacctgaccttgcagacacccaccatccagtctctggccttcaagctgagctgtgacttctctggcctctcgctgaccagtgccactctgaagcgggtgccccaggcaggaggtcagcatgcccggggtcagcacgccatgcagttccccgccgagctgacccgggacgcctgcaagacccgccccagggagctgcggctcatctgtatctacttctccaacacccactttttcaaggatgaaaacaactcatctctgctgaataactacgtcctgggggcccagctgagtcatgggcacgtgaacaacctcagggatcctgtgaacatcagcttctggcacaaccaaagcctggaaggctacaccctgacctgtgtcttctggaaggagggagccaggaaacagccctgggggggctggagccctgagggctgtcgtacagagcagccctcccactctcaggtgctctgccgctgcaaccacctcacctactttgctgttctcatgcaactctccccagccctggtccctgcagagttgctggcacctcttacgtacatctccctcgtgggctgcagcatctccatcgtggcctcgctgatcacagtcctgctgcacttccatttcaggaagcagagtgactccttaacacgcatccacatgaacctgcatgcctccgtgctgctcctgaacatcgccttcctgctgagccccgcattcgcaatgtctcctgtgcccgggtcagcatgcacggctctggccgctgccctgcactacgcgctgctcagctgcctcacctggatggccatcgagggcttcaacctctacctcctcctcgggcgtgtctacaacatctacatccgcagatatgtgttcaagcttggtgtgctaggctggggggccccagccctcctggtgctgctttccctctctgtcaagagctcggtatacggaccctgcacaatccccgtcttcgacagctgggagaatggcacaggcttccagaacatgtccatatgctgggtgcggagccccgtggtgcacagtgtcctggtcatgggctacggcggcctcacgtccctcttcaacctggtggtgctggcctgggcgctgtggaccctgcgcaggctgcgggagcgggcggatgcaccaagtgtcagggcctgccatgacactgtcactgtgctgggcctcaccgtgctgctgggaaccacctgggccttggccttcttttcttttggcgtcttcctgctgccccagctgttcctcttcaccatcttaaactcgctctacggtttcttccttttcctgtggttctgctcccagcggtgccgctcagaagcagaggccaaggcacagatagaggccttcagctcctcccaaacaacacagtagtccgggcctcctggcctggaatcctcagcctctctggccgccagtagcctgaggctacggctcctgctagagagggtggcaggcctgctgctggaccccagaggccactgtgaccgccaaggggccttttccacttccacggcctctccaggcactgaggggaaggcattgctctacctctccctgacattttgctccggggcagatccaaccttacctggggcagcaaactttgtcctggtacctgggcccagctcgccagggatgtgggcagagcaccagcctgggcatcaggaagccaagtttcaaggactgtctttgagtctgtctgtatgaccttgggcctgccacttctcacagaccctaggtatccacagctgtgacatgggggcaagcggctttgtttcagcctaacccaggagcttagtaaaaattgcataagaccagggggaagagtgtcagcgtggggtgggaattcccgcggcctccacctgcttgctaggggcaggatctcattcaggctgccctggaagcacctgcttggccctgccaccttcctccaggggagggccagatggcatcctggcttggggcgggtgggacctacccaggctctgagactttactggcctatgcctgaggcctcttttcctttaactccctaaattatgatgactccaagtccaagcccacccttcccaaagattgggaggttccgccgttcccagaggctcctcctgcggtgctcccaagacttccatagaccatctggaccagtagcccatcccgcagttttcttgggggcagaggaaaacgcttctttctcctccagctgaatcagctggatcccagtgtcctggctgtttggtgattgggcaagattgaatttgcccaggtaggcgtgagagtgtgggttttaaattcgaagctcaggccatagtttcagagaatcacccttaccccagaccttcatgagacagtgctcatgaagccagtgcgtttcccagaacgaacactaggcggcaccgttggtccacactcagaggcccttggcgccaagactgcatctagaatcgctcaaacacctgtttgcagaccccatgcaccagctggaggggccgtaactgcaggactgcgcctactgagtgacccatttcctccaggaggaaaggcaagacacgcttacacggccatttgtctcttttcccaatgcggcggtgcactttcgctcttgggggctgcaccccagacatagctggcaccagagcagggtgctcaggtggtgggtgctcagggccctgccccaggccactgggccgttttgatgacctcgaaggtcacaggcagaaaataggagcaggatttcccctggggaaaagttctcctgggacatcttctgctcttctgtacatttctagatgcaaataactccttcaccaggcagtgagtggcgtaggctctggagccaggctgcctgggctccaatgccagctctgccacttgctagctgtgagactgtggacaaaccactcagcctctgtgtgcctcagttttcctatttgtaaaatagaggccatagtggtacctattttgaagactaagtaaaagaattcaaataaagagacttggcacagagtaagtgctcagtaaatggtta

SEQ ID NO: 105539 - DNA, 762 bp, Homo sapiens
  Payload ID: 692
  Gene Symbol: ADGRG5
  Gene Name: adhesion G protein-coupled receptor G5
  ENST ID: ENST00000615867
  CDS Start-End: 54-719
gcggcagcttctcagggccggagccagttcttggaggagactctgcacagggcatggatcactgtggtgcccttttcctgtgcctgtgccttctgactttgcagaatgcaacaacagagacatgggaagaactcctgagctacatggagaatatgcaggtgtccaggggccggagctcagttttttcctctcgtcaactccaccagctggagcagatgctactgaacaccagcttcccaggctacaacctgaccttgcagacacccaccatccagtctctggccttcaagctgagctgtgacttctctggcctctcgctgaccagtgccactctgaagcgggtgccccaggcaggaggtcagcatgcccggggtcagcacgccatgcagttccccgccgagctgacccgggacgcctgcaagacccgccccagggagctgcggctcatctgtatctacttctccaacacccactttttcaaggatgaaaacaactcatctctgctgaataactacgtcctgggggcccagctgagtcatgggcacgtgaacaacctcagggatcctgtgaacatcagcttctggcacaaccaaagcctggtactgctgggggcgcccccgtttccactgcacccctgcccctctgtgactctcctgttgaacactggtttgactagacccaaacctgtggaaccatcttggaaatccatcacactttgaaaattcctgctcaagaaataagagagagagaagtttttactca

SEQ ID NO: 105540 - DNA, 7026 bp, Homo sapiens
  Payload ID: 693
  Gene Symbol: ADGRG6
  Gene Name: adhesion G protein-coupled receptor G6
  Uniprot ID: Q86SQ4
  ENST ID: ENST00000230173
  CDS Start-End: 477-4142
ccagctccagtcacgccggaagcgcgggcggagcgcacgggtccggggagagtcgcctgcgcccgcgagggggacccaagtacctagggtggtggccgagtcccgcctcccgccagcgggggcgaggacctgcgacgcgcacccctgcctggcccggtctcctcagcaccagccccacgcacaccctacttcctcagcttctcgccctcaccctgccaacttccctgcgaggagggacctgccgccagcctgcttcctcgtccgcaggccctgcgctgaacgctgccgcgcccagggttcaccttgcgccgtcgggaaagcccatgaactctccagaaacggcgtaaaggagggtcccgccgcggcgcagggctggggcgcctgggttccccctgggtggagcagcggcagcagagcgggaaagtggtggaggatgatcttgcggccaaaggggacctcggcgcagtaatgtcaacatgatgtttcgctcagatcgaatgtggagctgccattggaaatggaagcccagtcctctcctgttcttatttgctttatatatcatgtgtgttcctcactcagtgtggggatgtgccaactgccgagtggttttgtccaacccttctgggacctttacttctccatgctaccctaacgactacccaaacagccaggcttgcatgtggacgctccgagcccccaccggttatatcattcagataacatttaacgactttgacattgaagaagctcccaattgcatttatgactcattatcccttgataatggagagagccagactaaattttgtggagcaactgccaaaggcctatcatttaactcaagtgcgaatgagatgcatgtgtccttttcaagtgactttagcatccagaagaaaggtttcaatgccagctacatcagagttgccgtgtccttaaggaatcaaaaggtcattttaccccagacatcagatgcttaccaggtatctgttgcaaaaagcatctctattccagagctcagtgctttcacactctgctttgaagcaaccaaagttggccatgaagacagtgattggacagctttctcctactcaaatgcatccttcacacaattgctcagttttggaaaggccaagagtggctactttctatccatttctgattcaaaatgtttgttgaataatgcattacctgtcaaagaaaaagaagacatttttgcagaaagctttgaacagctctgccttgtttggaataattctttgggctctattggtgtaaatttcaaaagaaactatgaaacagttccatgtgattctaccattagtaaagttattcctgggaatgggaaattgttgttgggctccaatcaaaatgaaattgtctctctaaaaggggacatttataactttcgactttggaattttaccatgaatgccaaaatcctctccaacctcagctgtaatgtgaaagggaatgtagtcgactggcaaaatgacttctggaatatcccaaacctagctctgaaagctgaaagcaacctaagctgtggttcctacctgatcccgctcccagcagcagaactggccagctgtgcagacctggggaccctctgtcaagctactgtaaactctcctagtactacaccacccactgtcaccactaacatgcctgttactaacagaatcgataaacaaaggaatgatggaattatctatagaatatccgtagtgattcagaacatccttcgtcaccctgaggtaaaagtacagagcaaggtggcagaatggctcaattcaaccttccaaaattggaactacacggtttatgtcgttaatatcagttttcacctgagtgctggagaggacaagattaaagtcaagagaagccttgaggatgagccaaggttggtgctttgggcccttctagtttacaatgctaccaacaatactaatttggaaggaaaaatcattcagcagaagctcctaaaaaataatgagtccttggatgaaggcttgaggctacatacagtgaatgtgagacaactgggtcattgtcttgccatggaggaacccaaaggctactactggccatctatccaaccttctgaatacgttcttccttgtccagacaagcctggcttttctgcttctcggatatgtttttacaatgctaccaacccattggtaacctactggggacctgttgatatctccaactgtttaaaagaagcaaatgaagttgctaaccagattttaaatttaactgctgatgggcagaacttaacctcagccaatattaccaacattgtggaacaggtcaaaagaattgtgaataaagaagaaaacattgatataacacttggctcaactctaatgaatatattttctaatatcttaagcagttcagacagtgacttgcttgagtcatcttctgaagctttaaaaacaattgatgaattggccttcaagatagacctaaatagcacatcacatgtgaatattacaactcggaacttggctctcagcgtatcatccctgttaccagggacaaatgcaatttcaaattttagcattggtcttccaagcaataatgaatcgtatttccagatggattttgagagtggacaagtggatccactggcatctgtaattttgcctccaaacttacttgagaatttaagtccagaagattctgtattagttagaagagcacagtttactttcttcaacaaaactggacttttccaggatgtaggaccccaaagaaaaactttagtgagttatgtgatggcgtgcagtattggaaacattactatccagaatctgaaggatcctgttcaaataaaaatcaaacatacaagaactcaggaagtgcatcatcccatctgtgccttctgggatctgaacaaaaacaaaagttttggaggatggaacacgtcaggatgtgttgcacacagagattcagatgcaagtgagacagtctgcctgtgtaaccacttcacacactttggagttctgatggaccttccaagaagtgcctcacagttagatgcaagaaacactaaagtcctcactttcatcagctatattgggtgtggaatatctgctattttttcagcagcaactctcctgacatatgttgcttttgagaaattgcgaagggattatccctccaaaatcttgatgaacctgagcacagccctgctgttcctgaatctcctcttcctcctagatggctggatcacctccttcaatgtggatggactttgcattgctgttgcagtcctgttgcatttcttccttctggcaacctttacctggatggggctagaagcaattcacatgtacattgctctagttaaagtatttaacacttacattcgccgatacattctaaaattctgcatcattggctggggtttgcctgccttagtggtgtcagttgttctagcgagcagaaacaacaatgaagtctatggaaaagaaagttatgggaaagaaaaaggtgatgaattctgttggattcaagatccagtcatattttatgtgacctgtgctgggtattttggagtcatgttttttctgaacattgccatgttcattgtggtaatggtgcagatctgtgggaggaatggcaagagaagcaaccggaccctgagagaagaagtgttaaggaacctgcgcagtgtggttagcttgacctttctgttgggcatgacatggggttttgcattctttgcctggggacccttaaatatccccttcatgtacctcttctccatcttcaattcattacaaggcttatttatattcatcttccactgtgctatgaaggagaatgttcagaaacagtggcggcagcatctctgctgtggtagatttcggttagcagataactcagattggagtaagacagctaccaatatcatcaagaaaagttctgataatctaggaaaatctttgtcttcaagctccattggttccaactcaacctatcttacatccaaatctaaatccagctctaccacctatttcaaaaggaatagccacacagataatgtctcctatgagcattccttcaacaaaagtggatcactcagacagtgcttccatggacaagtccttgtcaaaactggcccatgctgatggagatcaaacatcaatcatccctgtccatcaggtcattgataaggtcaagggttattgcaatgctcattcagacaacttctataaaaatattatcatgtcagacaccttcagccacagcacaaagttttaatgtctttaagaaaaagaaatcaatctgcagaaatgtgaagatttgcaagcagtgtaaactgcaactagtgatgtaaatgtgctattacctaggtaactgcatatatataaggaatgtattttgttaagaaggcttttgtgaaattcagaatttttctttttaatatatttcttccatggaagagttgtcatcactaaaacttcagtactgagagtaacatgactcagtagccacagaagctatgatttgtaaaatatataattgaatcagagtaatcataatgcaggggagacattcaaattagagacaagggagaagcaatgctgaggaagaccctagatagagctcattttactccacctaatcgttatatctggatatacccattttctgcatcttctttctcaacaataaaaaatgtaactattttgaatgcccacaaatcccattccagtgttactttctgtgaatgcagtaccatattctcattttcaatgacatttcaaccacaggcagaaaagactgtttactccttgacccaaagattaaaaaggattttttattattttaaatattacaccttcagaaccataacatgcttaagaaaactttcccaaaatgttgacctagttaaatgaggctatataaatttctaatattttacttattctattcaaggcatagggccaaagcattaagtataatttaatcccatacattcgagttaagtttagtgttgatgttccatcattctggacctcccaggagttgtttaagaatgaatctcttacacctctacttttgcccctctactgtatattaagcccataggcttgtgggaggaaggagaatttccattaggcaagctgtatgcagtggaattttccttttaggagacacacaattaagactctctggttctgtccttgctttggagactttaagacatttcctaaagcacaaataaaagcctcgtatttccccattgagagttttgttccaaggaatatgaagtgagacatatgggtgagtcataataatcaaaataatttatgaagagctgggtctgcaatagctagtctaaaaactacttgtgtgtcagtcctctggttatagtatataagagcctgaggaggtctggcaagatagatggtgtattatttatggatcaggctgctgcatacaaaccttgcatactattatgcagcttacctaactctcagactattctgagtaatgcttgcttgctaatgaatgtataggagaccacattgtaattgttcttagatgatggagtccatgcagtttcttagaaatcggtctcagtgcatgctgtgctttttcacatttgctctgggttatctgggaagtatcaggttctgggaggcaacagcattaagtgataagaaaaggagacattctggcaaagccaatctgcttaaaggcaaagtccagaacctggaacctagaggcctttctctctgcacgaaaaacaggtagtttgcagtctgagatatgggagagcttttaggctacacagcaacccaagggacctctcaccttttgctgagcttcaatcaggaagctatttgcctggctccagcagatgatgagataatgaggtagtgggttttttattactgttccattttgcaacatcctgcaacaccatcctgggagacaagagcattacccagcttggctttcacgggggagggttgtattcagtaaaaaagaatagtaaatataaggtcactgagattctaagtaagatagtaaatctaaggtcactgagccaaatccttttcaataggcatatattaacaggctgcttattttggcggaggttacatatggatgaaaatgaatcttagtcactgaatattcatatacatttcccccaaaaccttagacattcatagtagattttaattagttagctttctaactagtcagatttctgcccaaagtgcttagtcaatagtaattaagatatagcttcaaaaatggctttgcttttgatttctactcatattcgtatggctccagaaaaatatttttttcatatttgacaatgtcagctccactttagaaattttcaataaccagatgagaaaaaaattaagaaattgctcaagggaaacatttgtaaatggatttgaaagattgagccaaattctgttgtcagttctaagcatgcagttctcacctccatttagtcccccatcagaacagaggtcaggaatttagctggggagcctaaatttagttcagcttacctttgagaatagcatcaattcagactctcttttcattatgttttcttttctttttccctctttttaaactacattgtgttagagtcatagtctaggatcctgagagattttccattcttgtcaccattcacttgcattgtaaagattttctttgtctgttgttggcatagattcttttgtacatatttatttatttgtgtttatatatgtcaattggtttcctttcttagcttgatattgcctagctttgttgttttaattaactttctattagagagactgtatatattttttctaaatactttgtgaaatcatttttggtagcaatatctttgaatatgatgaataaaagtgactgtgagtgcaaatagaattagcagtaagaagctactctagctaatttgccattttacttaaatggaaaatgtttttcaaataaatacttatgttgttcatgttccaagttattcaa

SEQ ID NO: 105541 - DNA, 6849 bp, Homo sapiens
  Payload ID: 693
  Gene Symbol: ADGRG6
  Gene Name: adhesion G protein-coupled receptor G6
  Uniprot ID: Q86SQ4
  ENST ID: ENST00000296932
  CDS Start-End: 402-3983
ccaagtacctagggtggtggccgagtcccgcctcccgccagcgggggcgaggacctgcgacgcgcacccctgcctggcccggtctcctcagcaccagccccacgcacaccctacttcctcagcttctcgccctcaccctgccaacttccctgcgaggagggacctgccgccagcctgcttcctcgtccgcaggccctgcgctgaacgctgccgcgcccagggttcaccttgcgccgtcgggaaagcccatgaactctccagaaacggcgtaaaggagggtcccgccgcggcgcagggctggggcgcctgggttccccctgggtggagcagcggcagcagagcgggaaagtggtggaggatgatcttgcggccaaaggggacctcggcgcagtaatgtcaacatgatgtttcgctcagatcgaatgtggagctgccattggaaatggaagcccagtcctctcctgttcttatttgctttatatatcatgtgtgttcctcactcagtgtggggatgtgccaactgccgagtggttttgtccaacccttctgggacctttacttctccatgctaccctaacgactacccaaacagccaggcttgcatgtggacgctccgagcccccaccggttatatcattcagataacatttaacgactttgacattgaagaagctcccaattgcatttatgactcattatcccttgataatggagagagccagactaaattttgtggagcaactgccaaaggcctatcatttaactcaagtgcgaatgagatgcatgtgtccttttcaagtgactttagcatccagaagaaaggtttcaatgccagctacatcagagttgccgtgtccttaaggaatcaaaaggtcattttaccccagacatcagatgcttaccaggtatctgttgcaaaaagcatctctattccagagctcagtgctttcacactctgctttgaagcaaccaaagttggccatgaagacagtgattggacagctttctcctactcaaatgcatccttcacacaattgctcagttttggaaaggccaagagtggctactttctatccatttctgattcaaaatgtttgttgaataatgcattacctgtcaaagaaaaagaagacatttttgcagaaagctttgaacagctctgccttgtttggaataattctttgggctctattggtgtaaatttcaaaagaaactatgaaacagttccatgtgattctaccattagtaaagttattcctgggaatgggaaattgttgttgggctccaatcaaaatgaaattgtctctctaaaaggggacatttataactttcgactttggaattttaccatgaatgccaaaatcctctccaacctcagctgtaatgtgaaagggaatgtagtcgactggcaaaatgacttctggaatatcccaaacctagctctgaaagctgaaagcaacctaagctgtggttcctacctgatcccgctcccagcagcagaactggccagctgtgcagacctggggaccctctgtcaagatggaattatctatagaatatccgtagtgattcagaacatccttcgtcaccctgaggtaaaagtacagagcaaggtggcagaatggctcaattcaaccttccaaaattggaactacacggtttatgtcgttaatatcagttttcacctgagtgctggagaggacaagattaaagtcaagagaagccttgaggatgagccaaggttggtgctttgggcccttctagtttacaatgctaccaacaatactaatttggaaggaaaaatcattcagcagaagctcctaaaaaataatgagtccttggatgaaggcttgaggctacatacagtgaatgtgagacaactgggtcattgtcttgccatggaggaacccaaaggctactactggccatctatccaaccttctgaatacgttcttccttgtccagacaagcctggcttttctgcttctcggatatgtttttacaatgctaccaacccattggtaacctactggggacctgttgatatctccaactgtttaaaagaagcaaatgaagttgctaaccagattttaaatttaactgctgatgggcagaacttaacctcagccaatattaccaacattgtggaacaggtcaaaagaattgtgaataaagaagaaaacattgatataacacttggctcaactctaatgaatatattttctaatatcttaagcagttcagacagtgacttgcttgagtcatcttctgaagctttaaaaacaattgatgaattggccttcaagatagacctaaatagcacatcacatgtgaatattacaactcggaacttggctctcagcgtatcatccctgttaccagggacaaatgcaatttcaaattttagcattggtcttccaagcaataatgaatcgtatttccagatggattttgagagtggacaagtggatccactggcatctgtaattttgcctccaaacttacttgagaatttaagtccagaagattctgtattagttagaagagcacagtttactttcttcaacaaaactggacttttccaggatgtaggaccccaaagaaaaactttagtgagttatgtgatggcgtgcagtattggaaacattactatccagaatctgaaggatcctgttcaaataaaaatcaaacatacaagaactcaggaagtgcatcatcccatctgtgccttctgggatctgaacaaaaacaaaagttttggaggatggaacacgtcaggatgtgttgcacacagagattcagatgcaagtgagacagtctgcctgtgtaaccacttcacacactttggagttctgatggaccttccaagaagtgcctcacagttagatgcaagaaacactaaagtcctcactttcatcagctatattgggtgtggaatatctgctattttttcagcagcaactctcctgacatatgttgcttttgagaaattgcgaagggattatccctccaaaatcttgatgaacctgagcacagccctgctgttcctgaatctcctcttcctcctagatggctggatcacctccttcaatgtggatggactttgcattgctgttgcagtcctgttgcatttcttccttctggcaacctttacctggatggggctagaagcaattcacatgtacattgctctagttaaagtatttaacacttacattcgccgatacattctaaaattctgcatcattggctggggtttgcctgccttagtggtgtcagttgttctagcgagcagaaacaacaatgaagtctatggaaaagaaagttatgggaaagaaaaaggtgatgaattctgttggattcaagatccagtcatattttatgtgacctgtgctgggtattttggagtcatgttttttctgaacattgccatgttcattgtggtaatggtgcagatctgtgggaggaatggcaagagaagcaaccggaccctgagagaagaagtgttaaggaacctgcgcagtgtggttagcttgacctttctgttgggcatgacatggggttttgcattctttgcctggggacccttaaatatccccttcatgtacctcttctccatcttcaattcattacaaggcttatttatattcatcttccactgtgctatgaaggagaatgttcagaaacagtggcggcagcatctctgctgtggtagatttcggttagcagataactcagattggagtaagacagctaccaatatcatcaagaaaagttctgataatctaggaaaatctttgtcttcaagctccattggttccaactcaacctatcttacatccaaatctaaatccagctctaccacctatttcaaaaggaatagccacacagataatgtctcctatgagcattccttcaacaaaagtggatcactcagacagtgcttccatggacaagtccttgtcaaaactggcccatgctgatggagatcaaacatcaatcatccctgtccatcaggtcattgataaggtcaagggttattgcaatgctcattcagacaacttctataaaaatattatcatgtcagacaccttcagccacagcacaaagttttaatgtctttaagaaaaagaaatcaatctgcagaaatgtgaagatttgcaagcagtgtaaactgcaactagtgatgtaaatgtgctattacctaggtaactgcatatatataaggaatgtattttgttaagaaggcttttgtgaaattcagaatttttctttttaatatatttcttccatggaagagttgtcatcactaaaacttcagtactgagagtaacatgactcagtagccacagaagctatgatttgtaaaatatataattgaatcagagtaatcataatgcaggggagacattcaaattagagacaagggagaagcaatgctgaggaagaccctagatagagctcattttactccacctaatcgttatatctggatatacccattttctgcatcttctttctcaacaataaaaaatgtaactattttgaatgcccacaaatcccattccagtgttactttctgtgaatgcagtaccatattctcattttcaatgacatttcaaccacaggcagaaaagactgtttactccttgacccaaagattaaaaaggattttttattattttaaatattacaccttcagaaccataacatgcttaagaaaactttcccaaaatgttgacctagttaaatgaggctatataaatttctaatattttacttattctattcaaggcatagggccaaagcattaagtataatttaatcccatacattcgagttaagtttagtgttgatgttccatcattctggacctcccaggagttgtttaagaatgaatctcttacacctctacttttgcccctctactgtatattaagcccataggcttgtgggaggaaggagaatttccattaggcaagctgtatgcagtggaattttccttttaggagacacacaattaagactctctggttctgtccttgctttggagactttaagacatttcctaaagcacaaataaaagcctcgtatttccccattgagagttttgttccaaggaatatgaagtgagacatatgggtgagtcataataatcaaaataatttatgaagagctgggtctgcaatagctagtctaaaaactacttgtgtgtcagtcctctggttatagtatataagagcctgaggaggtctggcaagatagatggtgtattatttatggatcaggctgctgcatacaaaccttgcatactattatgcagcttacctaactctcagactattctgagtaatgcttgcttgctaatgaatgtataggagaccacattgtaattgttcttagatgatggagtccatgcagtttcttagaaatcggtctcagtgcatgctgtgctttttcacatttgctctgggttatctgggaagtatcaggttctgggaggcaacagcattaagtgataagaaaaggagacattctggcaaagccaatctgcttaaaggcaaagtccagaacctggaacctagaggcctttctctctgcacgaaaaacaggtagtttgcagtctgagatatgggagagcttttaggctacacagcaacccaagggacctctcaccttttgctgagcttcaatcaggaagctatttgcctggctccagcagatgatgagataatgaggtagtgggttttttattactgttccattttgcaacatcctgcaacaccatcctgggagacaagagcattacccagcttggctttcacgggggagggttgtattcagtaaaaaagaatagtaaatataaggtcactgagattctaagtaagatagtaaatctaaggtcactgagccaaatccttttcaataggcatatattaacaggctgcttattttggcggaggttacatatggatgaaaatgaatcttagtcactgaatattcatatacatttcccccaaaaccttagacattcatagtagattttaattagttagctttctaactagtcagatttctgcccaaagtgcttagtcaatagtaattaagatatagcttcaaaaatggctttgcttttgatttctactcatattcgtatggctccagaaaaatatttttttcatatttgacaatgtcagctccactttagaaattttcaataaccagatgagaaaaaaattaagaaattgctcaagggaaacatttgtaaatggatttgaaagattgagccaaattctgttgtcagttctaagcatgcagttctcacctccatttagtcccccatcagaacagaggtcaggaatttagctggggagcctaaatttagttcagcttacctttgagaatagcatcaattcagactctcttttcattatgttttcttttctttttccctctttttaaactacattgtgttagagtcatagtctaggatcctgagagattttccattcttgtcaccattcacttgcattgtaaagattttctttgtctgttgttggcatagattcttttgtacatatttatttatttgtgtttatatatgtcaattggtttcctttcttagcttgatattgcctagctttgttgttttaattaactttctattagagagactgtatatattttttctaaatactttgtgaaatcatttttggtagcaatatctttgaatatgatgaataaaagtgactgtgagtgcaaatagaattagcagtaagaagctactctagctaatttgccattttacttaaatggaaaatgtttttcaaataaatacttatgttgttc

SEQ ID NO: 105542 - DNA, 6879 bp, Homo sapiens
  Payload ID: 693
  Gene Symbol: ADGRG6
  Gene Name: adhesion G protein-coupled receptor G6
  Uniprot ID: Q86SQ4
  ENST ID: ENST00000367608
  CDS Start-End: 472-4140
tccagtcacgccggaagcgcgggcggagcgcacgggtccggggagagtcgcctgcgcccgcgagggggacccaagtacctagggtggtggccgagtcccgcctcccgccagcgggggcgaggacctgcgacgcgcacccctgcctggcccggtctcctcagcaccagccccacgcacaccctacttcctcagcttctcgccctcaccctgccaacttccctgcgaggagggacctgccgccagcctgcttcctcgtccgcaggccctgcgctgaacgctgccgcgcccagggttcaccttgcgccgtcgggaaagcccatgaactctccagaaacggcgtaaaggagggtcccgccgcggcgcagggctggggcgcctgggttccccctgggtggagcagcggcagcagagcgggaaagtggtggaggatgatcttgcggccaaaggggacctcggcgcagtaatgtcaacatgatgtttcgctcagatcgaatgtggagctgccattggaaatggaagcccagtcctctcctgttcttatttgctttatatatcatgtgtgttcctcactcagtgtggggatgtgccaactgccgagtggttttgtccaacccttctgggacctttacttctccatgctaccctaacgactacccaaacagccaggcttgcatgtggacgctccgagcccccaccggttatatcattcagataacatttaacgactttgacattgaagaagctcccaattgcatttatgactcattatcccttgataatggagagagccagactaaattttgtggagcaactgccaaaggcctatcatttaactcaagtgcgaatgagatgcatgtgtccttttcaagtgactttagcatccagaagaaaggtttcaatgccagctacatcagagttgccgtgtccttaaggaatcaaaaggtcattttaccccagacatcagatgcttaccaggtatctgttgcaaaaagcatctctattccagagctcagtgctttcacactctgctttgaagcaaccaaagttggccatgaagacagtgattggacagctttctcctactcaaatgcatccttcacacaattgctcagttttggaaaggccaagagtggctactttctatccatttctgattcaaaatgtttgttgaataatgcattacctgtcaaagaaaaagaagacatttttgcagaaagctttgaacagctctgccttgtttggaataattctttgggctctattggtgtaaatttcaaaagaaactatgaaacagttccatgtgattctaccattagtaaagttattcctgggaatgggaaattgttgttgggctccaatcaaaatgaaattgtctctctaaaaggggacatttataactttcgactttggaattttaccatgaatgccaaaatcctctccaacctcagctgtaatgtgaaagggaatgtagtcgactggcaaaatgacttctggaatatcccaaacctagctctgaaagctgaaagcaacctaagctgtggttcctacctgatcccgctcccagcagcagaactggccagctgtgcagacctggggaccctctgtcaagatggaattatctatagaatatccgtagtgattcagaacatccttcgtcaccctgaggtaaaagtacagagcaaggtggcagaatggctcaattcaaccttccaaaattggaactacacggtttatgtcgttaatatcagttttcacctgagtgctggagaggacaagattaaagtcaagagaagccttgaggatgagccaaggttggtgctttgggcccttctagtttacaatgctaccaacaatactaatttggaaggaaaaatcattcagcagaagctcctaaaaaataatgagtccttggatgaaggcttgaggctacatacagtgaatgtgagacaactgggtcattgtcttgccatggaggaacccaaaggctactactggccatctatccaaccttctgaatacgttcttccttgtccagacaagcctggcttttctgcttctcggatatgtttttacaatgctaccaacccattggtaacctactggggacctgttgatatctccaactgtttaaaagaagcaaatgaagttgctaaccagattttaaatttaactgctgatgggcagaacttaacctcagccaatattaccaacattgtggaacaggtcaaaagaattgtgaataaagaagaaaacattgatataacacttggctcaactctaatgaatatattttctaatatcttaagcagttcagacagtgacttgcttgagtcatcttctgaagctttaaaaacaattgatgaattggccttcaagatagacctaaatagcacatcacatgtgaatattacaactcggaacttggctctcagcgtatcatccctgttaccagggacaaatgcaatttcaaattttagcattggtcttccaagcaataatgaatcgtatttccagatggattttgagagtggacaagtggatccactggcatctgtaattttgcctccaaacttacttgagaatttaagtccagaagattctgtattagttagaagagcacagtttactttcttcaacaaaactggacttttccaggatgtaggaccccaaagaaaaactttagtgagttatgtgatggcgtgcagtattggaaacattactatccagaatctgaaggatcctgttcaaataaaaatcaaacatacaagaactcaggaagtgcatcatcccatctgtgccttctgggatctgaacaaaaacaaaagttttggaggatggaacacgtcaggatgtgttgcacacagagattcagatgcaagtgagacagtctgcctgtgtaaccacttcacacactttggagttctgatggaccttccaagaagtgcctcacagttagatgcaagaaacactaaagtcctcactttcatcagctatattgggtgtggaatatctgctattttttcagcagcaactctcctgacatatgttgcttttgagaaattgcgaagggattatccctccaaaatcttgatgaacctgagcacagccctgctgttcctgaatctcctcttcctcctagatggctggatcacctccttcaatgtggatggactttgcattgctgttgcagtcctgttgcatttcttccttctggcaacctttacctggatggggctagaagcaattcacatgtacattgctctagttaaagtatttaacacttacattcgccgatacattctaaaattctgcatcattggctggggtttgcctgccttagtggtgtcagttgttctagcgagcagaaacaacaatgaagtctatggaaaagaaagttatgggaaagaaaaaggtgatgaattctgttggattcaagatccagtcatattttatgtgacctgtgctgggtattttggagtcatgttttttctgaacattgccatgttcattgtggtaatggtgcagatctgtgggaggaatggcaagagaagcaaccggaccctgagagaagaagtgttaaggaacctgcgcagtgtggttagcttgacctttctgttgggcatgacatggggttttgcattctttgcctggggacccttaaatatccccttcatgtacctcttctccatcttcaattcattacaaggcttatttatattcatcttccactgtgctatgaaggagaatgttcagaaacagtggcggcagcatctctgctgtggtagatttcggttagcagataactcagattggagtaagacagctaccaatatcatcaagaaaagttctgataatctaggaaaatctttgtcttcaagctccattggttccaactcaacctatcttacatccaaatctaaatccagctctaccacctatttcaaaaggaatagccacacagacagtgcttccatggacaagtccttgtcaaaactggcccatgctgatggagatcaaacatcaatcatccctgtccatcaggtcattgataaggtcaagggttattgcaatgctcattcagacaacttctataaaaatattatcatgtcagacaccttcagccacagcacaaagttttaatgtctttaagaaaaagaaatcaatctgcagaaatgtgaagatttgcaagcagtgtaaactgcaactagtgatgtaaatgtgctattacctaggtaactgcatatatataaggaatgtattttgttaagaaggcttttgtgaaattcagaatttttctttttaatatatttcttccatggaagagttgtcatcactaaaacttcagtactgagagtaacatgactcagtagccacagaagctatgatttgtaaaatatataattgaatcagagtaatcataatgcaggggagacattcaaattagagacaagggagaagcaatgctgaggaagaccctagatagagctcattttactccacctaatcgttatatctggatatacccattttctgcatcttctttctcaacaataaaaaatgtaactattttgaatgcccacaaatcccattccagtgttactttctgtgaatgcagtaccatattctcattttcaatgacatttcaaccacaggcagaaaagactgtttactccttgacccaaagattaaaaaggattttttattattttaaatattacaccttcagaaccataacatgcttaagaaaactttcccaaaatgttgacctagttaaatgaggctatataaatttctaatattttacttattctattcaaggcatagggccaaagcattaagtataatttaatcccatacattcgagttaagtttagtgttgatgttccatcattctggacctcccaggagttgtttaagaatgaatctcttacacctctacttttgcccctctactgtatattaagcccataggcttgtgggaggaaggagaatttccattaggcaagctgtatgcagtggaattttccttttaggagacacacaattaagactctctggttctgtccttgctttggagactttaagacatttcctaaagcacaaataaaagcctcgtatttccccattgagagttttgttccaaggaatatgaagtgagacatatgggtgagtcataataatcaaaataatttatgaagagctgggtctgcaatagctagtctaaaaactacttgtgtgtcagtcctctggttatagtatataagagcctgaggaggtctggcaagatagatggtgtattatttatggatcaggctgctgcatacaaaccttgcatactattatgcagcttacctaactctcagactattctgagtaatgcttgcttgctaatgaatgtataggagaccacattgtaattgttcttagatgatggagtccatgcagtttcttagaaatcggtctcagtgcatgctgtgctttttcacatttgctctgggttatctgggaagtatcaggttctgggaggcaacagcattaagtgataagaaaaggagacattctggcaaagccaatctgcttaaaggcaaagtccagaacctggaacctagaggcctttctctctgcacgaaaaacaggtagtttgcagtctgagatatgggagagcttttaggctacacagcaacccaagggacctctcaccttttgctgagcttcaatcaggaagctatttgcctggctccagcagatgatgagataatgaggtagtgggttttttattactgttccattttgcaacatcctgcaacaccatcctgggagacaagagcattacccagcttggctttcacgggggagggttgtattcagtaaaaaagaatagtaaatataaggtcactgagattctaagtaagatagtaaatctaaggtcactgagccaaatccttttcaataggcatatattaacaggctgcttattttggcggaggttacatatggatgaaaatgaatcttagtcactgaatattcatatacatttcccccaaaaccttagacattcatagtagattttaattagttagctttctaactagtcagatttctgcccaaagtgcttagtcaatagtaattaagatatagcttcaaaaatggctttgcttttgatttctactcatattcgtatggctccagaaaaatatttttttcatatttgacaatgtcagctccactttagaaattttcaataaccagatgagaaaaaaattaagaaattgctcaagggaaacatttgtaaatggatttgaaagattgagccaaattctgttgtcagttctaagcatgcagttctcacctccatttagtcccccatcagaacagaggtcaggaatttagctggggagcctaaatttagttcagcttacctttgagaatagcatcaattcagactctcttttcattatgttttcttttctttttccctctttttaaactacattgtgttagagtcatagtctaggatcctgagagattttccattcttgtcaccattcacttgcattgtaaagattttctttgtctgttgttggcatagattcttttgtacatatttatttatttgtgtttatatatgtcaattggtttcctttcttagcttgatattgcctagctttgttgttttaattaactttctattagagagactgtatatattttttctaaatactttgtgaaatcatttttggtagcaatatctttgaatatgatgaataaaagtgactgtgagtgcaaatagaattagcagtaagaagctactctagctaatttgccattttacttaaatggaaaatgtttttcaaataaatacttatgttgttcatgttc

SEQ ID NO: 105543 - DNA, 6887 bp, Homo sapiens
  Payload ID: 693
  Gene Symbol: ADGRG6
  Gene Name: adhesion G protein-coupled receptor G6
  Uniprot ID: Q86SQ4
  ENST ID: ENST00000367609
  CDS Start-End: 402-4154
ccaagtacctagggtggtggccgagtcccgcctcccgccagcgggggcgaggacctgcgacgcgcacccctgcctggcccggtctcctcagcaccagccccacgcacaccctacttcctcagcttctcgccctcaccctgccaacttccctgcgaggagggacctgccgccagcctgcttcctcgtccgcaggccctgcgctgaacgctgccgcgcccagggttcaccttgcgccgtcgggaaagcccatgaactctccagaaacggcgtaaaggagggtcccgccgcggcgcagggctggggcgcctgggttccccctgggtggagcagcggcagcagagcgggaaagtggtggaggatgatcttgcggccaaaggggacctcggcgcagtaatgtcaacatgatgtttcgctcagatcgaatgtggagctgccattggaaatggaagcccagtcctctcctgttcttatttgctttatatatcatgtgtgttcctcactcagtgtggggatgtgccaactgccgagtggttttgtccaacccttctgggacctttacttctccatgctaccctaacgactacccaaacagccaggcttgcatgtggacgctccgagcccccaccggttatatcattcagataacatttaacgactttgacattgaagaagctcccaattgcatttatgactcattatcccttgataatggagagagccagactaaattttgtggagcaactgccaaaggcctatcatttaactcaagtgcgaatgagatgcatgtgtccttttcaagtgactttagcatccagaagaaaggtttcaatgccagctacatcagagttgccgtgtccttaaggaatcaaaaggtcattttaccccagacatcagatgcttaccaggtatctgttgcaaaaagcatctctattccagagctcagtgctttcacactctgctttgaagcaaccaaagttggccatgaagacagtgattggacagctttctcctactcaaatgcatccttcacacaattgctcagttttggaaaggccaagagtggctactttctatccatttctgattcaaaatgtttgttgaataatgcattacctgtcaaagaaaaagaagacatttttgcagaaagctttgaacagctctgccttgtttggaataattctttgggctctattggtgtaaatttcaaaagaaactatgaaacagttccatgtgattctaccattagtaaagttattcctgggaatgggaaattgttgttgggctccaatcaaaatgaaattgtctctctaaaaggggacatttataactttcgactttggaattttaccatgaatgccaaaatcctctccaacctcagctgtaatgtgaaagggaatgtagtcgactggcaaaatgacttctggaatatcccaaacctagctctgaaagctgaaagcaacctaagctgtggttcctacctgatcccgctcccagcagcagaactggccagctgtgcagacctggggaccctctgtcaagctactgtaaactctcctagtactacaccacccactgtcaccactaacatgcctgttactaacagaatcgataaacaaaggaatgatggaattatctatagaatatccgtagtgattcagaacatccttcgtcaccctgaggtaaaagtacagagcaaggtggcagaatggctcaattcaaccttccaaaattggaactacacggtttatgtcgttaatatcagttttcacctgagtgctggagaggacaagattaaagtcaagagaagccttgaggatgagccaaggttggtgctttgggcccttctagtttacaatgctaccaacaatactaatttggaaggaaaaatcattcagcagaagctcctaaaaaataatgagtccttggatgaaggcttgaggctacatacagtgaatgtgagacaactgggtcattgtcttgccatggaggaacccaaaggctactactggccatctatccaaccttctgaatacgttcttccttgtccagacaagcctggcttttctgcttctcggatatgtttttacaatgctaccaacccattggtaacctactggggacctgttgatatctccaactgtttaaaagaagcaaatgaagttgctaaccagattttaaatttaactgctgatgggcagaacttaacctcagccaatattaccaacattgtggaacaggtcaaaagaattgtgaataaagaagaaaacattgatataacacttggctcaactctaatgaatatattttctaatatcttaagcagttcagacagtgacttgcttgagtcatcttctgaagctttaaaaacaattgatgaattggccttcaagatagacctaaatagcacatcacatgtgaatattacaactcggaacttggctctcagcgtatcatccctgttaccagggacaaatgcaatttcaaattttagcattggtcttccaagcaataatgaatcgtatttccagatggattttgagagtggacaagtggatccactggcatctgtaattttgcctccaaacttacttgagaatttaagtccagaagattctgtattagttagaagagcacagtttactttcttcaacaaaactggacttttccaggatgtaggaccccaaagaaaaactttagtgagttatgtgatggcgtgcagtattggaaacattactatccagaatctgaaggatcctgttcaaataaaaatcaaacatacaagaactcaggaagtgcatcatcccatctgtgccttctgggatctgaacaaaaacaaaagttttggaggatggaacacgtcaggatgtgttgcacacagagattcagatgcaagtgagacagtctgcctgtgtaaccacttcacacactttggagttctgatggaccttccaagaagtgcctcacagttagatgcaagaaacactaaagtcctcactttcatcagctatattgggtgtggaatatctgctattttttcagcagcaactctcctgacatatgttgcttttgagaaattgcgaagggattatccctccaaaatcttgatgaacctgagcacagccctgctgttcctgaatctcctcttcctcctagatggctggatcacctccttcaatgtggatggactttgcattgctgttgcagtcctgttgcatttcttccttctggcaacctttacctggatggggctagaagcaattcacatgtacattgctctagttaaagtatttaacacttacattcgccgatacattctaaaattctgcatcattggctggggtttgcctgccttagtggtgtcagttgttctagcgagcagaaacaacaatgaagtctatggaaaagaaagttatgggaaagaaaaaggtgatgaattctgttggattcaagatccagtcatattttatgtgacctgtgctgggtattttggagtcatgttttttctgaacattgccatgttcattgtggtaatggtgcagatctgtgggaggaatggcaagagaagcaaccggaccctgagagaagaagtgttaaggaacctgcgcagtgtggttagcttgacctttctgttgggcatgacatggggttttgcattctttgcctggggacccttaaatatccccttcatgtacctcttctccatcttcaattcattacaaggcttatttatattcatcttccactgtgctatgaaggagaatgttcagaaacagtggcggcagcatctctgctgtggtagatttcggttagcagataactcagattggagtaagacagctaccaatatcatcaagaaaagttctgataatctaggaaaatctttgtcttcaagctccattggttccaactcaacctatcttacatccaaatctaaatccagctctaccacctatttcaaaaggaatagccacacagacagtgcttccatggacaagtccttgtcaaaactggcccatgctgatggagatcaaacatcaatcatccctgtccatcaggtcattgataaggtcaagggttattgcaatgctcattcagacaacttctataaaaatattatcatgtcagacaccttcagccacagcacaaagttttaatgtctttaagaaaaagaaatcaatctgcagaaatgtgaagatttgcaagcagtgtaaactgcaactagtgatgtaaatgtgctattacctaggtaactgcatatatataaggaatgtattttgttaagaaggcttttgtgaaattcagaatttttctttttaatatatttcttccatggaagagttgtcatcactaaaacttcagtactgagagtaacatgactcagtagccacagaagctatgatttgtaaaatatataattgaatcagagtaatcataatgcaggggagacattcaaattagagacaagggagaagcaatgctgaggaagaccctagatagagctcattttactccacctaatcgttatatctggatatacccattttctgcatcttctttctcaacaataaaaaatgtaactattttgaatgcccacaaatcccattccagtgttactttctgtgaatgcagtaccatattctcattttcaatgacatttcaaccacaggcagaaaagactgtttactccttgacccaaagattaaaaaggattttttattattttaaatattacaccttcagaaccataacatgcttaagaaaactttcccaaaatgttgacctagttaaatgaggctatataaatttctaatattttacttattctattcaaggcatagggccaaagcattaagtataatttaatcccatacattcgagttaagtttagtgttgatgttccatcattctggacctcccaggagttgtttaagaatgaatctcttacacctctacttttgcccctctactgtatattaagcccataggcttgtgggaggaaggagaatttccattaggcaagctgtatgcagtggaattttccttttaggagacacacaattaagactctctggttctgtccttgctttggagactttaagacatttcctaaagcacaaataaaagcctcgtatttccccattgagagttttgttccaaggaatatgaagtgagacatatgggtgagtcataataatcaaaataatttatgaagagctgggtctgcaatagctagtctaaaaactacttgtgtgtcagtcctctggttatagtatataagagcctgaggaggtctggcaagatagatggtgtattatttatggatcaggctgctgcatacaaaccttgcatactattatgcagcttacctaactctcagactattctgagtaatgcttgcttgctaatgaatgtataggagaccacattgtaattgttcttagatgatggagtccatgcagtttcttagaaatcggtctcagtgcatgctgtgctttttcacatttgctctgggttatctgggaagtatcaggttctgggaggcaacagcattaagtgataagaaaaggagacattctggcaaagccaatctgcttaaaggcaaagtccagaacctggaacctagaggcctttctctctgcacgaaaaacaggtagtttgcagtctgagatatgggagagcttttaggctacacagcaacccaagggacctctcaccttttgctgagcttcaatcaggaagctatttgcctggctccagcagatgatgagataatgaggtagtgggttttttattactgttccattttgcaacatcctgcaacaccatcctgggagacaagagcattacccagcttggctttcacgggggagggttgtattcagtaaaaaagaatagtaaatataaggtcactgagattctaagtaagatagtaaatctaaggtcactgagccaaatccttttcaataggcatatattaacaggctgcttattttggcggaggttacatatggatgaaaatgaatcttagtcactgaatattcatatacatttcccccaaaaccttagacattcatagtagattttaattagttagctttctaactagtcagatttctgcccaaagtgcttagtcaatagtaattaagatatagcttcaaaaatggctttgcttttgatttctactcatattcgtatggctccagaaaaatatttttttcatatttgacaatgtcagctccactttagaaattttcaataaccagatgagaaaaaaattaagaaattgctcaagggaaacatttgtaaatggatttgaaagattgagccaaattctgttgtcagttctaagcatgcagttctcacctccatttagtcccccatcagaacagaggtcaggaatttagctggggagcctaaatttagttcagcttacctttgagaatagcatcaattcagactctcttttcattatgttttcttttctttttccctctttttaaactacattgtgttagagtcatagtctaggatcctgagagattttccattcttgtcaccattcacttgcattgtaaagattttctttgtctgttgttggcatagattcttttgtacatatttatttatttgtgtttatatatgtcaattggtttcctttcttagcttgatattgcctagctttgttgttttaattaactttctattagagagactgtatatattttttctaaatactttgtgaaatcatttttggtagcaatatctttgaatatgatgaataaaagtgactgtgagtgcaaatagaattagcagtaagaagctactctagctaatttgccattttacttaaatggaaaatgtttttcaaataaatacttatgttgttc

SEQ ID NO: 105544 - DNA, 540 bp, Homo sapiens
  Payload ID: 693
  Gene Symbol: ADGRG6
  Gene Name: adhesion G protein-coupled receptor G6
  ENST ID: ENST00000435011
  CDS Start-End: 116-540
aaaacgtgttttcaattcaaattaaacaaggagtaacaggcaccgctcctcagtccagaggcctggccctgccaagaaggcgctctccggaatcaacacctgggggcttggaaggatgtttcgctcagatcgaatgtggagctgccattggaaatggaagcccagtcctctcctgttcttatttgctttatatatcatgtgtgttcctcactcagcagtgtggggatgtgccaactgccgagtggttttgtccaacccttctgggacctttacttctccatgctaccctaacgactacccaaacagccaggcttgcatgtggacgctccgagcccccaccggttatatcattcagataacatttaacgactttgacattgaagaagctcccaattgcatttatgactcattatcccttgataatggagagagccagactaaattttgtggagcaactgccaaaggcctatcatttaactcaagtgcgaatgagatgcatgtgtccttttcaagtgactttagcatccagaagaaaggttt

SEQ ID NO: 105545 - DNA, 652 bp, Homo sapiens
  Payload ID: 693
  Gene Symbol: ADGRG6
  Gene Name: adhesion G protein-coupled receptor G6
  ENST ID: ENST00000540208
  CDS Start-End: 1-311
cacttggctcaactctaatgaatatattttctaatatcttaagcagttcagacagtgacttgcttgagtcatcttctgaagctttaaaaacaattgatgaattggccttcaagatagacctaaatagcacatcacatgtgaatattacaactcggaacttggctctcagcgtatcatccctgttaccagggacaaatgcaatttcaaattttagcattggtcttccaagcaataatgaatcgtatttccagttattatctttcactacgtgttttgagaaaacctcaaaatctgctgctgatggattttgagagtggacaagtggatccactggcatctgtaattttgcctccaaacttacttgagaatttaagtccagaagattctgtattagttagaagagcacagtttactttcttcaacaaaactggacttttccaggatgtaggaccccaaagaaaaactttagtgagttatgtgatggcgtgcagtattggaaacattactatccagaatctgaaggatcctgttcaaataaaaatcaaacatacaagaactcaggaagtgcatcatcccatctgtgccttctgggatctgaacaaaaacaaaagttttggaggatggaacacgtcaggatgtgttgcacacagag

SEQ ID NO: 105546 - DNA, 583 bp, Homo sapiens
  Payload ID: 693
  Gene Symbol: ADGRG6
  Gene Name: adhesion G protein-coupled receptor G6
  ENST ID: ENST00000508295
  CDS Start-End: 1-407
aggtaaaagtacagagcaaggtggcagaatggctcaattcaaccttccaaaattggaactacacggtttatgtcgttaatatcagttttcacctgagtgctggagaggacaagattaaagtcaagagaagccttgaggatgagccaaggttggtgctttgggcccttctagtttacaatgctaccaacaatactaatttggaaggaaaaatcattcagcagaagctcctaaaaaataatgagtccttggatgaaggcttgaggctacatacagtgaatgtgagacaactgggtcattgtcttgccatggaggaacccaaaggctactactggccatctatccaaccttctgaatacgttcttccttgtccagacaagcctggcttttctgcttctcggatatggtaatattttcactgactcttgccagcaaagctacatgttatcagccttcccagggttatacgtgcagcacggtagttcttaggcattatattgattgcaaagaagggcaggaatctctgtgtatgcctgtatcattcactcctggggaataaagataacataagtggatgactcagaaa

SEQ ID NO: 105547 - DNA, 844 bp, Homo sapiens
  Payload ID: 693
  Gene Symbol: ADGRG6
  Gene Name: adhesion G protein-coupled receptor G6
  ENST ID: ENST00000541199
  CDS Start-End: 121-844
tggggaaaacgtgttttcaattcaaattaaacaaggagtaacaggcaccgctcctcagtccagaggcctggccctgccaagaaggcgctctccggaatcaacacctgggggcttggaaggatgtttcgctcagatcgaatgtggagctgccattggaaatggaagcccagtcctctcctgttcttatttgctttatatatcatgtgtgttcctcactcagtgtggggatgtgccaactgccgagtggttttgtccaacccttctgggacctttacttctccatgctaccctaacgactacccaaacagccaggcttgcatgtggacgctccgagcccccaccggttatatcattcagataacatttaacgactttgacattgaagaagctcccaattgcatttatgactcattatcccttgataatggagagagccagactaaattttgtggagcaactgccaaaggcctatcatttaactcaagtgcgaatgagatgcatgtgtccttttcaagtgactttagcatccagaagaaaggtttcaatgccagctacatcagagttgccgtgtccttaaggaatcaaaaggtcattttaccccagacatcagatgcttaccaggtatctgttgcaaaaagcatctctattccagagctcagtgctttcacactctgctttgaagcaaccaaagttggccatgaagacagtgattggacagctttctcctactcaaatgcatccttcacacaattgctcagttttggaaaggccaagagtggctactttctatccatttctgattcaaaatgtttgttgaataatgcattacctgtcaaagaaaaag

SEQ ID NO: 105548 - DNA, 3140 bp, Homo sapiens
  Payload ID: 694
  Gene Symbol: ADGRG7
  Gene Name: adhesion G protein-coupled receptor G7
  Uniprot ID: Q96K78
  ENST ID: ENST00000273352
  CDS Start-End: 269-2662
ataactctaatcacttttttcatgttctccttgagtgaaggatgaggaaattgaaagcagagtatgcaccttttattaggagattcaaactgcatcctactggattagcctcaaaagtcctaaaatacaaagacatccatctgacagatcactgaggggaggacttgtttttctgttttagaatagtttccgattaaactttttagctcaagaagaaaagaagctagttatttctcacccaggagtggatttgtggtttggcttcaccatggcttcctgccgtgcctggaaccttagggtgctggtggctgtcgtgtgtggactactgactggcatcattttgggactgggcatctggaggattgtgatcaggatccaaagaggaaaatctacttcctcatcaagcacccctacagagttctgcaggaatggtggaacctgggaaaatggcagatgtatttgtacagaagagtggaaaggactgagatgtacaattgctaatttttgtgaaaatagtacctatatgggttttacttttgccagaatcccagtgggcagatatggaccatccttgcaaacatgtggcaaggatactccaaatgcgggcaatccaatggcagtccggttgtgcagtctctctctatatggagagatagaattacaaaaagtgacaataggaaattgcaatgaaaatctggaaaccctggaaaagcaggtaaaggatgtcacagcaccacttaataacatttcttctgaagtccagattttaacatctgatgccaataaattaactgctgagaacatcactagtgctacgcgagtggttggacagatattcaacacttccagaaatgcttcacctgaggcaaagaaagttgccatagtaacagtgagtcaactcctagatgccagtgaagatgcttttcaaagagttgctgctactgctaatgatgatgcccttacaacgcttattgagcaaatggagacttattccttgtctttgggtaatcaatcagtggtggaacctaacatagcaatacagtcagcaaatttctcttcagaaaatgcggtggggccttcaaatgttcgcttctctgtgcagaaaggagctagcagttctctagtttctagttcaacatttatacatacaaatgtggatggccttaacccagatgcacagactgagcttcaggtcttgcttaatatgacgaaaaattacaccaagacatgcggctttgtagtttatcaaaatgacaagcttttccaatcaaaaacttttacagctaaatcggattttagtcaaaaaattatctcaagcaaaactgatgaaaatgagcaagatcagagtgcttctgttgacatggtctttagtccaaagtacaaccaaaaagaatttcaactctattcctatgcctgtgtctattggaatttgtcagcgaaggactgggacacatatggctgtcaaaaagacaagggcactgatggattcctgcgctgccgctgcaaccatactactaattttgctgtattaatgactttcaaaaaggattatcaatatcccaaatcacttgacatattatccaacgttggatgtgcactgtctgttactggtctggctctcacagttatatttcagattgtcaccaggaaagtcagaaaaacctcagtaacctgggttttggtcaatctgtgcatatcaatgttgattttcaacctcctctttgtgtttggaattgaaaactccaataagaacttgcagacaagtgatggtgacatcaataatattgactttgacaataatgacatacccaggacagacaccattaacatcccgaatcccatgtgcactgcgattgccgccttactgcactattttctgttagtgacatttacctggaacgcactcagcgctgcacagctctattaccttctaataaggaccatgaagcctcttcctcggcatttcattcttttcatctcattaattggatggggagtcccagctatagtagtggctataacagtgggagttatttattctcagaatggaaataatccacagtgggaattagactaccggcaagagaaaatctgctggctggcaattccagaacccaatggtgttataaaaagtccgctgttgtggtcattcatcgtacctgtaaccattatcctcatcagcaatgttgttatgtttattacaatctcgatcaaagtgctgtggaagaataaccagaacctgacaagcacaaaaaaagtttcatccatgaagaagattgttagcacattatctgttgcagttgtttttggaattacctggattctagcatacctgatgctagttaatgatgatagcatcaggatcgtcttcagctacatattctgccttttcaacactacacagggattgcaaatttttatcctgtacactgttagaacaaaagtcttccagagtgaagcttccaaagtgttgatgttgctatcgtctattgggagaaggaagtcattgccttcagtgacgcggccgaggctgcgtgtaaagatgtataatttcctcaggtcattgccaaccttacatgaacgctttaggctactggaaacctctccgagtactgaggaaatcacactctctgaaagtgacaatgcaaaggaaagcatctagacagtaaaacttacctgttgtggtctttttaatcacctcgtttgagttttatctgtttctctcctttatttcccagtcctctcagaaagtcttcctcaatgtattttgctcaggattaagaattagataaaacctgttgtttattattattcggcataatggacttggtagtttttctatttttcaatagatttgtacttgaataaggtgaagaatttcacacaacatacaagagtaccattgttccttatatcgttaaatctttgtgacacactttgacaaaaatgtagaacctataacaaattcttttacaagttactataaaggacacaaagagaaaactttaccttccagaacaaaatgactcctgatgaacagtgtgtggggatttgcttgtatgtattaaacttttgacctctgaatattttacagtcgtatgtgcttgtacttttatttccaatgaagaatttggcaccaa

SEQ ID NO: 105549 - DNA, 2035 bp, Homo sapiens
  Payload ID: 694
  Gene Symbol: ADGRG7
  Gene Name: adhesion G protein-coupled receptor G7
  ENST ID: ENST00000475887
  CDS Start-End: 270-1778
ttatttacctgcagttgcttacaaagtgtttggacataattgtgtaaagctagggttttttttctggtttttaaaacaggtaaaggatgtcacagcaccacttaataacatttcttctgaagtccagattttaacatctgatgccaataaattaactgctgagaacatcactagtgctacgcgagtggttggacagatattcaacacttccagaaatgcttcacctgaggcaaagaaagttgccatagtaacagtgagtcaactcctagatgccagtgaagatgcttttcaaagagttgctgctactgctaatgatgatgcccttacaacattacaccaagacatgcggctttgtagtttatcaaaatgacaagcttttccaatcaaaaacttttacagctaaatcggattttagtcaaaaaattatctcaagcaaaactgatgaaaatgagcaagatcagagtgcttctgttgacatggtctttagtccaaagtacaaccaaaaagaatttcaactctattcctatgcctgtgtctattggaatttgtcagcgaaggactgggacacatatggctgtcaaaaagacaagggcactgatggattcctgcgctgccgctgcaaccatactactaattttgctgtattaatgactttcaaaaaggattatcaatatcccaaatcacttgacatattatccaacgttggatgtgcactgtctgttactggtctggctctcacagttatatttcagattgtcaccaggaaagtcagaaaaacctcagtaacctgggttttggtcaatctgtgcatatcaatgttgattttcaacctcctctttgtgtttggaattgaaaactccaataagaacttgcagacaagtgatggtgacatcaataatattgactttgacaataatgacatacccaggacagacaccattaacatcccgaatcccatgtgcactgcgattgccgccttactgcactattttctgttagtgacatttacctggaacgcactcagcgctgcacagctctattaccttctaataaggaccatgaagcctcttcctcggcatttcattcttttcatctcattaattggatggggagtcccagctatagtagtggctataacagtgggagttatttattctcagaatggaaataatccacagtgggaattagactaccggcaagagaaaatctgctggctggcaattccagaacccaatggtgttataaaaagtccgctgttgtggtcattcatcgtacctgtaaccattatcctcatcagcaatgttgttatgtttattacaatctcgatcaaagtgctgtggaagaataaccagaacctgacaagcacaaaaaaagtttcatccatgaagaagattgttagcacattatctgttgcagttgtttttggaattacctggattctagcatacctgatgctagttaatgatgatagcatcaggatcgtcttcagctacatattctgccttttcaacactacacagggattgcaaatttttatcctgtacactgttagaacaaaagtcttccagagtgaagcttccaaagtgttgatgttgctatcgtctattgggagaaggaagtcattgccttcagtgacgcggccgaggctgcgtgtaaagatgtataatttcctcaggtcattgccaaccttacatgaacgctttaggctactggaaacctctccgagtactgaggaaatcacactctctgaaagtgacaatgcaaaggaaagcatctagacagtaaaacttacctgttgtggtctttttaatcacctcgtttgagttttatctgtttctctcctttatttcccagtcctctcagaaagtcttcctcaatgtattttgctcaggattaagaattagataaaacctgttgtttattattattcggcataatggacttggtagtttttctatttttcaatagatttgtacttgaataaggtgaagaatttcacacaacatacaagagtaccattgttccttatatcgtt

SEQ ID NO: 105550 - DNA, 7853 bp, Homo sapiens
  Payload ID: 695
  Gene Symbol: ADGRL1
  Gene Name: adhesion G protein-coupled receptor L1
  Uniprot ID: O94910
  ENST ID: ENST00000340736
  CDS Start-End: 299-4723
tctttttttttttttttcctaatttttggtcggcggcggtgctgggccaggggaaggaagggacacggaggccgccctcgtcccgccacctcctacccgcttccccccagccccggctccgggagatgtgccgggcggggggcccgggttcgccgagccgcaggagagacacgctgggccgaccccagagaggcgctggacaggctggtggtccaggccgtggtgcctgccaggtgatgtggggcaaagccccccgcacaggccactgagagctccggacacgcacccggctgccaccatggcccgcctagccgcagtgctctggaatctgtgtgtcaccgccgtcctggtcacctcggccacccaaggcctgagccgggccgggctcccgttcgggctgatgcgccgggagctggcgtgtgaaggctaccccatcgagctgcggtgccccggcagcgacgtcatcatggtggagaatgccaactacgggcgcacggacgacaagatttgcgatgctgaccctttccagatggagaatgtgcagtgctacctgccggacgccttcaagatcatgtcacagaggtgtaacaaccgcacccagtgcgtggtggtcgccggctcggatgcctttcctgacccctgtcctgggacctacaagtacctggaggtgcagtacgactgtgtcccctacaaagtggagcagaaagtcttcgtgtgcccagggaccctgcagaaggtgctggagcccacctcgacacacgagtcagagcaccagtctggcgcatggtgcaaggacccgctgcaggcgggtgaccgcatctacgtgatgccctggatcccctaccgcacggacacactgactgagtatgcctcgtgggaggactacgtggccgcccgccacaccaccacctaccgcctgcccaaccgcgtggatggcacaggctttgtggtctacgatggtgccgtcttctacaacaaggagcgcacgcgcaacatcgtcaagtatgacctacggacgcgcatcaagagcggggagacggtcatcaataccgccaactaccatgacacctcgccctaccgctggggcggaaagaccgacattgacctggcggtggacgagaacgggctgtgggtcatctacgccactgagggcaacaacgggcggctggtggtgagccagctgaacccctacacactgcgctttgagggcacgtgggagacgggttacgacaagcgctcggcatccaacgccttcatggtgtgtggggtcctgtacgtcctgcgttccgtgtacgtggatgatgacagcgaggcggctggcaaccgcgtggactatgccttcaacaccaatgccaaccgcgaggagcctgtcagcctcaccttccccaacccctaccagttcatctcctccgttgactacaaccctcgcgacaaccagctgtacgtctggaacaactatttcgtggtgcgctacagcctggagttcgggccgcccgaccccagtgctggcccagccacttccccacccctcagcacgaccaccacagccaggcccacgcccctcaccagcacagcctcgcccgcagccaccaccccgctccgccgggcacccctcaccacgcacccagtgggtgccatcaaccagctgggacctgatctgcctccagccacagccccagtccccagcacccggcggcccccagccccgaatctacacgtgtcccctgagctcttctgcgagccccgagaggtacggcgggtccagtggccggccacccagcagggcatgctggtggagaggccctgccccaaggggactcgaggaattgcctccttccagtgtctaccagccttggggctctggaacccccggggccctgacctcagcaactgcacctccccctgggtcaaccaggtggcccagaagatcaagagtggggagaacgcggccaacatcgccagcgagctggcccgacacacccggggctccatctacgcgggggacgtctcctcctctgtgaagctgatggagcagctgctggacatcctggatgcccagctgcaggccctgcggcccatcgagcgcgagtcagccggcaagaactacaacaagatgcacaagcgagagagaacttgtaaggattatatcaaggccgtggtggagacagtggacaatctgctccggccagaagctctggagtcctggaaggacatgaatgccacggagcaggtgcacacggccaccatgctcctcgacgtcctggaggagggcgccttcctgctggccgacaatgtcagggagcctgcccgcttcctggctgccaaggagaacgtggtcctggaggtcacagtcctgaacacagagggccaggtgcaggagctggtgttcccccaggaggagtacccgagaaagaactccatccagctgtctgccaaaaccatcaagcagaacagccgcaatggggtggtcaaagttgtcttcatcctctacaacaacctgggcctcttcctgtccacggagaatgccacagtgaagctggccggcgaagcaggcccgggtggccctgggggcgcctctctagtggtgaactcacaggtcatcgcagcatccatcaacaaggagtccagccgcgtcttcctcatggaccctgtcatcttcaccgtggcccacctggaggacaagaaccacttcaatgctaactgctccttctggaactactcggagcgttccatgctgggctactggtcgacccaaggctgccgcctggtggagtccaacaagacccataccacgtgtgcctgcagccacctcaccaacttcgctgtgctcatggctcaccgtgagatctaccagggccgcatcaacgagctgctgctgtcggtcatcacctgggtgggcattgtgatctccctggtctgcttggccatctgcatctccaccttctgcttcctgcgggggctgcagaccgaccgcaacaccatccacaagaacctgtgcatcaacctcttcctggctgagctgctcttcctggtcgggatcgacaagactcagtatgagattgcctgccccatcttcgccggcctgctgcactatttcttcctggctgccttctcctggctgtgcctggagggcgtgcacctctacctgctactagtggaggtgtttgagagcgagtattcccgcaccaagtactactacctgggtggctactgcttcccggccctggtggtgggcatcgcggctgccattgactaccgcagctacggcaccgagaaggcctgctggctccgagtggacaattacttcatctggagtttcatcgggccagtctccttcgttatcgtggtcaacctggtgttcctcatggtgaccctgcacaagatgatccgaagctcatctgtgctcaagcccgactccagccgcctggacaacattaaatcctgggcgctgggggccatcgcgctgctgttcctgctgggcctcacctgggctttcggcctcctcttcatcaacaaggagtcggtggtcatggcctatctcttcaccaccttcaacgccttccagggggtcttcatcttcgtctttcactgcgccttacagaagaaggtgcacaaggagtacagcaagtgcctgcgtcactcctactgctgcatccgctccccacccgggggcactcacggatccctcaagacctcagccatgcgaagcaacacccgctactacacagggacccagagccgaattcggaggatgtggaatgacactgtgaggaaacagacggagtcctccttcatggcgggtgacatcaacagcacccccaccctgaaccgaggtaccatggggaaccacctgctgaccaaccccgtgctgcagccccgtgggggcaccagtccctacaacaccctcatcgccgagtcagtgggcttcaatccctcctcgccccctgtcttcaactccccagggagctaccgggaacccaagcaccccttgggaggccgggaagcctgtggcatggacaccctgcccctgaacggcaacttcaataacagttactccttgcgaagtggggatttccctcccggggatgggggccctgagccgccccgaggccggaacctagccgatgcggcggcctttgagaagatgatcatctcagagctggtgcacaacaacctgcgggggagcagcagcgcggccaagggccctccaccgcctgagccccctgtgccacctgtgccagggggcgggggcgaggaagaggcgggcgggcccgggggtgctgaccgggccgagattgaacttctctataaggccctggaggagcctctgctgctgccccgggcccagtcggtgctgtaccagagcgatctggacgagtcggagagctgcacggccgaggacggcgccaccagccggcccctctcctcccctcctggccgggactccctctatgccagcggggccaacctgcgggactcaccctcctacccggacagcagccctgaggggcccagtgaggccctgcccccaccccctcccgcaccccccggcccccccgaaatctactacacctcgcgcccgccagccctggtggcccggaatcccctgcagggctactaccaggtgcggcgtcctagccacgagggctacctggcagccccaggccttgaggggccagggcccgatggggacgggcagatgcagctggtcaccagtctctgagggcacctcatggaccaggggctggtggcccaggccagggagggaaccctgggcagggctctggtgggagagggagacagatggaggcagtggctggtgggccactctctccaggtgcccctcagccatgggccctacagtcccctcaggggactctaacctgggggcctgaggtgccagggttcacagacagggtttcccaccagccacacgcaccagctctatttgggggaagtgtagtgaggaggagcccagaggaccccaggggagtgaggagggagaacttggaagggtgcagcccacttccagactctcccctctcccacccttctaccctgtgaagggaaatgagggctttagtttcctgggcagggaggggcagcttctgaggttgccaaaggcccccactggatggaacctgttagctgctcctctccgcagccagaaatgctgccggctgcacccagagggagcagtgaggcaggacagatggacaggttcctcctgcgctgtaattccctgctccctggagactgggaaaaggccgcagggcagggggactgggcggtggtggctggtggtttaaaggttgaactttctctgaagctcctttccccttgctcttggtccctgccccgcaagcaaacctgccccctctgcctcccagtgcacccaatgaccccctcccttggggcgactcctgatgaagcacaactccccgcagggcccccagcccacaggggtggccatatttgggcagttcccagtcctgtgggctcggctatctggggagcagattttgggtctggatctccctggggagtgggtcctgggcttggatctttccctagggggccctcttactccttcctctctcctcctccttccccattgctgtaaatatttcaacgaaatggaaaagaaaaaaaaaagacaaaaaaaaaaaaaaagaaaagaaaaaaaatctcatcacttgaagccaccgggagcctgcggcccgggccagcccgggctttctccggagcagagcagcgctgctggcctggcagccaggacttctccgtgtacgtgcatccccagtccccgccggggcgggcgggccgccagagcagctttttacaatccagagacagaaaacaaaatctagatgcaacagcgaaacaaagaacccatttccttcctggcaccctcctttcctgctccgcctgcccggcatcatcagcccttctggggcgtgtacctctcactgcctgccccaggaccagaggcctgtctcccccttccctccccaccggcccgggggagacctcttcacacccaaagatgctttgtcaagatggctgcgctgtccctttgagttcctgcttcttgtatattgctctggggactctcgccggggaagatggggctgatttcccacctagagaggttgatggcagaaggaaaatggggaggcactggggttgtggagggcatgggtatggctgaggagggtgctgggaacggcaaggcggtctgggggatggggaggggcaaaggtgagagatcaccttccctatcctccaccttcccgcagggaagacgaagccaggtgccagggctggggtcgggacacccatgttctgggcggcttgaccccaaatcccagaccccggaagctccaggctcgggatgtgtcctgagcacctgtcccggccccctcctctccagcctgtcaggccagcctccccagcccccttccctcaactctaggggcagcatagccccaggccaccctagcccagcccctgcattgccgtttccccagaggtggcccctccacctctgctctgacctctccccatctctctgcccctccttttctcacaagtgccatgagttttcaaacatcttcgggtctcagcctgctgctgccatgaactttgttgggttaagggggaggggctctaggaaggaactggggggaaggggacaggtaggtggctggagggaccctttttgctgctagaaagcccctcccttctcccggggagctggggctggcttgtccccatcaattaggggagaaggggtcagaccaaagatggtggtttgtcccgtgtaagggaacaggtgtggggaagaggtggggttgggttccaactctggctttttctggtagaaaggcctaacccattacaccagaagaccatgggtgaagtctagatggggaggagaagtgaggccagggacagtcttgccagacgactctgaggagggcaagggacagttccatggcccttcccggactgcactaggctgggagctctgttgtgtggaggggtggtcagaggtctgtgaagagcgggcaggaggcatgagcaggcgaggagctggcctgtcccgggaagcagcccagcctgtggctgcccccgacaccaggaggagggccaggagagttccagggggctgaggcacacagagaggccaacttcctccctgcccagccttccttgtatctctccagactcggacaatcaaagggagagagggtgtatcgggtcctgttccagccggcatcgccgggtggcttccaggcctcagagctgtgtggcagggccccctgctggggctggacatcactgcagtccagtgcaaagccgcccccagagcccaggtgtccccccaacctaaccagacctggtgccttgacgcccccaccccagctgggacggtacagagaagggtcttggtttcctctcctactcccttccttaggctcctgaactcgtttgctcctaaatcttgttaattctttttctctggattttggtttcttttggctttcccttgccttcccctttctctgtctccaacactctttccccatgtctttctggctgtctctatgttcctcttctcttatcctcaactttctgtccattcgggcctcctccccacctcccacgccccagcccctccctccttggtctccttttcgatatgccaaaccaattttgggtcgagtgcatttaacgagaacaaaacaaaaggctcataacaacaagaacgtttcagaaaaaaacaaaaagttttaaaaaaattgttgagtcaaaaagtcaaacaataaagaaattaagatttcttggaa

SEQ ID NO: 105551 - DNA, 5610 bp, Homo sapiens
  Payload ID: 695
  Gene Symbol: ADGRL1
  Gene Name: adhesion G protein-coupled receptor L1
  Uniprot ID: O94910
  ENST ID: ENST00000361434
  CDS Start-End: 281-4690
ctaatttttggtcggcggcggtgctgggccaggggaaggaagggacacggaggccgccctcgtcccgccacctcctacccgcttccccccagccccggctccgggagatgtgccgggcggggggcccgggttcgccgagccgcaggagagacacgctgggccgaccccagagaggcgctggacaggctggtggtccaggccgtggtgcctgccaggtgatgtggggcaaagccccccgcacaggccactgagagctccggacacgcacccggctgccaccatggcccgcctagccgcagtgctctggaatctgtgtgtcaccgccgtcctggtcacctcggccacccaaggcctgagccgggccgggctcccgttcgggctgatgcgccgggagctggcgtgtgaaggctaccccatcgagctgcggtgccccggcagcgacgtcatcatggtggagaatgccaactacgggcgcacggacgacaagatttgcgatgctgaccctttccagatggagaatgtgcagtgctacctgccggacgccttcaagatcatgtcacagaggtgtaacaaccgcacccagtgcgtggtggtcgccggctcggatgcctttcctgacccctgtcctgggacctacaagtacctggaggtgcagtacgactgtgtcccctacatcttcgtgtgcccagggaccctgcagaaggtgctggagcccacctcgacacacgagtcagagcaccagtctggcgcatggtgcaaggacccgctgcaggcgggtgaccgcatctacgtgatgccctggatcccctaccgcacggacacactgactgagtatgcctcgtgggaggactacgtggccgcccgccacaccaccacctaccgcctgcccaaccgcgtggatggcacaggctttgtggtctacgatggtgccgtcttctacaacaaggagcgcacgcgcaacatcgtcaagtatgacctacggacgcgcatcaagagcggggagacggtcatcaataccgccaactaccatgacacctcgccctaccgctggggcggaaagaccgacattgacctggcggtggacgagaacgggctgtgggtcatctacgccactgagggcaacaacgggcggctggtggtgagccagctgaacccctacacactgcgctttgagggcacgtgggagacgggttacgacaagcgctcggcatccaacgccttcatggtgtgtggggtcctgtacgtcctgcgttccgtgtacgtggatgatgacagcgaggcggctggcaaccgcgtggactatgccttcaacaccaatgccaaccgcgaggagcctgtcagcctcaccttccccaacccctaccagttcatctcctccgttgactacaaccctcgcgacaaccagctgtacgtctggaacaactatttcgtggtgcgctacagcctggagttcgggccgcccgaccccagtgctggcccagccacttccccacccctcagcacgaccaccacagccaggcccacgcccctcaccagcacagcctcgcccgcagccaccaccccgctccgccgggcacccctcaccacgcacccagtgggtgccatcaaccagctgggacctgatctgcctccagccacagccccagtccccagcacccggcggcccccagccccgaatctacacgtgtcccctgagctcttctgcgagccccgagaggtacggcgggtccagtggccggccacccagcagggcatgctggtggagaggccctgccccaaggggactcgaggaattgcctccttccagtgtctaccagccttggggctctggaacccccggggccctgacctcagcaactgcacctccccctgggtcaaccaggtggcccagaagatcaagagtggggagaacgcggccaacatcgccagcgagctggcccgacacacccggggctccatctacgcgggggacgtctcctcctctgtgaagctgatggagcagctgctggacatcctggatgcccagctgcaggccctgcggcccatcgagcgcgagtcagccggcaagaactacaacaagatgcacaagcgagagagaacttgtaaggattatatcaaggccgtggtggagacagtggacaatctgctccggccagaagctctggagtcctggaaggacatgaatgccacggagcaggtgcacacggccaccatgctcctcgacgtcctggaggagggcgccttcctgctggccgacaatgtcagggagcctgcccgcttcctggctgccaaggagaacgtggtcctggaggtcacagtcctgaacacagagggccaggtgcaggagctggtgttcccccaggaggagtacccgagaaagaactccatccagctgtctgccaaaaccatcaagcagaacagccgcaatggggtggtcaaagttgtcttcatcctctacaacaacctgggcctcttcctgtccacggagaatgccacagtgaagctggccggcgaagcaggcccgggtggccctgggggcgcctctctagtggtgaactcacaggtcatcgcagcatccatcaacaaggagtccagccgcgtcttcctcatggaccctgtcatcttcaccgtggcccacctggaggacaagaaccacttcaatgctaactgctccttctggaactactcggagcgttccatgctgggctactggtcgacccaaggctgccgcctggtggagtccaacaagacccataccacgtgtgcctgcagccacctcaccaacttcgctgtgctcatggctcaccgtgagatctaccagggccgcatcaacgagctgctgctgtcggtcatcacctgggtgggcattgtgatctccctggtctgcttggccatctgcatctccaccttctgcttcctgcgggggctgcagaccgaccgcaacaccatccacaagaacctgtgcatcaacctcttcctggctgagctgctcttcctggtcgggatcgacaagactcagtatgagattgcctgccccatcttcgccggcctgctgcactatttcttcctggctgccttctcctggctgtgcctggagggcgtgcacctctacctgctactagtggaggtgtttgagagcgagtattcccgcaccaagtactactacctgggtggctactgcttcccggccctggtggtgggcatcgcggctgccattgactaccgcagctacggcaccgagaaggcctgctggctccgagtggacaattacttcatctggagtttcatcgggccagtctccttcgttatcgtggtcaacctggtgttcctcatggtgaccctgcacaagatgatccgaagctcatctgtgctcaagcccgactccagccgcctggacaacattaaatcctgggcgctgggggccatcgcgctgctgttcctgctgggcctcacctgggctttcggcctcctcttcatcaacaaggagtcggtggtcatggcctatctcttcaccaccttcaacgccttccagggggtcttcatcttcgtctttcactgcgccttacagaagaaggtgcacaaggagtacagcaagtgcctgcgtcactcctactgctgcatccgctccccacccgggggcactcacggatccctcaagacctcagccatgcgaagcaacacccgctactacacagggacccagagccgaattcggaggatgtggaatgacactgtgaggaaacagacggagtcctccttcatggcgggtgacatcaacagcacccccaccctgaaccgaggtaccatggggaaccacctgctgaccaaccccgtgctgcagccccgtgggggcaccagtccctacaacaccctcatcgccgagtcagtgggcttcaatccctcctcgccccctgtcttcaactccccagggagctaccgggaacccaagcaccccttgggaggccgggaagcctgtggcatggacaccctgcccctgaacggcaacttcaataacagttactccttgcgaagtggggatttccctcccggggatgggggccctgagccgccccgaggccggaacctagccgatgcggcggcctttgagaagatgatcatctcagagctggtgcacaacaacctgcgggggagcagcagcgcggccaagggccctccaccgcctgagccccctgtgccacctgtgccagggggcgggggcgaggaagaggcgggcgggcccgggggtgctgaccgggccgagattgaacttctctataaggccctggaggagcctctgctgctgccccgggcccagtcggtgctgtaccagagcgatctggacgagtcggagagctgcacggccgaggacggcgccaccagccggcccctctcctcccctcctggccgggactccctctatgccagcggggccaacctgcgggactcaccctcctacccggacagcagccctgaggggcccagtgaggccctgcccccaccccctcccgcaccccccggcccccccgaaatctactacacctcgcgcccgccagccctggtggcccggaatcccctgcagggctactaccaggtgcggcgtcctagccacgagggctacctggcagccccaggccttgaggggccagggcccgatggggacgggcagatgcagctggtcaccagtctctgagggcacctcatggaccaggggctggtggcccaggccagggagggaaccctgggcagggctctggtgggagagggagacagatggaggcagtggctggtgggccactctctccaggtgcccctcagccatgggccctacagtcccctcaggggactctaacctgggggcctgaggtgccagggttcacagacagggtttcccaccagccacacgcaccagctctatttgggggaagtgtagtgaggaggagcccagaggaccccaggggagtgaggagggagaacttggaagggtgcagcccacttccagactctcccctctcccacccttctaccctgtgaagggaaatgagggctttagtttcctgggcagggaggggcagcttctgaggttgccaaaggcccccactggatggaacctgttagctgctcctctccgcagccagaaatgctgccggctgcacccagagggagcagtgaggcaggacagatggacaggttcctcctgcgctgtaattccctgctccctggagactgggaaaaggccgcagggcagggggactgggcggtggtggctggtggtttaaaggttgaactttctctgaagctcctttccccttgctcttggtccctgccccgcaagcaaacctgccccctctgcctcccagtgcacccaatgaccccctcccttggggcgactcctgatgaagcacaactccccgcagggcccccagcccacaggggtggccatatttgggcagttcccagtcctgtgggctcggctatctggggagcagattttgggtctggatctccctggggagtgggtcctgggcttggatctttccctagggggccctcttactccttcctctctcctcctccttccccattgctgtaaatatttcaacgaaatggaaa

SEQ ID NO: 105552 - DNA, 791 bp, Homo sapiens
  Payload ID: 695
  Gene Symbol: ADGRL1
  Gene Name: adhesion G protein-coupled receptor L1
  ENST ID: ENST00000592164
  CDS Start-End: 1-791
gggcactcacggatccctcaagacctcagccatgcgaagcaacacccgctactacacagggacccagagccgaattcggaggatgtggaatgacactgtgaggaaacagacggagtcctccttcatggcgggtgacatcaacagcacccccaccctgaaccgaggtaccatggggaaccacctgctgaccaaccccgtgctgcagccccgtgggggcaccagtccctacaacaccctcatcgccgagtcagtgggcttcaatccctcctcgccccctgtcttcaactccccagaactggagcctggacttgcatttcgagctcatccttgccttttctcttctctcttctggctgccacctgcagggagctaccgggaacccaagcaccccttgggaggccgggaagcctgtggcatggacaccctgcccctgaacggcaacttcaataacagttactccttgcgaagtggggatttccctcccggggatgggggccctgagccgccccgaggccggaacctagccgatgcggcggcctttgagaagatgatcatctcagagctggtgcacaacaacctgcgggggagcagcagcgcggccaagggccctccaccgcctgagccccctgtgccacctgtgccagggggcgggggcgaggaagaggcgggcgggcccgggggtgctgaccgggccgagattgaacttctctataaggccctggaggagcctctgctgctgccccgggcccagtcggtgctgtaccagagcgatctggacgagtcggagagct

SEQ ID NO: 105553 - DNA, 729 bp, Homo sapiens
  Payload ID: 695
  Gene Symbol: ADGRL1
  Gene Name: adhesion G protein-coupled receptor L1
  ENST ID: ENST00000593005
  CDS Start-End: 1-729
gatccctcaagacctcagccatgcgaagcaacacccgctactacacagggacccagagccgaattcggaggatgtggaatgacactgtgaggaaacagacggagtcctccttcatggcgggtgacatcaacagcacccccaccctgaaccgaggtaccatggggaaccacctgctgaccaaccccgtgctgcagccccgtgggggcaccagtccctacaacaccctcatcgccgagtcagtgggcttcaatccctcctcgccccctgtcttcaactccccagagcaccccttgggaggccgggaagcctgtggcatggacaccctgcccctgaacggcaacttcaataacagttactccttgcgaagtggggatttccctcccggggatgggggccctgagccgccccgaggccggaacctagccgatgcggcggcctttgagaagatgatcatctcagagctggtgcacaacaacctgcgggggagcagcagcgcggccaagggccctccaccgcctgagccccctgtgccacctgtgccagggggcgggggcgaggaagaggcgggcgggcccgggggtgctgaccgggccgagattgaacttctctataaggccctggaggagcctctgctgctgccccgggcccagtcggtgctgtaccagagcgatctggacgagtcggagagctgcacggccgaggacggcgccaccagccggcccctctcct

SEQ ID NO: 105554 - DNA, 675 bp, Homo sapiens
  Payload ID: 695
  Gene Symbol: ADGRL1
  Gene Name: adhesion G protein-coupled receptor L1
  ENST ID: ENST00000589616
  CDS Start-End: 1-675
tccgccgggcacccctcaccacgcacccagtgggtgccatcaaccagctgggacctgatctgcctccagccacagccccagtccccagcacccggcggcccccagccccgaatctacacgtgtcccctgagctcttctgcgagccccgagaggtacggcgggtccagtggccggccacccagcagggcatgctggtggagaggccctgccccaaggggactcgagatcaagagtggggagaacgcggccaacatcgccagcgagctggcccgacacacccggggctccatctacgcgggggacgtctcctcctctgtgaagctgatggagcagctgctggacatcctggatgcccagctgcaggccctgcggcccatcgagcgcgagtcagccggcaagaactacaacaagatgcacaagcgagagagaacttgtaaggattatatcaaggccgtggtggagacagtggacaatctgctccggccagaagctctggagtcctggaaggacatgaatgccacggagcaggtgcacacggccaccatgctcctcgacgtcctggaggagggcgccttcctgctggccgacaatgtcagggagcctgcccgcttcctggctgccaaggagaacgtggtcctggaggtcacagtcctgaacacagagggccaggtgcag

SEQ ID NO: 105555 - DNA, 5479 bp, Homo sapiens
  Payload ID: 696
  Gene Symbol: ADGRL2
  Gene Name: adhesion G protein-coupled receptor L2
  Uniprot ID: O95490
  ENST ID: ENST00000319517
  CDS Start-End: 217-4428
cggcgaacagacgttctttctcctccatgcagttacacaaaaggagggctacggaaactaaaagtttcggggcctctggctcggtgcgtggagaaaagagaaaacctggagacgggatatgaagatcaatgatgcagactgatggttttgatgaagctgggcatttataactagattcattaaggaatacaaagaaaatacttaaagggatcaataatggtgtcttctggttgcagaatgcgaagtctgtggtttatcattgtaatcagcttcttaccaaatacagaaggtttcagcagagcagctttaccatttgggctggtgaggcgagaattatcctgtgaaggttattctatagatctgcgatgcccgggcagtgatgtcatcatgattgagagcgctaactatggtcggacggatgacaagatttgtgatgctgacccatttcagatggagaatacagactgctacctccccgatgccttcaaaattatgactcaaaggtgcaacaatcgaacacagtgtatagtagttactgggtcagatgtgtttcctgatccatgtcctggaacatacaaataccttgaagtccaatatgaatgtgtcccttacatttttgtgtgtcctgggaccttgaaagcaattgtggactcaccatgtatatatgaagctgaacaaaaggcgggtgcttggtgcaaggaccctcttcaggctgcagataaaatttatttcatgccctggactccctatcgtaccgatactttaatagaatatgcttctttagaagatttccaaaatagtcgccaaacaacaacatataaacttccaaatcgagtagatggtactggatttgtggtgtatgatggtgctgtcttctttaacaaagaaagaacgaggaatattgtgaaatttgacttgaggactagaattaagagtggcgaggccataattaactatgccaactaccatgatacctcaccatacagatggggaggaaagactgatatcgacctagcagttgatgaaaatggtttatgggtcatttacgccactgaacagaacaatggaatgatagttattagccagctgaatccatacactcttcgatttgaagcaacgtgggagactgtatacgacaaacgtgccgcatcaaatgcttttatgatatgcggagtcctctatgtggttaggtcagtttatcaagacaatgaaagtgaaacaggcaagaactcaattgattacatttataatacccgattaaaccgaggagaatatgtagatgttcccttccccaaccagtatcagtatattgctgcagtggattacaatccaagagataaccaactttacgtgtggaacaataacttcattttacgatattctctggagtttggtccacctgatcctgcccaagtgcctaccacagctgtgacaataacttcttcagctgagctgttcaaaaccataatatcaaccacaagcactacttcacagaaaggccccatgagcacaactgtagctggatcacaggaaggaagcaaagggacaaaaccacctccagcagtttctacaaccaaaattccacctataacaaatatttttcccctgccagagagattctgtgaagcattagactccaaggggataaagtggcctcagacacaaaggggaatgatggttgaacgaccatgccctaagggaacaagaggaactgcctcatatctctgcatgatttccactggaacatggaaccctaagggccccgatcttagcaactgtacctcacactgggtgaatcagctggctcagaagatcagaagcggagaaaatgctgctagtcttgccaatgaactggctaaacataccaaagggccagtgtttgctggggatgtaagttcttcagtgagattgatggagcagttggtggacatccttgatgcacagctgcaggaactgaaacctagtgaaaaagattcagctggacggagttataacaaggcaattgttgacacagtggacaaccttctgagacccgaagctttggaatcatggaaacatatgaattcttctgaacaagcacatactgcaacaatgttactcgatacattggaagaaggagcttttgtcctagctgacaatcttttagaaccaacaagggtctcaatgcccacagaaaatattgtcctggaagttgccgtactcagtacagaaggacagatccaagactttaaatttcctctgggcatcaaaggagcaggcagctcaatccaactgtccgcaaataccgtcaaacagaacagcaggaatgggcttgcaaagttggtgttcatcatttaccggagcctgggacagttccttagtacagaaaatgcaaccattaaactgggtgctgattttattggtcgtaatagcaccattgcagtgaactctcacgtcatttcagtttcaatcaataaagagtccagccgagtatacctgactgatcctgtgctttttaccctgccacacattgatcctgacaattatttcaatgcaaactgctccttctggaactactcagagagaactatgatgggatattggtctacccagggctgcaagctggttgacactaataaaactcgaacaacgtgtgcatgcagccacctaaccaattttgcaattctcatggcccacagggaaattgcatataaagatggcgttcatgaattacttcttacagtcatcacctgggtgggaattgtcatttcccttgtttgcctggctatctgcatcttcaccttctgctttttccgtggcctacagagtgaccgaaatactattcacaagaacctttgtatcaaccttttcattgctgaatttattttcctaataggcattgataagacaaaatatgcgattgcatgcccaatatttgcaggacttctacactttttctttttggcagcttttgcttggatgtgcctagaaggtgtgcagctctacctaatgttagttgaagtttttgaaagtgaatattcaaggaaaaaatattactatgttgctggttacttgtttcctgccacagtggttggagtttcagctgctattgactataagagctatggaacagaaaaagcttgctggcttcatgttgataactactttatatggagcttcattggacctgttaccttcattattctgctaaatattatcttcttggtgatcacattgtgcaaaatggtgaagcattcaaacactttgaaaccagattctagcaggttggaaaacattaagtcttgggtgcttggcgctttcgctcttctgtgtcttcttggcctcacctggtcctttgggttgctttttattaatgaggagactattgtgatggcatatctcttcactatatttaatgctttccagggagtgttcattttcatctttcactgtgctctccaaaagaaagtacgaaaagaatatggcaagtgcttcagacactcatactgctgtggaggcctcccaactgagagtccccacagttcagtgaaggcatcaaccaccagaaccagtgctcgctattcctctggcacacagagtcgtataagaagaatgtggaatgatactgtgagaaaacaatcagaatcttcttttatctcaggtgacatcaatagcacttcaacacttaatcaaggacattcactgaacaatgccagggatacaagtgccatggatactctaccgctaaatggtaattttaacaacagctactcgctgcacaagggtgactataatgacagcgtgcaagttgtggactgtggactaagtctgaatgatactgcttttgagaaaatgatcatttcagaattagtgcacaacaacttacggggcagcagcaagactcacaacctcgagctcacgctaccagtcaaacctgtgattggaggtagcagcagtgaagatgatgctattgtggcagatgcttcatctttaatgcacagcgacaacccagggctggagctccatcacaaagaactcgaggcaccacttattcctcagcggactcactcccttctgtaccaaccccagaagaaagtgaagtccgagggaactgacagctatgtctcccaactgacagcagaggctgaagatcacctacagtcccccaacagagactctctttatacaagcatgcccaatcttagagactctccctatccggagagcagccctgacatggaagaagacctctctccctccaggaggagtgagaatgaggacatttactataaaagcatgccaaatcttggagctggccatcagcttcagatgtgctaccagatcagcaggggcaatagtgatggttatataatccccattaacaaagaagggtgtattccagaaggagatgttagagaaggacaaatgcagctggttacaagtctttaatcatacagctaaggaattccaagggccacatgcgagtattaataaataaagacaccattggcctgacgcagctccctcaaactctgcttgaagagatgactcttgacctgtggttctctggtgtaaaaaagatgactgaaccttgcagttctgtgaatttttataaaacatacaaaaactttgtatatacacagagtatactaaagtgaattatttgttacaaagaaaagagatgccagccaggtattttaagattctgctgctgtttagagaaattgtgaaacaagcaaaacaaaactttccagccattttactgcagcagtctgtgaactaaatttgtaaatatggctgcaccatttttgtaggcctgcattgtattatatacaagacgtaggctttaaaatcctgtgggacaaatttactgtaccttactattcctgacaagacttggaaaagcaggagagatattctgcatcagtttgcagttcactgcaaatcttttacattaaggcaaagattgaaaacatgcttaaccactagcaatcaagccacaggccttatttcatatgtttcctcaactgtacaatgaactattctcatgaaaaatggctaaagaaattatattttgttctattgctagggtaaaataaatacatttgtgtccaactgaaatataattgtcattaaaataattttaaagagtgaagaaaatattgtgaaaagctcttggttgcacatgttatgaaatgttttttcttacactttgtcatggtaagttctactcattttcacttcttttccactgtatacagtgttctgctttgacaaagttggtctttattacttacatttaaatttcttattgccaaaagaacgtgttttatggggagaaacaaactctttgaagccagttatgtcatgccttgcacaaaagtgatgaaatctagaaaagattgtgtgtcacccctgtttattcttgaacagagggcaaagagggcactgggcacttctcacaaactttctagtgaacaaaaggtgcctattctttttt

SEQ ID NO: 105556 - DNA, 4674 bp, Homo sapiens
  Payload ID: 696
  Gene Symbol: ADGRL2
  Gene Name: adhesion G protein-coupled receptor L2
  Uniprot ID: O95490
  ENST ID: ENST00000359929
  CDS Start-End: 182-4393
aactgtgttctatgtggatccagcattacaactgataagggtatttatggcacaatgaaaaatttcatctttcccagaatgatatgaagatcaatgatgcagactgatggttttgatgaagctgggcatttataactagattcattaaggaatacaaagaaaatacttaaagggatcaataatggtgtcttctggttgcagaatgcgaagtctgtggtttatcattgtaatcagcttcttaccaaatacagaaggtttcagcagagcagctttaccatttgggctggtgaggcgagaattatcctgtgaaggttattctatagatctgcgatgcccgggcagtgatgtcatcatgattgagagcgctaactatggtcggacggatgacaagatttgtgatgctgacccatttcagatggagaatacagactgctacctccccgatgccttcaaaattatgactcaaaggtgcaacaatcgaacacagtgtatagtagttactgggtcagatgtgtttcctgatccatgtcctggaacatacaaataccttgaagtccaatatgaatgtgtcccttacatttttgtgtgtcctgggaccttgaaagcaattgtggactcaccatgtatatatgaagctgaacaaaaggcgggtgcttggtgcaaggaccctcttcaggctgcagataaaatttatttcatgccctggactccctatcgtaccgatactttaatagaatatgcttctttagaagatttccaaaatagtcgccaaacaacaacatataaacttccaaatcgagtagatggtactggatttgtggtgtatgatggtgctgtcttctttaacaaagaaagaacgaggaatattgtgaaatttgacttgaggactagaattaagagtggcgaggccataattaactatgccaactaccatgatacctcaccatacagatggggaggaaagactgatatcgacctagcagttgatgaaaatggtttatgggtcatttacgccactgaacagaacaatggaatgatagttattagccagctgaatccatacactcttcgatttgaagcaacgtgggagactgtatacgacaaacgtgccgcatcaaatgcttttatgatatgcggagtcctctatgtggttaggtcagtttatcaagacaatgaaagtgaaacaggcaagaactcaattgattacatttataatacccgattaaaccgaggagaatatgtagatgttcccttccccaaccagtatcagtatattgctgcagtggattacaatccaagagataaccaactttacgtgtggaacaataacttcattttacgatattctctggagtttggtccacctgatcctgcccaagtgcctaccacagctgtgacaataacttcttcagctgagctgttcaaaaccataatatcaaccacaagcactacttcacagaaaggccccatgagcacaactgtagctggatcacaggaaggaagcaaagggacaaaaccacctccagcagtttctacaaccaaaattccacctataacaaatatttttcccctgccagagagattctgtgaagcattagactccaaggggataaagtggcctcagacacaaaggggaatgatggttgaacgaccatgccctaagggaacaagaggaactgcctcatatctctgcatgatttccactggaacatggaaccctaagggccccgatcttagcaactgtacctcacactgggtgaatcagctggctcagaagatcagaagcggagaaaatgctgctagtcttgccaatgaactggctaaacataccaaagggccagtgtttgctggggatgtaagttcttcagtgagattgatggagcagttggtggacatccttgatgcacagctgcaggaactgaaacctagtgaaaaagattcagctggacggagttataacaaggcaattgttgacacagtggacaaccttctgagacccgaagctttggaatcatggaaacatatgaattcttctgaacaagcacatactgcaacaatgttactcgatacattggaagaaggagcttttgtcctagctgacaatcttttagaaccaacaagggtctcaatgcccacagaaaatattgtcctggaagttgccgtactcagtacagaaggacagatccaagactttaaatttcctctgggcatcaaaggagcaggcagctcaatccaactgtccgcaaataccgtcaaacagaacagcaggaatgggcttgcaaagttggtgttcatcatttaccggagcctgggacagttccttagtacagaaaatgcaaccattaaactgggtgctgattttattggtcgtaatagcaccattgcagtgaactctcacgtcatttcagtttcaatcaataaagagtccagccgagtatacctgactgatcctgtgctttttaccctgccacacattgatcctgacaattatttcaatgcaaactgctccttctggaactactcagagagaactatgatgggatattggtctacccagggctgcaagctggttgacactaataaaactcgaacaacgtgtgcatgcagccacctaaccaattttgcaattctcatggcccacagggaaattgcatataaagatggcgttcatgaattacttcttacagtcatcacctgggtgggaattgtcatttcccttgtttgcctggctatctgcatcttcaccttctgctttttccgtggcctacagagtgaccgaaatactattcacaagaacctttgtatcaaccttttcattgctgaatttattttcctaataggcattgataagacaaaatatgcgattgcatgcccaatatttgcaggacttctacactttttctttttggcagcttttgcttggatgtgcctagaaggtgtgcagctctacctaatgttagttgaagtttttgaaagtgaatattcaaggaaaaaatattactatgttgctggttacttgtttcctgccacagtggttggagtttcagctgctattgactataagagctatggaacagaaaaagcttgctggcttcatgttgataactactttatatggagcttcattggacctgttaccttcattattctgctaaatattatcttcttggtgatcacattgtgcaaaatggtgaagcattcaaacactttgaaaccagattctagcaggttggaaaacattaagtcttgggtgcttggcgctttcgctcttctgtgtcttcttggcctcacctggtcctttgggttgctttttattaatgaggagactattgtgatggcatatctcttcactatatttaatgctttccagggagtgttcattttcatctttcactgtgctctccaaaagaaagtacgaaaagaatatggcaagtgcttcagacactcatactgctgtggaggcctcccaactgagagtccccacagttcagtgaaggcatcaaccaccagaaccagtgctcgctattcctctggcacacagagtcgtataagaagaatgtggaatgatactgtgagaaaacaatcagaatcttcttttatctcaggtgacatcaatagcacttcaacacttaatcaaggacattcactgaacaatgccagggatacaagtgccatggatactctaccgctaaatggtaattttaacaacagctactcgctgcacaagggtgactataatgacagcgtgcaagttgtggactgtggactaagtctgaatgatactgcttttgagaaaatgatcatttcagaattagtgcacaacaacttacggggcagcagcaagactcacaacctcgagctcacgctaccagtcaaacctgtgattggaggtagcagcagtgaagatgatgctattgtggcagatgcttcatctttaatgcacagcgacaacccagggctggagctccatcacaaagaactcgaggcaccacttattcctcagcggactcactcccttctgtaccaaccccagaagaaagtgaagtccgagggaactgacagctatgtctcccaactgacagcagaggctgaagatcacctacagtcccccaacagagactctctttatacaagcatgcccaatcttagagactctccctatccggagagcagccctgacatggaagaagacctctctccctccaggaggagtgagaatgaggacatttactataaaagcatgccaaatcttggagctggccatcagcttcagatgtgctaccagatcagcaggggcaatagtgatggttatataatccccattaacaaagaagggtgtattccagaaggagatgttagagaaggacaaatgcagctggttacaagtctttaatcatacagctaaggaattccaagggccacatgcgagtattaataaataaagacaccattggcctgacgcagctccctcaaactctgcttgaagagatgactcttgacctgtggttctctggtgtaaaaaagatgactgaaccttgcagttctgtgaatttttataaaacatacaaaaactttgtatatacacagagtatactaaagtgaattatttgttacaaagaaaagagatgccagccaggtattttaagattctgctgctgtttagagaaattgtga

SEQ ID NO: 105557 - DNA, 5382 bp, Homo sapiens
  Payload ID: 696
  Gene Symbol: ADGRL2
  Gene Name: adhesion G protein-coupled receptor L2
  Uniprot ID: O95490
  ENST ID: ENST00000370713
  CDS Start-End: 217-3588
cggcgaacagacgttctttctcctccatgcagttacacaaaaggagggctacggaaactaaaagtttcggggcctctggctcggtgcgtggagaaaagagaaaacctggagacgggatatgaagatcaatgatgcagactgatggttttgatgaagctgggcatttataactagattcattaaggaatacaaagaaaatacttaaagggatcaataatggtgtcttctggttgcagaatgcgaagtctgtggtttatcattgtaatcagcttcttaccaaatacagaaggtttcagcagagcagctttaccatttgggctggtgaggcgagaattatcctgtgaaggttattctatagatctgcgatgcccgggcagtgatgtcatcatgattgagagcgctaactatggtcggacggatgacaagatttgtgatgctgacccatttcagatggagaatacagactgctacctccccgatgccttcaaaattatgactcaaaggtgcaacaatcgaacacagtgtatagtagttactgggtcagatgtgtttcctgatccatgtcctggaacatacaaataccttgaagtccaatatgaatgtgtcccttacatttttgtgtgtcctgggaccttgaaagcaattgtggactcaccatgtatatatgaagctgaacaaaaggcgggtgcttggtgcaaggaccctcttcaggctgcagataaaatttatttcatgccctggactccctatcgtaccgatactttaatagaatatgcttctttagaagatttccaaaatagtcgccaaacaacaacatataaacttccaaatcgagtagatggtactggatttgtggtgtatgatggtgctgtcttctttaacaaagaaagaacgaggaatattgtgaaatttgacttgaggactagaattaagagtggcgaggccataattaactatgccaactaccatgatacctcaccatacagatggggaggaaagactgatatcgacctagcagttgatgaaaatggtttatgggtcatttacgccactgaacagaacaatggaatgatagttattagccagctgaatccatacactcttcgatttgaagcaacgtgggagactgtatacgacaaacgtgccgcatcaaatgcttttatgatatgcggagtcctctatgtggttaggtcagtttatcaagacaatgaaagtgaaacaggcaagaactcaattgattacatttataatacccgattaaaccgaggagaatatgtagatgttcccttccccaaccagtatcagtatattgctgcagtggattacaatccaagagataaccaactttacgtgtggaacaataacttcattttacgatattctctggagtttggtccacctgatcctgcccaagtgcctaccacagctgtgacaataacttcttcagctgagctgttcaaaaccataatatcaaccacaagcactacttcacagaaaggccccatgagcacaactgtagctggatcacaggaaggaagcaaagggacaaaaccacctccagcagtttctacaaccaaaattccacctataacaaatatttttcccctgccagagagattctgtgaagcattagactccaaggggataaagtggcctcagacacaaaggggaatgatggttgaacgaccatgccctaagggaacaagaggaactgcctcatatctctgcatgatttccactggaacatggaaccctaagggccccgatcttagcaactgtacctcacactgggtgaatcagctggctcagaagatcagaagcggagaaaatgctgctagtcttgccaatgaactggctaaacataccaaagggccagtgtttgctggggatgtaagttcttcagtgagattgatggagcagttggtggacatccttgatgcacagctgcaggaactgaaacctagtgaaaaagattcagctggacggagttataacaaggcaattgttgacacagtggacaaccttctgagacccgaagctttggaatcatggaaacatatgaattcttctgaacaagcacatactgcaacaatgttactcgatacattggaagaaggagcttttgtcctagctgacaatcttttagaaccaacaagggtctcaatgcccacagaaaatattgtcctggaagttgccgtactcagtacagaaggacagatccaagactttaaatttcctctgggcatcaaaggagcaggcagctcaatccaactgtccgcaaataccgtcaaacagaacagcaggaatgggcttgcaaagttggtgttcatcatttaccggagcctgggacagttccttagtacagaaaatgcaaccattaaactgggtgctgattttattggtcgtaatagcaccattgcagtgaactctcacgtcatttcagtttcaatcaataaagagtccagccgagtatacctgactgatcctgtgctttttaccctgccacacattgatcctgacaattatttcaatgcaaactgctccttctggaactactcagagagaactatgatgggatattggtctacccagggctgcaagctggttgacactaataaaactcgaacaacgtgtgcatgcagccacctaaccaattttgcaattctcatggcccacagggaaattgcatataaagatggcgttcatgaattacttcttacagtcatcacctgggtgggaattgtcatttcccttgtttgcctggctatctgcatcttcaccttctgctttttccgtggcctacagagtgaccgaaatactattcacaagaacctttgtatcaaccttttcattgctgaatttattttcctaataggcattgataagacaaaatatgcgattgcatgcccaatatttgcaggacttctacactttttctttttggcagcttttgcttggatgtgcctagaaggtgtgcagctctacctaatgttagttgaagtttttgaaagtgaatattcaaggaaaaaatattactatgttgctggttacttgtttcctgccacagtggttggagtttcagctgctattgactataagagctatggaacagaaaaagcttgctggcttcatgttgataactactttatatggagcttcattggacctgttaccttcattattctgctaaatattatcttcttggtgatcacattgtgcaaaatggtgaagcattcaaacactttgaaaccagattctagcaggttggaaaacattaagtcttgggtgcttggcgctttcgctcttctgtgtcttcttggcctcacctggtcctttgggttgctttttattaatgaggagactattgtgatggcatatctcttcactatatttaatgctttccagggagtgttcattttcatctttcactgtgctctccaaaagaaagtacgaaaagaatatggcaagtgcttcagacactcatactgctgtggaggcctcccaactgagagtccccacagttcagtgaaggcatcaaccaccagaaccagtgctcgctattcctctggcacacaggacattcactgaacaatgccagggatacaagtgccatggatactctaccgctaaatggtaattttaacaacagctactcgctgcacaagggtgactataatgacagcgtgcaagttgtggactgtggactaagtctgaatgatactgcttttgagaaaatgatcatttcagaattagtgcacaacaacttacggggcagcagcaagactcacaacctcgagctcacgctaccagtcaaacctgtgattggaggtagcagcagtgaagatgatgctattgtggcagatgcttcatctttaatgcacagcgacaacccagggctggagctccatcacaaagaactcgaggcaccacttattcctcagcggactcactcccttctgtaccaaccccagaagaaagtgaagtccgagggaactgacagctatgtctcccaactgacagcagaggctgaagatcacctacagtcccccaacagagactctctttatacaagcatgcccaatcttagagactctccctatccggagagcagccctgacatggaagaagacctctctccctccaggaggagtgagaatgaggacatttactataaaagcatgccaaatcttggagctggccatcagcttcagatgtgctaccagatcagcaggggcaatagtgatggttatataatccccattaacaaagaagggtgtattccagaaggagatgttagagaaggacaaatgcagctggttacaagtctttaatcatacagctaaggaattccaagggccacatgcgagtattaataaataaagacaccattggcctgacgcagctccctcaaactctgcttgaagagatgactcttgacctgtggttctctggtgtaaaaaagatgactgaaccttgcagttctgtgaatttttataaaacatacaaaaactttgtatatacacagagtatactaaagtgaattatttgttacaaagaaaagagatgccagccaggtattttaagattctgctgctgtttagagaaattgtgaaacaagcaaaacaaaactttccagccattttactgcagcagtctgtgaactaaatttgtaaatatggctgcaccatttttgtaggcctgcattgtattatatacaagacgtaggctttaaaatcctgtgggacaaatttactgtaccttactattcctgacaagacttggaaaagcaggagagatattctgcatcagtttgcagttcactgcaaatcttttacattaaggcaaagattgaaaacatgcttaaccactagcaatcaagccacaggccttatttcatatgtttcctcaactgtacaatgaactattctcatgaaaaatggctaaagaaattatattttgttctattgctagggtaaaataaatacatttgtgtccaactgaaatataattgtcattaaaataattttaaagagtgaagaaaatattgtgaaaagctcttggttgcacatgttatgaaatgttttttcttacactttgtcatggtaagttctactcattttcacttcttttccactgtatacagtgttctgctttgacaaagttggtctttattacttacatttaaatttcttattgccaaaagaacgtgttttatggggagaaacaaactctttgaagccagttatgtcatgccttgcacaaaagtgatgaaatctagaaaagattgtgtgtcacccctgtttattcttgaacagagggcaaagagggcactgggcacttctcacaaactttctagtgaacaaaaggtgcctattctttttt

SEQ ID NO: 105558 - DNA, 5585 bp, Homo sapiens
  Payload ID: 696
  Gene Symbol: ADGRL2
  Gene Name: adhesion G protein-coupled receptor L2
  Uniprot ID: O95490
  ENST ID: ENST00000370715
  CDS Start-End: 217-3750
cggcgaacagacgttctttctcctccatgcagttacacaaaaggagggctacggaaactaaaagtttcggggcctctggctcggtgcgtggagaaaagagaaaacctggagacgggatatgaagatcaatgatgcagactgatggttttgatgaagctgggcatttataactagattcattaaggaatacaaagaaaatacttaaagggatcaataatggtgtcttctggttgcagaatgcgaagtctgtggtttatcattgtaatcagcttcttaccaaatacagaaggtttcagcagagcagctttaccatttgggctggtgaggcgagaattatcctgtgaaggttattctatagatctgcgatgcccgggcagtgatgtcatcatgattgagagcgctaactatggtcggacggatgacaagatttgtgatgctgacccatttcagatggagaatacagactgctacctccccgatgccttcaaaattatgactcaaaggtgcaacaatcgaacacagtgtatagtagttactgggtcagatgtgtttcctgatccatgtcctggaacatacaaataccttgaagtccaatatgaatgtgtcccttacatttttgtgtgtcctgggaccttgaaagcaattgtggactcaccatgtatatatgaagctgaacaaaaggcgggtgcttggtgcaaggaccctcttcaggctgcagataaaatttatttcatgccctggactccctatcgtaccgatactttaatagaatatgcttctttagaagatttccaaaatagtcgccaaacaacaacatataaacttccaaatcgagtagatggtactggatttgtggtgtatgatggtgctgtcttctttaacaaagaaagaacgaggaatattgtgaaatttgacttgaggactagaattaagagtggcgaggccataattaactatgccaactaccatgatacctcaccatacagatggggaggaaagactgatatcgacctagcagttgatgaaaatggtttatgggtcatttacgccactgaacagaacaatggaatgatagttattagccagctgaatccatacactcttcgatttgaagcaacgtgggagactgtatacgacaaacgtgccgcatcaaatgcttttatgatatgcggagtcctctatgtggttaggtcagtttatcaagacaatgaaagtgaaacaggcaagaactcaattgattacatttataatacccgattaaaccgaggagaatatgtagatgttcccttccccaaccagtatcagtatattgctgcagtggattacaatccaagagataaccaactttacgtgtggaacaataacttcattttacgatattctctggagtttggtccacctgatcctgcccaagtgcctaccacagctgtgacaataacttcttcagctgagctgttcaaaaccataatatcaaccacaagcactacttcacagaaaggccccatgagcacaactgtagctggatcacaggaaggaagcaaagggacaaaaccacctccagcagtttctacaaccaaaattccacctataacaaatatttttcccctgccagagagattctgtgaagcattagactccaaggggataaagtggcctcagacacaaaggggaatgatggttgaacgaccatgccctaagggaacaagaggaactgcctcatatctctgcatgatttccactggaacatggaaccctaagggccccgatcttagcaactgtacctcacactgggtgaatcagctggctcagaagatcagaagcggagaaaatgctgctagtcttgccaatgaactggctaaacataccaaagggccagtgtttgctggggatgtaagttcttcagtgagattgatggagcagttggtggacatccttgatgcacagctgcaggaactgaaacctagtgaaaaagattcagctggacggagttataacaaggcaattgttgacacagtggacaaccttctgagacccgaagctttggaatcatggaaacatatgaattcttctgaacaagcacatactgcaacaatgttactcgatacattggaagaaggagcttttgtcctagctgacaatcttttagaaccaacaagggtctcaatgcccacagaaaatattgtcctggaagttgccgtactcagtacagaaggacagatccaagactttaaatttcctctgggcatcaaaggagcaggcagctcaatccaactgtccgcaaataccgtcaaacagaacagcaggaatgggcttgcaaagttggtgttcatcatttaccggagcctgggacagttccttagtacagaaaatgcaaccattaaactgggtgctgattttattggtcgtaatagcaccattgcagtgaactctcacgtcatttcagtttcaatcaataaagagtccagccgagtatacctgactgatcctgtgctttttaccctgccacacattgatcctgacaattatttcaatgcaaactgctccttctggaactactcagagagaactatgatgggatattggtctacccagggctgcaagctggttgacactaataaaactcgaacaacgtgtgcatgcagccacctaaccaattttgcaattctcatggcccacagggaaattgcatataaagatggcgttcatgaattacttcttacagtcatcacctgggtgggaattgtcatttcccttgtttgcctggctatctgcatcttcaccttctgctttttccgtggcctacagagtgaccgaaatactattcacaagaacctttgtatcaaccttttcattgctgaatttattttcctaataggcattgataagacaaaatatgcgattgcatgcccaatatttgcaggacttctacactttttctttttggcagcttttgcttggatgtgcctagaaggtgtgcagctctacctaatgttagttgaagtttttgaaagtgaatattcaaggaaaaaatattactatgttgctggttacttgtttcctgccacagtggttggagtttcagctgctattgactataagagctatggaacagaaaaagcttgctggcttcatgttgataactactttatatggagcttcattggacctgttaccttcattattctgctaaatattatcttcttggtgatcacattgtgcaaaatggtgaagcattcaaacactttgaaaccagattctagcaggttggaaaacattaagtcttgggtgcttggcgctttcgctcttctgtgtcttcttggcctcacctggtcctttgggttgctttttattaatgaggagactattgtgatggcatatctcttcactatatttaatgctttccagggagtgttcattttcatctttcactgtgctctccaaaagaaagtacgaaaagaatatggcaagtgcttcagacactcatactgctgtggaggcctcccaactgagagtccccacagttcagtgaaggcatcaaccaccagaaccagtgctcgctattcctctggcacacagagtcgtataagaagaatgtggaatgatactgtgagaaaacaatcagaatcttcttttatctcaggtgacatcaatagcacttcaacacttaatcaaggactgacatcacatggtctgagagcccatcttcaagatttatatcatttagagctactcttaggccagatagcctgagcagacagacatgatgtgagttgtccaaagacattcactgaacaatgccagggatacaagtgccatggatactctaccgctaaatggtaattttaacaacagctactcgctgcacaagggtgactataatgacagcgtgcaagttgtggactgtggactaagtctgaatgatactgcttttgagaaaatgatcatttcagaattagtgcacaacaacttacggggcagcagcaagactcacaacctcgagctcacgctaccagtcaaacctgtgattggaggtagcagcagtgaagatgatgctattgtggcagatgcttcatctttaatgcacagcgacaacccagggctggagctccatcacaaagaactcgaggcaccacttattcctcagcggactcactcccttctgtaccaaccccagaagaaagtgaagtccgagggaactgacagctatgtctcccaactgacagcagaggctgaagatcacctacagtcccccaacagagactctctttatacaagcatgcccaatcttagagactctccctatccggagagcagccctgacatggaagaagacctctctccctccaggaggagtgagaatgaggacatttactataaaagcatgccaaatcttggagctggccatcagcttcagatgtgctaccagatcagcaggggcaatagtgatggttatataatccccattaacaaagaagggtgtattccagaaggagatgttagagaaggacaaatgcagctggttacaagtctttaatcatacagctaaggaattccaagggccacatgcgagtattaataaataaagacaccattggcctgacgcagctccctcaaactctgcttgaagagatgactcttgacctgtggttctctggtgtaaaaaagatgactgaaccttgcagttctgtgaatttttataaaacatacaaaaactttgtatatacacagagtatactaaagtgaattatttgttacaaagaaaagagatgccagccaggtattttaagattctgctgctgtttagagaaattgtgaaacaagcaaaacaaaactttccagccattttactgcagcagtctgtgaactaaatttgtaaatatggctgcaccatttttgtaggcctgcattgtattatatacaagacgtaggctttaaaatcctgtgggacaaatttactgtaccttactattcctgacaagacttggaaaagcaggagagatattctgcatcagtttgcagttcactgcaaatcttttacattaaggcaaagattgaaaacatgcttaaccactagcaatcaagccacaggccttatttcatatgtttcctcaactgtacaatgaactattctcatgaaaaatggctaaagaaattatattttgttctattgctagggtaaaataaatacatttgtgtccaactgaaatataattgtcattaaaataattttaaagagtgaagaaaatattgtgaaaagctcttggttgcacatgttatgaaatgttttttcttacactttgtcatggtaagttctactcattttcacttcttttccactgtatacagtgttctgctttgacaaagttggtctttattacttacatttaaatttcttattgccaaaagaacgtgttttatggggagaaacaaactctttgaagccagttatgtcatgccttgcacaaaagtgatgaaatctagaaaagattgtgtgtcacccctgtttattcttgaacagagggcaaagagggcactgggcacttctcacaaactttctagtgaacaaaaggtgcctattctttttt

SEQ ID NO: 105559 - DNA, 5873 bp, Homo sapiens
  Payload ID: 696
  Gene Symbol: ADGRL2
  Gene Name: adhesion G protein-coupled receptor L2
  Uniprot ID: O95490
  ENST ID: ENST00000370717
  CDS Start-End: 217-4596
cggcgaacagacgttctttctcctccatgcagttacacaaaaggagggctacggaaactaaaagtttcggggcctctggctcggtgcgtggagaaaagagaaaacctggagacgggatatgaagatcaatgatgcagactgatggttttgatgaagctgggcatttataactagattcattaaggaatacaaagaaaatacttaaagggatcaataatggtgtcttctggttgcagaatgcgaagtctgtggtttatcattgtaatcagcttcttaccaaatacagaaggtttcagcagagcagctttaccatttgggctggtgaggcgagaattatcctgtgaaggttattctatagatctgcgatgcccgggcagtgatgtcatcatgattgagagcgctaactatggtcggacggatgacaagatttgtgatgctgacccatttcagatggagaatacagactgctacctccccgatgccttcaaaattatgactcaaaggtgcaacaatcgaacacagtgtatagtagttactgggtcagatgtgtttcctgatccatgtcctggaacatacaaataccttgaagtccaatatgaatgtgtcccttacatttttgtgtgtcctgggaccttgaaagcaattgtggactcaccatgtatatatgaagctgaacaaaaggcgggtgcttggtgcaaggaccctcttcaggctgcagataaaatttatttcatgccctggactccctatcgtaccgatactttaatagaatatgcttctttagaagatttccaaaatagtcgccaaacaacaacatataaacttccaaatcgagtagatggtactggatttgtggtgtatgatggtgctgtcttctttaacaaagaaagaacgaggaatattgtgaaatttgacttgaggactagaattaagagtggcgaggccataattaactatgccaactaccatgatacctcaccatacagatggggaggaaagactgatatcgacctagcagttgatgaaaatggtttatgggtcatttacgccactgaacagaacaatggaatgatagttattagccagctgaatccatacactcttcgatttgaagcaacgtgggagactgtatacgacaaacgtgccgcatcaaatgcttttatgatatgcggagtcctctatgtggttaggtcagtttatcaagacaatgaaagtgaaacaggcaagaactcaattgattacatttataatacccgattaaaccgaggagaatatgtagatgttcccttccccaaccagtatcagtatattgctgcagtggattacaatccaagagataaccaactttacgtgtggaacaataacttcattttacgatattctctggagtttggtccacctgatcctgcccaagtgcctaccacagctgtgacaataacttcttcagctgagctgttcaaaaccataatatcaaccacaagcactacttcacagaaaggccccatgagcacaactgtagctggatcacaggaaggaagcaaagggacaaaaccacctccagcagtttctacaaccaaaattccacctataacaaatatttttcccctgccagagagattctgtgaagcattagactccaaggggataaagtggcctcagacacaaaggggaatgatggttgaacgaccatgccctaagggaacaagaggaactgcctcatatctctgcatgatttccactggaacatggaaccctaagggccccgatcttagcaactgtacctcacactgggtgaatcagctggctcagaagatcagaagcggagaaaatgctgctagtcttgccaatgaactggctaaacataccaaagggccagtgtttgctggggatgtaagttcttcagtgagattgatggagcagttggtggacatccttgatgcacagctgcaggaactgaaacctagtgaaaaagattcagctggacggagttataacaagctccaaaaacgagagaagacatgcagggcttaccttaaggcaattgttgacacagtggacaaccttctgagacccgaagctttggaatcatggaaacatatgaattcttctgaacaagcacatactgcaacaatgttactcgatacattggaagaaggagcttttgtcctagctgacaatcttttagaaccaacaagggtctcaatgcccacagaaaatattgtcctggaagttgccgtactcagtacagaaggacagatccaagactttaaatttcctctgggcatcaaaggagcaggcagctcaatccaactgtccgcaaataccgtcaaacagaacagcaggaatgggcttgcaaagttggtgttcatcatttaccggagcctgggacagttccttagtacagaaaatgcaaccattaaactgggtgctgattttattggtcgtaatagcaccattgcagtgaactctcacgtcatttcagtttcaatcaataaagagtccagccgagtatacctgactgatcctgtgctttttaccctgccacacattgatcctgacaattatttcaatgcaaactgctccttctggaactactcagagagaactatgatgggatattggtctacccagggctgcaagctggttgacactaataaaactcgaacaacgtgtgcatgcagccacctaaccaattttgcaattctcatggcccacagggaaattgcatataaagatggcgttcatgaattacttcttacagtcatcacctgggtgggaattgtcatttcccttgtttgcctggctatctgcatcttcaccttctgctttttccgtggcctacagagtgaccgaaatactattcacaagaacctttgtatcaaccttttcattgctgaatttattttcctaataggcattgataagacaaaatatgcgattgcatgcccaatatttgcaggacttctacactttttctttttggcagcttttgcttggatgtgcctagaaggtgtgcagctctacctaatgttagttgaagtttttgaaagtgaatattcaaggaaaaaatattactatgttgctggttacttgtttcctgccacagtggttggagtttcagctgctattgactataagagctatggaacagaaaaagcttgctggcttcatgttgataactactttatatggagcttcattggacctgttaccttcattattctgctaaatattatcttcttggtgatcacattgtgcaaaatggtgaagcattcaaacactttgaaaccagattctagcaggttggaaaacattaagtcttgggtgcttggcgctttcgctcttctgtgtcttcttggcctcacctggtcctttgggttgctttttattaatgaggagactattgtgatggcatatctcttcactatatttaatgctttccagggagtgttcattttcatctttcactgtgctctccaaaagaaagtacgaaaagaatatggcaagtgcttcagacactcatactgctgtggaggcctcccaactgagagtccccacagttcagtgaaggcatcaaccaccagaaccagtgctcgctattcctctggcacacagagtcgtataagaagaatgtggaatgatactgtgagaaaacaatcagaatcttcttttatctcaggtgacatcaatagcacttcaacacttaatcaaggaatgactggcaattacctactaacaaaccctcttcttcgaccccacggcactaacaacccctataacacattgctcgctgaaacagttgtatgtaatgccccttcagctcctgtatttaactcaccaggacattcactgaacaatgccagggatacaagtgccatggatactctaccgctaaatggtaattttaacaacagctactcgctgcacaagggtgactataatgacagcgtgcaagttgtggactgtggactaagtctgaatgatactgcttttgagaaaatgatcatttcagaattagtgcacaacaacttacggggcagcagcaagactcacaacctcgagctcacgctaccagtcaaacctgtgattggaggtagcagcagtgaagatgatgctattgtggcagatgcttcatctttaatgcacagcgacaacccagggctggagctccatcacaaagaactcgaggcaccacttattcctcagcggactcactcccttctgtaccaaccccagaagaaagtgaagtccgagggaactgacagctatgtctcccaactgacagcagaggctgaagatcacctacagtcccccaacagagactctctttatacaagcatgcccaatcttagagactctccctatccggagagcagccctgacatggaagaagacctctctccctccaggaggagtgagaatgaggacatttactataaaagcatgccaaatcttggagctggccatcagcttcagatgtgctaccagatcagcaggggcaatagtgatggttatataatccccattaacaaagaagggtgtattccagaaggagatgttagagaaggacaaatgcagctggttacaagtctttaatcatacagctaaggaattccaagggccacatgcgagtattaataaataaagacaccattggcctgacgcagctccctcaaactctgcttgaagagatgactcttgacctgtggttctctggtgtaaaaaagatgactgaaccttgcagttctgtgaatttttataaaacatacaaaaactttgtatatacacagagtatactaaagtgaattatttgttacaaagaaaagagatgccagccaggtattttaagattctgctgctgtttagagaaattgtgaaacaagcaaaacaaaactttccagccattttactgcagcagtctgtgaactaaatttgtaaatatggctgcaccatttttgtaggcctgcattgtattatatacaagacgtaggctttaaaatcctgtgggacaaatttactgtaccttactattcctgacaagacttggaaaagcaggagagatattctgcatcagtttgcagttcactgcaaatcttttacattaaggcaaagattgaaaacatgcttaaccactagcaatcaagccacaggccttatttcatatgtttcctcaactgtacaatgaactattctcatgaaaaatggctaaagaaattatattttgttctattgctagggtaaaataaatacatttgtgtccaactgaaatataattgtcattaaaataattttaaagagtgaagaaaatattgtgaaaagctcttggttgcacatgttatgaaatgttttttcttacactttgtcatggtaagttctactcattttcacttcttttccactgtatacagtgttctgctttgacaaagttggtctttattacttacatttaaatttcttattgccaaaagaacgtgttttatggggagaaacaaactctttgaagccagttatgtcatgccttgcacaaaagtgatgaaatctagaaaagattgtgtgtcacccctgtttattcttgaacagagggcaaagagggcactgggcacttctcacaaactttctagtgaacaaaaggtgcctattcttttttaaaaaaataaaataaaacataaatattactcttccatattccttctgcctatatttagtaattaatttattttatgataaagttctaatgaaatgtaaattgtttcagcaaaattctgcttttttttcatccctttgtgtaaacctgttaataatgagcccatcactaatatccagtgtaaagtttaacacggtttgacagtaaataaatgtgaattttttcaagt

SEQ ID NO: 105560 - DNA, 5023 bp, Homo sapiens
  Payload ID: 696
  Gene Symbol: ADGRL2
  Gene Name: adhesion G protein-coupled receptor L2
  ENST ID: ENST00000370721
  CDS Start-End: 646-4800
ctctttctctctccctctcttgcgctgtccctcattcatgcactcttccatctttttgccattgtgccagctcaatttaaatgtatctgctctgtatctgttcaagtggagataatccatgcaaatcaggagccgtggctctcaatgcctggttcacagagaggactcagcttgaggaggtcactcgttcacagccgctcctcccattatatttttccccttattgcagaactgctgtatgtatacagtgactgaaaggactcaatttactgcaactgctgcctggctttacttacaacttttttttttttataaaggaacttacctccatctgtcttttcaagctctaaacttcacaaatggttctgaagagtatggagcctacgtagattcataagagcccaatgtttccaaaggacattaattttgatttctccaatgaaggcttgtggctgtccttatgctttacaaaacattaccaaatcagagccgaaaagaaaactggtatttatggcacaatgaaaaatttcatctttcccagaatgatatgaagatcaatgatgcagactgatggttttgatgaagctgggcatttataactagattcattaaggaatacaaagaaaatacttaaagggatcaataatggtgtcttctggttgcagaatgcgaagtctgtggtttatcattgtaatcagcttcttaccaaatacagaaggtttcagcagagcagctttaccatttgggctggtgaggcgagaattatcctgtgaaggttattctatagatctgcgatgcccgggcagtgatgtcatcatgattgagagcgctaactatggtcggacggatgacaagatttgtgatgctgacccatttcagatggagaatacagactgctacctccccgatgccttcaaaattatgactcaaaggtgcaacaatcgaacacagtgtatagtagttactgggtcagatgtgtttcctgatccatgtcctggaacatacaaataccttgaagtccaatatgaatgtgtcccttacatggagcaaaaagtttttgtgtgtcctgggaccttgaaagcaattgtggactcaccatgtatatatgaagctgaacaaaaggcgggtgcttggtgcaaggaccctcttcaggctgcagataaaatttatttcatgccctggactccctatcgtaccgatactttaatagaatatgcttctttagaagatttccaaaatagtcgccaaacaacaacatataaacttccaaatcgagtagatggtactggatttgtggtgtatgatggtgctgtcttctttaacaaagaaagaacgaggaatattgtgaaatttgacttgaggactagaattaagagtggcgaggccataattaactatgccaactaccatgatacctcaccatacagatggggaggaaagactgatatcgacctagcagttgatgaaaatggtttatgggtcatttacgccactgaacagaacaatggaatgatagttattagccagctgaatccatacactcttcgatttgaagcaacgtgggagactgtatacgacaaacgtgccgcatcaaatgcttttatgatatgcggagtcctctatgtggttaggtcagtttatcaagacaatgaaagtgaaacaggcaagaactcaattgattacatttataatacccgattaaaccgaggagaatatgtagatgttcccttccccaaccagtatcagtatattgctgcagtggattacaatccaagagataaccaactttacgtgtggaacaataacttcattttacgatattctctggagtttggtccacctgatcctgcccaagagagattctgtgaagcattagactccaaggggataaagtggcctcagacacaaaggggaatgatggttgaacgaccatgccctaagggaacaagaggaactgcctcatatctctgcatgatttccactggaacatggaaccctaagggccccgatcttagcaactgtacctcacactgggtgaatcagctggctcagaagatcagaagcggagaaaatgctgctagtcttgccaatgaactggctaaacataccaaagggccagtgtttgctggggatgtaagttcttcagtgagattgatggagcagttggtggacatccttgatgcacagctgcaggaactgaaacctagtgaaaaagattcagctggacggagttataacaaggcaattgttgacacagtggacaaccttctgagacccgaagctttggaatcatggaaacatatgaattcttctgaacaagcacatactgcaacaatgttactcgatacattggaagaaggagcttttgtcctagctgacaatcttttagaaccaacaagggtctcaatgcccacagaaaatattgtcctggaagttgccgtactcagtacagaaggacagatccaagactttaaatttcctctgggcatcaaaggagcaggcagctcaatccaactgtccgcaaataccgtcaaacagaacagcaggaatgggcttgcaaagttggtgttcatcatttaccggagcctgggacagttccttagtacagaaaatgcaaccattaaactgggtgctgattttattggtcgtaatagcaccattgcagtgaactctcacgtcatttcagtttcaatcaataaagagtccagccgagtatacctgactgatcctgtgctttttaccctgccacacattgatcctgacaattatttcaatgcaaactgctccttctggaactactcagagagaactatgatgggatattggtctacccagggctgcaagctggttgacactaataaaactcgaacaacgtgtgcatgcagccacctaaccaattttgcaattctcatggcccacagggaaattgcatataaagatggcgttcatgaattacttcttacagtcatcacctgggtgggaattgtcatttcccttgtttgcctggctatctgcatcttcaccttctgctttttccgtggcctacagagtgaccgaaatactattcacaagaacctttgtatcaaccttttcattgctgaatttattttcctaataggcattgataagacaaaatatgcgattgcatgcccaatatttgcaggacttctacactttttctttttggcagcttttgcttggatgtgcctagaaggtgtgcagctctacctaatgttagttgaagtttttgaaagtgaatattcaaggaaaaaatattactatgttgctggttacttgtttcctgccacagtggttggagtttcagctgctattgactataagagctatggaacagaaaaagcttgctggcttcatgttgataactactttatatggagcttcattggacctgttaccttcattattctgctaaatattatcttcttggtgatcacattgtgcaaaatggtgaagcattcaaacactttgaaaccagattctagcaggttggaaaacattaagtcttgggtgcttggcgctttcgctcttctgtgtcttcttggcctcacctggtcctttgggttgctttttattaatgaggagactattgtgatggcatatctcttcactatatttaatgctttccagggagtgttcattttcatctttcactgtgctctccaaaagaaagtacgaaaagaatatggcaagtgcttcagacactcatactgctgtggaggcctcccaactgagagtccccacagttcagtgaaggcatcaaccaccagaaccagtgctcgctattcctctggcacacagagtcgtataagaagaatgtggaatgatactgtgagaaaacaatcagaatcttcttttatctcaggtgacatcaatagcacttcaacacttaatcaaggaatgactggcaattacctactaacaaaccctcttcttcgaccccacggcactaacaacccctataacacattgctcgctgaaacagttgtatgtaatgccccttcagctcctgtatttaactcaccaggacattcactgaacaatgccagggatacaagtgccatggatactctaccgctaaatggtaattttaacaacagctactcgctgcacaagggtgactataatgacagcgtgcaagttgtggactgtggactaagtctgaatgatactgcttttgagaaaatgatcatttcagaattagtgcacaacaacttacggggcagcagcaagactcacaacctcgagctcacgctaccagtcaaacctgtgattggaggtagcagcagtgaagatgatgctattgtggcagatgcttcatctttaatgcacagcgacaacccagggctggagctccatcacaaagaactcgaggcaccacttattcctcagcggactcactcccttctgtaccaaccccagaagaaagtgaagtccgagggaactgacagctatgtctcccaactgacagcagaggctgaagatcacctacagtcccccaacagagactctctttatacaagcatgcccaatcttagagactctccctatccggagagcagccctgacatggaagaagacctctctccctccaggaggagtgagaatgaggacatttactataaaagcatgccaaatcttggagctggccatcagcttcagatgtgctaccagatcagcaggggcaatagtgatggttatataatccccattaacaaagaagggtgtattccagaaggagatgttagagaaggacaaatgcagctggttacaagtctttaatcatacagctaaggaattccaagggccacatgcgagtattaataaataaagacaccattggcctgacgcagctccctcaaactctgcttgaagagatgactcttgacctgtggttctctggtgtaaaaaagatgactgaaccttgcagttctgtgaatttttataaaacatacaaaaactttgtatatacacagagtatactaaagtgaattatttgttacaa

SEQ ID NO: 105561 - DNA, 5254 bp, Homo sapiens
  Payload ID: 696
  Gene Symbol: ADGRL2
  Gene Name: adhesion G protein-coupled receptor L2
  Uniprot ID: O95490
  ENST ID: ENST00000370723
  CDS Start-End: 646-5031
ctctttctctctccctctcttgcgctgtccctcattcatgcactcttccatctttttgccattgtgccagctcaatttaaatgtatctgctctgtatctgttcaagtggagataatccatgcaaatcaggagccgtggctctcaatgcctggttcacagagaggactcagcttgaggaggtcactcgttcacagccgctcctcccattatatttttccccttattgcagaactgctgtatgtatacagtgactgaaaggactcaatttactgcaactgctgcctggctttacttacaacttttttttttttataaaggaacttacctccatctgtcttttcaagctctaaacttcacaaatggttctgaagagtatggagcctacgtagattcataagagcccaatgtttccaaaggacattaattttgatttctccaatgaaggcttgtggctgtccttatgctttacaaaacattaccaaatcagagccgaaaagaaaactggtatttatggcacaatgaaaaatttcatctttcccagaatgatatgaagatcaatgatgcagactgatggttttgatgaagctgggcatttataactagattcattaaggaatacaaagaaaatacttaaagggatcaataatggtgtcttctggttgcagaatgcgaagtctgtggtttatcattgtaatcagcttcttaccaaatacagaaggtttcagcagagcagctttaccatttgggctggtgaggcgagaattatcctgtgaaggttattctatagatctgcgatgcccgggcagtgatgtcatcatgattgagagcgctaactatggtcggacggatgacaagatttgtgatgctgacccatttcagatggagaatacagactgctacctccccgatgccttcaaaattatgactcaaaggtgcaacaatcgaacacagtgtatagtagttactgggtcagatgtgtttcctgatccatgtcctggaacatacaaataccttgaagtccaatatgaatgtgtcccttacatttttgtgtgtcctgggaccttgaaagcaattgtggactcaccatgtatatatgaagctgaacaaaaggcgggtgcttggtgcaaggaccctcttcaggctgcagataaaatttatttcatgccctggactccctatcgtaccgatactttaatagaatatgcttctttagaagatttccaaaatagtcgccaaacaacaacatataaacttccaaatcgagtagatggtactggatttgtggtgtatgatggtgctgtcttctttaacaaagaaagaacgaggaatattgtgaaatttgacttgaggactagaattaagagtggcgaggccataattaactatgccaactaccatgatacctcaccatacagatggggaggaaagactgatatcgacctagcagttgatgaaaatggtttatgggtcatttacgccactgaacagaacaatggaatgatagttattagccagctgaatccatacactcttcgatttgaagcaacgtgggagactgtatacgacaaacgtgccgcatcaaatgcttttatgatatgcggagtcctctatgtggttaggtcagtttatcaagacaatgaaagtgaaacaggcaagaactcaattgattacatttataatacccgattaaaccgaggagaatatgtagatgttcccttccccaaccagtatcagtatattgctgcagtggattacaatccaagagataaccaactttacgtgtggaacaataacttcattttacgatattctctggagtttggtccacctgatcctgcccaagtgcctaccacagctgtgacaataacttcttcagctgagctgttcaaaaccataatatcaaccacaagcactacttcacagaaaggccccatgagcacaactgtagctggatcacaggaaggaagcaaagggacaaaaccacctccagcagtttctacaaccaaaattccacctataacaaatatttttcccctgccagagagattctgtgaagcattagactccaaggggataaagtggcctcagacacaaaggggaatgatggttgaacgaccatgccctaagggaacaagaggaactgcctcatatctctgcatgatttccactggaacatggaaccctaagggccccgatcttagcaactgtacctcacactgggtgaatcagctggctcagaagatcagaagcggagaaaatgctgctagtcttgccaatgaactggctaaacataccaaagggccagtgtttgctggggatgtaagttcttcagtgagattgatggagcagttggtggacatccttgatgcacagctgcaggaactgaaacctagtgaaaaagattcagctggacggagttataacaaggcaattgttgacacagtggacaaccttctgagacccgaagctttggaatcatggaaacatatgaattcttctgaacaagcacatactgcaacaatgttactcgatacattggaagaaggagcttttgtcctagctgacaatcttttagaaccaacaagggtctcaatgcccacagaaaatattgtcctggaagttgccgtactcagtacagaaggacagatccaagactttaaatttcctctgggcatcaaaggagcaggcagctcaatccaactgtccgcaaataccgtcaaacagaacagcaggaatgggcttgcaaagttggtgttcatcatttaccggagcctgggacagttccttagtacagaaaatgcaaccattaaactgggtgctgattttattggtcgtaatagcaccattgcagtgaactctcacgtcatttcagtttcaatcaataaagagtccagccgagtatacctgactgatcctgtgctttttaccctgccacacattgatcctgacaattatttcaatgcaaactgctccttctggaactactcagagagaactatgatgggatattggtctacccagggctgcaagctggttgacactaataaaactcgaacaacgtgtgcatgcagccacctaaccaattttgcaattctcatggcccacagggaaattgcatataaagatggcgttcatgaattacttcttacagtcatcacctgggtgggaattgtcatttcccttgtttgcctggctatctgcatcttcaccttctgctttttccgtggcctacagagtgaccgaaatactattcacaagaacctttgtatcaaccttttcattgctgaatttattttcctaataggcattgataagacaaaatatgcgattgcatgcccaatatttgcaggacttctacactttttctttttggcagcttttgcttggatgtgcctagaaggtgtgcagctctacctaatgttagttgaagtttttgaaagtgaatattcaaggaaaaaatattactatgttgctggttacttgtttcctgccacagtggttggagtttcagctgctattgactataagagctatggaacagaaaaagcttgctggcttcatgttgataactactttatatggagcttcattggacctgttaccttcattattctgctaaatattatcttcttggtgatcacattgtgcaaaatggtgaagcattcaaacactttgaaaccagattctagcaggttggaaaacattaataattaccgtgtttgtgatggctactataatacggacttacctgggtcttgggtgcttggcgctttcgctcttctgtgtcttcttggcctcacctggtcctttgggttgctttttattaatgaggagactattgtgatggcatatctcttcactatatttaatgctttccagggagtgttcattttcatctttcactgtgctctccaaaagaaagtacgaaaagaatatggcaagtgcttcagacactcatactgctgtggaggcctcccaactgagagtccccacagttcagtgaaggcatcaaccaccagaaccagtgctcgctattcctctggcacacagagtcgtataagaagaatgtggaatgatactgtgagaaaacaatcagaatcttcttttatctcaggtgacatcaatagcacttcaacacttaatcaaggaatgactggcaattacctactaacaaaccctcttcttcgaccccacggcactaacaacccctataacacattgctcgctgaaacagttgtatgtaatgccccttcagctcctgtatttaactcaccaggacattcactgaacaatgccagggatacaagtgccatggatactctaccgctaaatggtaattttaacaacagctactcgctgcacaagggtgactataatgacagcgtgcaagttgtggactgtggactaagtctgaatgatactgcttttgagaaaatgatcatttcagaattagtgcacaacaacttacggggcagcagcaagactcacaacctcgagctcacgctaccagtcaaacctgtgattggaggtagcagcagtgaagatgatgctattgtggcagatgcttcatctttaatgcacagcgacaacccagggctggagctccatcacaaagaactcgaggcaccacttattcctcagcggactcactcccttctgtaccaaccccagaagaaagtgaagtccgagggaactgacagctatgtctcccaactgacagcagaggctgaagatcacctacagtcccccaacagagactctctttatacaagcatgcccaatcttagagactctccctatccggagagcagccctgacatggaagaagacctctctccctccaggaggagtgagaatgaggacatttactataaaagcatgccaaatcttggagctggccatcagcttcagatgtgctaccagatcagcaggggcaatagtgatggttatataatccccattaacaaagaagggtgtattccagaaggagatgttagagaaggacaaatgcagctggttacaagtctttaatcatacagctaaggaattccaagggccacatgcgagtattaataaataaagacaccattggcctgacgcagctccctcaaactctgcttgaagagatgactcttgacctgtggttctctggtgtaaaaaagatgactgaaccttgcagttctgtgaatttttataaaacatacaaaaactttgtatatacacagagtatactaaagtgaattatttgttacaa
